United States Patent Application Publication US 2015/0052636 A1 - sequence listing, part 15

SEQ ID NO: 50738 - DNA, 407 bp, Ricinus communis
  Intron number 2 from transcript 30027.m000809 (locus 30027 .t000002) derived from phytozome v7.0 (chr-ID 30027; pos 1 6639 to 17045 reverse strand)
atcaaatttctgaacacgacgtaagtatttataaataattaatataagctgctcagagtcctctgaagttttcaagtatcacatcaatatcataggtttccccttttcttttcttcattttaccctatatttttcacactgcgatgacaactgcttcaatttcctccaagcccggttcatatcatatcatctcttggtatggtagttgatttagtgatttgatttggtgtattacttgttcacacacacacatgtccgcggagtgttctcatgtggactttgaacattgctagtggtcagtgacctgggacttgttttgtaaattatattgatttatagtgatgaattgataaataaataaaaagtaataaacatagttttatctgtgcaacagggtgaggtgttat

SEQ ID NO: 50739 - DNA, 512 bp, Ricinus communis
  Intron number 1 from transcript 30131.m006945 (locus 30131 .t000096) derived from phytozome v7.0 (chr-ID 30131; pos 5 56294 to 556805 reverse strand)
ctttatcgatatagtttgtaagttttcttgcttattggttatcgaatttcaacgttagcttcctttttgatatcaaagcttatcgctttgccactccttctatgcctttgttggttctcaattgattaaaagtgggggctttaactagggaggaggaagatgaaaaaatgttctgcttgtacatattcttgtttgttagttatgatagtagcgtgttaacttcttgttcatgtcaaagtttaaagctttagctttccttctcaagcacatccatttgactgtatgtacgtcttctttgaatatttagctatggaggaggaggaaggaaaatcatcaatgcattttctagtaaaaaaaacgggaaggttattgattggacaatcacaggaattctaaaaaaaaaaaaaaattattgttttgcgtctttatataatgctgcaaccctacaaaattcttgtgataattttgaaatatggttcattatttcataattcattgttgttccaggccaa

SEQ ID NO: 50740 - DNA, 609 bp, Ricinus communis
  Intron number 2 from transcript 30115.m001234 (locus 30115 .t000060) derived from phytozome v7.0 (chr-ID 30115; pos 3 98461 to 399069 reverse strand)
tttcatttctacgccaaactttgccttcttgcgaggtaaaaagaaaaattgaaattactgtaaattcatcttactataattgttattattttcatacatattttttatctctagaatgattatgtgtcacttttggctggacttctgaaattaatgatgcaatgttttagaaacagaaaatagaaaaagcagctgttattactgttttcatcagtttgatttggtagctgcattttttcttaaaaatctgaaattcttaggttaagtatgccaagactggtgtatcttctatattttcttaacatatacttgtatctcaattattactatttatttagttattattgggacaaatattgatactctctacctgatcatttgtacttatgtacttacattttgtatcagttgatgtgttatagtttgcattgcggatttggtcttagttaaggtttttcatatgctttacaataatctgaattgcagtaatttagaaaaaaaatttttagttgccagtttttgttttctctttagtgatggtcctgaactgtttgttgtgatattgcactgtatatggttatctgagcagtgtttactgctgattatagg

SEQ ID NO: 50741 - DNA, 765 bp, Ricinus communis
  Intron number 2 from transcript 30128.m008714 (locus 30128 .t000175) derived from phytozome v7.0 (chr-ID 30128; pos 2 696604 to 2697368 reverse strand)
cttggggtggtttaaaagactggactgaaatcgaggttccttttcccaaattcattccaaatttccaatctgcctttcttatttgcccattatcatatcatttcttgggatcataattatatcagtaatgaccaacttacacgcacaacttaattaatttttacatcttctatctgcaactaggatatgaaacccaataatgcaaataatacataacaccccatgtctatattggaaggtagcctcttcgtttaatggacaatggactccatactaccttacgctgtttctctgataaatcctttaccagtttttgatagtaattgtgtttccctttgtgattgaagtagtttcttttttcctattaatttctcgcatatcagaagttgaactatgaagcaccacatcatattgattcattaataacacgcacattactccaccaagtgttcttccagattgcttaaatacaggacccctttgaggtctttcgtatctgtatctcaaatccaaattcatgatgcaacttgaacttcctttaagttacgagggtcagtctgatagctctgaattcatggtaatgttactaatgtatgttgaaccaaatgtcctgagtttcaattcccaatagcgcttcgccctgtaagtgtattttggtaacttgggctgcatggaagtacttccctattaatcaattctctcagctaggtaaatcactttgctctacatatctctatattaatattttaaatcatctcagggagc

SEQ ID NO: 50742 - DNA, 847 bp, Ricinus communis
  Intron number 1 from transcript 30128.m008850 (locus 30128 .t000311) derived from phytozome v7.0 (chr-ID 30128; pos 1 333572 to 1334418 reverse strand)
tggtcagcactcttttttcttcccctgtctatagtgaatctaatttcatgatgtttggatgatgttattgtgcaatattttgattttgtatgtgcttttacttttgatattttgtttgggtgatgaggaacatgtgaggcattgcctttgttttagacaatttgtgttgatggttgtgcatttgatggactactattgcttggtatgattggccattttgagatgtttgcaattgcattttaattgtggaagggattgtagcttgatggtaattgaggactgaaatggttgatttactgataaagtatgctctttgatgatatgggtaagctcggtgcttaattgcttattcccattgtatatctctctatctttttcattttgatttggctgtgtagtagccatttgtataatcatcagcttatgcgcaagtttatctatttgagtcttcattatcaaatcaaaattcaattgctttctcgggtactcttgggtcagattgatatttgcatctattgccttggtatagttggagtccttttgtaggcacagccataaagacccaaaatgcgaaatagcaacatacttagtttggcactattaagtctgatggtcatatatcgaaaataatgtctatttaaggcgcttgtcaataaatcttttgtttaatagaataatttatatcattcctttcttatttttaaggacatttttacttctttggatccaactgggagaaacaacattttaaatgaaccaattaaagggaacaaataaattatttatctcctttagtctccctttgtgcctcttgtctaatattgctggctcgttacaggtgatattc

SEQ ID NO: 50743 - DNA, 394 bp, Ricinus communis
  Intron number 2 from transcript 29908.m006065 (locus 29908 .t000116) derived from phytozome v7.0 (chr-ID 29908; pos 1 427025 to 1427418 reverse strand)
accagaagctgtaagtacttgtttccttgcgttgttgttgtgttagtttcattctccgtttagctttttgttttagacgctcatacaatgccttggatttaatttttgtaggtaaagtagttagatatttttcctaggttgtttgatattatgaagtgtcagcttaagattttattcacttttattcttgaatacattttgtcataattgctgtgtaataagatctgtagcagcagctctttcgacctaaatttttatcattactttgtaactgttacatgtatgttcattttttgatactagttttcctttatcaattttacattcttctcttattaattgttctttaatttttttagtcgggcattttttgacaagaggatctcacaagagg

SEQ ID NO: 50744 - DNA, 962 bp, Ricinus communis
  Intron number 1 from transcript 29983.m003199 (locus 29983 .t000098) derived from phytozome v7.0 (chr-ID 29983; pos 5 73185 to 574146 reverse strand)
gtggtaaacttcaggtaatttagttataagagttctgtttggttaatgggaaaatgaaaagaaagtgacttgaatgtatgcttgattagcattagaagttcttttgcacttaaatgtattgaggtgtaaagtgtagaagctaaatttggagtaaaattagtttacctttcctcgataagaaaataaaaatgtattaggaaatatgattttctcttctttttttttgacctttttctcattagttgtacggaaattagatggtagagattgatgtttccctaggaagttgtattcttttagattataaacgtttacaagttcagttctttttgttttttaagaatcttggagaaatactgtgggtgtattgaaatgtctttcttttgcctccatattctcgttaattgaccttctcaagaggcaaatgcgaaggtactaaatcagtagtcttaatttatttatggacgtgccaaatggtctaaatcatcgtaaaaaagaaactatgaaatggacgaaaataaagttgaatatagcactctaatttttggccaaagggaattctagttcatctataaggaataaatggatccacagaaaagatccaagtacctcaaatcagattagatttatttgatacactgttgtcaatattaattgaataaattgaggaaaaaaaatacacaattccaaaaacaaaagaacgacgttctgaatgctttaatgggcgaacagcccaacccttggaacatactacagccccaggtggcgaagagccaacatcgaggtgccaaaccttcctgtcgatgtgagctcttggggaaagatcagcctggcataacatctacgattggattcaaaaaggcgcaggcttcaagcaattttgtataacagaattcctttaacagaaatttactcactgcttctctctgtcttctgtttgtatcagggggaatttaaacttc

SEQ ID NO: 50745 - DNA, 882 bp, Ricinus communis
  Intron number 1 from transcript 30115.m001255 (locus 30115 .t000081) derived from phytozome v7.0 (chr-ID 30115; pos 5 30653 to 531534 reverse strand)
aggtaaaaaattttagcaatgagaagattatgttggtgtagttggctttgtattttgtgtagttgtttttgttgtatgttatattgcaatccattagacttttccaacttcaaaatgcaaaatactgttatatggattctgtgtttcaacataagatgtgaagtgaagttcaatgcttcaagtaaagcatgtttgtaggagaggcctttttcgatagaaaactcttgtcttttgtaggtcagatagaatttaattagacaaggaaaatctctattcgaatgaaaaaacccaacaaaatggcttcttttcccagataaatgatggacttttcagaatcagctattgagtagtggctccgtgaggcttaatcttattcttgatagagttcttttgattggagatttaaaaaattgtgacaaccctcatcatcactaatgaatcatagatgctttcctgttgtccaaccgatgaagaagatgcctcctagcataggctatagcctgtaagtcttgtctaaaatacgttatgtttttgtatatgcttgaattttaaaaatcttcatcatggtaatttactaacatctatctcttaccctattgtggtactaagatcagttcaaaaatatgtgtattaacatagaagttcatctgctgttaataattcaactaagagaaactaacacaaactgatttttctaatttgtaattcccaatatttagctgtcttagttccaagtgatgcaattttttcttttgggagaggtttagtggtatgcagattatagaagaatttaacacacaatgtgttcatactatatatttaattcattaccattttctttttccagattcacacacttttgactgataaggtaaaattgga

SEQ ID NO: 50746 - DNA, 977 bp, Ricinus communis
  Intron number 3 from transcript 30055.m001573 (locus 30055 .t000043) derived from phytozome v7.0 (chr-ID 30055; pos 2 69846 to 270822 reverse strand)
ttatcactccttctatcttgtctgatagattgagggtaatactctcaccttatctctctgtttttatcttttctttctgctctccaatttatctatttgttgccattcatttgatcacttgtaaggtaaaaaaactatggaatttatcaagtgatcgttgcgggcaagttattagttaataagttggagggcatcaagtactcttacactacatcagtacaattctcgttcccgctctttttatctcctcttcaatttggtgagaattggaggaaaattgtcctgatttttttctctctacattattgtcatcttcttaaacaagaaaaactgatccttgatccctaatattttcctcctttattttattttactcttttcttttataaacatctagttgagctgcatattgtactttatatttgagagggaaaatcagagaggaaagaagatagatttggaaaaattaggccaaaaggttattttatcatgtttgggaaaatagagaaggagaatgatcacaagttttctctccttatttggagagaaaatagaatgaggaggatggaaagtgtactagtagtgaaaaaagtcatttacatgccttcatatgttttttatttcaattatcttgtgaaaagtaaaaagggaagcaattttcttggctaataataattctatttaaacttcagctatccttagctacagttgatagatggattgaattgtgttagcaaggctcaagttaaaactaatattattatgttacactgagaaacactacttttttggtagctatatctgcgaaataggagcatagccctgctgcatgcacatatttacatggatatgtcctggttttgtttctactatggaactgtttttgatctgttgatatcgcagtaagaaaccgatattattttggcaacttgataccaaattttaatcctggagttgtttctgttttcgacagatca

SEQ ID NO: 50747 - DNA, 989 bp, Ricinus communis
  Intron number 2 from transcript 30089.m000997 (locus 30089 .t000011) derived from phytozome v7.0 (chr-ID 30089; pos 5 34055 to 535043 reverse strand)
tttcaaattccagaagtgcattctcttgaacaaaggtaaattcatcaattcacttatttttgcataattgcaaattcacatgtacattatggttaaaaaattaacattttaattattaaaaagaattatatgaatgatgatctcattatattaatacaggcttgttagacttgctaaaaagaatatatgactccaaaatgagattcgtccaattcgtgatattgaaatggaaaagaatagacaagagtccattctagagttgttgactttggatattcataatgacaagatatactttatttgagttaatatgtaaatggcggttgttaatttattaccatgttttttcaaaagacataaaatttacatgcaaagcaacgactaatgatattgatatatcaactgagtatgtccacaacgcaaaagctgtgtctaaaagtatagtgatcaggtttagtgcaataattacggattgctaagaggtcctcctacctgttggtatttttattaaatatgttttctgaattaattttattgtcaaaaaaatattaggtacaagttgaatatcattgttgaaaatgatactggatctacaacttttctcttttttggtgggcagcaactgatttaattagtttgccaactagcaacctagcttaagggtgcaaggatcaactctcaatgtctctgtttatgagcataattgttgggatgcaaaaattactccaaattgttctcgatacttggatagacgatccatataattatatcgttcaaagtgacttatattcttgaaaacaatgattgtgcaagaccaactttcccctctgtcatgacaactactccaagaagctcaacgctccttcgaatatcattaattttgattactccaagaagctcaacgctccttcaaatatcattaactttgaatacggagaagaatgttagaaggtgtttagatatttctaatgcaggtgaaagcaattcaa

SEQ ID NO: 50748 - DNA, 753 bp, Ricinus communis
  Intron number 1 from transcript 29900.m001622 (locus 29900 .t000084) derived from phytozome v7.0 (chr-ID 29900; pos 5 25224 to 525976)
cttggaattctgattacttgtttaaccagtacgttctgtttccttgtgatggttaataacttgttatattactctactcgttgcattgattaattaatctcattttaggcctttcttgagttaggttatcttggtatcaaatttctcttttattcatgtctcttggttttcttggctttgagtacttagtttcttggattccttttttctgttttctttactatcggtgttttttattaatagtttcttggagattcttcattgtttagcttcgtttgaattcattatgttttgggtgtttatatcggttttgagattcttagttaagcaagaaaaaattgcggattagagtatttgtctaaagaatcaagaatagcagggtatagcgtagattgaagtgctttagaatgattcttgagttgattcttgtaattgggtattctattaattgtggttagattctttctgataagtcgtgtttgggtgtttctttctttggttgaaagattttaaaaaatcaagacacagttgtagtacaattgatcttgaatagattgaattgattcttgtaatagggtattgattgaatttgggtaactacagagaagtagtatttagctgcttaattgattcttttgtgtgtttattattctccaatccttcagttcatgcatgaatttaattaattctcacgtgactcaattctaattcatcaaatgtagctaacagtggtttgtttctgcagtactcaac

SEQ ID NO: 50749 - DNA, 606 bp, Ricinus communis
  Intron number 1 from transcript 30136.m001053 (locus 30136 .t000049) derived from phytozome v7.0 (chr-ID 30136; pos 1 180059 to 1180664 reverse strand)
agaaatatttaggtatgtcagcctatgtagggagaaagaagatagacgtgtttgagtatatcaaggatagagtgtggcgaaaagtcgaatcctggaagacttctctattctcaaatgctgtgaaggaaacgctaattaaatcagtggcttagtcaattcctatctatacaattagttctttccagattccaaaatcattaattttggacatccatagattgttggcctatttttggtggggttcaatgaataataaaagaaagattcactggggcaaatgggaaacattgtatgagagcaaagaaaagggaagttagggttttagatatttagagtccttcaatcaaactctactgactaaacaatgttggtgaatcttgatttctcctaattctcttttatcaagagtcctccaagcttcataccatcctactcgacattttttacaagtaactgttaatgctcaaccttcttttttatggcatagcttactatgggtagagaagttctacaatctggattaagttggagaataggtgatgggacctttgttcgtgtttttttatgataaatggatctcaaatttaggtattctttgcccttttg

SEQ ID NO: 50750 - DNA, 534 bp, Ricinus communis
  Intron number 1 from transcript 30055.m001611 (locus 30055 .t000081) derived from phytozome v7.0 (chr-ID 30055; pos 4 11759 to 412292 reverse strand)
atctactgtcttctacgacactcctgccactcttggttggtcttcttcacttttagctttttcagctcatgggctgttctgcttacttgcgtttacttaaacttggaatcaagattgtactttgggaaatcagttttcattctttaattcaaagaaaaaactggtatggattgtccattagcggcggaaaaggaaggagaaagaagactcgaaatttgggatttcttattcaccaaaaaaagaaaatttgggatttcatctatctacacatttgaaaacttgaactacatagaagactgccataaaagaaagtcaagctttttcatatatatatatatttgagtcttgaaagtacaattgcaattcatgtgatataatatcaaggcaataatttgttttattttgattttgcttttatatctactcccaatgagacaaagaatttgtagttaaaaagtaaagattttgacctgcttttgattcttgataatgcatacagctaaggctgagagattgttggcagaagcagctgga

SEQ ID NO: 50751 - DNA, 877 bp, Ricinus communis
  Intron number 1 from transcript 30138.m004038 (locus 30138 .t000212) derived from phytozome v7.0 (chr-ID 30138; pos 1 465125 to 1466001)
tcgaagactacatttgggtatgtctttttactctttattttctttggaatcgcaatttccttcctctgctaatgcggcctttcaacaaatgctgtttttttattgtttttattttttatttttttaatttttacaattgagtgattcatcgctgaggaaatgcaaagggcgaaaatactagcgtaaagttcagattttttttcctaaagaatttcagataagaacttaaaattaattagagctgaggaaacaagaattcttctactggaattttagttattactttgtgatgaaactagcatttcttttgtttatttatttatattgtgcttcagagttgcaatctgagtccttttttctttttccttttaaaaagaaaagtattttcttgcattttcttggaaaccaaacaaggcaaagttaaagtttgtttcttttgtttgtttctttgtttaatgtgttttgtagccgagacgagtttttggtaagacagtcatttactttgtttcttttaacttgtctttctgcttactagttgtttacttgccgagaaatccgaggttgtgattggaaaacttttttgcattttttattttctttttctgaaaaacaaattgataaattactaggataaattattccgcaactgcttctcttaatgctactaattatgcttcgcaaaggccatttttggttttagtagagtcaagtttctagtttttgctggattcaccaatttgatagataggattggttattttttcttcttgctctttctaggagactaatctttgtgctttagaatttttattgctctcttggaaaaatgataatttgtgtttgcaagtctcaaatttgttctatcaattgcaggcaa

SEQ ID NO: 50752 - DNA, 481 bp, Ricinus communis
  Intron number 2 from transcript 30099.m001629 (locus 30099 .t000008) derived from phytozome v7.0 (chr-ID 30099; pos 4 0708 to 41188)
tcttgaacataaccttagaagtgataaggtacattcttttcctttttctccccattattttcccataattttcttaatttacattattttagataagtcatatccactagcattagctacatttttaaaattatatttgttatattattattattaattattgctcaatttttactcgataaacgtccagaattttatttaagatgttcctcaattggtaaaataaattataattttttgcaactttaacaccttaattaatttgatcttttaaattttaccaattcaaattaacatgcttcgattataaataattttattcagcataacatcttattttgtttcgtattagaaatttattacaaataacaactttccaacttgtaaatataatagtagatattattataaaattatatattttgaagttcattatgcaaatatcaatgaaatgaatgaaatttttggatgtgtagtgcac

SEQ ID NO: 50753 - DNA, 281 bp, Ricinus communis
  Intron number 1 from transcript 29851.m002453 (locus 29851 .t000095) derived from phytozome v7.0 (chr-ID 29851; pos 5 93171 to 593451)
gggtcgtaagaaattagtagcctcttctttttctgtttttcttttttttttttttcaaaaaaagactcaggctacggtctggttcgaattcataacctcagtctttgaacttcttatagctgatatgtgaaaaacaatctactattgacacttggctgtaattctggtgccaagcatcatagacattttgattttcatggcttatgtaaattgtattgaaatttgtattaccttaagctgacaattctatccttatgcggtcctctctgtattagttaggg

SEQ ID NO: 50754 - DNA, 850 bp, Ricinus communis
  Intron number 1 from transcript 29908.m006230 (locus 29908 .t000281) derived from phytozome v7.0 (chr-ID 29908; pos 1 762423 to 1763272 reverse strand)
atttcctcgaaaccagatacttcgattctcgtcgtgtattttctctcactttgagattcgtcttattatttatttatttttctgtttattatttaattggaaaatctgagattttctttttttatcttttaattttcttaaaaatcttttggaacacgccaaagaatgtttaggttcttgattctgattatagaaaattttggaatgctgaattggagtgtgttgctgaggtaatgtaagtttagcatttgtgcttgagttgagatttagatagttgttgttgttggagtgttaatcgagggaatgagaatttcgtgttggtcttttagctcttatttcttctaaacagttacatatattaagaattatttggagctgaggactggtatctagaaaagaagagacttctctctatcaactattttatttgttcaatatatatatatgtatgtatgtatattttctttttaatcttaggagtttgttttagttgaaagagtaagttaaatatcaaacattggcaccatggactatttcgaaagtatggacacttgtgtgggggttttctcttacaagaatgagtccaccgccattgagtttctctccgattttccttttagtcgtttcttacaaattaaactatgaggagagggagagagggcatggtatgtctgctgagtgtgagtttgtttttgtcattcgcattatcatttcaatagaagtttgtttcttcaaggaagcaagttcttcaagtatgattttgtattgtaaggaatgtttcatttagatttaacactagcttaagcgaaatgctttgttctctatgtaggatatcaatcacagtttacaa

SEQ ID NO: 50755 - DNA, 467 bp, Ricinus communis
  Intron number 1 from transcript 30138.m004035 (locus 30138 .t000209) derived from phytozome v7.0 (chr-ID 30138; pos 1 435726 to 1436192)
ggatcggcttctggagatctccgagcgcgtttacggtaaccccttttgcactttttttttatatattaaatttctttctaattttgattatttgcaaaattgcctcgcattttgtcaatttctgacctaatttcgcatttcaagttgcatcaatgcttctcgagctcaattaggttttagaatctcacttttcaattagagtttggcattgattttgaaacaatgcaatgcttagtttgttagttaggagagcttctgcggctttatttattgtaacattttgttttatacatgcaatcaagcacatttttcagaagctgtagtattcttcgttctttgtagataaagttcataactctaacaatataagtttttagaagttgagtaattaagtatgaataatgaatcattaaatttggtttgatttttctttggtgttgtagtgtttgattgttgcttctccacgg

SEQ ID NO: 50756 - DNA, 185 bp, Ricinus communis
  Intron number 1 from transcript 30128.m008785 (locus 30128 .t000246) derived from phytozome v7.0 (chr-ID 30128; pos 1 045357 to 1045541 reverse strand)
gggaggagtgtgtttctgagtggcaccttcactgggtgagttactaatttgatatattcttatgtttttaaataattttgaaggattaattctgttagtgaatgtctacatggttttctagtcttcagttttctattgtattagatgtatgataccggttttgaatgaaattgttttatggacag

SEQ ID NO: 50757 - DNA, 321 bp, Ricinus communis
  Intron number 3 from transcript 30114.m000531 (locus 30114 .t000029) derived from phytozome v7.0 (chr-ID 30114; pos 2 49654 to 249974 reverse strand)
tgactggacattttatctctgaacagcaaagggaggttagatttagttcattattctgccaatctagtgttcttttattttctgtttattcttaatgtactgtgtgtatatgccatgttgcattagtttgataagggaaaaaaaaagtagaaaagaaaagaggaaagttttgagctttatgaagaagtaaagttgtttgaaatgttgtccgatggaagcttttctcatctcatattatgggcaatcctcgatttaataacttcatatcctagactaattatgatatctttcagccagggtctgtatcaggcctgaggtttt

SEQ ID NO: 50758 - DNA, 885 bp, Ricinus communis
  Intron number 1 from transcript 29910.m000924 (locus 29910 .t000015) derived from phytozome v7.0 (chr-ID 29910; pos 2 07380 to 208264 reverse strand)
tggtaagacacattaccctatagactaatagccgcattcagatttatttttaactcggctcctattaggatttaaacttagtaatctcttagttttggagataaatttgactgaactagagacctagaagtaccgatacttttaaaaggtaaaagtgttggtgacagatatttttcaatgcagatatacgctcaatatatatttttatatattgaatattttattatttttaattttagtgaaacgagatgaacacgattaggacacatttagggcacgactaagacacttttagaatatcagtaggccattttaaaattttaaaaaccaaattaattaatagcaattggctcctagatttacagataattccactgttagcactaaaattattattattttatctaattagccaataatatctacaaacataataatcattgataaaatttaaaaaatatttcgttcaataataaattaaactctatttatatataatatattaatttttattattttatttttaaatgtgaatgattatatattatatattttaagtattataatataatatatttaattaacatgtatttcacacgttgtattctaatttttttaaaataattgtatcaacttggccgtgtatatcttctatcgtatccgtacttgttatgctaagaaggtatttagtactgcttcaattggaatacttatccctatgagtatctgtgtcggcgtgtctgcgtcattttgctcatgtccgtacttcttacgctagagatcatcggtggcgtatttgttttggaaggtgtttagtgctacttaactttcaatacttaattcttcttactccctatgagtaatgcataaatactgaaatgcagg

SEQ ID NO: 50759 - DNA, 897 bp, Ricinus communis
  Intron number 2 from transcript 30009.m000837 (locus 30009 .t000017) derived from phytozome v7.0 (chr-ID 30009; pos 7 72995 to 773891)
tttgccgcagcgatatcagtgcttgggagtctcaggttgttcctctttctctataaactgcttcttttatatgtagttattttctattctcttaaaaattgctttgtattcaagaaaagaagcccactaatacaagagtaagcaaagtcggcatgagttcaaatttcgtccaaatcagctgtggtttgttgtctatttcttgaatcttgagtgaaaggaccattcaccattattaaattttggttagttgcattttgcagtcccatttgtgttcttactgagctgcaatgcaaatagtgagaaaataatcacactaatggaggccataggttgtggaaaatgctactttacgtctgtttttagcgagtaacaaaatggatttgttacgcacccacttgcttatatctcaagacccaagttcgagtctttctttcatcctttgtaattacaaaagtaaaacgggatttcttatctatataacataaaaaggaacttgtacatatatctgtacttggtttcttttttctttttttaatactagattgaatcaaactatagccttgtatctttgttttggttatcaaatcaacaaatgtgtcaaatgggacatctgctgaaaacttgtacacctatgtgtcttattggtaagtaaattcttactagactattctgaaattaatgaacttgtgctttaccaatctacagaagaaaagaataaaaaaagacatccagtcttttaatcttcttccttgtttctagttgtactgtcatacatgaggcgttttatttcttttatattctctgtttctctctttaagtggttttccaagtaccggactgaattctttaatttaacatgcttctatgtgcaggcgctttttcctcggatatttggcc

SEQ ID NO: 50760 - DNA, 345 bp, Ricinus communis
  Intron number 1 from transcript 29900.m001578 (locus 29900 .t000040) derived from phytozome v7.0 (chr-ID 29900; pos 2 70632 to 270976 reverse strand)
gcgagcgaagtaagttactttattttattttcttttgataactaaatttgtttttgattgaggattaattggtattacctggataaagtaatagaattcaagacttgctataattttaatattccaatagacatacccatttgagaataatcctccctacatgaagggcatgccacaatttttagaaggagttgcagcataattagtgatgatgctgttttatttatgtaagcactagatatataaaagctaaaatagaaaaaatctttgtatctgtaaattgctgtcttctaactgcaaaatttcattgaaataacagagttaaagccacaggagttcctcgtg

SEQ ID NO: 50761 - DNA, 403 bp, Ricinus communis
  Intron number 2 from transcript 29848.m004525 (locus 29848 .t000081) derived from phytozome v7.0 (chr-ID 29848; pos 4 31726 to 432128 reverse strand)
agtgctctagtgtatgcttctacctttctctctcttctgccatgcgctgcaaagcactttagaagctatcaaataaacatcatgtctatatgttaagattattgatgccgcttaggaaaaagatacgagacagtgtccaatgcacgaagcatatctgaatgcaatgtggaatctaactcctttgggggaaaatataaggatcctgtgctttttttatctttttatccgcgagctacaataggatgatatatttttaaaaatttggagatgaaggacaggagttgtttaaactgttcctaaaccagcctggttgtgttcgggtgtgataatggcttcgtggagtaactgatgtttgatatttgtttttacagttacgagcactcaattcaggcatatctaccga

SEQ ID NO: 50762 - DNA, 301 bp, Ricinus communis
  Intron number 1 from transcript 29838.m001702 (locus 29838 .t000072) derived from phytozome v7.0 (chr-ID 29838; pos 4 24239 to 424539 reverse strand)
tgaggtcgattgtgtcacttgcaagcctgtctgcagtaagtttctcaacaactttcgatttagtcataaaatcttaatatattttgttttgatcgttcaattttaattgagtttcaagataattacattatttaataaaaaattgatacgtgaatgaaaaaaagaatgagagaaatatcatgtttcaatctttcgtctagcgactgaattataataaaaattagagctaaattttttaaaatgatatttatattatttgtctattatgactattaaaactttatatgttattcttggcaga

SEQ ID NO: 50763 - DNA, 941 bp, Ricinus communis
  Intron number 1 from transcript 29996.m000135 (locus 29996 .t000006) derived from phytozome v7.0 (chr-ID 29996; pos 5 6037 to 56977)
tcactgtatctgtctgcagtgttgttattcttgcggtatgtatctcgtactttctcttttgatcttttgcgctttcatgaaaagctagctgcagtagagcactttttatatgtcagatgcaagcaagtgctgctaatgtgaaatgctatattttcattttcatggttatgatgaagaagatgaaaggctggcttgatctggatacaatttttttttcttttctaaaaatggggtagtcctccatttgtcaaaaatcagctctttctattatttttgctttttttgcttgcaaaatatcatttttattctctgtgaaatgtgattgttttgcacattagtagtattttattcattaatgtgcaagtaggttttcattaatgcattcagtttcagggagtctcattctatcctttatatattcatgagactattgaacattagcttcctttaaaaggatgtcttctactctgaactaactttagatgacagtgattcagacatatatactttgccataagcaatatctgagatttatattttgagtttgtttcttatccaataacaaatattcaacctagactacttgggattgcttctcaaaatttactccagcttccttttcttttcttatttgtgaccttgaattatgtcttaatcaactcaattctaaaacaaatatatatacagtgcttatagtttcactttcttcaagactagaacctggaaatgttttgttgaggattagggaagtctgaaacttgggaccagaagatcaagattaaacaacttcagtcattttattggcctactgactgaacaaataatgttggtttctgcgaagcaaagactaatgttgtgaaataccattatgttctgtggactatgctgcaattaacacgcaatataattatgtgcagacctttctttttctctttgcagtt

SEQ ID NO: 50764 - DNA, 807 bp, Ricinus communis
  Intron number 1 from transcript 30005.m001307 (locus 30005 .t000073) derived from phytozome v7.0 (chr-ID 30005; pos 4 76440 to 477246)
aagaaccaaatcgtttgcaggtaataacacattaacaccatagatttacatcttgtaatcttctacatgtatatttatggcttttttttgtttgttccttttctttttttccctttcatgttcttgtatccgttttagttttaggaaataagcagcccagacagacagtgtagctttaggtttgctttagaacttgttgggttcttttagtagaaaaagaaatcaagaattgaagttaaagacggtagcttaatatttgttcaaggtaaaaggttctttcttgatttattaagtgattatatgatgaatgcttatcactttatgcttatcttggtgttaactatggtaattggttgctatttgaatggtatcgtgaccatgttggtgaagaatgattatgatgatatataaattaaatgggtatgcgaattagccctgttcaaatcgaatcctagctttgtcgcattctaaaaaagtttcaatctttccatagattgcaccagtcagcagaattatattctcatttcgtgctccaactcgtaattgtggaatttaactttcttatacgtaatttgtgatgaggtttgtgtatagagtagtaaggagcaatataaagtggacattgatgtcttggcatactagcaatcttacaatcaaaaagcaagaaaataaaaaacttgctagctggttgggacctattaactccttgattttttctttctcatttgactgccttttatgtatctatttaattttactcttgcttacgtagattgctgcttgtttccagaataattttcaaggact

SEQ ID NO: 50765 - DNA, 723 bp, Ricinus communis
  Intron number 2 from transcript 30005.m001307 (locus 30005 .t000073) derived from phytozome v7.0 (chr-ID 30005; pos 4 77276 to 477998)
attcttcaggtatgtgttcttttatgatatcttgctgcttttgcaaccatttgatattggcatttctttgctgtagatttgttgcaccttaatctacgttgattttggcttagtttgttagaatttgattttatgtgcccaattgacttttagtcactatgtatgaacttgtttttcttgttttgacttgtgagaatcagaggtttaactctgttaaaacaatgctagctttctaactaatctgattggacaaggcattccatggtttgacaatttgcaaatgtgcaaattaaatcatctatgaattgattttcgaaaagtatttgttaaacacatgtaatatggcatctttttatgagcttccttggaatttagggtaataccaggatcgcacattcctttcaacttatgcagttgtcgtactgagttttgccaatttctttgtgatctttggaaagaagaaaaggaggaacaagaactgatttaatgcttaacaaaatgttagctccttctatttatgattgattaagggactaagatgagtaaaatataggtctaaagtgtcttaggagtgcagcatatttttattacaggaaaaactaaatcaaagctaaatgaggtcattcgagatgtgaataatataatttatgtttgatattgcactactttaatgtttcgtagttggaattataaattcatttaattgacagattgctgctgttg

SEQ ID NO: 50766 - DNA, 630 bp, Ricinus communis
  Intron number 2 from transcript 29844.m003279 (locus 29844 .t000125) derived from phytozome v7.0 (chr-ID 29844; pos 7 61074 to 761703)
tttctaattttgattcatttgtccaaactctccaggtgaactccaatctttgattaatttaagtggtcctgcaattttactttgatcttcaaacaacagtggacaaaagactctgactttaggtgccatgtaaacatagtggattctacaattgaaacataaaggattgttagtgaatcacaagattggaacttttatttttctttaattactgatctagataaaagtatggaacaaattatgtgcaagagtttgattgaatttgacatgatttcatttctttcaaaattctttcgtttcttttcttttcttttcttgttttttttaaaaattaaaagaactaaattgtagcaattagaaagtttccaatcatgagaaataactaagtaaaattcaattgaagtgacttaatgacttgtctcgtggcattctgtgtttgctatgatgaattattttgctgcttcttttttatactaattaacaacactgtttaaggataattagtattttatcgttattcagttcaagtaggttatcttctatgttttcttcttttttttcatgaagtggctaaactggaacttgtgaaattcaggataagggaataaaaactttccaaaggtccgttcc

SEQ ID NO: 50767 - DNA, 389 bp, Ricinus communis
  Intron number 2 from transcript 29958.m000931 (locus 29958 .t000001) derived from phytozome v7.0 (chr-ID 29958; pos 2 47469 to 247857)
atttttcggccaatcagcagttccattccacctcagtatgtaatacttgctcagtcgattaggtttaatgaacaaaatgtcctttgatgcgaatgcttatttgttttcttttctttttataattttacaattagggtaacgaaaatttgaaatacaagtgcatgaatttaaacgctgaggttatagattaaggaagggattctgtgttgtagtctagggatttcgcattgtggagctgttatttttgaaattcaatcttgtgatggctagacgttgcttatgaggcagttgaatggttactaattcctatggaagttgaatattatatattgtagaaacgtagatgatgattgtgtgtagtttgagatttttgatgtaatacatgcagg

SEQ ID NO: 50768 - DNA, 1032 bp, Ricinus communis
  Intron number 2 from transcript 30068.m002537 (locus 30068 .t000027) derived from phytozome v7.0 (chr-ID 30068; pos 1 74450 to 175481 reverse strand)
catccggaaaagtccccaggtccggatggtataatcctgtttttttccaaagtttttggtctattgtaggcagagatttggttcacttgtatcaagaattctttcagactggtcaacttccagaggagctgaataaaaccttgattgtcctcatcccaaagaaaaagaatctggaatacatggctgatcttaggccgatatcactctgcaacgtcttgtataaaattttatctaaggtgctctcaaatcggttgaaatgtgttcttccccatttgattgctgaaaatcagagtgcttttgtaaaggcacagttgataacggataacattctcattgcatttgaaataaaccacttcctaaagaggaagagacaaggaaaaatgcgtactgcagccttgaagttagatatgtcaaaggcttatgacgatattgaatggcatttcctgcgtagaatgatgctacagtggggatttagtgaagtttgggttgatcaagttatggaatgtgtggaatcggttgagtatagtgtgctacacaagggcaagaggttgggaccattattcctcagcgcgggctccggcaaggggacccgttgtccctgtatttgttcatattatgtgccgaggggctgagtgcaatattgcgacgaaaagaagaagtagggctctccatggtgtaaaatagctagggggctccatcgattaaccacttatttttcgccgatgattgttacttgttttttaaagcatcagaaaatgaagggcaagagataaagtcgctgctgcataagtatgagatggcgtcaggccaaaagattaatctaaacaagtcttcagtgttgttcaatgcaaatgttaaggaagaaactagaacacaactctgtcaaattttgggggtgcatactgttttggacccaagaaactacttgggcatgccttcgctaattggacaaaataagagggcggtctttaagttcgtaaaggataaagtttggcagagattacaaggctggcgacgtaaattgttgtcacg

SEQ ID NO: 50769 - DNA, 917 bp, Ricinus communis
  Intron number 1 from transcript 29912.m005562 (locus 29912 .t000288) derived from phytozome v7.0 (chr-ID 29912; pos 1 799638 to 1800554)
cctgtaagaagacgctggttcgccacaagtctcttgtaagttcattcctttgctttctcacctaatttttttttctctttttggtaatgcaattttttttctttaatttagatattgttcttgacaaaacaacatgaaagaactgtgcttttttctagggtggagaatgaagatgaaatatcttctaattggttctgatagttcttgaaatttgttaagaatagcaatgataatcagaaatcagaatgtgtggtctttgatagtactgaattatgagctctagctttttagagctttcccaagtgggtgactggtttgattaaagtttttagatgtgattcaattattatgattcagttattagcattttctgatgatacctaaacatcttattattgaaattataaggtatagattattgtgatggctgtacatttgtcccttgctctgtatttaaagtgtaaattaccagtgcaagtaatccatgacattctttgttaatttccttcttgtgccattagcaagcatcttccattgtcctggttaatttatatgtcattgaattctccaaatgtatgaatgcaataatcataaatgatatttaaaaaactgagctgttgggtacaaatggcttttctaatgtcgagctttctatgaaacgtaatatttttaatgtatttttttaatgtttctttttttggtgtttatcacttgatctgttattttatttaccatttgttcttagctttatggaagagtaagtgttaagtttgtcacagttcaatctaattgtttttattgggtgctcttatttgccaacacatgtgtaactgctgttcatctacagttctttttttgtggttttgacaagaaatttgacaggtgaagacaaggacgtcagatttatctgttgaacc

SEQ ID NO: 50770 - DNA, 752 bp, Ricinus communis
  Intron number 3 from transcript 30143.m001197 (locus 30143 .t000036) derived from phytozome v7.0 (chr-ID 30143; pos 3 02277 to 303028)
cacagctctcccctttaggcttgcagcaggtaaaactttaccagtttccgtctgacgttttttattctggtgggatttatgagtctgtttatgaaataacttttttttttagaaaattgaatatttggaaatgagataaagttgacaatatcactatatacgtctatgctttttattgagccaagcatatcagacaattctttcatgttcagtttgtatttgtttgttctattttactatttgacagtttcctttgtgacaactgaggtcaatgatctatcgccggatgaggttatctgtatcagtttcgtaaatattagaacactctcataatctataaaataataaaattacgttgttctttgataatgataattcttttgttgcattatttaagctgatatggataggcaaatgaatttaagtatgacttcaaggatcaaaattgtcttacattgttgtcatacggaaatttgtttcaaggacctgcataccttttccttcttaactcttttcaatttggtggtaatcatgtataaagatttgggtttcagagagaatatataaatgtcttccatatgcaatgccagccaaaacccaagtcaaaagcaataatttaagtatatctaccattatattttttctctcatttggttttatgtaatgcagtcttcctctaaaaagaatgctttagaatgatctatcgtattttaacaggttgtcaatcttcggaaccgtattcaggattctgg

SEQ ID NO: 50771 - DNA, 642 bp, Ricinus communis
  Intron number 1 from transcript 30074.m001415 (locus 30074 .t000082) derived from phytozome v7.0 (chr-ID 30074; pos 5 97333 to 597974 reverse strand)
aggttacaggcaattacttgagaccaagagacaaggtaatacaggcaatttattctatttcttttttttccttgtgcatatgatatttaataattgttacttttacatgccactgaaattaatttttccatactgttctccgcagatagtaaagctaatttcctgacttcattttgaagaagtcacatttgttacatctgttcttggatttttctgttggcagtgacaatgctagaaagtgacattgtactgtaatcagtaagaaaagtgtaaccttatgcaatttcttatcatcattttctctttaagatacacaaaggcttcttctatcttttattgcctttctacagtccgggccctattctcctcttaaaccaccaaggaaaagagccatgcaccttttatattaatggcatacgtatattctcttcatcagtttcttttaagccttatgggcatattttgcattaccattatctgttcagattcattccatggttatccattggaactgtttactccttacatcttttgatgtaccttgtcaatgatgttcaaaagatcgagcatgccttctcttcttaattgcaaactttactggatgcagttgatatcacagcagttgagaagaaacttttggtt

SEQ ID NO: 50772 - DNA, 292 bp, Ricinus communis
  Intron number 1 from transcript 29866.m000619 (locus 29866 .t000014) derived from phytozome v7.0 (chr-ID 29866; pos 1 74964 to 175255 reverse strand)
cggttaaactcattactcaaggcaaaaacttggaggttctttttcttatccttcgaaccgtttatctttattattattatatctttggtcatatgattaaataaaggggcttgtttttcttgattttgatgacaatttgggttcttgcatttcaccaatttgtttatgtagaaaatggagcttagttcagttcattaatttattttgttagtttgcatcaatttttggtttgattgagagaaggttaaagaggaaattgtgtggatgcagttgacggatacagtgaaaaagc

SEQ ID NO: 50773 - DNA, 372 bp, Ricinus communis
  Intron number 4 from transcript 29872.m000536 (locus 29872 .t000014) derived from phytozome v7.0 (chr-ID 29872; pos 1 10352 to 110723 reverse strand)
ctgaagggcgaagtggctgtactacatttttttttcttgcaatatgttgtgtgcttgttcttttcttgttagattatacacctgctttgtgctgtagaagaaaaaaatcagaaaagaaaaggaatttagtgaactaaaatatatgcatgaaaagaaggaatagggataaaatctacttcatatgtatataagaaactgatattgcgtttttgtttgattccgattggtttcttttttgcttttctttcactagaaaagctgggtggaaaaacttttataacttattataagttaatgaataaaggtaaagttatgctggactttcttgttttgttatttaaaagctgatggtaactcttgtttcagttcaag

SEQ ID NO: 50774 - DNA, 642 bp, Ricinus communis
  Intron number 1 from transcript 30131.m007245 (locus 30131 .t000396) derived from phytozome v7.0 (chr-ID 30131; pos 2 437798 to 2438439 reverse strand)
ttttgaatttcttcaggggttttgttgggttcttggtgaattttaatacccacttgtcaatttgaattcactcttgtcttttaacaactttctctggtaattcctctgtctctgttttatcaattcgattgcacatgcacacacagctatttgatttctcttcttaaaaaaaaaagaaatattactcaagtcgagcttgctttaagttttttgtgaaaatatcgtatgctctgtgcatgaaagttgaattctttttgtttgtcgtgtagtttggtttgatattggaaaataatggaactatagtttttgaattgattaagttcgtttaacactctatttggatactgaggaaactttgagattcattttcttagtttcgaaagtaaagaaacaggataattctcaactgagcactgtatctttacttggctaaacaaccgtctttcatttatagctcttgtttcactattctctgccactcagcaaccgaagtgaatgttaagtttctggcctcaatcatttttctttttctgttattgtgattcatctaatactgttaaaagattggaagtagaatcactattttgttacctgcatttctctgcagttagatactctgctggaaccaccaggctttggctt

SEQ ID NO: 50775 - DNA, 356 bp, Ricinus communis
  Intron number 1 from transcript 29904.m003020 (locus 29904 .t000134) derived from phytozome v7.0 (chr-ID 29904; pos 9 19330 to 919685 reverse strand)
tatcgtttcgcctctagccttgcttctaaagctcggtactttctcttccttcttccctggaattgggttttgattggtttccccatttatccttgtcctgatcgtaatagactattttttttttcactgtaactgttcaaatttaacttgaactagaaaaaccagtaaactttaattagttttgaaatggcattatctcagttctttcttgtattattgcacttcatttcctgttagccaaaacaaagctcaattatgtgattatcatttggtatattaatgggtttctaatatttatattttcttgtttttgatgtacaggatcgctaggaatagcacccatcaggttagttcta

SEQ ID NO: 50776 - DNA, 526 bp, Ricinus communis
  Intron number 1 from transcript 30111.m000717 (locus 30111 .t000020) derived from phytozome v7.0 (chr-ID 30111; pos 1 39496 to 140021)
tcataaccctaactcctgacaccttttctgacaaggtaattgcatcaactcataaccctaatttgatttcaattattattatatgttggcaggactttcattttcttttatttacaacaagatttaggctttattgtaaattctagatttggtgatctttatgctattacttacttgtacacagttcaataattaattttgcttctgattaatgattgattgaccaatttaaatgaaatttttgttggtttctctaataaagattaggcctttgcttctttggggtctaatggctgattagatgattgggataccgaaatcaatttgcatattgttgtattttctgttacctgcatttcctttctaatcaagatttttaagaactgcttcttttctactgttttgaaatattaccttcttctgtaaaatattaccttttatgttgcttcgatcatgatgaaactgttaattgttcgtgcgcgctaacatctttttttctttatcaggtgaaggaaaaagacactgc

SEQ ID NO: 50777 - DNA, 504 bp, Ricinus communis
  Intron number 2 from transcript 29939.m000546 (locus 29939 .t000024) derived from phytozome v7.0 (chr-ID 29939; pos 5 28734 to 529237)
aaggtctgacctttgaagtctatttattttactcattggctttgggatgtatgcttgaattgacaatcttctttttcttttttctgggccagaaagataatcagcacagtggtttagttatttcatctattaagtttttgtatgattgttatgaaggtaatacaatataagaaacatatttgatagagctaagcaactgaacaaatatcatgtagcttattccatatatttttggttaaggctttgcctagttggatagagttgtataattcagaagacgcaaattttccatatattttttgttaaggctttgcctagttggatagagttgtgtaattcagatgacgcaaattttttttatgcaatctaatgtgtacaaatatgattaccatatccttctgcattgcgtgaatgtttagtatttgatgtgggttctcagggaagtttgaatccatgaacttattttgagcatgaacatgcaggccccgcttttgattggttgtg

SEQ ID NO: 50778 - DNA, 726 bp, Ricinus communis
  Intron number 1 from transcript 30055.m001621 (locus 30055 .t000091) derived from phytozome v7.0 (chr-ID 30055; pos 4 51490 to 452215)
gtctaccggccctggactcgagtcccttgtagatcgtatgttaattcttcaagaccttcctcttttccatttctttcacattattatagtttttaggcattaatcttatggaagcatttaggccttggggagtgatcccagctctggccttactcattatcctctttgagctgtaaccatttcaagctttcatgtggcaaattatacgaacagtcatctgataatgtttaatttaaactgcttcgaaagcatgttaagccatttataaatcctttacaaatgtattaatgtggttaatagactggtgtacacacctctaatatgacagaaaattactggcatgatcacttaaaacaataacatatcataagggacttagagattaatatttctttactagcaaacgaaccagagtttagtttgtagcattatcttgtaaaaggatgggctttcatgagttgggataaaacccggtagatgcctggcctctcatgagtcctttgcttttattgccctattttctaccagtatgccttgccttttgtttccaattcattcaggtttattcatttattcttgctgagaaagaagctaggatatacttctccatgatctcttgcttaagtggcattattcttttcagttttgggctacatatctctacttctatcatagtcatccagtaataacttccttgtcgtgcagaaaatatttcagttatcacta

SEQ ID NO: 50779 - DNA, 1019 bp, Ricinus communis
  Intron number 2 from transcript 29917.m002017 (locus 29917 .t000086) derived from phytozome v7.0 (chr-ID 29917; pos 6 06863 to 607881)
ctgacgaggagagacttatttacaatctcaaaagagtatgttctcttttgctttttttattttattttattttataatgattgtcgaagtgtttctttatcaacaatggataaattaatgtgccttcactagcaatgccaatattgtaggtttttcttttaatttttaatttagtgtctaaatctggagtatgtgctgttgtgtgcttaatctaacttttatctgtctgctgtcatttgaagatgccatgctctgaaagtttatagcaaggtagatatgaaattgaataaattttcctgtttaggcaccctctttgtcttagttcatatgcaacctagcattagttagctggtcataggaataggaaaaaataatatatatttgtatagcctgaagctttgcaaatgaaattgatctttctacttgatatatgcgttgtcacataaagtggttacttatcaaaattaagtattcatgcttaggtgttataatgcagagatgccaatctccgcaagtgagccttatgtggccatttaaatcccaagatcataaatgctgatgtgctttgatctagattaagccaagctcttagccagaattatgatggatcattgcagaatactttataagagaactcttaaataaaataggaatgtgctgctcctgagttcaatttatatgaacagtacagtttaagctaggagctgcctaatctttggtcttcttgtattgatctattcttcattagtttttttatgtttttatacttttatgattgctcttgaaacttctttttcctcattatctgcaatggtgaaactcaagaagaaacagtttagtatctgtatgataacttgttataaacgcgtgaccctgagtagagattgtactggtattatatagtttctttgcttttttagctttactccatagagttatgtgctattatttggtgaatcactatatccagtgtaatcaatacaggctaagaagaaagttgcattgctactacaaaaact

SEQ ID NO: 50780 - DNA, 995 bp, Ricinus communis
  Intron number 1 from transcript 30147.m013814 (locus 30147 .t000085) derived from phytozome v7.0 (chr-ID 30147; pos 2 750485 to 2751479 reverse strand)
gaggagagataaatccacttggtgagttgctgttatagattaaactattctgaattaagtaatatgcaagcacaatttcaaatgcaacagttagcagcattagtattattaagccagatgggaaaattgtataatttcaaaagttgtgggagttgagaatgttccgagtgaccaaattaaattagtaagataggctattgagcaatgtgagttttgagaatggtgacaattgattgttattttgtggatgatgtaacaaggcttgttatacatatctaactttaagggttctgaagattttatgttgcctttcctgcaattttattagtgttaaataaattttgaagtgatttagcataaatctttgtaagtttggggtgttgattagatactgggtggatgcttatactcttttgttttcccaatcgtgttgtgtgattaagtagatgcgagaaagataggaagcatattttgtgtcttcattgtgacgcatcaagtgtgttaaactgttttggtggatagagcataacataggatgtcttcttggatatcttagtagttaattttattagctgctttggttgtgaggctgtcactcgaagtgaactttgatggaagcttggctgattatttgagaagtactattcaaagagatcttgcacacaaataatacggacattctttatagaacctaaactgaatctcttatttgaaaaagagcaggctaggtttatgcacagtagacacctatctacgaatgctgatttctttatgagaatatgtttgtgctatttatcttttagtcgtcctttacgattgctttttatttaaaatagttaataatgattttgttctggtttacctgcaaattttcttttggaattaagagaatgatacatgactttattgctatggatatatatctatcaactaactgcatttttatttgccttctatcagttacattttcagttcttggtgagaagaccacagtt

SEQ ID NO: 50781 - DNA, 881 bp, Ricinus communis
  Intron number 2 from transcript 30147.m013913 (locus 30147 .t000184) derived from phytozome v7.0 (chr-ID 30147; pos 3 290063 to 3290943)
gagtggaactggaacatcagaaaagttggtatgttattttacatgttgatgattgtttaaattaaagtctttcttaaatccttgtcattgagggtgtgctagcttgcattgttataattatgttctgcttctttgcttgatgggttgttgagcctgtggtttaatactcatctgttacgcttacacatatttgtaggcaacttttcaaccatttgtacaacacatggtagtcaaatgccaacgggtttggtgccagttctaggaatatgtagaatgttagttgaaaagaatatgattttatcactagtttattgaccaagaatatcatcagtacaactattacagtgtttttctttttggtacagtgtgaagtgagtatgtggaatttatagtgtacaataatgaagaagcctagaatgaaaataactttaatcaaaaggtggatatagagaaagaaaaaagtaaaaagaatcctggaatagaggaagcaaactaataataggaactcttctggcttataacgcacatcttcctgatctcagatcttcatagagttgatgcattaattttcaagtgcattagaatgcttcaattgtttgctcttctttttagctgtctaatcatctaacaaagtgcattatagttctcaaatcgataaattttcctctttctcaattataaaagtgaaaacgtacatggaggttctcctatcaacagtcacatggtgacactaccaccattatgatctttgtttgtaggttatttataattctctctggtggttcttacattttaaagtatatgtgtttcatttcttccttaaattgcttcacttacctattttggccgttatatgcagggagtgacatcctctaaggttg

SEQ ID NO: 50782 - DNA, 745 bp, Ricinus communis
  Intron number 1 from transcript 29851.m002438 (locus 29851 .t000080) derived from phytozome v7.0 (chr-ID 29851; pos 5 17566 to 518310)
ttaattctcgccatctctccaactctattaaccaggtaaatcccatttctttcattcttttcctattaggttttgtttctttggttgaattgtaatgacccagaattttaatttccatcgtcttttaaattgtgatttgtgttttgtgttgtgagttcatcattattattagtagcagtagtagtagtaatgtgatctgtggagatttgtttataactttgctaattgtgtcttcaatccattcattttagttactccatcgttttcagcatcagatataataattttaatagtatgcaagaattcagtctttttggctaactttttcatttctgaaaagtatgtaaatttttcaaaataaattctatcaacacattctagtattgtttggactaattcctttgcaaaattgaatccttgggtattatgtcacttgttgtatgattttatttcttccaaaatatcttcttctaagtcaaaagaatttaactctagctttatgatctttccaaacaaagaattgactaaatagaatttaattcaattaaattcttgcatatttagattttcaaaatactatgataggttgctttggaagaaacgaaaccattttcgtcataaagatatactgtagaattatttcaaattgaagtttttaatcaaaattaattgaattctagcatcatttcaaacatgtggatttatgttttatggttatttgctattaggttgtatcgacatcatc

SEQ ID NO: 50783 - DNA, 152 bp, Ricinus communis
  Intron number 2 from transcript 30076.m004588 (locus 30076 .t000152) derived from phytozome v7.0 (chr-ID 30076; pos 9 79815 to 979966)
gcaggactgcacgtaatgaagatcatctcctttgacttccattttttattcccaattttttgtttttgatatattctactttcatttctaaatttttttctttttagttaatgaaggttagtgttcaatttgattgaaaatgcagggttaaa

SEQ ID NO: 50784 - DNA, 256 bp, Ricinus communis
  Intron number 1 from transcript 29976.m000494 (locus 29976 .t000009) derived from phytozome v7.0 (chr-ID 29976; pos 1 52521 to 152776 reverse strand)
gtggtaaagtcggttgacatagatctcaaatcacaataattgctgcaagtaatatcctaaccatccctgtcggctatatttgctattgtcttagctgatatttgaccatgttctcctacctacagttgtccgaggagtcatatccgtagtaattattggtcttttgattgggatcatatggaagaaacacagaaaacaaaagaactttttttaaaatgtaggtatactgttgaagcatcaacgagtaaggatcttc

SEQ ID NO: 50785 - DNA, 351 bp, Ricinus communis
  Intron number 1 from transcript 29890.m000285 (locus 29890 .t000002) derived from phytozome v7.0 (chr-ID 29890; pos 1 2831 to 13181)
gattttatacattaaggtatatatataatggtatggattttatatattatactattttaaatgttaagagtttcaattggaattacctataggttatatttcactttagggtaatttaccctcttatttgtgctcagagtcttgtgcacttctgttttaatacatcgagtttgatttatgaaagacatcgaactttgacagaatttttaaatgttgaagtggtattttgttgcctttctcggagtttatcatgaacagaaattagaaacatgttgaattatgtctctttcttctttttttgaaaaaattattcttcttgacataatatgattgacatcataagcttggtct

SEQ ID NO: 50786 - DNA, 933 bp, Ricinus communis
  Intron number 2 from transcript 30093.m000367 (locus 30093 .t000018) derived from phytozome v7.0 (chr-ID 30093; pos 2 06732 to 207664)
ggtaacaggtgaatttttaaatgttctttgtttgcagaataaaatttaagttgaattatgtggtttttatttttcagaataaaattgtttttcataatatttgaaggtcaatcaatttgaagtatatggaataatgattttgcaagcatatggtttaagaaacatttaactgtgttgaggttacaacttgttatcaagttcgagtatagttagaagtagctaaagaaaagctgcagttgttatgcttgcactattatataattcatgttctcattgtcgaggcaagttatgatatcttatgcactattgttgatggactctgaattcagtgtcgtaaattgtctcagacaatgtagggttatttatctgcaaccgtaggctatctggaagtcaatagtgtacactcatcttttataacttttagcctttcaagttgcttcagttttcaaaaaatgttattatttcaaataaaaaagaaaatgatgcaagtcacttctaggatttgtatcctcgttcactaataaatttcgtaggctgtccttatgtatgcgcagagttgcaattaaaaatagatatatcttgctattttctgttgtctaccaggaaacttgtatcaatcagattttcatgtttcattaatatttaatcttaggttctagaactttatattgccttctcttttcttctcttgagctgctgtcttgtatattttggtccttgcggtttactttaaacaactcacatttggcacttgatcttctggtttataattcaattttggtgagcttttgggagttattcatgaagatgaaccttagagagtttcgctaattgaactttgatttatgactttaacacgtgaatttgcttaactctctctttttctttctcttttacatgtagaaaaccaattgaaggccttgaaagagaaga

SEQ ID NO: 50787 - DNA, 997 bp, Ricinus communis
  Intron number 1 from transcript 29901.m000414 (locus 29901 .t000010) derived from phytozome v7.0 (chr-ID 29901; pos 1 53055 to 154051)
ttgctcttctcagcctcttctttccattcctcaaggtatttcttattgttttcttttacatttttcagatctacccagatcccatatatattttttctctgttttctttctaatttttaccttacaaaaattagtattttcttgctctagttgctcttacaaatgttgggttttatctgttttatcattctaataggattaaggaatttatgatattgaagacagttattgattagttttgttttaatttcagatccaacgctagatatgctaaaattctatgtagtaggaaccaaattatttaaaaattgagagctttgtagtttatttgttaaaccagaacatgttcaataggtggttatcacaattgttattaagcacaattttagttaagattatataatatatcaccactctctagagtttcaattaagggtagattttagatgggttctttccactgttattgccagtcaaattatcaccatgatcgcctacaatcgcaatttggttaaacaattaatctacagccttagtacgattgagttcctctacactttagttataagccatttttagttacttgcctcagtcattaatatgaaaattcagatcttcgaatgcctcattaccattatgaaagtgcatccatatagttgtaattttgacatagcagataagaatcataatcccgcgcataacagatgagtgtgatgataccacgcacacttttgttgaagaattgaatccttggaatcacccatgttaagtacttagtttgttacataatgagaagagaacaggcctctttgtgacatatgcataaacatatgcatgttctgacttttatctcttggtaactagacatttaagtgttcataaatgcatgtttgtttcttgaccaatttgtttgatttctaagttctgtgcgagtgttcaatcagttagataatcaataatggatttgttttctttgttttcaatgcaggcttaagca

SEQ ID NO: 50788 - DNA, 814 bp, Ricinus communis
  Intron number 1 from transcript 30025.m000582 (locus 30025 .t000010) derived from phytozome v7.0 (chr-ID 30025; pos 1 01584 to 102397 reverse strand)
cctcaaggtaaccttattaattctaaacttttgtctatctgattgttctttttaattatttcgttagtagcctacttgaattgtttgtttttgtgttttggactggtcttagactgcaacatttattttttcccgtgggtggcattatgtttgtgacatatgaaagtaatgggtgtattaattggtatttactaatttatatatgatgcacgagcgagaggattttctaagagagcacgtatcatagatgcatgatgtaagatttgaagtattaaagataagaatctccagggagcaacaaaagttgcgatttcaagtttgaagctttaggttgaactactagaatgggaagtgggaactaggcctcattaaccatacaagagaggagaaataaacactacagggaatgttgtttgaagttagacgtaactggtgtttgcttttgtcaaagtgtgtaacttgagattctgtgagtattattgaagagcacaaatgccctgcttattttgcttaaagattgaacaattcctctgaattccgttctcagactcgtaattatagaaatatgtcattcattcagacttcaaacacgatgcttgagtaaccatttctggcattcacatctttgaaaatgaacctttaacagttcccctaaaacacacaattttgttactagcatgaatcagcaaagcttgttctgcactgtttcagatattgttttccttaagaaaaatagttgcaatgtttgcctcaccacttgtttctgcttattgtttcagatatcttgcatattttctcatacttgccaagggat

SEQ ID NO: 50789 - DNA, 874 bp, Ricinus communis
  Intron number 1 from transcript 29889.m003359 (locus 29889 .t000125) derived from phytozome v7.0 (chr-ID 29889; pos 6 14018 to 614891 reverse strand)
attccatctcggccgatatctcgcgatttgaatcggttcgtattttatcttcctcgatttcttgaatttactggttcatatataaagatttgctcgactgctaactgggtttgattattatactgtttaattgtgatagatttgtagcctaataatttgtttatagatttagggtttgatcagttttggtcataattttgactttaaattggctgggttagttgccttataaggaataactaattggttagggtcctgcctgttggtagtttttaaatgaaaaactaattggatagtgtattcatatgagtactgcatcctgattgtgtatagatttttgcatgaattaattgaattgttgcattgttttatattagttctgcttcaattctgtcgctggggttaattgattagactttagaaggtatgcttgtatgaaggtgttttaatattaattatggcatgtgctccttgatttatgaaatgtttgaagactagtgcgtaaactagtgtctttatatgttcattaaagactaggtatataagccgtagaaagtaatgaggcaaaaggactaagaagaaagattggaaatttataacagtagccaaagaggcaactgtagttgaataatttgacttggtgaagtttctgggatatggtattttatactagggtaacttaattatgggttgtttccatacttcattggcttttctatctgttatgcgtttctttttttgctaatgatgtatttttcagatttttctttcaaaactttctatcgttggtacacctcagatcatagactaagtgattttattttatcttttttttttttttaattttaggctgtgagttgcacggagatcataa

SEQ ID NO: 50790 - DNA, 377 bp, Ricinus communis
  Intron number 2 from transcript 29912.m005419 (locus 29912 .t000145) derived from phytozome v7.0 (chr-ID 29912; pos 7 34655 to 735031)
caatacaatcgccgttttgtcactgctggtaaaattctttttcttcgtcatccttatccttagatttatctgctatagatccaaaatctttgttattccggtctaaatttcagtttaacagaataggttttatgataatgtttctgttttattctcgacttagtcaactaagtggaagaaatttatctttatgtcaccttgagagattatatgataatcatttcgtttatattctcaaacaatgatagcaatgtcctaggttttatgtattcatcttgctcagtacttttaatcaaaacttgggctgcttgtttgaatgattttgttttatttgatctgcagttgtgggattcggtaagaagagaggacccaactca

SEQ ID NO: 50791 - DNA, 430 bp, Ricinus communis
  Intron number 2 from transcript 30076.m004511 (locus 30076 .t000075) derived from phytozome v7.0 (chr-ID 30076; pos 4 23856 to 424285)
tacaagttatttggtttaatcttcgtgaagaaccagtaagtctatttctcagcttatcttaatgctgtgctttaattggatgtaaagagcattattcaaagaaccttgtattcttcccatttttcatttaaatacttgtagttcactcagcttcagattatttggatgtaatagcattattttcttctatcaatattgcttactgggtactgtagaatgcttttcatatgttttcaatttgacctctttttgacttgactactgtcaaatgaatgtagtgtaaacggaaaactatatagactggacttcgttaacattatatattatatgttaaatattatgttagatgttttttcggcataacatgagcactagagtatacaggattcatctctcccaactttgtctttgaaacaggtggtgtacatta

SEQ ID NO: 50792 - DNA, 635 bp, Ricinus communis
  Intron number 1 from transcript 30128.m008900 (locus 30128 .t000361) derived from phytozome v7.0 (chr-ID 30128; pos 1 597497 to 1598131 reverse strand)
ttctgcagaagtcttcttcgaggagcgtttcgaaggtatctatccatcttactttaacactgtccatacgtcgtctttatgattactttcttcttgtgtttttattccgtggatctatttgcttttaactgtttctttgcttatcgcgtaattaaggatagaactgtaattagttttgatagatctgttaataatgtttggttttgctttcggcaatgatgattgatcagaaattagaaatggaactcctggtttgtgtttgcttgttgagaaaagaatgcgatcaggtgttaatgtactggattgatcgagcatttgtttagatctgtttggataatgtgtttttgtgataattcgtgagaaatggtcgtgtttgattatatgaaatttaaattttggaaaattagtaattacacgtgcatattttcattagccggaattggtcaaagtttgactctctatttgttttcagcgttagccttttctaactaaaaagcacatttgattgtacctttcttgaaattttaccgtttatatttcagtttgcataactttgcttagtgaaactgaacagtaaaattaagtatgcataatccaacaattgctaattacatttctgttttactggtttgcag

SEQ ID NO: 50793 - DNA, 712 bp, Ricinus communis
  Intron number 1 from transcript 29830.m001454 (locus 29830 .t000071) derived from phytozome v7.0 (chr-ID 29830; pos 5 49631 to 550342)
tttaatcaaaccttaaaaagatataaactgatcaggtacttttcaattcaattcaattcaattcaattcatttcaacccagttcaattcaaatcgacctctctgtttattttatgcatgctgcagacaaattcaatccccacgtaaattgctttgtttgatttgtataattcaattgaatcaagcttcaatcatttctaattcatccttcttttttattctgatttttttttgttttttgtttttatcgaaattgagcttatgtgattacaaaggtgtattctttttctctaatttgcatgttttcttggttaattgaattttaatcataactctgtttggttcatgagaaagaccagaattgtggttttattatatccaggtcttttgcatttgatagttttgttttatttgatcgagtagaataattgtctacttagctgattgttatgtgttagatttagtttcgataatgaactgaaattggaacaattcacattagggtttaggtgagattcaatttctttgatcatttctgaatgagaaacaaattatctaagttaatgaattatgatctgatttagaaaagtggctaggctgattttctttggttattgaaattgaccagcgttggttttgattttgtacagtttttttatctgatttagggtttgatactgaagtttttttaatcttctttttcttatattagg

SEQ ID NO: 50794 - DNA, 762 bp, Ricinus communis
  Intron number 3 from transcript 30068.m002571 (locus 30068 .t000061) derived from phytozome v7.0 (chr-ID 30068; pos 3 40301 to 341062 reverse strand)
attagatcagaggtttggccatttctccttggagtgtaagattctctttattcatgtaattcatatttagttttgttttatctaagtaccatatgcttgtttgacaaagagatgttttctgcgacatgtaagtattaagagtttgtgttttaataggaatatatcgtgtcttcagaagttctagagggtttattctttaataattccatattcctgtttgggtcttctccggtttttttttttttttttaaagaactactgttgttcttctggatctttggaagcatggtagtgttgacgatttcttctctctaccattctttgatggagttaagattgagtatgtttatcagtaagctgtcaatgtcaaaatgaggttagacaataacagggttagattggacccctctgtgtgtaataaagacatttgatattgctctggataggagaaaatggaagtaaaggttttatctagatctcaaccttccttttaggaatctcaataattgagtaaactctaaagtctctgttgtctggccaacaatgatgcagctacaatctttgtggctcctaatgtaactgttcttttagcaaatatcttgtgaggtttatcattctcctctttgcagaatgtactaatgatcttttttctaatttgctatctatattcttaaggttttattatgctggatcttctgtttatagcatgaatccattagttgttcatgtatctcactctcttttttttcttttccaacagct

SEQ ID NO: 50795 - DNA, 431 bp, Ricinus communis
  Intron number 1 from transcript 30068.m002571 (locus 30068 .t000061) derived from phytozome v7.0 (chr-ID 30068; pos 3 41267 to 341697 reverse strand)
tcgtcgtcatcttcctcaccagtttccattaatcggtgagttcctatatatatattcactcctttcatttcttttatttttctcttttaaatcaattttcatttttcttttgtttgtttacaattcctttagaattcgtgaaatcaaaagcttagctctagattttagaatacatactgattctcagatctaatctgcaagtgcgttaaggttctgtctgtttgtttactttctttcctataagagtcttcgtttcttttacgttatattcaattcaattttgcatgtagtactattgaattattgccacttacagtatataatcctcccccttttttttctgtttatttagtacttataaatatgagcgttcctttttttttctgtgtttttcaggggaggttataaatcaccttggtcactaagaagaa

SEQ ID NO: 50796 - DNA, 425 bp, Ricinus communis
  Intron number 2 from transcript 30005.m001275 (locus 30005 .t000041) derived from phytozome v7.0 (chr-ID 30005; pos 2 86487 to 286911 reverse strand)
ccttccataggtaagtagatattcaattttaatatagttccttttctctttctcttccattattgctgttcaagcgttatatactgagaaaaatatatagtttttatacatatatgctgattagaggccattacaatttttttttctaaattcaagataaactgacattaattaagccaaaattcaattccaggcagttaagtactattttgaataacattaaaagtgttatttttctttctcgatccgatcagtgaattttagctcagtagaatcccaattaataaaaaattataatttttgaatcatcagtttccaatttcaaggccaaaacaaactgtaggtagagatagagttatataatggtttattgaattaaaaatgcattctcaatggtgtaaaaaacttccaggagttatttggaa

SEQ ID NO: 50797 - DNA, 730 bp, Ricinus communis
  Intron number 1 from transcript 29816.m000675 (locus 29816 .t000012) derived from phytozome v7.0 (chr-ID 29816; pos 1 26545 to 127274 reverse strand)
gagagtttgaagaaccttatagcattagctttcaggtatgtttatcattaccatcaatcattattatttttatcattatcgttattattttcactttctgtacttaaggttctaaattaggacatttctatgttttcatgattaagtttgattaagttaaattttatagtggaaatgactaagttattaatgatgctttactattattataactaacaaatagtaataatccttctaaactaaatctgtgatctacagtagtatcatcttgtcaggataaagattcacagaacataaacttctgggatgtgtgcgcctgcgcggtttttcttttttcttttttggttgtataaagctcctttcttcttgctttatacaataattagttgttttatttttgaaactgaagggacctttgccggtgattctgatatagatttctggatttctcccctaattcctaatatgtttaatctgattgtgctttcaaaaagtttctaccttttcttatcttgggcctcttgtcattttattaaaagtatgacttccatagacatatatcaatttgccaaatacaacaatgtaagatttagctaaagtttgcttgcttgcttgaaaattgtaatgtcttgctgtatgctatggttacctgttcagttgtcaacttcttaacatcactcatttgaattgggcagacagattctttgcactctggctctatatcatttgg

SEQ ID NO: 50798 - DNA, 557 bp, Ricinus communis
  Intron number 1 from transcript 30128.m008948 (locus 30128 .t000409) derived from phytozome v7.0 (chr-ID 30128; pos 1 826196 to 1826752 reverse strand)
ctcctctctgtaagttagaactctctctgtttctctttaatccatttgtacggttatttgatgtaatctctctggtttcatattttatttagttctgtatttctatgtatacgctgctgttatggatctgtatttagatctggatctgattgctgactttgccacttttgctatgtttttcttattgatttcaaagttttagatagtgatttatattgatttgttcgtgtttgctgcagatctattgtgcatgatttgttttagaaaaaaatatacaaatctattaattaatttgttaactgtgttttaatccattattaaatgaaaaaggtttttttctttttagaaaaaaagaaaagaaaaggaaaaacgctaatggaaagatagattgatattttcttaccttttaaatgataacacctttggcttttctttgtcattttttttgtcaaaatgaatcctctagatctcacctgtatagcatgttaaaggatttgaagatttatatcttctaaatatttctgattttgtgttctggatgcagctaagacaagaag

SEQ ID NO: 50799 - DNA, 670 bp, Ricinus communis
  Intron number 1 from transcript 30091.m000229 (locus 30091 .t000008) derived from phytozome v7.0 (chr-ID 30091; pos 1 07602 to 108271)
tcgctgccttccctactgcttgtgctcttgaagttagccttttatcctcctctccttgtttgttacatacaattactttgaacttttaatccacaattggtgtgggatcttgacattggtttagttaattgttcttgaaatttaattatttcaaagaaaaaaaaaagtagactaaaaaagctatggaattttttggttacgaattaccactgatgtgaagacaggggtttgaatattttcttttctttatttttatttatttaattcgtgtggaattttcggcatgataatgttgttgacattatataatttcttcctcaagagaatcaaatagtgtaaaaggaattgggtgtctattctgcttccaatttcaaggatcaactatgttataaaaaaaagtggctcaaaaagattttacttacatatatatcatgaaaaagataaatgtttcgttagcattttaaagttagtcaaggtgcttgcatactagtttgaaagcctaaagaacaaataaaattgcattaacaactctgagcagtattttttccaccttgactatacttgcttttgtttttattttctgcattatactttcatgacaattatatagctgcggtatttgaatcagttgtacccgggctttaacaggtgcatacagcttcgttgattc

SEQ ID NO: 50800 - DNA, 719 bp, Ricinus communis
  Intron number 1 from transcript 30086.m000215 (locus 30086 .t000012) derived from phytozome v7.0 (chr-ID 30086; pos 1 83462 to 184180 reverse strand)
aacgatttgctcacggtaacctgatttccctttttctttgctttgtgaagtcaactgttttctctctcagaatttttagtttagtttgtgggttgtatttgtatatgcggattggtgactgtagtttagagtatgttacttgagatcatcaaaagtttatttcttaattatgggttttcattttagtttagtgcttcatttgtttcttgaatttggtttatttggagctggcttagttctgcatgcttacagtttaattttaattcctgttttttattttccctgtagggattttatttgaattcaaccttgtgaatgatgaaaaggaatttgaattggcatgtattcacttggagactaagttaaagaaaaaaagaaaagaaactgtagtatagttctcaagttaattctttaatttagaaggattatgagtctgaggccagtgtttgttgtattcgtttcttacaaatacaactcctacagcaccaagaaaacgcctcatttcctagttatgaagactttgtgttggatttttttattaattaatgaaattttgtttccttttaaagataatacttctgtttgaagcattgagagtgattgtgactttttttatcatggaaatttgattgttctgtcaagctgttctattacctactattgagttggggatttatttcctgttaacgtgttccattcacaggattcatttgttggtg

SEQ ID NO: 50801 - DNA, 397 bp, Ricinus communis
  Intron number 1 from transcript 30076.m004445 (locus 30076 .t000009) derived from phytozome v7.0 (chr-ID 30076; pos 5 2379 to 52775)
ttaaggaaaagaagctcaaatctacctccaatttggtaattctatctttgtatctctcttttctttattctcaatttgctctcaattcaaagattattgctttctttgcatttgcaatttttattagccattgggttggctgacaattcgccctttcctaagcttagccctatttattctcttttttaagtagctatcttcttttgcacatttatacatgcaatcacactgtaattctgtattaatctttttttatccgttacacgcatctaaattataaaacttcagttttctttgaatatgctttcttttttatcaaccgaatagagacaaaaaggacgtttatttatttcttctttcatgtagttgatcacaaaagaagaagggttggtgctat

SEQ ID NO: 50802 - DNA, 698 bp, Ricinus communis
  Intron number 1 from transcript 30131.m007142 (locus 30131 .t000293) derived from phytozome v7.0 (chr-ID 30131; pos 1 807498 to 1808195 reverse strand)
gaatcatcttctcaatatgtaagcttgagtttcttttttttttttttttattcgtttctttaatatcggcaatctttttgttttgaaatacttagcttcagtttagtccaatcaatcaatgagttttcttccattcttttggcgttgcattaatggcctattgagatgaagtttttttgcacagcagtttaagactttttccttaaatttttatgtttatatgtttcaaacatcatctaagatttaataattgacatgagtgtgattctttgagttctaataggtaatttctcaattaatgaagaatcatacaatgtagctatgaatattgttaaaatgatagctgtataattgatgactgttcttctttcaaacattgaggtggtagtgtatgacagaaacaacagaatgagattgcatcaatcaaatattataatgttattctattagctgtagaaaaattattaacatagattttctttttcaaaattttactcataagaaaggcagtcaaccacataaaaaagaactatctcaagttattacctagaatgaaaactttctcatcttttttgtgcatctttaaatttttatcctgtaattgtcattatattccgtctttgattttaccaagttcctaattcactttactctgaattgtagaaatttactgttcctcagagattcttcactcattt

SEQ ID NO: 50803 - DNA, 617 bp, Ricinus communis
  Intron number 4 from transcript 29866.m000606 (locus 29866 .t000001) derived from phytozome v7.0 (chr-ID 29866; pos 1 4125 to 14741 reverse strand)
ctccatttagtgatttttgtgctgagtggatagaggtatgcgttaatggagttacttggggatgcacaagttctaaatgaagaagctggtagaattatcacatagatcacccactttatttttgaaatttcttgattctgtatcagttaaagagaactatctttctttttcaaataagcctatcatgaatcacacaaaaatgaggaaaagacgcaaggaaaataaaaaagattagacgtgtttaagaacagtctaccaggtcgtggcacactcagtgaatctgcttgtacctcggaagcatgatatgctaatatgcgactcatcgtcaacaagaattctttatcattactgctcgaaatgctgtagtgaaaatatatcaaagcctataaattttggagaatcatgtgctttccgaattgtcaaaagttgtttgacttgtgatttaataatgacattttgaatctactttttatgtttatttactttttcagctaaccatgcatgcccaaacccatatgaacataatcacatccatagtattgtcttgatcagaactaaattcatttattcatatccttgtaggttatagatttatcagataggctttataattatct

SEQ ID NO: 50804 - DNA, 639 bp, Ricinus communis
  Intron number 1 from transcript 29983.m003264 (locus 29983 .t000163) derived from phytozome v7.0 (chr-ID 29983; pos 8 84395 to 885033 reverse strand)
agtcccgccgtcgtcgctgcccttgctgctcaccggtatattttcttccttttctaattttcttttttttttttgttttatgaaaacaaaaggaatcgagtaatgttgcgatttttttttttattgaagtaatttagtttgaagggtttgggacattaaatcaaatcaaaaaagtatttcttttacgctcttgtattcgagggactgtctattaaaataaggatgttcagacgtatgaaatttggaaagaaaaattgaactttttgtgatgtgttaatttaaaagtttacctctttttagaattgaattacttgtttgttgggaagttttacaatcagttaaaagactcatcaatccaattatttcgcgatgatactagtgcaattacatttaaccattactagataataatttcataaaatagaggatttagcacttcaacttaagtggtttctaagcgtcaattaatctaatttgtataaattttttctgattgataaaaaaaacaacaaagtagataggtggatatattaatttttcccatttatttgtttgtttctcaattattctgcttgtgctggtttatatatgtgcctgtgatgttgtcaatgactaccaggtataagggtgtgattgtgg

SEQ ID NO: 50805 - DNA, 1005 bp, Ricinus communis
  Intron number 1 from transcript 30128.m008836 (locus 30128 .t000297) derived from phytozome v7.0 (chr-ID 30128; pos 1 283517 to 1284521)
tggacaccaatttcatttgggtgagtcgggattgtatttcaattttgaatttttttggtaaagttgaaacctttttgctctggattgaaatattgagatctgggtatgatatgggtgttgtttaattgcatttgacttggtgatgaaaatgagtttgtgatttggttttttagtgattagatataatttgacaagtttgattaaataaagaagaatcagtttttgtttcataaatgtaatggagataaatgttgctattccaagatagtttatgcatgttagctgtgttggatttggagaatttcagatgccagccttgaatatgtagttgaaggaggaggtggagtaagaattgggaatgaattagcgtgattaagttttagaaattagtatgtcattgaatctcgcccattttgctaaggttgttcaccattcaaatctaactgtggtcctcaatattgttatatagataacagttacaatccatcaatacttgagcttgcttgtgaaagaatttcatattgaacactgtcctcctgaatttagtattgtaaagtgctattccgctcttgactgatgctcaaagcacaatgtggattatcaatgatttatatcagtaatgtgagagcgtgaacttaaatgttaaaatgcataataaagagtaatgtgagagcatgaacttaaatgttaaaatgcataatatgtaaacagcatcaagcatatgaattctgatttcgatgtatttggcagtccttattaatatcagatacctcctagagtagaccacagctatggttttttcccttctcaaaaaagtagtagctggttctgctaattttggtcttttttcttcttttcttgacgatactggttcaattaggttatgtctattaatcattgacctttttagtgaaggaatacctgtattatttcctggcactgaatatctgtttgtcatgattattttcagattgcatcggttccgcatttaatataaagggggca

SEQ ID NO: 50806 - DNA, 230 bp, Ricinus communis
  Intron number 1 from transcript 29889.m003259 (locus 29889 .t000025) derived from phytozome v7.0 (chr-ID 29889; pos 1 01473 to 101702 reverse strand)
actattacagaatcgctgataatctccttagacaggttttcttttcttgcttaattgctttgtttattgtttctaataatcttttattacttaatgtggtgaattttgatttagttacgaaatgctgtttaataatggaggttgaaagttttttttttttgaataatttaattctaaaattttgatgatgcacaggcgaatatacacagagaggagaagaatatagtaga

SEQ ID NO: 50807 - DNA, 865 bp, Ricinus communis
  Intron number 1 from transcript 30078.m002318 (locus 30078 .t000111) derived from phytozome v7.0 (chr-ID 30078; pos 7 00357 to 701221 reverse strand)
gtatcggccctgagatcgccgagtccgtcaaacaggttcctctctctctctctctctctccgactctggttttgcttctcattttcaatttctagctgcttactgactatagtctcttaaattttaggtgtagtatttataatcatattactatattataaacaatcggaaattttgtttagtgtgcatgcgttacggttgtagtcttcattttctttagtttgctgtcttatgcgtcttgattcggtttttagatgtaaaaacttttgtttattataataataataattattatactataaagtgagtcaaatcttaatggtcaatttgcaatcatgattgctaagttctatattatggaaacgtaaatgtagccattttctcaatgcaatcttagtttctctgtatgccttcagattagattattctcgtgtacatgctaaatgtgttctggtgttttgattttaattttgtaacatgcatgtttgctaataattaggttaagatagtaatttttgtgaatatcttcttcgtaatatgtagtttcgactggatgattagtggtagatatagctcaatcaatcaggttagctgtgccatgactaacaattgttgattgctatggttttcttgttgtagctacttaatttaaggttaagatagatgtttaaataaagcttgtgtttttctttccatggggaatgtgacattgtaaaatgtccctctctagcaataattttagaaagtctttctatagttgtaaatggtacttgtttttctgtatcacatgtaatttgtgcagtaatttataactttttcaatcaccacaggtttttaaagaagctgaggtgccaattgagtggga

SEQ ID NO: 50808 - DNA, 411 bp, Ricinus communis
  Intron number 1 from transcript 30131.m007073 (locus 30131 .t000224) derived from phytozome v7.0 (chr-ID 30131; pos 1 328253 to 1328663 reverse strand)
cgcggtgagtttttctttcctttttgttttttaacagactaactgcatgcttacattagttgtttaaactgtggaataactgttttctaaaatcttgtgctttttcaaaacaaaccaaaaaaagatggaaagaaaaagacttgaattgtttcgtgctttgtatttaatctttcttttccttttccccctttttttgggggtttgtgtgagggctcaaatttactcaggcatttttttctctcctttttgttgttgaattttcatttatagcagtaaatcaattgcacagtttcagaaagaaaaaaatgttcttctgtctgtaaacttgtttaattgcggtctaatgagatgagctattgaaacatgattctactttgcttctttactgctcctacgcagagcatttcttga

SEQ ID NO: 50809 - DNA, 794 bp, Ricinus communis
  Intron number 2 from transcript 29884.m000185 (locus 29884 .t000006) derived from phytozome v7.0 (chr-ID 29884; pos 5 7792 to 58585 reverse strand)
cggtattatgttgttctactattcttttatctatatatgtcacttgtttcagtttgcaattagcgttggtttgtgctattccctttaagcagctgtaagaaccctacaatgcttgaaagcataacctttctcttcttttgctgtttggtgataacataagggctcttcaacaacttgtttcgtaagaatacagcagttttcacctgataatttcctctcttttttcctctgaatgatgtaatagctggatcctattcctagtgttgaacagagtattgctaccctgctacagataatcacttagattttgatgtcataagttacgtatataatatacattgttgtgatcttaatatttgcaagcaatttgctgaatgatgatcacttgcaatctcttcaaatgagtgacaagtcattgcttttctttttttaaatttgtaaaatgtgatcttttcatgttgaaaagaaaggcgaaaggttgtctatgatatgacttggataattttctcgtcttcattgaagtgctaatccatgattatttgattatcatgctggccaagaaccaagcctgataagatgtggtgtgtagtcatgagtgcaaaatacccagtctaataagcactaattcggcagagtgttttcataggtatatttgatatggtcaacacgtttggtagtctggctaatttatgtttgcatggtttggttgtaaacatttgaaggctattttgtaattttgctttccatccattgtaaaaggtatcaaggagtctgacactggcttagctgcaccc

SEQ ID NO: 50810 - DNA, 432 bp, Ricinus communis
  Intron number 1 from transcript 29948.m000696 (locus 29948 .t000010) derived from phytozome v7.0 (chr-ID 29948; pos 1 05958 to 106389 reverse strand)
ttacactatcaaaggaaccaccaaagttgttcgacgtaattattcttactcattactctttctcttgcttttattcaaagctcaatctctatttctgtttttgttggttttcttttggggctttgtcaatgtcaaacctacgaatatctctctttaaatatatatatatatatatatatgaagtagttttcccgaaaatcgttccctttctacattggtttcctagaaccctttttcttttcttttttaaattggtttcatttgattatccttttagtgttttagaaccatccagtttttacctttttctgcttttaaatgatacccaaaatcttgtttatatgatgccttttgagataaaatatccatcaagttttgggctggtttgttttgatgtctttctttgtatttgcagctggtgattgtgttttg

SEQ ID NO: 50811 - DNA, 673 bp, Ricinus communis
  Intron number 1 from transcript 30005.m001281 (locus 30005 .t000047) derived from phytozome v7.0 (chr-ID 30005; pos 3 07578 to 308250)
tagtactgttgtggggtctgctacttccagtgtgttactttttctttttatttcaaaatttttatttcaaaatttttctttttcttgttgattggtgtatgtttatgtcaatcagtatgtgctctactttaatggcaccgcgaacttaagaagaaaaagaggaaagaacgttaataagttaacttgtatgaatgcttgatttaggagaaattgaattgcttaatgcatcgctgaggtcgtattcgagctgtgtgcatactgaatcaggttgaatgggttggtgaatttgacctgaacatttaagatgctctatgtaatagattcagtcatgcaagatggctccaatatgattaaacaaaataaataaatctaacctttgttacccttgatgtgtattcaccctcataattttctctcaccttgtctggaataagtcatgtgcgagatttcggttcaattgaaattcaattctccaaaatcatgtcacttttgatatgatttcattttttcaaaaagaaattctagtatacatgagctttccaaacacgagaattaactaagtagtattcaattagactttccaattacacctcttaaggatacatgttgaagcttttgtctgtgtgggtttttggcagaggacaacttctttgggcctgtatccacgagtttc

SEQ ID NO: 50812 - DNA, 867 bp, Ricinus communis
  Intron number 1 from transcript 29917.m001967 (locus 29917 .t000036) derived from phytozome v7.0 (chr-ID 29917; pos 2 17046 to 217912)
ttcacgttattcaaagccgcgttttttcacttcctgtaagtacccttttctctctctaacctcatatatttttctttcttgtataaaaatttagaaagcttgtcggttcgttcttattcttttctctttcggattcatgattgtgccttttagatgatctagaggtaagatgagtttttgttttttcttttggaaaaaaagaaagtgattcgaaaagggttttgattttgattttgggtttttttattttctgattctgaagatctatttgtttattttattttgtgttattcctgtttgatgattaggcaagaacggaaaagtgagctgcttttgtctgattaagagtttgatatctgtatcaatacacagcacaagtagtacagattgtatgattagttgaaattaagcattttgctttgttgggttttaattggtagtcaggaattggtttttcagctttgtgggttttgtttgtgcttttctttttatttctctctttctttctttgctcatttgcttttgctaattgttacttagttccgttgcgatttggaaactatttagttaggcattttatgactcccatgttatgctaaaaccatttggattgatgatctagatgtgagaggaggcatatatatatacatatatatatccctgtttaatgtaacctcttcggaggatggtctgaagtctgtcccgtcagtgtctatatattatgcttgtagactttgagattctgtgtgctgtgttttggataggtgcaaatgcaattagcaatatttgtctaataatggtatcatcttcttgtatttttattgctttacagcgaagaaggctagtgctctttgcgcgtgtcccgtt

SEQ ID NO: 50813 - DNA, 570 bp, Ricinus communis
  Intron number 1 from transcript 29967.m000088 (locus 29967 .t000004) derived from phytozome v7.0 (chr-ID 29967; pos 3 2593 to 33162 reverse strand)
ctcttataacttctcacatccaaacacaccataaggtttattcatatctctgtctgtctcttctctttctctctcttacgcgggtttctttgattactgtagttgacatgtttttctttttttctttaaattaattttctttcgtggtgaaatctaactttagagtccacagatcatgtagatctgttgtttgtgttgctgggtattttttgtttagcatttttttccattaaagctttaagctttattgtgagaagtctggttgtgttttatttttctttttgctgtttttgttggttgttttcctgttaaaatttatgtgctgtcttacaaataaagtcaaattaagtgataatatactttttatttgccagtaatatgtgtttttaaagtctgtttaaccagggtaaaaaacattagattcaagacatgaatgtaattgtatgttatcatattgtcctctgcaatacacaagaatgcctgtattaatagttctatattttctttgtcactattgttattctctttcttactattaagttttgtgtctttactatggtttaggaggag

SEQ ID NO: 50814 - DNA, 407 bp, Ricinus communis
  Intron number 1 from transcript 30146.m003617 (locus 30146 .t000194) derived from phytozome v7.0 (chr-ID 30146; pos 1 308362 to 1308768)
aggtttagactagccttggccgagaaagggttaaagtatgagtctatagaagaagatcttctgaaaaacaaaagccctcttataaaaatggatactgtcaacaagaaactaccagttttgattcacaatggcagatccatatatatgcgagttaatgattatagttctatatatatatattgatgaggtctggaaccataaacctccattgctgccttctcatccttaccaacgaactcatgccaagttctgtgttgactatatttgacaatagggtccgttataatttttgaacatgcatgaaaaggggcaacaagaggttttctttctacctatttttaactcgggcaatttgttttcttctttaatttgtttattatgttgcgtctcctcatcatagaggacgg

SEQ ID NO: 50815 - DNA, 805 bp, Ricinus communis
  Intron number 1 from transcript 29864.m001443 (locus 29864 .t000019) derived from phytozome v7.0 (chr-ID 29864; pos 2 83281 to 284085)
agtttgttcgctctactgaatctaatattgagagggtattcattctttagttttccttgcttattgttcttctggattttcatatataataattctttatgatgctttctttattcttttgggggaattgttaggctactttaatccacaggtgccattgacaaagaggaaagaagaagctactttaatgataggctaaaaatatgtggtggagaaattttataaactttggagaaagaatatgacaagttgaaaacaaaatactagtttattcaagttaggcatgcaaaacattccaaaggatttttttttttttataaacagccatcatgatagcaattagaaaattaaaaagaagttcttgactgcaaaatagaaatgcatttgaacatagtgagcaggaatggccaagcaagctaatgggactttgatcaaatagtcaagattaaggttctgagagtagaagattttaggttctatttccactcattttgagagttggggtttcttttctttctttttaatattatttgttgagagtttgagtaccacttactttcctatgtaactggactatgtctacttgtagattaggatatagaaaaaaaaaagttgccaagcacctgcatatacacaatcaagattctaatttctcctcttctccatcagtagtacattaatactacattctcatatatgtttgttttagtatttttgtggatgatcaaatcttacaatgatcttcctttcttgttaattgttgggtgcagataatttttgacttccgcttcttggcactgctggc

SEQ ID NO: 50816 - DNA, 643 bp, Ricinus communis
  Intron number 1 from transcript 29912.m005361 (locus 29912 .t000087) derived from phytozome v7.0 (chr-ID 29912; pos 8 79259 to 879901)
gcagcgtttgggctcaaagctctacctttcctcaggtgtctaacttcattccaattttttaaacaaccccatatcttctttttgctcctgtgcgtttattattacatgggttctctcgcttaggttgtgatctaactctttctctctcttttttttcctgatttattggtttttttgcttttgattttgtttagagcttttttgtttaaaaaaaagaataataattagctgattgggtttgctggaaaggaactgatcttggtcaactgtttgttgatttactgggtttcttcttgttgttgtgatctgattacttgatgatttggtttttattttactgggattattgaatgaataacctatccatacgatttttttgtcggtgtgctaattactattgagttgattgatggcttgtttggttgatctctggattagttgattcattcttgctcaattaaagaattatcagtgaatgaaatcattaattttgtccatggctgcagatggacactcgtaatcacatctttgaacattatgcatgttggtcttttattttttaattaaataaaatggatgaagtgatgcttattcttttatttaatgtttgatttagttcaagcctgaagaaatcactgccatt

SEQ ID NO: 50817 - DNA, 777 bp, Ricinus communis
  Intron number 3 from transcript 30128.m008784 (locus 30128 .t000245) derived from phytozome v7.0 (chr-ID 30128; pos 1 028046 to 1028822)
aataaggtacccgctttgctcgactgccactgtgctagcttagttgattgctagaatttaccgtatatacatctttgttttgttaagcaccttcatgtactcagcacttaacttcagggaacagcagcctatttggatgccatttccttcttctgggatcatgttgtttaagtgctagatccttaattggttgattatcaggggtgagattttagatgtgtaaaagctggctgtgactgattgggttagcaccaagtctgacacgaatagagcagtttccttaaagttgaccgagtctgtacagctcctactctctccctctctgtctgtctgtctgtctctctctctctctctctatctctctctctctctctctctctctagcacaaacacatgcaaggggagagacagtcagaggagtttcagactgcatgtcattggtttcatatcgctagtagtaatactgattggcctcaatgtagatccatgttattggtttcctaggctgaagaggaaactaatactccaatctatttataacttgcttgtattttggcattaattgtgggctattgctttgttgataaagtgccaagcctttgttcaggtcaagggtttccttttctcctttcttaagctttattctttcattatttgttctaaaactttttgagagaatttgttcagttaagttgtctctagttaacattcttatttcttcacatggttatgattttcccaggcatatttatccctaccagagggaacagcttctgt

SEQ ID NO: 50818 - DNA, 648 bp, Ricinus communis
  Intron number 2 from transcript 29863.m001112 (locus 29863 .t000072) derived from phytozome v7.0 (chr-ID 29863; pos 4 78557 to 479204 reverse strand)
ggtatctcaatttcaccaaatctggattcatgtaagtcccatttcgattcttatatgtatgtgttgcattaagtggtggcaagacttagaatttctgggcttgttggtgagttttaattgtacttcttatgttgctgctacaattgacgtcttactttcagtgaccgaggaagtatgtaaatggggttcaaaattcaattcaagaggagtttattttttattaaatttttttcagcgatctttaaataggtgaaattttatgacaaaatgagtttcaagatagaagcaagcattttctttttcctgaatctttgatgctcaacgttcctttctgttttgatggctcgccagtcatcaacaaaatcaaaaagctcttgaactgatttttacagcttcctattctagtacttatcatcatctaattcacagtttaacataaaacattttcaatatatccatgagagcttgtttgcttgcgtgcataatgtctgccattttaaggaatgaatgaatacatatagtgtgtattctctctaatggaaagttagtgtcaacattgaactcgtagaaatggttctctgcattcttcaataattgatcattttattgatatgtagggagcattccaagagtttcaaaccagaagat

SEQ ID NO: 50819 - DNA, 510 bp, Ricinus communis
  Intron number 2 from transcript 29915.m000493 (locus 29915 .t000029) derived from phytozome v7.0 (chr-ID 29915; pos 2 47386 to 247895 reverse strand)
attacgactggtacatattcaccttattgattattagatattgaaatttcagatctatgtcatattcttcttttccattgtattacatgtatatttggtgtgtcatttaatttttactttttactccaaatatctaaacttgaattcaaatacattccttgtatattatgtctactgaagaagaagaagaggcagctatagttctttttcacaattcactatttttgctttcgacaattagcctaagatcttttagatgaagctaatttggaaattaaccaaaaaaacaaaagaaaagaaatatctgttgaagacgccctgtgatcatctctagttttcgcatttagtgtatggtagatttaaaagattgtcgagtccctaagttactgtatttatgtcatttaggcttcttgcttacgtaaaattagtattcatttatctttcccccctatttacaattggttcatgcccttaggcttcttactcctcctggaactcctctttttccaa

SEQ ID NO: 50820 - DNA, 407 bp, Ricinus communis
  Intron number 1 from transcript 29915.m000493 (locus 29915 .t000029) derived from phytozome v7.0 (chr-ID 29915; pos 2 47987 to 248393 reverse strand)
aatcttccggtattttctttttgtttcttaatgtggaggacgacgttgtcattttgatggaatgaaacacccgaaatttctttctgtcttcattgatgtattgattttgtcggctttcagttaggcaattttctctgatcaatccaaaagagagagagatagatggatagatttattagaaactgacaatgatgttcatacagttcacatttgtatttattaatcaaacgatgccgttttagtcacaaaatcaaactcatattgtctctgtcttggtcgcatcgacttcctttcggtttgcgattttaatcgagtctctcgtattgtctatcctttattattattactattgtgcaattttctgaacctgagttgttgtggattaatgtgatgtgattgcagtatca

SEQ ID NO: 50821 - DNA, 841 bp, Ricinus communis
  Intron number 1 from transcript 29929.m004629 (locus 29929 .t000132) derived from phytozome v7.0 (chr-ID 29929; pos 7 63155 to 763995)
tgtctgcaagggaggctttggtaatattttcctttttttagaaaaaaaatattattttgactgccctctttctgctatattatactgaaacctttagttgtttcagaagattaatatcccagagaattgtaaatctgcttaatcttagtctatcatgaatagggttttgtcaaatggaaaaagaaaaaagattatgctctttcaatatggtagtgttgcatgtaacaggaacaagtgcaggtaaacatttggctactatatagttcatgatattaatttcttatccttaattgtatcttcatataattatgaaaatttgttctgtagaaatatatatatatatatgagtttttttttttttttccttttcctgctaagtatcacattgggatttcaataataaaaaaataaaataaaaacacaaaacctccaaatcatgtataactgttttggcttaaatcaaataaattcttgaatatatttcagcgtgtacaaatattgcattgtttataaaaaattctaataattttttgttttaattcagcaccataactgaatactagtgtattaagttaatagacaatctttcagttctttcagatattgtgcaataagattttacaaattcatttgcagtcaaaaggaatttgtttttaagcaaattttttactaatttggggggttccattacaatttaatttggtcagaatttaggaattatgtatattgttagtacatagtatgtgtatcattctaaattatccgtcctccaaaatggatttttttttttattgctgtggctgcaggagctaagtagtcagcaggagtatttgaagcttaa

SEQ ID NO: 50822 - DNA, 713 bp, Ricinus communis
  Intron number 2 from transcript 29912.m005307 (locus 29912 .t000033) derived from phytozome v7.0 (chr-ID 29912; pos 2 08716 to 209428)
gtgttcgacttgtctctcaaactgaacccgaagcagtaagtttgttctcttttcttaaagaaatgatctaatacttttgcaattccgtttaaagaaaggtattaaaagctgaatttctttgatttttctttagtttgagttaggtatttactggatcgctatatatgaatttgtacggactcttttttgcattgtgtatatactgagtatcattaaatactaattctcggaaatgtgacgtgctcttgttgctcaatgtcctctacaagccacttgctttaaatacgtatcaacaatttttttaatttgttgcacaaatgaaggttcctagtatttatagctctcctgtataacctatcatcttcatatagaatcttcagagccacagccacttacctgacaaagccttactgagaatgcaaatctcaattcctattcaaagttgtatacacctcccattactatattgtgctatccaaacttttcagttttattctgcgcggattcataggaattacaagtagcatggctaatataaggggctttcaattataaaaagaaaaaaggaaaggaaatgccctaagattttatacttttaattaagggatattattaattactgtgtgatttcttgccttacaaaatcttagcttgttttctttgcatgcctgtctgcagccacccccaattaagccattggacaaccaattaag

SEQ ID NO: 50823 - DNA, 982 bp, Ricinus communis
  Intron number 2 from transcript 29907.m000624 (locus 29907 .t000003) derived from phytozome v7.0 (chr-ID 29907; pos 4 5198 to 46179 reverse strand)
gatcacgtaaggacactactaacacatttcttgtttgcttttctgcttctacatttttgacaattgatgtttatattcagctaaaagttgtaatctttgaaaggcttaaagtcccataatcatatcccttcttagtgaagatgtggaaatgaatgctatggctacctggatgataaccgcctcgtgaaattttgcaaaactccaggatagggatggaagtggtttttaacataatgtatgctttggtttcgtgtctgatgataagaattggtcatgagctcttatagctttccagtatgcctaaccagaatttccacacattttttgttacctaagcctgcgagaaaaattgtgcagttggaaaataatggacatatttatgactttgtatttagactgaattgtctatatcgtggtggttgcactatccgagaagagaaaccaacataagttaatgtcatactcaactcatgatgcttgttaaacaactattggatattgttaatttgtccggtaaacagacgtattctatcttttttatcagagtttgggcaagcccaccttgcagtttatagttttatgcctggataacagcctcttgtattactatcaatttagatgctaactttcactagacagcaataggcacctcagtgtttgtttatttggagagacacgagcttgtccctgtttgtcactctagagagaaaaataaaaaaatttgtttcatttccactttttatcaaaatggtatttcattggctgttttctaatttacgattgcagggctcaaatctgcaatcctaaccaatatattgaagaaaatgaaagctgactagcaataaaaaattgtctactgaaagtcatctcccaaaaatacatgctcacatgcacaaacatatatatcaacataaattcatgcatatgttatatctttgtgcctcatatttgttgctttttcatcgcatggcatggcaggttc

SEQ ID NO: 50824 - DNA, 575 bp, Ricinus communis
  Intron number 1 from transcript 29929.m004747 (locus 29929 .t000250) derived from phytozome v7.0 (chr-ID 29929; pos 1 422314 to 1422888)
gctaatgtttgttttactctctctttctttattatcttcttttggttttgcatattcacttcacaagtttgagtttttttttttttttttttgaaattttggggaaaatgagaatggttattactgattataatttttggattaatgtttttatcgatattgcttgtggctttcttggttcttaaatctttcctgacattttatatggtaattggctaattgctagttgaattttatatgattttgttcatgtcactttgaattgtagcaattgtaagctttccaatcatgaataaaataaaaagaattcacttgaattcaattcctgctcttttggactttccagacacgctcattagtatgtattccagcttattagtcatttagggtattgcagtgagttctgttgatactatcgttttaatttggttagtggactagttagttcttcagcaatctgcttgctgtcttcctctttgtttggttgcaaatttgtagtttcttctaccatcatgttattgactgttttttatttgccaggtttatctttggtacccactcagtcttgtaactgg

SEQ ID NO: 50825 - DNA, 715 bp, Ricinus communis
  Intron number 2 from transcript 29929.m004747 (locus 29929 .t000250) derived from phytozome v7.0 (chr-ID 29929; pos 1 422957 to 1423671)
cacttgatagaaatcttgcagcagttatttacagagtaagtacttcttggaattaaatatgatatgagtatgaattgtgatttagcttgtgtaagaaagaacctattttctagctttatgagaaattttcccttttcaattaactcactgtttctttcttcaactatgacttgtgattgccaggggttgtgttctcctctttgattctctgtactttgtaagaaaatactatatttgggattttttcaacattctctgtttactctttatgcctcattgaacaagctgcttgtagatatgtgatgagagctaagactgattctctatacactcaaaatacaagatctttaagtttaaacgtactgcagaacaacctatacctcctaaactggattcaaatcatcttcttgttcactcaaaagacataggcacacacagaaagaaccacaccgtgcttgtgatatcattcatgtcattggtggttagccttgggcctgtcctgccattttatgtgtttctttccggaaatagataactacctcaaattctcatttggagagtaaagaaaaagaagaagctaatttgaattagaatttattttcgctttgattgttagcttcaatatgtttctagtggtgcctgccatatagacataatgatagtttggataatggttcctatttattattgactgctggtgtgtaatttaaatagg

SEQ ID NO: 50826 - DNA, 850 bp, Ricinus communis
  Intron number 1 from transcript 30073.m002244 (locus 30073 .t000054) derived from phytozome v7.0 (chr-ID 30073; pos 3 91916 to 392765)
atcttgaacagccctccttttcttctcttggaaaggttaattccttttctttttttttccctttcattgctgtttggtttctgggaagtgagagagagagagagagagaaaatttgtattgaatatgcttttagtttcgctaactaaacactaataagaatgataattactttgtaagtgaggatagtattctttttacttggttaattttcttgttctcttgtactgatatttgctgcaagaaaccaaaaagagagcaatggttctattttgtttcatttcttggatgcaatttggtacccgagacaatgtagggaagagaaagaagaaaaagaagtaacttttatcttattattattattgttacttttgttgaagttaactcagaactgttttcctgtcaaagttcgttaattgttctctttttccactttttcttcaatgatgaatgcttttttgctttcagtgctcacattgatgctgaaatttttcatattgatattttagtaattgattcttaatcttttctttttctttttttttttttattattgacgtgtgggaaaaggaatcatttttgtatgtgtgatctacaatctctaatgacctgaggaaacaaaacttaccacatgacttcaaattcatctattggcttctaattatctagaacaaaaacaagataagaaatgatctccgcgtgtgtgtatatattttcatgcttttgtgtaaccaaataaagaatttttttttttttttttttttcgttttgatacttttgaggttacttcttgttgaggtgatgttaaatttattcgtgtttactaggttggaaagtcttcaggtgaaattg

SEQ ID NO: 50827 - DNA, 663 bp, Ricinus communis
  Intron number 2 from transcript 30073.m002244 (locus 30073 .t000054) derived from phytozome v7.0 (chr-ID 30073; pos 3 92804 to 393466)
tcagagtactactctattcttgctgcagtgctcccgtaagtatttattttgttttatttatggatttttccaaatttctgatctatgaaagaatcaaggaaaatacctgtgtttgttatggttgtattgccaaatgctggttagtcatgttcattttttggtgacatagggaaatgtgaactgtggtaacgttaataagtgcagaaaactctggcagtattaaaaatgttatttattctcattttaatttattgtcttgagtcaaattaatatgaattatccaacatgtcttgttgtttatgaagttgaagtatcttgtgttgtatcaaattgggattttcttagctaatactgataagatgttataaattgtgcgcatctcatataaaatgaaattaaggagtactatctaactttgccaatttattcaagtgcttaacaaactattcagacttcaggttcaacatcgtatttgattctatgcaccatcatcataccagccggtgctgcacccaagtcctgagccatgattttcctattcctttcacaaataacattggttcttaaaacttgatgcatcataaaatacacttttcatgcttaaagagtgcctcctttttgatttcagatttctattcccagcccttggaggactattatacg

SEQ ID NO: 50828 - DNA, 502 bp, Ricinus communis
  Intron number 2 from transcript 30000.m000377 (locus 30000 .t000007) derived from phytozome v7.0 (chr-ID 30000; pos 6 1878 to 62379 reverse strand)
gttcgattttgttgctccaagctcattgtttccaggttactttaccagcgctaactaattcgtgttcaataatagtttaatgaaatgaattcctgcataatcatgtcagttttctttaagtcatattctttatgaactcaaaaaatgatggggtttaatttactaattggaatttgatttagtcgattctaatgtttggaatgctcttagctactagaattcaattctttcaacttagaaaaatcaagtcaatttgaaagaaatgaactcaaataaaggtcttgcacctttattccagacaaagccttcatcactttcaaaatgctttttaaaataaaaaattattgagaatatctgattctatcaactatatgtcttccagacataaaaaccgactgtaaatcaaattcaatttttgcatttatacttcccttaacaaactcattattgtttggttctcctattgctatattgagattgcatatgatacagagaagaagcc

SEQ ID NO: 50829 - DNA, 809 bp, Ricinus communis
  Intron number 3 from transcript 29933.m001455 (locus 29933 .t000077) derived from phytozome v7.0 (chr-ID 29933; pos 4 10699 to 411507 reverse strand)
agacagaaatttaatattagggtgagcatatctttgtcattgtcttcaattcattgttgattgtatggatatttttattataaaagatgtctgaagtcgtatttctacatatctaactgctttacagtttctttcagtagtaaaagatttactttttgtttgatgaaattactgtgtttgcacatatgtttaactgctttttgttccacggtcatgtatctgtgtttttctcctctagtatctggattttgcctaaactcattgctgtagtctgtttttggttatttctccttttaattatctgaaattcagtgttaaaatgtagccataattcttgattgtttctagtttcttttgtcctgtcaagctcgctgctctatgttttggcattagtattggaatgattatgtccttggtttaagttttcatcccaagtactaagtaaaacatttcttgttttatttctgcctctcaagaatgtagcatctcttctattttataatagtgcaaatatggaaaggcgtcaagctttgtcaagtatgtttatttagttgatttaactgcagctttgtcaagtatctctttttgttgctgtggtcttttattttttcacttttggggcttcaagtgggtggcagtttgacttttctgtttgtgtattttcagtactctatttgactctgattaagcccttacagtgtctggatgtttcttttgatcatttgcaaacatctgttgcagttttagtactaataataccacctatgttttctacaatgtcttaattcagggaagtgatagttccttgg

SEQ ID NO: 50830 - DNA, 704 bp, Ricinus communis
  Intron number 2 from transcript 30028.m000254 (locus 30028 .t000012) derived from phytozome v7.0 (chr-ID 30028; pos 1 47447 to 148150 reverse strand)
aagctgaggttccttctgacgacgttgttggtaaagttctttctttttctttttcttgtggtttgaagatttaaagtgaaattagaatgggaaattatttgatgagatgtcttggctcccatgtgtcttttaattgcctggatccttattttgtttatatctgttgactaacatatgaattttgagctttgagttttaagtcacttgtagaatttattgatcattctgttgtgacttcattgcactgaaaggataaatattgatatatgcaaattcacctctacctaagcaagtatgatttgtgattactgaaccattagcaatctggatattttgtcctatgaaacatttcccggtagtcttcactttcaaagaatgtgtggaaaatttgaatttcatatacgttatggaggtatagaaggaaatatatcatacttggtagctctatacttttacattgcatctttgcataggccttcattccttgggtccattttatgtatatgcgaacgtgggacggttactttacttcattttacactatagtcaagttgtttcccttagtaatcaagttttccaactctctcactcgtctttcatgcgtatatgcagttttatgtaatttgatttcaagttttctaatggtgttctgtttttatgttatttcagaggttgtcctgagccctccatttgtatttcttcct

SEQ ID NO: 50831 - DNA, 123 bp, Ricinus communis
  Intron number 2 from transcript 29929.m004625 (locus 29929 .t000128) derived from phytozome v7.0 (chr-ID 29929; pos 7 22364 to 722486)
gaaaaattggtaattgttctcagttttaatcatccttagtcaaattagaattaatctttgtttttttaattttatttttgttattgattgttcgggcttttttttcttcctgaatttaggtaa

SEQ ID NO: 50832 - DNA, 565 bp, Ricinus communis
  Intron number 1 from transcript 30128.m008979 (locus 30128 .t000440) derived from phytozome v7.0 (chr-ID 30128; pos 1 977126 to 1977690 reverse strand)
actgggtttctggattctttgtagattgcattgtagtattttgaccatcccaattatatttggtttcggtcttcctttttttttttcaaaataattcatttcttatgagactctttacttagctatatccagcattcttgctttccaaggtgtatatgttattactgactagctcttgtaaataagaagacaacaacttgctgtcatgaacattcagaacttagttttgggaatgtatgtgaataggaattactcaatcttaatttcatttaaattgatggacaggtttgtgggtgatcatttctgtaggaatagaaatagtttgagcaaagaaactgatgatacaaatatgaagcatatagaggaaggatatagtcagactaggagaatcaaacattgaaatatctgattatagacttacagtggctcatatttatggcattgcaacaacagccttgatgctttttctctttttctgtctcatgttttttattaaacgtgcaagtttgatcacttgcattattgtgcaggtccaagaattacagttcctaggagccttcggtgg

SEQ ID NO: 50833 - DNA, 598 bp, Ricinus communis
  Intron number 1 from transcript 29912.m005324 (locus 29912 .t000050) derived from phytozome v7.0 (chr-ID 29912; pos 3 25098 to 325695)
caggatccattcactacccaagaagcactcctgaggtacaaatcagttccctgatgattgatggctatttttcccatttttgtcttccatatatctgaaattcttataaactcagtattttcatacatttgttttgtcttaaccctcccttttaaaaaaaaaaaaaaaaagtttttggtaaatgttttgtaagagtttgaaacctttggttaaagtaataagttaatatttttacttttggtatcaagacaacaaatggtcgtccagagttttatgaatattttgtgttctgtttgttgggtaaatttgcattagttctggccagtcctaaagagtcttgaaaaatcttcatatcattggctaatatgcagacagcatgtggactgcctctgagcagcaatgacgtcaaacgttcctacactttagatcacataacaagacaaaactgaaaataaattggaaaccattaaaaaaaccaagactgtaatattattgaaacttttggacttttatttcttctgtatataatttggaacatacttgtgtaaattgagctaatattttgattctttttgtatggtttttgtggtgggcacag

SEQ ID NO: 50834 - DNA, 741 bp, Ricinus communis
  Intron number 1 from transcript 30116.m000385 (locus 30116 .t000016) derived from phytozome v7.0 (chr-ID 30116; pos 1 90699 to 191439)
gcttctctcctgaatactggccgctcttatatcaggtaaatacactgacgttttgattggatctgttgtttgcattgatttaataattttctatgttatgttcaaatgtttctttttctaaatatcgaaattaagattattttgagaaaaaaaagatgagatctgattaggcttggcctcattaaatggaatctttatgtttccagtgaaatttatttagacagtcttttggaaagtctagaaatgcaagtctttcatttcaattcaatcgaactatatttaaaaagcacaatgatattttgtctttttcaaagaaaattgacatgattttgcgagaaattgagttcttgcatataatttattccaaacaaggccttataaagaaatgaaagattcatgaattattgtttgctttttctcactagcagaaaaatcgacactgtaaattaggaaacttgagcttgagatgctttgccagagattagattggctttttcacaagtaacgttgccgaaagtttttgcttgattattatcctttccaccaaaatgtaaattcaagtaatgagaagattgggtatgtcagggcgtttgatactcatctggtccctgaatttgatagaacgtttgttccttgtaatatgtcatttttggatgaagaaaaatttatattgttgatattttgcacttctattcgtttggagcaggttcaaggatattacattctggaggactaaagctg

SEQ ID NO: 50835 - DNA, 843 bp, Ricinus communis
  Intron number 1 from transcript 29818.m000393 (locus 29818 .t000005) derived from phytozome v7.0 (chr-ID 29818; pos 2 2485 to 23327)
tactatactttcagggagccatatacaggaaagatgttcgtactcttcctcttttatatatatgatctgttaattatttattttttatttattgcaaggaaagccaattccccggtttagttgcttcagagttttctttttcatatatttcaaaatatagaattagggttttatgtggcaaatttttcctatcttgtttttgcttgatgtcatgtgcctcatttatacttgttgtcatctagagaaccaagttaaagaatggcttagtttgatgaaattgatgtgtaaacacaatagacacagggcataataaaacaatatcaatctcctagattacacccattattttataggtgaaatttggttttctgacacttttttgattttggagaaactaactagctatgcttgggcataatatatttgttagctattctgaagggccttttgtgctgaggtgtaacaacggctagctggagctgatactagattgctgaatgtttttcacctctttttttttgttctttcaaaaaacagaacaactgatggcttttgcgttacattcagtagattctgaatgcaattggccatccaaccaaagccattcaatgctttcccttttcttcattctgtgaataatcattgcctcactttaggttggaagtactgggtttacatatgattctttactttggggctttctaattaaacttaccctttcactcagtgaataatcttttacctcactttaggttggaagtactgggtttacatatgattctttacttttgggctttctgattgttagggtggctttgctcggcaagaactattttaccttct

SEQ ID NO: 50836 - DNA, 495 bp, Ricinus communis
  Intron number 2 from transcript 30073.m002248 (locus 30073 .t000058) derived from phytozome v7.0 (chr-ID 30073; pos 4 19729 to 420223)
tatctgctgaccgccttatacttcttgacactcaggttttttctcttttttgcctttttaccttttcttgcttctaatatattcacatgagatggtttggtgaccccatttaaagtcttccatttaatgaagatatggatcaaattcaaagccaagagaaatttttatagatagttaagcataattgctgatgagtttgtgagatgacgatttcttatactttataaccaaaatctagccggctcaagtagcatagcctaccatctataacttctctgtgggagactggttttatgttaacgcatatcctgcataaataacaacaatctatcaaagtgtaatgatatttgaggatatttctgctgtttttctttttctctcttctcctcaactctgtttcctgtaatttcttcgttctctttctcttaactctttgatgttttgtttttattctcttttttccagcctgtttttagctcttctatcttagctgag

SEQ ID NO: 50837 - DNA, 837 bp, Ricinus communis
  Intron number 1 from transcript 30128.m008655 (locus 30128 .t000116) derived from phytozome v7.0 (chr-ID 30128; pos 3 48402 to 349238)
ctgacgataagaaggtagtattagtatttctaattattatttattattaatttgggatgtggggtgttgggaagattattgggtagtcagcatttttctgtgtcttgttttcactttgtgtacttaattgcatgtttaatttctttaacttattgcttcttttgctaatggattattctttgacattgctaagatctatgacacaacgagcattaactaaactctatttgttcggttttataaatataaacttctcttataatgtcatttaaattagttcatcagattgaattaatacgcctgcatgctcaggaattataaacttgtattgtgctatcatctttgtttaaatctttaacttttgcagtcaatttgggcccccttctacaaggaaatgacaggcaatattaccagttgttttgtttctttttttttttttttacagatcagaataaagaattggccttgattgcatgtgcttggctttgttgagttgcttcaccttgtctgaatttgtagttctgcctgttttaagctatagttagatgataaatagtatgttcttgattcagttgaaagcttcttgtttaaagttggaaactttttggaattttagatcaagtattgctgcaagatagccttcatttatttgctggggcaggcttctttctccagtgctgtgcttttttctcaaaaaaattaatctgcttcctatatatatcataagccctttttgaggatgtcattactgttaacatggttaaagatcctaaggttcttgttttggatgtctgttttgcagcattgttctggcgtaaattgcctggctgtattaaa

SEQ ID NO: 50838 - DNA, 738 bp, Ricinus communis
  Intron number 1 from transcript 30143.m001221 (locus 30143 .t000060) derived from phytozome v7.0 (chr-ID 30143; pos 4 68422 to 469159 reverse strand)
gaagtggacatactttagctgctgttgttcctcttgtaatatttgtgcctattggacttcttatttatgtttgtattgttttgtatgcttttactcgataaattgttttttaattgttagaatatttgatttgttgaaatataattgtgggatcttgcagattgttagatcccaatgataaatttgatgtattttctagcgttgtatgctacataaggatcctattaatgcgatgatgttaaaaatgaaagtgactttttcgtttctttttatttattttcgtatttttaaatgtatatatagtgagttatttatttgtttttgtttttaattttatcataattgggctttgggtttgaattctagatttcatagtctgaaagcgactagtgctgctgagctaaaaccattaagatggatagaattttaatagcatttgggtgggagttagaacatggttgcacttatatgaatgttgggaaattattagtggtttagtggaaagaagaaaaagtgatattttaatgtgggagttggtttttgaagtatgatagattagtgggttatactaggaaaattcgtaagtggggttatgcggtgtggcagagaagagggtaggatatgttaattgtaattgtgattaatggatgaaaaagtttgtgtttaataactgatattaattagtaactggtgcttgatgatggatggaaattctgtgacaatgtaatggattaggag

SEQ ID NO: 50839 - DNA, 1013 bp, Ricinus communis
  Intron number 3 from transcript 29907.m000654 (locus 29907 .t000033) derived from phytozome v7.0 (chr-ID 29907; pos 3 05823 to 306835)
ttggcagagtttcaaattcaggtacgttattggcaaaaacttggcatgttgactgcctgctgccattgcttgaatattatggtggtgttgttactttggatgaacttgatattactgggaggcttcttgtatattactgaattaaaaggtgcatgttgcttttctgttctattactgtggttcgatcaatttgtcatgtttagatttaagggaaatgataccaattgccttacgagaatgttgagttaacaaccaattgtaattagttgaattggaacaaccaattgtaattagttgaattggtacatcaacatgtaattgcatatggggtaatgagtttgataattagactgaagagaaaggataaaaaagaaagctaactcagtccttctgcagctaaatataatgtgtttatatcaatagctttgcttgaagcatttattttacaccaactctgttggaaagagcccaattgctttatacaaagagttgaatcatttttatagagtgaaacttcttataaatatgtttagcacaagtcgaaaagcagcgtgtgaagctgtgcctagtgctttagtcattggcgaagaagtatgggatgtatagcattgcattcctctttctataacatacttgttaactagattaatctgttctccagttacttggttgccatatagtgtttctttcttctgaatagtatcatgtagataaagggcgcgatttctttcagcataataaaaggcaccctcctttttgaaattttgatattttaggaaaatggttttgtcaaatgtggctttagtgattttatcttgtttctggaaaaaaataattaaaaaattctgaatggaatttctactccaaatgtctataaggattaatttcttaatatttccaagtatgatcagttcttttcaaattcatgtacttcagttgctctactttcatgatggcccctatctggatcttcattttgcttttatggtttggccatacaggttttcaaccaa

SEQ ID NO: 50840 - DNA, 683 bp, Ricinus communis
  Intron number 1 from transcript 29838.m001681 (locus 29838 .t000051) derived from phytozome v7.0 (chr-ID 29838; pos 3 27855 to 328537)
cataaaggtattgaaaagaaattaaattactgtaaactacaaaatcttaaaattcaagataaaatctgatgtgaaattatagacacatagaattgggtgattttgaaagtaaggtatacaaagaacaaaattcatataaaagaacatatatacataatgtatgcttatatatgagacacgagatgcagcatatgatttattttaagtttattctagtacatctcatgaaaatagaaattcatgagttcaaattcaaacataatccttcaaagtactaccttaaattaaaccaaccgtcatgcttttatagctactacctcaaatgtctagcgaaccacaactacatttgacaactttgtagtagagttagatgtgaaggtaaactaaccaaaaacagtaaaagagaaattgaaataaaattccccaactacataacctaccaaatggaacagtaattctccataatcctcgttccatagcctactatataatcccaacaccagaccatgatttctcatccaaaacaataaaggaaacagaataacaaaacactctttttgctctctacattcacaacatatccacttcctctctttttttttttccctcttccttttatgattatggcttctttcaagtgcttcttcatgttagctttcttcattgctttatcattcataagc

SEQ ID NO: 50841 - DNA, 539 bp, Ricinus communis
  Intron number 1 from transcript 29904.m002923 (locus 29904 .t000037) derived from phytozome v7.0 (chr-ID 29904; pos 2 83338 to 283876)
taaatctcaagcaaaagctcaattcttttattcaagtaggtcttttttcttttaaatttctgatgtttatgttgtctattaagttgggctttgcttgattgctgtgatgttaggagggaaagaaattatgattgttgaagattttgaattttcttgaattagggtttttttggttactattgtatgtgcaatgtatgttcttaatgggctgctatcgaggattaacctttgtttctttctatgattaaagaatgataaattgatggaagcattgtataaatacagctcttatctaaaaatgaaagatggcgaagcttaagttgaatgataagtgaaaatatttagcttccgactctaattcaaagattaaatatagaggttatgatttctatggttttctgcaaatatcttggatgtcttacctggtttttcttctggtatcttcttttatgaatttgttggaccttaattgattagcccgcgggttagcgggcggcaacatggtgggcaggtcaaagctgagtcattaagtcgattga

SEQ ID NO: 50842 - DNA, 613 bp, Ricinus communis
  Intron number 1 from transcript 29907.m000661 (locus 29907 .t000040) derived from phytozome v7.0 (chr-ID 29907; pos 3 40246 to 340858)
gggagtttcagtctttctcataggtaatgttagtacccacatgcttaaaattaccatttcttttttgctttctttgtatatgattatatggttagttgcttctttagttctatgatttgctttgggctgtgctattttgattccaaaacagttgctcctttttttttaaagaaaataaaaaaattatttttttttatcatcagcaatacccttctgtcgaagagttaattttcttttctaatattaaatcttggacatagagggattgtttactcaatataaatgtaaaatttatgttaagtctattgttctctgagaaagggaaaatgccaacagcaacagcttaagatgttcttgattcctttctgttatgatactatcgctattttgcttgtcagttctacaaaatactcgggcagtgtaattttgattaagctgtcctaattgattcagatgcagtattcatatgactgcaagggaggattctatctggtaatttctttggcatagaaagtttgaggtttgatgaaattggattactatttaataactgtttattttactttttctttttccagaattgttctggcacccttaaccaggcagagatcat

SEQ ID NO: 50843 - DNA, 768 bp, Ricinus communis
  Intron number 1 from transcript 29854.m001104 (locus 29854 .t000015) derived from phytozome v7.0 (chr-ID 29854; pos 4 06901 to 407668)
acaccctccttatttatttaccaggtgaaacctttgtcattttcatcattttctctacccaaatgcgttcttttattttattattcttttcttattttattttttttctttcattgaaagcctcaacgaataatatactataaattacttaagatgtattttattagataaaaccatcgataaaaataattcattttaattcattttctttgatatgaaaatataaattttttaaaatggttgataaattaaaaatttaagtcatgatatactttgagaaaaaattatatgaatgaatgataatctattttaaaaattaattacttttaagacgatcaatcttttaggtttaaactgtgaaaaagaaagagagaacgatagaattggtatgagattatatattatatcaagataatatattgtcttgtacaaatgaatttatttaaaaatttatttattttattaaaatatttaattaaattattattaattttataaatttaattatattaaaaattctagatgaattttattttattaaaaaatatatatataaaattgtaaataaattctgtaaattttatgaaatttattttaactagacaatagcaatcttattggataacaataaaaataaataaataaaaatataaaacaaaagtaaaaaaaaacttatagaatgtgctgatgaaattgagatggcacaaagttaaacacaatcaaacatctacaggtttcaagaaggaacaactaaaggttcaagtaaca

SEQ ID NO: 50844 - DNA, 747 bp, Ricinus communis
  Intron number 1 from transcript 30146.m003488 (locus 30146 .t000065) derived from phytozome v7.0 (chr-ID 30146; pos 4 13925 to 414671)
aggtgagcataataatggtgctatagcttgtatttatttttagtttgtagtcagtcacttgagtatctcccggctcacttgggagctttttgattagcttcctcatgttagttatctaccttgcacttctaatttcttgctgcaacctatgcataataagcatggtctcattcctttaccagcttaggcaatgcttgcatgagaaacattgtcatttggtgacatttgaatattattgcacttgttcttaacctgaaaacttgctttttaaaatattttttttttgataagccagtctattcaagatactctataacacatattgagagcatgcttactgaaattttattttttcttttttgtacgatctgtgcaatccaaattggtgctaagactttttcctatgcttcgtgctaaggttttctctgggttgagaaaatcttcttgctccttggttcaagtagttatctatgttgatcactacctcatattgatttagaactgaggttaatctttgtgaaggttattcattgcaaaaataatggactggatgaacgactatataatattattatttgcagtttgtgtaggccttgatagatgtaatgatttagatcagtgtttctcttgagctccataatgatttagatcagtgtttctcttgggctccaaaatgatttagatcagtgtttctcttgggctccaatgataatgatattttcctgctttcagcttggagtatttgaa

SEQ ID NO: 50845 - DNA, 1007 bp, Ricinus communis
  Intron number 3 from transcript 29917.m002015 (locus 29917 .t000084) derived from phytozome v7.0 (chr-ID 29917; pos 5 97728 to 598734)
ggatcattcatcgcgacctaaaacctggtatgataaaagtcacaatttatggtcattggactctttaagtttattaagttggaacgagtgcacttgttcaaagttttgtaagaccaacttaacagtccaactacagtttggtggacattggttctatatggaattcgagattctaggatcctaatgttgcactggcttatagcatagaaaaactggagtatcacctaaccagggcttgttcaaagactattctttaattttgctttctataagctgtacagaaatgtgtgcattgtatacttttgtcctataccataattatattgttaagaaaaatgttctgacattcatcctttctaataactgtcattcaaaaagtcaactcttgtgactttccactcatgtacaatttttgttgtctccttctcacatccaaatagctttttaatgattgggctgacagatgacataatttacagcacctgtttcttttattagtttgtaggtaaacattttggtaatctagttataagttgtttctgctatgattatttccagtaagaggcatactggaaggcattatacagatattgactctcggaaatttaatcttttctaaaaatgctgccgtaaactaggtggagtggaggaaaatgatccatagaaccaagtagcttaggattaaaacttagtttgttaagtaatttacaatatcagtcattgtcaattggtaatctaattgtgataggtgatcaaaattgttggaatttcttaaagtggtctcttctgtgtgatgtagatatgattttggagagggctggaatatttgagttaaaaattgtaactttctttgttgcttaaaaactgttaggcagctagacagttatactgtggaaatatgtgtaggtacttttcgttggaattaagtagtaagcacaatcctgacaaattcctttcctgccccttttacagagaacttgatcttgactgccgaccataaaacagtt

SEQ ID NO: 50846 - DNA, 1000 bp, Ricinus communis
  Intron number 1 from transcript 30146.m003545 (locus 30146 .t000122) derived from phytozome v7.0 (chr-ID 30146; pos 9 14588 to 915587)
tgaatccgattttggtgctcttggtgttccttggtgtaagtctttattattaatgtgtgtctgtgtttatgtttgtgggtgatttagatctgggttctggagaagattggatctttatgtttatatgttgtagaatccttatgggttgcattatatttagcatttgttagcttagaatccttattaatacaaactgatgtccaagttagctgttttattaaaaagattagatctttatgtttgatatgattggtctctattattttattttatttactactagcaggaacatgtcttaggtgcgtcatattattaggaattagaaactgtaggttaagaaacggaattgtggttctgaaagtagaggagctttcactatttgttcatatccagtatttctttagcttagttttgatacaaactgtgtccaaattgtctattgaaatattcttagctgctggcttattaacattgagtttccagttaattgtgcaagttcttgcttttcatcttgcttcccattttcgtggtttggagacttttttttaaaaggaaaaagtgggttttaacttaatgcaacagtcattcttttcagtgagaaagagagggatggagaattgggggggtggggttgggggggttgtatatgaataaatgggaactggtgtttttcctcctactagactggtgacagaatcgaaaactacttgctaactaccattttagcatatggttaaaaagtttgaaatattctggatttctgcttattacttctgaacagtgtgcatattatatggtgtagcaccttattcaacatgtgctaagcttatgattctctagacttcttatgctctgtgtttacttaacaagtcatgtttgtgatcttctatatggaattcagataatgctcttttttagtgattttaaaattgtgatttatatatgctgttataatatgctcccatttaattgttgtccttggcaaaaggcagatcgaaac

SEQ ID NO: 50847 - DNA, 515 bp, Ricinus communis
  Intron number 1 from transcript 29929.m004535 (locus 29929 .t000038) derived from phytozome v7.0 (chr-ID 29929; pos 2 25022 to 225536 reverse strand)
aaagcattggaggaagaatcaggtaaaatgaacatgtgaaagtccaccttttttttttttttttttttctacttttgtttatttattctttgttatatatatatatatatatataataagagattcatgcagttgagtttcaattttattagttagccatagaatcttcccttacatttcctttcgagatagcattgttaattgaaaataaaggaaatataaaattaaaatgaaagtgcatgtgatagttttagagtaagaaatatataatgctcaaaatagttgcatatctgataattattagtagttttgcaatttgatagaatgattctaaatctattatcacaattttaaattttaagctacagagctttttgtttttcaaaaaaatagttgggaaagcagcatatatctaaagctgatggaatttcacaatcaaatcattaatctaatggtgattgagatttttttgacttgttcacaatctagcaattgatgtatgttgtaatccagag

SEQ ID NO: 50848 - DNA, 601 bp, Ricinus communis
  Intron number 2 from transcript 29904.m002914 (locus 29904 .t000028) derived from phytozome v7.0 (chr-ID 29904; pos 1 96497 to 197097)
ggtggtggtggtgttttaagagaccattgtggcaggtggatcagtcatgagtggcttttctttgaatattggatgttgtttaattatggctgctcaactgtggggttttaaaagtgtagaaaaggtccaagttgcagtacagtagtggttcaggggtaattagcccagctggtaccaatccttggaactatatatcaatttgataccaagactttaatttgaatcgatttgatgacaaacgtacgtaaaactatttcaatttagtcctaacggtcaaattccgacaactggtggtgacgtggcatatgctgagtaggaattttctgggtgttttgcccgctcagcatgtgccacgtcaattaatgacgatgactcaccaaatccccaattcccctaatttctcctaatttcccctaattaaaccctaattctatttccctctcttttattcccctcttctctcttattcccctctcttcttccctgctcctcttccctctcttcaatgtctctttcaataacttatctgggccattgccattaagtaacaatttgatgaaatgcagcagtgttcttggaaatccttatctacggccttgcc

SEQ ID NO: 50849 - DNA, 532 bp, Ricinus communis
  Intron number 1 from transcript 30099.m001635 (locus 30099 .t000014) derived from phytozome v7.0 (chr-ID 30099; pos 7 8915 to 79446 reverse strand)
aataccaatcagtggccattaacagcactcaagtggttatgattttttttctaaagatgatttgcatatttaaacatgtattctagctcaataagggatataatccttttgccagtttgagttttaggcttcatattcttgtttgatgcggttctatgatacgtttaattgtgaactagaatgaggtcaagcagaaaacataagctaacaagtaactataattggcagaaatttaggatatgtatcaaaatttagaaacaaaacagatcttagatgaattattagctcttcagtttttgacgtactcgctatctaacatagaactaatgaaaaattaattacatatcattccagaaaaagcttggatttgtgaatcaaaatgtagttaagtatcatcatgctcgagttttagaatagcttccgcttctttcaattttcttataaaaggattcttttaagtgctcttccagtgtttcctgattaatctcccttaacagaatcaacacttgctgctaggcttgattttgcagcc

SEQ ID NO: 50850 - DNA, 584 bp, Ricinus communis
  Intron number 1 from transcript 30032.m000479 (locus 30032 .t000029) derived from phytozome v7.0 (chr-ID 30032; pos 1 70258 to 170841 reverse strand)
agttcagtccttgggaacttccacgtaaatacccttctcaattagttgtttgctcccatattttgtttattttatattctctttaacttgctacatacattcttatgttttgatattagctaaattaattaatttctttattaatatacggattgagaatcaagaaagaatcctaatattctatcttgcatttctgtatttcttgcatttcgttttcatctgttaatcaattgtttaatttcagctcaagttaccttttaatatgcaaatttaacctaacttttttttctttcttgtccttttggataagcaatatattcttacaagcaaaataagtttttaaaatatttatgaaggatgttcgtcattaatttgtgtacgaagaaaaaaaaaggtggtatatgaattcatacatgactcctaccaaccaaaaatagttgaaagaaaaatcctcatacttacaattgcattatgtaacctagcaaacttatatgtttgtgccaaaatagaaattaacaatactaatattagtccgttaatttggtgcagaatactcgggaatttacaaccgtacagaccctgaa

SEQ ID NO: 50851 - DNA, 791 bp, Ricinus communis
  Intron number 1 from transcript 29983.m003124 (locus 29983 .t000023) derived from phytozome v7.0 (chr-ID 29983; pos 1 17391 to 118181)
ctgctcgtcagggtaaaagctttatcttgaaccaggttaattccttttctttcttcaaaacatattcctcaatcaacattttgggtttcttattcatgcaaaaggctacttggttatgtactttctttttggctgtttgggtaatttggaggtttactagtcctgccaattatgtgttttttggaagtctttgattgctcttgagtacaggaatgttcattgaaagtttggagttattgtgttttattcgtcattgtggggcaatttttttttctttttctttagtttctatctttcttgttggtgtttggggttttaaggctttctaatattgtacatttctacgttttcgtaagagaattacggagaaggtaatcttagatagtcagaagggttcggtcatgattaattcttcttttttgaatttatatattcgtgggaaatgcttcctgttaatcatcattgctttagtttaggttattgctttttaaatttctgaagcatcaattttctttaaatggcaattgcttgggtttataacagtagatagttttattgtggaatttaagcgtaagagctacagtactggtttttatcctaagtgcagcatgttattgtgacattagtagaggttaggctctgttaattaattattcaattgaatcccaattacttttctgcgcagttatcataattttgtccaaatgttgcctgaaattaaaactcaaatttgcatcttctgtgaacttgttgcagcttcttggtaggagcactggatttcaagttgggtc

SEQ ID NO: 50852 - DNA, 913 bp, Ricinus communis
  Intron number 1 from transcript 30073.m002284 (locus 30073 .t000094) derived from phytozome v7.0 (chr-ID 30073; pos 6 38909 to 639821 reverse strand)
aaacttacatttcctcctggtaaattacttccacaaacttttcttcttacttaatttaatatttaactatggggtattggatatattttactcctgacttcctctgtcttgttattatttgattaactgactgtcaaattttaggctttgcaaatgcttgatggaattagttagggtattttgtactttaattaatgtcttaggaagcttggtgtccaagctgggcttcctccaattcaatggcgccagacgtgacggtggtctggtgagatcactcagatgattaagttaggtagttcattgagagaagagagagttgttagttaaggaagtttcgttgaaagattttttaaaggtttaggttaccttcttcttctagttctgatcttttgtttatacatgtagcagggttaagtctgtcatacctattgcaatagctatttgacatgtgttctgacttttcttaagcctcattcttgtaacttggtcctaattattaattttatgctttactaagcttgggttcctaaagaacttcattaagagtcttcatagttacttatattcgttgtaaggatatttcagttattctgttatgactctttataaacgtatttttaaaaaaataaaattgtccaaagcaatttttatttagactaattcttattgattatgaccagaaattaataaatttcatattaatggatttggattattgtttgtttaggattctgacgtctatgccatcatgtaagaatgtaatcaatatcatcatttcattaaatacatgatgcgatggatcatagtcatgtaataacttctccaatctcctaaatgaactgtgtcattcatttgttaaattgatgtatatatatatgttgatggtctattaggaacacccggaactggttac

SEQ ID NO: 50853 - DNA, 857 bp, Ricinus communis
  Intron number 1 from transcript 29968.m000661 (locus 29968 .t000030) derived from phytozome v7.0 (chr-ID 29968; pos 2 71976 to 272832)
gaataagagtttagcaactgctgaggataagaaaggtaactagttgtttcatatttagtttgcaattcttgcttttgttatgctttaatgaatgctgaactattagtagcttgatattgtaggaataagtttattataatttggttcttttaagaaatttatgttcttatcttgtttgctttggatgatttttccatgtgaagcttttggaaaatcaacaagtgaagatgctttctgtgttgattgtgaaattaatcatcttatgaggctgattggataactgttttattacctggggatcattatctttagattgaatctatctttctgattctaacttttaataagcattcatattcctcgacagtatctattgctttttttgtttttccaaatgtaagcgtaccatattagtgtagaaaggctaggatttatgtaactaatttctttttccttttcttttattattatttttgtttcggaagaatattgcttttccttatctttcaatcccacctttgcagaacgaaaattgtgttgctgatttgattttacgatgattgtgcatttacgcatttctttttttacccatcccccttacttcttgcataggtaggggatggccaagtagttgtgaatagcctgtatgtgcatgacttgtttccacacatttggttctgttttgcctcctgatgaaaattttatgtgctctactctgccatgttaacatcatataaaatgtaataagtcaaaagttccaaattataaaagatacacaaattatccaaactacatttcttgttcgtaaatgtctaccagaaaacattgatattctctcttcattgttatgggagcag

SEQ ID NO: 50854 - DNA, 769 bp, Ricinus communis
  Intron number 1 from transcript 29900.m001618 (locus 29900 .t000080) derived from phytozome v7.0 (chr-ID 29900; pos 5 04299 to 505067)
ttgctgttcttctcacggactaaacttcttttctggtaaatttcttattcttttttgaacttggttttctgggttatcatttgtttttggcattataattttgtctttagattgaattggagttaattttatacctcttcttggatgtttgctaatttcgttcatgaaggttagttatagttgagtaattgaatattgagatttcgacacgaagtaaatttattgcaacgttgttctaagcggttctcaaatttcaatggggattttagcaagtcttaagatgagagacagacaggtggaaggaaaagcaacagtggggattttctggtttggagtcccttaaaattaacatcatcttctgtaaattattacctgttctagatacctatcctgtctataagaaaaaaactaaaagtgatggaaggactcagaatcttgtgaacttaaatccaattatgtcgtaaggaccaaaatagcaaaagaaagaggaacttaaattttgatccatagatccttatagcacctggaaatttaagaaaaactataaggatcagataagactcttgacgtaatctaatcagcaagctgagtttagttttctttgcattcaagccacagtgcttgagataaataaggtaatactttttatttagttttggcatgtaattcaaatgtatgccgcatgtatgcatatattgctcaactgtgcttgagataatagaaatttattgcaggtgtaaatagtaattggcgacatcaagacttcaga

SEQ ID NO: 50855 - DNA, 984 bp, Ricinus communis
  Intron number 3 from transcript 29983.m003306 (locus 29983 .t000205) derived from phytozome v7.0 (chr-ID 29983; pos 1 070668 to 1071651)
ccctaaagatcacgaggttcgttactatttgatatcatattgtgtttgcatgatctggatgattaatttctaccacaaaatcaacatgttgatatctattgctattttcctgccatatactatatgcaatgcgccaacagttatcatgaatattgaattacgtgtgccactttcagttcacgtaagatagactggggtcaattaacatttattttagcactaatttcttttgaattttctgttctataattatgtattattttgttttattttatatggaagataatatgagaggatgagcttatataatggtaaggttactctacttagatatgcaggtcatgggttagtttcatggaagtaaccacttttcaaagtggaggaagtcctgccctgaccccagtgtggtagcgacatgcacttggaaggctctattatgaaatgcatattatattaatcataatcatcatatttttttatcattcaatattcatatgatcatattaattatgccttagttctcaaaaactcttgctggtccgtttgcttctgttattgtgataaatttttaaacttctttttgctgaccacttagtactgtaattacaaggtccagggcacttcaaattttacaataaaaaaggtaccttgggagcgtaattaaatatatttctgccacaagtaaggcatgagaaaagcaagcaatggtatggttcaatagtctaaaagggaatggtgatgatttaagcatcaataagctgtgctaaactcttctaatttggaatatgccagcttgtgaaaatttttgcttctattgactgttgttcagccccaatttctttcaggaatttatgtgtatgcttatggtgtgcttgtttttatttttattgtttataatattattttattttcttatagtgcattaagaattttcatactgtctgtccaccaggttggcatctcgacactccagggcagccacta

SEQ ID NO: 50856 - DNA, 716 bp, Ricinus communis
  Intron number 1 from transcript 30146.m003481 (locus 30146 .t000058) derived from phytozome v7.0 (chr-ID 30146; pos 3 74675 to 375390 reverse strand)
tcaacttctaccgtccttacgacggtataatattctttacatttcttgggttttgtttcttcattaagttggtttgattagcttgttttctctgtttcttcattaaaaacaaccatttcttgtagcagctgttcttttacattacataattgttcgtataatttcctactctacaagaaaatgggtttcgttaattgcttaagaaatggagatttcttgagtttttcttttacgtgttaatgtgtttctttatttcgttctttgagttcaggttactttgttttcttaattgatttgcatttgatggggctttttgtatattttttttttgaaaaggaaaaaaagaaagggtgagatattggagctctgttcctctcgtttcttgacttctatcgacttctctgtttcttgtctttttggtttcttttccctctttttttttgtttttgttttttcttataattctttttcggtatcgtgaattggctaacatattatactctgttttcttttctcactaaatatttcctggtattatttgaactactctttacccagtggctcgttgtattagcctttagatcttggtttcattgtagtcttttggaagtgtactagttttacattgattctaatggcaatgtgtttcctgtttttcttctcccccatttttatgatcagcatataaagcactgtctaacctgaatcacacatac

SEQ ID NO: 50857 - DNA, 128 bp, Ricinus communis
  Intron number 2 from transcript 30131.m007172 (locus 30131 .t000323) derived from phytozome v7.0 (chr-ID 30131; pos 2 024087 to 2024214 reverse strand)
ctgcagaggattgtaagtgatctctctttctctcttttatacaaatcaaaaaggttgcaactgattaataatgtttcttcatatatttataatgtttttcttttttctttgacaacagttgtgctgga

SEQ ID NO: 50858 - DNA, 447 bp, Ricinus communis
  Intron number 4 from transcript 29912.m005347 (locus 29912 .t000073) derived from phytozome v7.0 (chr-ID 29912; pos 7 89076 to 789522)
tgaagattggctgcacttgactgctcttattcgtagtatattgcttgatgctttctacccagtaaaagctaattaatgctcttattcatggtagtatattgctcgatgctttctacccagtaaaagctaattaaaaatatatatctttttttcggttctttctttcttctcttggtttgtataatcaaagaatattcatattcaatcaaaagatccttatctctactaaaagtaaaactaacttttcccaccaaaccttctaggtagtgggtcctaccctaattgataacagcaaaatcccttggtgcagaaaaatccatttaataatgatagttgtgcaagttgtagatactgataaggtaaacaaaaaaaagtaactaaattggtcattttgttttttttggggtcacagatcttggaaaggttcttcttctccctcaatttgga

SEQ ID NO: 50859 - DNA, 650 bp, Ricinus communis
  Intron number 1 from transcript 29842.m003666 (locus 29842 .t000163) derived from phytozome v7.0 (chr-ID 29842; pos 8 11377 to 812026)
tcctacaagttcaggaacaagaccagaaacaaaaggtaaagtttatttgtactgtttttgaggttatctaatgcttgataatggctggaagttataaggatcgattcatttatggtttatttaaggttcaggaacaattttagaagaagttgacattattgatttattttaatacccagtttttctacaaaatcaaaattcatccgtcttcgaataaaaccgcagtaccgcgtaacaacttctttttttttaataacaaaacattaccttgtaacttcagtattttcttatttgttagttttacagattattattataagtaaatacttttttgtttttgtttttgagctgttagaaaacttcaagctgttaaagaatataaatattggagagttccttagtgtcactgtatagctaattttaaatattttgataacattcagactcgagtgcaacttttattgataactttccacactttgcttgtttctttgaattgttggattatgccatcgactagagaattccgtgactgactgcaataaaagatgttctctttcctttctacagtgcaaatgcaatatattgaagtacatgttttattcatttatgcaggaaaaagcggcttatcaactgttacaatcgtagcc

SEQ ID NO: 50860 - DNA, 877 bp, Ricinus communis
  Intron number 1 from transcript 29877.m000482 (locus 29877 .t000020) derived from phytozome v7.0 (chr-ID 29877; pos 1 68124 to 169000 reverse strand)
cacctcagcagcttgacacagaagacggttcaaaggtactgctctgatgataattgccaatacctatatattatttctttttcagcttcatgctctttaaagtgtaacatcttggagcatttcttaattaagtacaatcaatttactttcaaacaattcactatgcaacagaatgcacgaaccttagatattattctcccttttgttgttttcttcctggaactcatgtttttattcaactggaaaaatcaaatacaaagacaagttggcaagaaatgcagatgatatgttgcggcaatattttctactggtttgcgtcagaaaccatagcatttcctggtagcctaagtggaagaaggttttgtgaggaggcttcttgatgcagtttatattcctccccatagtcatagcttgaatcctatccaaacctgttatggggagaaagttgtcttcccatcaaccactctgactagtagtagaaagtttaaaaagtcaattatatgttttgcagggtcattttagcaaaaaattttctattctacttctcaatattatctagcttgtggccttgtacaggcatattggtataatgattgaagtaaagtatgttggttgtgaaaaccaaggattctacacttattcaatggagaaaccaactaaaccaggtcctgatttgtatttgcatatccaagtttgattgggaaaggcatctaccataagaattatgataacaaatatgtttccagtttatggtacttcttttgtatggatatcatacttgatgttgttatgttcattttatattatttataagttatatttatggtattcctctactgcaggctgcacttggcaatattacagaagcagccagttt

SEQ ID NO: 50861 - DNA, 1026 bp, Ricinus communis
  Intron number 1 from transcript 29983.m003164 (locus 29983 .t000063) derived from phytozome v7.0 (chr-ID 29983; pos 3 62602 to 363627 reverse strand)
ccttgaaggagcgagctaggtcgtggggggacgaggtaagtgtttggtttggagctttcaatgttattatgctttgggtgtgtttaattctggattactttgttggttttgatgagaacttgtaatcaaattgtagagttggattaagaaaaaatgcagatttgattggttaagtttgttgtttattgtgtaaagtttggatttttggccattattcagtaacaatcatgtttagtttgttgaaattcagttgcacttttcaaataaaattttggtggggtttgatagcgacttgtgagaggttgtatgagaattaaggaaatgaaattgggcaatggcaagtgtgttagctcgttagtgctttgtgcagttaagttacaagttaccgagttcctatttcggggaaaagaagtcaaaagaaactagctaatgctgcaagaacgagatttatagaggacatttgctgtgagcaggctttattgcactgtatatttcgagttgcctggattaaacaagtgcaggaaaatttttatttcacagttatcttattcagatttctaagtaaacaggcactctacttttataacattgttgttggctgctccacagttaatgagcacaaagaccaatcatatttctaagagtgctagagcgatgactatattacgtgaattatatatttaaacatcacttgatattagaaaggtctaagctggttttagagctctaaccaacaatgtcctgtgttgaaatagatgttactctcaaagactgtgattcaatttactcatattttattcacatgcacttttgtacatgtcggtatctgaattttaatgtggaatggagcttatgatctaggtaaggacagtaacaaccgttgtagttaaaatcaaattgaagatgtggggaggaggacttgcatagtgcaacaatttttgaaatgtatattgcaccatcaatatgtttgaatctaatttttggttattgatatttgcttcttgcagtggctatttgttaaaaaag

SEQ ID NO: 50862 - DNA, 622 bp, Ricinus communis
  Intron number 2 from transcript 30024.m001706 (locus 30024 .t000023) derived from phytozome v7.0 (chr-ID 30024; pos 4 89471 to 490092)
aaacagttgggatataggaaacttgtgaggattgggtactataaatgtataacattaaattgggatgttcaaaagtccccacccccgagggaaatcttaactacactgatctgcggattagtggagagagcctttcaaaaatttatataaagctcctttgccagtaccggggaaaaggggagcttcctgattcgtctttctttttcaagaaggctcaatccatctttaatgataaaaagcaaatcttattacgcttgagctgggtaggggttggctcttggatggcaaaatttttcaagaccaagaataggaatgattattcattgaataatttcaatgctatcttcgagagtcttgagcacaatggccgcggtagccccttctttacccatttctctctttctaaaagaaaccaccgcccttgatctgggcgggatctatcagtagcggcattcttccttgacatcaatttgaatttcttttatcatcatcatcatggaattttatcccagagctacggaactaacaactctattagaaagtagaattaccaagtattacacaaattttcaagtgctctttggtagtgataccgctattaaaaaaggagattttatcaagc

SEQ ID NO: 50863 - DNA, 506 bp, Ricinus communis
  Intron number 3 from transcript 29908.m005961 (locus 29908 .t000012) derived from phytozome v7.0 (chr-ID 29908; pos 7 27697 to 728202 reverse strand)
aaggtaagaattaagtctatgtatcattttgaagtctgttgtggagtgagaaggtcttcccagtggattatattacccacttatctctaccctccacccatccccagagatttctaaaacccctatcaatgtgaggattttagtcatttgaataaattgtaaaaagagattttagggagaaagcaatcgccaggacaccaatgagatgcaaagtcagagtaataatttctttgaattcaacaggttaatctcatttacaccagatagaatacctagtctactagattgcccacttctccagttcacttatttctctcacttttcaatatattggaaccacatgaaagtagaaagagatagagaggggagggagattctagctggtttatgtaaattgcttgttttcctttcttttcttttctcctcttcttgtttctaatgtaattcccattttattctgctgaagtaattccactttcatgttctttattctaggcatcacaagc

SEQ ID NO: 50864 - DNA, 998 bp, Ricinus communis
  Intron number 1 from transcript 30130.m000274 (locus 30130 .t000007) derived from phytozome v7.0 (chr-ID 30130; pos 4 9076 to 50073 reverse strand)
gtgaggaggtcaccaaggtcttggcagtcctcaaggtattaacatattagataatttctagatttatatattgccatttctctgtatgttgtattaccttgtactgcttttcttaatttccgttttttaggttttgatgtcttgttttgatctagattgattttctgtgtatgcaattgggtagtgtttactaactttaaaaagatttctattggtttatcactttggtttggtagccaagggaatttggggagaggagaaggaaaatgtggtgggaaattgacgtttactgtattactagttgtcggttgttttaggctatatatacttggttttgatatgtcttgtcttttggatttgatgagcgattatgttcttatgttccctaaacttgtttttgcttttatatctatgttaatttggtatacaaagaaaacctaaatgtagccattttcatctgaagaaccatagttgagaggtaactggaaatggaaaattttctcttcaggttgcagtggtcggacagaacataggtttaattgcattatttcacatatcaaggatagaacagagatagagccaaattatctgtcttggttaatgtcattttatggttctattactttactgatggcagacattgttaatttgctttcatgacgaaatttgacagttttagttagtagactaatgtaataaaaatgatcttgcaatttcattttttggcactcagcagataagactcgcttttctcaataaactctttttggaagttcgacaaaatagtaaatacataaaattcaaatctcttctctgccctcatattttgttccttcaaattgctcgtactgatgtgcgctattttcatttgaattatctcattgtcaatgtcattcctctcatcatttatatgtgagatgttagacctttcttcttattatttccttgctggtttctcttgtagtgaagtactcaaatttgagtgtttgggtacaggt

SEQ ID NO: 50865 - DNA, 477 bp, Ricinus communis
  Intron number 3 from transcript 30120.m000375 (locus 30120 .t000026) derived from phytozome v7.0 (chr-ID 30120; pos 1 54998 to 155474)
cttggtattattcaagggagttctccacgtggcagttttataagatggaactcggagcgagcaccgtaggatcaaaggaaacagctgaaacgctaaataatcaaaacgaaaaaccggtttcccgctaaaaccaaaacactttaattagcgattaattaggaattagtggtgtaaccttacttaacgcttcttcaaaaaataagccaaatatatccttacgtgtcgttaaccgactgtctcatcttctccccttcctacacgtggcagcttctatttcctccaaaaccttcctggtttcttttatttttctctcctcataaaacctgaaaatccaaaacacaacacaacagcacacgaagattgtcttcatgttattgacacagaagtcatagcttgatttgttttttttatttatttctttctttttatttctttcttctttttaaagctgctgtggtagaaggaatcaatagcgga

SEQ ID NO: 50866 - DNA, 341 bp, Ricinus communis
  Intron number 2 from transcript 30128.m009019 (locus 30128 .t000480) derived from phytozome v7.0 (chr-ID 30128; pos 2 182470 to 2182810)
caagttgaaaaagatatctgagctatttcctaaatgtgagctttcttctctttaacttaatttttctaaaatctgtttgccccttacagagcatcatacattttagcacagtatagtgattgatcatattcacttaattatttccatgaaagattttgatcattcatcactgtactggttgaaatagtttaggtgattttagaagcatatttccacattattgaaaacaaacatctttttgtttcaatttatttccaaatgtcttacttttttaaattgtattgtttcttcatgtttttctattagtgcctcctccattcccaccacctttgtcagggaaa

SEQ ID NO: 50867 - DNA, 504 bp, Ricinus communis
  Intron number 1 from transcript 29950.m001138 (locus 29950 .t000022) derived from phytozome v7.0 (chr-ID 29950; pos 1 24448 to 124951)
aaccttgaaaccattaaatacgtgcaggtttcgtcttcttatcgcatttaagttatttattatttacttgaaaatggctcatcttttaatcgctactctgagcttactaatactctaatgatttgataatcatttgactgtatatggagatgtgggtttgttcttattttggttaatatcagcatgtcccctttttcaggggaaaaaaaagaagagaattggctccgattggggttcgaattcaataccattgagctaaagttgattcattttattactatttgatttaatatgatgtaggctcataatatttcgctgccttgacactatagagcatggaatatgtgtgtgtgcatttgcatgtgttagtggctccggcttaatactttcccttcatttagtattatgcaatatgaacttgattatattttacattaacatgtgatagaagctgacaatgcacttggttttctttttcttaatgcttttaggtgttcaagaacc

SEQ ID NO: 50868 - DNA, 526 bp, Ricinus communis
  Intron number 2 from transcript 30055.m001608 (locus 30055 .t000078) derived from phytozome v7.0 (chr-ID 30055; pos 4 00245 to 400770 reverse strand)
tacctggtaagatttcttttttcacagctcttttcgttgcttggatggttagtggttgtacagtgatgcaaggaataagcaaagagtgtcttgcatagctagtttctttttctttctgatgtcacagtagaattagacttcttcttgtggatattggcgttgcccatatcgtttcaagagtcttaccgttgtcaccaccagaaattcactctactagtgttatctgtctttttcaagttgaaatttagtacttttgatgatttcttttcaaacagactatagcatgcagttaatagatgaaggatcctagtgccaatcaatttttcggaatttaagattgtaaattttgtattccctgttcataggataagaagattttaattcctgaggtatccgcaagagctcttccaactgttttgaattttgacatttcttggatatccttccatctcttaaaaggatatctgcaaatggataacaaagatttctactacattcaggacctgaagttgatcgattggcagca

SEQ ID NO: 50869 - DNA, 584 bp, Ricinus communis
  Intron number 1 from transcript 30055.m001608 (locus 30055 .t000078) derived from phytozome v7.0 (chr-ID 30055; pos 4 00910 to 401493 reverse strand)
acactcctgccactctcggtatgtccttttcttcaatttaagatgttttagttcaattaacttggaagaatcactaattactggcttgaggctctctgtggttcttgatgattattactcttttcggaaactaatcaacgcaccactaaaattttccagtattagtttaggaaacttgtaggacatatgactggatttacggaaaggtcgcccaactagatgagatcccagaaaagaaaaagatatgtgaaaaagacagtacttcactttatatgactaagtacaactagatgaaatagaaagtaccttacttgattatggtcatagtatttagcaatctatgatgcattgtttgagtaattttttgttttattgttttggtcttttcttactttttcttctcgtctttccaattatttacagtggagatatcaatttattatagcatcagtgaggcatgatcacaaccattccttatgtatcacaaagacttgtttgttattattaattttggtgctgtaactttttgattcccaaatgtgcatgcagataaggctgagaggttattggcagaagcaactgga

SEQ ID NO: 50870 - DNA, 634 bp, Ricinus communis
  Intron number 3 from transcript 29908.m006262 (locus 29908 .t000313) derived from phytozome v7.0 (chr-ID 29908; pos 1 963349 to 1963982 reverse strand)
ccccttgtgaaatctgcagctgtggtcttgacgaggtatcttccaattgctattagaatcctttctcccctggagaattttgttacgcataatacccatataagtctgcatttttcaaatttaggtgctagtgtaagtgtatgcttacggtgtttatgcctttgttttaagttgcagatggaaaaatgttgcaatattaccatttttcagtggctgttgatatctaagaataattctttgcattctattatatgtcatttgtgtttctgttgtagttttaatagtaagatgctaattttgtcaagataggtcattgttctggtcactatcctttttttctggtcattgatctttaactctaacttctcctcccgcctttatgataaaaactttgtggatataaacatgaaaatgaaatgcttaaatgtatatagatttctttgatttgaggttaggttttacttacacataagcataaatttacacctcatcaatgagccaggaaatactccaattaaataattgattggtgcctttttctccaattatttcattcctctcttccactctttatggaatagatagtattgacagagtttttttctcaatactggtggattttgtaggtcgtaca

SEQ ID NO: 50871 - DNA, 870 bp, Ricinus communis
  Intron number 1 from transcript 29929.m004572 (locus 29929 .t000075) derived from phytozome v7.0 (chr-ID 29929; pos 4 37830 to 438699 reverse strand)
attgtttgggaggttagtgtttatatatatcatctttttcattttctttaaatagtaattcttcttgaaatggttgatattaaaaatcaaatattgttcttggttagctttgcaacaagcagtcagggtttatctcgttgcttgaataggagaattcactccaaacaaatctagtgttctcaatctaaatttcctctttgctacctttgaatcctcatcttatccttagaatatgagttttctttccttgagagaactataaatctagttagtagcattctgctctctattttaaagaattatattaaaggcctatgttttctcttctttatttctggttcttgtccaaccttttgctgtttcgccaaactctttctgtgattgcatgtattggtttcatgtgatgtatggaggagtatcctactgcaagttggttaggattaagtgtacgcatacttctagttggtaacttaaaagcaatcgattaaacaaactggaattgtctttgttctacatccatgataggcttattgttttggcagacttcatacagcatatgattatgccaattccccccttcttgatgattattgaaactatatgtctttcaaatcctggccatgttcagcaaaggccaaaacattctacttttgtctattgcaccctgtttgcataacaatgattaagaggtcctgtgataactattatcttcattgttcaatatgtaccacttttttgctttatttaattaaaatatgatgttaaagtgtacccccacatttgaaagttgtggaaagaaaaattctcagtgcattgagcatgtggaatttttcagaattttggatcaaggacagatacagttttttgcgg

SEQ ID NO: 50872 - DNA, 899 bp, Ricinus communis
  Intron number 1 from transcript 29908.m006269 (locus 29908 .t000320) derived from phytozome v7.0 (chr-ID 29908; pos 2 008761 to 2009659 reverse strand)
gtactcagactggtactgccgagggatttgctaaggtaatcatcaattaatctttttacttttattggtaaattgtgtcttttggcgtttgattcgagttttgatgattgaggatttggttattatttgctcaaaagtaggataattttgattatgatggtgtgtttggaaagtcaaaagtctctgatcaaggatatgattgtagaaatgtaaaatcattgttggttaatctttgttccaaaaaaaaaaaaaaaagaagtgggccacgtggctgatattttctgggcatataatttgaccgagtgtgctgggatgaactttgattggagctgaattatgcccagttattatcagagatttcctttgactaactgttcgaagtagctgtgtcaatttcaagaacaaaattattgattttctgattttagattatacagtacctcagttaagtttgtgctttatctaattgagatatttggagtcttaacgatagtgattttcagttttgtgattatgacaaagctcatggtacattctgttgaaatgtggaaccttgtgaacagtgaccagtgaaagcgaaataatggaagaactgaaaaccatatgggctggtgtgtgtgtgtgtgtgtgtgtttggtgtggggggagttattggcattttgctacatcgttatttgttacaatagatatcgcacgagtatagatatgttcaatgtgcatggttgtggtgttgttaaagtttttgacctccgaatcaaagttgtgactgcagaatcctatgtgttgatcattgtatctttattttactatttatctatgatctatgtaattgcattaattatgcttttcatgaactaattattaaatgcaggccttagctgaggagattaaggcaagat

SEQ ID NO: 50873 - DNA, 528 bp, Ricinus communis
  Intron number 1 from transcript 29830.m001460 (locus 29830 .t000077) derived from phytozome v7.0 (chr-ID 29830; pos 5 92594 to 593121 reverse strand)
gccattgcagcagtactgcattttttatagatcctgtgagttcattctttgtctctatttctttttgcttttattgaatttggattaattcagtctttagttgattttgtttccattacatctgtaccttgtttttcatgaattatgatctggctggatgatgttactagcagtatgcagatatcaattttactcctataaactaatgcatcataattctagcctatgtttcaaaattgtcaatttcacaaagaaggcaattcagggatgtatcctatgaatcaaattttttgtttattgcaggcacaattgtcttcatgatgtgttaaaaattatgtcccagaataggaatcacactatattgcatgctgcagtttttaactgcaacttagtttccaggctcatagtttttatcagctcggtacataagattgtatgcctcaatacaagcaaaatatggaatctaattatcatacaattatcatttgtctaggaattagatatagggatcatcagcttgaagtcccc

SEQ ID NO: 50874 - DNA, 821 bp, Ricinus communis
  Intron number 2 from transcript 30055.m001559 (locus 30055 .t000029) derived from phytozome v7.0 (chr-ID 30055; pos 2 08056 to 208876)
ctcagcacgttgaggaggtattttaatgctgtccttatttctagagctttttattgatgtcgtttttgtttctgtaactcacattttgtattttcaattttgattttaaattaactctagtagtatggccctcagttttagggaaatgtattcttactttgagggtagcagtttttggtgttcttctggtcccgagcactgaattgggtattggacatcagtgtaaaattttatcttgatctaatatttctcttgctccctaggcaacttttatattatgctaatttcttttatctaattcttatgttgtgaaggaccatgtcaaatttgtttcttctctactttggttttgtatattattgcaagttgttccattactttcttttcatcttttcttggtgatatgcagcactgtgctgtaggttaatgagcttgtatgatttctgctttctattacagcattttggccgtaccttttgattatttaagcatgttaaatttttattttaagatctgtatttatatgggacattcctttgtgttcactatcaatgttttcttatgtattcactatcaatgttatcttatgtgaataacctagtgatcatgttccactctggatgtcttgagcatgctatgtttatttggtttggttactctaggaggattttgttatttgtcattgaagtgcaggaatgatatgtgactttggatatgaatgcattatttttagttaggagctgctggctttccttggagtttgaacaatgatttaaagttattgccttttttttggggcaggctgaggcaataggtctcca

SEQ ID NO: 50875 - DNA, 620 bp, Ricinus communis
  Intron number 3 from transcript 29908.m006018 (locus 29908 .t000069) derived from phytozome v7.0 (chr-ID 29908; pos 1 116423 to 1117042 reverse strand)
cccttggctactgaatttttcaggtgcgtttggataatactatccattctgattctattttcttgtggactaagattgaaattattactttcttcttgttcctatactataattttgacaccaatggctgctgcagagtctatttcaattgtattatcagtcaagtttcaagtagaagagaagggtgaaccggttgtttagtaatttaatccctgagctcgatatagcagccaaatggggtttctgcaactttgattttcagagattggatatgcagttagttaattgaattactacaaggtcatttttattgcagcttgattagttttcttgggttcaagtagtgcacacaattgtagttagcttacatgtggatgtgagtaaatggcttttaaatctaattggtctcctgtgtcataagctttgcttttgcagcatttatacagcatggtgaaacttggactctaaaatattcttggatctatattgtattaacttattatgactgtgatgtgatctttgatggtatcatgtccaattaatgtgaaactatctacttccagttcgaagttcaaatttttttttttttggaatcaggctttcactgatatcatttctct

SEQ ID NO: 50876 - DNA, 457 bp, Ricinus communis
  Intron number 1 from transcript 30146.m003627 (locus 30146 .t000204) derived from phytozome v7.0 (chr-ID 30146; pos 1 357029 to 1357485 reverse strand)
atcattctcaaattagtatttccaattcactccagcctgtttcctaacatgattgcactatcattttggatattttttatttttattattactgatcttggttggattaatgataattcagattttttaaagattttgtgtacaaattattgagtttattttgttaattagttattattaataatgcaatatgatatggttgaaagaaacaagaaaaagaaataatgggatatgattttcttgatcttctttcaaatttaaccccttcaccttctttctattatttccaattattgattgatagaaataaattaacgttttgctattctattgctactaatacatgactgttaatgtacgtaaaacaatgttatgccattagaaaataaattgaaattaacactacaatctcagtgatcatgttttgatttattggtgtttgcagccgagggtctag

SEQ ID NO: 50877 - DNA, 437 bp, Ricinus communis
  Intron number 2 from transcript 29988.m000120 (locus 29988 .t000002) derived from phytozome v7.0 (chr-ID 29988; pos 9 304 to 9740)
taagcttcccagtgaagccagcacctccgccgaaggtattttctctttacctttctctctgtctgggtgtttgtttcgttttatatttgggagaaattagtgattctaaaggaatttgatttactaaagcttaatgattcgagataatattggatagttttaaaagaggaaacttttttcccttccaatatgttctcctctatacgtcacattgttggatgactcaaaatggaggcagttggcgatgcttactactcagtaggatatgatatggtaatttggtaagcactaagcagtatgattaaaagaaaaagaatatgtattgtaacagtaggaatttagaatatgcttatcaatgtctgttttcttttcctgagcactagacactgtgttttaatgtagagtcccgtggtactaattttagaaaagtgaatact

SEQ ID NO: 50878 - DNA, 797 bp, Ricinus communis
  Intron number 2 from transcript 29876.m000250 (locus 29876 .t000007) derived from phytozome v7.0 (chr-ID 29876; pos 5 5637 to 56433)
agtgttaccattatcggaccgcctgatacactttagtatgtgttgttaatcttgatttaatgggtgtttcatattgatgttaatcttgtttattgtgtttgttcattaattttactggattggattgagggaaaatgataaatcatgggtgcttattggtggtttggataatgaaatttgatcaattgagctgagattttgttgagagtgggtggtttgtatctgttgtttgcttatttgagggttttagcatgatcatgaaattgatgtcggtgtggcttttctgttgttggtcttgttgagaaagcttaaacttttacaagtatgataatctttcttttgaatgaaccccgtttgagttccaaaatattcatttctcaatatcattgctcagtttttaagcaagatggctgattggagtatagagctggttgttgatttctatgtgttggtttagcctctcaagtataatctatcaagatttatcttggtgatgttgtattgagtgtttacagttggaccacaatttattgtggtgttcaagtctttggtatcgtgggatgttctattgtttattcatgaactgatttcttttgatttttcctagtagtgtatttcctggctcgttttgtcagcttgttgagaaagtatttttcctgttttttcttcctatggagttcgctttcagcatattgtgcgtgactgactagggtttttatctatattactgctggatcattgggtgatgttatgtttttcttacaaatcttttgattgcagtgaagggggatttttta

SEQ ID NO: 50879 - DNA, 889 bp, Ricinus communis
  Intron number 1 from transcript 29966.m000223 (locus 29966 .t000004) derived from phytozome v7.0 (chr-ID 29966; pos 6 1559 to 62447 reverse strand)
tatctaccctgagatacatcacataccttctccatgtaagaagccctctccactcctctctatctctccatttcctttatttatttattttaagttggtgagtttcttaagaatcaagccccattattgggagccttgatccttgaccaaggatcgtattttgatgtcgtcaagtggcagaaatcacggccgaaagtggtttctgatgataattatgatccgggtttcgatcgttttatcttgtctttatcgaaagtctaggttagctgttctagcttgatttgttttgtacttcagttaagaatgatgatgtctgaagattgaagaagaggtaaaagggtagaaaaaatatggtttttgagaagccaattattgatcattgaagcacatgcttccatttttgttctaggttgactgttgactgttgactgagcttcatgtcttatataaggttccatcttatggtgctttcttttcttcagttcaaaaagaaaatataacttttttaatggcaggaagaaaaattagattagctacatgttgtaaaaatgcctatgtatgaagggatggtatccaaaaatttaattgtgattatatatcttactaattaattttgagttagaatctgatatatagtagcaagagtttgattttgcctggacccacaaatttaatcttatggtagatgcagtgtttgattttaccttacctcaagccttctttgtgagtgaaggtgttaaaaaggatgttatcccacatcaaacttttaagtgttttttgggttagttttatacgtttaagtttgatatttcctaagataagcaaactaatttaattcatgagtgatgaaatagtgggtaaacttccaaaaaatcaagtgagtcctgaa

SEQ ID NO: 50880 - DNA, 411 bp, Ricinus communis
  Intron number 1 from transcript 29908.m006031 (locus 29908 .t000082) derived from phytozome v7.0 (chr-ID 29908; pos 1 208964 to 1209374)
cacgcccacatactagagttattgtaaaccagttcattcttacgagtttgaatcctaattagaacccattttcttgctcactttgcaggtctcaacagatgtggcaagagctgtaggttaaggtggacaaattatttaaggcctgatatcaagagagggaagttttctcaagacgaagagcaaacaattctaaatctgcattctattcttggaaacaagtaattccactattttgctttttttgcatctatctcaacttttttttttctctttccaaatgacagtattattacgaatgtgttttggtttcgtgcttgcagatggtcagctattgccagtcacctaccaggccgcacagacaatgagatcaagaatttttggaacactcatttgaagaagaagctgattcag

SEQ ID NO: 50881 - DNA, 658 bp, Ricinus communis
  Intron number 1 from transcript 30138.m003978 (locus 30138 .t000152) derived from phytozome v7.0 (chr-ID 30138; pos 1 068275 to 1068932 reverse strand)
tggaacaaactcctcgccaacagcattcctcaaaggttctctttcttaataccatttactggtactgaaatgattgttctttctcgtccttgtgtttgacttttagttgactcttctcatttgttatttctagctgttagattggttcttttcttaattttcatgcttttaattgtcttattaaaattcatgcacttaattttccgcagtgtattatttgtatctttgttgaattcagtgacaaaaagatgtcaataaatgtttttgattttttttttggctgccttgtagtccgtttctaatcagaattgtgttacatagtgtttccaatgtctaaaacgccaagaatttaattcaattgagtctatttagttaattctcatgtttggatagttgctacatttcaactctgtgaggcttactttataaacaaaaacaaaaacaaaagaaaaagttaagttgtttatatatattggatttttatatatccatttatagtattgatatgttatcttttacttattaattattcttttaagtattatctactttaggtctattttaactgatgtctatgtttctttcttattttttacctttattaaaatgccttttcttttttcttttaacgttatagaggtggttttgattatttcag

SEQ ID NO: 50882 - DNA, 724 bp, Ricinus communis
  Intron number 1 from transcript 29820.m000991 (locus 29820 .t000012) derived from phytozome v7.0 (chr-ID 29820; pos 6 3875 to 64598 reverse strand)
gttctttcgtttgccaggttctatcttcaacatcatgaatcatttttttctataatattctcatcttgcattctgatttagactatgaaccatgcactcgaacacacacacgtattaattagccaccgcctatctctgcagcaactagcagaatgcatgaatattaagtgttattatttacctttttagaatttgtgtattgtggaaacacaaattgaaagagaggaactaatgaaaatggtttttcatggaattaaactagtatcttcatttactttatttaggtggtcgcatgttaaattttcgttctacttttcttcctttgtcaaagatgataaaattggaactccttttcttttaaaaaaataaagataaaattctctctttgtcaaattaatcttgttgtttcttgatggtgatgaattttattggatatgattaaagggcatgaatcaatttttatgttgtttctgtgtttcctcggacccatactattcattgactttatgaacagctagagctagcattatgtttatgctgacagctccctccccaagatactgcattaacctgatagttataaattttcatctgtcagtggctactctttggtccattcatatttatttaatgtcatcattattatttctctaatataaaaattttgattgagtactttaccgggtttcagttctttcttaattatgtaaaacatgtttgcagc

SEQ ID NO: 50883 - DNA, 583 bp, Ricinus communis
  Intron number 1 from transcript 30000.m000391 (locus 30000 .t000021) derived from phytozome v7.0 (chr-ID 30000; pos 1 84503 to 185085)
gcggaggtaccccttattattttccctttactattaatgggtatctcttagtttttccactttttctctaataattctagagtatgattttcttttatttttagtttttttttagagctgattttaatgcatttttgatattaagaacccatttggttatctttactagaattttcttgttatattttggatttgagtccttttgatagaaggaaaatgatgatcattaacaacaaatggggagatgttgtataatgcataagagtatgtcttaaagtttgaagtttgagattgtgctattaagtttatgtagaagtgtgttactaactgaagcagaaaactttatagaagatagttctcgaaattttaatcattggatagaattgtttaataacattaggtttggtattaacacacaattatatgatggcggggttagaaatacactctttattttaaataggatttatgcaattgatggaatgccattctacttcaatgacccaactaatgatcatatcttgggtgacatctgattttgtttgcagttaaagctctaaaagttactaggacaaggaccagt

SEQ ID NO: 50884 - DNA, 645 bp, Ricinus communis
  Intron number 1 from transcript 29883.m001970 (locus 29883 .t000025) derived from phytozome v7.0 (chr-ID 29883; pos 1 97030 to 197674)
catcgggtgttgctggtttcactgcagcttattgggtaactatacttcactctctctctctctctctctctctctctatatatatatatatatatatatatatatatatatatataacgtgatagatgactgaattggcaacaaaaaaaatatctccttgcaaatcaaagtacttttgaagctaagaaccttaggacacttaacaagtacacgatactcactgttcttcttgtataccctgtcaagtattcacgtagattattacatgcaatgactgcataaaaatgcttgacaaaaaacaaaaaagaaagagaactgcgcattacaaatattcttacaggatcagaacccaaatggaattattacatatcggaacaaaattaaatctattagctaaactggtagtttaggagatgtacatttgatcggtttgtaaggatggtgtattagtataacttcaccaaaaaaaaaaaaaaaaaaaaaaacaaacaggtaatagaaaagactagaatcaaataggctttattagttcgaaatgatggaaaaggaaaaggttatgaatcaaacttttccatggtgctaatatggttacatggaatgatgggcacaggtagggccaagggcaaacaaggacagagaaaggtt

SEQ ID NO: 50885 - DNA, 719 bp, Ricinus communis
  Intron number 1 from transcript 30131.m007054 (locus 30131 .t000205) derived from phytozome v7.0 (chr-ID 30131; pos 1 226366 to 1227084 reverse strand)
tagcaaagcttagacaacacccaagtccatttaaggtcagcttcttttattctcttttccctttcttctctcttcaatttccgatatttttgtgtatttccaattgtacctctttgtaatttttgttagtaatttatcatataattttctgatcgtgaatttcttctagtttagcatataaacatgttttcatttgtttctgtaattttaatatcaatttggaagtatagaaggtttgcttgttgttttcagatctgcttctggaattccttttgctattgaaaccctggagttatgtacattttggatcttctgttgtttttctttatttgatgaaataattattagctgcatttggtcctgtatcaattgggtatgcgaggatttttggtatgcgttttgttttgcatttgacttcttttttttttttttcctaaaattttatagacattgagttatatgggattgtggtttttataactgttattctgaaactaaactttgtgtgtcaagattgtgaacgattacttgcacatataaggtttatagggttgataagttatggtcgtaatgtcagaatatctgtaatgtatattgtattgtttactgcttgttgactgttaatttgattaatgtttctgcacttcagtgcacatgcagcttcttttgattggttttgtttgtttgcaatgtttgcaggattgtgaaactttaattta

SEQ ID NO: 50886 - DNA, 500 bp, Ricinus communis
  Intron number 2 from transcript 30128.m008756 (locus 30128 .t000217) derived from phytozome v7.0 (chr-ID 30128; pos 8 56312 to 856811)
tacaaattggtgattcagtctttcagttacataaggtgatctgaatatgtttctcttatgctgtataatatgtaaggaaattgcattagcactatcagtgtcagctgcatcaccagtaccaataaggctttcttgagcttccacaagttttattttgagttttagacctttgcaacaaatttctgttagagtccataagattaacgaagagaattgcactagtgttaagagtttgtaacagttgcactagctcaagattgacataaaaacaggttagaatcatataacatttcagataatttccctgtctttcctttccccatggaagggatgcatgaatatacaaaagtttatcgcttttgtctgtagtatatttttaaatcctggtcctgaattacgtttgcgttcattttttctcttctcttatttcattttttgtgttgagtataaatccacgatcacattctgacttgagatcatttttgggtgctcagcttcca

SEQ ID NO: 50887 - DNA, 571 bp, Ricinus communis
  Intron number 1 from transcript 30128.m008663 (locus 30128 .t000124) derived from phytozome v7.0 (chr-ID 30128; pos 3 97063 to 397633)
ctctctctctctcttttcactcagattcaatccaagtaagtatctctgtctctctaaacatcactttcttcagctatctctctctctctctctctgattttaaagctctttctcttgttcttgttagttcatttttcctttcaattttgttcttaaagcttccatctctcatttcttttatctttccccccctctctcttttgttagatcattttttacttttttctatggttaataatctcagaagctccaattcttatgactgggtttgtgatttgggtgtatttattattagctcatatggctgtggatcatttgagctgtaatttcaaaacctttttttttttattttatcattttgactattttgagagtcttgaatctgaaaagataaggatttgatttgcttgttttatttgtttaatacgattttcactttgattagttgtgtttgttttacttttgaacttcatactttcagatcagacaaaaacagtaattgagttgctttatgcttggtgatcattttttttgatatgcagtgattagttgccgattgtgaagaaatcac

SEQ ID NO: 50888 - DNA, 840 bp, Ricinus communis
  Intron number 1 from transcript 29842.m003680 (locus 29842 .t000177) derived from phytozome v7.0 (chr-ID 29842; pos 8 86413 to 887252)
gagaggtatgtattttttctggattttcaatttctttttacgtattccagttatgttttattaaattaaaaactttaatttagtgattaatttcgttattctttttaagattttatgttaagttcatcttctggataatatcaataaatttggctgtggtatcagggtcacatattaaacaaaaagacctgtcacatgcttcataaaacagaaaagctgaacataaatgtaaacttccatttgtattgtgctcttctaagatgcagacttgcctttgtactggaccagtggaatcatggggttagaaagtgggaccagaaatggtggttgaacacattcggcagccactacttaaaaattctgccttttgagagaacgagaggacttttgcataagccacttgctagtccaaattccttttgctcctgtaaacattaatctttatgaaccttgattcaggatttttggataagtccaggctaaatttcaaatagcaaatatctctctctttattcagaattggaataggtgaagcttatatcctttaatttggatttcccaagacagaaatctcagaatcctaggaataggtaaactacgtagtttttgtgctaaaccctgtaatgctgacagacaactagcattaatttcagctattcatttcatttgcgatgaattttacataaagtggcaacttcgaatccaatgattaggaagaaacgaaaagatgttcagactcagcttaaggtgacgtttcatgtcagtacatagtcgctttcatttacatttcggagtttctgacaattcaaaatatgaacagggaattgcaccattgaagcc

SEQ ID NO: 50889 - DNA, 451 bp, Ricinus communis
  Intron number 1 from transcript 30076.m004672 (locus 30076 .t000236) derived from phytozome v7.0 (chr-ID 30076; pos 1 513226 to 1513676)
aggttcgattattttattccttttcaatttgttgactgcttaatttcgttttctgtctttgatttatatttggaattgagatctctgatttgctttcacttgttaagaacttgtcctttcctgttaattgatactattatacctaaaagcaggtttaaatttagctaatacgcattggattttgctcgcttcttttgtagaagatgcttgtttattaggttaacctaatggactttttttctctttcctgtcaatgggtcagttgctgttgttaattgaaaccattcgcaagcttaggcgctgttcggtcgattcgattcaacaaatgcatgattccatctacatgctaatgatagctaaacagctttactagttgtgcttaaccaaacacttattattgttttttgtgattacagagattggttcagcatcagcctacccaatatcctac

SEQ ID NO: 50890 - DNA, 928 bp, Ricinus communis
  Intron number 1 from transcript 29830.m001452 (locus 29830 .t000069) derived from phytozome v7.0 (chr-ID 29830; pos 5 28556 to 529483)
gcataaaaccctctctgcccagcaagatcttgcaggtctaactttccctctctctttctgatatgtttggtaaatgacaagcttgtgttgtgtgttttttttaccctctgatggagaatttaaagtcgatcagctttttattggtatatttatgggtgttctatgcaatggctttctgctgtacttttttgtcattttctactgattgtttttagggttttatttcatctttacttttgtgctttctgcccttctcttcttcaaattgcatatctgcctataatttgtaactgttttaactactattaagatattctgcttcaagtgtacctatgtatcttgtacaatttggttcaagtggggacataaacattggcaaaaggtcctaattcttgttggatttgttatcaacttagctagaagtgaccccaagttgctatgatattctgatttgaacttatcacttatgaaggtagtaggactgcactgtcaacattgaagtgcagagtgcactctaattgagtcatgtcagacaagattagatcatatttttgtggctgatttttgcttaagagttcttagtcttccattcacgttatttcttttttcatctgtccaacctcattttaccaaaatgtcatgtgttacataggatttcaagcaagttaacgtggtttcagtatcagttggtcatctcaaacttataaaaaaattttaaaccagatgaaggacataagggatcttagtttgcagtgtgcctagatgctttatatcattaataacgatgtggaaagatctcaacatattatgactctttgctaatttgatttagtagaagatacacttgactagaacttcttcgctgaacaaaatcacctcttttactattgcaggaggtaggttgggaaatctctactgtgatccatta

SEQ ID NO: 50891 - DNA, 477 bp, Ricinus communis
  Intron number 1 from transcript 29848.m004541 (locus 29848 .t000097) derived from phytozome v7.0 (chr-ID 29848; pos 5 03938 to 504414 reverse strand)
tgttaaggaaactgaggcaattcaatccaaggcaagtctctaatttttatttgtatattattctttcaagtatttggtttcttggtttttgggtagcttgtttgtttgtattctgtttttcttgttctctttttgataaaaaaaaaagaaaaaagaaaaaagaaaaaagaagaattgttagtttttgtttttgtcgagtccttgttgggtcaacggtctttcttaactattttcattatttggcccttggatgctgccttccatttgttcctttcttatctaaaatttccaagctgtgtttttttgaaaatggaaaatcgaatctggtgaattggaataaaatatcatatggttccacatgatgaatttagattatattcttttggcattttgccgaagaccaattagagtgcggagatcatggcaatgaaccattaaagacctgtttgattctggctatattacaggcagggagat

SEQ ID NO: 50892 - DNA, 925 bp, Ricinus communis
  Intron number 3 from transcript 30147.m013938 (locus 30147 .t000209) derived from phytozome v7.0 (chr-ID 30147; pos 3 456608 to 3457532 reverse strand)
tgaaggtttttatgcttgctatttcgttaatggctatgctagatatttgatttgatctaagacttattatctcattgatcttgataatatatacaagtgaaaaatagtatataagttggtttgatggaatactgttctctagggatctgctaagtttccttctcccatcattgatgtttttgataatctaacaccctcacaggcacaacatttcagaacccgtatcacttatcatttcttatcgatctccgctgtggccattctcagtatggtagcatcttctctgtaacatacatccgtttgccttatctagtgccaaactcaagttatttcccgcctaccaatctattataccttgccatcttagaatatccaccaccagcccaacttgtcaccagctcttggaaggaccccaactgccacttcacttccaacttgccatgcttttggtatcagctaaccaccagcacaacaaaatattgtatcccaatagtagaatccctgaccctacgtgctcttcattcctaattgtgtttctgctaattctttaaattggaagacctaaagaaaacttgagtttttgaaaccaggtgcagcacaattatgtctaatatgttagaactccattggagattatagttggctccttttattataataacaatacaggtgctaagatttgatggataataagaataagtggtatatttattttttccattaacgattcatgaaacttcctgtaatagtgtttgtgattctgcacacaagcatcttccagtttgacactctgttccttgctccagtcctagtccctacagtttttattcacttgatatattttcaactgatagacccattttttattctattatggaatttggttgcaggagtgctcgcctactgtattagttgtgcttattac

SEQ ID NO: 50893 - DNA, 513 bp, Ricinus communis
  Intron number 2 from transcript 29848.m004676 (locus 29848 .t000232) derived from phytozome v7.0 (chr-ID 29848; pos 1 283626 to 1284138 reverse strand)
gtagctgggctgcttatctttctagtagttacaaggtcactaggatcgattcagaatttgtaaaaacttgattctgttgtgtgggatgtgtgacaaagaaaatggcatcccaaagtagttaattttgaaggacccggcgcttatgctacgattttccttgctcctgaccagaaggaattttaatcttggtttaatttacttcaatatttttctgtctctgtgctgtaaactatttccgttgttttttgtatccttggcctcaatcttcagctttctactctgtctggtctccactttgtctagtcaactgatagatcatattcttggacaaccaattttaactgttgtatagtatccttgttgagaaaaatcaagatgttttacccggcagattatattattgcttactgtttgtgcatttccttcttgctgatttggaagcatatattatcttaggaaaagtttgattgttatgcaggtctatatcttctgaaaactgcggcattggcacca

SEQ ID NO: 50894 - DNA, 249 bp, Ricinus communis
  Intron number 1 from transcript 30131.m007045 (locus 30131 .t000196) derived from phytozome v7.0 (chr-ID 30131; pos 1 187855 to 1188103)
aaagaaaggttgataaggtccagaataatacaaaggtgagttttctatgtaaaaaattcttgatttcttctgtgtcaatttctttgattttcttttctctgtttcagttgaggcacttaattaattgttcttcaaaacaaaattaaacaagtgaattgtcaaattaaatagcacagcattattgttgggcagttttttgttttattaatcaaagatcctttttgggtacggtttaggttgttgcagaag

SEQ ID NO: 50895 - DNA, 453 bp, Ricinus communis
  Intron number 1 from transcript 29864.m001493 (locus 29864 .t000069) derived from phytozome v7.0 (chr-ID 29864; pos 1 012368 to 1012820)
ggtgttggccgatatcatcctcctttgtttaggttagtatgtatgttcttttcctttcaaaaaagaaaggcaacttatcctaaaggattatccaactagtcaaaatcgaataaaaatggtgttcttattgctaacataaataaaaacactaaatgcacataactattccataagatgaataattacatacatttactgtgaaatatttgttttttatttgcattagtttaaataaataattcttttgtgcaattttaactagctggataaagttgcaactagatttaggatgttggaataaaattctctgcaatttgggatacaattacaaattcacgcatagatttcaattcttatgcaaattaagctttcttgttttctctgccctgctgtatctagtaattatagaaattctaattctttttggctgctttattttccagtgttgctcct

SEQ ID NO: 50896 - DNA, 552 bp, Ricinus communis
  Intron number 1 from transcript 30146.m003562 (locus 30146 .t000139) derived from phytozome v7.0 (chr-ID 30146; pos 1 039361 to 1039912 reverse strand)
agcgtcttaatcatagcacctggtaggagacagttataatgctaaaatcatttggacttggatttggtggggtgcgccaggcctgtgcagtagtgcaacgtacaggcgacgctcgagaaccccagtagcaagctactgtattgggctctccccctcaaaaaataaatttaatatcatgtgggccaatgacccacgtatcagatattaaactgataagaacagatactacacttgatcttagccaaaaggccgagaaaggtatgatttgtaatgtcttcggtttatttatttataataggcgtgctcttgtttctctgcttttcttcccgatgtgggaatgtaaaacataaatgaacgataagtagccagctcaaatttgccgccactgcccattatacaaagctctgtatcttgaattttgattcacattaacctaaatggttctttactctaaaacaaacctaaaacgatcttttctttgttttacttttcaatttttgttatatcctcttaaaagcaatcgtagcagcccgaaacttctaagtacttttc

SEQ ID NO: 50897 - DNA, 856 bp, Ricinus communis
  Intron number 1 from transcript 29868.m000346 (locus 29868 .t000010) derived from phytozome v7.0 (chr-ID 29868; pos 1 04913 to 105768 reverse strand)
attctggttgttctgcccaggtatatgcttttagtcatttacccatttgcttgtttttgctctttaatgcttgttttgaacttgctacaattttttccctctgcataaatcgaatattgttaggacttgattcacattgttggtttgcatcaaagctggtttttttcaaattcttcgctaagcgtttaatgaagtgaatgaaaatttagtggaaattgataatggagataactattggtcattttcttgaattagtgtttcatagctagcttaatttttcacttcaagatttgctttttaagttttctttcctgttctgctcaataggttctatttcttgttatgtaactttgaaatttttgtttgaagcttcatgttttagtatggaagctttcagattaacattattcatcatgtataagctagttacaactccatgaatatgcagactgtaatggacaatggatgagcctaacatgtaattaacaactacaaacctacaatggcaagccggttttttaagataagaaattacgaagtgactgaaagataaaaattggctaaaatttctcaattatagttttagtagaaagctaacttagcaatgcatactttatgatttttattattgtggattgtcaaacaaaaggaaaaagagttaaatcctcactattgcatgttctactcctgagataaaccatcttgtcaactataagcttttttatgcctgcatcagtttgcctcgtgttaattcttatctgttttcctagcaaaggtacaaggttggcctgttaagtaaaaatgtctgatttaccgtgcaggtttttgattcccctcacttgaaagttttagttgg

SEQ ID NO: 50898 - DNA, 758 bp, Ricinus communis
  Intron number 1 from transcript 29973.m000409 (locus 29973 .t000021) derived from phytozome v7.0 (chr-ID 29973; pos 1 87285 to 188042)
tgaggagatttttcttcaaagacccaagtctaaaggttcctttttttctaaaaaaagaaaattaaagacctcatttcaagttcttgttttgttcaagatttggagttcaggatataatgtcgttaataaatgactagttaggactcattatttgtttcttttgtcaggatcgttgtatggtaattgaacttttcttgtgggttcagtttcatatatgatttttcttttaatgttaccgaaaaacgtattggtatttagggcacttcatctttgtgagggatttttggcctgtaattgtgaagcataaatctaattactaatgtggctgttgatgtcgaaaatatagatacactacaactgtgaattaatcattgcttttacatgtacttacaagtgtttgatcgtgaaatctttagaattttggggttgggtttcttttaggttgcctttggcacattcaacttattgtcaaagtcacatttttctataacttcaaaaatgcaagaagaaaggtccaagattttattgggattaggaatagggatgaagtaagaaccattcctcacttttcattatttgttttttcaggcttgagaaattgtaaaatttagaaattatacttaatttaatttgttgagtgatttttcaaggacttctgtagttctgtttcgttattgatttggttattctgcatttaacaagttctgtgggaattgcaaacaggaactaaagcagaggaaactgagacatcaggagaa

SEQ ID NO: 50899 - DNA, 913 bp, Ricinus communis
  Intron number 1 from transcript 30138.m003895 (locus 30138 .t000069) derived from phytozome v7.0 (chr-ID 30138; pos 4 97281 to 498193)
gataaggaggtgcaactggatcacaaaaaatagtggtaagctatagtgtagctttttctatcttatttacacaattacagtctcacagttgcaatataaagctgcaatcccagggttttgattgtgtaatgatgctctctttctcttcaaccaaaaagaaaatgagatgataattttatttcttaaattttcatatatatatatttaaaatgagtccaattgtggatggcagtactcatcttcctccatcgactctttgtattcaagaaacatgcaagtgaaacttgagctttatgtcaatcgtcttcattttcaactcttgtcctaacaagaaagaaagaaaaagaaaagaaaagaaaagatggttatagtgcatgcatctcgttgcttcattattaaacattttgacttttctctagtggttagactgtaaaatctttatcgtacctgacaaacaaaaattaaacataatgacaagttattaattgtcaataaacttcaacttagtggtattaaaatatgggtgaattctgcaatgccctagtttacatgacttccaatacttttatctatttactgctaatataaaaaattattttaaaaaaatttatattgaaatattttaatatataattttatgtaaaaattacatattaatatattttatctaaatttaactaaaattttaaaaacgaaagaagtgtatctatatatcaatttaaataaaatctcaaatttcaatcataaaatagaattcaattgtgtgccgatatatactaatcacccaatatcaattaattataccatgtgccaaccatatagatatatatatatataattataattataatgtgtagcactgaataaatcaagagatttcaatgataaacagataaagtctacgtggcatttc

SEQ ID NO: 50900 - DNA, 1036 bp, Ricinus communis
  Intron number 3 from transcript 30073.m002292 (locus 30073 .t000102) derived from phytozome v7.0 (chr-ID 30073; pos 6 94734 to 695769 reverse strand)
ccttaagtcatgtttaagctatggagtgaaataagctgcatgttattgcttaaatggtgcttgtaaaattcattgtttctagctaactttagtttataattgtgttcttatttgtgatttttaagaaataaaatctatagatcaatgtgactagctgcttaggatctgtttttttattacatatgtgttgcctgttattatcatagatatgcatatagtggttactttctactgtctcttgtctgcactatttagattgtctatgaagatttgttattgtagttgtcgtggttttctatttgtgacactttttactaggatgaagatcgattgtggcctagggaatctacgtaccagtttattcatgtaacaagatgcaaaaagatagtattagattctcttggatggaggatatatgtaactttctgggatctgattagaagtcaattttgttgtccgcctccagtctgatagcaagcttcaattcttaatagctttggctttgtttccaatggtatttcagcatgagttgataaggggtacatggggaggtagtcaggcaataataagagtggagtagatgaaggaccgaaagatgtgcctctcttttaatttaaataacgaggcaggacaaagattgcaatggttctttataggtcattggagtgctatacatttaggctctctcgcttatttcccacaggagtgctatacatttaggctctcccgcttatttcccaaagaaggattaagacacctacctatcattagcacaaaaagctaatcaaaacatgataaaaatgaatatattctgaaattctgcaaaggcagtggaaccctgtaattgcaagtaaacctaagggtttcttctatgaaatactatatgtagtgtaataaggataaactaaaaaccttgtgtgtctgaaataaaactatataaaattggcttgtagtctattgggtacattacaattgaatgagcaccactagttacatcgcagattctgtggtgctataccattgcgttcatatcttt

SEQ ID NO: 50901 - DNA, 534 bp, Ricinus communis
  Intron number 2 from transcript 30090.m000245 (locus 30090 .t000010) derived from phytozome v7.0 (chr-ID 30090; pos 1 05017 to 105550 reverse strand)
gtggttataatatcagcaataaacattactgggctgtgagtgattttccttttccttttctttttctttttttttttttaaaagaaaaactattcttgatattcattgatagtgatagtaatatgctacttctgagttctcttggaaattaataatcttcattttgattttttttttgttactcttataataatgctctgtttcttataaggatttgctgttgaattctggtatgtttagaatgaattgtagcttatgttcttatctggttcctctcatgaatgtttcacttttctattttaccaaaaaagcaaaatgcaccacagataatttgactgggaatttgcttagacttattggcttgtttgtttctccaattctgttttgagtcatttcttagtttcttagttatctgattcgtctgatagactttttcttcctctcttcaatcgattttttttttcaatttattatactgacgatgatctaaataatgcagtctgtggctttaacagcagctcctttctttgtcat

SEQ ID NO: 50902 - DNA, 514 bp, Ricinus communis
  Intron number 3 from transcript 30041.m000238 (locus 30041 .t000008) derived from phytozome v7.0 (chr-ID 30041; pos 9 0191 to 90704 reverse strand)
gaagtggtaaagccaagggtgagtttctatatcttagataggttttaatattcttgtgtcgacttagcatatcatgtcatacgtggacatggtcaattgtcaatgacatatgttaattcttattaaaatgacataattaattagttcatttttaattatagactgtttaggccacttagcaaaaattgaccttaccattcatataatataaaatggcttttgtctcctattaatttacgtcttaaataacaaatatcaaaacctatatagaatatctaaaaaatatcaaaaccttatataaacatttttatatatatcattaatttaatttaaccaatgagttttaaatttatggaattgttcctcaggattgtgaaaaaaagaaaagaaaagaaaaggataggatataaaattcaatcaccactaatctgactctcgctcttgttttcttttcaacacataaaaagcagacggagtaacaaactttttgaattttctgaagctgtattgaatt

SEQ ID NO: 50903 - DNA, 714 bp, Ricinus communis
  Intron number 2 from transcript 29827.m002570 (locus 29827 .t000043) derived from phytozome v7.0 (chr-ID 29827; pos 2 46797 to 247510 reverse strand)
ggcatgtcagttccctctctttatttatttgtttatttcggttgctccatgttaccacttctttgttagagacttgggtagtcaaaggagttttacaagatctgaaacttattatgagactgcccatttattagctattgatgtttcttggaagaaatctgtggcaacttagataccgtttttctaaatgttaaaaacatatattactgattatttgaagtcatctattccttcttgtttactaatcttagtattacttaatgttgcacttctcacttcttgtcattgattcgactatcactgcattttgtccactggagacattagcttattcctgtgagattcttgtctgtggatatggatgactcgatattgatgaattgttgtttaatacaagtgaaacacaaattatcaaaattatcacatttctggtaatcataatccttaatagaaatgcaagccaggaggttgctgattggtttgcctcatgcttgagttaattctgggaagaacatattggagctgtccatcttgtggccttgcctcttcctctctctttctactcttttcaccctttctctgatgtgtactttgtgatattcttgtaataattgcatcctggtaacccatgacattatttacccgacgaagggatgctatagtgttgtcatggggaatttctgttaacttatgtgttgttttttcttcttacag

SEQ ID NO: 50904 - DNA, 804 bp, Ricinus communis
  Intron number 1 from transcript 29970.m001009 (locus 29970 .t000038) derived from phytozome v7.0 (chr-ID 29970; pos 3 00804 to 301607 reverse strand)
agggaaagaaaaggtatcaaaactcacttctcattcatggtttatttatttgatggacagaaatgtgccaaattttgggtttattaaaatgtacttgctacgattttcttcaaagaaatcacttcctagaatgtattttcttgattgatgatagatttctgatgttggactagaatctcttcttattccttttcttttcctgtttataaatgccttttaagtgcatttgttttttgtttacaaactttagttttgctcacttctattactgttggtttttcttcttttggatttataggttggaacaaattcttaggcattacattgatctccctgatcagcaacgtggacggtatgagaattataatttattaaattgagaaaaaacagcacgtgtataaataccttaagtcatatatcataccccatataccaatcaagaagcatttcaatttcctatgacattttgctatttaaattgatcttttgctcaagatgaaactaatcactcacgtcatgtttcgttagattgataatctttggaggaattgtacatataaacattatgttttagtgtcaaagtcattttcaagtagtgaaaatgattgagagatccgagcagccatgacagaaatttaaactgcaataggaaagatgatcagaatttgttcaaatatagtttcttttgtcttggagtttgattaccaaatcttttggctatgattgacagaagtttagatgaagaaacagttgtttcttttttaatttttttgttaccaattcctttttcattaatcagtactg

SEQ ID NO: 50905 - DNA, 444 bp, Ricinus communis
  Intron number 1 from transcript 29907.m000651 (locus 29907 .t000030) derived from phytozome v7.0 (chr-ID 29907; pos 2 64000 to 264443)
cattaggtaataatacaattaaaatcattattattgaatatttgttgaataaagcaaatacattatgttaagttgaaatttataaaattacgaaatttatttgcagatctaaagtttatatgctttaaatgaagtgaaagttagtttaaaattctacataatcaaatttgtgtggaattgattatagctaaactaaattctaataaaataagtagaatttctaaatgaattctttcaattttatcatttacattttacttttttatttttatttttttttctcaaatgaaacgaactctttaatgaatttcaaccaaacatattattgaactttacttcttttgccttcatgataataacatacagagaaagaagatatcaactaacaaattacaattgttttttgcagctgaacttctgggatttcggaatttcattccacca

SEQ ID NO: 50906 - DNA, 1051 bp, Ricinus communis
  Intron number 1 from transcript 29929.m004525 (locus 29929 .t000028) derived from phytozome v7.0 (chr-ID 29929; pos 1 81350 to 182400 reverse strand)
aagctttataaaggctgcacctttgtcattaaaaggtttgattttctttttctttttcttttttgttaaatatctttttgatctgcaactttgttatcatatttccaagggtgtgtttgaaatggatttactttggttgtttcagttcgttgagttctaactgttggtttgattactgataaggaataaccttgaaatattggatgttgttgcttctcaagggatatcattcatttgagtcttcattattaatccttgtttgttcgtcgccctgtgtaaatttttatatggacctgcgtacatctgtgtggatttatactaaaagggtacttacaatgcgttttgcttatgctgtaagcttttgatgtcattaggagacgataacacagctcaagagacatattgctatgttcagtcataaaaagttggagcttcctaatgcatgagctcatgtgattattcttacctagtttattaggttgtcgagtagtctacggaaaatattttgggtcgtgattttgtccttatcttccattttccatcaagaggattttccattctaacctatacttctcaatctgtacttcttctctgtctcgtttcttcttcaatcaaattaaatgttacagttttcatcctaggaattcatggaatggagtcatctgcagtatatcaaatggaattgatttctggcagcttctgattgtgtttgttttagcaatcaaattttgtttgcgatatggatgataaactgctagtaaacagttgaagcttaaatttttatctagatgagtcacaattgtaaattgtagcatgtagcttagtttagtgagccacttttgatactggttcatattgtaaggagcatatgccagtattggaagggtaattaaattgtcagcagctgtcacctgttttcatgttttcataagtaaaactagtttttttggccctccttcacttaagaaaagggtatattgcaagcttcataatgtttttactctctggatctccagtgctccggcaaggcatcttctctgtgggaagccaa

SEQ ID NO: 50907 - DNA, 613 bp, Ricinus communis
  Intron number 3 from transcript 30068.m002538 (locus 30068 .t000028) derived from phytozome v7.0 (chr-ID 30068; pos 1 77052 to 177664)
caggtctttaagttgcacatgctaaatgcaatgatgctgcaatatgtcatttgttgttttgatggtgtccatcttctcttctttgtatgtctcttttcacattattgaggaagtaaggatgaagtttggcaacaattgctgttgtaacacatgcgatcaaatttttattttcatgacctcctttttgcattagttgaactaatttgaagctttatacagtgttctttctcttttccattttggttatgaatcctgtaggcagcttgtgtttcttagtccatacaacaactcctgtctttttgtattagatttcgtcatcctttcaattatcaggttcttacaatatagtgatttgattcatttgaaagtcgcagactcatgatctcataatatgcaactagttgattgtttactattttacagttacctacttaaccttcattcttccttctttcccatatttactgatagtgctttcttttgactttactatgcatagtcaccagagtaaattggcattcaatgtgtaattacattaatgtatataatctcgtgtttcacgtgcaaatcacattcttcttcatgcagtcctttatcgataaatttcgttata

SEQ ID NO: 50908 - DNA, 961 bp, Ricinus communis
  Intron number 1 from transcript 30128.m008998 (locus 30128 .t000459) derived from phytozome v7.0 (chr-ID 30128; pos 2 091674 to 2092634 reverse strand)
atcttcttcattgtcgtctagggttgctgttacaggtaagaattgcttttgtttgaagcaaaattttactttggaatctcctactgattctcaaacaagtgatcctaatcatcctaaatttacctttgagatgttgaggactttgattgagaagaatgacttttactccaaagaatgcaatacacgttagatgctctcacttgcgttcttctagtgataattgtgaaagaaggtgaagggcttttgctatttctgatttcagtttgcttccaaagcttgaagagaggttgctggaactaagttttgataaaatgtgccaatggattttgtttcttggattttttcccactactttgatgttgggttcttaactgcttttggcactcagtcagtcattaatgttctatatgaggaggaccaaccaagtgtgattatgtatgtttactggtttcacgagtgtacattgaggttaatcttgaacaatttgtggaggtctcaaccttgtctcatcgccaatttttttctttggatgggaaatagaagcagcgtttcgtcacatttactttctgtccgttgatacaatgttaatgttgtttttctttaacccattgcaaaaacagagctttcttcttcttttttcttaaacccgacaacagtggagagtaaatcggtatctgccccaccaccttgcaaaaaggaaattaaaaaaaagaaatcaacttggattgaaattcgatactgggtttcatttatatgattctgatccaactctgactattctttttttttttttcatcataaagattaatgctttgtggtccttttcttgttttattcgttttggtaattatttcttgattggtttctgtatgtgctgttaatgtctgggttggagtctgataatagagatatatcatcatctaaagttggtggtagaattggcggtggccttaatcgagat

SEQ ID NO: 50909 - DNA, 303 bp, Ricinus communis
  Intron number 2 from transcript 29827.m002657 (locus 29827 .t000130) derived from phytozome v7.0 (chr-ID 29827; pos 7 44852 to 745154 reverse strand)
gctctttgttaggatccttcctgtgttttgtcaaggtaaagttcctcagtttatccttttattttgtttatagcttaatttagtgtaacccttgtatgatacttagttgcgatttttatgggaagaagcaagaccaatttttctttttcagagaggaaaaaaaaagggttagaagttattcttggagttcaaaatggaggttttatgttttccagaccttacttcaaaagtgaagctaattatgcccttaaaaatggagaccatttaattacatttcttaattactttgatatgcatgcaggg

SEQ ID NO: 50910 - DNA, 972 bp, Ricinus communis
  Intron number 1 from transcript 29838.m001670 (locus 29838 .t000040) derived from phytozome v7.0 (chr-ID 29838; pos 2 91174 to 292145)
tccctaccacacttaacttgcctattgtgtcgaaagtgcctggcgctcccttttccccatgaagcacttacctctccatatatatatatatatatatatatatatatatagagttatacaaaaggttgatatttaaattaaaacttatcaaatttggtcgcctggataaattcaatgctagtggttcactggctataagcaaaatgtgattcatgaaaggtgtatgggaagaagaggtctgtaagaaggtgtggaccgtgtcagggtctttgagattcttatatttgattcaaagtgatgtgttctacttttccaatattttcttaatacataatatgatttttgaaaaataaagaaacaagtggctaatatacgagcaaatactttgatgaattaataacctgaaaataaatcatataaatgaattgggttttgatcttattttacatatcagatatatgctttcggtgcataagattgcataaaacctttcactatgtccaactatatgtgcacttctttcaatccaaggaaaacacatattagattgttgagatgttttaatttttctttagtaatcgagatgcgacttaaactagaacttccaatttacaatttacccaactaaggttcattattattgtaaaatatttatggttttgatatgatgtttaaatggaaaaagaaaaccacaattggagcaaaagaaataaatgtaataatcataagaacaatacaaacacaaaaaaatatattaaaagaaataaatgaataacaagctattaagtgtcacaaataactctgccggagtgactacaaataaaataaaataaaaacacactataatacactagtacatagatgtatatagttcaatatctagtactctgcaaaccgaccataaagtaaagaagataacaacatgaaggatatttagttcccagctggtggtggggagaggaaaggaataga

SEQ ID NO: 50911 - DNA, 716 bp, Ricinus communis
  Intron number 1 from transcript 30073.m002282 (locus 30073 .t000092) derived from phytozome v7.0 (chr-ID 30073; pos 6 33202 to 633917)
tggtatgctgcagttttatttatttgtttatttttttcttaaggtgtgctttgttcatatactctggtgattttctatgttgtgattttttttttctgctatgttttattgactgagacttctcttgggaggccttatcatgtcagattatcacttgttctggccatatatatcaaaatttagcatctacaaaatgaaaaggtagttgataaaaggtagaacaactgctgaatttcagaggggtctaatgtaacttcggaattgagttgaaaatagattgatgcttctggttttatctgaactcttaattggctgtgttttaaaatgtgcatgcatcattgcatctttttgaaccaatgccactggtataaatgcattaggttagatatcaaggaaggaaaatatagaagtaatccaactgacattcgccctttgttttctctttcttcattctcgacttagctttaatctttgtcttacaagattgttaatatacttgtatgtggttgctactccgtgactttttcatatgattagaagttgccagagctgtctgacagataattaaatctctttctattgaagtaatatggcattaacgttttagaatgctgtatttgcattggacaggctgggtgctatcatagattctgtattatgtgatcaatctgcttgcctgtttccatcagtgttgtctttaacatctctgcaggtag

SEQ ID NO: 50912 - DNA, 414 bp, Ricinus communis
  Intron number 1 from transcript 29929.m004738 (locus 29929 .t000241) derived from phytozome v7.0 (chr-ID 29929; pos 1 372986 to 1373399)
gatcaggcctgaggtatgtttccttctttgcttcttcagattttctttcagttttatcttcttgatttacaaacggattgggaaaaaaaaataaaagaatcaaagagacagtcttgattgtatcagactatcagtcgattgttttttaaccaagatttaatgggatgtcttccttctatcgtattaattagttacaataattttttgccagttttcctttctgcaattctgatatgggcatatgcttataactatgcattatttttatgatgtagtatggtatcatctttgttctgttctcaagaaaattgagttgaattctgttatgttctaatcttaaatcgattccttttttgttttttgtttgcatttgggataggtatttcctctgtttgcatctgttggtgttgctgt

SEQ ID NO: 50913 - DNA, 832 bp, Ricinus communis
  Intron number 2 from transcript 30039.m000233 (locus 30039 .t000006) derived from phytozome v7.0 (chr-ID 30039; pos 3 7697 to 38528 reverse strand)
agagaacacaaaggaatttcaacaagaagattaaggtagttacctacttttcttttaaggttccattatgtcaaaacggtgtgttttagaaaacatatgcattttgagaaaacattcttattgggatgattgagagacccatcattgtactaaacacgcatttacttccaattattttgtctatatcaaattaccggttagaattatgttttttgtttatggataatatttacttctatatttgatttactaaattagaagaaatataagcataagtgatcaaaatgtattattatttctcaattgaagaagactttcatgatttttctttttaagaaaataactttgctagcaatatatacatatacatatacatttggctctaagacaagttgcatttgttcttgcttgtctttctggctcacacggcacatattatgctttatgtcaaatccaacttttcttatcaacggcactattcgatagaagttgcaatagttgttgtttgaatttcagccatgaggatgacaagctatggactcttcaataataagtgactaagtatgatatgtaatcataataaagtccattaattttatatacttaacccaatattattctttgttcttttggtatatatgtaacacataaaatgatagcataggcacttctgagagtgtaatgattttgtgctgcaccaaaatgcaaacctttctatctctttttaatcttccttgagtgattataagttgaatgttagacttaaattagaatcaatttacaagttcttgtaccatcatgatcgtataattaattttattttattttcagt

SEQ ID NO: 50914 - DNA, 957 bp, Ricinus communis
  Intron number 3 from transcript 30131.m007250 (locus 30131 .t000401) derived from phytozome v7.0 (chr-ID 30131; pos 2 467362 to 2468318 reverse strand)
aggagagtgggagagagagagagagtggtaaaatattaaaaataaaaataaaaattctaatttatagaaaaaaatacctcaagcgaaacggtgtcggttaacaaaaacgacaggcctcgctctcatctctttgacttggggcaaagacaaataaaaggctaaccctaaaatcagaggaaagaagaaaggccttttcaccatctccaaccaagtccttgctccttgtgtaattaagtgtgataaatctatgctccgtggcgtcgagtgtcttctctttaagcaacaaagagagggttccgtcgctaaatgctgtatctgttctcttcctatttcatgtcttcaatcgactcttctctttcctctgctccttgttgttcagagtggaagtcatctctattcctaactcttctttctttctttgcccctctctcttttcattataaatctaccttcttttcgtttacgcgctctgctttttacaaaacatgagtaataaaaaggtccgtttcttttcttatatatatatatatatatatatatttccagtataatattttttttaattgcctaaaagatgaagtttagcatgtgtttattgattataagtttgcttacgagataaaaatttatccataggggacttaaggatttttcagtagaaaaaaaaaaggtaggaagatttatatgaagtgggtatctttgcagatgatgatcaatttggcaatttggaattatcttttctgttctgagtactttaagcatttcattgtccaatactattatcaagcttgttatggtgatcattttggacaatgactacagaatatggactgtgtctgactttcaggagaaaatgtgtttgcttatgagttacttgttggtttcctacttcttaaagtctgatcatttttcctcaatctctctagcaggttctagtattcggatccttcactgaag

SEQ ID NO: 50915 - DNA, 515 bp, Ricinus communis
  Intron number 1 from transcript 29912.m005351 (locus 29912 .t000077) derived from phytozome v7.0 (chr-ID 29912; pos 8 18850 to 819364 reverse strand)
ttcctcacttgaccgattaccttcccgatcttcctgtacgtatctttttaagcatttttcttttatagaaactttatgtatctgtacggaaaatgtatacacgtattgctggatcaatttataaataagaaaaatggaggtgaaaaggatgagaaagtgaaagttctggattcatttggatttttttccttactaaaaacgagatgcttaactaagttaatcgtaattgtttgttgagttatttattattatttttttctaaaatcatgcatttcttcggctagtaaagtgataaaggagagattctgtttttctggatccttaataattgtgactttttctttaatcagtcaaaagcacattatttgtgacgatcatcatggaaagatgtatttaacaaataatctggaagcatgatattgttgttccgtttgtttcgttcacctgctgattctgtgtttgacatttattctgttgtagacttatcccaatcctttacaagacaatcctgcata

SEQ ID NO: 50916 - DNA, 502 bp, Ricinus communis
  Intron number 2 from transcript 30076.m004513 (locus 30076 .t000077) derived from phytozome v7.0 (chr-ID 30076; pos 4 42953 to 443454 reverse strand)
tcaaggtaattagcataatatataatatgaatctcgtacttctatcgatctttaataattattttagagacactctgcatgtatgaaaaatctttaatccaattctttggattttaacctaacatgtaattattactttagttgatgttgggagggaagaaatctaaataaccaaaaccaatttcatcatataagtacttggtctttttgacaagaagagacagaacttaattaagtaaatctatgcctttttcttaaaaaaaaagaccccttttcagcaaaaaataaccatcacgaatatcttgggcactaccatcagattcacggttctcttggttttagcaatttgagtggacaaattttgtctcgtgcataaaaaaggccatgtacatcagtttagagcttttttgaatgttaatttgtttggtttcgtatcctgatatggaattggctgtatttacatgcaggctgtgatcacgagaatcaacacaataacaagagt

SEQ ID NO: 50917 - DNA, 487 bp, Ricinus communis
  Intron number 1 from transcript 29852.m001988 (locus 29852 .t000007) derived from phytozome v7.0 (chr-ID 29852; pos 3 44624 to 345110 reverse strand)
acccattggttccggattcaaaggattagtacaaggttcaaggcaatataagaacattcctttgaaaaccaaaaagaataatttattcggggggaatttagagatagagatattttattccaccataaagagttatttgattcttgcatttcaaaaaatttctacaatacatcagaataatcatttataggatttaatgattcctaagagcggattcatccttttttttaattaacgtggtcctgtgatttgttcatgtgattcgttaatagtaaagtaataaagaaataaagaaattaaggaatagaaagaaattaatcgcttggatcgtatatcaacgtccaatctccgggaaaagagaaggttccatcggaacaattatttatttcaaggtaccccgtttctcttttttctttaaaaaagaaaaaaaagagaggaagtgtggggagaaatgataagaagatattggaacattaatttggaagag

SEQ ID NO: 50918 - DNA, 506 bp, Ricinus communis
  Intron number 3 from transcript 29889.m003288 (locus 29889 .t000054) derived from phytozome v7.0 (chr-ID 29889; pos 2 33015 to 233520 reverse strand)
attataggcaatagaggccttggcaagatcaagaggttgaatctccttaaacccctcttttaagtgttctctctttcatctcggtggtgcttggctgcatttgattaatttctctgttcgtgtgatttttcattggttcaatttgagtaaagttttattctttttgctgaggacaataagtgatggacgaatttatttttgactgttgatgctaaaatgccctgtttccactgtacagtggaaagacaccaacttttgagagatgccatgtttttctcctctcttcatttccagttgacacaaatatgctttgatcaattttcttatggattgaaaagattacgttgaaagatttctgtgccaacaagtataaagaaacttggtgtgttgtagttcatttaaagcatgatttttagactcttcagtagataaattcttcttcttcttcttttgcaatataattggttttctgattttttgtttatatgagctttggcagggctata

SEQ ID NO: 50919 - DNA, 656 bp, Ricinus communis
  Intron number 2 from transcript 29939.m000529 (locus 29939 .t000007) derived from phytozome v7.0 (chr-ID 29939; pos 1 40493 to 141148)
ttgaacctcatcaatctcagtgacaaacctcagtatatgtcataaccagttaatctcatcagtatatacacaaacacatatagaaacctgcaaacgccaccttgattttaggatcatgttctttaatgtttccatggttctctgaagtgtttgagcaaatgggttgctgtcagtgtaattgttttttccttttgcatcgggtacctgtacgattttgtgacttttgtgtcttgtaactcatgttgctatgagattcttcaaatcgaagggatttgttgatttactttcagggtgagccaagaaagtgccttacttttatgggaactgaaactcctttaattcactgtggaatatatcgactctaaaggcccttcatttctatcgataacaactgttttaagtatagaaaaaggattggaaatgattgaaagtaaccatttttttgtaacttcgactcttaagtcgttctatcaaaatttgatgagattacaattctaaaaattatgactgatcatcataagaaaatatattattttgaaaaactatctgtattgttttgaggttttccaatgttttcattttcctcatcccttaggctgatatgtattgttataatcataggttcttggagataagtcctgaaggaaaggtgcctg

SEQ ID NO: 50920 - DNA, 820 bp, Ricinus communis
  Intron number 1 from transcript 30003.m000338 (locus 30003 .t000019) derived from phytozome v7.0 (chr-ID 30003; pos 1 25279 to 126098 reverse strand)
caaaaacttgaaattcaatttggcactcacaagttgtaagtttgtctttaattttaagtgttgctaactaacaattaattaatactgcttcttcttttaaggtcttgaactggattttttgcaattgccaacctcgttgttggagttgtatccatactcgcagcattactctctttctctaccaatttgcctgggattgtcttttctaagctcgtcttttgcataggcaagcttgtttacaagttaagaaaggaaagggcgtatggagatggagtggcaccatgccttggttctattatccatctgaaaatggcccgctgtttggttcctacacagatattgctggattgatttgtgtcatttctcagttcattcttgctgcaacaaattatttattgtaaatccaatcaaaatatctgcttggcctatcatttttgcctcatgtcggttgggttctatagttgggaggaactcggacagaatatgcatgagtaagataactcatctattattgattcaagatctttagttccatgacaccaaacaagatttcgttttccccatttttgcatagcaaattctgacttcatatatttgatagaaagcattaattatttccatttcttgtctcatgtaacacttgagtaattatttgatatgttaaatgttctgaggtacggtaatcattcttatatttacccgttatccatcttatatctcgagtactttaatcactttgttactctttaaactgactgtgttattcaaataagcttgtgtttaatgcttgtaaatcagcactaacaagcaaaggtaatag

SEQ ID NO: 50921 - DNA, 992 bp, Ricinus communis
  Intron number 1 from transcript 29841.m002886 (locus 29841 .t000150) derived from phytozome v7.0 (chr-ID 29841; pos 9 15570 to 916561 reverse strand)
ggtatgtcccaatttacatcttttagagcttttcgcatatgggtgtgtaataacttgattgttaccgttgttgatatgtaatgtttaggttttgttgtcttttctttttggagttgattgttgattgagttgaattttttaattgattatgttttttttttttttggaaaaataaaaaattaagggaatagttggagcttaaattttgtagcatttgttgcaaaggtgacaattttatgaaatagaggtgagactgtgaattttgatcttccaaactatgctttttaggttgcccgcatatatatagcttcccttgtgctagctagctgcctcattgtactagaaaaattcattgcaatgtatctcattttcatgtccttttttgttacaaaattcagaaacggagaaaaaaaaaatctttgttctcaaaaatgcataaaatttgctcaattagaaactaaattggttgtgatggttgctttcgtgattttgggaactttacatgtgaatattcttggtcttgataagtaaacggtttaaggatggtaatttgggtctcatagaacaaattgcagaaaatcagagtttctttttgaaggatgtccatgaaacttgcagcaaatggaatggtaattagagctgcatagaagagcacaagtagtataaacttcttgggtgataacatgaattttagattcataatgaactgcagttatgtgcttggaacttaatgccagaactgctctaatatattattctcagttgttatccttgagcttccagtgatccaatgggtggtttagggatagcagaaattctggtgtagcttatagatgtccaccaaagaaattctcacttgtataatgatgtaaaaatacacattttcagctgtaacacaaatatttatgcactttgagcttgcattcaattggccatatttcataatatatcctagtactaaatgtaggacggacgggactctatttggcctc

SEQ ID NO: 50922 - DNA, 542 bp, Ricinus communis
  Intron number 4 from transcript 30138.m004015 (locus 30138 .t000189) derived from phytozome v7.0 (chr-ID 30138; pos 1 300897 to 1301438 reverse strand)
aattgaaccttttattcagtaaaacagggtaagattttagcacttgagcttctttttggtcctttctttcctttcttcccccaattaaaacaaatacaattatgaagttgactcattagtgttgtctataacaaactcttgatgctaatatccaaggtagtttacttattctactatagcactggtgttcattaatattaataaacaactttatggctttatcttttcagttttaagttctagcataatacatggaacataagtatctaagtaatgttatatgtgataatattatatccttaagtttgctgaattcataaattgaaactttttggcattgaagcgttcccgagttttgatttccaatactgaggaatttgaacctgagatttccttaccaattctgtgcccctcacatatttttcatcgacatatatttaatgccaaagaaatggggctttggaagagattgagggctcacttcaggtgtgcttataattagaattattgtatctgcagggctattgtgacttttagcttaa

SEQ ID NO: 50923 - DNA, 757 bp, Ricinus communis
  Intron number 1 from transcript 30138.m004015 (locus 30138 .t000189) derived from phytozome v7.0 (chr-ID 30138; pos 1 302123 to 1302879 reverse strand)
catccttggttttttgaggtcagtttccaattgggttcttcttgctttgtttttgttttttttttttttttttttgttgaatgacttgaaagtagcttagatttggttatttatgtttctcgtgttactggtctttgacattctactgtcaaaatttaagaactctactatcaaaattcaagaacgctgctttattagtgattaattgagctcagctgccattttcaaattttagctgtgaatttttgcatttgagatcggtttgttagtttcttattgctttagatattagtttttgtatctagttttctgatttcaggttcggtaagatactatagttgaaattaatggcattcatttcactcttggtatccatctgtaaccaacagcaggtgaagcccttttgttgtcacaattatcacataattctctacttcctttattgctttaagactttcagctttatactataccattgttttctaacttatctttgtgtttcctgttttctgtaactgaattatcatttcttctcttcttttctatgtctaaatctggacgccgtataatttctaaactgtttgtgtaattttctttttggtccttgcattactttatttttcttccttatgtaaactttatgtatccttcttaaaattttcacaagtaatgaaatgatacagcatggaaaaagttgatccttttatatattttagttgcagttcatttgaataagttgaggtggtggtgaggctat

SEQ ID NO: 50924 - DNA, 717 bp, Ricinus communis
  Intron number 1 from transcript 30138.m003832 (locus 30138 .t000006) derived from phytozome v7.0 (chr-ID 30138; pos 5 6591 to 57307)
aggaattaattgaagatttgaagagaaagcagcaggtaataatatctacttgtctcttgagtttggctttatttactgattatgttatgtttttattacattactgatctgaattttttttttcaatacatatatctctttatattaagagctgcaaggcatactgagtgtcattaatatgtcctgtaccaacatttttattaatttttcatataagaaaagctcaactattatattagatatttatggattttatgtaaaaatataaacctttagattctcgtaaaatgattttcatacggttttaatggtttctgatgttagttaaacaccgtggaaagcatatacaagaacaaaaaagaaaaattaaaattaacctcttctgtttaagttgaaggtttttcttttttcagctagactgtgttagtttgaaaagttatatgttcttgcagtatgatgctagtcttctctccttgtgtcattaacctttgctagtactaatgcagtttaaattcgattcctttgaatattgcaatacaaaattcaggtttatgcatagagttctcatattgcttcaaagtttgaaaattggatagagtttccgtctgttgttattagaaatgtgttaatggcaaatatttttcttgtttgccctttatggagacttatcatcccttgttcatccttttctatatggtaccttctcaggatatcgag

SEQ ID NO: 50925 - DNA, 697 bp, Ricinus communis
  Intron number 1 from transcript 30076.m004602 (locus 30076 .t000166) derived from phytozome v7.0 (chr-ID 30076; pos 1 080565 to 1081261)
cccttcatttgctctctctttggccgttcccttaggtaaactcacttctcctcttcttcgatccctaaattcgttctcttttttatttcatttcttaaaattcgatctctgtttcgatctgatctctttctccataggtgaaatggagatgcgcttaattcaattattaattcttttgtttgccatttcgtctgatcttaagatcttgacattcgtttaaggttttgatttattaccgtttgaatccctgtcctttgcttgcctgatttaaaattgttttgttcgtatttattagatttcgagatctgtaggttttatatgtttgatttgatgcttgatctaccagttaatgatgcctaattcaagtcctattttgatgtttcaaacagattaggttcttatttataacaaagccatgtgaatccatctgtttgtgtatatgatttcgaatcttagccgtcagttattttattgggagtctaattcgtgctgtcattgtgatcttatttatttttaattttattgtgacagtttgttttcttgctgatggatcatgagatctttacattttgaatttattagttgtaaaaaattgaagcatttggcttggtttcctttgaaagcttatcattttgggagggagtgatggggtgtttgatgtaatcttaaaattttcttcattagcaggtgtgaaaat

SEQ ID NO: 50926 - DNA, 868 bp, Ricinus communis
  Intron number 5 from transcript 29844.m003333 (locus 29844 .t000179) derived from phytozome v7.0 (chr-ID 29844; pos 1 014844 to 1015711 reverse strand)
ttggccctggccttgggagggacccatttcttctggtgtgcttttcctttgcctagttttttaatttatatatgtacttggctgactgtcgaatcctgatatctaactgagttttgcataaaccatgtaaatataacttaattgttgacgtgggagctatgtatttgaatttaaggagtttgttctagtttcagtctgtgttctactgtatgctaaatatgcaagagacattatgcgatatgtatcctagagaaagttcaggacagtacatgcatataagtgctggaactgttttcttgtcgtgtatatttgctgttgtctgactatgggcttgtgaactgcctttcttctctttatatgccaaatgattgtctgtgaaccttatgcgtaatctcttcagtcatctcatgcaaaataactttgttaaaattgtaatgatgaaatcctatttcccaaaagcacagagagaagtgttctctcgcatcatttttcatagtaaatctggttctttagcttctttgttgatatgtccttttttattaaatctgctttttcattttttgtaaggtcgacttgaaaaatgatatgtcctgcttcttcttgtttttttgttttgagtagtaaaattgctagactgtttaattacttgcctggcatcaaaagttcttttgggttgttttcatctgcaaatgcttgcacactgccctttccacctagttttacctcatgctcactaccactgcatgcacatacatactctttcattttaggtttacctctttattgttgtactttttgtctggctctgcaattctcttatttttgcttcacaggactgtgtgagtaagattatcaagcaggcaaggcg

SEQ ID NO: 50927 - DNA, 705 bp, Ricinus communis
  Intron number 3 from transcript 29848.m004478 (locus 29848 .t000034) derived from phytozome v7.0 (chr-ID 29848; pos 1 71513 to 172217 reverse strand)
gctgcttttcaggaaagggaaaacctacaacacaggtttgtggtgccttatttgatctagtgtatatagttactggttttaatctggttcatacatattgagctttgttttactgctgttgtgtcatatgtttctaaattttgtatatttgatgtgaatggaattttattaggtgctgattgaattaggaaaaagtaaccacttggttcattcattggcttgattatgatctgcaatgagtttggattaacacttgcatttgcacaatcacattgcttctccttttctatcaaatatattttactggttttaatctgttcatacatattgagctttgttttactgctgttgtatcatatgtttctaaatcttgtatatttgatgtgactggagttttattagatgctgattgaattagaaaaaaaaaattcacttggtttattcattggcttgattatgatctgcaatgagtttggataacagttacatttgcacaatcacatcacttgtcctttttatcaaaatattagtaaatatatgactaatgaaagaattgggtttagcgagactagatttctgtcccataggttattgaagaaactttttcattactagtgcccttgaatatggtatttcatttaaacaatgatatgtctccattctatttcaggtgactctttctgtattattgactgctgctggggt

SEQ ID NO: 50928 - DNA, 753 bp, Ricinus communis
  Intron number 3 from transcript 29983.m003190 (locus 29983 .t000089) derived from phytozome v7.0 (chr-ID 29983; pos 5 21727 to 522479 reverse strand)
aggttttgctatagttatatcaatatatgccttggtgattgcgatatttctgttttttcttttcttggtcatgctgcatttgcttaactttggacgtgagtgatgtaactttagacttttagagaacgtaacatgttacataataaaagttggatgagttaaatgttttattgttttcatatgcctgtgactgctgcaaatttacaaatacaagtacaaaggcatgcgattagtgaattataagatttgtaggacagtccttagttgatgtaatgatgtgcttgtggcaaaagagaaaaagaaaaatagaataatgtgtatgatatgctattatggtttagtagtagtatttgcctaaaacttgtaatatttttcgtgtttgtttttatctaatggcgtttagatttctgtggaacattattgacaatgaaggtcctctagatttcttcaaatgttacagttcttagatgaatagtttgtaatttcttgatattttgattagcatctgagactatgatttactgctaaaaatttcttaaaattattacctttcctggatgcagaaaggcattaaatatatatgggcttgatactctttcatgcaatgattcattcaggactaaacattgtgaagcattattgttggtagaaattattgagcactccctcttcagatatggtcctctgtaatttacatggtttgtgttttcttctgcagggaataactctcgtcatactcatagctcatatttt

SEQ ID NO: 50929 - DNA, 605 bp, Ricinus communis
  Intron number 1 from transcript 29908.m006238 (locus 29908 .t000289) derived from phytozome v7.0 (chr-ID 29908; pos 1 832149 to 1832753 reverse strand)
aggtatatactagttttaattgtttaaacggtctcgttttgattgtttcaggtttgcagatttttatgagtactttttcttcgtttgttaattttttggtttccttctttactcttttccataagtttgagatttgtttcttttaaaaaaaaagtacaattgaaggtgcttataatactacgcaagtgtttaatttactgacaatttaagcttttggcgtatattttgtttaaaatggcctagtttatgaattaaaacttgctttcctcagttggtttggccctttttcgtataaattgtggttgtccattaaaatcgtcacaaagttatacggggcttgccacctgctataaatgttaggagatgaaaacactttactctgcgttatacatgggcaggctactatattgtagatagacatttctttcaatctttttcctgtttctgatgaatttgtcgcatgctttttatgataaactaaaattgcaatcttgagtctcttttgataattattctggctccggatatgatggaaaccacttctcctaaaagcttttcaggttgtaacttagatttttcttcatgcttgtttccgtgatgcagtt

SEQ ID NO: 50930 - DNA, 834 bp, Ricinus communis
  Intron number 3 from transcript 29822.m003456 (locus 29822 .t000131) derived from phytozome v7.0 (chr-ID 29822; pos 6 96169 to 697002)
gacattgttctgatcatgtgagcacttgttatctcacagtggaaatttgttacttcttgcgatgctttcatttgcagtttgcctttatatattatcttattagtactactgtatgtgcttttgtcaattcaatgttggatggaatattgactctatgccacttcccataattttgaagaattcttttgtgagatttttcacctgccaaattctatgaaatgttattgattgcttgtttctttcttagtgattgagggtcagaagaggaaagatatagatggaaggtcatatttaaagttcaatgaatgcatggagctttccggttttaagattttgatatcagtaatagctgaagagaatatatatatatatggataacagaacgtgctcgtttttattgttgtgttagcactagaatcttgcaatatgacagattaattcagtattcaacttagagaaatgcctccgatccctaatttttttttggatctggaactatttcatagtggaaaaaaaaacttataacactatgatgacctctggaaagaactctgatacacttgatcaatttctccgaagtcatgtcctttgtgtaaaatcttcatattacacattactcaaacagtttatatgacctctaaacattaaacactattatgaactaatttagctataataaaatgcttaatttcatctgggacttaaaacaaagcaagtgtaatagagtctagccagcatctgctaactgaaatcattgattttacttataaattttgtttataattcattatatttgcagattttggcagaccattatcctaggggtcatcgaga

SEQ ID NO: 50931 - DNA, 548 bp, Ricinus communis
  Intron number 2 from transcript 29830.m001470 (locus 29830 .t000087) derived from phytozome v7.0 (chr-ID 29830; pos 6 63546 to 664093 reverse strand)
agtaaatcaaagcggctaccttccattcaagcaaggtacaatgtcagtgtctcagttaggtaattggttctatgcaccaccattttgcaacagaattagcaagatcatgaatttcaagcgtttgcctgttaacagcaccacccatgcgagttagaacatgaaagctatgacattgatgaaaatctcataagattattttttctctattttgtttttccagttagtttcttctcctgttacacatcttacatggtatgaattatgtttatctgtaggattttctttgtttcatatatttgatagaagttttattgtgcatttttcgatctgctgcattttcttttccatcatttttctaacagatgcctattacatttggaattatttggatcttcaataagtcttcttttggtttcatttggatatcataatgatatctttcttcttggactgaagtccaatcagcattttctaactcaaatataatcttttttttcccttataaaaatacagtggcgaaagggacttatcaagtagtgcaggtatct

SEQ ID NO: 50932 - DNA, 844 bp, Ricinus communis
  Intron number 1 from transcript 30057.m000083 (locus 30057 .t000003) derived from phytozome v7.0 (chr-ID 30057; pos 2 2324 to 23167 reverse strand)
ccaagtgagtttatttctgtcgtcttctatttgaactttatcattctttttattcttttttctatttattttaatattgtatttagatcattatgctgttttccctcattttctgtaattttttatgttttttttttatggattatgttgatttggtgttgaaatttcattagaatagcttatgtagaaacttgagtggcttctatatgctttatgctctctttgatttccaagaatacttgcaagaaaaagaaattaagggtttgggttatagggtgttcctgacaaaaaaaaaagaaaaacacataaccattgaattagtttccaattgtcatgtgttgcttgcagaacaatagattccaataccttctttctttttctttttctttttttcttcttaagaaagaaaaacacataaccattgaattagtttccaattgtcatgtgttgcttgcagaacaatagattccaataccttctttctttttctttttctttttttcttcttaagaaagaaaaacatagatggttttagagtcctttgcattggaatgataaatactgaatgaaattcacaacaatttggagcagagagaagtagtgatatagttttttggtgaattgacaaccaaaagaagctatgtgcctttgacacaaagctcatgtttcctgctgcgatttcttgcttcttaatatgagagatgtctatgaaaaaataagataattgggtcattccctgtgtgggagatttatgaagagtctattactaatcattccctctctctttctcttgcttatttgatgcacaggaaaaggcagctttcattttctgcgttgaagacag

SEQ ID NO: 50933 - DNA, 966 bp, Ricinus communis
  Intron number 2 from transcript 29822.m003513 (locus 29822 .t000188) derived from phytozome v7.0 (chr-ID 29822; pos 1 115926 to 1116891)
aaggattgtaagaggtatgttatttggcgttacttttcttttatctttatcttttagttgcacttattgttcttctccacacttgaacattaccttgagctatatggcttaaccatacatgtattcaatcattcggaacatgtcatcgttttgtgctggcttataggaatccttggcaaagcattttagacagaatcaaaataagtaacagaaatgaggttcttacgtacatgtctagattgaaagactaagtttctagtggaaaaataattttggagtctcaatctaagaagagtgcttacccctgtctatggtagaactggaaaagtttccgtgaagtctaaggcagctgacctttacttcaactgtttctaccgtgtatttcacactctaacccataaggaaaaaaatttaatgcgtgatacttgtcatgtgacttctagtgagttacttagaattaggtgctgtgctttgatggatcagaggctgctactgaagacataagctatttgttagcattcccttattatgggttcctgtttgtcaactttatagttaattcatatgcatacaactgtaagttctttaataatcttccatatttcgtactaggattttggttatgaattaatgaggccgtatcaaaccctaagaactcagttaatgtttgctagatcaagggactgtggcattgcacttttgcatcacattcaaatgttctaccaaaatatgctcttagtttctatttttaatataaaggtttagttcttaattatttggtttactatatttcaatattgttctgctactctagtgtatattccataaaaaaatttccatgctgaattgttatatatcttttatctattctattttcatcccttaattattagtaatgccttttgtcatcccttgctgtcttgttctccaggcttatcaaagattttgacagagaagtgaaggatt

SEQ ID NO: 50934 - DNA, 556 bp, Ricinus communis
  Intron number 1 from transcript 29929.m004538 (locus 29929 .t000041) derived from phytozome v7.0 (chr-ID 29929; pos 2 51657 to 252212 reverse strand)
gaagaaaatttggtctttatataatcccaaaacaggtataattgatgcattgacatttgcttatgtttgtatataaatgcatttattcatttgtctacttacgcaagtatacgagttgttgtatcttcttttgccttttctggtattgagtaaggtttatttatttggtgctgccacttttgtaatctgcaaaagcttggattttttttttttttttgttcttttcttcggcaaaatttgtatatttgtgattttcccagctgggctgtctttgtccaattatgattcccttctccttaggaaggagaatttcaagacagtcgtagtcttgaagtgtgttcctgagaatagaatttattcaagtctaattttaatgcttatgactttgtctttgattatccaatagattaattgctaagtttttgcaagctgcaatatggaacttccaggagacagcaatttgttctgctaaatctattcctcggaagtttctaagtttttcctttaacttttttccttaggttatacagaagtattggacgaaagcactgaactc

SEQ ID NO: 50935 - DNA, 665 bp, Ricinus communis
  Intron number 1 from transcript 30068.m002551 (locus 30068 .t000041) derived from phytozome v7.0 (chr-ID 30068; pos 2 47246 to 247910 reverse strand)
tcatcaaggtaaaattataaataataataattgaatgatataattacttgccaatataatatagaccactcaaatgatacaatcaaaaaccaaaactcaaaagcacgaatgcattattgccaatgtattcaaattccataatttggagaacccatttcaaatattataatgatattaataaaatactctatccaatgtttttcattcttataaaccccagtaaatcttaagtgtaacatcttaatagaaatttattcaaaaaaaatctctttagaaattcatttaatgtgaatggagcttataaagtttagatcttactaataaaatcatgaaaattgtttcttgctaccactcaaataaatagcaaatactcaattaaaagccatagattttaattgatggcttaatttaatgatgagttgatactgagcattaaaatttaaattcatcccattttctttaggaagtgaaaaaacattgattaatatttgcatcatttgcatacattaaagggagaaaagaaaaatcaaatatcatcgattttcatgggtgtggtccatcctgcattattatactttctgtctgttccttatagtaaaaaatgatttttttttttcttttcttttatagcttggagtgtattttaagccacagcccagtcagta

SEQ ID NO: 50936 - DNA, 679 bp, Ricinus communis
  Intron number 2 from transcript 29912.m005574 (locus 29912 .t000300) derived from phytozome v7.0 (chr-ID 29912; pos 1 880328 to 1881006)
aaagctcctcgcatcacttctaaaaatctcatcaggtaataaaagaattgagtttttattttaattagtcttaaaattttcaaactttaatttaatttttttttcaatctcaaactttttgttttgtgctatttgatgcttcattattacaattcgtttatgtcagaattaatatttagagttcaattctactatgagttgaaaatggattattttagtcccttgtttgcatagtttattagaaatgtggatcttttggattcttcaagtggaagatgatcaagaagaagcgaattgaaattgtttactgttaattttatctcctgattatgtgtagcgattaggaagcctaattatgtatctaaaagtttgaatttttggaaccctcatagcatgaattagtcagagcttttagaatgattgaattgataaattttagtatggggaaaggatttgggaggggttatgttatgattagaaaaatgatgtcattctcttataaatggactgtttgagatgtattactagcataatgctcttgatcgcattcttgactactctacagtaggaatgttctttcagcatgttttgaatttctttttagtacaagcgatgccagtgtagtattttgattggttcctcttctgcagtgtaatcttttgtgaggctgttgctatat

SEQ ID NO: 50937 - DNA, 810 bp, Ricinus communis
  Intron number 3 from transcript 29868.m000340 (locus 29868 .t000004) derived from phytozome v7.0 (chr-ID 29868; pos 2 9661 to 30470 reverse strand)
aggtatcaattttagtattcttgctcactcatgctgccttaaagatatacttgagttggattcactattcttttaatataatcctagttttttgttttcttctatgaagtcttattacattctgcaaattcatgtttctttgttttcaaactgagaactaagggctagaaatatttcaacgtacagggtgctaaatattgttcaaagaagtaacattatatgttaaaacacatgcttctcctttgtttgaaatagcctaagattgtttttcttctcactaccaaatagaaataaattaagaagagcattaatcatagttgaattactacccaatgaagtgagaaacagagaaaagactgttcatcgtctcatggttaaatataaccaaccctgagtatgaggtgatgctgtttgctctaaacttcttgcttgccaatatataaccctttcatactcccaatgcttaaatattatttgtattcaaatccataatacctagtattccaaatttgctagttcaccagtgatgctatatctaaatgtatatctttttgtccccttttcttgcggttgttgtcatcatcgtcgtcatctagagatagtaaagatgtagtttgttttgagtttttcctcctcttttcaccttagaatgaataactgaacaactgcaataagtgataggtttctaatgcgtataaaatatcagcaatgctacttactgacatttgtaatgcttaaataattgttgtccatgtttgctgagtcatctctctaggtggtaaccctgtggtatagagcaccagaaattct

SEQ ID NO: 50938 - DNA, 643 bp, Ricinus communis
  Intron number 1 from transcript 30114.m000525 (locus 30114 .t000023) derived from phytozome v7.0 (chr-ID 30114; pos 1 56368 to 157010)
cccacctaagtccagaattagatatacgccccaaggtaatttttgtagcatgtctttaaataagctagtgtcagttgctagttattggtttgtttctggtttatttagtttgcttttggtggggttttgtgttttagggtctagatatgggttcctttttttgtttaatcagcttattctttatttaaaaattgattataattctatactgctatatttcccagaaataagagaaataaaaatagaattgcataagcttatacttgtaatgattatcatttctggttgtatgatatattttctatctacattcatagaaacaattttgatcgattactttacaatttcacttaatttattgatttagcccctaggattgtaaatgctgtgtccgtatcctttagttttttaagatattaaacagaagaagttattgtaataaaccaaggaatttcaattgagtacttagttttatcaggtctaactgatgaagaatttaaaactgaatgtttaaacctatttattttcttgcatccattcaaaataccatttggggactgtctagtttttgtttttcaaagctgaggatttaaattttctttgtctaggtgaagcacatttttctgaggattttgttcaaaaa

SEQ ID NO: 50939 - DNA, 577 bp, Ricinus communis
  Intron number 4 from transcript 30076.m004491 (locus 30076 .t000055) derived from phytozome v7.0 (chr-ID 30076; pos 3 11034 to 311610 reverse strand)
cttccagcttgctcgtaccaataatcgtggtgacggtaaatgttctatctttcatgttgtgcacgtttgccatagacttcaaacagtaaaactttgatttctgtttatcttgactaattattttcttttttaatctttctttcaaatttattactgttagtcttggaatttggcgcataattatcttttgtttctggtcttacaagttgtattatcaaccttgaccatctaattcaactgcggatgacctaatctggtccttttccctagctgcaatttggacttttaccattttgtagtccattagatttaaggaaatattatctagcttcaattaatttattgcttttcctttccttcttcttttttttttttctttaaactgtgatcaccgagttttctcattttacttgaagttgctcagtggttgttttgtccctcatgttcttatgattaagcttcaagacgttcatctatataagtttctgttatctacttataatcttactttgtggcttaaaacttttattcattatatataggcctgctaactgctgtgcataaggactactttacg

SEQ ID NO: 50940 - DNA, 445 bp, Ricinus communis
  Intron number 1 from transcript 30131.m006993 (locus 30131 .t000144) derived from phytozome v7.0 (chr-ID 30131; pos 8 25621 to 826065 reverse strand)
cttgaaactgactggtatgattttaatactagtaataataacagtaatatcaactcttcttctgatattattattaacccatcttttactctacaaaatcatcaccatcacgattttagagaccttgctttttgttccagttccacacctgaaaaccttctcttacagcctttagattcttcctcttcttgttctccatcacaagctttccatcttgatccttctcagtcacaccactttttgcctccaaaatcttgtttctcttctctttttaatgttacgaatatcccttctgataaccataataataataataataatagtaatagtaatggctttgatttgggctgtgaaagttcttttctttctcattatcagtctaatcaagcttctaactttatgggttttagtgggtccgagtctgagtttcaagctacccagttga

SEQ ID NO: 50941 - DNA, 938 bp, Ricinus communis
  Intron number 3 from transcript 29897.m000357 (locus 29897 .t000003) derived from phytozome v7.0 (chr-ID 29897; pos 1 32690 to 133627 reverse strand)
ctgaaaaagtaatttcagaacgccttgtaagtttacgttctcaaattttaagcttggacattgaaattttacctatttgtttgttttctgtgcttagctttttatcttttccatttctaagtggggaggattggctgtgcacataaattatcctacaaattattcaacaaagccacatttgatgagcagtttagcacaagaattaccaaatatgagcaaccgttgaagaaacgatacgtcgtacgtagagggcatatgtgcaaaattccttttttaaccttcctcctttattatgtttgcagaaattaattaacttaccagaaaccaaaactgccgtttttttcaaaactttgacaaaggaatccattccactgtgaccgtcgatctgaatatgcgaatcggtaataaaagtaattcaaataaaaacgcaaacaaaaagaaactagccgttacggctcacaaattcaaatgcacaacactaagttgcccgtttgttttttcattaaagaggaagagaaacaaatctcttcttcttcgtcctcgaaaatacctgcaaaatcagtagaagccattctctctctttcaacactcctctctctctttattgaatttatttccttaatatcgaagctcatgatctttccttatgtatactggaaaagattaaacttaccaagtgatttatcttctgtttcttcctttcccttcttagatttccttgcgattgaattatggttggttgatttctttatttgagacgattgcttaatctggacctggtactgcttatcgaaattgtagatacttgatttttagttttcctttttttctttttctttccctattctttctcgtgctgttttgttaagttttcagcagcttagttgaattttacagtcatctaatgaatgtgtacctcatcattttgttgggtgtag

SEQ ID NO: 50942 - DNA, 685 bp, Ricinus communis
  Intron number 2 from transcript 29897.m000357 (locus 29897 .t000003) derived from phytozome v7.0 (chr-ID 29897; pos 1 33711 to 134395 reverse strand)
tggctcagaaggagattgtggatcttcagaaacaggcatggatattaggggcctttttctttcattttgtttattcaattttagtggcttatcttgcttaatcacttccaaattccttgatatgatttttggttttcattatccttcagcccacaccccctaccgccccttgaggacaccagcatgagactaattttatataacattgatgtgttgacttggaaaaattattgtgactaggaaaagaaaaagaaatcaccaaaattgtcgatttgaagtattacatgaaatatatgtgcccttatttatgacactaattataagtatagtatttttcttgttgctattaagcgtttatgctaaattgctttgatttctctaaaagccccattacttttttcttacgattacgtccttgtcgattcaaaaaaaaaagaaattattaactgctcatcttcttttcttttttttataaaaaagatctctctttcttaaattttattattctacatatatgctagcgtgtgcattagatgttggctgtgtgtcaaggcatttgtacatatttccttttgttaaactatcgttatagtttattctttattttgcttgccagtaccattcttttaatgctgactatgattttgcaggtcacagttcttctcaaggagtgtcgtgatataca

SEQ ID NO: 50943 - DNA, 889 bp, Ricinus communis
  Intron number 1 from transcript 30065.m001142 (locus 30065 .t000007) derived from phytozome v7.0 (chr-ID 30065; pos 3 44996 to 345884)
gtaaatataaacaaactatcagtttcacgaactaaatgtaaagtttctttattttgtttttggtaaattgaataaatcaaagattaaaatcgaataataataataataataataataataataataataataataataataactacaatacaaaggcagaaaagaagaaaagaaccatacgaacattaatgtttggccaccaatgcatgcatatatgaagcttaaaatagcaaacagaaattagaataactgggactaattaagttgtaagcaaacattataataggcaactaatacaaaatccctctgcatttttaggtgctctgcaatttttttttttctcttcgctcttctgaggttttcttacccccaatttcttcttctcacttagtgtggctgattgctgcaagcatttgtcaacagcaagtttcttttctgcctttgtacttttgcttagatttcatggctagtactcctaatgaatttgagggaaaatacctcttctgatttaagttcaaacccttcttcttccctagaaaatgatcattccaagtatcctcgttctgtaacttctgtaaatttggcaatgtttaaaaattgtataaattacctaatacttacacattatctctctgccctgctggttcttttgccagcaccacttttagagagaacgaaattgttctttttgaagaacagctgaaggctgggtttagactgccgttaaattattctttaggctagttgtacaaatctctaggtgtttgtccaagccaattatatccaaactccattaggctagctttaaataattgtgcaccgagcacaagattactactacttcaaacctcctttttgcattttactcttctgctttaggtttccaagg

SEQ ID NO: 50944 - DNA, 698 bp, Ricinus communis
  Intron number 1 from transcript 29980.m000180 (locus 29980 .t000008) derived from phytozome v7.0 (chr-ID 29980; pos 1 20886 to 121583 reverse strand)
tcatcaaggctaaaggcagattcaaagggtatatttcctcttcctcttcaaactttaattagcttaacttgtgggatattatgtttggcattaagattattagttagattactgcttgtttttattgctagcttcatgatgatgttcaaatttcatttcaaattggtgtcaaaaccattatgtttttgttgctagatttttgaaattttatcctgtactaaaattttggagtcaaaagagcttcaccatcatatagttatataaatcttctaatatgtctttctcaattagaattttatgagtcactgaatcaacaatacaatggtgggtaattacgctttgagaagaaataggtgagatgcatatttagatatatcaactttagctatttagttattttaagattttaatttttaatttaacttgataagttcttgaattttatttttataatattttaaatattcttttgaatttaactgaataaatatttaaattttattttttgataatatttaaacatttgtccacaatataagtagatatgttaaatgaatgcagatgtctaaaaatatttaaatataaaaaaaatatgttgtgatctttatcagattaatcaaaagttaatatactactttaaccgaataatcttaatttatttgtaaattttatctttcatatattttttcaaggcaagc

SEQ ID NO: 50945 - DNA, 917 bp, Ricinus communis
  Intron number 1 from transcript 30026.m001447 (locus 30026 .t000011) derived from phytozome v7.0 (chr-ID 30026; pos 8 0592 to 81508)
tgtgcagaggcctggtttaagctcaaaggaaacaggtaagggtttattttattaaaaccagggtctgtatatgagttctgggctttctgttgtgttttgtgttttgatttgattggactaagattttagattattagaatcgtgtcatgtaatctttcttttgcaaatgaaaatggctctgttatttttccaaatatcttgatttgaacaatgagttcataaattttctgttcgtagctcaaaaatggcttcagattaggaatctgcatgcgtccttttaagtaatgcttgaaatatatctacttaatggctgtttcttccttcaattatcagggtgcctctttctcattcctgaacttatgctacattgctttatcttttccttctattaatatgaaatgcggttgttggtttcttggatatatctcaattgtgctattttgatgttcaggaaattagacaactgctcagatttctttggtttatctaatatgtttttactctcatgttaaatgttcaagttgtcataacatgcccgtgggcgagccatttccaaatgttttcctgttatgtgtgtgtagagtacgaaaatagtctccttggagtcggccaatgtagagcacacaaattctgccttactccactgttgcccattgggacctgcatgactacttactagcatgatgatcctatgcaaacctgtgttcttgttctaggtgtcaacgaatgtaattcatctttgaatcagtctcatgttggtgttaatctattaatctttttctttccttctaaattttacgtgcttgacttcccaattccactaaagcattttaccatataatacactggccttcaatgtgcctcactgatgtgaattgataaatcagattgatacattgtctttgttcatgcagaat

SEQ ID NO: 50946 - DNA, 693 bp, Ricinus communis
  Intron number 1 from transcript 30142.m000628 (locus 30142 .t000002) derived from phytozome v7.0 (chr-ID 30142; pos 1 0248 to 10940 reverse strand)
aagactcttgtttcagaatttgctgtctttgacaggtaagcccaaggtttgttctttctgtgtctgcactggtaaataaatccttattttcttcttggaaattgagaattgagatgattttcttttggaaacttggtgtgcttttttgtcatttttttgcttatgaaaactgttctaattttgtttgctttcttttgataagtatttgatatcatcatcatctcctgattcttcctgtcatgagccgcagagtgcccatgatgcctgaatttatgatttgtaccaaaagaattaaaagaaatttcaccctttaggcctagagctagataaggcactttttgatttttgtctacttcttaaatgtaaatctagtggttgaatactctttgcatgttcaatctttcttactgacttcataatcaattttgtttcttcctgacaaatctttttttaactatctcttctaatacccaacacatatcccattattggcacatgggcatatgaaaatgtgtggtagtaaagcccacttctgacaaatgattaattgcattggtaaaagaaaatgtttaaccatatcgaggcttattcttttaagcaaatgattaatgcatgacaacctaaccatatatgtgtgaaactgaattgaatctggtaggtggtttgcctctgtaccatcatcaacacagccca

SEQ ID NO: 50947 - DNA, 1053 bp, Ricinus communis
  Intron number 2 from transcript 30128.m008732 (locus 30128 .t000193) derived from phytozome v7.0 (chr-ID 30128; pos 7 32223 to 733275)
tgttctggactccactgtctcagagaaccttcctggtataatgcattcccttagaaattttcagttagtgattgtccttctaagtccttgattctttatgtttataaattcttttgggtggtattgcaacagttttgaagaaatacatgtctgtcttagacaagtataggtgtttacctcctgaaatagagacagagtttacaacattacaatgttctcattagcaaagactctttcattctttaaatggcattagaaaagaagtgactagtgcttggaaaaacttcaaacttagttgttggtggagttaaaactctgtttgacatgttcactgaaagcaggaggttcaaaccacttctttgttttctgctaggagtttggcctgctgtggggattcaatccaatagttctttggagtgacatctaaaatctgagcatgtttaaaggaagtgcatttctaacttgaggttaatctaggacttaggttgctgtgcctaatttgattctctttctgaattgaacataatcgacctttctttgaggaatatatgattggttcctcttagtgactcctaagcccaattctatatccaaaactgctatatcagtgcatgacttgtgtatcataatccacagaatactagagtccagattcatcctaattaggtgctacaattgcgcagatagtcaacctccactctactgtgagacagatcgtcaaccctatcttgtttgaataaaatttacttcactgagaacgtatcaaatgttgtcaaatttgtctttgcaagctagttcagatgtcattactcttggagatgaggatgcatacattgcttgtgtttgctcatgctgcaactcttctactggtgactggttcaaatgtcattagtattggatataaggatacgattgaaagatcaatgagggtgaaatgtccaattatttgtgaaatcatgagcatcagtagttatgttggttaatgtgtggcattcatgctgattggctatgtggtctgcgacgttgcagtattggctacagaagagaagtaca

SEQ ID NO: 50948 - DNA, 917 bp, Ricinus communis
  Intron number 4 from transcript 30128.m008727 (locus 30128 .t000188) derived from phytozome v7.0 (chr-ID 30128; pos 7 00223 to 701139 reverse strand)
cacaagcaagagctccaccacaagcacgacaggtgtgttatctctccctttggactggttcttgttggttttcacttttatttggaaagtggttgttttctgtctgtttggttgttttatgcatggattttttttgtgtttaataggaaatcgagttaaatggaaagaaaaataaagaaaagtacctaaaagagttgggggtgagaatttgtctaatgtgtaagatcttgtacacattgtgtaggatttcagttatcaggcttcaactcaacatcctcaggaaacgatgtttgtagtaaattggtcagtttcacacttaattcatctgaagattactaaaatagaattgttattcttgatgtagccacatacagcgtccaagattttactggctaaactgtaaatttcttttgttaacttctaggattttcaaatgctttgtagttatcaaattgtattttaaagttgagatcaagcatccatattagttatcttgtgggcctgttactgttactttagcatgcaagatggaaaggaaaaagaaaaggggagcccaaaaaccagacaactaccataacacatatttcattgctttgtagttatgaaacattttgaaatgctgctaatttgtgaagggggtagaacatctgtgtgttttgatttgtttggttgcatattgtctctctttttgcatttagtggcaataaaggctatcattattcaattttactggttttccagaaccagttgaaaatgttaggaatctgcgcgactatcatactcttaattaagggcatacatggacttgttatgatttattgttgtcttatcttgttttttattcaaataataacttcactgcatgcataattttttctgcagggagctcttaaagtgtccgtttcgagtccaggatt

SEQ ID NO: 50949 - DNA, 635 bp, Ricinus communis
  Intron number 2 from transcript 29863.m001098 (locus 29863 .t000058) derived from phytozome v7.0 (chr-ID 29863; pos 4 03319 to 403953)
acgtcttggagaatccaagtaagtgtgagcctcaggttgccatcgaacagaagaaagagaatgagatttctgcagagaaagactggttgtggaaatgtgcactctgaagaagatagcaaacttgagtcagaagttgctgaagatggtggtttgaatgtgcaactccctgcagcgaggctctcttgtaaaaggaagaatcctgacagtggggttgagtcactggaaccaactgctacggcaaagaagaggaatcgggagaggtcaggaagcaacagctgatggcaacaattcaccatcaagtcctctcaatgtgagatcatctgatgatgactttgaatgaatggtacactgattctcaattctgtttgaactatttttggaaacttgacaaggttcatggtgacttttttttacaactttatgggcacctatgtttcaattttgaatggctgggttgttttgggagcagcacatctctgtttttggatgctagaaagtatctactgatacagcatccctttatgaaaacattcaccattgataaatattctctacctttctgtttgaacgtgcagctaccatttttattaatcttttaccttctttgatgcgataataggcaatcaaaattctgc

SEQ ID NO: 50950 - DNA, 632 bp, Ricinus communis
  Intron number 2 from transcript 29908.m006225 (locus 29908 .t000276) derived from phytozome v7.0 (chr-ID 29908; pos 1 717799 to 1718430)
tggcaacactgtatctctcttttctttacatattggctagcatgtgttagcttgattttttatttttttttttaaaaaaaactgtttctttcccttggtaataaatgttttatctttaaattaccgacttcaatatcatacttgcttccaactatgtctcgcttttccacactggtttcccttcttttatgacgctgcaatttgatgttcttcatgtagctgataaatgaccgtatattgagggttctgattttagttcttacttttgtgcacagtttgttggtttttgttttaatgggaaagttgtgtaattttcttatccctatcttgattgttgcactttgtgttttctatataagtcatagctactacaatcttattcattttccaaattggcgcacttcaaaatactgatgagtactctaatttctatgttaatttgctattctccgagtttacagaggctattgttattatttttctattgattttttaaaattggttttagcttatgcagtggtttattattaagatattataagtccaaaatggtctgtatttggcatgctcagtaggcaaatatgttaagcctttcttctttttatcagtgaaaactggccctagttttgctg

SEQ ID NO: 50951 - DNA, 611 bp, Ricinus communis
  Intron number 3 from transcript 30073.m002217 (locus 30073 .t000027) derived from phytozome v7.0 (chr-ID 30073; pos 2 02149 to 202759 reverse strand)
gggctggtagagggttcactcttgaagaactcaaggtacagatggttgtatttatcaatatttttaaccatatagcttatatcgagtcttaatctcttatcttagtttcttatttttttgtttgctgccttatctttctttattatgtgcgcttttcccctatatgctgccatgttattgttcttctttttattatgccttcttttgaaggaatatttgtgccagctactgatatcaggacttttattctagccatgcatggtagtgtttctctagttttccaaagaatatagaactcagttggcattcatgagatgttaatctaacagatgttcctaatagtcagaacagtaactggttcctacaaatatgttaggttttaagatgagcaactaaattatatatgcatattctctttggcaatttactattgtacatattgttgcatatcgttgcatatcagaggatgcaaatttaaaatatcagattttaccctctaaatcattgtaacaatctacctttagcttctcatgcaatctcttttgcctcttgtttgacttctattacattttccaggctgctggtattccaaagaagcttgcccctactat

SEQ ID NO: 50952 - DNA, 679 bp, Ricinus communis
  Intron number 1 from transcript 30131.m007158 (locus 30131 .t000309) derived from phytozome v7.0 (chr-ID 30131; pos 1 924568 to 1925246 reverse strand)
gttcatttaagttcatcaactacgttaggtctgtaatcagcagttattttgttgcgtattgatgcgtttttctttgttttattgtttatgatatgtggagtaattgaaggattaaaaagtttgtaacttttacaaaagcttcaactgctttaatctaaattgttgtgttaggtcctttgagtgtttagtttgattatgatttaggttacgtttggttaaatagaaatagaaacaatagaaaaggaagccttaattttttttccctcgtgtagaatcaggttaagctcacctaattgattgcatttggatgttatgttcttgccatccaaaaccgaaagataaaagattaatcttttctattcttttcttatttgtctcacagtcgccaaatggagtagtataaatctattgtgagtctatgtgaatacctttcttactttctctcattttttgttatcctaacatggctatggtatcatttgttttcactctttttgggtcctgaaataatgggggaggctgggacggtgggctgtggaaaagttttcttttaaaagaagaaaatttcaatgtttctgttattatgctttttatcattagcagaaaaaagcttgtgtaatttgatgtcttgatgcctttgtctgtccttttctcttacctaccaggtggcagaaaacag

SEQ ID NO: 50953 - DNA, 510 bp, Ricinus communis
  Intron number 2 from transcript 30005.m001237 (locus 30005 .t000003) derived from phytozome v7.0 (chr-ID 30005; pos 6 110 to 6619)
ctccagctgaatttacaattcgtaagtataactttctctcacatatatatatatatatatatatatattggttattatcaaattattacctggttggaataaaatatgtccaaaatcatgtctattatggcatgatttcattctttcaaaatgccttgtgtgttctcttaggttgaaagaattgaatgctggctagtatgacctttgcaaacatgagaacttattatctagttaaatcaaatttttgaatatttatactttccaaacaagccctacattcctcagattctggcttctagtatcccttttcttgttttctttttcatgttaaatatgtgagagtagttcttttattcacaaagtttgcctcatttactggtttctggaactttcttcttaaagatggaatatggggctttgggttttagtctttcttgttgcgtagctgtatggtaggcataagttgcatcaaaaggattctgcatcttttaactacaaattgtactgcag

SEQ ID NO: 50954 - DNA, 969 bp, Ricinus communis
  Intron number 1 from transcript 29929.m004552 (locus 29929 .t000055) derived from phytozome v7.0 (chr-ID 29929; pos 3 16575 to 317543)
agttgctgagatcatttttgaggagaaatttggtaacgttctttgttctcttaagtttttgaagtttgttgattgctcttgttttgacttgctttctttttatagttcagtcttcattttttcttaacaaagttcagtcttcattaatgttcttgaaatgttatcattggttgagacacccaagaaatgaaattcttgaattctgtctctgtctccgtctccgtctctctctctctctgtggtttttttaatgtccttttgctatgtcatcaactgaaaaatctatgctttcctaactaactcgtggcagttagtggttgttgcttttttgtgttctttgctctgtttggttgttgattaaatggtataaagaaggaacgaaagatttgaaggaaaaaaaagtcaagaaaagaaaagaattttgtgataccctttcagtttactgttgacgcaagtgttgatttgtattacttttgttgcgaaaatgctgaagtttgcagtaaagataaacaaagatttcatttcgaaatcaaatgtcttcctatctctatcctgggtatttcttgtttctttttgggttgaaaactattgcagattgatgattttgatatggagtgacactttgttttgctagccttttgtaaaaggcaagttatttcgtaacataagtttgataattgtgtgttgtatctcctttcaacttgcaaggacttgagataaagggagctgaaagaaaaagttaggaaattttaactttttataaagttaatttttgtcccttcgtttctgctaatgactttgtgtctgcctgaacttgtgttgctccagaagcttgatttactgcggttcaaccttgtaatcagtgtgccaaagacttgaactcatagcgtttatagagaccttttaagctcatattccactatataattgatatgtaatatttctttttcttactttttgtgggaaaag

SEQ ID NO: 50955 - DNA, 527 bp, Ricinus communis
  Intron number 1 from transcript 30093.m000351 (locus 30093 .t000002) derived from phytozome v7.0 (chr-ID 30093; pos 2 2123 to 22649)
tgccagtagccaagatatagcagccattaaccctggtatgattctgtttctaagctattgattaaactaatttcttatgactattttttactcaatttactttaagccattgtattccttgtgctgtaatcaagattatagttttgattatggcggatttgataacatgaaaaaactacttttattattgaaatcttacgactcttttctgatttttctttctaaaatttttgggtgataatgctactgaaaaattgaaaaagaaaatgtttattagttgggataggtggctattattgttacaactatttagatccaatgtttatatctccaactaattattaagtggaaaaaggaatttgttaaggtattttgaaggttctttttctcatggcacagctgaatttatttcccagtttttgttagtggaatttctgattttctgtttcatatttaagatgagaatccagagatttgaccttcttgtagtcttttaattcttttctacagaacatactgttcaacaa

SEQ ID NO: 50956 - DNA, 1028 bp, Ricinus communis
  Intron number 1 from transcript 30143.m001211 (locus 30143 .t000050) derived from phytozome v7.0 (chr-ID 30143; pos 4 16158 to 417185 reverse strand)
ctattggtgtggagtttgctacaagaactcttcaggttggtttttcataaccatgaattgagattttcttttttttttttttttgggggggactttttagagggtgtttggaaatcagaattcaagaatttaatttaatttaatttgtttttattagtcaattctcgtgtttaaaaattgctagaattcgatactttaacttgagtaaaaataatacattttgaaagaaatgaaattgtgccaaaagagacatgattttgctttaaattcttgcaagctttattccaaacaggacattttgtctcgagggtatggcaaagatttaatttttttatttaaaatttattatttgaaatatgtatcctcattatatttaaagatcagaaaataattagaatgaaagatttgaggaataaaatagattagattccatgcctgcttctctgtgtcaatgctgttatatgttctatcataaaatgaatctcagcattgaatatggcattataacttggagtctgcattttgtagttgctgataattaattacaaaatttgaaagttattgtagcaggtgtatatattgtacaaattagatatcagaatcaagctgattgatatattttgagatttgaaatacgaaaaagcacttcaaatgcaagactccaggagagtcgagagattttgtcagcattagaatagttgtgagtgaaattatttctgaagagtcaaatcttacttcctcattagacttggcaaccatttttcctcgcactagttccataagaaattcttgggagttcttgcaattgaaactgaatcttaattaccttagttgtattttatttctttgaagaaagatgacgcaattgttgattgaacttgtcaaatatcaccttcttgattggtttatgaacttctttttcttgaacctgctcttcctgttgaattgaatacagtagtcgcttactaatggagcttggttaattttaatttaatgcaggtagaagggaaaacagttaaagcacagat

SEQ ID NO: 50957 - DNA, 935 bp, Ricinus communis
  Intron number 4 from transcript 30115.m001194 (locus 30115 .t000020) derived from phytozome v7.0 (chr-ID 30115; pos 1 46716 to 147650 reverse strand)
acagaagaggtaccttctatatcctagtaactgaagatgttgaattatttatttctctgactgttttatgatacttcgttccataggataagcaaatgggtgtacttctagcttgctgccctttaatacatttgcatactttggaattttgattttgcttagtatagtttatgttcttgcattatgttggcttcggtctcaaagtttacgctgatggagatatttgcttgatataagtttcacttggtatctttttcaagtaattgtggttgaggatagcagagccttaactttcaagttatttggcaaggatgtctgcgttgtgccaataatttccagaagtgttgtaataccatttctcattagttatctctgtctttattaattgtccatcagttattatggttaacaaagccaaaaaatatcaagtacatcactattactcttaattcgtggtgaagttgaatttacatgaattaatattcaagtctgaaactcctcccacacaacagttagtcctattaccagtttctcaaattttgtcccttcccaccccccatcatgactgcatgtgtaaaacacaagcatagtgaagtgtatatttgaattgaaaaaatattgccaggtattctcatttatgttcttcgccccaggccccatctccttacgcttattctatttcattggcgtagctttatatctcaaaaaatcacaaacgactttctgttatttcttttctgtttcttaggcccttggtgttagttgaattggattccttatcgataactttggtcaattgattgtaactactaatagaaacaagaaaaactcatacctgattaacattcttcttgtcatctcaaaattttgtaaatggaacttgatcgtgcagcttatatattgctgaaaatgtgccattgcagcaaattactcaa

SEQ ID NO: 50958 - DNA, 720 bp, Ricinus communis
  Intron number 2 from transcript 29964.m000153 (locus 29964 .t000004) derived from phytozome v7.0 (chr-ID 29964; pos 4 1759 to 42478)
aagttcgggccttgtataggtccagcttctcaaagcctttcacctttctgagaggatacattagctagcgcctgatgggaacacttaaggagaagctaagctaccgtttgcagacttagggaatcactttgtcatggtgatgtattgtaggagaattttcccacgacccttgcctagtgcattgtgacctttttaggacatttcattttgtacaataaataattcaagggggaaaatttccttcaacagataggtcagacttccagacgttgggaggacttcctctcccaattatcaatacatttttcttagatacctaatctaattaccaatttagttccaatttctgctctcacctcaactaagtaaccccatttttcaatggcctatccttcaatcagtcctttctcttgactgatctacgtgtattttggcttgtcccccaattaacatacaaaagatgtgtgcttgtatactagaccagtttcttttattggtgcaaggagcacctgctgtttaagggatttaagttttcaatctaacatgtttgcattgtgtccatcacatataatcaatttggcatgtatcttctaaagtttgaattcttggggctagaggcatgagctagagtgaaactctattgaatgaagtgttcagtcaatataaatgtctataattttcctgattagatgtcatttaattaactgtaaattaatgcag

SEQ ID NO: 50959 - DNA, 526 bp, Ricinus communis
  Intron number 2 from transcript 29841.m002861 (locus 29841 .t000125) derived from phytozome v7.0 (chr-ID 29841; pos 7 95501 to 796026 reverse strand)
tcagagaagctgttgagaaatcttagaggattactgtaattcaacttaaccatccatctcttttttgctcatctttattatctttgtttcttcttttcacatgcaacatgcgcagtgtaaaatgaaaagttggttcttgatcttcttctcaacttataatttgtttttgcctgtgcgttcttttattttcacctctcctttttctcggggttgtcttcattttctcgcacgcgcacaagcccacattttgactttttgttgctcatttagcttggtggggttttgcgctgtttccattgtttaaccgaaccaaattaataaatgtcttccattattatgaattgtgaattaatctttgtcaagggattgattaggagaaaacgattacgtgttattattattttttatatacagagaaaagaaaagaaaattatgtttgtttgacctccatgtctatctgttatttgaagtactattagtagcgtacaaatggagtaaataatggtggcaattttgatgggacagg

SEQ ID NO: 50960 - DNA, 634 bp, Ricinus communis
  Intron number 1 from transcript 29912.m005550 (locus 29912 .t000276) derived from phytozome v7.0 (chr-ID 29912; pos 1 748913 to 1749546)
acaaagaaaagcctcttcagaggtatttatttttgctttttttttttttttttttttttcttgaagttaggtatttattcttatatcatattattttgcttgtaattaaactgagactgagcaaatagggtaatataatgttatttggttagaaattaattattatgctaaatttttctactggattattgtagattgaaaaattgcattttagaagagattaataggttgaaattaagtccaagcataacttatggaaaatgattttcttatttaaacatgacgtaatacctcttatttagaatgataatgcatatttatatcatttcatttcttttaaaataacttaataattatttcttgaaagaattacattttggcaatttatatgctcttttaaacattaacactgtttttttttttttttgaagtttaaagaatttatttacactgaattcttgcattttttttgactttccaaacagattcttaaataattagccgatgagcagaaatgcaaagaaaaaagaaagattaatcgctatgctttatgtaatgacctactttaattgcaaggcacttgtttatagtatgtcgaaactttgcaggatcctggctaatcatacttccacca

SEQ ID NO: 50961 - DNA, 528 bp, Ricinus communis
  Intron number 1 from transcript 30131.m007083 (locus 30131 .t000234) derived from phytozome v7.0 (chr-ID 30131; pos 1 417132 to 1417659 reverse strand)
tcaagtctacctatttttccttgagccagagtttggtaaatttcaatgagggctatcctttagccaatcctcatttttcctagaatggaagagtttctggagtgtcaatatctagataaattgcccagctcgttagatcatattataaattggtatcaatactttaatttgattttaatcggtactaaaacttcataaaagtatattaatttggaataacactccattttcagaccaattgaagttgaccaatctgaaaaaaaatattcctttagattttccatataaactcttgccacatcattaaaaattgccacatcattaaaaattggctaatcactaaaaggagcccactccctttcttcttctaaattaatttttaatttctctaaattgaaccctaaaatatcatgattcaaaaagtaaatatgccgcccctctcctagtaactaaggtcctgaagtgcagcaaaaataggactagctttgttgttcctgcactaaactaaaccagagccactagtgcact

SEQ ID NO: 50962 - DNA, 833 bp, Ricinus communis
  Intron number 1 from transcript 29848.m004532 (locus 29848 .t000088) derived from phytozome v7.0 (chr-ID 29848; pos 4 64254 to 465086)
ccacaaaaaccctactttttcttctatctctttctgtaagctctctctgcccttttaaattctttactaagtcctttatgtacttgaagtttctttgtttatgggtttatttgtttgtgtgcttacttttcacccattgctggtgggaattgatttcttttgaaaaagaaaaaactccaatttgcaatttctatgcaaactatttgcagagaaacaaatcgtgagtaaagttggaagcttccttttttcagtttaattattttaatggttgctgagtaaatactagtaatgataagaatccatatgtgtattgatgttccagtgaatgtgtatgtgacctgtagttgtcatttatctttgttcgtagcttcattattgtagtattcatcttgtccgggttaataatacattcttcggcatagctacctattctaattcctaagtgttacattttccatttgttaaaatttggagaacctataagttgtcaaaacttttatatctttgattcagtcttatgtctaattatgctgccttgtttaagccccatgtataataagaaatgatgtggaccatttgggtttcaagaactttttttgtctctcctgtgcatttgttgattatggtcgtaaaagaatctgacaactttctgaacttgtatgaagacagcataattacaagcctactcagtgtgctgaatggtgtattattagcaatcatctttttcagtatttttcctgtgcacggattttgtgatctctcaggacaatgaatttaatattctttctctttactcaggtaaaataaactcatttgcaaatcacattggacct

SEQ ID NO: 50963 - DNA, 283 bp, Ricinus communis
  Intron number 2 from transcript 29993.m001036 (locus 29993 .t000005) derived from phytozome v7.0 (chr-ID 29993; pos 9 9771 to 100053 reverse strand)
tgttgcacggtccacttctcaagcgatctgaaactgtaagcacctttactattcagtttgtacattcaattttaattctatagaaaatcatgtttgatattacaacgaactatgaagtaaaatgaataaccctagataattacttgattctatgtagttgtgtacaaattaggttttataatttgaagatttattgaggcatttctattttctttgtctttaatccctgaatttatagtctgttcataacttgcttctatttttggctttaatagttaagaaa

SEQ ID NO: 50964 - DNA, 778 bp, Ricinus communis
  Intron number 2 from transcript 30025.m000576 (locus 30025 .t000004) derived from phytozome v7.0 (chr-ID 30025; pos 5 1433 to 52210 reverse strand)
ccaccactgattcttcctcagatcttgatacagaggtcatttttttctttctttctttcctttgctgctccatttttagtctttcgtttgcaatagaatacatatcactacaatctaccgcagttaagaggcagtatcactactgttggtcattattattattattatgattaatagagacagcacccttcttccattcaagttctaactttgactaccaaaacacctaagagtccctttcctttgattggaaattaggttcaaaactagctatttgtttgccttcatttttgttcttattttctgggttcatacaactaaaaagtctaaaagcaaagttgaatgcactttactcttttcacatggtccataatgatagcttctgactctgcatttttttattgccgttgcttctgtgaactgttcttctcttactttgcaataggatatttggtatctggtgctgcctttgcatgctcagtttgacaacttaaggtagatgcgcattgcattactttaaaagggtcctaacaaaacatgaaaactgtgagatgtgtaaaagttttgttagatgtttgggcggtgctgcttgtttcttaaatggatctctagagggtcagttccaatctaggttttgcgcaataagcacaagctagctggtctctccttcaaatttgcataatatataagcctttcaatatctattcaatagaacagtgttttcttcttcgtgaagtgtttgttatgattaattttcagtctactggatctttcttcc

SEQ ID NO: 50965 - DNA, 1011 bp, Ricinus communis
  Intron number 1 from transcript 30147.m013847 (locus 30147 .t000118) derived from phytozome v7.0 (chr-ID 30147; pos 2 912299 to 2913309 reverse strand)
ctcttgatcgagagagtataaaggctctaattctggtatgtactctggatccttctccctttctctgctcatgttatgtcggcactttctttgtgttacctgctccgaaaaccatttaattaaagggtaagggtacttcaatgtggtcgcagtttctggatcttcgtgcctattatgactgctgtgtactctttggttagcatatatataaactccacttggaaaaaggatcacttatgcatcttcatcatatcttttttccttatttcaagtattcttttctcctaaggaaatcttcaggatgagatgatataatgttatatcatccgcttaaagattaaacaaggaaggatatttgaaaacaaaaatacgtctcaatttggtatgccttaagatcaaaacatttctcaatcttgcttttttttaaatattaataagattaaacgtcttcccgcttgttttatactattcttaattcttttttaatgatatatttttaattaataaaatttaaattattttttattttaaaatataatatatttcactcatactaaattgaacacatgcaataacatttcaataaaaatataattaataatagtcttataaaatgagaaaactttgttatttattaattagtatattaattaactttatgtaagttaatattgacgatataattatatactaattttttaaaaattaggaatcatttattcaattaaaatagtaatgtaatagaaaatatattatagtattataattattatttaattaatagaataatatattagtcaatatattgatagtatcatagtgttattaaaataataattcaaataaatatcacacttttgtgttatgtgttaagaataagtatatatagatataaatatgtaatgatttacaaagcaaaatcctcgcaccatatacttagatttctaacatcacgtttttttttttttttttttttttctaatttctttattttacttgtttttctaaagg

SEQ ID NO: 50966 - DNA, 910 bp, Ricinus communis
  Intron number 3 from transcript 29844.m003205 (locus 29844 .t000051) derived from phytozome v7.0 (chr-ID 29844; pos 3 11586 to 312495)
gttacatatcagctaacgaggtaatttctttttcttttcatcaatcttgttataacatgctactagagtatgcattatggcatgaaactctctagtttctcaggaatgaataacctaaagttggctgcaatgttcctgcatttggagacaggcattcaatccttaaacttttggtccaatggggcatggcttgttcataatttcgcagatacatatggttaaaagagctagaactaattcatgatacagttaaattctcttaaaagaagaatacacaaaaatacaaaactcaaaaagaaagctgtatgtatagatgtatattagggtgacaactgtgttttttgcttttgtttttctcgagggtcgccgttgacaaaaataagaatatcttactagtacaagtagggtgacaatgttgacgaatgagcttccaaataataatgattttaaataaattaataataacattactaagaacgatattatttttcatgttaatgtcttaaaatttatgtcagtagggaagtatattgattttaactcataaaatgtactataatacccgtctcaaatcttcaatctctattcttctttgttcaatttagtccaatttcttaattttaaaaaaataatttgaaaatgtacattgcaaatacaaatgaaattcgaatcaataatgttggtattggcagaaatgaatatatatacatagtttaatattttcttttgataataatttacacatgaatcttactgtgtatataagcagcatgcagcgaacattaactatgtttggtaagagtaatgcattaatttgaggatatgcatttgattaaattattaagggaatctaacaaagtgaaaagaaacaaataaaaatttgataactttgttaatgtgcagttgaggc

SEQ ID NO: 50967 - DNA, 861 bp, Ricinus communis
  Intron number 1 from transcript 29970.m001004 (locus 29970 .t000033) derived from phytozome v7.0 (chr-ID 29970; pos 2 51670 to 252530)
aaagtctggaacatcaggctacaaggcctacagtgtgtcaatgatggtaggatggtatggttttggactgacatgtggctggataagggtctttctttaatgaactatgcttgtgcagaaatcccagctactcaaatttcaaatgttgttcgggattatgtcattaatgttggcttttgggattggaataatttttcccatcttttaccacaccatgtccttctaaccattgctgttttctttcctccaaattataatttgggtggtgatgtagtgttttggagtaaggctccttcaagtagtttcattaccagttcaacttactagatgtgcatgcagccttaatggaaaagtagaaagtgggatgtcacctggaagtggaatggaccacagaaaattagaatgtttttacggttatgtttaaagcggtgtctgcttactaattctaaaaggagtaggagacaccttcataatgattactgatgtgttagatgtggtcattaattggaggatgtggttcatttttcaagagactgatcggctttaaataggatatggtttagccttgttcaattagtttttttctcagttccctttgaaggttggtttctcggtaatctgataaatgaatgggacattgatagtccagtaaattgttcttattgctttggagtgacttgctgaggtttatggagaccaaggaactcttttatttttggtaacacacaccaaagaaaggaggttacagtacaacagattcttgcttcttctcagaaaattgagagagctgatattatgaatagggatcttaatcataacaccataggtaggactccagtttcgttgtgttggaatcctcct

SEQ ID NO: 50968 - DNA, 161 bp, Ricinus communis
  Intron number 1 from transcript 29885.m000142 (locus 29885 .t000006) derived from phytozome v7.0 (chr-ID 29885; pos 4 6417 to 46577 reverse strand)
agactcagtgaattaaacatcaagtgctggccaaagtgagttttctcaaatcttcttctttttcttttttcatttgaggtatttattttaatttggggttgggcgtttatttatttgattattatttattctttggtgggtgggtgtgtttgtgaaaaaag

SEQ ID NO: 50969 - DNA, 841 bp, Ricinus communis
  Intron number 1 from transcript 30131.m007213 (locus 30131 .t000364) derived from phytozome v7.0 (chr-ID 30131; pos 2 282779 to 2283619 reverse strand)
cacattttcagcttcttatccccaattccaggtttcttcttcttctttctcgttcttgctctgtttgttgcggaactctagtcttgtctgtatttgattgattgatccattctttctttctttctctcttttaaatataatgtgaaagctctaatcttttgttttgttggttggtaggtagcttgcaagattaacttgtttagctgttttggggttttagctgataactcaatgactattcttgatagcaattttaatataaagctctggcttcatggataaatgatctgcagatgctctgaaagaagtttatttattaattctttttctttttttctttttttgtaatttttgcttcctagtctaaggttcaaaaaataagaagattcgattgtgaaacagaatttcattagaatgattttagattgatcgaggatggctaaattattgaactagaaaggacgtgagagcaagagagaaagaatggctaaaaatggagggtaactgtcacacttgaaggtttatagtctggtgtgtgcctcaaatggatttaattcagtagggtgtttaaaaggtcagatgtgagcttatattttcttatgagagagaaggaaatcaattatactttatgaggtgaaactatattagttgacatgttttcagtttttgtctatgtttattctcttatgcgagcctgcttcttatgaccttaagtagtacatatagaattcaggggtagatttagtaccacaataaatgtgtgagacaaattggttctatctgtgtcacgagttcctattgagtttgcagatcggtataacaccgccctcgtttgccacag

SEQ ID NO: 50970 - DNA, 900 bp, Ricinus communis
  Intron number 1 from transcript 30131.m007287 (locus 30131 .t000438) derived from phytozome v7.0 (chr-ID 30131; pos 2 625746 to 2626645)
gtcgcccgctacttctgtggaatctcttattgcaggtaggtttgccccttctttcttttccatttagtaagacaagtttcatttgggatgattattaatattccttaaaattgacaaagttcttgtctattatgcttactcggagaaattaagacgaattatgcttcttcatacacttgctacatgtggtaattaaattagcctaggatcgtacattatctaattctgcaaatgttagaacttgtgaattgtctaatatcagagaatatatatatatatatatgttgtctcctctttttgctggtcagtggaggtggaaaaacctttatagaccaaacatctattttggatgcacaacttggtaacaaaggaatcaccttataatctacaaggtgtcaactagcttagcttaatttctagactctcttggtattgaattagatcattgaatctgagcaggacatgatcaaagggccatctactgcttccccattttacatgtcaaatacaatggcttatagcttataattgtgtgaaaagattgcatcgtccttcttgtaatttattaaaactaacgacgttactgtactaatcttcccagtaacatcttgtataattctgggagcttgcaccaaatccttacttgaggatggttgctaatgctagcgctagaatggtcaaacataaatgtagaagcacaatgtacagttttatttgtatgaattccctcttattttgactccaccgtgtacattttgaaagaattgggatcccacttattgacaaaaacatcctcagtgtatgcctctgtaaccctgctcaagtcttggtccctaggtttgagatcttataggttgctaataattttcttgtttattgctttggcagaagctgcagctt

SEQ ID NO: 50971 - DNA, 665 bp, Ricinus communis
  Intron number 1 from transcript 30061.m000291 (locus 30061 .t000010) derived from phytozome v7.0 (chr-ID 30061; pos 1 81826 to 182490)
tctaagaggtgaagtttttattttcttttgatttgtttgtggtagtgtgtaattttgtttgttttgattggatttatgtgtcatttggtcttgatgatgatgaggacgatcgttatatgttcttgtttatgagagtttgtcagtgatgtttatgtatggaaatacggtgtaagtgtttaaatttattgattgatgcgtttggattgtgtgaaagttatgctttttaatttaattttgcgtctgaaattttgaattgaaggttagggttctttttgaaatgatttttgaaaattgattgtttccagctccacctacgagggagatagaggacatttgttgtgtatgtggatattattgatcttggattgttttgtgtgtttatgtccaacagttgagttattggaacgtggaggaaaataaagaaatatgtaatagattgccaagataatctgaagaggacaaaactttatttagttattttcttttgagtcattaatatgatgctttaattttgaatcagaaatatcttccttctgtttagaatttaatgaatgatgccactctttgagtttcttgggttcctactttttttggtttggtctttttattcttttaaatgtgtgttgtgttttattctaccagggtactttgcaagttctttgcac

SEQ ID NO: 50972 - DNA, 275 bp, Ricinus communis
  Intron number 1 from transcript 29942.m000752 (locus 29942 .t000025) derived from phytozome v7.0 (chr-ID 29942; pos 4 11282 to 411556)
gaaacctaggagaaaaagggcttggggttgacagggttgggacttatacattatcttgaagactagtaaaagttaaactataggtaggttaaatatttgccttttttttttcttttgattctaaacaagatgaatttgatctttgcctctattgttcaatatcaatatcacatatatagggctcttaattttgatttattttaatgtcttatacattttcttatacatgattatgaaagtgttccaatcttgattttgtttttaaataggtaatt

SEQ ID NO: 50973 - DNA, 833 bp, Ricinus communis
  Intron number 1 from transcript 29908.m006203 (locus 29908 .t000254) derived from phytozome v7.0 (chr-ID 29908; pos 5 67681 to 568513 reverse strand)
ctgatatcggtcattgcgttctgaagaacttgtcggtaagtttcagttcacatactgtttatgcatctaccgttcttttcctttttgctaaaatctaccgttccttttgagatcaaatgctatgctcgtgatttagggtttaaggaatagaaactaaggtttatcaaacgttccttacaaattttagtttatggaggctaatttcgagttatattttatctgggtttttgaatcttttagtagcttttagtttttgatctatcaattgaatgttctgtgagtgttcacttcgtttccttatcattaatctgttgttctgttgcctagaaacaagaggaggaaaaattgggtcgcttggtcaactgcttctctttcactgcaccgtttttcctttataaaatgctatctttcctcattttgaactcttgtataatcttccaaattttggtgcgccatttcagcaagggcaagtgtttaattcactctgtgctcttgtacttttatgtcattctgttaaaatttaggtacttgtattcttgtctcatattgttcttttgagtccaattaaattatgaaaagttgagacctgagatcaaataggggaacagttttatgaagtagggttagtttcaaagttgcttcggctccgataagtgattaatgctaataatagctgaagcatgcttagttggatgtgggctctaatgttctagcattccaaacaatttaacattagcatttgaaactgcaacttcttagtcctatgttttgttcttctcatgttgggttgttaaatctcagactattttgcagtttcgttaccaaagagtgca

SEQ ID NO: 50974 - DNA, 537 bp, Ricinus communis
  Intron number 3 from transcript 29950.m001149 (locus 29950 .t000033) derived from phytozome v7.0 (chr-ID 29950; pos 1 77636 to 178172)
gacttaccttatatcatctaaagagtcatcttcaggtaaattatgattactatctgcagaatctatgcaaaaatattatcaacaccaaatgatagcactttgaaaagtttcctttttccaagatttaggtcctaaaagttttccgtccagccaatcacatgacaaaataaaaggaaaattggccaatctgttatcggattggaaacaatgccgcctgatgatttcacttttttcctgtatttcaaagtatccatggtgtctggttcagaaataataatcatataaaagaaaaaaaaaaggctaaatcttgtgcctcagatgttttagtagtaattacaaggaacccaaaacacctgagcatgtaaagagccagaggtgcaaataacattcaaaaatacacttgtttttcctgattatgttaaaataaggctaggttggtcggctgtttattacttaacttcttctttaatgttcataaatagaaaatgctaactttatctttgggtcggcagaaatacaggctgagcaagaatcttc

SEQ ID NO: 50975 - DNA, 483 bp, Ricinus communis
  Intron number 3 from transcript 29819.m000078 (locus 29819 .t000002) derived from phytozome v7.0 (chr-ID 29819; pos 5 8148 to 58630)
gttggtgtgcccggaaattcaatcaaggtatgccttcttttctactctttctattaatgcagatatagttagtaattttggtctctcttgctgcatgctctatgatacaatcaaacattttgacttgtttgtccaaaagaataaacttttcttagccttcttgtgaaaatatagggactaacatctgaattagatggtattgtcatggatatattcagcaaaatatgcaaccaacttgaggatagtagaatctagatctttactaatgaaaggttcttttatctgaataatcactgtttgttgctaccaaagcagtcttttcttttgggaggcaaataaaggataaattctagaactgttatttcttgctttgagatctgatggtccattaattttattagaaactaattcttaatatctaatgctgattatctcgtttattgcattccttctccagtatcaacttttggagctgttttggat

SEQ ID NO: 50976 - DNA, 903 bp, Ricinus communis
  Intron number 2 from transcript 29848.m004608 (locus 29848 .t000164) derived from phytozome v7.0 (chr-ID 29848; pos 9 51865 to 952767 reverse strand)
ggcatttctgtggttgctggtaccattccaagcttttgctctctctttctctttctccctctctgtgttaattacatttgatgctgtttctgcatatcatttatgtttctttatacatatatatgcgtcttgatttggcgtgttggattgctgaattgggtgtgcctgaatgaatgatgaagattaatttctttttcgtgagaaccttttctttttttcttttgatttgcacagttttgctaattcttaccgtgagctatatcaagatttattgttcacattttcgaaagatgattcatctacagtagttgtacttggacaaatttatgctactgctgttcagaaaaaaataaaagagagagagaaaagaacttgtgccacttgcttcgaatagtcttctgaattgcttgtgccagcaggacaaatataaaaaaaaaaaaaaaaggaaaacttgcaaaataacctgtcggttttgtgttgtgggtggcccaaggggagattgttttttttattcggtggaaacaaacacggttttttactccctcttaactgtttccctatatggcttatagtttcttttttttttaataatattttagtcactattttggaattttgctgccaggttacacgttcaaggcattttgtcttgcataggatactaacactaattgttaatatcaattgtgagaaaactgatgtgttcatgaatgccagttaatttgcaaggttcctttaactgggaagatttcatggttaaacaagaatttgatattgtatttgtttcactacttcatgatgatagccatttttttttcttctgcttgtttttatttttcaaaaaaaaaaaaaaaactctttacttttggttttctttctgtaggagttgaagctagaggattc

SEQ ID NO: 50977 - DNA, 859 bp, Ricinus communis
  Intron number 3 from transcript 30098.m001735 (locus 30098 .t000030) derived from phytozome v7.0 (chr-ID 30098; pos 9 02480 to 903338 reverse strand)
gaagtgttatatttgggtgagcttcttatatgcctgttaatatctgaatttacaaggttttatagattaatgaactttctttttatgattgcatgacatgaaagcactactaactactaagtatccaattttgtctttgagtgactcatgtcaaggtgcttttattattgtttctactatgctttagagaaagggatttgattataagtaataaagtgcaatagagttgaacttttcatgtgtaaaatccatctttaatccaaagtcatcacagtgattccatgcatctggtttatgttcagagctgctttcttcacagagaaactgtattgttgtctacgaaatttgattgcaaggttctcactagttgtcttctgttatattatgagattgatatgttatacaagtatgatattgtattagaaatgcgtcaaaacagaactacttcatgaattccaacagaactacctgatgagttccagcattactggttggtaattttttgattgttcttgcatacaaacattgatacaggaccaggaagaggaagaatggatgggtgaatttcagactacatgaaaaatatcgacctttagtttttctctagtattatgttgaccaggaagattcatgcatttttcattttaaatttcctatagttgaagagggttctctctagatttaaaattctggcattcaagtttatacagacacaagtgtgtttctttttttcttatttgcccacacatgcatgttagcatgtgtatgcattggcttttggtatctattgatgttactgaggtgaatgcaatgttttctcacaggtgtggggctagacaatcaggggatttaggcccaa

SEQ ID NO: 50978 - DNA, 303 bp, Ricinus communis
  Intron number 2 from transcript 29908.m006075 (locus 29908 .t000126) derived from phytozome v7.0 (chr-ID 29908; pos 1 476599 to 1476901 reverse strand)
cccatttatcgaaaccacctcaaccttctagcaaggtctttttagcgtctactctctcttttttctttttttttttttaatcaaattgttaatttgaaatgaaacagagctcttgccccaccccccctttttttttttaataaatattatagagaagaaagattaattacttatatactcttgtactggtggatagaagtaacatatagataaaacaatttgatgtgtgtatgtaattgataagaaaacaagcagcgaatcatgcatctttcgtgttttcactcctttagacttgacagttgg

SEQ ID NO: 50979 - DNA, 529 bp, Ricinus communis
  Intron number 2 from transcript 30138.m004045 (locus 30138 .t000219) derived from phytozome v7.0 (chr-ID 30138; pos 1 502491 to 1503019 reverse strand)
aaggtcgtgattactgcaatatcttactatcactttgaattatatttattactattaattattcataacaaaaaaaatttatcaaaatataaatataaaaataatttttaaacgacgtaataaattaaatttattattattattattattattattattaattgctaccacactatgagtttggtataatttataaatgtaattcttctttattaaaaagccaactaatacttttttttttcttttaatccatggaaggccacaacttctgctaattaccacttaacgaaaccaaacattaaaacaaaatgttaattaaccttttaaaaaaataaaagcaaacttgtaagcaatcatcccattaattttactattatggaccgttgtccttgttttgaataataattaatattctctctgtttcaataatttatatatccaatatttatgaaatgacgtaataaataataaagatagtgtagtttctccatttatattgtgtttttgtcttgtattttgatatgtccag

SEQ ID NO: 50980 - DNA, 272 bp, Ricinus communis
  Intron number 2 from transcript 30100.m000786 (locus 30100 .t000009) derived from phytozome v7.0 (chr-ID 30100; pos 4 71117 to 471388 reverse strand)
tcagacggttctgcttgttttgcttcctcatcttggtaattatttgataaccaattcctttgttttcttttctggttagatgcagacatctgggtttgcctttttctgtttgtatcatatttagcttcttttgttctgttttatggtttttttgtcgactgatcgcttttcccatcccagatcaaacaattattataagtttgttttattgatttttcagttcgttctttctttcagctgtatttggttgagtagttattagtgttgtcgga

SEQ ID NO: 50981 - DNA, 947 bp, Ricinus communis
  Intron number 1 from transcript 30138.m004026 (locus 30138 .t000200) derived from phytozome v7.0 (chr-ID 30138; pos 1 373673 to 1374619 reverse strand)
aagctatattcaaggatcaggtatgccactcaaaatttcggtgccaagtgcaaaattcgcttcttatacatgccccgattaattatctgtaattgaagtttattctgctaagcttctaacatgcaaccataacttctattctacagaattacgattatgctatatttggttgaatctataataaaattcatttcatttaagaaaaagacatgagagagaaagtaaaatagaaatgataaagttgaaatagatcttttagttttatggaatgtattggcttactaatgtggaattcatttgaaaattttacctattttattagaatttacttttgctataaccaatttcacacaaatttgattatgtagaatactaaattaacttcactccatttaaaacatataaattttagattcgcaaatgaattccataaattttttggatttcaacctacactatgttagtcacatttagtttatattgaaaactgtaacaataacttttaatcgcatttagtttatgttttcgctgtaatattgcatatagtcttatgtcataacatacctacaagatctttacaattgtttattaggctttctcaatgctatcagaaactatatattgtatccttttgaattgaattcgtttgaagattaacagtggcaatgaacaatggtgtctggttggtacaatgtatgttttgcaatttattgtgagtgtctgagaagtttttcttcctttactctctccacctctgacctaacattcctccccttgaactctctgtttccccgattcttccattttctttctttcaaatagtgatctcagatgtgattgactttttgattcaaaaaaaaaaaaacagttacagttattgaaacgtgtgtaatttgtgttttgcctgtctagatcctcgaactccaccgggtttacaaccggcagag

SEQ ID NO: 50982 - DNA, 498 bp, Ricinus communis
  Intron number 2 from transcript 29904.m002904 (locus 29904 .t000018) derived from phytozome v7.0 (chr-ID 29904; pos 1 31599 to 132096)
gaagagaactgctcgcctaaagaaatttgtgacaagtaacatttctttctgactaattgttttgtgaatatatttttaggcttgagatatattttagttattagttatttagtttgatatgctagcttctccttcttcttcttttcttttttttggggcagcagtttgtgtatatgctaggttggtgttatatgcatgttgaattttaatcttgatgtttacaattgacgttcataaatttagttttttacaaattaatttgaattccttcaaattaaaatcaattgcttcataatttcttttctttcaactgtcgtactaaaacttgttgatatgtgttgaacttttagttgcattactgttcaacatgttaacatgtgccttattgttgaacttatgatattgactaaactatgtatttgggtgaatcttatctgtttatttggggaaaaattttagaattgtatgtaacttagtctgtgtgctcttctaggtatc

SEQ ID NO: 50983 - DNA, 584 bp, Ricinus communis
  Intron number 1 from transcript 29983.m003215 (locus 29983 .t000114) derived from phytozome v7.0 (chr-ID 29983; pos 6 28803 to 629386)
ctcttctttgtgtgcctctatcacaaagcttgcaggtttgctaaccctctcttctttatccctctctttatgatttatcccccaaatgttctattgcaagagtttaaccagtgaagaggttttctgattataaaacttcgcgaatcattttacggaagtgtttgacgtttgaattctgttaatgagctaatgaaacttcgaaaataaacatttgggttttgattatttttaaggaatccgaaatgtgttgttttgtttattttaattgaaagaaccagtcttgattgcttgggttttcggttgattgtcgatacaaatttttaacatatggccataacctgtttgatggatgtacccagaggagattaccttttttcttaagaaaagtttaaactttggctgctatgttagtacttgcccacttcaataacacaaagcttcttttgtaaaaatcgaatttgtttgatataaaatatttgcagatcttgcgtgttatctattgatagaattttgatttttcttatttgttgatgggaaaacaaaaatcagtgaaggagaattacaggaagcaaggctttggagag

SEQ ID NO: 50984 - DNA, 262 bp, Ricinus communis
  Intron number 1 from transcript 29889.m003291 (locus 29889 .t000057) derived from phytozome v7.0 (chr-ID 29889; pos 2 45178 to 245439)
aggtgttttttttttcttcctttattccgtttgtttgtttgccaagaaaaataaaatattccatttttctcgcaaaccaaacacaacttactaattaattatattctttttctaatgaaataaaggtgatttttattcacggatttaagaaactacacaatcgccataaggtacgtgatgtgttatttgattgagcaacatagagttgaatcgaaatccactccaatgattctattttactttatctcgcagtctgagctgt

SEQ ID NO: 50985 - DNA, 774 bp, Ricinus communis
  Intron number 1 from transcript 29844.m003179 (locus 29844 .t000025) derived from phytozome v7.0 (chr-ID 29844; pos 1 69140 to 169913 reverse strand)
tggcaacgtaagtaaagtaatgtgtttgctctttcttattaataagcctgtgaacctgcacctctctacctgctggttcataaaaatttgctttgagttcgtgatatttatttctcattttcgtagcaggtatcagaaaataagatgtcataatatgattatgaaactgatataattacagttaagacttaaagagaaaatgaagtatgcatctttttctccttagcataggaatatagtagcatgcaatcacaagtatgtttgaaaaatcaggccttgccatcacctcttatagcattatatttgtaatattatcaattcaatttttttaatgtggagaaattggttgttttggaagtaatagcaaccatttttataaatatcatctaatgtgagatggtcaagatgatatattgaagtcagatagtgtgtaggttttactttaggctttgtagataagatcattctccatctttagggttcaaaaactaccatccacatattaatgctggactacttgtatgaagattcagaggaaaaatttgtagtccatgcttaagatacccatcatgttttcgacctaaattccagtaaaacaggagatagtagttggattacatttggaaacttatagttatcagctcataatgggtgctgctgtgataccaatttgtttgtctgttgtgtgcccaagaatatctgcttgttaaatgattgattggtttaaaatgccttgtaggttctttgtagtactccttgtggcttgcttctcat

SEQ ID NO: 50986 - DNA, 1025 bp, Ricinus communis
  Intron number 3 from transcript 30131.m006973 (locus 30131 .t000124) derived from phytozome v7.0 (chr-ID 30131; pos 7 34668 to 735692)
gaatcaggctgtgaagaggtatgattatcagtctcggtttaaatcaatcaaattcctgattacttctcatttcttatttacaattgcaagaatagcatgtattaattgtcaaatctttgttgttaagatcatgtttctcatttatttctttgctataacttttgacgtagaatttgtatctacttgacctctcctcttgtgaacaagcttgttggttgtaagtaatgtagtcacctagagatatccttgctaatatatctatgcacacaataaactctattgattttattacagttgcttcagcaacgcaatctgtttgaatgtcaattcttctggaaaaattggtttctcatatcagtgtcctaccatggaaacttttacagtagtttattaggaagtatgatctgtgccacgagaaaagaaaatgttatgattcagggaaaggcttctcttttcttttgtcataaatgttcgctagtttaacagctcaatgatttgatgaggcgttgcagctaaatgttgttgagatatgctgagctttcaggtcataccgtcactgtgattaatgctttagttccattattgtttgacttaacttattagatgctgttgcatcctgtctgcaatttacgaaaaggattcagttctgagaaggggaaagttattttgtagaaaaagatgttgttttgtgttcaatgagttttgttttcctcatccacctataattgagtatcgatatgtcctaaattaactttatagtgttttttctttccggtgccattttgttgttaagaatctagacttacgccaccgcaaaactatggatatacttatctgccgtataaaatttttttatttaagatttatgatctgacattacttatctttacgcgggatgaattgaaagctagctccaataaactagttaagtagactattcggattttcttctcctttatctggcgttcattgtttatttattttctgaaggtgacattagaagcagaagttacaaacaaaggagc

SEQ ID NO: 50987 - DNA, 293 bp, Ricinus communis
  Intron number 3 from transcript 29912.m005582 (locus 29912 .t000308) derived from phytozome v7.0 (chr-ID 29912; pos 1 905276 to 1905568 reverse strand)
ttaacgttgaatatcagcagtaagttaaatttctttccatatctttttaaaatttattttgcaccatattcctgatccgttgtcatacaatttgagtatttaaaagaaaaaaaaaaaaaacaagagaagagaagagagaacacgtaacttgagtacattaaccggaatcattaagctaaaagtacactgaaatgaatcatatgctcattatatataaatagattcattttggtactaatcttctttgcactgaagtctgaagtggcttatttatcttttctactcagggtttg

SEQ ID NO: 50988 - DNA, 561 bp, Ricinus communis
  Intron number 3 from transcript 30054.m000788 (locus 30054 .t000003) derived from phytozome v7.0 (chr-ID 30054; pos 3 1081 to 31641)
agtcaaccaatcttcattccagggtcaaatttcaggcaataatccttttctgtattcattcttaaaccaacttttgttaagtgcatttaaattcaaaaaagcatatctaatttatttcgatagctcgaacgtgcatctctagattattcttgtcttcactagttcctactttgtgaagatcactggacaggatttgaaatctttaccatcataatttctcaattatgtctatatttaggccttctaagatttttctttgcttgtaacttgtgattggcaattgagttttttttttttttttttttttttacttctttgaaaagtgctattttggcctgaatctgtaacaaatcacgatgctgagtttgagaatataacaacagtttgctcaaagtgggagagaatttgaagcttctttctttaagcacacttaagatctaaataatagttaagagagatcatgctcagttaccgtaataaatgtggaagttcatcttatgctgttgtatgacaaagtttatgaatctcaaattataactttctgggggccttcatatccag

SEQ ID NO: 50989 - DNA, 587 bp, Ricinus communis
  Intron number 1 from transcript 30059.m000462 (locus 30059 .t000008) derived from phytozome v7.0 (chr-ID 30059; pos 7 6116 to 76702)
ctacgagatctccgtgaattctcaagcaacttttggtatgaaaacgatacatgcagatatagctccaactctttttgttcttgacgaagttaacatatttgatttttgttttgtttttcttgttattaatactgttattatcaatttattctttttttttttttcttcgtcctccaattaattttatgatacttttctttttttgtgcaaaatgcaagctgaaatacttgtgaagtacatttgagtttttcactggtgttaatctctttggtatattgaaatatgaaataaggttacgcacgacaatagtttttcttctgccataaattttagctcagtggctctcgagtcccgttcagaggggtgcggtatttgagtgtggcaagaaaatgattattctgatcttatacctggtgcaagaaattccaccgctctggacagaagagcatgaattgtatatttatattgcaatcgtaccctccctgtgtaacaatttagaagtaaaatgaaatgaaattaataaatgcatggtaattgatgatgtggggtttgatccttgactgacaggagagttgaagaagctcctg

SEQ ID NO: 50990 - DNA, 327 bp, Ricinus communis
  Intron number 2 from transcript 30075.m001157 (locus 30075 .t000024) derived from phytozome v7.0 (chr-ID 30075; pos 2 12053 to 212379 reverse strand)
taagattcaagccgagaatctcgcactcaagaaaggtaatctttatatctatcttcagtttgatttgtaaaattggatgaaggggagagtaaatattactaataatttatcaatgttttaagaggagaggaattagtaaaaatatgctctattcagttttcttataggatacatggtaggatcagaaacttatgcacaagcgccagtggcatgattgaaattcatattcaggcattacccaggaatcatgtttaaaattttactaattatggtttttgtgccttctttttggtgtataatttcatgtctttttaccttttgcagcat

SEQ ID NO: 50991 - DNA, 743 bp, Ricinus communis
  Intron number 1 from transcript 29889.m003269 (locus 29889 .t000035) derived from phytozome v7.0 (chr-ID 29889; pos 1 39306 to 140048)
gattccatacacttcaaggtctcttttatgctgttttaagctccatttttattttatttatttattttgtttattattgttattattattattattattattgttattattattattgttgtgattttgggatttgtgtttatttatatttatttttttcctgttcgtaagttctcttttaaactcagtcagtccttggcaatggctaactgtgcaatatgtaactgccttcaagtatcaatgaaactgctatctttgtgtaaaaaaagaaaggaagtccttttgtttggtttttgaaagtaaatttcgtggtcttcaggatataatagagcaaaattaagtttaaacagggagctaatagtaactattaaagcatgggggttcttatttcaaaacgctaaataaataaacttacttttactaatgacaattggagatgaattatttaaagttggttttacaaggtaacaaagaatgaaggcatactatgcaatgaatcttaatagtaaattaacaaaaagaaaaagttgagaaggaggtaacagaattagttctattttgtctgctacgtgctgttattgtttctacctcagcttttagtggtctatggttctcttgattggcctttataatatcttcatctggttctggttatattccattctcctggtggtatgtatagttgtgcctaatatagtaatgagcgccttgttatgtggacagatttggactttgggaacata

SEQ ID NO: 50992 - DNA, 887 bp, Ricinus communis
  Intron number 3 from transcript 30068.m002661 (locus 30068 .t000151) derived from phytozome v7.0 (chr-ID 30068; pos 9 74350 to 975236 reverse strand)
tggggggttcaggtattcatgactttgaattggttattaaggcttattagtttgtttgttattgaaataatgtatgtaactgtagagaattgttaaatttggatattctgttctagtaaagattgaatttcttatttacgcaaaggtggtatgtgagcactatggatacatattgatgtaataaatattttagctattttattctgagaatggcatgaaactatggattcaccatttgaaggacattcacttccagctaaaatagagttcaactagtgtgtgctttaatgagcttgagcatgatattttgcctgattgagttgttgattaacttaggttgatgaatttttcttttatttgaagaaggtggagctacttgtttaacttgtttgcggtttgttttcatgctacatatgttgtagtggagaaccccatattgtatttttgttagataagcttatctgaaagtttcactatgggacacagtgcctgactcagttacgacatatttctggacttgtgcaccttcaaattaatttactgaatatgcatttaaattcaatctttagcttttcctatgtcttgatctgaaatgcatagtctgaattaacatgaccagtggttgaaatgccatcagataacaaatatgctagatgcctttgtccaagaagtacagagattgtctttagattacataaaaattcttgcttcgtctaaccttttggtgattcatttttttgggtgctgttctcattgtatcttttcaaggttgcttaaagtcttccccttgtattttcttttcttttattcttgttcagcttttgtaatttcaccttcttgttggaaagtggtccagttctaatataagattttaattgcagcctatc

SEQ ID NO: 50993 - DNA, 673 bp, Ricinus communis
  Intron number 3 from transcript 29850.m000272 (locus 29850 .t000006) derived from phytozome v7.0 (chr-ID 29850; pos 7 0627 to 71299 reverse strand)
tgggctgaaacacattagtggtacttctctcatgcttggttattaaagtgctacaagtttttatcattctttgttcttttgtttgtcagtttaaagcatagtttacagtctttgatctccatttgctgcctgagatcatttatttgttctgtatagaaaaaaagatatggtagataaagtaagtatccttagtattactcttgtggatatttagtggcaattcgtattacctttgaggatattaaatggaaaagtataccaattgtttgcggtggtaatattagaagttactgactatgctatatacttgttgaagtaccagtggaggaagttagttctgagctgcaatgaacattacatgcagcaaaagtttgactgtctaaattatacccattttatgctttgattgcactatgtcaaattaatgatgctaattagttttattctatcctaagctgatgttccaatttcctttggtcaacagctatgatttatcgatttcttttttattggtattaattcaagcattacatcatttggtggcttttcttttccttttcctagtatctattcttgaaattcactaatcaactctatatgctgattacatggatgataattgtgatcctatcctccaggtcttaaaaacttgacatctttgagtttcaagagg

SEQ ID NO: 50994 - DNA, 559 bp, Ricinus communis
  Intron number 1 from transcript 30078.m002247 (locus 30078 .t000040) derived from phytozome v7.0 (chr-ID 30078; pos 2 51442 to 252000 reverse strand)
tatcattctcttcttcttcttcttcttcttctctggtaatttatcaaatttctctcatttcatcttttcttctccttggttgctgagaaaaaagaaatctaatttttttgttttttttttgcgttctaagaattgtttttattttttttattgtttggaagtctacaatgtgaaaattcaattcaatgctttagagtctgtttggaaagtctaaaagtggaacatttcatttgaattgaattctatttagtcaatttatgtctggatgaaaaaatagacattttgaaagaacttgaagtttggcaagaattgaattgaaaggaattttgcaaatgattaacacaaacaaggctttaatcaattctcatgccgggttagtttatggttgctagacttcaactccttctactcaaaacaacgaaagcattttgaaaggaacaacacaatattaaaagtcatatgattttgcaagaattcagtttctcaacaatgcccgactataaaggatgagagagtgaaggtgacttttcttgaattggaatgcaggtagcaagtggtt

SEQ ID NO: 50995 - DNA, 620 bp, Ricinus communis
  Intron number 1 from transcript 30131.m007247 (locus 30131 .t000398) derived from phytozome v7.0 (chr-ID 30131; pos 2 454130 to 2454749 reverse strand)
ccaattaaaactctcaaggacttatctctgatcaagtatgtttgtagttgccttttctttttcagaatcattttcatttttgtgctgaaaggtttttttttttttttccttttagacttctttgcctacattttctatctcgtcggaattgacttaaagtgaaagatcgtcaaaatttgacctttatcatgaatgcacccttacattgcagcagtattctagtattatgtttagtgtgtttgcttgtgttatgtctgcgtcttcatatctttttgacaggcctgttttggtggatagtaataattttttaaaaagatagacaattcggtatatacagattccgtttatgcacgtttctttgcgttctatagttgtttttgcactccttcatttgtttttcccacataatctgggttaagtatacggtatcatgtggtaaagaatgttgcatgtgcgggcctctaaaagcttgtttatatgccaactaaaggaaaaatgactgaagtttccatgcagccttttgaattaagcatacctgattcaaatgtagttcctgttttccccttaaatttcctttgtcgaataataaggtgttatctgtggcataggggtgtgggtaa

SEQ ID NO: 50996 - DNA, 891 bp, Ricinus communis
  Intron number 1 from transcript 30074.m001336 (locus 30074 .t000003) derived from phytozome v7.0 (chr-ID 30074; pos 3 2810 to 33700)
ggtcaaggttagcctctattattcctctttaatcttcaaagggtcatttagaaatagagacattattaatctacatcttccccatcttcttttagattcaatgactgttatctgctcatagtattggcagcataagaactttcagaaatgcaaaagaacataaagaaaaaaagaaaaggttgtaatgatgcttttaggcccctcttctttttgtatgtcaatgatatattatgttatttagcacctaaaaggaaaatagaaatcttgcaagcatccaatcccagtttttctgacagcttttctatcaggtttggttccatttgtgggccctgtaacaacaatctttttaggggctaacaatcatagttttttttcccttgtcaatattttttcaagtcatcaaaacaaacagcttggaaatcttttagcattgaaattaataactaattgttcaaaaagttgtattttcttaatttattagtaagaatttattacaaagtttttataaatcaaacatctgaaataccaattatataataaccgaccagtatttttatttataaaaataaatataaatttaagctcgaattcttctatccatcaccattcaccaatattggtataaatttatcatttttattaagccttcagttacctgtaattagagatttaaattgtcagaaatgcaaagcttatttaagcacaagtactgaaacgaagagaataagaatgtgttaatactatttttgagctttttttttttgttcttccatttgagtggttagtgttaaatgggaaaggattgaagcaaagcagtgagtgaaaatgaaaaaaaaatgttgaattatgtgggcaggtgatagcaacaaggaatactcgtgaacgcagtaa

SEQ ID NO: 50997 - DNA, 673 bp, Ricinus communis
  Intron number 1 from transcript 30008.m000811 (locus 30008 .t000027) derived from phytozome v7.0 (chr-ID 30008; pos 1 22523 to 123195)
ataattctccatcttcacctcctgataattctcaggtaaaagttagctgttttctttgatgggttcttgttttgtttcctttgaagaatgttggatccgctttgtaatttacaatgtcgttatgttgttcaatttggttcttgatcttgttgatgatcatgtcattttattggctaattctattgacctatttattcatagtttaatggccaacctggaatagggtcttttggtttgagattatttgtaatgatgtattcttgatgctggaatatgtggaaatgctacgtaatggtggatctgctttatattttacaatctagttacgtgtgcttattttgggcataaacagtccataagaaagagaccgtaaaggttttcactctgtagcttaagaagcataagagaagacaaaggttctaaaatttaattggtatagttttttttttttcctttgtagcttaagaaacatgagaagacaatttctagaatttaattgttctttctgaagaaacccaggacttagaatcactatttttgtgcttttagcattctgcaagattatggcttttccttttccattttacttgggaattttagtagtactggctgtgaagtgagaatttttgaatgtgtaggccaggccattttctagtgggggaaaatcattctc

SEQ ID NO: 50998 - DNA, 467 bp, Ricinus communis
  Intron number 1 from transcript 30146.m003619 (locus 30146 .t000196) derived from phytozome v7.0 (chr-ID 30146; pos 1 315733 to 1316199)
aagcaaggttttgggctgactatattgacaagaaggtgagttctattaaatattgaaaagaaaacgtgcacgttgggttaaaaggttctgtattaccccaatactttgctaacaatacaaatgtcatgcaacccaaaagtttaatataaacattgttctggtgcttaattcttgctttgcttttctcgacgtcaatggcataaatgagtaacatatatatatatatatatatatattagtttattagtatttgactgttgaagagagtatcaataatttaaagtctaagtggatgtatatattattagcatacttattaaagtgtgtataactcaagtattcgttacagtgtaggaaattcttacttattgctattacttcttggaggggaaaaaggggtaaattcacatttcatcttctaattactggtgtgaatttggtactcgcagatttactcgactgcaaag

SEQ ID NO: 50999 - DNA, 460 bp, Ricinus communis
  Intron number 2 from transcript 29908.m005950 (locus 29908 .t000001) derived from phytozome v7.0 (chr-ID 29908; pos 1 050 to 1509)
cttgggagaagaaactatacaaggaagttaaggtatgagacaattacaagcaattattttgtagttttcaggtttcatcttttgttgtacacaggtattcatggaatttttatatttgaagtagatgcctgaaaaagagctccctaaagtataaatatgcacgaattttatatatcaaacttactcatttgatgtgggaatactataacttatttctttttcttttttaacattgaattttatcaaacataggctcatttagaaattttctcttctgtatggccactagtaatatctgaggaaggaaaatcaaatttatgtacaaggaaaaaacaaaggaaatctttttcatgcttctttctatgtggttaaatattgtttgatatttcattgcttttatatgtctttaattgctgtacaatctttcttactatgtctaggtgtttctgctgattttagg

SEQ ID NO: 51000 - DNA, 470 bp, Ricinus communis
  Intron number 1 from transcript 29822.m003393 (locus 29822 .t000068) derived from phytozome v7.0 (chr-ID 29822; pos 3 64879 to 365348)
gcttaagagattgccaagctcaagttggatcttctgtaattatttcctttctttgtttctttttaattatttgatcaatgcttgctttcaaaaagattacccgggctcttctcaaatttttgtgatgaactgtaaatttgggtcctttaacttttaaatgaaacgtggattctttatgtgctaatgaagtttaacttgctagacccactcggttgcatgttttgttttgtgttatctgattattaaaaaaaataatttttcttatataaaggtgctaaatttccgggatgatcttctggcttttctttaatcgcatgatgtttatttgcattttttttaatttcattgttatgtgttgattatatctacattttttaattgaagcgtgtgggtgttgcataatcgttccctgtactactttgttttgatttataggtgtgtaatccttctgtgagtgtgttcaagggata

SEQ ID NO: 51001 - DNA, 288 bp, Ricinus communis
  Intron number 4 from transcript 30076.m004646 (locus 30076 .t000210) derived from phytozome v7.0 (chr-ID 30076; pos 1 377783 to 1378070)
cagttgatcctaataaggtatgttcttatattcttttttttttttcccagtagctgtagtgtaccactgctaagtctgtttcagttgatggtgtaacatctcttcttccgtgcataggaaaatgctaatatgtatctttcttaatggttcttaaattttatttatctctttctctttggagtataattgcacagaaaatcatacaaactgattttgatctgaaataatatctgcttattttaatatttacttattggtgcattcttatattggaaacaggatattgta

SEQ ID NO: 51002 - DNA, 458 bp, Ricinus communis
  Intron number 1 from transcript 29912.m005462 (locus 29912 .t000188) derived from phytozome v7.0 (chr-ID 29912; pos 1 202815 to 1203272 reverse strand)
ttaggcgagcacttttgaggattgctgctggtcaggtttgtttttctgtttgattattctttgtttggttactaagaaagtcaagagggaaaaagaaaggacgatctttcttgtatgaacttatgattatgggaaattgcgtgaaagttgaaatctttttgtttccaaatatagaatctttctctctctatctccagttctgtgaatttgttttaaacgtactatcatttgcttgctttggaatgtggttcggaattgaggaagatagcagatatttggaaacggtcgattaagttctatatggatggtgccattactgattgttttataaatgggagtaaaaactttgatctttgagttaatttatgtcattttgttcagtgtggtttttaaatagagtattgtcaattactgagtttctgtttctggtcttgtatcagcttggaaggcgggtagag

SEQ ID NO: 51003 - DNA, 523 bp, Ricinus communis
  Intron number 3 from transcript 29848.m004528 (locus 29848 .t000084) derived from phytozome v7.0 (chr-ID 29848; pos 4 46750 to 447272)
gaggtacgagttggaggttgaagtatttttctatgtactccacagtcttgctctattaaatgtgtttttctcttgattgtgaacctttactagttttttttggttgatttcaagatatgttcattacctaatcaaatgatctcattggtgtttgctcttgaaattaatgaatctctattgtcatttttcacttgcttatgtttcaaatggtgcttaagttccttgacactcagccaagcatgtgatgtggtgaatgtgaagtcaatcaatttcttaattaagatttagacttttggttaatttactgatgagtcatggaggtctttttttcatcctaggactcctgcttctgtttcttcatattgtccgtattatagagatagcttcttaattcggagaaacttcaatatgcttactattatgcctacagactaccgcagtgtggtggtaatatatatcggtggtaaccttgttctgctaacttgcaggtaaagtagttgcaaagttctgtgccaagtttctt

SEQ ID NO: 51004 - DNA, 491 bp, Ricinus communis
  Intron number 1 from transcript 29827.m002555 (locus 29827 .t000028) derived from phytozome v7.0 (chr-ID 29827; pos 1 63527 to 164017 reverse strand)
cgatttgtacaaatttgatccttgggagttgccaggtactattctgctgcccaatctgttggaacttaagtaattgaaatcttgctctttgccaatcatattctgatgtctatttgtatttctgttaagtttatcggatggttttactgctacctttgtggatgataaactagtgtctgaacatagatttttcaattgaaatattggaaagcacttttgccctttgctttttgtttttcgtttcttctttatagactatgcttctcagaagaaaacttttatcagttggaactcccactttattaatttctttttttttttttattccaaagtgatttcaaatgaatatttatttatttattttccacaacaattaaaccctgcaaaagcatagcctgctgatgattcaattgtatttttaacatgaaagattcaaattctgatttccaaactatgcatttgcagagaagtcattccttccgcaacgagac

SEQ ID NO: 51005 - DNA, 758 bp, Ricinus communis
  Intron number 1 from transcript 29848.m004704 (locus 29848 .t000260) derived from phytozome v7.0 (chr-ID 29848; pos 1 516718 to 1517475 reverse strand)
ttgtcgcttccaacttcctttcctagttttagcaggtggtctcttatcagttaaatcttaattcccattagtaatagttttattaacatctgaattcagttgttttaatttgaagctgctttaacctaatctcatctttatgacttcaattttgaataatcatgggtctaatttctattatatcctccacaaaaacctgtgttatctaacaaacagacatttggagtgcataatcatgtatcacatttgccctacttaatttcaatacaagaatcatgtttagggaatattgtatttttcttccttctgcttgattatggaaactggagaataagtgaacacctttctcttttttttttttggataatatagtgtagaattttaaagtcaatgtaaaatgattgattttagagtttattatgtaaaatgattgattttggagtttgttatgtacctttttaaatttgagaagactgctattttcataattttatgagcacagggttgcatttgatttatggattttctttgaaggttgaatgatattatataggaggtttgattgggattgctaatagataactgatttgctaaacttgtttggctacttgcacttttttcagttttctcatttcatttcatgtcaatgcaattgcattcagttgataaattttctacgtcagaggatactgactctccttctggtttgtgttgcatcattagactatacaaacaaacatctgcagtcagataagtct

SEQ ID NO: 51006 - DNA, 547 bp, Ricinus communis
  Intron number 1 from transcript 30076.m004655 (locus 30076 .t000219) derived from phytozome v7.0 (chr-ID 30076; pos 1 412363 to 1412909 reverse strand)
ggagcgtttgtttcttacacaactcagtggcccaagtaagttactatttgtttcaagatagaacaaatagcagagaattactttaaatgctgatgagttatacttctgtcgatgttggagttctataatattttcttttgagttttggagttattatatataatcctttcgggtaggacagctaatgtaacagaatgacaggacctgggtaagggagtaaaacttagctcgttttaatataaccagggtgcatcaaattcacaggaaatggtgcagatgcaattatgccaggttgatcctgtttgaattattcagcttgtgggaacgtcttagtcttatcaataccagtatcaacttaattaataattaaatgtatcttctttctatggttgttaggtcaagcattgagcaaccccttttcagattaattagtgcgtttctgttttaattttgccttctaaggaaagaacccgggtgcctagaccccacaaggtgtgcaggatttacagctcatttactgacttgttgatttgcaaacttgtaggcg

SEQ ID NO: 51007 - DNA, 738 bp, Ricinus communis
  Intron number 2 from transcript 29912.m005482 (locus 29912 .t000208) derived from phytozome v7.0 (chr-ID 29912; pos 1 350107 to 1350844 reverse strand)
caacaaaattgctatttctaaaccaacttgaggctgtatgatatgccttcaataatgagttttgttagaccacatatttattcatgctggaaatggagctatcctcattgtgggttagtaggttgtattatttagttgtgtgctgctgaagtgaccttgttttatttttcttggttagtcatcctttgacacatgcacagacatattaatatttctatgctctcctttaggtcttgctttcgtcattatcttgtgaaagtcttacaactgcacctttccttcttggctctaattgaataatgtttttgtttttggcatattttgtaggctgtagccaatattgctaaaaagctcttgtttatttggctgcaaaatgacctgtgttatttacttgttcactgtcgaagtttcttgtatctttatttctcttttaacataatgtggtagaaaagtaagcctgcaaaaccactgacatcgtctaccattcagggtttcattgttatattgtaattgctatatcctattatttgataatatttgccaagaaagaacaaggaagaaaacatgtatgtctaatcctacagaaaatcataacaaattcgatttctttctcatttagtattaagaatgtatgtttcatagacagtatgcaatgtgcagcaattattgtgtttcttctgtatcagatttatgttttctgttgctgattgccttagtggttacctctttaccagattt

SEQ ID NO: 51008 - DNA, 1036 bp, Ricinus communis
  Intron number 1 from transcript 30055.m001590 (locus 30055 .t000060) derived from phytozome v7.0 (chr-ID 30055; pos 3 30192 to 331227)
acacctttggcagtgcgttatttctctccttttcaattgctcttaggttattatagacctcaagataaccattctttgcttaattcaaacgctgatgatgatttgattgttgttttaggagccaaattttatacagattcttaaatttggtattgaattgcttacctttgggtttccatttcctcaaattgaatttttatttcttacctcattttttctatacgataacttaggttccaactaaaaaatgttagctgaataacctttttcggtgatatgaagataggtcattaaagccttattggtgatatgaagataggtcattaaagccttattggtgatatgaagataggtcattaaagctttgtccatgtaaagtggttctcttgcagcaggtgtatgaaagtctctaacattttttacttgacctctcaattctatcctcttctttgttctttaatactttagcgaactagttgttgtatattgctaattttgctaaagaattgtcctgcagttttcaccggctgtccaagtaaaattgggtgtcttatgtgtaatgacaattggctactttgtaaatcatgatttgagttatatatgtttgattccatatccaacttgatctgtggtatagccaggttaagaaatcaaggggatcagactagtaatagctggacctaattaaggaggtcaatgctcaaagtgtaccaaatttaaggaggcaattgtcgtttttagatggataaacttaaaagcttacaggactttaatactaaaacttgatagataagtcatgttataagatgtttaaaataacgtcaactttttgtttttttttttttgaacgaggtcaacttttttctttttaactgttacaaatatatctaatttcgatactcagtgttctataaattgtgattttcagcagtctgattggataatatgtttcatatttatctttatgtgacatttatgtgtcaatctgtgcctttatccagggagaattccattttcatacttggaggacatccac

SEQ ID NO: 51009 - DNA, 799 bp, Ricinus communis
  Intron number 1 from transcript 29981.m000577 (locus 29981 .t000006) derived from phytozome v7.0 (chr-ID 29981; pos 6 6951 to 67749)
ccctaccactcctcctctacagtctattgttgcccgtaattctctcttcacttccttttcttttctcttaattacttttaatgtacctgtagtgctggtttcttcttgattttataggttttctgttttttcttaattaacattatccatttttggttgattaacccgagaaagggaaaaaaaggactgaagaagtacaaatcttttagcacttttcttttctgggtcttaacattgcttatggataagtgtttctgttgattgatttaacctcactgggtgttctgaaggtgtttaatgcataaagcatacgaggtgtgatgggtgggtgaaagttttgaattttatgtatttcattgctaattatgggttcgaatgtgaataccgaattccctttttgaaccagctcataaatgttaaaattagaagtgaaaacttgaattccgcataactatatgagaaagaaagagatacaagagtactcttttgtttgaaaaaacactgctaactgtatgtatggcattgcctgttacatgatgtactcatttcctacttcatggaggcatctgcctttccaattatgttttgaataatgggttctgttttaactgcaacatgctggcctattatattgggcataccaaattcttgtttatctagctctctgttcttcatggcatttggtaattattctgttgtattggccatcactagcatcatttagttgattggttttatactttggttcatttttatcttttcaggtagagtgtgcccttttactggcaagaaagccaac

SEQ ID NO: 51010 - DNA, 596 bp, Ricinus communis
  Intron number 1 from transcript 30128.m009009 (locus 30128 .t000470) derived from phytozome v7.0 (chr-ID 30128; pos 2 145376 to 2145971)
acattgcttccaattcttctggtttgtcttctttcactttacatttaatatttctataaccattttcacatttgcctctgggatttctgggcccacttatggttacaagtgggcccccccctccgcggccgggctatctgactgttgccgaatggtataaaagttcatgtcttttaccattactaacgacccattggcattggcaatataaaagtacaagctttgttctgtaacttgctagcatatacgtgattttcctgtattagctcattctaattacataatgtctttttttattgttgaatttacggtttttcaactaaaacaaacaaaaagattcatacttttcctagtcatacctgtaagttatgactgcttagctagcagattttaatcttggtggttaattttgatacgtcgatgatgatttttatgtacaattaattgatttatataattgtcctagtctgatattaattctgttcaccttgaatatttctttttctttttggcatgttagtttctctgtttttatcaatgaccatgaggtattattttgttcagggtttactgggagtagttcgtccaaacatagc

SEQ ID NO: 51011 - DNA, 198 bp, Ricinus communis
  Intron number 1 from transcript 30147.m013854 (locus 30147 .t000125) derived from phytozome v7.0 (chr-ID 30147; pos 2 944100 to 2944297 reverse strand)
tcttgttgtcactgcgactccatcttcaaaacaaggtctcatctctctctctctctcttatttcttcaaagatttaatctttcttattaactaatcagttttctaacatgggtttctcttattttgaccaaatgaatttgtttgattaaaattgtttttgcagttctgaaaggtggtgttgacaatatcaccgtaact

SEQ ID NO: 51012 - DNA, 467 bp, Ricinus communis
  Intron number 2 from transcript 30147.m013930 (locus 30147 .t000201) derived from phytozome v7.0 (chr-ID 30147; pos 3 414583 to 3415049)
gtggtagcaaggaggcagctgcatcagttgtaagttcttctttattagaacagtagcactgcagttatgtggtcattgtgattgtttagatagcttttcactgagacatccatccatgattattttcttgctctaacagaaatattaaaatagagacctgatttgaattgtggatatccatttgggaaaaaggagaaagaatggggaaatgaaactgttaatattaacttggattgagatatgcttgacttttttttttctttttaatctctatgactaagagaattttatggttacacctgtaatgcgagatgataagagacattggtgcattgttatgttaaagaatgcaaatgaaacatgttgatagcagtttttttggtaatgcaaataggtatcgttgtttatatatgcaagtaaattttgaaactttcaagaactgacttcatcattacgacagagtaagg

SEQ ID NO: 51013 - DNA, 683 bp, Ricinus communis
  Intron number 2 from transcript 29908.m006275 (locus 29908 .t000326) derived from phytozome v7.0 (chr-ID 29908; pos 2 034068 to 2034750)
acagcatttctcagcctgttgtaagtctatcctgtcttttactaaaatggtattggaaaccagatgattggtagttttatggctttagtaccctttgttttacatttctgatttatttaataggtactcacgatgattgctacctatctccccctttctgtatctgtgcattacctttcgcgttcctttactaaaatgcattgcttaaaactaataaattgtaggttgttgtaggttctttttctcagatttcatcatttaaacaggtttctttaagtcaattgcatatcaaatgatattaatttagtttctatttatttacttttaaaaaagattgatttgggaacctgataagaagttaagcccctttttgatgcacttgcatatggtgaaagattaaaaagataaagaagaaaacttctcttttcatcttcctgaaatgttatttttgagttggttgtttgtcaaatgatatcttgctgctgatagttgattttgactgtacagttttatgcttcttaccctgaattcttataatccatttacatgaaatacccacattcatcatgaaattgtggtccgccacatggtaaatgaagcagtagggtttcaatccatctctaatctttccctgttatttgctgttcctaattcatagctgaccattgcttttatttgtcagc

SEQ ID NO: 51014 - DNA, 1000 bp, Ricinus communis
  Intron number 2 from transcript 30147.m013835 (locus 30147 .t000106) derived from phytozome v7.0 (chr-ID 30147; pos 2 869083 to 2870082 reverse strand)
tttcatcgtcatgtaagttttgttttaagcatttcttaaagtagcaaggtggaaatgaaaataagggaaagataagaggcactcctttatagaatggtgttttgatgcgtttatcatttaagtaaagaaagttaaatagcttttgcttaggtctccttgctcttaagctaattgtttttttccactggctgttcaacttccaggatatatggcattattaaatgtatgttgcttgatttttgtctttaaagatggttggatatttactcaagaactctgtggaggtattaatgttgttaacttgattgatgtagctatggtgcttttgcttggacttgagctttatcggattcatcagttcaaagtttaggtttttgcaatttttttatcattaaccaatacttcctgcgctctttcctataaacaaatcagtagaagaatgttatgtgattggaaaaggatgaaagcttaggtgatactggaaatattcagtcattacttaatcagggtagtagagcataggtgatacttgctaataacatcaaaaagtaaatgcctttgtgtttcataagaattacttccttctcactcatcaacctatccttctcccgcagccagaagatttacattttgtgtttattcttatatatatctcgtgtagatgtcaattagtcaccttatttgttgacgtagtgactgcttaattgctaattgtggtgatcatggtagtatcatgtttgtaagccttcatgaattggcaaacagataggcggatgatcatgtactaatatctttgtaaaatattcatgagtttttcatatcagattgtgcctcactggtctacctaattaaaatcagcacatactgtaagcatattggaagcaacattccctttgtcaattttgtaacagcagatgatttgaacattgtggttgacctaataattttttttcttctaattgagttagcttctttttgtttgtacgtgaacaggatttag

SEQ ID NO: 51015 - DNA, 223 bp, Ricinus communis
  Intron number 1 from transcript 29822.m003451 (locus 29822 .t000126) derived from phytozome v7.0 (chr-ID 29822; pos 6 81913 to 682135 reverse strand)
cttcctttgtaacttgctggtggtcactgattgttattcacatccactgtgtactaatttaagtgggttttttttttcttttcctttggttatttaatccattcagttcctttcacttttgattcccatggttttgtttgtttttgactgcatttttttattatttgtaattgtatttgttggaataggggcaccctttgtcccagaaacctctctgtctttc

SEQ ID NO: 51016 - DNA, 801 bp, Ricinus communis
  Intron number 1 from transcript 29889.m003335 (locus 29889 .t000101) derived from phytozome v7.0 (chr-ID 29889; pos 4 79168 to 479968)
tttctgaagcagaggtatgtgcggatctgctttatttacatggtgtagggtttttctataatttttttcagatctgttttgtttctcatgtttccttgtgtggttgttaggctatggaggcggtagaacagtttgctgcattagttattatcttgcgttttgattttgtgcatgttggtgtgttttttcgaaactttttggcaaaggttgctgtttttgtgtttctttttttacccttttagtacggtagttttggcttcaccagtatttccagatttttattttatgtttttaatgccgtgtttcaaggtgttttatttgatttagttgcggtgaagatgttccttagcagatttgtttatgtctttttttgttgggtcattctaattgttttttcattctcataatcaagtgtttgagctgcaggattttagtttatgtttgtttgattaccatggacttggctgtaatcagttttaaagcagcctgtttttttaatgtttgaatgatgtggcttaatctgctagcaaaagattttaggaccttgtgtaatttccatatgatggtgatattggagtcgtcgtcgtcgtcttttgttaatgggattttcttatgccaaagataataaggttactaaacaaatgggttgctccaatagtttcactttatttttctttctttaaatgtcttgatgccttatccaatattaagtttcatttgctctgcgttgactttttttttttttttttttggcctgcttatattgtgattttatgtatatgtattggtgtataggaggat

SEQ ID NO: 51017 - DNA, 838 bp, Ricinus communis
  Intron number 1 from transcript 30099.m001643 (locus 30099 .t000022) derived from phytozome v7.0 (chr-ID 30099; pos 1 12457 to 113294)
aaaagcaaacttgttttgccaatatttgatctcaggtaagtagccaaattctgttgaattaatttgagtttaactcttattttacattttctctaacccatgtcatattttaattaatctgctccttttattacatgagtttctggttaggtgttgatcccaatcacttctgtttgcttgcaaaacccgagttataatgggttgattaaaatatgctatttgaaatgggaattgcaacgaagtttggaattagttaattgcttcttttggttttaagttttggacctgtaaatcgtggagagaattatatagtagaaaatctagttttttttttttgtttttgtttttggattgaaaagatgatagttttagaacaatgactatagttggtaggatgctcaaattagatggccatgttaaatggatcatattgaatttgctatctaaaatgggaaatttttcagtgacattatttagttttttttttttgttttttctttgttttaagttctacagttatatgttttggaaaaaagtcaaaagaatcttgttactttgatttagaagattgtctttgtgactaatttttgtgagatgctcaaatttgataaccatgtcaaatgggtcagtccaaatatgctatttgaaagttggagatgggcagtgaagtttggcattaggtattattgttttcttttaattgtttttctttatttaaagttctgcagttataagttttcaaggggttgtaggagaaaatcttgctatttggattgaaaaggtaatatatttagaccaataactctagtttttacgtgatgcctaaataagataagcc

SEQ ID NO: 51018 - DNA, 988 bp, Ricinus communis
  Intron number 1 from transcript 29877.m000474 (locus 29877 .t000012) derived from phytozome v7.0 (chr-ID 29877; pos 1 05359 to 106346)
ccgagcttattaatgtaagttcaaaactttagcaacggcgttctcattaattttgattatcgtttactactatgcaattttgatttcggtggtttcaaatttggttgtaacctcaacctcactaattgtagttatttgatcagagtctttgtaggaaaataatatgtggaatgggtcattacataaatatatttattgtgatgactaattaaatgtatatgaaatagaaacaaaagtgactgaattgatgatatcacctatagaaaaataattattaatcagtcattcaattactaatgtattgagttattatatctatcataattttattctttgtattatctttggttttcttttaatgtattatgtcttttcttgcattcttttctgttttctgcagcgcttaaaattcttgaatcacagattaatgagtaatcttttgggttaggctatttcgaaacataaatgaaatccattacattaaacccgtaggctataagtatacatgtggtgagcctaacttaaaccatgccctgagctagaattgaaggaataagtaaatatcaaatatgtttgattgagaaaaagatgttgtctttgaaaattttgggcaagagagcattagggatcatgtatttttttctttcttgaaaagtattatactgggaaggagaaaacattcatctaatgaaaggctgtttatgctatccaatatttccttgtagtctttgagttctcgttctctatcatgcataatgcttgtttttctgtaatgtgttctttgcatataatctttttagtactaatgttggcgcaaagtatgaaacctcatgctgatctggacaccctttaccagcacaggatgtatttattatgttattggcaactatttgatatgcttattagggtggaaaccatttgatagacaagaatattacctgtattcttctttctcctttgtaggttcattatactgcaagatttgctg

SEQ ID NO: 51019 - DNA, 692 bp, Ricinus communis
  Intron number 4 from transcript 29929.m004611 (locus 29929 .t000114) derived from phytozome v7.0 (chr-ID 29929; pos 6 36532 to 637223 reverse strand)
tggctgaacgaatccaacaggtagatctgtaaatcaaattatccttttcttaactcatatttattgtaaactagagaatttagggaaggaaataactgtacttgaaattcaatgtgattgtgaaattcaaaagggagcttcaaatggatttcattatcagggatttcaagtacataacttggattcttgactgtattacaaaaatgaagtatggctctagtcaatggaggccttgctccattgagttctacgttcttaggttttcaaattcatccttcaattttgagaaattaggctacgcttgatttgtactcattctgagtctagaatttcttgtgcttaacttcttaaggagcaaaatctaagagaaacagaagagagatttagagcagaaaaattgacaggagagagtagaaagtccttggatattataagttgtggaagaaacagaataattcaaattgataatttatgcagtatacttactttgtgaactacagtttttattgctttaatcacattccttaaggcatcgataagataataccaaaaggacttaacaaaaaaaaaaagcagggattgatgtatgatctgtaccatgaatgtttagcatcattatttgtggagccatgtgagtccaatgtcatgttgataagttaattttacatgtgacagtcactgggaccaagagc

SEQ ID NO: 51020 - DNA, 685 bp, Ricinus communis
  Intron number 3 from transcript 30055.m001599 (locus 30055 .t000069) derived from phytozome v7.0 (chr-ID 30055; pos 3 66299 to 366983 reverse strand)
attactggtcaaccggctactgcaactactggcgggttagttaataatttactcacttagtgggatgtgagagttctcgtagtgctgtgtatcctcaatacaggataatatataattcataattggatgttttcttcaacataaacatcacaatatacttctatgggatgggggaatggggataagttaaaataatatatgtaaatatagcttgacaagccatatagtaatccttgtctagcacttctcgcaaaggtataatgtatattgcctaatttcaattttttggataggacaagaagtttctaagttttatgtaggtcatcactcgtcagagctttttgcttcaattaagatagacatctttttccttttttgctttaccttttttctggggcttatgtttttttctctgcaggcttgttagtgaaaatttggtattagtatagaaactgatcacttgttgttcctgcgtgtctaattcaaacattaagtaatatggatttcaactcatggttgatccttcccaaagtatattatacatctgtctatgcatgtgtgttgctttgtcctattgagattaataaagctttggtgcttgtttattgctattaaaatttttgatgccatatttgcttgaaatcttgcagattcaagcttgtcgtcgcagcaccagagcctaaga

SEQ ID NO: 51021 - DNA, 666 bp, Ricinus communis
  Intron number 1 from transcript 30073.m002256 (locus 30073 .t000066) derived from phytozome v7.0 (chr-ID 30073; pos 4 60694 to 461359 reverse strand)
ttaaagataccagctgctattatcagcccatataggtacagcctcctgatacaatgcctccttctatatttgcaagattatgacagcatccacttaaatatctaaactgttttgtagccttgtgtttatttgggacataattggtgtagtagaatcagcaataagaagtgatcattagtttcatggttacttctgccattttaagctgttcaaatatggttagattctatactgcatttgatctaataatagctggtttgtattttggaactcacatcaccgggcaacaatattgtgtttttaacaatgcagtgagatgatcatcatcgtcattgttattgcatttttcttttgtttatgctatgatatccttatgaatgattcccctctttaaattttatgaagggtgaatataactattgtgtgagattatacatgcttgtctcgtttttgggccttgaccttgaagtatacatgatgcaaaagtcttaattatttttcttcttatctactcttctccatgctatacggttgtggtagtctactacaaatatggttaaagaaatcccattaatttacttctacttatgctgatgaacaccttgtcctttctcttgcatatgatttacaggctgctcatctgtattcgggttgttgtccttgcct

SEQ ID NO: 51022 - DNA, 947 bp, Ricinus communis
  Intron number 2 from transcript 29908.m006130 (locus 29908 .t000181) derived from phytozome v7.0 (chr-ID 29908; pos 7 5893 to 76839)
tgctggtgctaatcgtagaccctacatttctcctggtattgcttccatttcttgcttttctttgtgtaattttgattgtctattctttttaatttggaaaaagattttgcaggttaagtttattttgatgcatggttgagctggagatgaattgtctctgatttactgtgtagagtctgtgatttactcttttttctttttgtagactttacatttgatacctctacaaaaagaggccttaatgttagggactttcttgactttatttatttttttggaagaaagagagaacctcacacaacacacgcattttgatggtcatttgtttacttttatgtctgtctcaaatgaactcgggcaaaggattgttctgatttctttattcgtagtctgtagaaggtaacctttttacgggaaaaagaattaaattcatagtctagctatttcaattggtgggaaggcgtattctgccgaatatgccttctgcttgttccttctgtgtattgatttatactctgctgctgaaagttagcacgaacccagctcctttagtgtcagtttttgattttttaaacaaatgattgaagtttcttccttggtaacttttcctccttttctcaataaaaacatggggtcctggctcttcatagtatttatgattttgaatcttttacagtgatctgtggaattcttaggccatgtctggatattttatattggtaaccactttattttcatggctgtctagagacataatgtcaggcagatagctaaatgcattgttgacctgcagttatgatgtttttaaaatctatctcgcctgctttgcatcctgataactgtagtttttagttgcttcagttggtgtttttctggaacacgtgtagttattgatacaagtgaagcagtaatgaattgattcctgtaacactttcatcttgcagtgc

SEQ ID NO: 51023 - DNA, 866 bp, Ricinus communis
  Intron number 1 from transcript 29908.m006248 (locus 29908 .t000299) derived from phytozome v7.0 (chr-ID 29908; pos 1 881388 to 1882253)
acacggtgtgctcgttgtaaagctgttagatactggtattttaattgttaattttttttttttctagtgatgagaaactgagttgctttaatcaggcatttgcttttgaattgggaaatagattaccctgctcctgatttgcctctaatcagtaatttggtgattattgtagatttgttggtggagaacatggttttgaacagtatttttataagaatttgatccttgctggcttttcgttgttccaagtaaatagaggaaacaggagaagaatgaagttgtggaagctcgaacaaatcaattagggctatctactttgtatacttcttaatttggccaatgctgcacctactgagtattaggttacacatgtttaatagttgtaaggagatgtgtctaggtaggctagtgtttaattacaagtttgaggttgtgaaggagaactggtacttttataagcggttagattagtataaactctttaggcagttgagaaaattctgtctctctcaattaatgaagaggcctgacacatggattaagctgcaatacgtgtttgttaattggaaatatggttctttttttcttttttttttcttttatatctagtagctagatgatttgcatcatttagaaatttgctatatttgaaggatttagtgctgatatgcattgatatacctattatgtatcagtaaagggattttgtttccttgtgacaagacttttggttttgctcaattagtgacactggttttggttgtcttttttttttttttctttttaacttgcttcagttctatatttatgctatattttaatttgtttcagttctggtaagtgtcaaattatccactggcgtcaag

SEQ ID NO: 51024 - DNA, 538 bp, Ricinus communis
  Intron number 1 from transcript 30008.m000806 (locus 30008 .t000022) derived from phytozome v7.0 (chr-ID 30008; pos 1 03700 to 104237 reverse strand)
tccaagtctgccaatacaaataggaaacttggcgagtgggtccacccactgttcttcaaacaaatgcctttttttgttgtcctttcttttaattcaatttaatggttgacctccccaccaaaaaaaaaaatgtttccatttttcacattcctctcttctcaaacacccaacaagtcaaacactataatcaatcaatctcttcccttccaatctttctttctatctctgaaaacccaattcccaaaactctcgcctttcaattatccacttcacaagcacctctttttattccataccccaaggaaccatatcactgtagctttacctgcatctacagcgcaataatctcttctcttttcaatacagaatcacaaactgagtgggtgtttttttttttgggttatttattgatgtatcggttccttattttgttttttattttttgaatatggaaaattatgttttctgatgagtttttattttccaattctttttggaggcagtgtatccgaaggttaaggttagaaccgaaggccaa

SEQ ID NO: 51025 - DNA, 383 bp, Ricinus communis
  Intron number 1 from transcript 29841.m002831 (locus 29841 .t000095) derived from phytozome v7.0 (chr-ID 29841; pos 5 84010 to 584392)
gcaggtttaagcttgcctcacttgtaaacttaaatttcaaaatcaaactggagcctgatgaagttttatttgaaattcgagctcattaaaatagttgaagtaatcaagctttgctcaacttgagcaaactagtcagatgaaaaaaaagaatttcttttttcttctccttatcctgttgtgcagtactttgagtagttcgaggtttggaatattttggaaattgtttagttaaatataagataagatttgttgctaaaaagaggatttgggttgggctagaggcatcctttctttttgttccgagtcaatatcaattggttttctttgcagacaattgcattggtttttttgttgaaatcacgcagctctacctgcagaaatta

SEQ ID NO: 51026 - DNA, 564 bp, Ricinus communis
  Intron number 2 from transcript 29908.m006170 (locus 29908 .t000221) derived from phytozome v7.0 (chr-ID 29908; pos 3 50968 to 351531)
atctttctcagaatagcggctcttggttttctggagtaatgctctacccacttttctgtgcttatcaaatcatgcatttcaaacataatatgcacgtcaagcatttcataattttatgcaatgtgctgacaggctgagataaacataggtgtatctctccttatcttaacctcatcgagcgagtctgctttaaatatgcatagcatcattgattcagtcacttttagttttattttataattatttcattagtcactacaatagtctatttatgtcataacttattatactaatgtttttcagttacttttaatatgattagtcatattttacttgtctttcatgctttagtgagcatatctaattataaagaaaaactaggattattcttcgctccatagattcctggacaaaatttgagttagcattttaattttatatgtccttaacgtagtggagcaaaataatttgtatagcatatagtaaatatgtgtcttatgttctgaattagaaaacaatgttaatttatgtatggaaatctgcaggccagtgcttgatcagaat

SEQ ID NO: 51027 - DNA, 541 bp, Ricinus communis
  Intron number 2 from transcript 29968.m000659 (locus 29968 .t000028) derived from phytozome v7.0 (chr-ID 29968; pos 2 51670 to 252210)
ctgattatactgctggagttgttgttgctttctatgtgagtaatcttattcaattattttttttttttttgcaaggttcatggttatatattaaaatttagtactttgattgaatttgtcaatattatttcttccctaatttgcaaaccctttttgttctttacatactgatattcaaagtttaagaaaacaaaagatgagtttgatttaggcaattagacctaaaataaattttttctttagtttttcaattcttctttcccctgttttaaccatggcagccaccacatattatattatatatatatgtatacatatattgttcttttgcatgtttgttagttatcagcttacttataattcttgtgtaatttgtttattttgtattattgttttaaactatctgataaacaatcctttttcctatagatgttgtctcttcttcagggtcacttgtaaaatccatactagaaaaacaagtttcatatttattatctcactgccaagattattttaactaataaaaagatgaccgtaacag

SEQ ID NO: 51028 - DNA, 543 bp, Ricinus communis
  Intron number 2 from transcript 29907.m000663 (locus 29907 .t000042) derived from phytozome v7.0 (chr-ID 29907; pos 3 52266 to 352808 reverse strand)
cagcagcctctagtaagtagatgtctttgtcaaattaactatctgaaaactgtatacaaattcttttatttagtgaagaaaggcagacagagaatgtctaaaatggtatagaatcagatgcttggctctaatgctcctcaaagggtgggagggactaaaggcatgagttttctgacatttgtttttatgagggttaataatataaatagttactaaactttgtattttgttaattttttcttacagaattttgattcgttttgtttcaatcattcaacttcaattttagttataattacatcatcaaaataaaattaaacgcaaaattcaataactatttatatcattatctgattgttatcattttatacaaatatcaacagcttgcaatagataaattcttacataaatttagcccaccacataggattataaactatatccgataacactttcatgtgaaaagaaattgctatgatgccccaaatcatatgcctctatatatgagtattcctattactcattttcattgctgactgtagg

SEQ ID NO: 51029 - DNA, 840 bp, Ricinus communis
  Intron number 1 from transcript 30131.m007170 (locus 30131 .t000321) derived from phytozome v7.0 (chr-ID 30131; pos 2 005121 to 2005960 reverse strand)
tagttcttgcggctacagcaggttctctctatctctccttattttccaactttggtgcgtatatgatcctatttaaattttatttatcatttaaaatcaataaatatatgtcaatcatttatgaatttaatatataggtagagataaacataaaatttggacaaagattttcttaagtataatactcatactagctgcacttcttttcttcttcctattatattcaaggtttcgcccgaacatgagcctaaatggatgattatgacattataattattctaaaattaaaagttgtaaatgttaaaatttattttactattacaattaaatccatgtgatccgttatatccaacaatccagaaattactattgatcactacctcaacatgaccaagcataatttattacaatcaaactgtaactttttgaatatctcgcatttcaattctaatttttaggaccaagatgatcattttccatcctcacgatacaattttcagaaataagatggagaaacatatgcataggcttcatatatatatgcacatatttttacctttttactgaaaaggacaagtgaaaataaatcatattctcttggtccggaaatgctcacttttcttttttgtttgtactgaattataagtcactttctattttcaaaatctagtaaatttgtttgaactgagtggttcaagttttaatattcctgaagatagaatatagcagagttccattccgtaagtaagatgccttgtaattggtcccaaatcttccatgctaaatacattctagagattaatttcttatattgttattgtggcatttcaaatcgcagct

SEQ ID NO: 51030 - DNA, 530 bp, Ricinus communis
  Intron number 1 from transcript 30028.m000252 (locus 30028 .t000010) derived from phytozome v7.0 (chr-ID 30028; pos 1 10830 to 111359)
ttgctgtcaagcaattgaatcgccgtttccaggcatgtactttccttttctttttgttttcaaattcttgatttttttgaaagataattccagggatattagaataattttgattagttgaaaataattaatttgaaaaggacatgaactgtgtgtctattgtgtcttaatgttatagttggattagtacagttctaatcaatataattctgcatgtttcagttgaaaaaaatgtgtacttcaattattgtacaatttcctgaaaaagttaaacaaaaagtactttcttttgaatttgattgtgaaaattttgtactatgattatgtaaaatttctttgaaaagttgaaattttttctcttttctagatgaagcttatgtgaaaaaatttatccttcttgcattcagttgaggaaaaaaaagaagtgtcctttgattatgtgcagtttcttgtcgaggctgaaatatctgttcttgaggtgagcttatgtgaaaggtttctctgtttgcatttctagtattcaggggcac

SEQ ID NO: 51031 - DNA, 649 bp, Ricinus communis
  Intron number 1 from transcript 29955.m001166 (locus 29955 .t000011) derived from phytozome v7.0 (chr-ID 29955; pos 6 65659 to 666307)
tagactaccaaggtacgtctgtaatgaatgtcatgaatgttatgtatgcatgtttgatatctgagtgtttgctaattgcaattttattttttttgctactctaggttagacaaagtgccatcttcgggaggagagggaagttgaaagcacccgtatcgccaagatatggcgtacgacttacggtgctgaggacttccataacgtctttccctcacatccatccgacctgagtgccccagggggtagcaaccccaagtaggctagttgtccttgttttcgtcctgtgcggcgtgtttatccccttacccctggatatagacttcccccttttatgactgccattttgatatgtacattttgctggattattttaaacattctatagttttgtcttattttgcacatttataatacagttttattccctcatttcctcgttaattatggcaatatttgcccgtgcccatgctggtataccacggcttccgttgcgcctgtcactttggatacttaaaaaggaaattggtcagcctgaaaataagatacatgagattagagaataacaattagagggagaacaattgcaaagcaaagccttataccctggctgatatgactgaactcggtttattaaaaatttcccacaagg

SEQ ID NO: 51032 - DNA, 321 bp, Ricinus communis
  Intron number 1 from transcript 30074.m001339 (locus 30074 .t000006) derived from phytozome v7.0 (chr-ID 30074; pos 5 3877 to 54197)
cacaaggtgtgtgtgcatgcgtgtatacatatgagtttcttcacttctctccttttatttgatttcattttgtctatttcttatttacaaactgttattctttatgaagaactcacgcgattaaatgcacaaattacttttattggctatattttttaacaattttagttagttaactcactatcattaattccaagtattaggcctgttttcttccaggctatttggtaaagaatttggtttaagttatccctgctgtataccagaactcttatatttatttttgggaaggttactcttgaagtgaaaggagaagtccag

SEQ ID NO: 51033 - DNA, 654 bp, Ricinus communis
  Intron number 1 from transcript 29830.m001456 (locus 29830 .t000073) derived from phytozome v7.0 (chr-ID 29830; pos 5 70358 to 571011)
aaggttctggtttacccaaacaagtccttgctcaggtatcctttctttttaaaattttttcttataataaattattctcccgttttccctgttttaggttacagaattttaagtttatggccttaattagagtgattgaacaagaactacttttatttataattatttgttttaatttcaagaatgtctgtagctgttttatagtgcatagtaatagatttgagacgagatctcaatagaaacagttttgtaatggtattgaggaacttacttcctagtattaagtgaaactaactggcgttattgcttctatgagttgctagaagtttttgcaatcttccagttggagcatattacacgtgttatgcttagtgtttgattttgtgggtatctgtataatttgtcttatgaaatactaaatagtaattatcctcactagggttcctaagtgttgctatatgtctcgataatctactcatacatgcacgtcagaactttctgatggcaaactcacaaattttgttcaaagaaaaaaagatttctttcttgaacagtttgatttttatttttgcttttggtttgaacatcccttctcatttgggactgaattacttactgtatgtttccgttgttgttttattaaggtgtggactt

SEQ ID NO: 51034 - DNA, 496 bp, Ricinus communis
  Intron number 1 from transcript 30072.m000968 (locus 30072 .t000042) derived from phytozome v7.0 (chr-ID 30072; pos 2 82216 to 282711)
ctttgatcacttctcctccgtctctcttcctcctggtaattacttcttattattactaaatcagacccgttactactacttttattgcttattttacagaatcaatttcttaatgttaaattcccttttggtttattattgtagttactgcggtttctacgagcacaaaatcaagcacgaataataataataataatagcagtaataattcttctggtggaacattacgaataaatatagaagaaacaaatcaaattccttgtattgctaataacgatggcaaactcacaggtaattttcttactctggagctaaacctgtttacatgtttttgttatttcattttttttgtcaatgcctcttacactcgcaatcagttaggtatttaaaattatgtgttctaggttaggtatgcgactcaaaatatattttcatattctaatcttgattttacttttgatgatttactgatacgattttgtctttggaccgaaag

SEQ ID NO: 51035 - DNA, 442 bp, Ricinus communis
  Intron number 4 from transcript 30128.m009021 (locus 30128 .t000482) derived from phytozome v7.0 (chr-ID 30128; pos 2 196130 to 2196571 reverse strand)
cccagagacatcagtgtatgtgataacattcatgaaagggctcttttttaccgtttattaagggaaaagtttcaccattttttgtcatgtcatgctatcatccatatctagggtttctatgctatttccttacatcaatttgttattctattatggttgcaccttccaaattcaatcacttgagaaagactcaaatacatatgtaagctctctatattcattaaatttttcaagtttgggacataccttatataacattaaaaaagttactgtttggtgctttctcgtagaaaaactcttgcagtaaaagatacttgatatgcatacttattcattacaaagctgcagattcactattcagctccaggcttttggccgtgttcataaattttcttctctttgtaccttatttttttctgttgcagaccttccatccttgtta

SEQ ID NO: 51036 - DNA, 601 bp, Ricinus communis
  Intron number 3 from transcript 30024.m001704 (locus 30024 .t000021) derived from phytozome v7.0 (chr-ID 30024; pos 4 48665 to 449265 reverse strand)
ccattcttgatttgcaaggtatgtttatttcctttcttttccatcatggaagataaatcagtctagaactttacatagctaatgagaagtgtgcaatatgccattgatgtgggtgaaactgtgaaagtatatccagggttacatgtagattgtcaatatatgatgcattgcattcaaccttcaaatgcaatcaactagctaggctattagattcagtgtcgcctgcttgcaatttttggtcagcaataagtggttctccaggcagcatgcaattggttaggatccaattaacgcggccttttcagtcttttaaattaatgacgtcctatattgtatttggtcatggaagttctgccagatataaactcgaaatcatgtgcgtagaagtagcacttagcatgatctcaagttcaagtcagggttttttttggtcaataagatcaaggctgctcaatatggaacaagaagtattttcaatttagaattgtaaaacattttgaatattgcctgttggttatcatacatgatgagtttcatctcttctcatacctgcaattttttttcactgacaatcttctctcagttattcttggtaagtatc

SEQ ID NO: 51037 - DNA, 930 bp, Ricinus communis
  Intron number 1 from transcript 29917.m001987 (locus 29917 .t000056) derived from phytozome v7.0 (chr-ID 29917; pos 3 55764 to 356693)
ctcctggtgaactctgcatcatttctgaagaacctgtaagcaaaaagtttaaatctttttttaatttgaaatgtctttataggttgaatttcactaatgggtatctgtctttttcttccctgttatttatatggttttagcaataattccattggtcaacagttcaaacttcagttttgttagttcttttcttttgtaaatggtgttttaattttagctagatttttatgaatgagaggagaccaatatccaatgttgcttaaggctgctataccgttctgaaaatcaaacatttacatttcttttgcatcttatgtatgccgattgctcttttcttttgctttatttgtttatttctctttgtttctattacttggaagtgttcacatctattataagtcttatttggcttgttacttcaagtcagggttaaaatatacttcaattccactacaagtttcttaagggacttctcttcttcttcttcttcttcttcttttgtttggttttcttcaaataaacatttgtttgaaaatgtcatattgtcttgcatagttggttgatttggagtttaacacattgattggagttttggccaataaccatagcaaccccacgtcgtgttagcatactgttaaaggaagaaagaaagttggacagtaatctacttttggtgatccaagtgtgatttgatgttgattaatgtaaaatagaaaatcgtttaacataagtagtagagttcaaaatttacatgggagacgaagaatgatcaaacaccaaaagactcacatgaacctatttctaaacaggcctgaatatgcttgactcccttacttccaagttaaggagatatgattttcattataaattggaaactctcataaattggaaatttatcaatttctactgatttcttgcaggttccacctt

SEQ ID NO: 51038 - DNA, 694 bp, Ricinus communis
  Intron number 2 from transcript 30099.m001689 (locus 30099 .t000068) derived from phytozome v7.0 (chr-ID 30099; pos 3 36657 to 337350)
gcattgaatagtgaaggacttgaggttttttttttttccaaccttctctctactttagtattgtatctcataattagaattatttatgtcaaatattgaaaatcagaaataatttagattcatatatatcaaaatacaaaacaaactttctgaaacatagaattatggttttgtttgtattaattttgaactaactttaattgtcaaagcataattggtcagatttcttctagtgattgcaataatacctttttctgttacttcttggagaaataatgttcataaacattttattagcatgtttctattatccttggacttcatcacccactggaattgttagtcacctggcatgatgaaagtaatccctactgtcctctctattgtattgattttaggaagaacatcaaaatgataagccagattaaatcttaacttctagtggttgatttggaatttttttggtcatctgcaatagaatttcctcttgaaagcttgtttggaggaatgttaggagccatgacttaaacgtttacttattaactgtctgattcaggcattactcttgtaattcagatttgattgaatgagattaattcttttattttttagcagagtagtattatttcgctattacttacatttttttctgttttcagggtttaattcctcgtgctaaactattgcttaccat

SEQ ID NO: 51039 - DNA, 656 bp, Ricinus communis
  Intron number 1 from transcript 29912.m005305 (locus 29912 .t000031) derived from phytozome v7.0 (chr-ID 29912; pos 1 96694 to 197349 reverse strand)
aagattttcactatccagtttcccgtttcccacaggcaagaacgcttctttgtttttacttatgtttttatttctaatttgttttttacttttatttttatttctaaatttgaatgctttatgttgtttgtttaatattgcctgtgagtaagtaatgtttggtattttgggtatgtatggttttctttttcttttcttttctttgtttcccagatgagattttgtggattgtttcaaattgtgtttaggtctgttggtttgttgactttcactgttttggcctgtttatttggtttttgcagctaaagtttattattctgtttttaagtttgttactgcactttatgtataacaatttcacatcttagctgatttgttaattttaattttaatttcttgtttggttcatgcctctggaaagatttcgatttatttccgaggggtaatagaaaaagcattaatgcgttgtatcaacatatacatgcctcaagtacttatgaattctttgttttctggtttttgagataaattttctttgctggtggaacatgtcaatttagttgcttttcattttttccctaaagaatttaatcctaagcgcctctttaatttctgaagcagggattgttcggggctgtcagagctgaggagtacaa

SEQ ID NO: 51040 - DNA, 811 bp, Ricinus communis
  Intron number 1 from transcript 29929.m004777 (locus 29929 .t000280) derived from phytozome v7.0 (chr-ID 29929; pos 1 591213 to 1592023 reverse strand)
tggtgggtgagacaaagacgacgaagaggaagagagtaagcgaaaagacgtctctctttcatatttgtgtttgaatctgtaactcttgatattcgttttctcttttctccttattgtacttaaggatttgtcatttttacctacaatgtttttgtataattgattgttacaggtcctttatattatctccctaatctgttttcatggctagtgggttgtcgattttatcatatacatgtgccgtttatgttgatattgattgcatctaaataatgggtgcttggatttttattctttttggtaattcatatgatatggcatctgattttttgcttcttaggttttggttaatcgcatgagactttaaatttatggctcggcgttatttatcatggtttttaatttttctttttgaagttcttttattacgattaggtaattggtaatttttttgattctcaagactgtactttccaaagataattttactaggattaggtaattggtaagtttcttcattctctagactgtaactgaagataagttttcttatggtagcttttttgtggatctccccttcttagtgttttggcagctctggatccaatttttttgtgcataggacactattatggttctatattgcaggagctatatttgatttctatcaagtgatggccttatttctgtcttgtattcagatcaatcgtttaatttatctttctttggatacaaattatgcttttgctctcatataggtggagatagaaattttaatctaatacatatttgcccagcttgaacgtatcca

SEQ ID NO: 51041 - DNA, 189 bp, Ricinus communis
  Intron number 1 from transcript 29929.m004729 (locus 29929 .t000232) derived from phytozome v7.0 (chr-ID 29929; pos 1 334076 to 1334264 reverse strand)
gcttcagtcatctgacgacttagaagacacattttgtaattttctataccgacctttattcactattttggtttatgttaagtatttgtctgtttcttctggctaatgatgttgctttattttcttttatttgctctataactgttgtgttcagcatcaaagttgagacacttttcagatttcaagctt

SEQ ID NO: 51042 - DNA, 491 bp, Ricinus communis
  Intron number 3 from transcript 30005.m001241 (locus 30005 .t000007) derived from phytozome v7.0 (chr-ID 30005; pos 2 2594 to 23084 reverse strand)
ataacactccgaaatataggcttgttgttcgatttgtatcctattttatggttgatatatttatcctgttattggggactgtgctcttataatatttcataactcatgtttttatgtgaattatcatcttttatgttaagcgggttgagcttgttttcatgctagaaggtctttggggcaggatgaattgtaggataacttttcaagaattagaactgttcaatttttctaacttggttagttgatattgcatcagggtaaatattgtaattcgatttgtattgcgctgatattgggtcaagtaaggtgtctggttttaaggtgaattgagctattgctgctgttaggtttattcttagataagcggcttctggaattgaattttattgtaccatgtttgattaaggtgtcctgcaagatgtttctttgcttcacttccttggtgcttttttttttctttctccttgatgtgttttacaagaccaacaaag

SEQ ID NO: 51043 - DNA, 964 bp, Ricinus communis
  Intron number 1 from transcript 29929.m004627 (locus 29929 .t000130) derived from phytozome v7.0 (chr-ID 29929; pos 7 37414 to 738377)
ggtctggagcaacggttttgtcagcagtgcagcaggtaagaactaacatgcttttgaaggtaatattctttgtgttctagctattcctctgctttactgtcaccttcatagccttttctttggttagagagcttaaattgaagtgcaacattcatttgttgttattgcaatttagtcttggcactggcaagtggcaacatgattatttaggcgttgcgcatatctcctcttgggtcataaactctttcattagttttggggatgtaatcaaactaatattagcttctaaatattgatgccactgttgtagtttgtcgggggcagatccggaactatgtttaacagattaacatccctcagagtaaatattacattcacatctaaattgtcacagaatgcagtgtcagtgcatgatatgcttcattatcattgacatgaaatattagggagaagtcactagggggcagccatggcttacaaagagggacatttcccgaaatatcttcaatttgaatattgttctgtcatgcatgtgatttgctcggatcttgggttttcaaggcaaaaacatatattaagaattgttgtgctggctggctgcatgtattttcccctccctcaattgaggtaaatatgtgcttaatgcatttaaaggggcacttatgctgtcaattataattgaatggatgttgcttagtcaaatggattaggaggaagaattggagaagaatcttatctttgaacatttcattatccagcacattttttggtggctgcctaatggaattcttcttgggtatattgttgcagcactagttttccttgaaccagacctgctttcttgctttatttgggtgattgagaaataatcactctgatctccatttgattgcaagttttccttactaaatttattgtgttcttcgatgtgcctgtaataggttccattccttggtggagtttg

SEQ ID NO: 51044 - DNA, 311 bp, Ricinus communis
  Intron number 2 from transcript 30076.m004634 (locus 30076 .t000198) derived from phytozome v7.0 (chr-ID 30076; pos 1 319519 to 1319829)
cttacacaaaagggtaagtgtttttttttccttgaaaagaatattcaaaatagaaaatcaacatgcatgttaagtagtaagtatatagatgaattgagtagctatctgattctatctttaaagaaagtatgatgatttgacatcgtccataaaggcatattaagatttggttttaaggggactaatttgtgcgtttcctttatcatataaggttttgctgtctatttgttatgtggaagatgctttctgctttgacttactgttttgcaaggatttaattggattgatctttattgcagcactaataataa

SEQ ID NO: 51045 - DNA, 355 bp, Ricinus communis
  Intron number 3 from transcript 30128.m008778 (locus 30128 .t000239) derived from phytozome v7.0 (chr-ID 30128; pos 9 81793 to 982147 reverse strand)
tactgcctcctggagcaaaagttggtattgatcctgtgagcaatttctcaaccccctctggcttgctgcaccttattttattcttctgttcctttaccagaaaaattatatgtttgaataatgattgcgaccatctgccccatttaatatgtgtctctgtcatttcttttaaatagtttgttgctttcacctttcttttcctcctagaccctttcttgtttcccaaacttttgtttcatctaattaccagttttaactataaatatgcatttactttgacatttgtcaccattttaatttcatgaggccaccttatctttgactctgtgaagggagcagtttcttttttcttttg

SEQ ID NO: 51046 - DNA, 273 bp, Ricinus communis
  Intron number 1 from transcript 30128.m008778 (locus 30128 .t000239) derived from phytozome v7.0 (chr-ID 30128; pos 9 82514 to 982786 reverse strand)
ctcatcaggtaaatttggttaagtttagttttcttttggtaagtctagtgtttaatttagttgagatgagttgttattgttttccaccatttctttgagaaataaaagctcactttttttggcttgcaataatggaaaggattttgagtattattagtcaagctcatatccttgtaatgtttatttgaattatttgctggagtttttatagagcttttaatagtttctaattatgtcttcttattgtggttgatagagtgaattcattgctga

SEQ ID NO: 51047 - DNA, 499 bp, Ricinus communis
  Intron number 2 from transcript 29983.m003222 (locus 29983 .t000121) derived from phytozome v7.0 (chr-ID 29983; pos 6 63485 to 663983 reverse strand)
ttgttgctcttcttgacactctcggcatcgataaggttagcggctagtccaaaaaatgctttcttttgattgggctttttcttttccgcttcagaataatctatggaaaacctgaactgatttcattgaaattagttgaccagaactgtcaatcaaaacaacatgtaataaaagaaaattaagaaggaatctttctagttgggtatgttatagaatcatgataatacaagaaagtccaggaaaaagaaaatgtagtaagtttaaatttcagttatatgttacccactaaccgtatcaatgctaatggtaataccacaattcagtagttgatttgatatattgcgcaggcagtcagaattcagacccctactttacaatgataagtctaactgatgacatgtgctgtacgtaagcacccgtgaatctagtgttttccaattgacaaactgaacttttggtagcaggtttttctagttgggaaggattttggagcattacc

SEQ ID NO: 51048 - DNA, 702 bp, Ricinus communis
  Intron number 3 from transcript 29827.m002614 (locus 29827 .t000087) derived from phytozome v7.0 (chr-ID 29827; pos 4 71441 to 472142 reverse strand)
ttattgtacagagaagagctagcaatagtatcaaggtagattttgattcccgcatgcatacaaacaaagagtgtgctgtcgttgcttattttaacttgtgctgaatctcttaattaacaatagaggagcagtcaaaaccttttgtccgaagagtctactcagaaagaaaaagaaaaggaattaacaaatcgtcaagggttgatctagctagtggttgacgagcatgtgatatgtggttaggcacagtcactggttcgaatgtagtgttgctagtctgttcacagcgcctcggcccgaacagggacaccctgatgaaaaccaaaagaaatataatgttgctagtgttaatttcctggtaccagactgcggatcccttagacctggtgttcgtggcctgccttaatcagactagcaaggtgaaattagctcaagtgtatgcaagctgattcagacactagctatctgaccgcaatattgaaaataaaaaacataatcacctgaaagctaaagcatataaatgagagctcttagaatacaataacgattacatggaatgaaatatctcttaaaaaatattattttgactaagataataaaagaaataggtgggtaagctagcatgtagttttaagataagttttgatagtactgtgtttacaattttcaggtggtggaaagacttggatcttacagaaaggcttt

SEQ ID NO: 51049 - DNA, 668 bp, Ricinus communis
  Intron number 2 from transcript 29983.m003278 (locus 29983 .t000177) derived from phytozome v7.0 (chr-ID 29983; pos 9 41873 to 942540)
ccttgaacgaggaacctgagcagtataggtgaattgcattttgctcctttactttttcttgcttatagctttccatgaggcaatagttcttcccatcactaattgctaccttgtttatcatatgcgatccaacattatgtttagtatctcatctacccaagaggtgaagtaaaacttgtacatatggtgctaatacttcatatgatatgaaatggaaaaagatttctaatccttcaacactgtaccacctcgtttgttttttcaggggaaacgatcggtacttttaaattcagaatatatagattatcaactaaataatctaatttataatcatgtgttacatgttatgtaagtctatccatgctgcctttttatttattggtcaattttgtaaatacttttttatttttcttctatattagtattactttcaaggatttaagaaagaatggaggctcactaaacaatctaccaaataaaatgcaattttgatctgaatagctgagttaaatcctcgaaagaacacttagagatccatggaatctgaacactttctatttcaaggactttttcttcccctacatttgaaggaactcttaagaaatgtaatgtattagaacaacttgtctttagttagaataattttgtatttatgcattacagaattg

SEQ ID NO: 51050 - DNA, 901 bp, Ricinus communis
  Intron number 2 from transcript 30060.m000543 (locus 30060 .t000032) derived from phytozome v7.0 (chr-ID 30060; pos 4 70498 to 471398)
aggtattacatgttctcacataaagaggagcttagatcttttttttttttctgatatgattgtctcatcacgcccactgaacactgcccattccaacccagtcttctcttcaaaagattttgtagaaaatatagttggaatcattgcacagattcctccaggaaagcatttttccagtgctaaaactgagcacccatttggggttgggaaaagaagtgatgttatagtaattgctcgagcttagcatgttatagtataaaggtcacacctacaggatgctgcatctttactttgtttggctttattcacatgcggctgtaatcttgacttctgaacttatttcctataccgattttgtttatggatgacagaaagatgcctcgcctggactttaaggttccagatagcttccagaagtggtaagtttttgtatgtgtccacttagcagctaaaaaaagtgcatgaatgtatcgactaccaaaccattgacctgctgttttttttaggcattcgtattcttcagaaatcatctcttattgcttgctctatcatgagacttgtggtgactgtttttagctttttctattctaaagcagtttttctttcaagtcaaagcaactctccccgttggaaacaggaatgtagttttcttttatggcaaatgagggcatgatgacatctctgaaactagagtgaaagggatgccaactatgctttgggacagttatccctgacatgtttttgacagggaacttggataaaacagaattgggaaatttggtttcagacaagtagaaccctttattgagctttctaaatactaatgtcaggctcttatattcattttcgaatcgaatgtgcatgtatcttatgaatctcattttgatctttctacaggttt

SEQ ID NO: 51051 - DNA, 570 bp, Ricinus communis
  Intron number 2 from transcript 30109.m000168 (locus 30109 .t000004) derived from phytozome v7.0 (chr-ID 30109; pos 1 49680 to 150249 reverse strand)
atcaggtgagtctttcatttctcagggctcttatttattagtttatgattgtttcaaggattatgttattaatttgataggctggagcgtttctacgtatgagattataagtgtgctctttggcaacaatacttatttctatagaaagactttcatgcaaagatggtaatgtaatcttgccttgttgccttattgtcctagctgttccatcctgtcaaaagaacttgggtaggtattgacggctctactttgtttttaaaaatatactttcataatgcattctgatttctataaatataaaacttatctaatctttttactttttctcctcaaatcaaatattaatttattcttacaaaatctaatatatttacacttgtcatttgataatattgtaagcaagaatactgaattctcaatattttgtgaagtaaaaattatgttatctcaagacggggataatactccctgagctgcgctaccactatgtgttgtatcttcaatgctatatgtcttcctgttttatactttcctagtggttatggtgttgtgaacttttatagataacac

SEQ ID NO: 51052 - DNA, 415 bp, Ricinus communis
  Intron number 1 from transcript 30109.m000168 (locus 30109 .t000004) derived from phytozome v7.0 (chr-ID 30109; pos 1 50868 to 151282 reverse strand)
aattaaattcgcctctctaacccaccaccatagtatggaatcttcatttcttgtcttcaaattgttacttcccttttttaatgtatattttctttttattcgatgccttatatgaataaaatataatttcttttctatcttaagattgctcgttgttttgtcacaaacacggattaatggtagcgtaagttattgcgttaatttgactgatgttgatgcgccccagaaaaaaggttcttttatgtgtttattgggcgatttaattgctaagttttagctttttaattgatccgttaatgggtgtttgctagattttgatttggaggtacaagcagtgagatcgttgtttgatatgagtttctttcttttggtaattttagggggagtggcggctagagtaaggagtgtttgatcg

SEQ ID NO: 51053 - DNA, 439 bp, Ricinus communis
  Intron number 2 from transcript 29841.m002811 (locus 29841 .t000075) derived from phytozome v7.0 (chr-ID 29841; pos 4 66439 to 466877)
gaaatccggtgactggatttgcaccaggtaggtctatcttctaatacagtaataatgcaacagtaagacaaaaacacgtatatatgtattcgtatgctttttatttaagtgtgcatctctgtttcttctttttatatggttgctttaggtagtaccatataatgtcacttgaattctttctctgcttttggttgcattctcactttcctttagaaacataatgagagaggcttcatttgggcacactggtagcattaattataataactactttacatttataatgaatggtacgtattatatgctaagaattgaactctatttttgactgttttaattttgcatgtgaagaatcttttctcttgctcaccaactagtatctttttgtgaagtatgtggataaatttaatttaattgagaattatatggacaggtgggg

SEQ ID NO: 51054 - DNA, 925 bp, Ricinus communis
  Intron number 2 from transcript 30146.m003428 (locus 30146 .t000005) derived from phytozome v7.0 (chr-ID 30146; pos 4 8415 to 49339)
gctaaggctgtccagaaccaggtattctacaacccttttcttgctatctctagctgatttgattcactgaaattagctgctttactgtgcttattagtatgcaatggttcttaagtagttttcaagttgctaatgtgttggagcttttgcaaatactttctcagcataaaaaagggttacttttgtttttttttctctctctagatgtcctgttctttcatattattttctattgatttcaggatttatatcatgacttttgattgctatctatctgttagatctattttttgcaaaaatgtttgttagatttattactggaaaaggaataaaatggatgtcaacaatattgtcgggcagtgatgagctcttaacatgtaagaagaaattctgatataagagtttttttctatgaaatatacttgttacgcttggcttctgagctctgtttgtgtctcaattccttacttgctgttaatggctttctagctgcatatatggtgtatggttctactgggaacttcgtattaaatgatatgttcttaaaatgtatttcatttcccaagtactgcacctggttaagttttctctgcagtgatgagccgttaacacataagaagaaatcttaacatttggtttctttgatgaaatatacctcttacgcttggcttttgagctttctagtatttcattgatatgtttgtgcatctctccttttttcagctggttttaagttgtatcagtatgatgcaataaattctagtttattggtaggactgctttttttgcatctggtgtcttgttatgtttcctttcgccgctgctgagctttgcctttttcgtagaatcaggtagcgtgttggtagtcttacctgctttacatggtgcaggttggcgataactattacaggcctgatttaaagaa

SEQ ID NO: 51055 - DNA, 629 bp, Ricinus communis
  Intron number 2 from transcript 30146.m003510 (locus 30146 .t000087) derived from phytozome v7.0 (chr-ID 30146; pos 6 26903 to 627531 reverse strand)
cagtttgtcactccttggtccctctctgttgctaggtgagctttatcaatcactgttgatgtgagcattgattttgtgaacttttgcttcttctattttttaattgatattcaaatttcttttgtttgattattggaatctcgatgataccgatgtatttagcttgttatgtactgttgttaacgttgatgatgtggttcgtagatgtcactgtagttgggaattttgcatatgctttgaggtgtttatgccaccgtttgttagcttttatagatatatatatatatatttttgtctttatgcaatctttttttatctattttctttcttctattttttctttttaatattttttctttaacaacgtatcatatgaaggagtaatgctttcagcattcttgtggagttgcaattattatcaccaatcaggatattgaaaaaaagaaattgtattgaatttccgtatcagttctgcttaattcctcaatttcatttggagcgttagggcttctttattctttttcttagttcttgtgaatgccttaagatatgtgaagggtaatcttacacattgcttcctatgatatgctgcagtgggtattccttgttgcgagacccacaccacaaca

SEQ ID NO: 51056 - DNA, 826 bp, Ricinus communis
  Intron number 1 from transcript 29842.m003567 (locus 29842 .t000064) derived from phytozome v7.0 (chr-ID 29842; pos 3 14589 to 315414 reverse strand)
gttttgaacaatatccatcaccaccaccaactactgtaagcctccccttctcgtcttcttttcttttatgggtctattcattactgcaaaattgtgcttcaaagtttctatcttttgctgttctcaatactcgattcttttacagtaaggtgctggtgattatgccttcttggatgctgaaaatgcaaatgagatctattatcaaacactctgtttgttgttgctaatattcatctttttcttttatgtgaattgttcaatgacgtcgtacatcttttatgagatccttatgttcttagtgggtgagtaactactggttctttgagatcataagtattacttagaagcagatttcgaacctggaggcgcaattgcaccaaatcattttatattgtgaaccgtaaaggatgttattgcaggcatttaaaagaatccagtacccaaattatctctttcattggactactagaaaaggctattgcttgttagtgtatcaaccctttttataaatggtattgttatgtggagttatataactctggacaatgccattggcacataattaacttggacttgtctacactttctgcatacttcaccctttccctcacatttgaccctttccctcacgtttgacatatctgtaaacctgtttctttttttgtttctgcttatgtatttaacttttcatctctttttggcttgcctatgtcattaacatctattaatcaaaatccaattgctattctggactttgcatctgctgatgctagttgtatctgacagtttgcttgacattgttatggtcagacattcatcttagaga

SEQ ID NO: 51057 - DNA, 509 bp, Ricinus communis
  Intron number 2 from transcript 29851.m002448 (locus 29851 .t000090) derived from phytozome v7.0 (chr-ID 29851; pos 5 64897 to 565405 reverse strand)
caggtcacttcttaactttttgctgcccttttattcttttgaagttcaaaactgttcttttgcggaaggcacgtatgttactagaaggttcaacagtaagggaaaatttcacaagatacatgagacaaaaatggaatggaatgtaaaacatccttggttatttgtttttatctaccaacaaggattaaacagcaccggcttatttttaaatttgttcactgaagccttgcatgaaaacttttgactcgttgaatttattggggtaggagtttggaggtttacgggaagtagaatcagggaaaggttgtattcttttgtgtagctcgctgaggttttggtgtggggttgggggctggttctgaatagttggagtaaggatgagcctacttgattattgattcttttatttcatatgtttttgattgaatagattgtcacccataaatttgtgagattacagtaatgtaattcttcttttcacaacttacatattcttgttcatgcagttt

SEQ ID NO: 51058 - DNA, 679 bp, Ricinus communis
  Intron number 1 from transcript 30076.m004599 (locus 30076 .t000163) derived from phytozome v7.0 (chr-ID 30076; pos 1 068924 to 1069602)
atcccttcatttgctctctctggctgttctctcaggtaaactcacttatcctcttcttcaatccctaaattctttctcttttttgtttcatttcaaattcgatttctgtttcgatctgatctctttctcgatggatgatatagagattgcttaattcaattgttaattcttttgtttgttgatcttaagatcttgaagttcatttaaggttttgatttattaccgtttgaatctgtgtcctttgcttgcctgatttaaaattattttgatcgtatgtatcagatttcgagatctgtaggtggtatatgtttgatttgatgcttgatctactagttaatggattcgagttctgttttgatgttccaaacagattagtttcttatttataacaaagccatgtgaatccatctgtttatgtacatgattttgaatcttagccgtaatttattttatggggagtttgattcatgctgtcattatgatcttatttatttttaattttattgtgagagtttgttttcttgctgatggatcatgagatctttacattttgaatttattagttgtaaaaacttgaagcatttggcttggtttcctttgaaagcttatcattttgggaggaagtgatggggtgtttgatgtaatcttaaattttcttttcattagcaggtgtgaaaat

SEQ ID NO: 51059 - DNA, 639 bp, Ricinus communis
  Intron number 1 from transcript 29983.m003203 (locus 29983 .t000102) derived from phytozome v7.0 (chr-ID 29983; pos 5 95443 to 596081 reverse strand)
ttcgcaagtaccgtcgctttactcacgcccttcaggtctctcatttctttttgtttcttttcttttcctatttgtacccattttcccttttcatgttcagatttttatcatgtcaacagatattggtatcatgagtttgatgggcaatttaatttatgtgaaaagtttggtgctttttgactgatacgtgaagtctagataagtaacatgatgtgggtgttgaaattggcaatttaaattttctgaagtcaaatctgtgtaggaaaagattggcacttttcagctgatatatgggtatcaatatgataaaaaaatgatagtgttgtatcaattcccagaatatttgatcttgtacagaatacattagaaaatgacgattctaattagaaacataggttaggaaagttgtctgataaagttcaggctcctagtattgcaactgttcttacaggtgtttctttttcttcttttttttcttttttctgttctgaaaattaaaatgctatattactgtttatgggttgtgcattgtcattaaaatttgtttccccaattaccatgcgaacatcaattgtgggatagtcttatagctgttgtgaaatacctgaaccttgtcttgttttaatattaggtatcaga

SEQ ID NO: 51060 - DNA, 725 bp, Ricinus communis
  Intron number 1 from transcript 30099.m001730 (locus 30099 .t000109) derived from phytozome v7.0 (chr-ID 30099; pos 6 00016 to 600740)
ctactaaagctcaggtttgagattaaatttttgtttttcttacctatgaatttgaacttttaggttgagttgttttcttgaagaatttgtagtgttgaggatgaagttttggtgattctttttatttttcaatttcaagaatgatttgtatactgagcatgtgtagaggttagaatagtgaaacttgaagtttttcaaagaactagtctttagcttgctagatcaagttgatgtgtacattttttattgatatcaagatggattatttaacacagggggttagtgaaaacaagtcagacaataaattggactagaccgtttctgttggatttagaatattcagctaaagtcaattgaaagaagtcaggattagtgagataaaccccaagtagaaactgaaccagatgaacacctagtatcaattttataatgacgaggccacataagtgaattggcttttgttggttggcctagtcagccacccttttcatttcttttgggtcattgtctctcaaatcttcaagctccttttgttttgtgctctgttattatacaaaatttggatttggaagtattctttgttttttcttttgtttattctttttcctttttaaatttgatgtaattagcctattggctgtctcgtcaacctcacatgcgttcctaatcaatatgttcttttctctttgtaatttttgccttatctttataggagggcaataata

SEQ ID NO: 51061 - DNA, 851 bp, Ricinus communis
  Intron number 1 from transcript 29917.m002013 (locus 29917 .t000082) derived from phytozome v7.0 (chr-ID 29917; pos 5 81807 to 582657)
ttatcttgactgagcctactggttcttctgctgaggtcatttattctaacccccttttcttttatatcctcttgagcttttttttcgagctctcttgatctttaaggaaattgggttctaatggtttctttttttcattgattatgtaattggggacaaatattatgtgttcttttggatgatgttactgtaattgaaggagaaattctgtgattggtgtagattgatagttcaaatgattgacaatggtgtgaaaaagagaataattttgatgtatagaattggaaaagctttgatcttgagagatgataaacagaattttatggccagatgaagagaagttagattcctgataagtttgagggtgggagtcaatggacagtaaattggttttggaatatggggcagcatcttagggcataagtctataaaatttgttgtgattgttattttttttcttttcattgtcaagaatttagctttctcaaaggtcatatataattaaataaacaaacgctacttcagagatcctcaatgaggatggatgaacaaatcttggtctgatttgaacccatttaaataaacccttataatttaaaaagatgaaagaacagttgtgtcttgcaaaaggctgctgatacgaaactaagagtttctagaaagataatttaattgaattaatactaaactttgcttttctctattgtttttcattggcaaagaatatatatatgaaactgaaagtgatagctcacttttgcagtcactatgatagctcacttttgcagtcactatgatagctcacttttgcagtcactaactgttcatccaaatggttcaggtgcttcttt

SEQ ID NO: 51062 - DNA, 633 bp, Ricinus communis
  Intron number 2 from transcript 29981.m000601 (locus 29981 .t000030) derived from phytozome v7.0 (chr-ID 29981; pos 2 22201 to 222833 reverse strand)
tacaaagtggagaggaagtagctgttaaactggtgagaattttttttcttctcttgcttttctttgaatttgttatcttttgttttggttctttatgtatgttatgataagaagcaatttttttccccttcttcttctttcattgttattttagatttttgagttttgtgaaatttatcgagttaattgacttccagttctgttattatacaatacttattttcttcttaatatcctgatatcgagctcaatgcttccctagctaatacccatacaagatatgttacggcatgatattctagttagcatttttagtgccgtttaaccacaaggagtcctaaagaacaacattaacttctctgaatttggttggaaatgctgtgaactaggattttctaggtgatgcataatcttatttgactatttctttgaggtgttgtagactagtttaattatgtatgtttatggtagataatccatgttggaaagcattcttttgaaagtgcagcctctaaaactgttgttgaacatatggtagtagtcagagggcctctaagtgataaccctcaactgacctccattcttatggtttatctaggaatctgcgaagacaaagcatcctcagcttcacta

SEQ ID NO: 51063 - DNA, 495 bp, Ricinus communis
  Intron number 1 from transcript 30146.m003490 (locus 30146 .t000067) derived from phytozome v7.0 (chr-ID 30146; pos 4 29524 to 430018)
acagaacagcagcttcgcgtctccgagctctcaaggtcagttctcttcaaaaccctaattttctgtttggttctcgagaaaatgtgggaaaaaggaatttttttaaacttgttttcggttttattatcaggtaaagctaataaagtactcttctttgtcaactataatgattaaaccgcaattctttttgaatctttttaaattaaggtacattgtattagaagctattatctttttccggtagatctgattttgtttctcactcgtggtttctttaatgctattttttgatgtctcgatgttaaattttaatttcgttatgatagttcttatgtgtgttatagttttggccaatttatcaaatttggatatttatgtttcagtgtatgaatttgataatatgatgaaatgtggcataagaagtagtttattggtaattctttttaatgtttaaaaatctctgactgaatggaatgactttatgtggttagagcc

SEQ ID NO: 51064 - DNA, 877 bp, Ricinus communis
  Intron number 1 from transcript 30131.m007015 (locus 30131 .t000166) derived from phytozome v7.0 (chr-ID 30131; pos 9 98120 to 998996 reverse strand)
agctcgctcaagctgctgaggtattttcttcttcttttttatttattattttaatttcgtagcttaattgtgtttctttctctatctactttcttttctgaaaaaagaaaaattcccaatatgcttcgaattcattgaagaataaatgatttactaattttgttaagttccacttaatttaccaattggagctttggatcgatgttatgatgtgtattgataggttgattaagttgtggattacagtttagagctgcaattagattttagatttttttttttgttctgtagtgcgcactcgtgcgttcccgtgattaaattgttcggaagttgatgtgccaaggaaagcaaatcagctcatggatttggcaatcaagaaaatttaatgtaccatttttatgtagatcgtgtggatgtacaaattttgattgagattgatacagatttacactctttggaagttctggaaattgtagcattacattctttgctttctgtaattaggcttatgacttcttcaactcagattagccttgtttggaacaaatcatgaggaagagtgaaattgatttgaattgaattctttcaaaatcatgccacttttggcatgatttcttttccttcaaagtgcccttgtttgttttccttttataagttgaaagaattgaattctagcaattattgagtttccaaacacgagaattgagtaaatagaatttaaatgattttaattcttgcatttgtagactttctaaaacaaggtcttaatgaatttttgagaactttgtggtttgtacttttgtttatcttttcctgaaattttgttgtttaagggtcattgctctgtaattatctgattctttcctttccacaggac

SEQ ID NO: 51065 - DNA, 351 bp, Ricinus communis
  Intron number 2 from transcript 30074.m001405 (locus 30074 .t000072) derived from phytozome v7.0 (chr-ID 30074; pos 5 28177 to 528527)
gcttcagtagtagcgatagtggtgccgtggtggcaagggggataattgacgaccatactaatagcagtagttttttcaggaagagtaaactatatagttcatagtctaaaacgttatttactttttacatgatttgtttcttcatgttatgtgctaaaaggaaaatgatatcaaacattttaatcgttgtcagccaacataatatagagcttttaattaaaatgcctttttgcatttgcgttagaatgattttagctaatttgaggtaatttttattttcttgtcataacaatttaaggtttcattggttgaacagagattttatctgattggtagtgatcggaataagag

SEQ ID NO: 51066 - DNA, 537 bp, Ricinus communis
  Intron number 2 from transcript 30005.m001257 (locus 30005 .t000023) derived from phytozome v7.0 (chr-ID 30005; pos 1 22689 to 123225)
ggttacctactcctaataaatctatttctgacaaggtctttttctttttattttatttcttttaactaaattcctgtgttggaatcatatgctgttttttactggtcttcttgtgtgtgtgtgtgtgtgtgtgtgtgtgttttttttttttttttaatgttgatcatctgatgcctcgttttgggacttcaaagatttgtttatttgcttttcaatgtttgttggtcttactcgctgggaaataattgctgtgtggtgtgggattaagttaatacatttttacacttgtttgaaccctggattgaggacatttgattgggtttaattcattagaggtctaccttgaacttaaaaggatttttatgcggttgttgacaatgattgtcattttcccctttatgtctatcttatttttgaagggtttgaattcagtactttttatgttatttttttgcaagtcttgattcaatcatctatttattaatacccttttgtgtttcaggattttatcaaatctgctttccagaacatagtttc

SEQ ID NO: 51067 - DNA, 983 bp, Ricinus communis
  Intron number 1 from transcript 29844.m003168 (locus 29844 .t000014) derived from phytozome v7.0 (chr-ID 29844; pos 8 4124 to 85106 reverse strand)
agatattggaagtatgcttcctctttatttaactattatttttatttgtgaatgttatttcattttctggatttgctagtctaggttattgatgaatttagcttatttgagttttgttgattggagattgggtaattaatcaaaagaaagagagtatcccagttattacgtgtatctatgtaatagaacctgcagttatggaagtttgagtctttttggtagtttaataatggaatctcttgttgatgttaatagtactgaaatggaaaaatatgctcagaagagctgaactaaattcgagcataaggtttcgacatccttacacgtttaacagccattctccttatttccatagcagaaactaccaaagctcactctatctactgttcagaactcaacacaatggaaaaccgactttgcttgatttcattgcagaaaatatttaaagcctgaagaagataagaatttaatacgtaatagttatatccattcaaacagataggtcccaacaatttccacaggcaagccaattgttttgcaatgaatttttttcctgaagtgatcatcaagctaataaatggcatattatgactttgacagttcacgattttcttagagctgacatgaactgtagatgaagtaataaattagtcattgaaagggatattgcacaataaagaatctatttcatgctaagagtagttattagagtgtgagttctgttgcatgtatcttcttgtatgcattattctctctgctgcagtgctgctatgcaattatatctgtaagtctgcctccaattattcaagggagggggggttttttataaccatgtgtaagaaggttgtttactcatgcataaaaagataaatgttttccatccattgattaataccattattattctttattctaatattcttttacttctacttctaatgttttcagagaaaaactggtggtttggtaatttggaggtctgg

SEQ ID NO: 51068 - DNA, 817 bp, Ricinus communis
  Intron number 2 from transcript 30131.m007119 (locus 30131 .t000270) derived from phytozome v7.0 (chr-ID 30131; pos 1 669384 to 1670200)
tcccaccataattttctttctgatattcttggaaggtcttatttcttgccttctctttattaattaatgtttatgtctattaagcattgaatgctcacgtattgaaattgtcattaagacatcttttcacacattcaataattcatgaactactttggttaacatcattctggattttcagttccttttgtttaggaatacgtccaggtagactttacgtttggtatatttccttgaatattgcacttcaatgcttgagctgtttcatggtgtgagtcaaatatgtttcagaatgcatataaataatttttggcgattcattcttaccatgtatgtatattttgtgggtaccttggtaaagaaatccacttgctttcttgtcaatcagttctattattcgggaaacgctccaggaatttattcttgaatgcattaggcagacctgggaagatactctcaccattcggaccaaatatatatatatagcctatagatggatgtgaatctaaggatgtagtggaagaatgaagataattgcggtcttgatgaaatattactgtggtctcagtggtgacgtgctttgccctcatatttgtgcaatttcacagtaaagctgtttcacaatttacggttttcgagaattataaacattattgtactagtgaattctgtacaagatttctttattagcaatatatgcggattaacatcctgcgttttggatttcttttcttttcagtaatattaagccaaagctcattggtctgtttgacttttgacagtaaagaagttgcaaaggagtcaattctgtacagct

SEQ ID NO: 51069 - DNA, 868 bp, Ricinus communis
  Intron number 1 from transcript 29912.m005276 (locus 29912 .t000002) derived from phytozome v7.0 (chr-ID 29912; pos 3 3675 to 34542)
attgattatatttgcagcgaagtccagaatcgcaagtcagtttttcttgcttattctttcttcctctatttattcaattttatttttgttgttcggttaagatctggattagatagtgttctttaaattaattgctcagagtttaagagcttgcttaagctgcttataattttttgtttctctggttaagagaaaacatacatgttatttgctaattttgagattcaaatttaaattgattgccttaggtctgaaagaaaaggtgtaaattaattgctaaaaacgatattactagtgaatgccttacctctagctcaaaagcatttttctaaaataatataattatgattgacatatttttcttctaatttctattttctttttgtgtctcaacagaaagcaatattcccgtttgttttcaaaatattgctcataagcgaaaatgtgattttgtaaaattagaatgcaaggttatgcttcctttcaaaatgcatttgtgaaggttgacttttgttgcttgtatacttcttttctgttcttaaatttaggcgttcatacttcacgccgtgctagttgatcatctccattctggtgctaagtaggtttgatttgcttaacttatgttagccacttatgcttgttttgggttgtccatgatgaaaagagaatgataaagggaaaaagtaatttaatcacttatgaagagattaaaaaagaaaagatagaaagtgaaagtgtttgtttgtgtgtgaaatgattaatgtttcctcattgtctgagtcttgacactgtagcagatatacttagttctgttttaattccttcttgtgcaggattattgtcgttctgaacttggaaactataatcc

SEQ ID NO: 51070 - DNA, 659 bp, Ricinus communis
  Intron number 2 from transcript 29889.m003380 (locus 29889 .t000146) derived from phytozome v7.0 (chr-ID 29889; pos 7 70621 to 771279 reverse strand)
atactatcattgccaaatacccaggccgagtccctgtaacctcctcctctcttttttatacttttacaattacaccataataatgtcttttcacttttaccacttttagattttttacccagtcctgaatatctttatataacgactcattttactcttagttctattgctgctgtcggaatctttttcttttttccttttaattttataccgtctgtcctgattggttttcaaatttcaatttttgtttttctttatggtatttatgttatgatgattatctgttgttggtttttctagaaatacttggatatcaaattgcctctggcccaggatcaaaatcattcttcttataagaatttaaagcgtggaattggcagttagggaattttactttcttttcataacttgtttctttcgccatcgcatgtgctgactttgtaaattcaacttggcgttatgatttacgaagcaaccacaaatattttgacttcaacagcgtgttttgtagtgcaattcatatcaaccctaatcgattccctgttccacctcatcacggttgtcttaatgtccctttttaaaaaataaataaataatattgcatatttattgttaatattgcaggtgattatagaaagatattcaaagacggacctgcc

SEQ ID NO: 51071 - DNA, 921 bp, Ricinus communis
  Intron number 1 from transcript 30147.m013761 (locus 30147 .t000032) derived from phytozome v7.0 (chr-ID 30147; pos 1 58587 to 159507)
tctctcaaagcaggtattttctcaattttattgtgtttcctggggtttcttttggggttttgtttttccttttgtccaatctcctatcttttgagtcaacgagcgttttaattgacatgtaatccgaaatcattggaaaatttgattacttgggttttgcaaaccttgggatttttttagatgataagtggatttacaagttgatttcccttttttctttttagttaattcattgttttgctaggtttttcacctttttattgttgacctacttttactttctggtctctgataaagatgctaccttttgcaagctcaacgagtgaaaaaatgcaaactttttcttttcttctttgggtccttttatggatttgaatgttcattatcttttttaagcgaacaaaattaaacaattgttagtcttttatttatgtacggctatattttttacatagtttctggagaatcggaggtattcggatagcaaatgttgcctttgttcgtggcgagttggtgactaatttgagtgtgtggtttgcataatcagattggttgcgtttcaattgtatggttatgtactaattgcatttgattgctgcttgtacgataactgtaatgaacaactagatttctattcttgatttcagctaagtttttagctttctacacatgccatatactttaattttttgctttataatgatgaagccattgcaaagtaatctaatgtgctagctttgagagtctcacatgacattttcatttcatttcataacaacgtaatgtgctatctgtttcatttcatttcttataatgacattttcagcagaacaaagtccacaaccaatgcaaaatttgttttgctcatacatgtttttacatagaaacttatgattttttctgtaatgcctttgctgcagg

SEQ ID NO: 51072 - DNA, 924 bp, Ricinus communis
  Intron number 3 from transcript 30065.m001162 (locus 30065 .t000027) derived from phytozome v7.0 (chr-ID 30065; pos 8 65172 to 866095)
caagaggtttaaacggttcaagcatttctgtaaaggtattcaatttgttttctctataaatgagattgcaagcagtttaacttatttaaacttttgaaaatgcagttgacgtctgcttgttctagtgttggcattgatgtctctgccatcttatgaatatgtggtctggtggttatttattctagtttggcatagttccttgcaatgaattttgaagtttctttagttggttgtgtacatagattttaattagcacttaggacaaggcttaagtctgggaaaaaaaaaacgacttggggttagtttcatcttattgttaacatggtaggtcatgtttatataatcttgaccattgagctcacgatttgttacctaataaataactatccattttttgaaatttaaattcaaatttgtaagaaaatctcaaccattcaatttaaaataaagggtgaagcttacagacatgataggtcatgttcaagttgaacatgtttaaagtcatgacatgctctctctatgtagtaattgacagtctatataattagctttatggaatggcataattagcaaagttagaagtggttgagcagcaacaatggcaactttaaagaaaatggaactagtctgaatggaaattatcttgtttagggggactgatttatgttcctttcatttttcttttaatagcatatgatgtcttttactatcttcttttctgaaaataccactctttgatatccaaaaagaaaactgtactttttctccaactttactaaactcagttagtatatgatttggtaacaattctgttatgttgtcctttatatgtaattatgaattaccttaattcagtttactttattgatttacttcgccaatcttctaggtactccaagcagaagaggagagcagaaaactgat

SEQ ID NO: 51073 - DNA, 212 bp, Ricinus communis
  Intron number 2 from transcript 29991.m000627 (locus 29991 .t000009) derived from phytozome v7.0 (chr-ID 29991; pos 7 0445 to 70656)
cgctgcctgtggtaatttttttcacttttaattaatcttcttgtcttatttgattttgttttgtattattgtttattttctatgagatcaagtaggaatggacaagatatggttgttaatttgttataactgtttggaattgatgtgtgatattgatattagaatttgtatttgtaggtaaagtactgttcagagaataacaaacgtttaat

SEQ ID NO: 51074 - DNA, 936 bp, Ricinus communis
  Intron number 1 from transcript 30128.m008549 (locus 30128 .t000010) derived from phytozome v7.0 (chr-ID 30128; pos 2 452293 to 2453228 reverse strand)
ttccgcaagcaggtttgttacctctctctctctctctctctctctctctctctcgctctcttttcataaggaaaattaaggttcttgctctgtgatgttaactgaataatcaacctgattgactttttgaatacttctaagccaaattggacaatcttttcaaaattttcacaaacttgtaattaaatagcggatgtgcactgaaagtttcttgcgttttggatgttctattactttaatagctaaattctatagcaccttaatttgctctttctttctttaaattgctgttatgttttcctctttatatcttttagccgctggagtttaagaaggcttctttaattacttaaacatatatggaaagcttgtttatttgttgagctaagttatcatttccttgagaaggtaattggttatgtttccaaggaaagaatggaaaatggatctgcatttaacgagttgaaaaacacagggaaatattttttatcattaaatattaataactggatccttatctactatagttcttacgagatcttttcagtcccaacgggcaaataataatttctttactgcctcaattatcacatttgatgtggcttcattttatgccttacattccgcaccttccaacaaaattcttttgctgtggagttcaaagatgatgctgtgtgttttgtgcattgtctggtggtatgaaaactgattgcataagcatgaatgtgaacaacacgttttttttttttctttttagaataagtatatctgctgtttcctatggctatatgcatgattacttctctttaggattttccttgtcaaaccaattgggcagagcaattcttctgtgcttataggcataagtaattgatttatgttgtctcctagcatagtggtctattgatattttatttggtgctacagatacaatcc

SEQ ID NO: 51075 - DNA, 848 bp, Ricinus communis
  Intron number 2 from transcript 29844.m003228 (locus 29844 .t000074) derived from phytozome v7.0 (chr-ID 29844; pos 4 89549 to 490396 reverse strand)
ttaaggtacacacatacacgcaaaacacatgtttgtaagcttgtacaggagactaatacgaagctttttttttttgctttttttttttaatattgatgtgttgggttttctttgagaaaaacagagttctcaagaaaattatttttcttgtttgtttgtgtttgtttcttctttatttttaatttcgctacgaatcacgatcactgagctaacactgaccagaccattgatgacccagaaaacatatctcaggcttttctctgtgctcaatgcgcgctctctcttttaattaattaccctctggaaaataattaattatatatcctgtttttgtttctctagtatataatttatttcggtttaaagaaaaacatagtcctactgttttttttttttcagtttagatacttctttttagaaagtaaattattttccctttataactaaaaaaacctcagaggttgaaatttgtttagtttttgtttggtgatttctgttgaatttttagattattttacttatttgaccttgtctttttctggtatctgtttccagacctctaattctgtcaaaatacgggaattcagtaaaattagagaacggtgcatttatacctattaacaaaacgcaaatagcatgcctaatatcttagataatcaacgtttattagttatgattattggccaagaatgtcctttctttttttcttggatttataaatgatacttgaagatgcctgaggaactcaaatttgaaattccacattggaagaatgttaatgttatgacccaattacgttgtttctctatgcagtattcccgtccaaataacgccatcagtacccagtt

SEQ ID NO: 51076 - DNA, 400 bp, Ricinus communis
  Intron number 1 from transcript 29844.m003228 (locus 29844 .t000074) derived from phytozome v7.0 (chr-ID 29844; pos 4 90468 to 490867 reverse strand)
tctcagtcggtgagttgtattttttcttccttcagaatagataaaagacaagtttttggattctttttcagtttttgttttgggtttttggtgttaaaaaggttcttgttttgctatataattgactggcttggtttttgttttgttttgtatctttctgaaaacctgggttgttgatgttacagtaatgtctttggcacttttgtggtgttcgggtttgtttctttctagttgtgattggttaaacaaaaataatatggaatcttttttcaagaaatcaaactgggttatttttcaagaaatcaaactagctagtgttacatttgggctacttcttgatttcactttctttaatttgaatgcagcaagaagtatcaccgcgcacttcagggaggctttc

SEQ ID NO: 51077 - DNA, 744 bp, Ricinus communis
  Intron number 1 from transcript 29822.m003442 (locus 29822 .t000117) derived from phytozome v7.0 (chr-ID 29822; pos 6 20131 to 620874 reverse strand)
cagcctggcaagcatttcactgagcaggctgcaaggttagtgcctaactatgcgattagtatgtttttctgttaatgcggttttgttaatgcaatgtttataaatttttgttttgattgctttttgagctgctgactagaggaagtgcctatagtagaggtggtaactaatgaaatagagatttgtttgcttcttttgactatttcattgtgctgcaagttgcaagcttgtggggcctaaaagaagttactagttttttgttcgttgctgggaactattgaggttgaataattttaagcttaattaatgcatatgaagggaagtaaaggctatacattatgtgcaaaaataaattcaattttgtacttgtcataataactgccggctgatctgtcgtaagttcatttgtaatgtttgcattcattgatttagaagatacagataggcatcattctgtaaatggccagttgctggagcattcgaatggaaactccttaaatatcattaagattcaaattaattcttccagataacttcttgctagacagctagagtatttagttatatggtcttttggatttgcaaagaaaaactgtcatttctattaatggaataattttaagcctttttagttatcagctcaactcatgccaattctctatgcttgttccaagctatctttagtattttgatcacaaaattaggcattgtttttcactaattctttctgcgtttacagatttt

SEQ ID NO: 51078 - DNA, 789 bp, Ricinus communis
  Intron number 3 from transcript 29912.m005394 (locus 29912 .t000120) derived from phytozome v7.0 (chr-ID 29912; pos 6 13008 to 613796 reverse strand)
ccctccaaatttgtgcaaggtaaacacagttccaatttaagcagattaaaatattatatattctagtagttcattggttggatttcttacttgtttgattagaacttgggtttgcagttggcattattgcatagtgagagctgaatttggcttaccgtgatgcaatatgcaatgaagtcctatagagctgctagagaaattgatgcgtgaactcctcttaaaggagaaaatgttcatgttatattttgtcatcgttgatgtacgcagagtagtattttgttgggccttaaatggagaggagctagactggaatgttatcaagtcgaaggcatgcacttccactgatagacttgcatatcactagctttcctagcagctcgggaactttcctggttcacgagtctggttgattttttccttttcattgaaaacttgtgtcttttcaagcctatctcagtcctggggataatttaaggtcgcctaggaactgtacccattctgggcttaatacttacgaaatatcaaactatgtggagttctattaagaagctgaaagaaacctcaggatttaaagaaagggaggaaagtcaggaagaaaacaatgtagaaatataaaactacattttcatttatatcatttctgcatgtgcttaagattagactgtcaaagaaatcataagaaattttacaacataatataacattagctcctcttctattacgtgaccatcatgttcaaaaatttgatatgcagggcctggtaattaatcaaatctgtgcttcaactgc

SEQ ID NO: 51079 - DNA, 422 bp, Ricinus communis
  Intron number 2 from transcript 30131.m007079 (locus 30131 .t000230) derived from phytozome v7.0 (chr-ID 30131; pos 1 378131 to 1378552)
atcctggcgatccaaaagctgcagaaaattttcaggttagctgaaaaatttgatttttctcttgaagataaaagtttcagtttgttagttccgttttcataatggatatatatatatatatatatatatatatattttttttttttttttctaataattgaactgtactaaagagtgaggaaaattcaagttccaaaatgctgttcttttgcttattactgagaagatttatttcagctttcttcttttgttttcttaagattccttgatgtttatgtagttctgaatctgtatcataaaagggaagaaattgctaaacaagcttttaacttttctttattttcccttccatgctcttattttcttctttatgggacatgtgcaaagaaacttggtgaggcatatcagatcttaagtgaccc

SEQ ID NO: 51080 - DNA, 770 bp, Ricinus communis
  Intron number 1 from transcript 29922.m000111 (locus 29922 .t000004) derived from phytozome v7.0 (chr-ID 29922; pos 1 85465 to 186234 reverse strand)
gagctggtactcaagctttggtggtacttattttcaggtaaatcaactgtctagttagatattttaaatatatttcttgtatacttatttttatctttgttattttgttataatctattaaaaatatatctatagtataccaatttaattatgtttgaatgtttttttatattttaattttattatataattttagtattgtaattatatttgtctttatgttttagactagtgatggataatttggagataagaatgtatgtgattgtgttgatgttgatgatgatggaaagaattcaaaggaaaaagataatgacaataccattgtactatttcttttaataattttatattttaatgttgttatgttttgttgttgttctaataagatttttttttttttgcttttactttggtcatacggtttatgaatctagaaatattggaagtcttggtgatgtaatggagatagatgatgaaaaagtcaatgacatatgtaataattttctttttacattaaaagctacctctgagatatttataatatacctttcatgtttccttttgttttatataaattactttttggtggtattacaaagttattatttttgtttgcgcatcttatgtaatattattttaaatatatttttaggaagtataaaaaagattacaaaatgatgttgaggatttgaatcaaaatgataatcatgataatcctgaggaggcaaaataagatgatgatgatggtgatgaataagcagaagttg

SEQ ID NO: 51081 - DNA, 886 bp, Ricinus communis
  Intron number 1 from transcript 30026.m001445 (locus 30026 .t000009) derived from phytozome v7.0 (chr-ID 30026; pos 6 6264 to 67149)
gctgacgataaggtacttcttatttcttcttcttcttcttcttcatttctatgcttccctgcattttctaagaaacttttgacattctgcccctgggtttgttttgggtttcgttttacatatgtttatttgagaaggtttggatttttgtttttttttttttgttttttcagccgaaggtttatttatttatttatcttgtgatgcatttcttgctttttttcttttattatgtttttttaattaatccttactgttggttttgaagctttataagttcttaggatctgggtgctttttttttttgttgttttcctggactttcccagctccaaaatataatttttctggttatagtttattctcttggcaacgagggatctcgtctgtttagctcttaggacatcctcaattttcttagcttttcccttgtctcgatctgagatttccctctgtttagaggagctttttccatttatttttattattattattattattattattattattattattattattattattattattattattattattattattattattattattattattatttcttaatttttttaaggagcttaaatcattctgtaggtgtaaatcttgatctctcttttgatcccaagacaaaatttgcttttcaatactaggaattttgttcatatgtatagataggtctgtctaaaatctaacaacttgatctcattcctgagttgggcttgatttttatttgtggatctacctactttttttcataactactgagtattatttgatcaaattttgtttaccttctctttatgctatttttggtgtcttgctttgtttatgcatctaatgttgtaaatccctttatgctctgcaggaa

SEQ ID NO: 51082 - DNA, 724 bp, Ricinus communis
  Intron number 1 from transcript 29822.m003352 (locus 29822 .t000027) derived from phytozome v7.0 (chr-ID 29822; pos 1 52625 to 153348)
tctggtttgcttttgctgtgtccattcctactttggtactttctctctccgttttgtacagatgtcaaaaatgtattatgatttcttcactgatgaaatgtgatccattaatacgtgtacggcgagatcttgctcttttatgggattttgctttctaccattttcttgttttggaatttattttaggagatgcttatagatcctttgtttggctagttcttttggctgattctgtattcttcgttttttttttttttagtgatttgcttttgttgtttcagctaattttagcaaagcatttgattagtacttcactttttattggttaatatcagcgtgttattatttgaaaacaaattttacacctagtcatggttagggtttggaactgtaacttctgatttttcttaggttacttcatgcttttgcaagttttgatctgaatctataatgggcttattatagtttattagtttaatcctcaggtgattgatgtaaagagtgtcatctgtagattaaaataggtgaaaggaagattggtacttccattgttagtggttgtcattgttgtatcgaagtgcaagatttggccaaatagctgttgaattagggaaatgatgattttattatgtataataagtggggtcagagtgatataactatgcatgataagacttttgttgaaaagatttattctttgtatcaggattttctctcaacagtg

SEQ ID NO: 51083 - DNA, 976 bp, Ricinus communis
  Intron number 2 from transcript 29827.m002559 (locus 29827 .t000032) derived from phytozome v7.0 (chr-ID 29827; pos 1 91618 to 192593)
ctcaggtttatattcttttttccttatgtccttatgttgattttcttggtgaacacataagagttacttccattgaagatttgcactcaggaattgatgcaaaattaacaataacttttacgggtacaatttattaatttgtttgtttagagttagcttttctgctgaggataaacttttggggtggtccttgaatctaattgttcttccatcaccacacgttcagatggataaggtctggccacaaaatgaccacacaagataatatgaagtttggtctgcgtctccatttatcagtattttacattgccacttcttgcagtagaataagttcttacgagaaccttatttcgacatgaaagattcaaatatgaatcctaatttaagattgggggaaagaccaactttaagccactaagagaacaaagtcttattagctacttgtgctttatgtgaagtataaatagcaccagtaaccattaaactttaggctagtaacagttttgttcacaaaagattaatttgtgattttttgattactaaacttcaatttttgacaggaaatgaagtttagagtgatccaatagtggcctatgaatcttttgtgataatagctattattagtatagagtttggagatcattattacaatttagtggctttgtgactggaaattatagctgtcgagtcaaatactccactaaaatggaaaagaggggcaaggttgcatacaatagaccgtctgccctgacccttaaaaatggggaatctcgtgcattagcttctttaattatgtccatttgtgttatactaaataatcctgttaaattgttgggaagtgggatcagaatcttcagcgaattgaagtaaagaggacagaaatcccagctaatatgtgaaactacaaatacgcataagaatatgatgcataaaatctgcaggatcatctgggagaagtagtgtttgtggatctacc

SEQ ID NO: 51084 - DNA, 850 bp, Ricinus communis
  Intron number 1 from transcript 29827.m002608 (locus 29827 .t000081) derived from phytozome v7.0 (chr-ID 29827; pos 4 33296 to 434145)
ccaagcttagggagcaagttgccaagcagcaacaagtgagtttttattttattttaattttttaaactgttcctaaatcttttttcttttctttttcttgaactgcctgattaagaaaaagtgaaatcataataaatacttatttaatatgatgttgtggagttaaatgtacttgaaattcaatttaagaaaaatggtgtttctttttgttgcattcaatttcttgtaaattcaggtcagttaattccattgtgctcggtatttgagatgctctttgttgggttttatttatttgtggttttctcttttctttgtttgagttcataacttgaaaagttcccatcttttttgcccaagttttagttataagcaatgcttcaatttatgttaacttatgcatgccacctttcatattggtgctgagtttatgtatcatttttttcaatatatttttggccacactgatttagcatcatcatcaagtgtctgaatctgcagaaaacaaacttagggtttcagccacattgattttagtatgatcgtcaagtgtatatatttattttggttcatttgatgaagttagatgtttattggtaataaggaacaataggacaagagaatagatgattagcataataagtatcatcatcaagtgtctatatttattttggttcattatggagaagttagatgtttattggtaataaggaacaataggacaagaaaatagatggttagcataataaggataactgtttttagtatgtgtgttatttgatctgtaactcaatataatccttgatattcattattttgcaggcagtattgaaacatttgggacattttggta

SEQ ID NO: 51085 - DNA, 726 bp, Ricinus communis
  Intron number 1 from transcript 29827.m002649 (locus 29827 .t000122) derived from phytozome v7.0 (chr-ID 29827; pos 6 70329 to 671054 reverse strand)
cccgggttgccatatctggcgggtaatttgcgttttacagacatacaaaatgttgtcgtagcaattcgatatttgattaggcgttgttgccgctgaggtattattaatgataatgcaattctcctcctccttctctggttaatatcttcaattcgtttcttcttcaaaaaacgtagcagacccgtattttttagtctctaagcttgtgtttttctttttctattttcttctttttatatggtttattcggtagctgtttgcatcttctttttctagtttcatgtctgttaattgctgttatgtttggcccgtattgcttctatcaattgaaatgagcacctagtagccacttatttaatgggtttttggtttcttcagtctttcatcactactatacagttatgatacttggcgctagaatgtagtcgtccgattttgatgtgtttccgtaaacccacaaaataccgcagctttttctgcgctttatatttgataattatgttttattacttataatttctttgttatatctctctgtgaatcgcaagaagatataaaagcacagaacctttcaccttttacacattgattatgcgataactattttgtataataattaatgtatttctttctatcactgttagtttctgtttcataagttgaagttttgtgttagttgctctttaagtagagaagtggaacatattggtgaccggagtgactacc

SEQ ID NO: 51086 - DNA, 828 bp, Ricinus communis
  Intron number 1 from transcript 29908.m006194 (locus 29908 .t000245) derived from phytozome v7.0 (chr-ID 29908; pos 4 81452 to 482279)
tgttcaggccgccttcaagcgccaccgcgccctaggtgccctctttgtctctctacaaatgttatgaaagcatgtgattgttttagttatgtgctttctttacaattgtgaaaaattagggctgtaattttataagtttgaaattgggtgtttttggccttcgtagtgataaatttaggttgaatatgtgctttttttgatgcatttgctttcagagctttattacgttcttttaaccgaatttgtcttatgttttaaattttatcaattttagtctacataataataacactcataacaatttcatccaactcagtgagttaggaatatatatataatataaaaacgaaattactacctggattcccttccaaaaactaataacaacgaattgtattttcttaatgtcttttttctttatgaaattgatcacatactaggaaaaattgatgtacttttttttccaaaaaaaaaaagaaaaggtaaagcaagacttagcattacaactaagtaaaacttatattctgttttctcaattgatatagttgtatagagcttatacatgcattttttgcttttccttgtaacttggataagtctgttcccaatattatagtttaggctaatatttaacaggaaagaactaaaataatgtgaaaagttcaggaaattttatcactaagctttttctttttccttttcacatgatatagataattcaaggaaacaccttatctgaaacagggaagaatacaagtatcactatttgctattgaattaaaaagaattgtcaatccctgaatgcctggtatgcttgttttaggtacc

SEQ ID NO: 51087 - DNA, 652 bp, Ricinus communis
  Intron number 2 from transcript 30128.m008542 (locus 30128 .t000003) derived from phytozome v7.0 (chr-ID 30128; pos 2 410702 to 2411353 reverse strand)
ggttaatcttgccagggtattccatcttccttctatgttcttttacataaagctgcaactcgatgttgaatgttgtttactctattattctcactttcttttggagagacttagtaggaaaattgcatgcctgcaagtctgttcacattactatgatagatatgttttgatccatcattggcattgaattgtgtctaaggaggggtaaatatatgtttctttttcttcattagtggttgtgggacacattaattagatccttggagacaaattgacctaactaaatgactaggaaattgttttcttttgctttgaactgttaacaaatgtgtgaatttgtgtcaacaaaggggccaaggatatgtggttttaaaaaccacttgtatgttgtgaagaatttaaactagaatcagtgttattggatatctaggatatcatacaccccaacacttcttggggtgaaaaggaagtgtaaacaaattgagtagttattgctggttttttgacaacagttgtctgtaagctttttgtctttgctagacttatttttttatttaagtttcttaactggaattatctttagatagctaaattgctctgtggtagcttatttactaggttttgtttcaggatatatctattgctgtacaat

SEQ ID NO: 51088 - DNA, 620 bp, Ricinus communis
  Intron number 1 from transcript 30008.m000828 (locus 30008 .t000044) derived from phytozome v7.0 (chr-ID 30008; pos 2 03894 to 204513)
aataaacttgctgaagttttagtatttgaaccaaggtaattataatttttgctttaagttagagttttcttttctttttcctttttctggatttttgctcgctgcttttgtttttatctgatcaatgtgctcattgtaagtaaacgaatctaattgcacaatattccaacaaatggaatgtggatgcatgtctaatatgctgcatcagaatacgtccaattcaatagtacatatggatggttcttaaattactgtacccatgttatggagatttgtggctgtaaatgtcagtataccaggttatactccctggctaaacatgtcatctgcatgcataattgcaagaatgaagtgtctattgtgtgaacctctgtttagggttaggtttcaagttgtaacatgagttgacttgaggatgtcatttttgtttcctgaattatcatgctattgtagctagagatggcagacctgttggtagtgatttgcacttaaatttttcttttgtttttaattggcatttagtgtttgtcgaaacctaattttgtatgtattcgctttagaaacttgatggtcttggttatcctatttttcttatgtttatcaacagtttatttccttgc

SEQ ID NO: 51089 - DNA, 662 bp, Ricinus communis
  Intron number 1 from transcript 30073.m002290 (locus 30073 .t000100) derived from phytozome v7.0 (chr-ID 30073; pos 6 86415 to 687076)
ctgctgtccataatcgtttgcctttactcttctttccttttccataattggcttctcgattttgatttttgaaagattaatgtactgtttatcattcccaattttgccctaatttttactctcacggtcagtatagttttcaaaacaagattatcgtcttcggggacatttttgttagttgaccaagatctttggcttgtcaattttgaactgttggaatttcgttgctacctggaagaggggttgtgcaaacaaatgacagaatttttattcttcttttatatatatatatatatatttatttatttattgaaatacccaattcacaaaatatgcatgtattcctttagcatgcaatgtatgacccttgaaaagaaagaggcatcttctggtttgttagtttattatatatcacagtccaaaatgaactgttataaatatgcatattatatttgcttcatatgctaattagttttagagaagtgcaatgtaagtggccacatgtaggcttaaatataattgtttattctcattgtttcttatctaataaattagttatatagtttgtctccctggaattgtctaaataggatactcattttagtgtgtgtcttgtggtggctgcaggtaaattaaaatactttgaagagttatcttgcaaa

SEQ ID NO: 51090 - DNA, 727 bp, Ricinus communis
  Intron number 1 from transcript 30072.m000950 (locus 30072 .t000024) derived from phytozome v7.0 (chr-ID 30072; pos 1 91213 to 191939 reverse strand)
tttatcacgtgccactcacgccaccactcccaaaggtactcttctttttcttttcttttttcttttatttgggttatgatgaaagccaaacatttattgttttgtatttatgtttgagttcaaatactttgtttagggttcttttaacatgtgtacttagcgtctggtttcttcgatctctagtgcttatagatagagtattagtccaaagccttttttcttttaaagtaaatgtttggactaaatcatgtgcagagaatttggactcttccaaaatcatgctacttttaacatgatcttatttttatcagaattacttttcttaaggtaacaaaaatttgagttctagcgaacgtgttttctttctctaacatgagaatggtgtaaatagattgaattgttgtatttagtaaagatttgcacattttagatttcctttgaactcagttgtaaatattttctggacgaggctttgttctgaatggacgttgaattgcagtcttgtaaaattatgtcatttttaggcatgatttcattatttttagatacaattgaaggttttatgtgaatttggtactggggtttcatgccatgcgcttgaagaatttgattaatgtgttaatatcattttgcgcctgttttcactttttccctcatgattgaaaattaacactttattttaattagtacaggtattgaccttgggaatccagttattgatatcact

SEQ ID NO: 51091 - DNA, 835 bp, Ricinus communis
  Intron number 4 from transcript 29889.m003378 (locus 29889 .t000144) derived from phytozome v7.0 (chr-ID 29889; pos 7 61300 to 762134)
cttgaggttctgctctctctttctttatctttctctgtcacattacgcactcatacactcacatgtggctttatttgaagaagcctttctgttgcttaatttgcctaattttaggttcatttctttttccgtttccgttaggtaaatgctgagagaaaattggtggagaagctgacttatctggggtatacaaagccaaaatccaaaggattatatgcttagtagagagctacacggatcctgcaaaatgatgaaacttatagcccttcttacagtggttcatgttgctagatagtccaagatagatatcaagttagtgagctgtgacagataaagcttcaatgttttgctgctggtttgaatagtccagaactagatcataggaatcaaatacaattcttctaatgttacttcaagacatctgtggttgattttctggaggactctagttctagctttctcagctttcattatgagcattatcttacgaactatcctgtgctaaatttccaaaatgccaggagaaattaaaatataatacaatttgtttcgcttttggttctctgctattcatatgatttgcttttctgtttgcgggtgccgtgtgttactgaattgatgaaatgtcgctgtctagaacgtttgtaattgatgctgtactttggggggctaatatgttagaggtttgaggttggacttggacgatccatattgaacctcgatgcttcaataaaacttgtgagaatggaagtggaatttcagttttaattatgcttgcttctgtttgagtgtaattagagatgcattaatttgctgcagggtattctcagattgc

SEQ ID NO: 51092 - DNA, 971 bp, Ricinus communis
  Intron number 3 from transcript 30072.m000978 (locus 30072 .t000052) derived from phytozome v7.0 (chr-ID 30072; pos 3 26220 to 327190)
atcctaaagcacttgaaattgctttattattatccgtatgtggtccttatttattattcttgtttttgttgctatatgattgtgtgattgctttgattgtgtattaattgtgctttaattctggtggcagtgagtaaattataagcaactcttaggagttgaatgttttacattttaagcaattgagtggtgttcttcaagattacccaatcaaatgacataacctcttttgcttttgtcccaacttcaggttgattatgtgctacttgcaagataataagtacatagcattgatgttttgtttggtttctgtttcataaaagtaggaaattatgatcaattctatgttacaattgccagcaatatgcttttattcttttatttgtctttctttacaattcattaatgtgcgtattatgtgttttggtcaaactaacttcataaaagtaggaaattatgatcaattctatgttacaattgccagcaatatgcttttgttcttttatttgtctttctttacaattcattaatgtgcgtattatgtgttttggtcaaactaacagtaggaaattatgatcaattctatgttacaattgccagcaatatgcttttattcttttatttgtctttctttacaattcattaatgtgcatattatatgttttggtcaaactaactagattttacatgttttaagtgaatgctgatctaatttttcattaatcttgtggtgaaattacctagtttagatgcaaaatgctttttttttggaatgattaacctagctcaagagttacagccaagtattagatatatgtggaaggtgtagtttttctgggtcctcaatctgtaattggcaatcctttttctatttgatattagttaccaatatgcatgtaagagttgtagaaagtgaagcattgatgtttggtgcagggagcaactatagtggacaaaatagtgagtataac

SEQ ID NO: 51093 - DNA, 997 bp, Ricinus communis
  Intron number 1 from transcript 30128.m008917 (locus 30128 .t000378) derived from phytozome v7.0 (chr-ID 30128; pos 1 696989 to 1697985 reverse strand)
tttttggggtatgtttatttttctttatattgttgcctttcttttctgttaatttaaatattgtgtaatatttaaatatagttcatcgagctgtagtaacttctttttttttcaaaagttcttaatagttgggttgccttttgaatatattattggtagaatcatggctatgatgaacaagaattcttctctaaataggtgttttgctatgtcttgtgttgcagttgtttgatgttatgcctttctttatcttttgttttctatgttatgattattattattgttcttttggtatttttattctaccgtgtagagtatatttggcaaaaggaaacatatacttcttcattggttttagatgtttcctatcttttgctgtgtgttcttttggtgttggattgttgtctctgaagtttaacatttttttctgtacttttgctttcttgatatagcaatgttttcatgtgttaaattctcccttcctccttcttctacccactcccttttctctctaaaaaaataataatcttttcttttcctttttccatttcttccccaatctcaaatctttatttatttatttttgtttcacatgtctccttgccatttcttactgttatattttagtattgactgttcatgtctccttttcttggtgaagaaagtaaagaaataattctcctgctaatgcttatgcacaattttcttgtccttgatgcattcaagcgacaagataatgatgatggtgaattttggttgtatttttccgtcgcttctagtgttggctatggttgtcgttgtcttgccaaatttcggtatatctttgcttttctaattttgaaagagcaaaaagtagaggtttagtagaggaggtaaaatggcactagaggtttgaaagaaaatgtttaagtgcttttaatttccactctaactacattgtgataagttctctctgttttctcttttcaggggtgttgtgggggtttgcatttcagtg

SEQ ID NO: 51094 - DNA, 694 bp, Ricinus communis
  Intron number 3 from transcript 30072.m000933 (locus 30072 .t000007) derived from phytozome v7.0 (chr-ID 30072; pos 6 4009 to 64702 reverse strand)
ataaaggtaggcttttgttctattattggtttccatcataaaattcatgtgtattggaattaaatttgttcatggataaagtcatatattcataattcttctccttttcatatttggaggttttttatgctctagcaagctcaaagagctagtgtaagtgacataaatttttcttggattggtatatctacgtggcatgtgcattaattttctccatatcgtccaccctaaaaaatatagggcattgaattttgagtgcttgctgctaaggctattttatcatacccaaaggttaaggtttagctattaagatttatttgggtcttcctttctttctttcttctgaaggaacttcagtgattggatttgattgttgaatattaaatgagttgtttatataatctttcttctccttttgttaggactacaatgattcttatcacgtgtatattttatgtgcttggctacacccttttagattcaaaaaaattatttgacagactatttctaaattaaagttaagttattttttacatttaacttttaattaccctcaatcactgtttctgtcaataaatgctgttcaaaatcttggaactttgctttcaaggacagtttgaaatacaaatgggatatctggtgatgattgtgacatcctcacaatggctgctaactttctttcatgatgcagctt

SEQ ID NO: 51095 - DNA, 673 bp, Ricinus communis
  Intron number 1 from transcript 29869.m001141 (locus 29869 .t000006) derived from phytozome v7.0 (chr-ID 29869; pos 1 05052 to 105724)
ctcgcaattttgctcatcgtcttgccgcttctgaggtctgcccaattggttttatttgtttttagtttcttttgtggaattttggtgattacgtgtttcattaattgaacattttaaatttagcaatttgttaaacatggtattgttaagatagtttaggtgatatctttgatcatgggttacttgattgtgtaagatagttaaaagaaaaccttttgtatcgccattgttcttgatgtgcatgatggttcttggattagttactcattacggtaagacttttaaggttaattagaaagtactgatttggattttataagttcttgcgtcatttgttaaagattttttttctcaagttattgttattgtgctttctatgctttgaattgaaggcagattgaactaaaatgaaactgataagtagattatactgcattctattgttgatggattgagttagtgtcctatattgtttcgtcgatcttccttgtttctatgatgaatcatagtgctgtgttaacgtttcctaccccttttgtttatttcttttgtctaacccaaacatgggcctcttttttgttattcttttctttttggagttattcgtgttctcaagaaatagttatttttcctttcaggatcttgtactacgacttgatctatacaagaagct

SEQ ID NO: 51096 - DNA, 747 bp, Ricinus communis
  Intron number 1 from transcript 29844.m003276 (locus 29844 .t000122) derived from phytozome v7.0 (chr-ID 29844; pos 7 51693 to 752439 reverse strand)
gaagatcccagtaaaagtgcaatctccaacgaaaggtttgcttagattttggatagtaatactattttctaatatttatacttacatcttggtcttgggatattcaggcctttcgtacctaccttcaaaagaattttagaaaaatttcatgtattactgatttggtatcaagtagaagcttttaatgtaaattctttttaaagaaagtatttgaaggctgtaagctgtaatgaactgtcattaattgattcattagggagatgcatggtgaacctttgtgcaatggaactaagagatcattataaagctaaaatgaataaaccttgtggtctactttaattggtcagaagattgtttgaacttctcatttattttcttatagtagtaattataatagtaacatgtcttgtgatttcccttatggtcgccaatgtgcatttgcatttcttagtgtttgacttggtttcctttaaatgtttgcatgaaatggggcaccatgcaaataatcttttctgtggaactttcagtcccagcttgaatctttctcctatgaaagtaaataagagggacgtgtttattgtgccttttgtttacatctggatatttgtattcattttttctttctgagaaaaaaaaaatagcaactgaacttagtaatttaaatttaaattactcattttaagttttaatagtgctatcatctttgatacagtggaacctgcccctccactgccgccggaagaaaag

SEQ ID NO: 51097 - DNA, 754 bp, Ricinus communis
  Intron number 1 from transcript 30054.m000808 (locus 30054 .t000023) derived from phytozome v7.0 (chr-ID 30054; pos 1 37499 to 138252 reverse strand)
ctccctcgttcccttcaagatcttcaaattctcaggtttcctttttctatttcaaaaaattatgtcaatttgttggaactaggttttttctttttctttttttttgctttctcaattgggtcttcatgtgtcatatttaatgcatttctcaagtaattgacttaatcaacaaattactttacatggatgtacaattgggtattacttttattatatctggagatgagaatgtttcatattatatggaccctttaaaattatgcaaattatgggtctgcatgccagtctagttttcgaaattttatctcatagctggttgtttctgcgactttgaattgttttgctcatgtgtggctcttgaatttgcttgaacatgattcgcccagaggcttgacataattgtattatatctataatatacacactatggcataattgtcgattagaaacctcaaatgcaggtatatagctcatattgaaactgggttaagataaccaaataccatgccaaaaagaatgggtttttagcgcatatatatatatatatatatatatatatatatatatataagtattatgctattgtgcattgatgcgattgttccacttcatctctttgtactttgttctttttcagtgcatttcttcaaattctcacaattgttttttgcccgcatctattttctgctataatttaaaaccttctttttttggggcagagatcatctggagacctacacaagtgactacactg

SEQ ID NO: 51098 - DNA, 1008 bp, Ricinus communis
  Intron number 1 from transcript 29816.m000684 (locus 29816 .t000021) derived from phytozome v7.0 (chr-ID 29816; pos 2 26900 to 227907 reverse strand)
ttggcgtctgtctcatcaactctgataaccaggtatctctctctcaatttgcaagtaattttttcttttgttcacagtaaataaaaaaaaattgattttaggattttgatcacttttaattctgcacttatgaaaacttcaaaggttttatgtatatatatccacacttactggtgtgtatgatcattactggtggacttgtttgtttcgttagagtttgctgttattattactattattattaatattattatatttgatgtttggttgatgaaagagaccgaggagttggtttcatcacgatattaattactaacttgtgtgacagtactgatcttgaatgtaatttgcagaagatctgaaatcgtaggcagtgttcatgaattcgtgaaacaatatgtatatctaaattgaaacagaaacggaacattttcggctaaattttaacctgaatttatgtattatataggtaaatttaaataaactctcctaatattttattattttcgtctttaaattttgtggaagtagaaatttttgaaattgtcgggtgatattttgttggtttctgcttaaaattatatgaagtattgaaagtaaggcagtaaagtaataggatctagtactgatatattaagtactgtcattaaattacagatttgcattctacaatggactaatctagagatactagatatggtcaaagtctgactgtatcattttatcacttgttaactatcatctatctataatataatatatattaactgagatattagatattacgaacagttttgaagatttgaaaggacattttcctgtacaaccatgttcttgatgctgctgaaccaaaatgtcaggatttaagatttactctactgttaggttaaattattagcatatttcatgcataaccatttctatattttaaaattgcacacaccctctatgagagaaaatgctaatactttgtgatttacttgcagatttttgtggcttctagattga

SEQ ID NO: 51099 - DNA, 420 bp, Ricinus communis
  Intron number 1 from transcript 30147.m013869 (locus 30147 .t000140) derived from phytozome v7.0 (chr-ID 30147; pos 3 024161 to 3024580 reverse strand)
gagtctactctggtgatcaaggtcagtgtttgtttttttttctttaaattcttttcttttacttcatttcgtcatatgctttttgctttttgtttttgttttttaaaattttgctggctctgtagtttcatcctcgattttaacggtgaggaggtgaaattgggactgtatattttgattatatactctcttttttagtatgcatgttaaggctttgaactttacttttgttgtaatgtaatcatggattggttattaaatttgagagctaattcgagcttttgtgtttactgtctatatgtgtgtgtttgttagatagtccaattgattatttgtgtagctgtaaacgcgtacttattctatttctgctctcatttttgttgcttcaggctaagtgtggtgatacactgaggcgtttca

SEQ ID NO: 51100 - DNA, 812 bp, Ricinus communis
  Intron number 1 from transcript 30131.m007026 (locus 30131 .t000177) derived from phytozome v7.0 (chr-ID 30131; pos 1 064206 to 1065017 reverse strand)
cagaacaattatccaccatcacttccttgttaacggtactctttttttcttttataacaaaaaatttgaggaaaatcgacgtagttaatttcatatttgtgattttttaaacacatttggacaaggatgtagcaatctactgaaaaattgtgcattgaaataagaatattaatcgctatggttatgcctgcaagatacattggaattaacaaattggtgaaatattacatttttagtttgcttttgctaaaataagaatattaatcgctatggttatgcctgcaactgctgtttttagctgatgccttcttagaatctcaaccccgaggaagaatctgttgttttttaattttcttatctgtttcaaagatatattagcaatatcctttggtagccagtttgtgcttacgcacaatggtaagtttaaaagcatgtgatgaagttttttttttttttttttttaaacctatggacttatggagaatatcttttaccgctgaaaaagagatagctggggtggggtggggtcaaaatcgtggtgatctctgtattgctcgtgtaattgaaggatttatattttcattttcatttcataaattgtttatattccagtttaaataggaaaggaaaacttcaatataatacctactttatgagtcagaaatatattttcgtctcgcatttgtaaaagccatgtgctttcttaggggtacatgaaagttctattaatactttatagacatgcttatggtagttatgtgtttggttatgtttcaggggcttctagagtccgagatcttcctccagatcag

SEQ ID NO: 51101 - DNA, 894 bp, Ricinus communis
  Intron number 1 from transcript 30143.m001193 (locus 30143 .t000032) derived from phytozome v7.0 (chr-ID 30143; pos 2 80763 to 281656)
tcaagattgcccaggaaaccgacgatcttgaccgggtataagattttatttttatttatggcctctttgtatttgttttaaaaagaaaaagggctttcatatgaaagccatcttaattactgagaaagctatgttttagatcccattaagtttgtttatagttttgatactaaatttttaatgggctaaaacttaaaatgtgaagtaattacataattttttttttattcttttggagtttagaaaaaaaaataactaaaattttagaaaattgtgtattcttctccttgaaggtgtaaaagaaaaatataaagaattataaaagacaatttgaacattttgttttagaacaaataaaaacaataaagacatgtattcagtatacttttcctttgaaagccctacttgcatcaatgaagtgctagaatagttaaatatgggacggtgctcaaatctgcaaaatattttagtttaagctgtgtagcagttatgaatttctgaacttttattgggaattctctcaagtggattatattcccatagaattgaactctgatatttaattagtaagtatttaagattccatatggggcacaaataaaattgcaattgacttcccacaattgaatcccataactattatgttggggactttttttcctcctaaaactgtttggggtgtgattcagttgactatactttgtatttgtttgcattttgtattaagggttgctaatttttgagaaagcataaatggatcattttttaacctttatacacttgttttttgttgggaaaacctttaccgcattttttgtcatcattttcatcttttgttttttggcctgtggttcaataggttgaggcgattccacaaggctttcctttcaagat

SEQ ID NO: 51102 - DNA, 899 bp, Ricinus communis
  Intron number 1 from transcript 30147.m013902 (locus 30147 .t000173) derived from phytozome v7.0 (chr-ID 30147; pos 3 225598 to 3226496)
ttctgcctctttacatttaactgccatcatcactggttagtttcatttaatctctttaagggctataccacttgaaatggaaaacacatgtaatcttttcaccatgcaccttttcttgtttatggcatgaatataaggttttttacactttgttctgttttctcaggattttctcttcttgatatatgcatatgcagctctttagagatttgttttacatctttgccttctgattgcttgctttctttctttatttcgccccattgagctcttatttcatatgaataatttaacaaagaaatgattgtatgaaaattcttagaaataagatattactcctcctttcatctctctctctctctctgtctccatgatcaaaataatcttcttgtcttttcattatttcactttctaccttcaagtttactatattcatctcttcacatttgcttcaattttttattttttttatggattccctacaagaattaattcttttgcaaatatattcatcaagaatctagtcgaagctcttatattatccttcatcatatttatatttcaggctgttatgcattgcacaacataatctctggctaggaacatacttttgtatatactaatatactattatttaatctggtggctctttttgactgtagcaagatatggttttgtctcttctgaatggtattttgtcattgtttcatactcagatcacttctttctgaagcaactaatcatacccacttaaatatacttttttctcgacctgggtatttttctttttaaatttcatttacattctcgtgcactcgatattacgtgtttctacattagtaattgtaaattttggatgtgaaggggctacttcaggtattggggttgaaactgctaga

SEQ ID NO: 51103 - DNA, 349 bp, Ricinus communis
  Intron number 3 from transcript 30146.m003538 (locus 30146 .t000115) derived from phytozome v7.0 (chr-ID 30146; pos 8 67976 to 868324)
gatcgacaccacaacgcatcactagttaaaaaaatgtgagtgaagaataaatattttgtgtttatatataattaaccgtcatactttttctacttctactaaagaaagtacagcaaatgatgtttaaccagaagatatttatttaatcttgggtgcctacacaatgttcaaattttttggtgaagtcaaattccatgtttaaacatggccaagacactgtttttatctctgacttggtatcattatgatatttctgcatcttaatgcaacccgtgattgtaaagatagtaactagttctcatgctttttcttcttcaatttctttagcttgaccccaaagataaacttg

SEQ ID NO: 51104 - DNA, 597 bp, Ricinus communis
  Intron number 1 from transcript 30054.m000800 (locus 30054 .t000015) derived from phytozome v7.0 (chr-ID 30054; pos 9 1852 to 92448)
ggtatgttgctctacgcctttgttttcctcttacgtttcgaactttactgtccttttatctttatatgattttacttcaattatgtttcactgaatatattatgcaagtttcttttatacattttaaactcttcagttgtgttcttgtgttttgcacataagccccaagtgcctcgtgtgtggtaatatgcgcctttaacaactatagttgcacaacattctaaaacttctctttctttcgttgcatttattaatttcttccccatgcacttgaagaatgaaattgggttctaatatttgtccattttgaattgatagactttgtctaaatatcgcacttcccttattttgtttaatatcgagcattggagggcgaagactactcatctttgctttcaaacaaaatctctgaaatttattgtcgtgaaaccgtacattgtaaaatgccatttgtaattattgaacaatattcttccttgagcttgttatattccagtttatgttatagaaatcttacattttgtttattggatcagttgccattttcaattacttcagcacaaacttgattggcttgtttcttgcagtcaagtttat

SEQ ID NO: 51105 - DNA, 413 bp, Ricinus communis
  Intron number 2 from transcript 30128.m008632 (locus 30128 .t000093) derived from phytozome v7.0 (chr-ID 30128; pos 2 03514 to 203926)
tttccaaggtatatcttaatctaagttaagcattttggaaaattaaaatttttatttggactcttgtttttgattttccatttactttattgaagatgctaaaaatttgaaagaaattaggagttttggctcattttgtcaatgtagagacaattattcaattttctgtcaatgttttctgtaagagttttaaatccatgtctgagcagtttaacatgaatgaaatgttcaagtaactaaagatggtattgcactagtgattattcaattttgtgcattaagtttgtaatgggaacatctgatcttgactgggaattgtttttctttgatcttttttggttgattcaccttgtcttgatttcttctttcttatgttgtgaaggcggagctaaaggagaagctatcaagtattt

SEQ ID NO: 51106 - DNA, 619 bp, Ricinus communis
  Intron number 1 from transcript 29866.m000621 (locus 29866 .t000016) derived from phytozome v7.0 (chr-ID 29866; pos 2 21219 to 221837)
tagctacaaaggtcagttctttctttttcttttttggtgaactggtgaattgagttgctgtggaccgattcttactgttaaatcgagaatgttgttcaaaatttatagaattatggtttttgtatttgagttcaatggctttgaattctgtgttagtgtttcttgatctttgaagataatggacttgatcttcaactggtaatttcatgtggcgttattggtatgtttgtttattttttttggttccatgaagttatatttattttggtttcttatttccggattaaaaatttttgtttttcgtttttggtgtgcaagtaactgcacacccaagtgagatgggccaacggtaatatattgcgtcctgttttcttgcttctgtttacaacatctgagactaaaacacaagtcaaattgattttgcttaatatctttgttaaccctgtcaaatttgaagatggatttattcatcctttttatgtgtgctatctttaatatctgcagtagtacattcagcattgaagtatcccatatgctaaatgtgtcttgaaacctgaaatttaatgattttataactgaaaaaggtttggttttgtttgggcagttgccgctgttcctg

SEQ ID NO: 51107 - DNA, 746 bp, Ricinus communis
  Intron number 2 from transcript 30106.m000660 (locus 30106 .t000017) derived from phytozome v7.0 (chr-ID 30106; pos 3 49998 to 350743)
gcttctggaaagggtaattgattaacctcatctctctccctcctatttttcattgctctgtttcatcaatttcctttcctttttttataagggtaaatttattaaattgaagtgattttattgacaggttgtaaatacatagatgatttttagagttggcctctagaacagatgaaatcattcatgtacactgtctggtccttaaaacaagatttttaagaagaaatcaaaccttccttacaaactgcttgtccttgatagagccccctgagggagtaatttgatatttttatttgtgaaaattgaaagatttatctctctgtcgaatattacttatcaatattggtagaaatttaaaagtttattattttcaaacatattatgagatacaaaaaatatatatttgtttaataagcttttgatcaatcatactaaaatcatctttgaaattttgaaggcttaaatttaaagcctagctaaaggattagtcatagaaaaggaagtcaattgtttcttttattttttgtttaaaaataataatatcttctgagcttttaaaattatttttttacaaaaaggacaatgacttcgctatctaactgaaggcctaattaaacttaatgttgggtttgctaccagtttgtaacagttattaggttaatagcaaacttcaaatatttgttcctcaacagacactgttgataatctaacttcctctttaatgtactgtgcagctgtgctgccct

SEQ ID NO: 51108 - DNA, 989 bp, Ricinus communis
  Intron number 2 from transcript 29912.m005420 (locus 29912 .t000146) derived from phytozome v7.0 (chr-ID 29912; pos 7 39369 to 740357 reverse strand)
agcatcgccacgagttacaggttctatctttttacttatttcattagttgaataatgtaatttgttactttatggaggttttatgattggcctgccacatttgtggaatgattttaccactgcagaatatgggaattattccactaggctataattgcttaatccaatattgggtggaaatggatattcgtagtgatattcaaacttcaaaggctatgagacacactatacttgtttgattctcgtggagatgtaaaaggcttgtttttaaggtacctgactagttgagcacttaatttgctgttgtccttgccattctctttgtactgaattctgccattgattaatcaagttttacaatttcattcttacaactacgtggcaaaaagaattgtcaccttttgtactattccatgattttctgttcttttcgtcttgaaagaattttgtattccctagttcttactcttgaagattttccctcaactttctgctcccctggatagttgtatctgcatatatttgtagtatttctacatgttaaatgcttttttcttttggactttgtaatctaaattcgaaaaggttacctatttctatatcaaatatttgcttagattgctagtaattctcaatttcatatccttaactttcacaaagtatttgtactttttaaaaggttccagtcacattcacatccttcttaagaaaaaggtagtcaaagctggatcagttaattctactgctcatacattgtaatcccaagatgcaagtttgttcttggattatgtggttagcaaccttgctaaaatctgataacagaagtaaacttataatttaattgctcaaggatggtggattgccttgtatcaaaaattgagaaaggaacttccaaatatgcttatctttcctctctctttgtttttttaatccctttcaaaccattcttgacagatttgtctggcgctttttaacaaaagttagtttta

SEQ ID NO: 51109 - DNA, 678 bp, Ricinus communis
  Intron number 1 from transcript 30008.m000799 (locus 30008 .t000015) derived from phytozome v7.0 (chr-ID 30008; pos 7 5347 to 76024 reverse strand)
gtttcacacgagggtggatcccctactgctgccaggttagttgagactgtttcttcttttctttttcttgtacatccgtttatttgctctgtttgcgaaacaagaaagtaaggagacagatgagaaaaagaattattttttttttttgtatgttggttctaactatgaaaaagaattagtctcgtgttaccattcgtaaatattaactcctctgtttagtcctcttcttctatttgataggcaactacttgtatgcatgactataagaatttggctaatatttatcataacctccactatattaggtttacttgtgtcatctttttcccttaaatggaatatttacgttcttatacaaattaagaaatcctggttttagctcaatctgtttgcaagtggtattggttttcctggagttgttttgttccaattagagttaagtctctgttttggtcccatggaaaagaggaaagaagataattgtaattgaattaaattacaagtgtcttctctttgagatttacggtctgtgtttgttcaatgtgtgcctgcttattgtcagagcctgcatgtttaacctttactgttctttatgatttatattgcttgacgactcaaaagttttcttgttttgtggaagcagtcagattgtggggtggccacctgtaagaacttata

SEQ ID NO: 51110 - DNA, 836 bp, Ricinus communis
  Intron number 2 from transcript 30131.m007059 (locus 30131 .t000210) derived from phytozome v7.0 (chr-ID 30131; pos 1 254109 to 1254944 reverse strand)
ttatcactccctctattctctctgatcgtttaagggtaaatacacaaaaaaagaccttttcttttttatgtcattttctttttcatgtacgtttgggttttcattgttattgttgtagaagatggttcatgactgatggatttacataaaactgccatttttgttgatttgggtttaataatgtaatttataatcctaatatatctaaggatttatacattttttagtttgattgcgttaactgggttctattatattgatgtttttatttttatatatgttaaaatcaaatatgtgattgtggccaacagtgtattaaccaaattttatgttgttttttgattttgttttcttgtttccattgaattaatttggagtgcagcttagatttcctttgtttaatatttcccctgattcttttatttacttctaaatataacacttattttttatactactatttgtttttctagtaaagtggtggctttatatactatttcatcaatttaattccctcaaatgtattagtttcaatcaaaacccacttgaaattgagtctgaaatgctagtttagcaatcaaattgtagacatacactttgactctctggtctatttaaagattttggttgtatatttcatattttttgtgttctttttcaaaagtaaaattaacttgagcttcttgggtaagtacattgtactgtctattgcactctgcatggctgttgttcctcttaatctaaattcgtgtttgtactgtatcaatcagcacgagtcctgagttattttgtatgaacctttttctcattctactgtacatgttcctaacaggtca

SEQ ID NO: 51111 - DNA, 696 bp, Ricinus communis
  Intron number 1 from transcript 29842.m003542 (locus 29842 .t000039) derived from phytozome v7.0 (chr-ID 29842; pos 2 08504 to 209199)
aaagacattcagcttttcggtattttcagtttattttttcaatcttctcctagttttctctacttcttttgcatgatgatttactttcgattatttctttcttttttcattaacatttcgtcactcgccgttcgtgatttatgtttgcgcttagctgctagtgattatctgggaatgcttaatagctaatcttgttggactgaagtgccattgttatgttcacaatttctatacctattaaacatcaacgataagtctgtctattgctaactagattcctacaaagctcatgcccatctgttgccagaaatttggctgcagatttcacatgtttgattcgtatgatgaatgctggtaacatggaccgggtgttatcaagtagttggaggattgaggactgggagtaaaagagacacattatatgattttcctcttgcacctaatttagattcctggattgcgaaataacccagaagttttgctgtaatttatggactgattgggaaacaaaggaagggcatttgcatttttgcttgaacatgctctatctttgtcattgaaagtgataaaaatgtataatctatttaatcctgatggtttatggttcttcaataggatgtttcatagctctatttgttttttctttttcatttgcatttgtttgtgacctgtgggaaattgtactttggtattcag

SEQ ID NO: 51112 - DNA, 944 bp, Ricinus communis
  Intron number 3 from transcript 30048.m000317 (locus 30048 .t000011) derived from phytozome v7.0 (chr-ID 30048; pos 2 21156 to 222099)
agcttcacagtaagattgattacagtatttctgaatacatggattgttttacttcttttatcttttttgattctgttttttgttgtgtgatccttgcaatgaagattcataaatgctactatagttcaatctgtgattgatatgcaataaattgaatcttaatagaacttctttgcactaacaagttaattatacacaaagcaattggtgaatcagatatgaaattaccctgttttggtgaacaagctgctgtagaagcagggagattactcggtatctgcttgagttccttgcttagtgttttatagttgacaataagaaattttgtagtgtaattttatgtctgaatgcgtgctagcagtcatcttagaaatgatttttgcctaaagaagcctttcaatgttttggaacattgataatgagaataaatctattgataatgtttcgaatttacattattcagaataaattgccgcaacaatattcattatagaatgatgttgctaatgcatgataacagccccttatgctgttgaaattgagattgcattgttactagagtagcattatttgctagatgccttcctgcaccctgcagagatggcacttttccatattagtcttggacctggtggttgttgtttgcttgctattttctctggagtaattctggggatagttgccatagtaatttatcccatatggaattgatttttttgtacatggcagattaccaaaagcatccacatgggcaaccatagaattgtagccacagttgcccacttactagctcaaggacgtgttccttttaattgatgggtttgtcaatgtacctgatgcttggggcctgctagtactagagttacttttttatttgtccatcccaagtacaatgaacgcaagattgatttttgtccttttgtgattggacagctcattctgac

SEQ ID NO: 51113 - DNA, 789 bp, Ricinus communis
  Intron number 1 from transcript 29901.m000418 (locus 29901 .t000014) derived from phytozome v7.0 (chr-ID 29901; pos 1 90583 to 191371 reverse strand)
tgaaacaggtgaatcgagtgctaattctgctgccagtaaggttccatagcataatattttgaacctagaactggattttgcccattttaatgctgaggatacaataaaattatgaccagtatttcaattttatgctgttctttaacagcaacggtagccacattgttctttggcgatcaagtggatgattggttaagcttggataactgtcaatccaaatgcaacttggaatccatttgctgcggctttatgtgaaccatttggagaataagagattcagacattaagacaagatgggcggggtctgtttctgaatatcaaaatcaaattttgagcacctgaggttccattttactgaaaatcttaccctgaattaaagagaattcctcaattcctctttcgtaagttgtctcagtagtgaactaaggcctgcaatagaattggccaaaccacaagcccttggtggagcattcaaattttgcaaggcttcatgatgagtcatagatactggcctgttactccaatctaaaccttccaattcttgtcaaaaccccagccactttcaacctttcaaacccgctcgaccatcaaaataaccttcctctttcaactaccatatctaatgacagtactaaacagcagccaaaaccaattcaaacatatctcagaaaaaggttccagagcttgttacagatggagagatcgctattttgtgggccatcaatgtaaataaaagcgactttttattatggagactgaagatgatacaaatggctcgttatagagagc

SEQ ID NO: 51114 - DNA, 942 bp, Ricinus communis
  Intron number 1 from transcript 30065.m001156 (locus 30065 .t000021) derived from phytozome v7.0 (chr-ID 30065; pos 6 39517 to 640458)
aaggtggtcttggtctttatcatcttcatgtactcaacttagctctctttagtaagttgacatgaagggttttttctaatgattcttttgtgtttagattcttgcacaatagattttatactagtttcggtatgccttgtccttttcatattttttctttgttttgaacctctataaaatcttatgagtcttttattaggctcaattctcagggggcatgggctcttgtttagcttgaatatactattgtagatgtgtttcggttgttatttcataattctttcattgtgattagtgcgaatatcttaaatgtttctctttttatttgcattaagattaatttgtctttaggtcttctcccaatgggaagttttcttccaaaattgcttctgatctcttctgtgtgcataaactcaaagtttcttaggggaagtctctatggtgccattatctccctccatcgctctcttttttgttatggggtgttatccttacattgtcttcctattgatgtttctttaatgcagaaaggacttgtcattatctctcattgcaagctttgtctttcgacttcaaaaaccattgaccaaatttttaccattatccctttgctattgcagttcgatagctcttagaagtcttttcaaggtgtgtcttgatctttcttctagctttatgaatcttttttgtaatgcttgagtttggatttttcctcttgaattttgcctctatggcatgttggattcttgtatgctttccattctatctagtttgcattcaatagcattgctttttgagatactgctattagtatttctatggttatccattttatgtgctgctcaatcaaattggtaaaactttttaagattggcaaaatgaataactcgtaaactaatctgtctatccttcggcatttaagatttaattcaattattcaga

SEQ ID NO: 51115 - DNA, 907 bp, Ricinus communis
  Intron number 1 from transcript 29955.m001164 (locus 29955 .t000009) derived from phytozome v7.0 (chr-ID 29955; pos 5 74789 to 575695 reverse strand)
ttttctcaaggcactatgtaagtttatgtaactaagggcaaaaactttttgttaatgaaaatcctaaatgtatttaatttttcttttgtaattttgagcaattgttctaatttcttaaaagaaaatacccaaattgtaaaattattggcagttatagtcaatcttaaattttgactaagttaattatgtggcatatgaggtgcacgtcggcattgaattcaactaaatttcatcaaaatttaaaagtttggcaatttagtccatttttgccaaagttaaaaaagagtctaataagttgcataaattttgtattattttaaccattaaattttatatgtatattttaatttaatatttatttttaaaatatcgtcagtagttcttatttttttatttattttttgaatttagtgatttccactaaaatagttttatatgtatgctttaatttaatatatatttttatagcattcttaatagttcttattttttttatttttttaaattcgatgagatttagtccctattaaagtagctttactttacttctgatttgctattcttgtttaggccatttgaataattagatataaaataattaggcatataatattgataggaagacacatgaaatagttttataatataatacttgattgatattttgcggatgaaatatgaaaagttctgaatttgagtctttttgtttactatgtactaattttgaaagtttattacttttaagatgaattgtttacaactcgttgagcctcgaatcccacatcatatgctatataatataataaatagttaattagagatgtctcacttgatcagtacatggaatggtagtaattgccatattatcacagggagacagaaaaaaatagcagagtattaccgaagg

SEQ ID NO: 51116 - DNA, 815 bp, Ricinus communis
  Intron number 1 from transcript 30068.m002533 (locus 30068 .t000023) derived from phytozome v7.0 (chr-ID 30068; pos 1 52713 to 153527)
gatcatttccttgaacttgacactgtcacccattcgtgagtttcttttacactctcctgttttcttcctaagtttttctatttttcctaataatcatttatagttcaaatataaaaaaagaaattaaaaataaataataataagagattgaatggatgtaatatataaatatatcttgaatacgtaaattttatttatcagtgagtgacttgttgaaatctgaatctaaaatatttattttctactcttaaagttatgaaaagattcatacacttttcatttcaccatctgtaaactttttctcaatccttttaataaattaaatcaatggatttttattagttctctaattatggctagttaattttttttttttttttttttttttgcacaaggacccataagaaatatagaaagaaagtagaggagcattccattgatttccagcaaatcaaaatctatacttgcactgagaatagaaacgctacgattgtatttcactttttctatgtatagaattaataaattatactacttgctgaatagtgcccatattacatgctgaaaagctttttttttttttttttttttttttttgaatgttgaaaagctttttaactcatagctttcagagcaaaagaaaataataaagacatatcatagatattcttttttttcttttcttggtgtatttatataggtcaagaaaggacttagattagataccatgagcttggaataataatttatacatgtgaagatacatatactatatctgtcttctttttctaagttttagcaactttccaatgcag

SEQ ID NO: 51117 - DNA, 466 bp, Ricinus communis
  Intron number 1 from transcript 30055.m001629 (locus 30055 .t000099) derived from phytozome v7.0 (chr-ID 30055; pos 4 91479 to 491944)
tcaactccctgaattactctctttccacacatcaggtgcctccctaaccatcacttcttcttttttttttctttttttttatctataataattatatgatcttgttgacggctatagaatcaacaaacggtgatgggtaacctatcttgaaatttcaaatagttttcctattatctaggagcttcactatgccttctatatactgcaactttacaccagttattttttatttaattaattgctggagaaacatgccaatttgatttcttgtcctaggccagagttcaactaattgcaagagaactattatcattatgttttctcataacaacaaataataatactaatattaataaaagcaatttgttgtacaatttggtaactacttttctatcgtgcgatttggtagtttaggtcatttccgaattcctttttctgaatgtcatatattttgcagactatataa

SEQ ID NO: 51118 - DNA, 640 bp, Ricinus communis
  Intron number 1 from transcript 30128.m008564 (locus 30128 .t000025) derived from phytozome v7.0 (chr-ID 30128; pos 2 523332 to 2523971)
tgctcatcagaaaccacgaacggagaggatttcaggtggcattcctatgtttccttgctctagcacttgtttctggaatatgaggaatcattagtcttcatttagtgttttttgtttatttgcctatttagacttcacatctgcagtcgcactcaatatcaaaagcatgtatcccgggtttgaaatttttacaattaaactacgcggttcacgcatttgtcatttaaaaatatatatttatatatatatatatatatatatatatatatatatatacttccgtactcttcttgtcgtataatcaaatatttgagctgaatgctagtagctaagtgttatacttatgtctgttctatcagatagctgttttatctagaacaactgcaattgacatagatatttcaatattccttaaaaggattgttgtatgaacattcttgccgtcattacggatctaacctcttcaatctacattgtgatattgactgcaagtgtagttttctctttgtttctgacatagcctgcgtaggccctacaagtctatccaaattgacttagtggagcaatttacttcgattgtttctataagagaatttttctgattatgctttgggattcaataatgcaggaagtgccggtg

SEQ ID NO: 51119 - DNA, 672 bp, Ricinus communis
  Intron number 2 from transcript 29955.m001177 (locus 29955 .t000022) derived from phytozome v7.0 (chr-ID 29955; pos 9 72721 to 973392)
cacggctacgaagtgaagaggtacaattataattttctgtttagttactagtaatcataaagaaactctgttttattttcttattctagttttagtcgcgaaatagttatataaaagcatggtgatagcactacttgtagtatgtatcaaataacccaactttgtaattgtctgatataccccaacagaaaaagaaaagattgaattgcataatctttgatttcgattgtatgcttgaataccatgttacttcaaactagagaatgactgccacatctttctagatttacctacagctgagcaatgggctcagaataatacaagtatgttttttttctcttccatcagacacgggctgctcattgaaattaaaagtattcagtttatgacgagagctcccgttttttactgtccataaaatgaattcttgaattccaaaagtcattaagtaaatgtaaaaaaaataataaatcaaatttgatataatgatacacattattaatggaaagaagtttgatgagacgcaagtcaagagttgatatggatatatagcttgatgtttccttgctgattatcacaaagattcaagtatcgtttattataacttctgtatattaaaagttggctgatatgtacaaaattgtaatcgcaggttgagcagagtaaggagag

SEQ ID NO: 51120 - DNA, 273 bp, Ricinus communis
  Intron number 2 from transcript 30128.m008661 (locus 30128 .t000122) derived from phytozome v7.0 (chr-ID 30128; pos 3 87633 to 387905)
gaggcccctccagagcattagctgctagagtactggtgagcatttgattattatatattcatgttcttctttcagatttagaaaaagaattcttttctagctcaacattaggatgctttttgcatacatctcattggtgctaattaattttttggctcctgttttttaattgacttgataccctgcttactattttgaaaaaaaagtcatttcacgactcattttcaatgtatttgcatataatgtgttttttctgccgttatactgtgcagg

SEQ ID NO: 51121 - DNA, 945 bp, Ricinus communis
  Intron number 3 from transcript 30128.m008661 (locus 30128 .t000122) derived from phytozome v7.0 (chr-ID 30128; pos 3 88100 to 389044)
gctgcctggtctgccctaaagagatgtaagtgtttcatcctttttattagattccgtactcttatgctggctagcacataattcagtttcccaaccgcttgatctcaaggaggaaaagatccttccccaagcgaatacaatagtaagccataggttcagcctttacttcattggtttctttcctgaacagtgaaatttttttgtgattaatatattagttataatatccagaaagtgggtaagcaaccattagcatttgcatgtttgtgtatgtgtttgtgtcagatagagagagataaggagatgttcagcagtaagtccaaaaattctgacttttagtagtgactttgtcttaggtggtggaaatatactctgagctgccttgttgcaactactacccataacaaattcccttgaacattgtgtgtcctgccattgtttggaaaagcttcatgaggattttgatgcatttttctccctcatcagtttctttttttctccttctatgaatgcataaattggttgtgaattaaaactgaatcagttctttaagttgtatgttgatattaaataggcctttgaccattgggttgaatttgggtaccagtatccctggttctctacttttactggtttgtaaagtttaaagctaaaagactctataggtgatcaaattgatggaactgtcttattttttccatataatttccacccagcaagcattctgtcatttcgataactaaatattcaaatgaaccatctgatacatagataatcatcattttcatcttttcacttccagttaacctcaaactgtttcatcttttcactttcacccagttttcttggaaaatgtatgttcatgcatttgcagtcttctgcttttatcagttgcttatagtcgagttatttaaatattctattatgtctttgtagtggttcaac

SEQ ID NO: 51122 - DNA, 788 bp, Ricinus communis
  Intron number 3 from transcript 29929.m004548 (locus 29929 .t000051) derived from phytozome v7.0 (chr-ID 29929; pos 3 03343 to 304130 reverse strand)
ggttgtttggattactggagccagccgggggataggtacttgttttatcaactgatgtatccaatgttggtattatgattttctctaatcaaatttccctgttgatgtgaatttgatatgcacaaacattgaagttctgggctttattgtgtacatgtattatttagaagtgtatttatatttgtgaatccaaaagatttattctttgttgccatttcattgttattgccgccagagatttttctcatttttgttaataacgatcaccagctttttgtatgtcctacctaaatcttattagcattaaagacaaagtcttgcagattgacttggaatctcattgttgcttttatttaaaagtaatgggtgtttgttggcagtccatcaggttgtatttctcctttagtgggaaagcaagagcccaacattgtcttcagaatggaggaagggtcctgtgtagcactttaggcatatactctttgaattttgatggagtaaactcagattagtctgaaaggatgacatcaaatattaacaaacttgatgaaattcgtttcattgctgatggacgattgtatgaacatctagtttaaacgaccttaaatattgcaactaaaatgcaaaatggtatacttttctgtttgtcattacgtataataaagtacatctggtccagctatgtttatggggcttgctactaactccttctacctatgctttttatcttatttcccttttgatgcttgatttaaggtgagatccttgctaaacaattggcaagtttaggc

SEQ ID NO: 51123 - DNA, 762 bp, Ricinus communis
  Intron number 2 from transcript 30026.m001514 (locus 30026 .t000078) derived from phytozome v7.0 (chr-ID 30026; pos 6 08522 to 609283 reverse strand)
aagagtgaacaagagaacaagcgtgcaaggtatgctagatatactatttcaacatttcaattttgcttttgactcttagtacatagctcccatgccctactaaacatggaatcaactcaagagctcaattctgggttgcagcggctaaattaatagacttattcttcccccatttcacattgttttgagtgttatttgtatgttaagtagtttcagaggtttcagtcaaatgccaattgacttgcaaatcatcttgtcagtaattggtagctttaaatgcgtaagttaatttttttattttatgtagttttatctgaaggcattaattcttgaaatgtgcttttgtggtaaagcactgtatagatggaaggaaacagaactttccacctcaaccctttgctgtttcatttttgtctttactgatgaagtgtgatcaattcagtcagccttacgaagaaaaagcttcctgcttttgtttctatgtgtcccgtctcctgacaagttttcttccctaaaatgtctaaactggcctacatcagaaaaagaaacatgtagagcaaggataatgctagcactcatacacacacacacacacacacacacagagacagacatgcacacagacacacgcattgttttagattgttgtactgatgcttgctgtgaaaaacgaaggattgtgatacacctgtaaataatgagatgttatacactatacaaaatgcagatcaaggaaagagaatctttcacgtgctatagagc

SEQ ID NO: 51124 - DNA, 974 bp, Ricinus communis
  Intron number 4 from transcript 30131.m007164 (locus 30131 .t000315) derived from phytozome v7.0 (chr-ID 30131; pos 1 964423 to 1965396 reverse strand)
caagctagcaccattgtgagattcttctccatgcccttgtatgcattcatttataatacatctataatttttcatagcgtacctgttattgggctatataacaagatatacctgcctatcattttttattattatggtgtggccagtatcccaccttggatcgtatggatgattaccatttccacaatttaaacaggttttttataatatcttttgtgctttaacatggggatattgctttcttgcgaaccagaaacattatgaattgattatagcatcttgtatgccacaacatgatttatccattaactgattagttgtggtcattgtggccccaaactttagtatgttgggtccaggtatgaatgaaaaggcacttgtgtgggttcttacaataggtagaggcatagcgagaattcctcaaacataatatgaaatgaataagtttgagtttatgttttgattcttataatcatttggagatatgttgtagtgtcttataagtgacactagtagtgtttatatttggagaacaatttcacctaatagtgcaactaatgttaagcattgaagggataaaatacacttaaatagcaatattctacggagcatttctttttgtaaaacctcgtacaagaaactgttaaaatgaccgagttacatagatgatatggtatactggtactttttttttgctcctttcttactgacaattctagaatggcatctttactgtgatttcatctgatgtagcgcaaaataattcgattactgtccttttggtgataaaactataataagcacttgctgtctagcagtgttggagtaacattctaatccaccgactttaaatttcataagtaaaattatcttcttttcccctttggctgataaattgattggccatggagtctttacttatttgttaactattatgcttaggtgtgataaaaccattgggctcttgctctcct

SEQ ID NO: 51125 - DNA, 343 bp, Ricinus communis
  Intron number 1 from transcript 29851.m002435 (locus 29851 .t000077) derived from phytozome v7.0 (chr-ID 29851; pos 4 92976 to 493318 reverse strand)
acctctatcttacttggttgtgagtgtcttctctctctctctctctctccccttgtctactttttctttacttcttttagtatctcaaaaatttcaaagagcaaaagaaccttcaagatttgaactctgaccgtctgcataagaatattcgatcagtgctgagttactggccagtttaacaaccctttaaatcattctttttaatcatgtattgcatattacatgtcttccaccatacagattcattttctatgcaaactttctctttgacatgttttcttgtttagataagtttggtaaacttgaagtgttgttttattgtttgttggtagatattggtgta

SEQ ID NO: 51126 - DNA, 730 bp, Ricinus communis
  Intron number 1 from transcript 30099.m001632 (locus 30099 .t000011) derived from phytozome v7.0 (chr-ID 30099; pos 5 3594 to 54323 reverse strand)
atcgttactggttctgctccagagttggtcagtttcttctctctttttttgttcagaaattcttaactttgttcttttaattatttgttatatgaaaataaacattttttttatgtaattatatcactgtttcgtgttgaattgggttgtagggaatgtgtttttaagggtttggtttatgtgttcttggattcctactggaaatgcaaaattgggcttgatttaaagtagagaaaatattttgagtgattagtttggttagctggagagaaatgagtgttagcttttctgacaatttctactagtgttacaggactgatctctttagtttgtgggcgacttcaggttcagtttaattgttttatcttctaacgttttgttcaatcttagttgctaaaaagggatcataggttgggggttctttactgtttccatttattttagagcttatagtttctttctgaagttcttgcctagatcataggttgggcttgattggagctatatcatgcaccaatcttgcatgttttggactttacctgcatgtgagacctacaatctgtgggagtggtgtatgtgcagtattttcatgttttcatgttcttattttcagcttgtccctaatatttctggtttttttttaatatcttttcagttgagtaatatgtactcaattcattgaaaatctaacttttgaattccgtgcttccgttcattttgtgtactcagg

SEQ ID NO: 51127 - DNA, 705 bp, Ricinus communis
  Intron number 2 from transcript 30131.m007100 (locus 30131 .t000251) derived from phytozome v7.0 (chr-ID 30131; pos 1 524842 to 1525546 reverse strand)
ctgctcaggtacacttatgtctcttttgcttatttttcttttcttgtttggtttctggtggtaaataatgtaagttaaaatttgaagatataacgtgaagcttagcagtaattgaagaagaattcatataaatattgaactatttatgacaaccatttttaatggttcggaaagtccaaaactacaaggtttcagttcatttaatttctaatttagtgtgtttgaatgatctaaacatgcaaaattcttaatgcaattgaactctatttagtcaattcttgtgtttgcaaagcttacagctgctaaaattcatttctttcaacttaagaaaactaggcaattttcaaagaaatgaaattgtgccagagttgacgtgattttgcaagaattcaattaaatttgaactattgaacacgatttattccaaacaagaatttaggatatacatcaaaagttgaaaaatagcttcccaatggttgcatttagtttcctttgaaacagttaaccatctcatgttttatatattcaacatcattaatcatacaaaaatatagggagcttaagatatttcatctgcccctgtaatgttgtgaaaatattgcttctaatgtcacttgtcgataatataaatctcttatcagaattgaaggtaatttctggagtgcaaatcttttaattatttctttgcattgttaagctcaaaaa

SEQ ID NO: 51128 - DNA, 866 bp, Ricinus communis
  Intron number 1 from transcript 29912.m005488 (locus 29912 .t000214) derived from phytozome v7.0 (chr-ID 29912; pos 1 399212 to 1400077)
gacggtataatgtaatgctgcatattttttttttaatctttcattataaattggttgttcttttaccaattagttcataaataattcaatctttaatcccatcaggtgcatttgaattctcttcacatattccattttttctttagacaagcaaaattttgttttagtagattgatttttgttgttgttagattcaccttattggattttgctttgaatgtgtcaacaagacaaagaaataatttaaatatggtatttttaattatcatatcaattatttgagtaggtcaacctaaaacccaaattggactacgtgacaaagttggaccattttcttgtattaattcttcaacacaataatgattacattgcatacgcttggcaatagtcaatttgttaatttctcacatatgatatgagatgcatacgggccaatgatattagaaggtcaacttgattttcaaaaaaaaaaaaacaaaaaataataaaaatcatttttggcattatgtaggccaattttataagaataattaaacaaccaccatatatataattattctttttttccattgtttgttctgtgttttcctttcgtcctatgcatcatctgagacaaagtattaattggattctttgaatcgttcaagctccaactaattgcagagaaaagttcattacaatggcctgcgagtttcctcttgtcaaagtgactggataggacgatcaactggcatgtttcttgctaaatttgtttgttttcttacatagtcaaacaaaaagtctctgtttgacaactccaagctcagtgttgttttctagcagctattaactttattttccttgtattttcaattttcgcagccaat

SEQ ID NO: 51129 - DNA, 695 bp, Ricinus communis
  Intron number 1 from transcript 29863.m001055 (locus 29863 .t000015) derived from phytozome v7.0 (chr-ID 29863; pos 1 14987 to 115681)
agattgcaagagtaagtgcttcatggaagttcttatttttttttctcttattcttttgtgtgttttaatgagttttaacctcaaaatggtgtgttttgtcttttagaattgttttctttaccccatttctgctatctgaagatacccatttgctcatttttcaagttatttacacagtggtactacttggtccgggagctgcaatagttgattctgttttctttttggttttggtggagatggggggtggttttattttgcgttttaactattatttcattgcctctttggatggttttttttcttttgtagctcactgctcattttccatcgttactagttttctttttaactgatagaccatcattcttatacaaaatgtgcattcttttttagttatccaagtgtctgtacatttttgtcatcagtgttcatcaattagttaattcttttgccttttagtttctagattccagagctggtcaatactacttaataaaaaattgcaactttgattctgctgaatagtctgattatcaattcttcagtggcatgaacaattaaatcccttaaccgcctcattttttacacccataacttttgactttgatcatatgtaatccgatttaatttacatccatttgcttctaccaattccaggttacttctgttaaagaactaagcgggcaaatttg

SEQ ID NO: 51130 - DNA, 767 bp, Ricinus communis
  Intron number 1 from transcript 30140.m000573 (locus 30140 .t000008) derived from phytozome v7.0 (chr-ID 30140; pos 4 24903 to 425669 reverse strand)
ggaaagaaaccgcaatacggggcatcttcgaccaggttaatgttttactcatgcttaattgttgaaaatggagactagataagaaaagaaattggtctttcttttttattccttattatttagcttttctggcttttgattaaataattggccattacgagacgtcaccatatagaaacagacaaaaaacttaaaaaataaaatgataggatcacaagtaatcaacaactaataatgcacaactagagagagagaaagggttgtggctgtgattgtaggggtaagatgttcggcagtaaccccgtcgtgtcggatgtctgtgcggctgttgcaactgccggaatcattttcgcgcttcttgaattctggaaagttacagccaagcatgggcttgaccaggtttaattatttcctcctattttggaattagcttttactaggagaaggcaatcgcatttaaaagctttttagctaatcacacgtctgaagtcctatatatgcaggttctgaagattattttgcttgcttttttgctttttttgggtaattagaggctctcgcagtgcaatttccctgtcgtctgctatgctctgattttttttctttttctgaattttacatgtatacatccttgcttcagataagtgagtctgttaaaatggaagcaaaagaactaaattttctatcttctttggcttggaggttgcttatccttcattctttcttggttagaaactgaataggaagcttgtgcacataagcattgg

SEQ ID NO: 51131 - DNA, 543 bp, Ricinus communis
  Intron number 3 from transcript 30128.m008877 (locus 30128 .t000338) derived from phytozome v7.0 (chr-ID 30128; pos 1 467554 to 1468096 reverse strand)
ggcttcctacttttgaagcctgtgatcttgagcaggtgcgaattcaagtaatttccagaaatgatttcttgaaaatgccatgccatgccaatttttttctattaatttgttgtaagggttgtcttttgatattgctgctaatgcttttatgctatttctcaattaggccatatgatcatttgttttgtcttcaattaaatcctacatcataaaatggtaacattatttaaaactagaccaattactaaaacctcaacttattaatagaaaataaaaaaatgttcatgagaacaatctcattaaaatataccccaaaagccaacaatcttcgaagtaagagttttatttttcttctattcagatatttgtttttgttaattgctctatatctttatcatataagatactgatttattgaataggaagttataccgatagctccagacctgtaaagattatgtcatatcttaattgaaatgaggtaatccaataatcttgaacttttcagggaggaaaaactgcaaggatagtgaattgtgtgtt

SEQ ID NO: 51132 - DNA, 650 bp, Ricinus communis
  Intron number 1 from transcript 29863.m001093 (locus 29863 .t000053) derived from phytozome v7.0 (chr-ID 29863; pos 3 74119 to 374768)
tgaggaagcatcgggcaggatagaattagaggtgcaaaatataaaaatctctgcattcattttccaacttgacgagtatgaagcaatggattcaaagataaatgaactgtggaatcaaatacaggaatcagaaaggaactaaactcagaactggatttgcataacatgtagttaaaactatataattctgactacttgttccataatcagtttacataatttgctctgtgcatatacagacttaatttcttgtagaacggaatttcttttactgggactgtcaactgaggataacaaaacaaaaataaactgcattgatttttgtactggaacttacaatctattgcgactgacaagaaacgaataatagtgtaatacgaataatagtaaagccaatattcaaacaattctgcaactgaaccggataatcacagttaatacaattaaaaccatctccaaatcaggtaatatttgaagatctgaaaaaagcattaaaaaaactatgagaagttactgacagaatttaacgaagtttgtagaaagtcagatagggtacaattggtaaaaaatcctgatgcttgcaagtggagagaaagagaatataattttgagtagttgaaagccttgttagatccgcctgtcaggattag

SEQ ID NO: 51133 - DNA, 733 bp, Ricinus communis
  Intron number 2 from transcript 29908.m006234 (locus 29908 .t000285) derived from phytozome v7.0 (chr-ID 29908; pos 1 802739 to 1803471 reverse strand)
gctaaacaggttagggtcctttcattttgctgacttccctttctgtggtgtatgatttttcgcaatttaaaagagtttctgtgaacaataaagataaaattgctgtttttagtaatgattaatggttgaccaatagaagcttagatgcattgcttcttgtcgaaactaatgtgataataggagtaaatattcataataagtgccctgccagaaattgaccatgccatgttttctaatttgaaatgataggatttgaatcttgattgtttgtgcgtgcttacacttgtgggctttatcaatacaatgaattctgtccttgtctttttccaagtttatttctgagaattttctggtgtatgggtttgaagtaatgcagggaaaatgctcctcaattgctaataattgagtgttcgtttttaaatctattttttgagtatacgaggactttatcccctattagattcttttttatttttcttttgcaaagcttggttgtgtttttcatatattcctagcatctttttcaccactaatgcttatttaattatacatgggtgtagtaatacccattttctgagcaattgtgcgcctttttatgcttagtggatgctgttacaacttgcatggttgcagtatttacaacttgcatggttgctgatatcctgctaaattgctgtttgccatcttttttcgtgtaggcatttgaggaagccattgctgagctagacacttt

SEQ ID NO: 51134 - DNA, 197 bp, Ricinus communis
  Intron number 1 from transcript 29908.m005983 (locus 29908 .t000034) derived from phytozome v7.0 (chr-ID 29908; pos 8 53921 to 854117)
cccaactttctccgatacctacaaatttctcaaacgtctgttttttttttttttttttttgtctttaatcctgtcgtgaaaacaacttatcttctcgtttcatgtttaatcaaactcgataaatattgctgtttagattgcttttaacatttgagaagtgatcttatgtatcaggagcttggggagctaggatcatc

SEQ ID NO: 51135 - DNA, 987 bp, Ricinus communis
  Intron number 1 from transcript 30147.m013911 (locus 30147 .t000182) derived from phytozome v7.0 (chr-ID 30147; pos 3 278811 to 3279797)
gctttcacaggtaaatataattaacttctacaaaccaaataatgacgaatcactttcgggtttcctagaatttgatgattagaattcaatttcagttcttcttgagacgagctcactactatttattctttttttttttctttttttacatttcgcaatttcttgtatcaattgcttggaacgtgacctatgtccttaattcaacttctagtgcaatctttgatggtattggtttttatttatcttacaaatccgtagttgtcagttgtcgatttttcttttctttttcttgagggctggtaaattgttgattctatctgtcaaagtcttaaatgggtgtttctgtcgttgtaaaaggctttaaaagattcttgatttcaccattttgtggcagtaattttaacttttatatcatttcattacctggaaatctaacttgatcagggctgtgattctaacatcacattttagagattcattgtcttcctctcacattaacatgtaaaatgcattcgtcttagtccgatggactaagtaggcgtcctggaaaaacaaactagtacaaaggtttataatgccacatttttatgtcaatggcctagaggaatcagtctctgtttgttttcaaagtaacccaatcattttctcccctttattcaaattaattatcaaagaatgtattgtttgtaaggtaaaacacaaggctccgtttagatatttcaaaaatagttggacattgaatgcataattaaaacatgcatgatagctgttcccaagcagcataataggattataagattcatttagagtgaattgtccgcctttctgtctgtcaaaatgatattgttgtgtgcacttcctataaatatccgttaaagaaatgcacatgttatgaactctgatttttcattgagaattcccacttttgtattatcttgttgctctctcccaggttgttccagttcattcaaggtgctaatctgaatt

SEQ ID NO: 51136 - DNA, 954 bp, Ricinus communis
  Intron number 1 from transcript 30128.m008700 (locus 30128 .t000161) derived from phytozome v7.0 (chr-ID 30128; pos 5 93993 to 594946 reverse strand)
ctatttctggtgataatcaagcccataaggaccaggttatttatcagttcattaatttttttattggttttggttaattttttaatagagatttttagattcttaattgaaatagttaatgaggtagttgaaccaaagaaaaataataacaaatggaatgagtttcttgcatgtgtgaagaattgttgtcctgactaagtgaaatagtcgctgatggcttcgttaagtggaagcttttgtctttagttataatgtaaagtaagtaattgagctcttttcatttctcctatttttgcttcagttggagacaatatatacttatacataagcacaatttaatcacgaagttgtgatgaatttactttatgacaaactagttaagagaatctagtaacttgtatttagttagttgacctatggacttgacatttataattttccatagcataggcattgatttctgtgcctaatagaaatgctaatcactttgagtctgatatgatttcactttgttggaaattcagggaaagaaaattaattgtgaagtcagtgccactgatactaaatgcatcttcaacctttagttggcttttagaaaatgtcgagttcaattgacatagagaaaatttcaacccctcttcttgaatttgttgaaggattgttgactcaatattaaggtttatttatagaagcgaaaaaatagtttagttgaagatatgaattgggggattttacctctcgtatggcaacatctttggtctgtcttcagcaagtccactgttctgtcattcaacacatctcacgttgattatgagccctcgcatctttaattcaatccactgcttcctatttgaatataatgtgcatcagttactattgtgcttaggagcttgatgtttatctatttttggccaaacaggtactttgggcttcctttgacagactagagcttgg

SEQ ID NO: 51137 - DNA, 788 bp, Ricinus communis
  Intron number 1 from transcript 29933.m001397 (locus 29933 .t000019) derived from phytozome v7.0 (chr-ID 29933; pos 1 21575 to 122362 reverse strand)
ataaatctaattcccctactgcatctacactcagagtatggattcttttttatgatagctttttctttctttattgctttcccttttttttctttttgtagagttttggtttgtttttatctggtaaaagtttgattagtttttttttgttcaaaagaacttaagtattacttatgattagttaataataacgccatttgtttgtgtttggttagagacttcaattttcatatacaatctagtttaagttataatgcgctgtcaaattattttaattacaattgtttacagattagccaataaaaaattagagctcgattttggttccaaatagaacagtgaagactatttagttatgggaatttgtttaacggtagaagcgtaatagaacaatctaaaataaatgggtgaagaggacactgaaatgcagttactccattttacttaaattaaatatgtaaagagtgttgaatcacttgatcttttttaggaaaatttgatggcaattccatttctctggctgaattaaactgtattttttagttgtatttagattgatgtgcgctatttcttggatagatcttttttcttttgttctttctattttatcttatttgagaagcttggacttgttttctcatcatttattaattttaattatgagtaatattgatgtgcttttttagaaaaatagaggagtgataatttctaccattctcttttatcttatatatatatactatttctgcataactatctcatgctgttataatttcctatacagcatt

SEQ ID NO: 51138 - DNA, 1039 bp, Ricinus communis
  Intron number 2 from transcript 30138.m004033 (locus 30138 .t000207) derived from phytozome v7.0 (chr-ID 30138; pos 1 421389 to 1422427)
cctttgagaaattggagaaggttgtgcaatgtgtcttacttaatatatttgttgttttgtatatgcataaattttcattgcagtcttaaaaatttaatctttgtttttcttttaaaaaaagaaaaaagaaaaacagaaaactcaattgggtggatgtcattggtgcaaagatgggttttttgtcattttgctgttttgggtttgtttgtttcattttgtctgaatccttatcaaattatgatatcaggttaatgtgaattaagaagataatttctgttttttcccggaaaagtgcatgcttttttgttttcaggaaatgaaggaatgtggtcttattgcagttttctgatcactaagattgacattactggatttttcaacagattaagaatttctgagctttttttttggttgaagtgattgagagatttatcaagttattattcgtcgccatatatacttggacaaatgtatctttcctgtccttcatgataattctaattgatagttttctccacagttgtttccttcatggactgatttcattgttttctgacagtaggagatggtacatataaccacatttctattctttttgtacttcttgaagatactttcttccctctgtctgctcgtaacctggatttctcatgtataagattggaatcttactgcaattgtttactagcaagtttattctcatttatagctctgttaaaaaattttgaagaaaatctgcagcttctgctcttcgctttttatggatgtgggaaatttttgttgacaatattattctattattcgtaccctttttttgttttttctttttccttttgttgctgcaacaaagtattttgctctaagctattcgacttctgttttatacgttgtggtttttgcttcctaaaatttttcagtggttaatgttttgaacttttaacacagcttctgttacttgaactgtataatggactgagtgcagattttttcaattgtttttgtagataggacagggtacatatagcagtgtgtttcgagc

SEQ ID NO: 51139 - DNA, 494 bp, Ricinus communis
  Intron number 1 from transcript 29929.m004695 (locus 29929 .t000198) derived from phytozome v7.0 (chr-ID 29929; pos 1 175667 to 1176160)
ttcttccaagactgacaagcgtcttgttttcattggtctctctctctctctctctctaacattctgtgttgttattttctttccctttttaagtttcttatatttcatcaattactgaattttcttactttgcaatttctgttatccgttttcagtctatttagtaaaaaggagtgctctttttttttcttcttcttttcacctcgtgtgtaaatgggtcgttttcatattctctggactagcttttatgtttggatatttttagaatgtagtttagtgttaggaaagtcaaaaattcaattctatttaatcaattctcatgcttgaaaagcttatagttgctagaattcaatttttattttaacttaaaaaaaaaggcactttgagacaaaaattatgccaaaagtggcaatattttgcaagaattcaaaagacggactgggatggataaatttgcaggtccacctggctcaggaaagggtacacagtcacca

SEQ ID NO: 51140 - DNA, 492 bp, Ricinus communis
  Intron number 1 from transcript 29844.m003369 (locus 29844 .t000215) derived from phytozome v7.0 (chr-ID 29844; pos 1 244639 to 1245130 reverse strand)
tcggtgtttcaggtaatcgatcattttttttgcatttcgttttttgtcatttttacttagtcgtttttcatgtttatcgaagtttagtttaaagaaaagataaggttttaatgaacaagtttcacggaaggaaaaaggtcgcttgctctcccgccaaattgtggttccgaggttcagttgccgttaaaattaccatattgtcccctgctcttaaaatacgacacaaggatattttaggaaatacactgaccgttaacgagagttgccctctctctgtaaccgacggatttggggtgaattttattaagaatttaagcttcaaaattaagttgtttgtccataacgtttttttctctcgtcaatccatcagttaatttgattaatgttcagaaaaaagaaaacaaatttaatatgtattaattatatgaagattaatttaatgatgttaattaagtttgttgatgtaaatatgatgcagggggtgttacatct

SEQ ID NO: 51141 - DNA, 927 bp, Ricinus communis
  Intron number 2 from transcript 29822.m003463 (locus 29822 .t000138) derived from phytozome v7.0 (chr-ID 29822; pos 7 78043 to 778969 reverse strand)
agactcttgcctttgcctctatctgctcttttgtatatatatatatatatcatcaatttctaaatcctagaaatgtagagatagattgatggccacatgctttttagtcatggcattaaaaataattaatttaaataatcactctcattatttcagtcatttttttatatttaattagtactattcatataataactcattcactctataatcattttttatttattcattctttttattgatattcacatcttgcatcacatcagcataaattgttattttttgttgattcttttattcattttctaacgtaatttagatgggaagaaaaatttagattcaccgatagttaattattcgtttactagtcagttttattacatatatagtgtatattttataaaaagtcttttatcctctgtctgaaatggacttaaacctaattcaaatttaagctcatttttaatttattttatacttacctttaaaacatatattttgacataatattttactagttttccctaactaattattagaagcaaaagaaaatctcttaattaatagtattatttaagatttagttagtaactagtgcaattaggatagttagacaagtataccatacaacggtaactgggcttcaactatacttgtcatgtaacttatcccacatatataattgttttttggtttgtcaaaaaagaataaaagaggagcaactatagcaccccgtagccttagttgtccatctagcaagaagttttgttctcggaattcagttttgattgcaattaataacgttatggccatctcttctttttattttcattttcctaggaagtaatgcaaaagtttcaatatgcatggaattagtatcataatatgtaagctgattcattttgcatgtttttaatcttaaaggga

SEQ ID NO: 51142 - DNA, 801 bp, Ricinus communis
  Intron number 2 from transcript 30122.m000357 (locus 30122 .t000017) derived from phytozome v7.0 (chr-ID 30122; pos 3 95357 to 396157 reverse strand)
cagccctaacagaagcagctggtgcaattgttgatgtgagtttcttcttcttcttcttcttcttcttaattattggatttgtatgtatgaatttttatttggttgttaagataaaaggtgttgaaaaaaaggtcacctaattcgactatctgtagataaagtggtaagcatggttaaatttctcagtgtcaatagaattgcgtagaaaaaagaatggatttattcttttagagcttgtttgggatgaattatttgcaaaaattcaattgttgagttcttgcaaaaccatgtcatttaatttctttcaaaatgcccctctctttttttttctgagttgaaagaatttaattctagcaactatgagctttcctaacaaaagaactcacaaatagaattcaatcgaactttccacactcactcttacagactttgacatttgttagtgtaattctctgttctcgagttagactaaaaaagatgtatatttttaggtgtgaaaagatacacttatctaaagctagctgattcaaaatgactgaacatttcttgatacaaaactctattcaaaactcaagtaagcttccttctcaatctacttggggtgacctatatcaactccattacattcggtataggtttgcattcatatactgcttcatccttggaaaaaaaggaaagaagcttaggagggattttaacagattattttgtattttttttctttctgtctgcttaggttaaattattctttgccttcttcttttaacattatggtgattttgaacaggactcgtttacacg

SEQ ID NO: 51143 - DNA, 1009 bp, Ricinus communis
  Intron number 3 from transcript 29842.m003631 (locus 29842 .t000128) derived from phytozome v7.0 (chr-ID 29842; pos 6 44913 to 645921)
aatacgtgcgattggaaccttcaccttcggaaaatgtaagcttctctatgagattgctctcttatatgtggtttagacttagaccacaagcttatgttagtgccctgctggtgagattatatggttaaatgtttaggatccttataattttctatgggatttttgtacattaattcacatgctgcatgttgtaattacaaattttctggactattaccacctgtttgagtttcagacaaccttgctatactggaggttgtggattattctggtgctatgtgtcaatttggcatttctgataacgtttaagccatccgagtggcagtagcctgtcacagatgcctgtaaaagatctgcataaacaaatgaaaaccatacttgtaaaagcttacgatgggccaaatatctggagtttctttttgcatattatatggacgatccaatcggcaaggaccaaaggcctctaattctgcgaattgcaccaattccaattttaacttattagctacttgtttcagagctttaatttaagctgcagatctccggaaacagaaatacccatattaatagtgggcctgatttagcattggataaatttgtggataagaatatttttctatctgtaatggaaattacattagtgagaataggacgatttgaaatagcaatactgtatccagtttctccaaaatatcaagtgtagttctggtgccctcaaattataagtgtacaatgtgattaaatccaattttttcttctcatatgctttcatatcagaacagccaattctatagttgtatgtagcttttttgatacatttgccttccctggtttgggcagaaggtgggtcttggctcttgttttgttgatggattgctatatagagtagcaaagatgcttagaaagatatatttgacactaatatgtgcagtgagaatgtttttaattgagtatgcataaatggcagacatctaaaatgctaaaattgatcatttgcagagtgctcagc

SEQ ID NO: 51144 - DNA, 551 bp, Ricinus communis
  Intron number 1 from transcript 30064.m000505 (locus 30064 .t000027) derived from phytozome v7.0 (chr-ID 30064; pos 1 97295 to 197845 reverse strand)
acctgtgggtcccctcttccaagtgctatttctcggtgagtcttttttttttttttagttttagtttagtagaggtatctgttttaatgatatgtttggttatttttggaattggaataggaatagaaatggatgtttattctgagttcttttttggaataatagactaaattttagggacaatctaagaattacgtataagaatagatgccgtttcaatgtaaatcaagtaattcaaatatgagaacattggaaaagaatttggatacttttgctaataaagaatataatcctattttaagaattgcattccattttacaattatagtaaccaaacttggccttttcaacctagaatttttttatcacttagaagatctgatttatatttcatgtagttggtttattgctggtcctaaagacctcagagtcttaatgattgaataaattttcttggaagaaaggtttgttatgttttgtaattgaatatcattatgaccttatccctgtttgcaggtggcctgctatttccattctaagtacaagtcagg

SEQ ID NO: 51145 - DNA, 881 bp, Ricinus communis
  Intron number 1 from transcript 30059.m000474 (locus 30059 .t000020) derived from phytozome v7.0 (chr-ID 30059; pos 1 44195 to 145075)
ggtaagtttatctctttttatttcttcattattatcaccaggtcttttgttttccggatattgctgcaattccatatcaagcttgataaattctccagtttgagaataccaagctgattaatttcccttagttaattcttttctgggttttaatcagtaggttaattaatccacaaatcctgaacatttcaactatttttgggtcatttccactttctttctattccaggttgaaccgcaagcccccatgtgtttccatgatgatgctctggaatatatcccttttttgctttacagaattcgatttattccttctctttttttttttttttttactacctttttagtactaataatcttcttaaagtattcatgtatcgaaacaaccttgatttgtctgtctaaaaatttgctagccgtctatttacgtagacttcagatatcaaatctttatgcaattgttcctacctaaagatctacttttattagtttccttacaatatagaatcaattagactaataaaatccgtaatgattcattcatatcttcaaactagttgaattttaggattgagatacaactcgtgcactacataatgcaattttttttgaattttcattaaaatgctcatatatacaagactgatatatatattatttcgagttacataaatatctttagtccttaaaaagttattagctatttttttttaatatattacattcaatatcaaaagaatgatacatatttaaattattatatatccagtattaaaatgctatccactcagattaactaaaaatatctctaattctttactatttctaaatgatttttgtttgcagaaattccatcggaatctgcctccaacgccagtgtt

SEQ ID NO: 51146 - DNA, 560 bp, Ricinus communis
  Intron number 1 from transcript 29820.m001034 (locus 29820 .t000055) derived from phytozome v7.0 (chr-ID 29820; pos 3 29369 to 329928 reverse strand)
ggactccaggtcttcattttttcgcctgtctacatttttatgaataatcaatttttttgacttttcctgtattgttattattattattattattaaggcatagttatggtttaggggttatttatattttagtggatatacttttcaaccattaaaataaatattaactatgcaacttccattacactcttttcttcagaacttgaacagtccaattcactttttcgttttttggttcctgaattcaattatcttttgctggtttattttttgggtttttgatcttctcgctattcaattaaaagtaattgatacattctaaatttttatgtgcaatttcaattagttaaggttttaatcctgaaacaaacttggcaggatgattgtttacaagccatttataaatgtaacatttgaagtccattttactggattgttagaaactttataaaattggtaaaaaattgatatacagtccctcctgcaagcatatgataattaaccattctgttatgtgggtatgcgattaaattcctcattaattattggttgtttgcaga

SEQ ID NO: 51147 - DNA, 740 bp, Ricinus communis
  Intron number 1 from transcript 29970.m000988 (locus 29970 .t000017) derived from phytozome v7.0 (chr-ID 29970; pos 1 52911 to 153650 reverse strand)
ccttcatcatcgtcgcctttcctctcgtcggggtacactgctttcacttctacatatatattctaatgatctttatatatgtagttcaattttaatttgcttaacttctatactgagtagccctagatttggaaatcaaatgcaaaaatgtatgagttcgttccattagatgttgcacgtgcatatatgttttatttatatttttcttatgctgaacaatctaggccaaattagtagctcaaaaattagtgagttattattaactttaatgtttgaaattgcaatgaaattcttgaaattggatatttgtgattgttcatattcattggcttgagtaagctaaggtaaaaacgtggaaggttttacaaaaaagcatggaattttcacgaagtctaataagctatattatgtgacaatgaatgctttgttgtaattattttggcgggctaagaatttttactatttgagggttaaggaaggcgtttataaaaaccacagaagctcttactttacaaggatgagaagttaacgcactctatttaacaaaccagaatctctgcccatgtactattgtaactttgccatcatttataaaacctgatttcttcaatgcataactaccggatgcttttttctttttaatatatttatatcatttattaaattataacaatctttttgctgatgaatatgagcaaactatatgccactctctacatgtcaggtctcagcatccctag

SEQ ID NO: 51148 - DNA, 935 bp, Ricinus communis
  Intron number 1 from transcript 30024.m001689 (locus 30024 .t000006) derived from phytozome v7.0 (chr-ID 30024; pos 1 12615 to 113549 reverse strand)
ctgggaagtctgcattgaccaattatgtttgtttctttcgttcgttctcaaattgtaatttcttctttgtttaatagttatggtctttgatttataggtgatcttctcatatttgaaatgctctgtaaggaacttgcaaagttttgttgctttggggtttgctttcttttgaaatagatgatttttagtgataaatttatttgaaaataataagatgtaaagtcttgatactgttaagcttcatgcttgatagagtaaattaagaatctcagttttagctactttaatttcgctgcttgtttaatttagctcgaagtcgttagaagtttggtgggttatgatgtaatcagagaaattggtagtcctgtattgtgtttggcatttgatgcaggagcacaataagttttgcatctcatccggaaacgtgccccctcattgacattatttgattcagttgatgttttcagaatctggcgagattgtcagatattattcttgactttgtttctcttgttgtttgtattatattaagtgtaagattaaatctgtacatatttatggggtgacttgttcacctttgacctggacattcctttcctgtgtaggctgtttttagagcatgggagttcggatatgattctaagcagtgaattttgttatcaatttatacattgttctttgtggttagctatcgtatctctctagccattctgtatgacattcagagtaaaatatgtgcagaaaacacatagtattctattcaagtaggatagataatttctctatttgtgaagattttgcatgcttatatagcatttactggcctttcttagatgggccctttatgatatctagtgctgacctttttttttttttttttgttgtggttggaattacaaggttggaacaaaggtttctgctgtgtctcggaagac

SEQ ID NO: 51149 - DNA, 530 bp, Ricinus communis
  Intron number 5 from transcript 29848.m004663 (locus 29848 .t000219) derived from phytozome v7.0 (chr-ID 29848; pos 1 185631 to 1186160 reverse strand)
tatattgcagggtggcgattttgttaaacgagacggtatgtattccttgccaattttgttgtcatttattaatgtaaatactttgaatgattctaattgatttgtttggctcattttttatgttgcatggtgcctgaagttgagaattaagtacatagtgttgtcagtgactatcttaatttttgattgaagttatgagtgttgaataactattacatatactagataattcacaaaatcttaagtgaagaacagctatttaatgttaattttttttcttcaaaaatctttattctaaacaattgcaacttctaatatgagtaattgaattaactataatttatgtctgctcaagattcacaagtttcaacttttagctaaatgtgatgggttacctaaggcagtgttataatttaagtttgtcagtgatgaaattgttttttgatttcacaggtttttctacaataatcttaagttcatcgtcttgtttttccttttccattttgcagggactggtggagagagcattt

SEQ ID NO: 51150 - DNA, 838 bp, Ricinus communis
  Intron number 1 from transcript 29999.m000204 (locus 29999 .t000001) derived from phytozome v7.0 (chr-ID 29999; pos 1 0550 to 11387)
ttagaggtgcgtttcgagaatcattcttcttctgtagttttattgagtcgatttgatgatctttgtttatcttgttctcgtctctgttcatggatctacttgttttgtgtgtgtttggttcttggtgatgaacatgacgtggcatcgcatcgcgtcctgtactttgcgagatctgtgcttgtgttttccaatagaaaataattgattttttttttgtttatcaaatgtatgaaatggaggacataaatggcaatatcttgtttgttgcctttttggttctgtttgttatactggtgtaatacatgcacttcacctgttctgctttctgttacattttgtgtacacagatttagtgtgacttagtaatttttgtttttctacttattttggtcttttggcttgcatctttttaatgtatatatcaatatgagaaaactgaaattaatgcatactggaaaataattggtctctgtgttttgattttagttcttgaacatgtggaaagtaaacataaataatcatgttatgagaaatgttactgtgctgttgttgttaggttaagaatcatgagccaggaaacttgtatgagattgcccaataagatggttgattctcttgtaacaatgtattttgcgtgtttgatctaccaaaaaggggccctataaggccttcaattcgctttattgcttatcaattcttgaaaaacataaaatgagatctataaagagtttaagcgattgtgtttgatgtttcctataatatatgtctgatggttgccagtttatacttaaatgtaacagcatataaattgtgttcctgtggtttttaggttgcagat

SEQ ID NO: 51151 - DNA, 672 bp, Ricinus communis
  Intron number 2 from transcript 30128.m008823 (locus 30128 .t000284) derived from phytozome v7.0 (chr-ID 30128; pos 1 219244 to 1219915)
ttcccattgaggtccttaagtttgttgatcgcaaggtgagccctttgtaatttttgttaattatgagtcacattctatttatatgagatcgattaggtaccaaactcattcccccttgtttggaaagtgtataaatgcaattaaattctatttagtcaattctcctcttatttggaaattccatgattcatttcaatcaatgcaattgaattatacggggttctgttttatatcagtatatgtattgcaatgtcatggaaatggatatgatcatgtagaataatttttctgaatttgtacatcagccatgttgcttataactcgattattttttaattattgttgctctattcccgttttggaattttcaaaaatttcactgtttgagattaggacctacatggagtctgacttcataatcatgtttgatatttcaattactaaatctttcttgtgaagattgttaaggatcttgtgcgaccaaaggcctaaggtgctaggattagtttttatatctgatcttctgtttatatcacactggggatcctaactattgtgattgcttctattcggattgttcattctttcactaatgatgcactagctaattgaattgaatgtttctacctggttgcaggttgacgaatccgttacaaaactggatcgccgtgt

SEQ ID NO: 51152 - DNA, 501 bp, Ricinus communis
  Intron number 1 from transcript 29974.m000236 (locus 29974 .t000007) derived from phytozome v7.0 (chr-ID 29974; pos 5 4487 to 54987)
tccagaaccctcccttgaccaaagcccttttccaggtttctttaatttttcttttctaatttacttaattttctcttgcatacttattctcgttgcttatttttcatagaaggaatggactttttgttgcttttcttgtgatattatatgtacccttttgcattttttcagctttctatattttgaatttttctttttatttgttgctgctatgatatagggtgtaattagggttttaattgagggctttattccccagttctgaaaactcattctatgaatgaacatcaaaacttaagaaggcaataatgttgtttagcatttgccatttatgcagtaaaaaagttggagtatttttgagaaattgtaatagattgttatgtgcaataggatatgtgaccttcggacatggagaacttgttgtgccttattaattctcagattgttttttaactgactggatgtgacgttatctttttgtgttttgattaggcacagatt

SEQ ID NO: 51153 - DNA, 489 bp, Ricinus communis
  Intron number 1 from transcript 29836.m000589 (locus 29836 .t000036) derived from phytozome v7.0 (chr-ID 29836; pos 4 31303 to 431791 reverse strand)
aaacgacgccgcaattatacaaaaaggtcttgaaggtaatcctttaatattaatcttggtacttcttcaaggcaattgctttctcattctccgtcaattaaattaatcttttccttgctttgttaattgaggtatttatttaattttttcaatgaccttgtaattatttatatatatatatatatatatatatatatatatatatatatatatattatatgacttggcctgactctattttgataaatcttttattagggtaatatttttagagtttgaatttcttttgttctgggttggagtttggttttgataaatttgtgaaagttgaggtcttttaattaacaagtgtactttctggaatttaatgtttctgtttaaagatttggtattcatggtgatataagcttacttcttttttattttttattttttttaaacttgatttttgaagttagggtttgcataggagggtgtgctttttcgcta

SEQ ID NO: 51154 - DNA, 915 bp, Ricinus communis
  Intron number 1 from transcript 29904.m003058 (locus 29904 .t000172) derived from phytozome v7.0 (chr-ID 29904; pos 1 106916 to 1107830)
cggtgctcacagaataccttatattctcattggaggtagctcccttctatctccttttccttctttagattatcttggccatttcaaatatatcaagttttgcagtttttcaatttctatttcttttgtttacttaatcttgaattgttattttatagtttcaacgcatttatgaattaagcttattgttgcatcctctgttttaaattagtctcgatagctttcttggtttggtattgcccctgtattgatcttgcttcttaagattctgttcgtctatttccatgtccaaaccttgtgatgataggaattggtattggaaaataaaagttagctgcactgattcctcagaatagtgtgtgtatgttttttttctttgtcgattcctttgttgatgtttactggtattattgatgctcaagctgtaaaggtttgcttaagtcctaaaaagagaacttttatttggctttttcaaaaggttcacagtttatgtaacatggcagaacaaaaccaaggatttaaaattgtacatgatccaaatctagaaatagtgagaatgtgcagacttgggatttcttaaaagattttgtctacctatatcttcatcaatttcttagatcaatattatgctatcttccccttcttattcacgtttctgatgacttgatactcttttacttttgtgggtgaaaattatattttaaatagactacatagcatccattagggagataaggtactatatatgcaagtacaattttaagtacatgaagcttattgatctaagatctgaagttataaccagacaaagtcccttgttaattttcagagtccagctgatcaatcaaagtagtgaaaactgatagaaatcaattctcagtattgttgcaggtcctatcttggggtccattggct

SEQ ID NO: 51155 - DNA, 734 bp, Ricinus communis
  Intron number 1 from transcript 30072.m000986 (locus 30072 .t000060) derived from phytozome v7.0 (chr-ID 30072; pos 4 03319 to 404052 reverse strand)
ctcattcttagacttcatagattgcttggtaacaggtatatgaatatgctttcagtgtggggatagcttaattttgtttcttttaagatcgggtgttgttttataaaccatcttgcattcttattcttatctgctaccttctcttttattactttagggttcatcaatctaattcctctttctctctctatcgttatatacatgcatatgaggctatgggtgtgtataagattacaggtcctttctattttgtatgatttttgatcggttgcaactttagggttgtttctttatcgtattgctcccttttttatttgggccttcgataatctttctatcctttttttataccttaaccttctgaaaacatccaaagttcgagaattagttttcttggattcagtatcatctttcttgatatttgtgtcactggataggtatatatatatatatatatatatagatgggtaggtgatgttgtctaacatcttaggtgaagccatagacaaggaaaaaaactcattatgtgtaaatgagggagcttttgaatgtcaacttctgatctcctacacatataaattctacgggacaagcagataataataaaagatgcatctgctagtcttcattttgtcttgttttttgatgtttctagatttcaattaccaaagattagtaataatcaagagagttcgtatatgtggatctcagtttttgttttatttttctgtcag

SEQ ID NO: 51156 - DNA, 732 bp, Ricinus communis
  Intron number 2 from transcript 29830.m001389 (locus 29830 .t000006) derived from phytozome v7.0 (chr-ID 29830; pos 7 5913 to 76644)
tccttaagactatatttatacctctgtatcttcattttctttttaaaattaccaataagaaaaatgtaattcgaatttgcgatcattgttaattaaaatttatatttttttgtcggattcaataaaataatataaaaagtaaatattatatacacacatttacattaaccgtcggatgtttaaatagtaataaaatatacaaaatttaatgtctgatgtattgaaaatctgattgtccatatgaccaaaacttgaaaaatggattattacccaaatacatctacaaaaaaaaaaaaaaaaagtaattacatcaaataaactatttatatggccctcactaaccactaggccaagatctcaatcattataagaacacatacacacttggtcatcgggaaccaagtgctactcaaacaaacacttctttgctaacattctaaataatacttttttttaattaatgagaaaccaataaataatgggttatataaaataaaggtaattattccatgaaaaatttaatttgttataatatgcactcatattttttaataatatacattttcatctctcgccttaaatattgtttattatagtattagcagtgtatgaaattatttaaaaggataatttaacccataaactaaatggaaaaagttgtatatctcattaatttaccaacaataacggttaaaaggtttatcaatctctctttccttcaacgcttcaaaa

SEQ ID NO: 51157 - DNA, 133 bp, Ricinus communis
  Intron number 2 from transcript 29933.m001402 (locus 29933 .t000024) derived from phytozome v7.0 (chr-ID 29933; pos 1 46654 to 146786)
ctaagtaagctattttaatagttcctttaattgttcttgatttcgggctttattgtttttgctttggatgtcttctgagtggttaataatgttttttttttcctttcttttctataaatttgattaattgcag

SEQ ID NO: 51158 - DNA, 635 bp, Ricinus communis
  Intron number 1 from transcript 30027.m000823 (locus 30027 .t000016) derived from phytozome v7.0 (chr-ID 30027; pos 2 03059 to 203693 reverse strand)
tgcctgagttggttagtcttataacacctgcttcctgtgcttttcttttaccttttcttatttaattctttatgtatttaaatgctaagcattgccgatatatgtaataatccacttcattagctttgattgtttgaataaaatgaaatgcaaaatctggttaggatatgggattcctaaatgtggttaagattgtaaaatggtcttccatgtgttaaggaaaattttttttgtgcctatggaaagaaattaaaggtttaaaatcttgaagccacttgaaaaaactccttcactgagaaagtactacctaattactgagagattggattgccaggtcagtacctaattttcatgttcataattaggatgctaagtgagtgagagcgaatatcactgctgtatttcaacttaatcttgcttcataatttttctgtcctaatttattttacctattcccattgctagtcaagaagtataatttttttgctttttgattgatcctaatttgtatgtgctgctcaacttgctgcaagatagttatgagtaaattagaatttaaaatgattcatagtttaggcgacatttctttcaggattgtagtcattgtaacttaattttaatgtttctgcagtttg

SEQ ID NO: 51159 - DNA, 748 bp, Ricinus communis
  Intron number 2 from transcript 30138.m003862 (locus 30138 .t000036) derived from phytozome v7.0 (chr-ID 30138; pos 2 78339 to 279086 reverse strand)
acggagaaactgttctcaagcaggtattttgcataactaattacccattattagccaattgccttgtccatttgctcgtttatcttcatgtttcgtcttacgaacacactgtacaaatcaagatttagatttcgattgcaatcgcttttgggtcctcattgagaatgtcagaacttgcaaatttgagatttttaattgataaaactctgtattgaagattagaagctttctgctctaatggtgaatgtgagtctatcttaaagtaggcgctgggcttcaaatgtcagcaatgtcaaataacaatcctactccctcaaactccacttgctcggaataaatcccaggaagagttcaattgaatttgaattcctgcaaaatcatttcatttttaggcatgttttatttctttcaaaatgccttgtctttaaaacaattaaaattgaaagaattgaaatctagtacttgtggcctttccaaacacaagagctgactaaataaaattcaagttaattgaatccctgaaacttttagacttcttaaacagtatatattagaaaaataaaagaaaaacaaagaggaaaaccctctaatggatataagttgtttatgtggatactcataagaagatttgtggaaatgattttgttgatatagatgagaactgctcttctagttttctgttaagtgcttttcttctaatcaaattgctcttttaatacttagattgagttggaggatcctttggaga

SEQ ID NO: 51160 - DNA, 774 bp, Ricinus communis
  Intron number 2 from transcript 30008.m000788 (locus 30008 .t000004) derived from phytozome v7.0 (chr-ID 30008; pos 1 7183 to 17956)
aggaaagctgctcaagaacaggtaaataaatttgcttattctttttcttctcttttttttccctgcttagtgtgtttgatataaatgaattccaaacttgtcatatttggtttgatagaaaattcattagcaattctacattttcaactctacggagtttatcatgtttgatctaggttgtaccaaaattgatagaatttgcaaatgccttctaaaccatcaaggctgagaaattgactagactagagtactcttaattaaattgtttctttagttgaatttatttgtttttgaaatgaattccatattggatttgaaccaaacacaagttaatgttattgcttaatggaggaacagagttttgtttaggcatgaaaatgtaaatatgaatcgtgctcaaacagataaggatagcagttttaatagatgtgataatgattttgtaaatagtagaggtagacaggtgattgggaatgtgagaagcctaaccttctgagctgttttgtttttagctgtgttgacagcttgttcttgggctagatttcttaattcaaagctcctttttggcattgtttaaaaagaattaagttatgagtgtgtttgatgattagttagttgatgtattcaatcttgggtgcaatacaaatgcatgaattctatgttatgtatgcccacacagttaaacatgttaagtatttaagtaaaggaataactttacatttggttgttttgattatagagagaacttcttctgggtggtggagaagagtccac

SEQ ID NO: 51161 - DNA, 640 bp, Ricinus communis
  Intron number 2 from transcript 29986.m001586 (locus 29986 .t000002) derived from phytozome v7.0 (chr-ID 29986; pos 1 4865 to 15504 reverse strand)
tccgacagaggtctattagattatcattattaataatattattattatttcttttctgtttggcttttaattggttctactgcattggatgattggtttagttagtaaaatattataattttggattctttcttgaatgagaattttgatatttaaaaataaatttagataattagaggctaaatccatatgtataggaattttagttttcttaattatgctaatttcctattgatttatgtggcaattgattggaaattcatgtgaagtgaaaactcatcaaacaataattacttgtcttagagtaggctttggattctgtcgattggtctatattaaagtaagaacaatttcagacaacggaaaagtagtccctttggatcaaatttgaacacagatgttcagtttggtggaggagcatgtttccttgtactaataagagaaactggtagagttaatctctctacatgttggcttgtcgttttgtggagaaaagaaatgaagtctttgaaggtcaagctcttaagtcactgttcttatcttaaactcattactgagcatcaacatgttgtgccagctggaagccatcagcttgtaataatacttgctgaccatttagtctgtaacaggtacaaaccag

SEQ ID NO: 51162 - DNA, 673 bp, Ricinus communis
  Intron number 1 from transcript 29852.m002019 (locus 29852 .t000038) derived from phytozome v7.0 (chr-ID 29852; pos 1 365203 to 1365875)
ggagatatctggtgagatttgttttgtgctatttcgatctccaacacatattatagctcttatttttgtatttcaaagttcattttcttctctgattggcatagagttgtaggttaccttagttgtttccttttagcccaatctgcatatccttcttctgctcacatttcgaaaagaaccaagatatcgtgcacgttttatgttgtggccttaggcatgctttataagctcaaaaagtcaaaagtgcgtgttagcaaggtaaaccaaattttgtagtactgaaacaaatatgagctgcagtcattatatgctacaaacaaataggtattctaccaaagaatgattagtaaacgtcatatcattgttcaatatgcagaagttgttaattatttgatagatgtgtaatttaattttccaaaaagaaataaatgaagaaaatgaaaaaaaaaatgtatatttatttaaatattaagtgggatgctacttttatttttcctgaaaaaaaactaataactgcatttcttttatacaactataaatggggaggcagtaattcaaacatcattcttgtctaacaacaaatatatattttaggtcttttacatttcaaatactagcagtttttttcatataatcatggctgaattactgatgttgcaggggaggagaggca

SEQ ID NO: 51163 - DNA, 480 bp, Ricinus communis
  Intron number 4 from transcript 29844.m003340 (locus 29844 .t000186) derived from phytozome v7.0 (chr-ID 29844; pos 1 048436 to 1048915)
ctctctgttgctttgctcggatttcgctctcataggtataattttattggctgctcatttgcttcttattaggcctgcttgacaatgctgtgggaacctgcttttgatttttatattattattatttttttttttgctattcctttttttttaacctgcttttggagaaagcatgatgtattcagcttctcccaaaagtcagatataaaaaagcagtagcagttccaaattggcctttagtattttgtttgttgattgacattgtttagattgaggaaaatccatggaaaaattgtgttttatctataggtttggctactttgagtaatgggctttgtaaaagtaaattcaaagagatttctatgcatcctctttctcttcttagtttaaaacgcaaacgtcgagcttatataccaaccatctgagagcaaaatgataaatcttctgattataaattcccattttgtttgacttttgtag

SEQ ID NO: 51164 - DNA, 868 bp, Ricinus communis
  Intron number 2 from transcript 29929.m004545 (locus 29929 .t000048) derived from phytozome v7.0 (chr-ID 29929; pos 2 83398 to 284265)
ctggtagttggaagcaacagatagagcaatacgaggtaaggttttctaaattaaactaactaactttggggatcaaagtgagtttagactttaaaagctgctccattgacactgtctgtttggattaatttttttttttttgggcagcagtttgcactatataagccccttatgttttattacagagttctgagttctttttcctccaattgaatctgcttctatttcttacaatcaaagtctaatttatcttccagctttgcagccaataccactgcgctagctatttggatatctgaaaatttagaagtattttgcactttatactgtcaaaacctgtgttactaacagagtagcagaatattgtatgcctttatagttattgatggtagtggtatgtgtatgttatatacttccttcaataacacggttgtagtaatcttggtgcaattttatttcttgcgttttattttttaatcccttctttgagattattctccagttatatcctctgtactttgggcttttaaaacatggaaaaggctttaatctgaaaacaagaccttgtactgacctctattatgtattagtactacagaaatttggtcttgcttttgtggtatctatttagatattgaaatccagaaactatatgatggatgattgatgtaaattaaagtaagtttgatgttgttatttttatccataactagatttttgactatctgtttctgcatgggcaaatacttcaggttaccatgacagttttaatcaatgtgataggaagtagtataatttgcagttctgctgttgtgcagtatttgcaacatgcaataacgtattattattacattttcaggtacttgta

SEQ ID NO: 51165 - DNA, 799 bp, Ricinus communis
  Intron number 1 from transcript 29916.m000525 (locus 29916 .t000011) derived from phytozome v7.0 (chr-ID 29916; pos 1 08444 to 109242)
aagtttaccatcctgacaagtatcaggacttccatgtatgatcaaatttcatgttaattcgaagttcagtgattttaagtaattgattgtagttccgattttttttcctttaaagtttctttttgggcattgcttgggataaagactctttctgcagtttaattgaattgaactctcgcaaaaatattctctctctttttgttttctttcgaaacgctttatttattgtttcaaaagttgaaagatttgacctgtgctttccaaacacgggattgaaatgaattctttcttttctagactttccaagtgcatttttttatttttaatgccttgtttgggattaatcacatatcagcgttcaattgcattgaatttcttgcaaaatcatgtttgtttttgcgatggttatctgttttttttagttgatagaattgtatttagcaactgatgtactgactaatggatttggattcagttgaatttttgcatttttagatttcccaaacacactatttaggccaccttgtttggaagaaatcatgtataaaagttcagttgaatatagttctctcagaacgctttttttttttttttttttaatgttgaatgagttaaattctagcagcaatgcacttttcggatacgagaattgactaagttgaattcttgtccttttaggctggccaaacacattcttgattttggttctactctccatcattagtatttctttcttactacttttatctgatgctggtattcagttgaaggaaatagctactcagaattttcaaaggat

SEQ ID NO: 51166 - DNA, 471 bp, Ricinus communis
  Intron number 2 from transcript 29826.m000753 (locus 29826 .t000026) derived from phytozome v7.0 (chr-ID 29826; pos 4 65594 to 466064 reverse strand)
tgccagtggagaaaatttagaatcttcatcagtaggtaatacccaaaatttatgcttttgtaagtatttttgttttcttctaggtagatgatttactgggatgaaatttagagtcttcatcagtatttaatacccaatatgactatattgtttaatcttgaattgagggaacttattttttcgatgttttatgtgcaccgactgatattggtgtttcagaaatattatttaatagaagtgtttatacaattctaataggtgggagctgctagattggtgcagcattttgattcatcatttaaagttcaaacatgcctaaatttcaaatttttgcattttatagtgaatctctttctcttcttgttggagttatgatcgttcttttttttttttccctgttttaatgtctgtatctttgtttctcatttggatttaggtcaaggaacaagtgaggggaaaagggctttatac

SEQ ID NO: 51167 - DNA, 374 bp, Ricinus communis
  Intron number 1 from transcript 29991.m000632 (locus 29991 .t000014) derived from phytozome v7.0 (chr-ID 29991; pos 1 14154 to 114527)
agattgttaggttttccactagagatagtggagaggtattctttttgttatcaagatcattactttcagaattgtatttagtgtctaaacggaaatacattttataatattgacatgattgattaatttaggtatttattggataagagatgggtttttgaggtggtgatgtataatttgagttgtacgtatgatttctgttaattatgaagaaaaccattacttttagaccattgatttgatcggttagtttaaatattttatggttaatgcttaggtttttgaggtggtgtctgatataagtagtatgtttaatttttgtagtggtggattgtgattatctgagtggctttggcaggttggtcgaataccta

SEQ ID NO: 51168 - DNA, 732 bp, Ricinus communis
  Intron number 3 from transcript 29842.m003533 (locus 29842 .t000030) derived from phytozome v7.0 (chr-ID 29842; pos 1 69828 to 170559)
tacaaagactttacttacaccagagcgtgagataggtattaagagagttcttgcttgcttgattttaggacctgcattgcttagcaaaatgttctagctgttgaaactagtgtctacttatgatattaatttggtgagttaattgtttacctcgaaattcagatacttgattgcatttgttttggcttttttttttttatcatttgtcactgtatgttgtgaggatcaaatgttggaaagaattcttatacgttgggcttgaaaatctaaggctagtgaaactctatagtagaggactcctttgtgtccactgtttagtgaaactctgtttttccaattgtgctattatttagtaggaactcagtctatagccactaccatttgctaaagggatcttaactattgttcacaattgccactgtctgctatattcttatgctactaaagggccaacctaaaccaatttaagttctcttttcccacagatcgatgtggcttgcctaagtaaattttagtgtagttcagatccagtaataattgctttaaaaagctgatctttgcttaagagtaagaaagtttacatttttcttaattggtctgtgtcctgtcacatgtctcatattctgtattaaactcattttaaatatcattttaaatcttctgttgtcaatgtgtattatgtgacagttgaatgggttttttgattaattttatgatgttacataggacttc

SEQ ID NO: 51169 - DNA, 459 bp, Ricinus communis
  Intron number 1 from transcript 30059.m000465 (locus 30059 .t000011) derived from phytozome v7.0 (chr-ID 30059; pos 8 9148 to 89606 reverse strand)
tccagctattcggccagaagattatagtttggaaggtgactcaatttctggcttcctttttttttttttcagtttttgaattttgctttttcctgtctaatttatttattttttcttttacattcttgaatcttgaataagcaaagtagattgttgatataacaagaaatttaatgctgcatatgacaacggtttgatatacaatgtgtttaatattagagtgacgcaaaatgcagggcctagaagatgctcagttgctaaaacaataacaaaaaatgtctatagatctttcatgttgtgactcagacaatttcttttattattgtttcttggattatttataaaatatatgtatatatatatatatatatatatatatatatatatatataggtattgccacaaacgtgaagctattgctaaaactaatccaagaacacaacggagcaagcactatcg

SEQ ID NO: 51170 - DNA, 793 bp, Ricinus communis
  Intron number 3 from transcript 29908.m006240 (locus 29908 .t000291) derived from phytozome v7.0 (chr-ID 29908; pos 1 849398 to 1850190)
cttcaagagtggacctctttttatttcatccaaaggtgtgtttgcattaattatttatttatttttggtttctgtatacttaatcataaacagcaagattagaacatgcacatgtttaatgtttttgtaccaagtgttgaactaacaatggcatgattcctggttcatgctaatatatatctggttgtaaatgttgtatttcaagcattcctctttgttattttttctgcaatgcaatatcactgacataaatatattatagacaaaggaagaaggtagagttggaacttactttattttaaagacgcatgtcatgtgaattttgataagaccttacatatatacatgcatacaaaaagatatcttggttgcttttctgttttagcatatgtgtggattttaaaggctttcttttcttttaaatttagaaagcagggccagatcttcttattgtgtagaaagcaataatcaaattcattgaaaggttaggtatcaatatggcatgtgactttctagcaatctgctaacatttagaatctctcgtggacctttcttgtcttctaatgctgatgtgaatttttctttttttgaaaaatagataaaacatattgttatctctttgggactcatctgagtgtagtcatccatattatttgagttccttaaactattcctcactacctgtttatttgtaatttgaacacttaaggtgtctctcatccttaatgcaaggacggcagcatactctgaaataaattctttgattttgtcgtgtaggaattggttggacgtc

SEQ ID NO: 51171 - DNA, 888 bp, Ricinus communis
  Intron number 1 from transcript 30042.m000479 (locus 30042 .t000017) derived from phytozome v7.0 (chr-ID 30042; pos 1 58205 to 159092)
tccattccatattgcagcaaagcagggtcatctgggtaaggctcaatctaattttgcagatttttaccattttctcttttgtattctttggtgaagcgccaaaatgtgactgttccatagcaattatgaaacacttgaaaggtggaaatgactttattgttcgcatggaaacttttcctatgagctcagatgtcttcaatcaagtggtttataaaaacatgatacaaggctatgggatttgctcttacttcctagcctgtatttgatgatgcaaaggcatggaatttttttggcccttatgctcatgaatttctctagattctggaatccaaaatgcctcctacagtataattagggatatggctagcttcaagtttctttctctctccagttatcattgattctctcaagttaattcttttttcctatgtttcttaaactccatttagttatatgttgaagatcgctggagtaaatagtagttttatctgtcatatcatattgctttagagttctgtactcttgtttattgatgaaagtcgaagcaactttaggaaaatccaataacagacagtgttccccattgacacagtcaccatcatggttgaccacatgaattgttttcttccatttccccttttaatcatctctgtaaaatgtcactataatcttatgccgactgacaacctactgcaaccatgttctctattggggcatgggtttcataattatttaataattaagcaaccaattggcaggtttcatctcccttcccctctttctatctgcaattcaagattaagtgtgctacttcttgaaaatttttatttgattttggccatcacttctgatttcatttttcaactttaaatctcgcagaggtgttga

SEQ ID NO: 51172 - DNA, 570 bp, Ricinus communis
  Intron number 1 from transcript 29844.m003253 (locus 29844 .t000099) derived from phytozome v7.0 (chr-ID 29844; pos 6 50925 to 651494)
actctctcatctctctttctctactttccgcttaggtcaatgttcttcttcctcctttatgtacaagtgctagattataagtgttacacgtaatgatttaaatgggtttcttaattcttctgggatccattaatcactttctctaatttaaatttcgagttgatttcttgtttctgatattggatgaatacattatgaatgttcatgcttttaatttttgttcacatacaatgggtttttacctgtaattctaaatgttgaagctgttgtttttatcagtcaattgaatgagagaagcaggttttgatttctttctgttcacaattttgatttctttctgttcacaattttgatttcttcttgttgtatactacatgggtttgcttatgggttgtggttattgtgaattatagtatcttcagttactacatttgtgattttacccataaagagtccaagactttaaacaagcacttacttttgataaattcgtttttctgtgtgtgttgagcatgcttacaatttgctgaactagtggattatttggttatctctgttttgtggttagtg

SEQ ID NO: 51173 - DNA, 441 bp, Ricinus communis
  Intron number 1 from transcript 30128.m008762 (locus 30128 .t000223) derived from phytozome v7.0 (chr-ID 30128; pos 8 74726 to 875166)
catttccttactttcttctccagtgcactgtggtattctccctttcctatgtagtttatggcttctaattttctagttatgtatacaagaatgtaacatgaacctccttttttttggtttcgaacttcttttcatgcccaaaaattcagttgttagtttaatctagtattttgatttacttcattcttttgtatgtttctaactatataatatcttttttcttttcataaatatattagttgcattactcttaaattctaagaggagacttttggtcacgcactgcaaaattttattaaatgtttaaccatttacattgtatagcttgataattctgtgtgtgttccgaatactaagtttggacaattcctgacagtcgtgttctttaatgatgtctatttatatattttttgataatttatgtataattttaatttacag

SEQ ID NO: 51174 - DNA, 338 bp, Ricinus communis
  Intron number 3 from transcript 30074.m001373 (locus 30074 .t000040) derived from phytozome v7.0 (chr-ID 30074; pos 2 98126 to 298463)
aggcctgtgctgctgtcaaagggactcagattgtctgtgcataatttttttcactttgatttcagattttgaaattaacggcctttgtttgggatatatggtgtcaatgcttgcaaatcatgacagttttgaataagttgaaagaatttgaagaattgcactcttgcttttctactttccaaacaagtggcgtaattcatgactagaagacttggcagcagaattcatgtgaaagtcagccttcaaaaagaaatttaaagaaaaaacaaattatttttctgcatttttatacccctttcgggtccttgtcttatcaggtagagaatttgttctataac

SEQ ID NO: 51175 - DNA, 620 bp, Ricinus communis
  Intron number 1 from transcript 29842.m003703 (locus 29842 .t000200) derived from phytozome v7.0 (chr-ID 29842; pos 1 000190 to 1000809 reverse strand)
acctatctaaatactctagctactgtactgggcaggttagtgttatctcttcttatttttctcttaatgatgggctttgcttttttttttttttttttttaaaggttttgattttttacttgatataatttactgggcattttctttgactaaatggtggagaattgggcatttcttgaccaattggtcctttatctctatttgcttgaagtgtgtgtgtttgtgtatataatggtgtttgatgctaaaggtttgatttttaatcgatgggatttattggctattttgcttgaattatgataattgggtatttctttatgttctatttattcttggaaatgtatgggaggtgataggatttggagtgcttaattatttttcctgaataaaatttttctcttatactcaaattaagcatttacgcagctcccttatggtcttaaattgctgcgacattctttggtttctttttcctccaagaaaagatagacttttgtgttagatagaggggctttgtgatctgtgaatctatacttcgctatttcattaaaaatagtgactttattttttgctcctaaagttcattacaaaattatcttgtactccacttgtatatcagc

SEQ ID NO: 51176 - DNA, 663 bp, Ricinus communis
  Intron number 1 from transcript 29842.m003510 (locus 29842 .t000007) derived from phytozome v7.0 (chr-ID 29842; pos 5 6844 to 57506 reverse strand)
ccacattgcaacgtgtgtaagtttcactccctcgttgcatgatcttcaacactatttagctatatgcaaacttttcctcacttctgttattctccagcaactattagtcttgaggatgattcatctcaaacttaagaatcatattgcaataagtagttataatcataatcttcatatgatcctataatgctgggtgcatgtgttgcttgattttcatcttgtgaaggatcttttcaagttttctccctatatactctgaagaagatggtgaccatgattgtcttttcatccgtaggtcaaattcttaaaaagaatgagctagagaaaaattaaagaagaaaagaaaattcgtacagtcaaattgcaccctcgtctacatccatcttgctaactatcctcaataaactgctaacaaagtttatttgcatgtctattgcatttgatttacctatcttcataactgacactggccccttgcactcttttaaaaaatcagaaatctagtgttttctctttttctttctgtaagcccgaaaagagctaggattagcatacagcggctattgcatagatattgatattctctggattatctttttgttgttgagattcattcaagacgatgatggtgattttaacttatttccaggcaacagcagagtg

SEQ ID NO: 51177 - DNA, 532 bp, Ricinus communis
  Intron number 1 from transcript 29916.m000515 (locus 29916 .t000001) derived from phytozome v7.0 (chr-ID 29916; pos 2 355 to 2886)
atcgttaccttaggcgagacaattagaataggaaggtaaaatcttaaatatataaccgattatcataattatatttttcttcttctggctatataatagaaaaagccatgttgagatctaagagtgtatatatgagatagtaaaggtttcttatagcttaattaaagtgacgaatttgaattttgagtatgcatctgctttaaaactcttgaaataatgttttgctatccgtaaagatctattcgctacgctctagattaactctaaatgtatgttaccaaaaaaacaaaagctacatttatacatatgagtttatctcatagtttacattgcatagtagatgagtcattaacatattcattaattagttttagataattgagttgcttatcaatttattatttaatacccaattataaaacacacgggccacggaatactcatatattcattatggcatatagtaggtcttaccccttctttattagtgtctaaatgctggagttcctgtttatgctgcagcctcgctggt

SEQ ID NO: 51178 - DNA, 568 bp, Ricinus communis
  Intron number 3 from transcript 30063.m001405 (locus 30063 .t000009) derived from phytozome v7.0 (chr-ID 30063; pos 1 10190 to 110757 reverse strand)
aattgtacacaattcctgaacatcttaaagtatactatccctcaagattttttttttttcctattacttatgatgttgtagtagagttgctgcctgctattcttgtttcgatcttatgaagagaagacaagttaccaatatggtgttaggtatttgcactggataatggatgccgagtaacaaaataactaaatttgaagcattttctgtttctactcttcgctgaacagatgcgcctagtttatatgtggctccattttaatgtaggtctctttgcagtctgctgcattgtccttctcgagttcatttgcaaacttttatgtgtacaagtgatgggaaactttttctttctgttcctccatgtgtgttctttctccaagtctatgcttctgtgtctgtgttcttttaagtattaatttttttgtttctttgatgctgggtgtttaggcgctgaagactttctgccattttctttctttaacatttattatgtctttcaattgattccttcacctttttatttgtcttctcaggtgaaaaggagaaactcggaagaaagctctaccca

SEQ ID NO: 51179 - DNA, 520 bp, Ricinus communis
  Intron number 2 from transcript 29848.m004550 (locus 29848 .t000106) derived from phytozome v7.0 (chr-ID 29848; pos 6 03080 to 603599)
ttgacgactccaatagttactgggtaattctacttttttttttatcactttaaatgttgcttctatatattttgggaagtcttttttttttttttttttttacatttttatcagtaatttgcttcaaagcatgtgtgcttcattaggaagcaagtagtggtgtgtagcttcttggagagctgtaatttgtaagccatgattggttctttctttatcatactaattagtcagcccgtaccgagtttataattgcttggtgacaaaactcctatttaatctttcttgaacatattttggattctgaaagtctcaagttctggttttttcttttccttttgtataatttgatttcatactgctgaaatttgctgtttactacattttcatataaatgctcctttgtgtttatgcaaaaatgcattggttgtcatttaagaactgtagactttttttacttgtacttaatatgggatttattcttgtagattgttaggcctcagccagacacgggtgccaaaca

SEQ ID NO: 51180 - DNA, 433 bp, Ricinus communis
  Intron number 1 from transcript 29864.m001465 (locus 29864 .t000041) derived from phytozome v7.0 (chr-ID 29864; pos 6 12755 to 613187)
ggtgtgtttcacgttttaaatttctgttcttttctccgtcgtctgcttcaatttcataattgattatcttaatttcaaaatctttacattatataataatcccctaatgtgctttagttgacaacttggttatctgctagatttgcgttttcaatttcctgcgatcataatgattccaattgtttttccttatgattaatttgtttatttatcaatcacgccggctgttgtttttatctttattttgattgtgtgccactataacacagctcattgttactctagcttgaatttaataattctttatgcaatgtagaagctttagaaaaatatttccttgagctttttatattatagtttagtgtgtgcagggcccaaatttaattagtgcttatctgctatgccctttttttttaattgcagtcaagtttat

SEQ ID NO: 51181 - DNA, 746 bp, Ricinus communis
  Intron number 3 from transcript 30147.m013956 (locus 30147 .t000227) derived from phytozome v7.0 (chr-ID 30147; pos 3 627148 to 3627893 reverse strand)
caaacaaatattgggtcgaaagctcccataaaagggtaagtatggataacggtcatatagaatttagctgagaattaattctgtgaactataagaagctatggctttaacttctctcatccgaattgcattattgcatttcttttcagaccttttttgtcaatctaaccatgagaataactgcatgctacacaaatgctccttttcttttttggcgtttggggggatgttttcctgattgaaatattatcagtatgttactagagcagataagtcggattttattccagcaaagtcctctctgtcctcctatattttcatgtactctagtcatgtcgagtagattgcccttggtttttgctgcaaatagaaatttcccgcaacaaaggtgcacattcacaatctttggttgcacaaacttttatttaatagtaatcttagatttctatttaataattcagcagttaacactagtgaagtgctcaaccatgatgatcgattctttatatttatcaataaaaatactttatagtttgttttaacgtttatttaatggttttttttttctataattttctttttctggtgttcttgtttctctaatttgcttgagaggaaaatttaagattggatactagtgctcatcttgttttatttgtcccatcgattttgatatttttatttcatggttaataaggtaatggatttccttgcatgtaatgctctatctgattgcttgtgcagtac

SEQ ID NO: 51182 - DNA, 557 bp, Ricinus communis
  Intron number 2 from transcript 30147.m013956 (locus 30147 .t000227) derived from phytozome v7.0 (chr-ID 30147; pos 3 627939 to 3628495 reverse strand)
accagactatcaagcttggtggcggcctccgtcaggttactatgttagggttttgatttttacttcttatttctttctttattgattttatgctttaattattatttttctagaaaaggatgttccgaaagtgtgcgtgtttttttctttttaatgttgggaaccccttaggattttccttttttcatggaatttatttaaacagattaattgattgtgtcaataactgaagactatattatgcgcaagagctactgtctctcttttttctttttcctttttttttttttcctttcaaagatgggagctaatgcttggctaaatagcgacgagcgcaatgcctattggcttttggtttgagtaaactagtcctagattcatggttaatgttttatttagtaaaaacttctgattgattcttactgtgtttaaatccatctgaattttactatgaaggtactaagtgcagtcacccaaagtgaataaatagaaaacatcactgtttaattttatgagaagatattgatatttgttttgggtgattttctaggattgtg

SEQ ID NO: 51183 - DNA, 665 bp, Ricinus communis
  Intron number 1 from transcript 29904.m003055 (locus 29904 .t000169) derived from phytozome v7.0 (chr-ID 29904; pos 1 098090 to 1098754 reverse strand)
ctctggctttgttggttctcacgagcttgaaggaggttctctaatttaatctttctttctatgtggttaatgagaaaatggaattatggtttggtaattgaaaagttgggaacttggtcagtttggactaactgaaagagtgttttcaatttttgtttcgttttttttttttttgcttacacatttttaccatggacgcagctatacattgtgtgttttacagttattatgaatgaatgatactttgatcaataaaccatttcgcctttcttactttgataacgacatgggtgaagtccttaatcgactggacaattaaggaaaacaaacgcaaagcatagaaacgagaagatacaagactcataagacctctgttttatcttgcttaagcttttgaagcttttcattgaattcaaactaaaccaaagtgtttgttgctgagaagttatttgttcaatcgtaacttttatcagaaagcaaatggtatctaactttgattgcagttttctcattgcaattggtatgctgaatttctttaaacagatgattcttatgtttagagttgttctgtgtctctatttatatatatatatagctttggcctgaatttttttcctttatccaatactgatgatatgtaggttttctttcactggaagaaattg

SEQ ID NO: 51184 - DNA, 257 bp, Ricinus communis
  Intron number 1 from transcript 30040.m000275 (locus 30040 .t000015) derived from phytozome v7.0 (chr-ID 30040; pos 1 05356 to 105612)
ttggataatatcaagcctgtcaaaatctctgatcccttcactaacaccagtctcaaacatatcctttttttttttcttctataattagtatagtttgattaattttgaattttttgctgtttattattattgttgttaattttattctattgctttttgtttggttttcttgactggttgttactgtacctgagtaaccctagagtgtatgagcctttgaaggaaagttcgagaaccaagcataagcgtttacttcc

SEQ ID NO: 51185 - DNA, 675 bp, Ricinus communis
  Intron number 1 from transcript 30114.m000520 (locus 30114 .t000018) derived from phytozome v7.0 (chr-ID 30114; pos 1 20198 to 120872)
acaagcgatccaagcaatcgcaaactgttcaacaggtaaactcgattccgcgcaattcaattaatcagatcaagctctgtcaaaattttaaattattaaaacttaaatagctgtgggctttttcttgtctaaaaatttcttttgttggctgcaaaatattggtttatgctatggtgaaggttgctttgggatttcttatttgttggttcataaattgtgttataaattagggttaattataaatccccacctttgtggttcgccataatgtacgatttaatcccttctgttaacggaatttgcatttttaggttcgtagtattatttttgataaaaatatgtatgattttgagggactaaaatgttgtacaacataaagagttgaggactaagttgcaattatttttatcattttcagggactaaaagtatagtcaacttccaagtgataaggactaaagtttgatgaaattttatttaggtctttataagcaaggactaaagtgtagagttgctatcaatattagggactaaatctgcttattttgaaacagcagggagtgaaatatgtgttatggaaaacctgaggggtgtcttagtaattgatgccagttgcttagaattttgattaattgtttgtgttgataattttcttagcagtggggtgcgggtgcta

SEQ ID NO: 51186 - DNA, 761 bp, Ricinus communis
  Intron number 1 from transcript 30040.m000266 (locus 30040 .t000006) derived from phytozome v7.0 (chr-ID 30040; pos 5 3555 to 54315 reverse strand)
ggggaaatttatcttctctgcttcaggtgagtagaagttctcaactttgacgttgatttatctgttttttttttttttttatttccgggttttaagagtttgacttgtttccaattagatttagtgttgtaccctgtggaaatatctgaggttatgctataatagcttgttgagatttagcaatctatgacattagactccaaattaatttttctctttaattgcgcctcctcagttgagctacattgagtaaaagttctcgactgtagtatctcgtgtgtgctgagatgcaattctgaatttggatgcattttaaatgagatgcctaagaattcagaccaagtgctttggatgggtaatccatgctaggtttatttgtcttccttctttgcctcaaattctgaagtgctttggtactgaaattgaagactaataacacaaactcgcttgtgtagcttctgctcaactaatgcccagtgtttaggcactcatatatctgtgagataaagcgcaattataaggaataaattgctgtaggttttgaaactcatatcagattatttatttccccataccactgttaatagtaatacataatacaagattgaattgatagatactgatggagtttgttgtataaccttattacatcttctccatctatgttgactggcttgttttgtgatttttgctatgaatagatatgtttaacattgcatattgcagatttacttgtaggcttgtttatccacaaaattttg

SEQ ID NO: 51187 - DNA, 596 bp, Ricinus communis
  Intron number 2 from transcript 29841.m002903 (locus 29841 .t000167) derived from phytozome v7.0 (chr-ID 29841; pos 1 056400 to 1056995 reverse strand)
ttcgtaccagttctatttgcaggtagctttttctttcctttatttgtttgtcttctgtttttctgataatatttttagaatggacgatgatctggaatcttgtggtgcttaactttagtaaaaggatgtttcttttttggttaattatttcctgctgttgttgactattattagtatactcaactttgtgttgttttgttatttttgtctatgtttatgatttgggcttttcctggatttgcagtgtaatcaatgttcaattttactttttttgggaatatagaaagatacatatttgctttatttatctcattaattgacacttcttccctcaagttctgattaggaactggattccgaatttcttttacttatgattattaacaatattttgaattccactattttcatgtttgtatgtaatttctttttctattaatttatcaccaaattggctttgaactctcactggtcctgtttgattattattttcagtgactggaaaatacatgttttgacgttctttgtttctctttctttatttttcttttcaactcctaggaaattggagaaagaattaccaggtggaaggactc

SEQ ID NO: 51188 - DNA, 418 bp, Ricinus communis
  Intron number 2 from transcript 29822.m003395 (locus 29822 .t000070) derived from phytozome v7.0 (chr-ID 29822; pos 3 73403 to 373820)
aggttgcatctagtgaagaggaaatcatccgagaggtaattgggaacaataagtttcttttcttttgcttaataacagttaagagctgaatgactccttctgttagatttactatctgccgaatttatttatcatatgaccaagtattgacatctcctaaaatttgaagatgactacatcttgtgactgaaaaacagtaagccaccatataagctagcctgcctgccaccaataacaagtatggttttctttaatattctcacttctcgaatcgattcataccttcataacaggaaatgtctagcaaaactggtcaggagaacttatttatcttcttcgtaattaatattagctctgccaagcactaaagttaaccaaaattatttgagttggttgaacttgattttgcattatcaga

SEQ ID NO: 51189 - DNA, 743 bp, Ricinus communis
  Intron number 2 from transcript 30115.m001196 (locus 30115 .t000022) derived from phytozome v7.0 (chr-ID 30115; pos 1 54490 to 155232 reverse strand)
aagaaggtaaatttagtttatatcattacccctgatcatgtttaagaaattaaactcttttcagcttgagcacttgagaaattaatcgcgcagctaaatcaaaaaaaatatttcataactcgatcattgttaccacaggaaatctttaagtaaaatctgtctgtctgtttatctctctctctctctctctctctctctctctctctctatatatatatatatatatatatataataaaaacaaatcacatattaattagtactatcatatcacttcaattagttaaacctaacgtacccataaagcatgtttactgttcaactttcttacaacgtgcagtagtacacattctaattcaaagtgggaaaaaaatgacgagaacataatattcctgaaaacagctagctagcgatcgcaaggttacgtcattattgtacaacatataacgttcatattaacatatactttttctcggcaatcaaataacgttcagattataattaaaattaaaattgaataattaatgtaaaattaattaatattttattatcaaatcgaaatttaattatttatgtatttacctttagttttcatttgaaattacactgtccgataaagaaaatggtataaagaaaatacatcgatgttctattttcttccaattattctccaagtgttatatagtcgttgttgctgatcattagttcccaaaccaatttttgtatcaatgcagttcgcttttg

SEQ ID NO: 51190 - DNA, 434 bp, Ricinus communis
  Intron number 1 from transcript 29968.m000653 (locus 29968 .t000022) derived from phytozome v7.0 (chr-ID 29968; pos 1 81898 to 182331 reverse strand)
ttcattacaacaagaacccatctgcaattgaccaggtttgcgcccctttcttggtccttgaaacctttatctcttattttctttgaattcttgttgttgttaaggttctgactaattgctgagaaatggtggaagaataaaaaaagggaaagtaatttctaaacgctatttgagtatttatgcttgttttttttcttcttccaaacaaaatgaagaggaaaataaatgaaaaatgaattcggaagtttttaggtgctgctaatttgttttcaagatgtaatttggtggttgacttggtcaaatattcgcaaaggactagttttatttgatgatccatgtcttttttgttctttatttctgatgtgaatgttgcaattgtgattcttgaaaaatatgtaggaaacatttgctgaatacactgctagaacatcatt

SEQ ID NO: 51191 - DNA, 743 bp, Ricinus communis
  Intron number 2 from transcript 29827.m002632 (locus 29827 .t000105) derived from phytozome v7.0 (chr-ID 29827; pos 5 78954 to 579696)
cctcctttccaattaagggaaaccctaaagaatacgtcaatctccatattctccactgtttttgttttacctattctttcttttgtttagatattttgatttttccttttccttctccttttctactccattcgttttgaagactgcacgatcagaaaagactgtcctgatatatatgacagatttccttggtgagtcggacttggcttttgcaagatgaaaccatgtaactcaaggacaggtatggaatcttttgctatagtaacgcctacatcaaaagctcagctatgcaacttgcaagccggtctggactaacaggtccagggaagtgtttccgaataaacatagtgagctcaccaaagtcggtagaagaatggcggagttcccactcgatcccatgtttaaagcaaaactaaagtgattgttgcttctgacgagtataaatgtctagatgcgatcatttctattgctgctatgctttctatttggaaattcaatattctatcgtccaaaggataaataacttggtgcagatctcttctcaagatctgtaattcttggaaggaatctaaccactcaacgcaatgatataatgaaaaaattatattcaggtataatacgagatcaattggaggccttctggaaagggttgaaattggggtgatatccaatcccaatgatttagatgccataaagaagttcataaagtctggctttttcctcaagctgcaaggctaccaaca

SEQ ID NO: 51192 - DNA, 263 bp, Ricinus communis
  Intron number 1 from transcript 30072.m000981 (locus 30072 .t000055) derived from phytozome v7.0 (chr-ID 30072; pos 3 60746 to 361008)
aagaaatattttattggtgagcctatcattcttgccttttttcttcttacttgatccattttgggttttaacttcaactcgaaactttgaatttgtagtcactgaaatcattggtatcgtttttatttttctttttctttttttttttttttttttgttttgttttccttttcatttggaacttacaaaatttaagtgtctttttccttttggttctgtttgtggcagggagtgtactgagcggaggagggagtgttccagct

SEQ ID NO: 51193 - DNA, 859 bp, Ricinus communis
  Intron number 2 from transcript 30131.m007163 (locus 30131 .t000314) derived from phytozome v7.0 (chr-ID 30131; pos 1 958764 to 1959622 reverse strand)
ctgttgatctgagcacaagtaagtattgttaaacccaacttcttaaggaaagatggatcaggcttggtttattctttcacattctgtcgtcagataggtttagaactaaaattatccacttatatcttcttgtctcttttatattttttttatagagcttttaagcattgttcctcatgctcagataatccaccatatattggtactaatgcaataatgtagctagctattcggatcattatcataatgattgtttgatctcatcttgtgtactagttggagagaacaatattcttgtcataaaaaaagaggatgtgagatgtaggacattgcaggggtgtcactgcctcatagttgtcttgtccagtttttgaggggttagcccccttctataattaaaagaaaagagaaaaaaagattaaatatgcagaaagtattaaacttgagaagcttacacccttcagtttcacttctcagttatcctcctttatttcattaattttaatcatattcctcactgcaattatgtcaattgtttgacaggatgagtaatttatctagaagagggtaaatgagcaagtaatactgaagttgttgaaaaatcactaattaaccattaatcttggacaatttgaatggttatttttttaagagtagaagttgcaatgagtccaaagatagccatgatgaatactcaattcaactcaacctaagtcttcatgacttaatcccatgacaaatctgtcacaaagtagtactgtaattagattgaagagttctgttctacagctgcaaaggttcttacaagacttctgaaattgcagataccgtgttcaattcagctaaagcaaataaccaa

SEQ ID NO: 51194 - DNA, 379 bp, Ricinus communis
  Intron number 4 from transcript 29848.m004446 (locus 29848 .t000002) derived from phytozome v7.0 (chr-ID 29848; pos 1 5370 to 15748 reverse strand)
gggcattggctgagcgtcttgctaggtacaactttctttggaattgtcttgaaggatgtaaaatttagaatgctttacctagttgcaaatgaccgacaatgttatatctatcaactgtattagaaaatgttaatgccaaaatagagactgagaaacaagctgttcattgttatttattttcttaagtagattttaacactaatcagctagcagccctgtggatgaatccctttgcacattatatgagtggcattttgctgcttgcaatccagttgtaagactgcaaatgaagtattagtggttatggttcttgaacattgagcttatacaatcatttgattttattattgtatttcttttcaatagggattctgacaag

SEQ ID NO: 51195 - DNA, 1029 bp, Ricinus communis
  Intron number 1 from transcript 30128.m008722 (locus 30128 .t000183) derived from phytozome v7.0 (chr-ID 30128; pos 6 76423 to 677451 reverse strand)
cattggatttgcattgcctatactgcttttgacaggttagcaccattctattgtatgaagtgaggcttatatgcataatgatatggtgtttaagttagagatttctatttatgtatttgtgtgaagtcacagccttgtaaagcagagagatgaaggcaaaaatatttattcaggaattcctcctcattctgtttgattgaacgatgatcattgtgggactatgaatgcagcataataaacttgaatttctaatataatctttagctcttttctatagatagtgattgttgttgtgattatgctaagtgcttagactgtaaacttctgcaccagctataaccctttctcttttcctctattctttgctctgtttatccagctgctctagtcaattggagtttgatgtctctggccgatttgttagcctttctcttcatacagtattctgcaccaaaaattggtacagtgttcatcttatacttgatgccttaattatctcttggcttattttgtattataattaatgcttcccaacataaatttattttcccccatatttgctagataaggttttcacttttatattcaactttgattattcattaaagaattgttgctgtaagatgtgaatggcaggaatatgcatgtctgcgttgttacatctggctttctataggtgcatggaactgctagaaagcagcctttgagttccatctatttttcatcttgaagctatattcaaagaaagcaaccttaaataaaatcgtgcattaaaaacttctgcatgctctttgtttctcttttaaaatattccaactctgtttgtgtaccattcagttgaaggaaaagcttaataattaggtccgaaatgagaagtaagaatgtactcttgcagtaaaggcatatcaaacttgagaacctatataatgtgatttgctatctattgttggtattttatatttctaaatcttgtctttttttttgggtgcatctgataggctttcatcatcaaagacaatctctactatc

SEQ ID NO: 51196 - DNA, 485 bp, Ricinus communis
  Intron number 1 from transcript 30140.m000571 (locus 30140 .t000006) derived from phytozome v7.0 (chr-ID 30140; pos 4 00220 to 400704)
aagtcactgtccctgctcaatccactttcggtaattaattaattgccctattgaaaactctgtttgcaatttttctatttgaatagggtattgatcccatcagatacattcccacttgttaattttctcgtttgatatgttacttgtttgttgttttcttgaaatcgttcttggccattttcttttattagtctagcttttgatcttagtgtttctgccatttcaaggaaatcaagtaataatttattggatagcaaacaaaaaaaagaaacaactggttttgttctatattttcgttcattcttggatataatttaatgttatactgcttgttggcgtttcggcttcatgaaagatagggtgtcgccgtgttagacatgggcgattttgggctctgtgatggcataggctgggggtagtgatgttgatactcaattgctggtttttgttcaattttgaaggcgatttgaagaaggtacttgtcc

SEQ ID NO: 51197 - DNA, 378 bp, Ricinus communis
  Intron number 3 from transcript 29841.m002901 (locus 29841 .t000165) derived from phytozome v7.0 (chr-ID 29841; pos 1 046270 to 1046647)
cactaatcttcttaatagttccctaccaatagaaggtacacagagagtgaaaagaaattattagcacataaaatagattaatacttaaaaaaatttgcaaattcattagatttctaatttaatttgcatcaattttatttgagtttcgttctctttggttgcagaattagcgagattaagcaacttgaagattctaaatttgaagaacaacttacttacgggcacccttcaaattgaaggcaaggatagctgaattaagcaactttttcatatatttatactataaagataacagtgtatgaagttatttaagaaaccccacttttctaatttactttggcaggtttggcaactctgaagtgcttagaaatcctagat

SEQ ID NO: 51198 - DNA, 468 bp, Ricinus communis
  Intron number 4 from transcript 29841.m002901 (locus 29841 .t000165) derived from phytozome v7.0 (chr-ID 29841; pos 1 046742 to 1047209)
gatctttacccccaaaaggtacttttcaggttcttaatctttcatcactatctataattagcacttgctcaaagcgatctacagttaccacctgctcaaagggaaaaagttatattttcttcccctgttcaaaaaaattatgccatccaaaaaaatttaagatgtcaggtgagatttcaagaatagttttatatctctaacacattcgtccttgtactaaaatattaaattatgaactctagacctttcaattatagaaaccccgatattatatcaaagaactattccacccaaaagcttaagctgtaaaatgaggcctgagaatagttttatatctctgaaacccctttctctcctatcccaaacatagtgtacatgcaattctctagctgaaaactcgtgaagattgactttgtaaattactatattgtaggtttctgtgaattgacgaaccttcaagagttggat

SEQ ID NO: 51199 - DNA, 1047 bp, Ricinus communis
  Intron number 2 from transcript 29827.m002558 (locus 29827 .t000031) derived from phytozome v7.0 (chr-ID 29827; pos 1 88896 to 189942 reverse strand)
catatatcaaactcagcaactctggtagacatgcatatcttgtttttaattttttatttattcttcttcaactacatgtaagtaactgtaatcttctagtagaggctgcattaatgtcttaggagttatgtatttggtctaaagcatgtataagcatgaacaaggtaccacattttattgcggttgtggaattaattaccctagcatttaactgatgcttatccacaaatgctttattatcagtttccctcttagatgtgttttactaggaagggaatcgaggccaggtcgtgaattaggaagtctgctattattccgacataaattagtgactgccctacgttgctgcgttaatacagtaggaaagtggtagtgctctaacgattttcagtttgtagaacgacttaaaagttttgttaggtggtcttctaaccctctattatatgctgctaatggttttcgatgttaatttgaatttctcactctccttttaacattcttatcattttactatatcacgtggcatgcatattcccactcctagttctaacctagcagtaattattattcccatccaaactgaagtgctttttttttttttctcagatatctgtttctttattatgttttagatgttttttgggtcatcaggttcatgattctatcttttggaaattttttatataataatcaaatgcaggtatttctactagaaaaatattaagaaaggaaaaatctgctttaccattctcattctaacaactccacagattgcaaattttttgacaaatatcacctaattattgagcctgttgtgtgattatagatggctaagtaattgagaaactatgattaccagtcagggtttctttgatgttagcaatgaagttgctaggtgctaaattattaagaataaattattaatatgcagtcacagagtacctaatttagcatccacaatttttttgtttctatttatgtgatattcatgcattttctttttattttctagattcactgattgttgctgtcaaaccaaagcctccg

SEQ ID NO: 51200 - DNA, 557 bp, Ricinus communis
  Intron number 3 from transcript 29939.m000525 (locus 29939 .t000003) derived from phytozome v7.0 (chr-ID 29939; pos 6 0746 to 61302)
ccatctcttgtcactcctcctgaatttgcttctgtgtaagcatcctttgtccctccttgtagatatttttctttattagtttgatattggtaaacctgttttggcattttaatgttttcttggctctcgattgtttatttactgatttaatttgggcagtaaaattggggctttcaacttttactagatgaaatgatgaggtgaaagttatgattgtacaattgaattcttgttcttaagtctcttttcctggttttggcattaggggggtatgcttcttatttttcttctggtcgtggatagtgctttctcatctctttgtaatcgttttcaaaaattgactttttctctagtctcatggcgaataaagtttaaatgtgttagttattattattatttttcattttttaaggataaaattttcctgcgactgttttaggtgatatacagatgtcatgcatttcttttcacttttaagggtaaatttcctaggactgaattctatatgatttgggactgcagaggttcaaagatattccctgcttttgtcaaattct

SEQ ID NO: 51201 - DNA, 588 bp, Ricinus communis
  Intron number 1 from transcript 30026.m001490 (locus 30026 .t000054) derived from phytozome v7.0 (chr-ID 30026; pos 4 00036 to 400623)
agggtatgatcaatagtttatccctttattcattcctttttcttttgatattagatgatatatttgatgtttcaaaaggttctgtggtgatttgctaagacaacagaagaaccgttttcttttctatcttgcatacagttatcctatatgtctttgctgattattgcagggtctagcgaattttaatgagaagtaaaagttggagattggtaatattacatgattaaggaaaaaaatagaaaaaggacgacatacttgagctgaattaattttgttcagaaattctatcaagacattgatgaaacatgggcaactataaaagaccatcttacttgtgtttatgatatctgattcaataggttagctgattgttatatatacttattactgtggtagaacttctggaagagttgatatgagttcagatttcaaaaaagaaaggtattaggtaagtagacccctaatacgaacttggttcttagagagaagaagaagaatatgctggtagataaaattgtacctttaagctaatttggttttaaactcttaccgtgctacaattgtttgttggtgaatatcatccagtgg

SEQ ID NO: 51202 - DNA, 605 bp, Ricinus communis
  Intron number 1 from transcript 30138.m003925 (locus 30138 .t000099) derived from phytozome v7.0 (chr-ID 30138; pos 6 89197 to 689801)
tagtcgaactagtggtatgtcatgtcatgtccgtacactcatcagtcaccacaaaatgctaaagttgacatctttatgtgttaagtttcgtattttagactacttccacaaaggtgatggtgatgacggacttggactcttaactaattaggatttctattctcactgtattttgtttagtcttcacatgttaatgagcccatcatttttgcaacaagtaaaggaaatgaatgtttttgtaggaaaactgcttaacatcttcatgatcacataaaattgtacacatcttcacaaagccacctatcattggaactaacaattgtgattattttagtaatatttcatcagatgcaatcagtcaagaggaaaattttcctttattctgttaaatgcttttatgatgttcagtaagataatgagagttttgaatgcaaagaaagcttctttcttttgaaaatgctcactgaagtggtgaatcgtgaaaatcatggaatattttgaattggatgattactttgaggttcttgattcctctccacctttgaataatttgtaaataatcttctctgtgtaggtccgtgaactagaaaaccaccccaacttta

SEQ ID NO: 51203 - DNA, 673 bp, Ricinus communis
  Intron number 5 from transcript 29885.m000138 (locus 29885 .t000002) derived from phytozome v7.0 (chr-ID 29885; pos 1 3142 to 13814 reverse strand)
gtgtcgacacttcttttcttgtggtcagttccaattaattgtaacaaatgaattttcatgatcatgctcttgttatttattatgtgaaagttcaactacttagcatgtaaacgagagaatcctatgttcttcttcctcttcctttttgttttgtcaattttttttttgaaagaagagaacaggagactagtttttgtgtcagaagtcaatgtcatggttgatttttattatttttataggttgtttgtactgtcataactaaggagaatgttcctacgtctccttgttcagactgcataatgattctatattaattgaaatctcttgtattttgttgttatcttccattatggattataatggagagggtaatttttagttttttctccacgcttgaccaaagattgtcctgttttgtttaaccgtggtggtatcttatggatggccaggctggatctttcttttctatcttttattgtattgataattggatgtttgccttattttaccttggcaacttccctatgaaactgcttttattttattgtcattctctatttgcattttggttggtacatgataagtaccatttagtttcttgtgtctagcattgtttcttaactatttctgttctgtttccaggtctccaagggtggtaattcgccatttactt

SEQ ID NO: 51204 - DNA, 554 bp, Ricinus communis
  Intron number 1 from transcript 29883.m002004 (locus 29883 .t000059) derived from phytozome v7.0 (chr-ID 29883; pos 4 29560 to 430113)
tctacatacgtgttagtgttctctatctaaatctgttttatctcttcttttgttcttgagtgattgtgattttgattcttgtttgtattttgcattattgatgataatctgggtgcgttatgggctgtttcttgtttcaaagcgttatttctttatcttgatttggttttcttttgtctttattttgacgtggtcgtttcgtaatttgtattgttagactacgggcatttagtacttactctgctgatcagcctcttcatctctctctagatgctagattaagaaagtagtactatagacaagttttcttgttcccgtctttgcttgctgagattgaagtcgaatattgagacatagtaactgggtatctgctacataagttcatgttatgtttaattaggtgaagaatgttatattaactttcaagtttcgtggtgctaacaaattaagtttggtgaaatgctgctttttaagccactagatgaaaaatgtctgattttcttttcttttctttttcagtttgcagaaagtgcatatataagaagatatcagat

SEQ ID NO: 51205 - DNA, 887 bp, Ricinus communis
  Intron number 1 from transcript 30055.m001545 (locus 30055 .t000015) derived from phytozome v7.0 (chr-ID 30055; pos 1 22863 to 123749)
gctacacccacttctttcccactttccctctgtatgtatgtattttcttttttttcttttttttttcttgcttgtgtctttacttcttttggctatgttttcttgtttcaatcttgatttctgtttgtgggttctgttttagtttcagctctgtttcgttggtttctttctgttaaagtctgatgtgtttataagtttaggagtgtaagactatgtgtttgtgtatggattgatgtgtatcttggaacttcaaggtgttaagtttgagatagtagttaagtattacatggattagattcacatttcatactattgtaaaactagtattgcataccagatacataattcttgtatttgtgcaagtatgatccaagattatgttttaaatacagaaatgaactcagtgttaattagcttgattttagaatacaaattctgtctagaaaacccaattactaaagtgtccaaaaccaggtttttggtgtaaacaaattaaagattttgattgatttgtactagcatagtgctctgcagctaaaatgcagctacatttctctttcttgggcgcaggcttttatttaagataattatccacactgaatgtccacttcttaaattctttctgacttttgtaacttccgtaggagatgccttctctgtgctatttccttagctctcagttgatggattttctagttttgaatgccatgtatattactgcagtaacagtgaggttgctgcaaatcattaaaaacaacattacttaataagttcttcaaacaaataagagcatttaccctggatttaagtttcttcgtctataacaaagtaatcttaccttacatatatcgcctgtatttactgcatctgttaccttgctaatagaa

SEQ ID NO: 51206 - DNA, 830 bp, Ricinus communis
  Intron number 4 from transcript 30128.m008895 (locus 30128 .t000356) derived from phytozome v7.0 (chr-ID 30128; pos 1 572032 to 1572861)
aagtagacctcgactctcgattaggcaaaactcaggttagtcactctccaattctgattattgaatcaggcaagccgaatgctaaattatgatcttgtcttatgaaatgagcagtggttgatatagtaaattagattttgcgggaaacgatgaattccctggtttttatattcagaatattgctgttacttatagtgtctttaagatggcattgaactgttgtatagactattgttgttaaagtctcaccatttttgaaggtgaccagttggtgttatagagccactgaagtaaggaatcacacatctgaagaaaacatgtcttagaatttttcggaacagggttcacttgaggaagtggaaatcagttgcatgtaatttgttgtacaaagtgacctataacctgccgattgttgattaaaagagctattttgagtttaacattgtaacttatatctcatatgcattttaatacttgagctgacaatttctgtgctatatttacattggtatcatagaatgtaatgggcctgtatgccatgtacggtctgtctccatacaaattattgtattgtagttttcattctcgtataatagcatactatatttctattcttccggtgactcaataatgctttttccagcatttgctattccattttgatcagtttattgtgattgaatgcaagttgagctttgacctttgagatgtttggaacattgattctggtggagttttcttttcttctttaatgtagtttatctactcttgttcatgtatatgttgcttttgcaggttgttactcctatagcacctttaagccaacaggt

SEQ ID NO: 51207 - DNA, 582 bp, Ricinus communis
  Intron number 2 from transcript 29847.m000243 (locus 29847 .t000007) derived from phytozome v7.0 (chr-ID 29847; pos 1 03893 to 104474)
ggcaagtacaagcctctttctgagcctgctaagtaattttttatttgttttgaaagaggttttactgggctttttggaagttaaagaatgtgcaacaaatggattttgtttgaatctggtaattgatgggtgttctaagtggaacttgagtggtttgattgtgaatgttaatactttattttggaagttaaagaatgtccaagaaaagggtattgtttcaatttgataggtgatttggagtagaatttgagtgttgtgattctgaatttgttaactttcttttcttttcttaatcattttggaaaacttttcctctttccttttaaaagaaatagcaaataaaaaaggtttatttcaatatgataattgatgggtaatttaagtggaaattggatgttttaattttgaatttttttaacactttgttctcttttttttttagtatcattttggaagtgtgtttcttgctttctttagaagttaaagaatgagcaagaaaagaattttgtttgattgattggtagctgaaagaggaatttgattgttttatatttgaatttgctaattcctttacagtcaaca

SEQ ID NO: 51208 - DNA, 765 bp, Ricinus communis
  Intron number 1 from transcript 29923.m000789 (locus 29923 .t000004) derived from phytozome v7.0 (chr-ID 29923; pos 3 3415 to 34179)
attgagttgcgaaaacttctggataggtaccctacatctgaagtgaattctttctggttaaagaatctctttctagtttcactagaacaattaggagattttctagaagaaatgcggggttctgcttctggcggcaacatgctatagggtggtggtcccgcttatggggttaaatcaatacgttctaagaagaaatttttgaatatcaatctcatcgatctcataagtctcatatcaaatcccatcaatcgaatcactgttttgagaaatacgagacatttaagtcacacaagtaaagagatttattcattgataagaaaaagaaaaaacatgaacggtgattggattgatgataaaatagaatctttggtggcggacagtgattcgattgatgataaagaaagagaattcttggttcagttctccaccttaacgacagaaaaaaggattgatcaaattctattgagtctgactcatagttatcatttatcaaagaatgactctagttatcaaatgattgaagagccgggagcaatttatttatgatacttagttgacattcataaaaaatatctaatgaattatgagctcaatacaccttatttagcagaaagatggatattccttgcttattatcaaacaaccacttattcacaaacctcgtgtggggtgaatagtttcatttcccatctcatggaaaacccttttcactccgcttatccccctctaggggtattttagtgataggttctatagggactggac

SEQ ID NO: 51209 - DNA, 882 bp, Ricinus communis
  Intron number 1 from transcript 30143.m001180 (locus 30143 .t000019) derived from phytozome v7.0 (chr-ID 30143; pos 1 62895 to 163776)
ttattgcatctatcgaaagtttaagaggtattactgctccactttattggttttgttcaatcttatgcttatttgaattcaccatgggaagttaatattttatctcagtattccatgaactttttgctgtaaactagtgtcacaagtgatgtacaagaaaaagttcaccctttaaatggaaaaaattgttcccatgaatataccgatgattaacataggaagcttaatttgtaaacataactgtgaatccatgtgaatacgaggagttaatgtttacaacagtaagaatggttaggtgccttttttcattgcttaatttcctttctttttgattttaagttgagcaattgcttatagtgttttcttaaattttaaatgctaagttatgtagaatctgtatgtctatctatcaatagcctgactactgcataaatttagtagttacaatcacttcagggtttgaagctttgagtttttgcaagtttttgaagctctactgtgatagatgcaagacacttgcacaattatattccagtcaatttaaatttgccaagaagcacaaaactgtggctttggcacgtgagtatcaactagaatagaagaaatttataggtttgaggatccaatagacctttatggtgaaaccttctatgctatactgtttttctttggcttgcccaatgagtgaaacacgcgactcttagaatctgagaaggatgcattagatttacttactctctccaccaacatcactttttcttgtatagacttattattacatatgattgtcttagatgtaaaaaaaaagtttcgtagtgctgaagcatgatttaattgtcaccaacaggtgcaactgtggagccctttggatcatttgtgtcc

SEQ ID NO: 51210 - DNA, 536 bp, Ricinus communis
  Intron number 2 from transcript 29908.m006038 (locus 29908 .t000089) derived from phytozome v7.0 (chr-ID 29908; pos 1 256534 to 1257069 reverse strand)
acaggggaatccactgttttttactataagatgtgagtttttgtttcctcttggtttgatgtttgagttattctgaaatgatttgcattcaatgttgtgatgggaaagaaactacttcttggtattagaaactttacaagggtagagtacagacaatcagacactgtagctttagcttaaaaagcttggtgtttgatggacaccaaagtcattcatgtagaatatgctaggaaagcaatgggagttttgtgacattgatgttcatttggatgtacaaggagatattctcggaaaactgtatctgggtgtttaatttttgtgttatttttctataaaaattctatgacattgttgctatgatagttggcatggaatgcattcatccttgtaaacgtgtttatttggataggatgtgcacatgcatttattattattatagttctcaatcttccactatagtttttgatgcatgtgtcattgttttaattctctttggggcaggaaaggagactattatcgctatttagctgagttca

SEQ ID NO: 51211 - DNA, 803 bp, Ricinus communis
  Intron number 1 from transcript 29923.m000807 (locus 29923 .t000022) derived from phytozome v7.0 (chr-ID 29923; pos 2 01782 to 202584)
gggttagattcatccctttacactctgttttggttttttttttttttatgcctttttgtttcttttctttagcctttatttttcttcgggttttatggatttttgcgggcttttagaaattctacgtaatttggttgtgtgagaattagagctttttctttactattttctgaagattgagccatatttttactgaattttaaaaggcttgagatattaattgctgcacttctttattatatgggtgactgacactatattgtgttcatagtgtaatgggctcaatctcaattgttttattgagttagatttttgcagctaaatgttattattccgttgtaggattcaacatcattttttttaaaattgtgtttgctttccgaatagtttgattaagggtgaaagatttttatttttctattcgatgttgaaactatagcttaaatataattaattaagtttagtttaatggagcattatcggttgtcttaacaatgtttaacttgggttgcagctaattgctatgatgttatttttagggatttaaccttagcttttgtgtttgtgttcgcttttatggatcgtatagtattggcaattctaattcttttttttttgtttgtagtattgaatttagaatctataataagcttaatttaattatccatttagctgagttttgtttgtttgtttgttgtttaatatggtaagatttaggtgtgtgatggtctgcttctactgttcccttatattggctgtgagatttttacataatttgaatctaatgcaggaaaacacgggga

SEQ ID NO: 51212 - DNA, 740 bp, Ricinus communis
  Intron number 1 from transcript 29889.m003307 (locus 29889 .t000073) derived from phytozome v7.0 (chr-ID 29889; pos 3 37696 to 338435)
ccaggtttgtgttactttttttttttttaaattacttttttggggggcatactttagcttcaaattcagtgtctttttgcacaaactgtgacggatttggaatttgaatggtctaacttccattgaaatactaaatttttttggggctttgtagcaaaatttttactttgattgattttgttaactttaattcataccaaacgatcattgtcaatgctgctaactaattaataaggttccgtggttatattaatgatgtagtttgaagattgagattgtataatttatatgaatttaattacacactgattttgttattagttaaataagccctaagattgaactcaaaaactcacatcctacagcgtagtatataataccatgaagctaaaaacttattggttaccctatccgctgtaaaatttagtttactttccttttctaattgttactagtttagtataaatattataaaatctaattaatttttatatgtttcattttgaaattgtagtttttatgaaaagcataataagaaatgtttataaaaaaaattaataacattgaataagaaaattgtgttttttaattcacatgtaaaatgaaagtgactatcatattgggatggagggaatattccatacttattaatatcaggattttggattttgtgtagtggataagtatttattcttgttttaacatattaattgctgtagcaggtttggtatatttccatc

SEQ ID NO: 51213 - DNA, 433 bp, Ricinus communis
  Intron number 2 from transcript 30128.m008719 (locus 30128 .t000180) derived from phytozome v7.0 (chr-ID 30128; pos 6 36069 to 636501)
gacgatcttggcctttctttggcagaggtaagggaaacattgtgaaagcatttatgtgtatatgaacagttcctgtataatctttaatacttcaagtattgtttgattaacaggatacatatttagccaatggagtgattctttttgggtattcttcagttgcaagaatattttatttaaaagaagtattaatgagagttcatcaaatgagtatgagaaaatagttaaactttctattacgtaacaaagaacttatggagagttatatcacatgaatcattaggtccagtttattgtgctcttgttgataataaatattatttattatttgcaatatatataaaaagaagcacaaagaaaaatattttgtttcattttatataagttaaacttttatgttgtcattattcagtactcagtttttggctcaatt

SEQ ID NO: 51214 - DNA, 794 bp, Ricinus communis
  Intron number 1 from transcript 30146.m003529 (locus 30146 .t000106) derived from phytozome v7.0 (chr-ID 30146; pos 8 07036 to 807829)
gttcgctctaagtggtctttctctcactcttttgagtaagtcaaatgatgatcgtggccatttgtttattttttattgtttggttgctgagaaagttatgaaaactaaagaaaatgaaaaactcttttgtgggttttgttttgaaggattgaaataatggaatgaggctaaagtttttagctttctttcattttccttcattttcttagtaaccaaacagtttgccagttcttctatgatacttttaattgtctacaatgtccttaattattggtctgaattactgtgaattgaccgacaaaatcggtgtcctgcctttgcttattttgtcctgttatgagaaagatattgattctgatgaagttgttgacgaaattgccctcgtttttgtttcttctgtgagtaaaaaaaaacaagtttttggttcttccatagcatttgaatgaacagaatcaaacccgtgagtttcttatatttaaatttttcttttttatttagtttagaatattgggttcatggaattttggaagttttcagtgacaatgatgttgaaatgagtatgtatcattactatgataggatggtttaacaacatattttttgaagcataaaatttactaattttagatatagttgattgcacaagaaataactatatggttggtgaaattgagtggtttcagattcaaataaaaaggtagttagacggcttgttcggatgattagtggttgttgattcagatatttggtgctgtgcaggtatttagttggagtatcagctgctgttgctgcac

SEQ ID NO: 51215 - DNA, 465 bp, Ricinus communis
  Intron number 2 from transcript 29950.m001160 (locus 29950 .t000044) derived from phytozome v7.0 (chr-ID 29950; pos 2 31677 to 232141)
agcctggtcttttctctctgcccttctctttattcttttttcttcttgttttcatgatttttcaatgatgggctttccttttaacttgtatatgttgattatatttatcaatttatgtgcttgtttcaaaatgtggaaacttttcataataggaagctttttagttaaaatgtagacccttgaatattttttgtttatatagaatcagtttaacctttttctgcatttggtaaaataacgaatttaagctactcaacaggagaaatgttatatgatgtttgtttgttacgtcttctgtaggagttttgatgcttggtcatcattttgtgtttaatactgttgtctagtacatcaaaagtaatttgcagtctgtttagaagttgagggttatgcatcatatttttggcttctgttcaagtctttgccaatgtttataatttcaatattgggtgcaggaacgtcagc

SEQ ID NO: 51216 - DNA, 953 bp, Ricinus communis
  Intron number 3 from transcript 29950.m001160 (locus 29950 .t000044) derived from phytozome v7.0 (chr-ID 29950; pos 2 32219 to 233171)
gcatctgtggtatgattgtttacatataactctgaatttgttttcattttgtgactaaacttggttgtgtttttttatttgatgttcaaacttttgctcttctttctaagtgcatctcacgggagaatattgaaacttctacttggttacctttcaccttgaatataggcagacacggtttaagtcaatggcaaagtgtgattgccaagaacttaaactgactagaatctaatcttagacaatgccactgcatttaagaatgttttccatagttatctgagtcacatggaaaggctctttttcctgttcaattatcgtaagaagattaaggtgttattgaaattgaaggcagatgagaaggtgaagcgctagatgctttgttgtttttcaacaattggcataatacaaataattgaagctcttctgatacattaatattttcagtgattaatgttctctctggagatatttttctcatctatacatttgaatgtgtaatatttacatattttatccctgtcctatctttctcttgttcacaactttaaaaatgaataatactgtagctgacctacccaaaatatatccagaaggtttttactcacgaattacttaaaatcagaagcatatccctgtatttctgttccctatttttttctccttgataagtaaggctcatttatgttgcatctacttaacaatgtaaggtttcctagttttttattttttattttttttatattttagcattgctgtatgtgtgctgaatatctaatgaatttaattcatagttcttaaatagttgtatgattagttcattctaagtatctttatatccctctgtggaattcatgtttgagcatctttctgaattatttgccgatttatatgaagacatatctatttcagttacttttattgatcattctgtaatgtgaaagcagattgctgtg

SEQ ID NO: 51217 - DNA, 172 bp, Ricinus communis
  Intron number 2 from transcript 29973.m000395 (locus 29973 .t000007) derived from phytozome v7.0 (chr-ID 29973; pos 7 3330 to 73501 reverse strand)
gtaaactgcttcttcttagatatttagatttgcaggtaaatacgtttgattttttcttatttgaatttctgttgctatgtatttgtctgtttgctaattaatgcttcttcttcgttctatttattcgtttattttgttactttaggggtcaggtgggattttggggttctta

SEQ ID NO: 51218 - DNA, 666 bp, Ricinus communis
  Intron number 1 from transcript 29838.m001734 (locus 29838 .t000104) derived from phytozome v7.0 (chr-ID 29838; pos 5 57859 to 558524 reverse strand)
tctcacccacccaggcattaagattaatcctcgaggtaattttccaggttttcgttttctttatcatttccatggtacaattggtgacttctgccataatgtcatggtattgttgtctactaattggggtggaaaaagtgacaggagggcaaatgcactttgtatctaatccacattatgggattctgtctcttcaaaaaaaaaaacatcatagcattatgtactataaaaatactgggtatttagaatttttcatggcagtacaggcaagtcttcattccccataggaccacctgctagagtcatttatgttacccaggttgtggcttctatttctgagtccgcggcttagtatttacgacaaccattatttgtaacattggttactttgcttgttagaacacataagagtgaagttgataatgttaaagaagaaatactaagatcccatctttgacttctaatactttatcgacactgttagacaaggaaaaggcagataccctaaaaagtactctgcccgctatatatgttcacttgtagctgattttcatcgaacattgatgtatggtggagtcgcgatgaacccaagggaccaccttcgtctggtgtaggaggcaaatcctcttagttttcttgcagagcaagctgagggcagaggttctg

SEQ ID NO: 51219 - DNA, 676 bp, Ricinus communis
  Intron number 4 from transcript 29904.m003040 (locus 29904 .t000154) derived from phytozome v7.0 (chr-ID 29904; pos 9 90767 to 991442)
ctcgtaaaactaagcctgttgaaggtatgcctttctactaaaatactgctaaattgaagtttctcctatgtttaatcttttattggcctttactggttcataaatgatgactatgccttcatgtttccctttattttgttcaaattagacaattgtaactctagaaattcaatggaacaattaagaatcttctatatcaaagtaattgcttattatcattaatctatgttgattttattcgaagaatcttgattgggcgagacttggagagtaattggtaggtttttataaaggttaccagcaagattattttggtgatggaaattcttcaatgcatatacctcacctgagtatttaagatgtgcttgttctttaaccttaatagtcattttttttattgtactaaatatgccgttcgaaccaaattttgcaagttatatccttttgccatgagcttgtattttatatagacttctggtgaaaactaaccaccactcctaatttaatttctaaagtagatgatgactgctgcagtctaaggatcattaatgcaatgttttttatttatttataatactactactttttatttaaccaaaatggggaaaagcatgaaattgagacacatgccctgttaattatatgttctgcgcatatcttgtattgcaggagctca

SEQ ID NO: 51220 - DNA, 469 bp, Ricinus communis
  Intron number 1 from transcript 30131.m007259 (locus 30131 .t000410) derived from phytozome v7.0 (chr-ID 30131; pos 2 511378 to 2511846)
atatttgagggtcctcaatttgcagaattgtaaaggtaaagtttcttgcttttcaaaaataagtgtgtttttattttattttatggatttaggtcttaaatatgtctcatttagtagaaaaacatagtgtattcttaatggcaatctcaagatgcttaatacgcacagctgcattgctgatttaggctgatatcattctagttattacagaatggacttaggtaaggtttgtttttctttttttttttttttttttttcttattgaaaactttgtttagcaattgaaagagaatgaaattgaaaacttggaagctgatttgggtttaatctttatttaccttttaagtatctcaatatactttcttgtcaattcctggtctcaaaggctttttgtatatcaatgtgaaattcttatttacttagctgttgaatcatatcgtttttattacaggaataactgataacgga

SEQ ID NO: 51221 - DNA, 285 bp, Ricinus communis
  Intron number 1 from transcript 29908.m006071 (locus 29908 .t000122) derived from phytozome v7.0 (chr-ID 29908; pos 1 459634 to 1459918 reverse strand)
aagtttttctctctcttcttttctttcaaggtacgatctcttttccttatcttatttattcatcatcttttacaattagggtttctatcttgctctacgatttttgtaatttttccattgatcatcttgaagaaaatttttcaatttggaaattatttgttcaatttctgcaagtcaaaactctaatttgttggtgaagcgtgatctagggttagacctccgatctgaacttgctaattgtttttttttttttttttttttttttgtgaattaaacgaagcttag

SEQ ID NO: 51222 - DNA, 795 bp, Ricinus communis
  Intron number 2 from transcript 30025.m000580 (locus 30025 .t000008) derived from phytozome v7.0 (chr-ID 30025; pos 7 2803 to 73597)
ggtttcatattggctggccctgcttgaggttactggcttcttttttcttttcctgttctggttttgcctatctctagttcccttagatttgttgattacatgaaatagagaaagaaaagtcgaaatcttgaggattaacttttgattgctggttttgcctatctttagttcccttagattttgcctttctctagttcccttagatttgttgaatctttgcatatgtatattcttttgttttttgtttttaatttttggactcttggtttggtatgttatggttgagtttatctactcctaaatattaaattacagagattgctactttaggtaatcaaagccaatagcatgtagacttgaaccctcaacctcagccttggcaaggctatgctctaccattaagctatttccgccagccaaatcctatctttccttgaagtaagttcagagagggagcggcttcaggaaaggagcattgccaaatatatggatttgccgaggtgcccaacattcctgggtagcatgtagactatgtgataagggtcaaaactgtcaacttattcttacaaggtggtatagtcgctccaagtccaaggactgatttgatgtgtcttgcatttgtgtatcttgggcactgggcagaattacatgctataatgataaaagtgatttttgtcacttcatattttattcttcataattgtgaagtcctaaatatcagctttggcataggaaaggataagaagttttattaaatttgttcttactttacttttgacagttttgatattgtac

SEQ ID NO: 51223 - DNA, 781 bp, Ricinus communis
  Intron number 1 from transcript 29842.m003556 (locus 29842 .t000053) derived from phytozome v7.0 (chr-ID 29842; pos 2 77958 to 278738)
tctctcaaagtctttcgataattaatcagtcagtaatgcttctccttaatctcttatttacatatattatctgtgttggttctcattaacaccattttcataactgagtgtgatcatcatcatctcttcgtttgaattcattgttttgtttctgcggatgatttcattttcatataaagtaaccgtatgctttgagacagtaataatcttttggttgtctctgaacaatggaatcagtttctctctctctttttttttttttttttcttttaatggatgaaatgctcctctgtaactatatagacagagatatgcagtgtgtgatcttgacatgataatagtttatattcagtgagatattgcaatttcatcttttgtccttaactaaagatgtcatattcttgccattctatggtacaccatgccattttgttctaagctagttagtcttggcgttttcaatatttatgtaattgccctttttttttctcctttagaaaaagatttaacagttcttcgtatcaaaagacagttttctttttcccgcaaaaattcatattcgtagcagagtattaagacgagtctattttaacttattttgaaatctttgtacactgcatctctcgtaaaataacaaaaactagttgtcattttgtaaagaatattagtttgactttcttacatgattctgcaatcacaatggattttttgacgattcctacgtgattcttccatttctgctgtgtacttgctcaaattggattccaatttataggttaac

SEQ ID NO: 51224 - DNA, 502 bp, Ricinus communis
  Intron number 2 from transcript 30138.m003904 (locus 30138 .t000078) derived from phytozome v7.0 (chr-ID 30138; pos 5 51414 to 551915 reverse strand)
aaactaggtaatgataagtatcttctttaataagtatcttctttaataagcatcattgttgtttaatctctactagactctttgtttatcatggtattttgagttaggatcacttgtgtttataagttactgtgatatctaagtaggtgttatcggtcttgtgatcttgttttgatgctagaatccatgtttcttggtcaatgaatcgttaccttggagaacttcatttgtcccttttaattaaaatatgtaaggtgtcgtagtgcttaaggtgtcaagccaatttattctgatgcatttagtggtgtgcttgttactgttttgttttgttctcttgttactttcttcctggaacacctaccttctgaacttttacaagacaatttcaaatttttcctcaagtttgttgttattatgggccatttaatgatatatattcctgatttcaattttcaattttactgaatactgtaccttgcagatagtgaacaagtactctgcc

SEQ ID NO: 51225 - DNA, 518 bp, Ricinus communis
  Intron number 3 from transcript 29951.m000144 (locus 29951 .t000004) derived from phytozome v7.0 (chr-ID 29951; pos 9 7541 to 98058 reverse strand)
tgttgtcctttgaggtaatatgtctaaagcatgttgtcttgctaatttacatttttcattaggtcatgttttggagcattcattgaaagacatcttcttgagtcaaatttctttgatgttgatgattgtagacatgtttgtttttcatgagtctataccgtacagttttgtttgggaaaagagagggaaagaaccaataaccaaaaatgtgaagcaaaaaagcaaaaagagaataagaaaaaggaagggggggagttgaaattttctttttgaacagaatatgcagttgtctctataattggtaagatttgtgcaagttttgtttaccatcattagtttacttttcaatattgactgtggtctctttgttgctttcttatggacttttaatgtgaacaaatgttaaggtaaatgctttgctgttttctttttgttactagaacagtctgactctgatagtttaaactattggaatcattgcagggtgtgtgccatctttggaccaatatagcaaacta

SEQ ID NO: 51226 - DNA, 297 bp, Ricinus communis
  Intron number 2 from transcript 30131.m006969 (locus 30131 .t000120) derived from phytozome v7.0 (chr-ID 30131; pos 7 17777 to 718073)
aattttgtggtcactgatagaggagagactattacgtaagtgaactgccactttcatatccttaattatatctaattgcatgcatttttacggcacagtagatgattttttcattacttaatggctagtcaaaaagaggatttgtggaaaagaaaaggctaaagtcattaatccaattagttgcgtccagatgtaatttggagagcactggaattatggtttctttgcagcaaccaaacctttgagatttcttttaattatgcttcttcttctgccattggacataggtttgaaggc

SEQ ID NO: 51227 - DNA, 431 bp, Ricinus communis
  Intron number 1 from transcript 29912.m005354 (locus 29912 .t000080) derived from phytozome v7.0 (chr-ID 29912; pos 8 37403 to 837833)
gccctggttgtggacacaagcttgaaggaaaaccggtacggattattattacaattcttcttttattctttaacttgaaatagattttttgaacaaaagaaaaaaggaatattgcaaagcaaaaaaaaaaaaaaacaagaattatgcttcatgttatattctcaatctttttttttttgttactctttttctttcttttggtttatttcctttgaacaaacccaaattgagttaaactaaagcttcgctttctcttcgcttgtctctctctttctcccgctctagctccctccattcattattatttttttaaattgggatttatatgtttaatggtatagtttatattaaactttacagttttcatctttacttggatttgtacggagttttcaggattggctaggtctaccagcaggagtgaaatttga

SEQ ID NO: 51228 - DNA, 298 bp, Ricinus communis
  Intron number 2 from transcript 29912.m005354 (locus 29912 .t000080) derived from phytozome v7.0 (chr-ID 29912; pos 8 37942 to 838239)
tgggatttgttacacccatcctgagaaacttccaggttaaatattatttcaaatacacatattattattattttcttttcctttctttttttctttgcttctatgcctgttcaatctttatcaaattcttgaattatatacatataaaaaaaaaaaagctgagagttaactatatgcagggttttatgacttttgaagaatactattttctgtcacagtttgttacacctaagtgaacctaactttgattttggtaaaagaattttgtgtcacaattttcttgcaggagttacaagag

SEQ ID NO: 51229 - DNA, 645 bp, Ricinus communis
  Intron number 1 from transcript 29851.m002473 (locus 29851 .t000115) derived from phytozome v7.0 (chr-ID 29851; pos 7 08355 to 708999)
tctgcagaactggattctccttggcaattcttgaggtatgtcaatgtatatatagatgtatatcttttgttttcattttgcagtttccgtcagtgtttcttgaaattattataatctcgctccgattccttaaaaataatggtgcttgcaagaacttagaacagaacaaagaatggtaatttacagggcaatggcatttttcttcttctctgcgtgttctttaggtgtcaatgtcagaatgtaacgtattgtaattgtttacaatttttttggagtggaggtctatattgtcttgggcgttttatgccgcaggttgaactctgcagtcagtttcatttgctgaaatttgaaatgaacaccttcatgtgcgactatagtttgcatctacttccataactgaagttcaagttccatgtttttagtcttaattattggtcaattgttccgttagttttaagtatttagaatcaaaaaacctggcccatgcaggtttcgaacctgcgaccttcgcgttattagcacgacgctctaaccaactgagctaataggccatttgtccttaattatttgcttaattactttgattaattgttaattaattaactctgatgcagcgattctgctcttaagaacccaaataaccga

SEQ ID NO: 51230 - DNA, 625 bp, Ricinus communis
  Intron number 1 from transcript 30138.m003845 (locus 30138 .t000019) derived from phytozome v7.0 (chr-ID 30138; pos 1 59687 to 160311 reverse strand)
gtaacacggaacgagtaattatttaatgtcttaatggatcagtattagccaattatttatgatagatatacatattttttataatttatgggcttaattattttaaaaatagttttaagtactaaaatgctctttacaccgaaaattaagggcaaaacgcactttttcctaataataataagaagaaaaatggtctcttttgttttaaggcgggagataaagtaatatttcttttgccctcactctttttgcagtttgtacccgaaaagctttcaattctttcaaaaaccaaaaataaaaaatttaaaataaaaattcccaatctctcgattccattcgctaaaaagttgcttccctattacaaattttataaatcttcatttagtcatttagttattagatctgtttctctttgtaatttgaatcctcgcacccatttccaaatttcagatccattatttattataattcaatcaaggttttgcgtgattatcttgttacttgtaattaatttgcttagaatttggttattcttggtataatttatagtttcatgatctatatagtgatggttgatcagacttcttttttgtttttgttttgcttatttagggtaaaagagaga

SEQ ID NO: 51231 - DNA, 591 bp, Ricinus communis
  Intron number 2 from transcript 29912.m005588 (locus 29912 .t000314) derived from phytozome v7.0 (chr-ID 29912; pos 1 980065 to 1980655 reverse strand)
ccccttttcgtgtcattcaaacttccaggtatctattggaacctgagttgttggtctgtgcgctttattcttaattaaaatgttatatgatcacgcaagaacgatattagcggagggttagaggctagttaaattgtacgaagagcatagcattaacaaacctttctatgattaccgtttctagttggacttttatcctacagtttggtacaagtacttttaaactttattcctgtcctccccattctcaggcctagcagactagtacttgtatgttacttttggttatggaaaatgattggtgctatgaaccatggcataaatatttttattataattaattaattattcataaaatagaaacataagtaacgaatcactgtatctattgttgccctttgattatatcctctttttcagtcaattatttagttaattaggtcttcttttagcctatttagtttgttgccataatggaaaattaaaagattcttctttatgttgatgacttccttttttatgcatcataagttcataacgtttccactgctttataaagcaaatcccaagttttgtgcaaggcggctgcag

SEQ ID NO: 51232 - DNA, 232 bp, Ricinus communis
  Intron number 1 from transcript 29912.m005588 (locus 29912 .t000314) derived from phytozome v7.0 (chr-ID 29912; pos 1 980734 to 1980965 reverse strand)
tggttttccttctcggctaacaatatcttctctgggtatgtcttgttttggctttgatttcatttatttgcttcctgggtagtgtttgcttgccttctttattatctgggatttcttgtttcttcattgagagttgcttcctctttttctttttgaagtgttgaatgttcaactatgtgctttaattaataatcaattctttgtggtgcatttgaatgttaagacataagaa

SEQ ID NO: 51233 - DNA, 745 bp, Ricinus communis
  Intron number 1 from transcript 29908.m006125 (locus 29908 .t000176) derived from phytozome v7.0 (chr-ID 29908; pos 3 7074 to 37818 reverse strand)
ctctccctattcaggtgtgtgttgttatgtatgtatggtgtgtgtgtgtgtatatatatatatatgttatgtgtggaagaagcatgcatgtttttacatatagatggtgataaggctgacatggggttttgaatgcttaacataggcagatttagtttttttggggttcaattttctttgtttgaaagaaaattgaaaaatgaaaaaaaggagttctttatttttcagggattttcttttctatttaagtattatgattttttggctttagacaacttatttcttcttgttattcaccaattcaaaatccacgctaatttaggaagtgcaaaaatagcaatatatatatatatatatatatacttaaaaattaagcattatattaaaagaattttttatttatataataagatagtttattttaatgctgactcagaaatatctaattttgtcgtcttatatttcttagatctgacatcacgtgttaaaaattataagaatgttgttatatgataaaaagattgtgtcagaacaaatttcgagaagaagtttccaatcatcgaacattactataggcccattttttaaagttgtttactaaaattggaaattttcttggctttttaggtcacgttgttgagaaattgattaagcatgtgagaaagttaattaagcaaatgctgtggtgttctttatttcttttctttcaggaagctgtagagtgggagtacaaaagcaaagttgc

SEQ ID NO: 51234 - DNA, 886 bp, Ricinus communis
  Intron number 2 from transcript 29929.m004600 (locus 29929 .t000103) derived from phytozome v7.0 (chr-ID 29929; pos 5 67533 to 568418 reverse strand)
gtgtatataaaggtcttcttgagaccactggtcaggtaacttctttagattgtttttgtgtttgttatattatttgaactcatgagtgtagattttatagatatttcctttttcttgatgaatgtctttacccacttcaaggacaaaagaccaagaattttgaatctgaacttgtgatgatttgtgaagcatgatatttgaaggatggtgcatttatcagtacatttgaatcatgtcatgttattcttaaatctgccttcaaatattagttgtagaggtattttctttggcatctttttaactaatagggggatgaaatatttggaggaattgaagattatctctgtttatgacaactttgaactcaaggcttaaagaccactagactataaaaaaactgcgctactgctatgacctaatagcatgattattatacttttgttttctgatctgtctacttcttaatcaaatataacgcattctgacccacctatttgatactgcaaaccagtggaatcctatctgatgtttataagttcacttactttatttatgtcacggctctcctcaacttgtaggctagttaacgataggtgtataccagtaagctttttaatgttttactcctaccatggaacgttcttactacatgctaatgcttcatgtttcaaaatatgggataagccattgtcaaatatggtaagaatatgttccactggaagtttggcatgcataggtctgagttaggttttgaagtttttgctgttccttgagggattagtgattaagttatactggcttaggaagcagtgacactgttaattttattctctcttaactttgtctttgtatctctaggttgttgctgttaaacaattggatagaa

SEQ ID NO: 51235 - DNA, 643 bp, Ricinus communis
  Intron number 1 from transcript 29929.m004600 (locus 29929 .t000103) derived from phytozome v7.0 (chr-ID 29929; pos 5 68569 to 569211 reverse strand)
cactgagtcttctaatatatccaaattatcttctggttagtttttatttttgtttttctcaggttgtttttattttgttatttttagtatccaatttcttcactttatgatctgatctgggtacttctgattttctgttgttgctagccttgccctttttctctttttattatgtcattgagtacttgatggattgttttcataacataaaattttggagcttttagaatttaggcttcggtttctagtagaccccaccaaattttgattcagtttgtaaaagggtactaatttcttttatgagatgagatcttctgatcactttagtgagttgggttcgatctgattgattggtgatgaaagattggagagttttaggtgttatcagctcaatacaattgagaatttgagaaaatcatctttaccctttatgagattgagtttttcattttattggtactatcaattaatcaagattattttatcttcttggtcattatgatgcaactattttattgatctttatttataaggtcatatgttttgatctaaatgtctagttgggagcaaatgcatagttatttaactgagtattttgattgagtgagatttgcaggagctgacaggcttagatcaagaagca

SEQ ID NO: 51236 - DNA, 810 bp, Ricinus communis
  Intron number 2 from transcript 29820.m001029 (locus 29820 .t000050) derived from phytozome v7.0 (chr-ID 29820; pos 2 92957 to 293766 reverse strand)
acccaaacaaggcctcttcttgcttcttcttcttcgtcttcatcattatcatcctctatctttcaatcttcttcaagcatcatttctggggtatgatttatgattcaacagacatcattctgtttcctgtatatactttacttaatttgggtgtttaattgtttattccttcttttaaggccaattgtatataaaagaaatgctcttacctttttgtctttatgattttgaccctgtttagttgcaaactttgaggtaatgaagtaaagtgctaactgcaaatcattgcaggtcgactagaaatgaagtccacatgtttgctttaggacaaacccgtctggataaatcaaatataaaaagatactttcttgtttaacatccaaataattttcttgaaaaagaatacaagaatcaagagagggagacaagtttcttcgtctttttatcatgctgtgatgagttggggtcactgatactagtttaaagggttgagataataaattcgaactcaaaaggagccaaattgtattacaaagaaaagaaaaaacttctaccaaaaagaattgtataaaagaagcaaaaaatatatgtaaatcttttctacagatatagtgatgaaaagcaatatgctatctatgtctataattcattcaattgcatcctagtttgtttttgaatttgttcttgctaacctccctttcattcgacaggatgaatcgatgaaaaagcaacaagaagcctggaattttaagaaacccataaagcaagcggatagaccgtcagagaaaggagtagtaaagcaagaattta

SEQ ID NO: 51237 - DNA, 822 bp, Ricinus communis
  Intron number 1 from transcript 30128.m008709 (locus 30128 .t000170) derived from phytozome v7.0 (chr-ID 30128; pos 2 670599 to 2671420)
attagccatatcgtttccaccgcacgcgccgtcaggtctctctcccccctttcttttttaaatattattttatttcttattttaatccatcatgaggcatgtgtgcgtatgatttctctctctctctattctttttcttattattttatttgcgctgagatttaattaatatatgattttatgtgcttatgatagttttgcgattggagatggatttttctttttgtctttgattttttttttcctcgctacgattgattgatgaatagattgattagctgttggaccaaaaggctttttcacttattaattgattataatttgccgcaacatgatcggtatcaaaccaaacttttgatgaagtgttcgtgttatgtgtgtatgaatatggcgttttctcttttcgccaaaattgcctttgtttcttctcctctccaatttttgccttttaactactttataattttttttaagattcgtctctttactagttggatgactatttgttttatccaaatcttgttcttttcgaattgctacatttctgcatcaatttgattggcgaattttatttttgttggtttcctatttcattgcccacttcagaatctccagacttcattattcttttaacactgatcctaattatgaatttatcggattgatcatagtttcatctctttatgtgcctattttattattctctctctcttgaactttccaaccttaaaaagatgtattcaatgtatgattttgtttataatgatctatttttcaatgttcacaggtaaactgttcactgctttataggggacaacaaaa

SEQ ID NO: 51238 - DNA, 1015 bp, Ricinus communis
  Intron number 3 from transcript 30143.m001198 (locus 30143 .t000037) derived from phytozome v7.0 (chr-ID 30143; pos 3 06174 to 307188 reverse strand)
ataggtatgttattgctacttctgctatgcgaaatctatttgttaatggtatgcagtgtagatcatgtcgcaattgtatcattgtaatttcaaaaaaagaagaagctagttttgtagccttaaactcatcccaggaagggattgttagtaacaagtattggattcttttttcataaatacattgacgtgaattggaattcaaagttgtcttgaacttgggtaaaactttaggctttctaatatgactgaaaatgacattttgggttgctttttgagacaactagagatgttgactctagagcatctaaaatcaagtcttttgtatttaggaacattttgtgtttgtaattttgaagattaatagaaggcttatgcttagaattgaagtttgagtagattttgagtgagagaaggttggactttatccatattttcttttctaaaatggtggtggctccatgagctctagtttaatttatttagttctgtaacattggaagtctattttacagcttatattccaagtttctaacagtgacagcatggactgtgctacttgcagccaaaaaagtataggcttttttccttttggtgtgcgtatgcatgtgtgtctgctcgcttgtgtatgtgtgtgagatagaggcatttgaaaagttaatgatgatagtggagaaaacagctcacataatcaaattattgggaagtatttgtttattttgtcagatttcccattctgtgatgcatctttcatcaacaatacgaattttcttctttgcgaaatccatgcatcttaggcttatcaactgtccttttcaagccttgccatgttatttttggactctgcagcttcatccaccgaacccaaccctcctctccccagtgtgttacctttgcatgtagttgttcttaagctatgacgtgccacatagcatataataggtgtttcctctattacttggggctaatgatttatgttgcagttttgcagctaccttcagtgagaaggtaacaagaa

SEQ ID NO: 51239 - DNA, 707 bp, Ricinus communis
  Intron number 3 from transcript 29816.m000681 (locus 29816 .t000018) derived from phytozome v7.0 (chr-ID 29816; pos 2 05250 to 205956)
cagtaagttttgtaatactaataatgaaacgacttctgtttttgcataattggaagtttaatttctttattacatttttatacatgcatgttgtttgtgcaaatcgattgtcatggatgcctggtttaatgacatgactttgttaatataaagtgatgggtaatctgtagaaggtataggaatggggacatgcgaagaaaacgttgttcatggtcactggagtggttgggaaatcttataaaaaatgaaaacgaaatactaggaatcaatttgctttcttttaggtcctatttttcattttgttccatcaattattgtctatccagtacctcctagtatcttcgatcctcgttccaggtactctatctctcacggggttgtgccttcctcttcatacttgtctgatttatgctcatgcaatatacataaagtgctaatggagatccttcgttgatagtagttatggcccaattctagtaagaggattttgcaaactgttatcaattgaactgatgctaatggacaaatgtgtctattttcatgtatttgcgaatgcttctggtgtttgcttcctagtatgcaattggattttacctaatatggggtgggaaattcagcctgtcaatagcatcagcgggcacagaaacttattttgcttcttcacttttttaagttttgaattatgtttatgtgtcttgcagcaatat

SEQ ID NO: 51240 - DNA, 523 bp, Ricinus communis
  Intron number 1 from transcript 30076.m004652 (locus 30076 .t000216) derived from phytozome v7.0 (chr-ID 30076; pos 1 399872 to 1400394)
tctccaaatcaaccgactctgtctctaaactcagagttagttcctctctaatacttctgttctattttccgtttgtatctggaccatttttctctaaataatttttattgataattcttcttcttcttttttttgggcgggttagaagagatgcttatgaacagaattaacagtaattcacttttctacccctattcaattgttgaattactcaatctcgtgtttgtacctgagtgtttcggatgtataattcacaaaattcagtctctttaacgctaggaatttgttgtatctaagtcctgtttggctgctgatatgttacaggggagataaaaaaaagaaaagaaagaatgcaatcgattgtgccttaaagtttcctttcctaataacgaatttatataattaaacagaaagcaaaattgcttgataataactttttgtattgtggcatgttttactgattaagtgcacgtgtgcttaactagttaataattaatctctgtcatccattggcagaaatctc

SEQ ID NO: 51241 - DNA, 703 bp, Ricinus communis
  Intron number 3 from transcript 30115.m001206 (locus 30115 .t000032) derived from phytozome v7.0 (chr-ID 30115; pos 2 18930 to 219632)
gaagctaagattactgttccattttcctcggacaggtttgttcatgcattcattttttttcctagtgttttatagtggatgtgtttaatttcgtttatgttgcattctttgagtagtttgtacatgagggcgatgaaaattatactttcaaatacgtttgatttctcattgtatattttgcagatatcatgatattctatgtttgcgatttgggttcctgttaagttctccaaggaagaatttggcttttggttcaattacttaatgttactaaagcttcttagaatgttttgcttttatatttttatttggagctccaaaaccagcaagaaaaaaaaaatggtttttgtagataaggatttagatgtgtctcttcaaaatgaaatgttacaattatagttgtctgtcttgcccttcttattgatttttactgaacttgacataagtatttttgggtgaagacatgaggccaagagtcagtgttacaacatggtctagggctttgcctcattgtggtttgctttgccctgtgaaatgtgaactttcatcgtttagttagagtagtttgtcatttttcttggtcttacctttgtgctgttatcattgccaataaacaattacaagcttcatattcctccttttgttttgttttttgaacacaaatccagttctactcagctggcacaagctccttcaatcaagg

SEQ ID NO: 51242 - DNA, 827 bp, Ricinus communis
  Intron number 1 from transcript 30131.m007132 (locus 30131 .t000283) derived from phytozome v7.0 (chr-ID 30131; pos 1 739491 to 1740317)
cgaaggttccacatttccatctgcctatactttcggtaaggacatgctctttttttcttttatacatagggaagttgaaggacatgttcagtgtaaaaatgacaatgccatttattgtggcctacgtagattgggtcttaaaattttgggatgtaatccagtgaattctctagcatatgcttcaagtctctttgctcagttagatttgaattttagcggctttgaataatgatattttaactatttctgcatgcattctggatgcaggatgcctagacagctcttctgattcctgtactcttgtttttggggtaacacaagcatagggttctttaaggttgaaaagccaacttgcagatagattatgcccatagttgatgaacaaaaatgaaactcttggcccattttgtactctaccaataatttatgctggaccttctggatatttgtttctcatttaacctagagtaagccacaaatactggccaaatgtttgcttcctgtcactgtaggactgataaatgtagtccgctatcagatgtcagagctctatgaactaacagggacttacgtttatcttgtgcaaatagcttgatatcttacaaatttggtccttgtaattatgtagatcaaactatagcttttgttatcttaattttctaactcttttttaaggtcttcactgcatcaaacttttgggtttgccactgtctttgaacttgtaagcagctttctaaaagctgattttctttatggttaaataatttcatctattttattttctgaggacagacagagtatttcggggtgacagctctacaaggcag

SEQ ID NO: 51243 - DNA, 771 bp, Ricinus communis
  Intron number 2 from transcript 29883.m001986 (locus 29883 .t000041) derived from phytozome v7.0 (chr-ID 29883; pos 3 14828 to 315598 reverse strand)
caagaattgtgaatcgggatcatcaccagtttctggtaagctcttggttcttttatctatgcatttaggttactttttttatcaaaatgcatatagggtacgttgtggttgggttttttgactgaaatcaactgtcatctatttaaagtaattgatacattagaatgttctagacgacaaaaagattgacaaaacatgaaaaaattgactagttaaaacatgcaacagaagatgacaagttaaattgaaacttgatattagtttctgattttaggagcaatgccatgggaattttggtgaaaagctaagatgctttttgtgcatttgcaccttttcgcaactacaatccaatgtatatttattgtcaaaggaagtgaattgacacgagtttcttagtttcttggcttcttacctctttctttttctttaacaagaatgtccagggtgtccaaatgatgaaacaccggcattgcatgaaagcattcttctttgatatcttctgtgctgcttatgacttaattttttttggcaggtcacatttgttagctgagtatattactcgtcttttatttctccatgtttgttatctgtttcctggtcactttttaactgcacttgcaccttgttgccactaatattttttatcagactgctttacatatgataatgcggtggcatctaatatgcaagatctgctctgcaagtgcatatcattttctatggttatttttacatgctttaccaatgtctgagtttcacccattacaggca

SEQ ID NO: 51244 - DNA, 702 bp, Ricinus communis
  Intron number 1 from transcript 29929.m004643 (locus 29929 .t000146) derived from phytozome v7.0 (chr-ID 29929; pos 8 66167 to 866868)
aaaagaaaggtttcgtgatcggttaatatccactggtacggaccaaaccgattgttgttgctgttgctgttttctttttttcttcttctggattacaggattaaaagaaaagggaaaaattgtcttattttttttttttaagaaaaagaaaaaagaagaaagtttatgctctgtttgtttgttttggtttagatggtgttttgttaatgctgaggtgccgctattatgaatccccgagttttaagaatttcaatcaatcaagagtgttctttttttgttctttggattgtggctagattatgttttgaattatataattgtgctaagaattattttaatcggctggctttaattatagttaatatcccatgacaatcgagtgaaaattggatcacaaaagaaactgttaattgatccttatttgtacaatgtgcaatttgtaatccatgtttatattgtcaaattaaatttccttctgggagtgttttctggatttgcaatttatgtatttccctgtgctggaatttgaaatacgcagtttatgtttatctgaccaagttccataagtttttcttttgtgtgcatttatttgcatgatcaatgtggcaattctccggatcatctttctgcaattaaacttatgctaactgctgttcaatacttctagatactgaactacggaaaccactggagcattttagc

SEQ ID NO: 51245 - DNA, 660 bp, Ricinus communis
  Intron number 3 from transcript 29929.m004643 (locus 29929 .t000146) derived from phytozome v7.0 (chr-ID 29929; pos 8 67150 to 867809)
gaggtttgtttatattgtgttcttctatccatgttagatatgcaaagtgtgtttctgctgttggattccagttataagttttagctggtaagattattgttattttcagtggtcgaaatgaagttgacctgaattcgcaaaagctagtttgatgtttatgctcatgcctattttaaacaaagaacttcataatgttgctctttgcattttcatgacatgaatgttgactaattaaaccttgctttcattctgttgactgcattcaaaactgattattattggaaacagtgaattccatagaattcgccctttccattgtttgttataggaagtgttctctttttgatagtctctttatccatttgcttgaatatgcaactcaaaatattattatcactcagtcttcctgcttaaaggctaacatatgtgtttccaactaaatgttaaatggtaaaatacacatatgtgtgtgcttatagtgtattatgatgattattaagcactttggatgaggagcgttacttcaaacattatgtttgctcgctgagcctgagatgcgttggaatatccaaggataacaatgatcaactaagtttagtaggacatgagaaatggaaattctcttaattcctaatcttccactgtgatataaatcaggta

SEQ ID NO: 51246 - DNA, 856 bp, Ricinus communis
  Intron number 2 from transcript 29822.m003500 (locus 29822 .t000175) derived from phytozome v7.0 (chr-ID 29822; pos 1 036309 to 1037164)
tccttcaaactcagaataagaaacttcacgcagaggtaattacaatatagacttctatcctacaattttgtgcaattaacaaagtcaatgtatgccttaaactttcttcttgttttagattaattgcaaaatcaaatagacaccgagttttcttatgttctttttatctttgcatatgtagagttctttttagatattgtaacttaggcttcgtctcttgtaactaatttagtacaagtacaaataatgtttttccttttcctgatcgtagttcttttttggccattgatttattcttccaggatgtagatacatatattttaggttggagctttaagagtttcaatatacgcattacttttctggaattattagttcttctcttttctatatcccttgggaattttaacaagccgtattagcacagttcttgatctgataatagtgacttgtaattaaaatgtatagcatgtcatcgaacaatataatagcaattgagcatctaatatatctcattgcccagagaaaagggttgtcatattccaattaaaaatttctttaggttcagtctttcacatagttttctgattaaagatttccatataccagaaataagggttggcgtttctttaagtaatttaatataacctgattagctaggttgatcacaactttgtaagtgtcagtgtcaggagcacctcatcagaaacaaaagttaatttaattctagtagctttctagttgacacactcagttgcatttttattttatatatgttctttttatcatcatcatctatcatcttcatatcaagaacatgaagtgtatctgattgtttccttcttggttgcagtta

SEQ ID NO: 51247 - DNA, 675 bp, Ricinus communis
  Intron number 1 from transcript 29953.m000444 (locus 29953 .t000021) derived from phytozome v7.0 (chr-ID 29953; pos 2 40604 to 241278)
gtcgagacttcagcaggcaatgtactgtttctttagtaaatgaatgtactatatacatgcatatcagtggtgattggtcttttgaagatgtgaagtactgggctacttttagatttcgcatttgattatcattcaaaattttaattatcattcaacctcaagtactgatgaaatcattaatttgttgtgtatgggactgtacatttagtaacgtatacttagcaaatgatttttagaatttgcaaaatggctagaattatcatctcaatgcaaatgaaaatagtaaataaaacttttggaaaagcatctaattctaatgcttaattacattgtcatggctcccactggtatggaacatgcccttatatatgtaaatgcaaaacctattcttgggtctttataagcgcttcatctcttttttgaactgctcagaaattgaacaggttactttaggtcacgttatgaaaataaattatgtttaagttttatttatgttccattttctagtggagaggcattttctgatttcccacaatgatggccttttttttcctcttcttttgatgcgagagtacttccattgttttcacaatttcttttcttaatatggttgaagcttctggaagagttcttaatatttattatttttcctgtcccatttggttaaatcagcag

SEQ ID NO: 51248 - DNA, 602 bp, Ricinus communis
  Intron number 1 from transcript 30131.m007096 (locus 30131 .t000247) derived from phytozome v7.0 (chr-ID 30131; pos 1 500209 to 1500810 reverse strand)
accgcaaatccgactctggtgttaatcgtcgactcgtaatctctttcgctctctctctctctctcatataatatatataaatatatatatatatagacgattgatgtacttgacagatgagcattttgaaatagtttggggcttaatgttatttaattcgttgcttccttttgaactgacctcttttcttaactttgaaagaaaattcaaattagaattagtgctttgaaagtgtttattaacagaagttaagtctaggatttgcaattcaatttacttttactttgcttctgcaagagatcttcatcgtcgcggaagatttattatgtcccagtgtcgaaagcgagcattattattgtcttgataagtatctcctagctatatgtttatattttttgttatgttatatgtattatcttactttaaaagaaacttcaaagtatccaaatcgtatattaaaatcatcaccgtaaactaaaatctaaatggataaatctatattgagagattgtttgttaattcaattgtttctattgtttccttatttttctctgaaaatttaagaatgacttgccatatgattatatcttgaaggactggag

SEQ ID NO: 51249 - DNA, 557 bp, Ricinus communis
  Intron number 1 from transcript 30143.m001181 (locus 30143 .t000020) derived from phytozome v7.0 (chr-ID 30143; pos 1 72247 to 172803 reverse strand)
aggtattggtgcttttggttcgctattatttacggttcgttgaattttgttttgtttttgagaaatgatgacgaagtaaagaaaatgaaaaatcttttgctagttttaattacgtcaaagcaaatatattaggttcgattgattgaatccccttctagttatgcaaaaccattgaacttttagtattataatgttaacaatgtagaatatgtggaatgtggcgacttgtgtctggttatgaaggaagaaaacatgagtaaacaagaatttatatgctgcattactgaaaaatggaaaactgatatcatgtaagttaatggttgcattaggttgatccgacctcccattttggtgcagtttataaattagatacttgcaactgtcatgatattgtcattagctttgaagaaactattgcatttgctgcttcaaattagtcaagtcatgggaaattatttgagatttcaatttcaggccaacagtagaggaataacgaatttctcttaagcttatcttatgaaagttctctcaataggacatgctacttgattacaggt

SEQ ID NO: 51250 - DNA, 535 bp, Ricinus communis
  Intron number 3 from transcript 29844.m003226 (locus 29844 .t000072) derived from phytozome v7.0 (chr-ID 29844; pos 4 83544 to 484078)
agaagattagggaagccaggggatacaattacgtacttaattgtttctgatatatcattgagtttgtcaatttgattattttctaatcatcgcattatataattagtttagcaatctcaacgtgttttaaactttttgaactagcatgccatggagaacatgaattgacagatgacccaaaaaaaattgcagcactcaccttggtttttgtctttctaagttgcatatgaaactttataccattaatttagcagtaatgctcatggtaggaatttctttagattctaagttgattgagattagctgaagatagtgctaatgctcatggagaggccgtgattattgaatttttagcttttctttgggttgtcattatcaccctctaattttatatagtcttgttcaaggatgttttggctgatggcttcatggttttcacaccgtactgaatcataagagatggtggcatcttcccgtcgaatttacaagtgagaagcataattttataatatactttgcaggatttgctcgattt

SEQ ID NO: 51251 - DNA, 935 bp, Ricinus communis
  Intron number 1 from transcript 30131.m006915 (locus 30131 .t000066) derived from phytozome v7.0 (chr-ID 30131; pos 3 65547 to 366481)
tcattttgcgtgaagttcgcggtttttctgctgaggttttcttctgttgcttgatttcttcagataaacattctattcaaatttctaaatattttccgagttaatttattgttattattattattattattattttttcttaagccaatgctgtttgattcttaattgactccctttagatctgtgcctatttgattagggtttcatatttctgtttggcgtgtcagcaaattccatttccattttattgtcttggatgattagtggatcctttttctttcttgtttcttgctttaccagatttttagatttgcataattcctctttctgagtgcttatttacttattagtgaacctttttattccggcttttcatttttacttgtctttcaatcttttgtctgactcgcttactgctctagttaaggttccatcggctggtaatttgattattacaaggagaagaaaaccttttccaagtttttgtttccctgaaaaactttttgtttgtgtattaataagtttctaatagttgcatactgttttcaaactcttaaaatgcaagaattcagttcaattgagctcttttagtcaatcatcatgtctggatagttcacgtagttgctgacttgaagaaagaatagttgcattttgtaagaactgaaatcattcaaaactgaatgcgattttgcaagaattcaattgaattgattttttgcacttgatttattttattccaaacaaggccaatatggtgctaaaaggattgtaatagcctcttttgtttttttgactaagtatattcctatattttcctctttcctagtagttaagaaatgaaagtggaaatatgatcacaaaagcatattggttatagagggcttattatgagttattactctttgtactttttgctcgtaaacaggtctacttgt

SEQ ID NO: 51252 - DNA, 771 bp, Ricinus communis
  Intron number 1 from transcript 29991.m000634 (locus 29991 .t000016) derived from phytozome v7.0 (chr-ID 29991; pos 1 28925 to 129695)
tggttctggtagattgcagctcttggctgctcttggtgagtttttatattaattttatctgttttttttactcgttcagcacgagttgtagaagagacagtcatcctttgaactctgtgagagcttcataatttttacaattgaaaaatatgaatcagaccactttctaattagtatatacatacattatgattgctatgtatgttgccatctttatgatcctatttattagattggaaaactgaattcatgtaactatttttttttttatttgttcatgcttattttagatacataaataatctagatgggaaaattgtcaattcctttttagagatagtttaatttgaccaattacagtagaaaattgaaacagaggaacttatttgttcaataaaaattgtatatatatagataaggatatggatgtctgaagtggtcttggaatttctttgccttttctttcaagggctaaatattctgcctgccaaagagctaataatcttctgagaaattggattcaaatgaagtctctcttggtcataacagttctttatctgataaattgacttctctccaccttggaaactactcaggagtctggaattttccgtctttcaattgagtttcaagcaagtgcactcaaaacacttcaattgcctattaatttagacaataaacttccacctgaggaatatgaaggctcacgtgattttgctgtaatgtgtttgttcaggtggttttgctgcagaaacagcaggaggaatctta

SEQ ID NO: 51253 - DNA, 576 bp, Ricinus communis
  Intron number 1 from transcript 29912.m005438 (locus 29912 .t000164) derived from phytozome v7.0 (chr-ID 29912; pos 1 031367 to 1031942 reverse strand)
aagaggagaaaaatcgagccaccacggcttcgcaggtaatctccttttgttttcttttttcttttattattattgttgttctaaagctagcctcttgttagatttctgtacaaattttttatttaatttcttatatcactggctttgaatgaatccgtatccatactgagattcattttgttggtataggcgctcgatgattaggaattgccttgtgaaatgttttaagtttctcttccccttcttttgagatagttttcctatgaagagtcgattttttttactggtaaattaaattgtatctgcttaaaagaatttgaactgaaagcagcaattactaactttaatttcgtttttttttttttctgcaatgagctgagaactgttatgagacttcactgaaattgggtttattccttgtattatgaagtaataaagcattttcttttaacaaacattaccagaaaaaataaagagtttgtgaactgtattttctgatagagacaggacaaagttcttgacaccctctctcataatgcaggattgttacttcgcctgtagcaaataaaactagag

SEQ ID NO: 51254 - DNA, 1048 bp, Ricinus communis
  Intron number 1 from transcript 29941.m000218 (locus 29941 .t000001) derived from phytozome v7.0 (chr-ID 29941; pos 1 2497 to 13544)
gccgccgtcagatcctctcttctcgctgctgctgagtacgatctccttttctctgtttctctttattcacttttctatcctgtatcttattctctttctcatccatattagggattatgttaggttgttagtcaaaatagaaggatacgacatcgtattatcttagctttccacatttgattctatctatgttacttcgttttatttgatggatagttggaaaatgagatgaaatgtttttaagctaaattagtgagagaaaaaaaaagtaaattagtcaagatcgtttgggaacttctgaattttatgtttcttctaatgagctcagtattagccgcatccgattagaggttttcttttgttctgccaatgattgcaatgtactcctgccggagtaggagagaagtgcttagtgaaaaccaaacaaggcacttgctattgtactggaaaaagcgacctatgaagccttccagatatatgcagatcatgtaactcctgtttaatgttgaaatatgaaatcttagaaacatgagaaattgcaattgtgttgcaaaatatgaaaagaaaaatttcaactttttctctttatatttcacttgcttgaattcgtactctgtgatcattgctaagtaggtctggtaataatagctaaaaaagtgttcaagactttgtaagcattattacaaagaagtaagtgtatgcagttttttttttttttttttaaagaagtgtgtagttttattttattgagctttggtacatttttactaaattgcattgcaatggaaaatcaatgtgaaacaacatgaaaggttaaggcacatcattgtgtagaaggtttaggaagtactgactatctaggaaaattatgcattagaactacagtaatctgcctgcgttgctatttcatgtcttcacgtcacatttgctatttcctgattgcactttagtgattttagaaagttttgtatgtttgcatttttaatagctaaaatagttagtttgatgagcagggagcaggccccttttggtgtgcgttcaatttcta

SEQ ID NO: 51255 - DNA, 438 bp, Ricinus communis
  Intron number 2 from transcript 30063.m001436 (locus 30063 .t000040) derived from phytozome v7.0 (chr-ID 30063; pos 5 05224 to 505661)
atactgctgataccatcagcaccattgctgctcaggtatttctgtctccttttcttctgctgttctatttaacctcatgctttgctacaactttcatttctttctacttattagtaagtctaaagttctaatcatccattgatttgatttctatacagtcaattcataaaagcacatttgtttctatttaggaaatgagatcgtgccaaaaacaatatgattttccaagaattcaattcaattgcacatgttatttataccacaaagaaagaaaaaaaaaaaagagagaatttgaaagagaccaaattatgtgacattgcaacaattcaattccattagaaaagcatagtaatggtacatcttccatgagattggattgatgtgtttggatgatgaacaacaggttggttcaggggatacttctgctggaagcacaaa

SEQ ID NO: 51256 - DNA, 235 bp, Ricinus communis
  Intron number 1 from transcript 30138.m003982 (locus 30138 .t000156) derived from phytozome v7.0 (chr-ID 30138; pos 1 102553 to 1102787)
atcatcctccagaactaccacctcaagcctcgcaagtaatcatcattactagaaaccgaattcttcctttagaattttcttttttaattatatcggtgtttgtacttgtagttggagttctcaattaattgcgaaaccaagacactatatgaccaataacatatttgagttatctaattttgagtttgattttatttttttaaaatttttagcttattttttcgatgatgtagta

SEQ ID NO: 51257 - DNA, 379 bp, Ricinus communis
  Intron number 1 from transcript 30146.m003435 (locus 30146 .t000012) derived from phytozome v7.0 (chr-ID 30146; pos 8 1957 to 82335)
caggttttatctatttgttaaaatttttccccttcaagaataaaaactaacgataatagttctattctatagagtttattttaatcaaatattaattttgaaattgagagattatgttgaagtgtggtgtcttcttaattgatagcagatgtctagagggtgatgttctgtttgaaattttgtctttggacataaatttagatttggttgacttatattaggaagtccctctttgtgctgtattttggtgattttgttcagtacgataccttaattcatatttagtttctggagttagaatttattaccgatatttgagattggatttagtttgagaatatggagaaattaattgatggatatttgattttgacaggaa

SEQ ID NO: 51258 - DNA, 296 bp, Ricinus communis
  Intron number 1 from transcript 30024.m001696 (locus 30024 .t000013) derived from phytozome v7.0 (chr-ID 30024; pos 1 93818 to 194113 reverse strand)
ctgtagaagctgccgaggctaccatcagacaccaggtatggttttgttgtttgtatttttattgttattatcattattattattattattattattatttttattgttgtgtgaaatgaaatgatgtgtatttagtaagttttcttcttttaatttttgtttttagggtttacttttgtgtttgaaacagccacatgtcttttaatggatctttatctttttttttttgttttgttttgttttggcattgcactttctcaggtagaagaaaataccagattaaggactgaactaca

SEQ ID NO: 51259 - DNA, 646 bp, Ricinus communis
  Intron number 1 from transcript 29842.m003689 (locus 29842 .t000186) derived from phytozome v7.0 (chr-ID 29842; pos 9 15346 to 915991)
cttcgagtatgtaatgtgccttttcttgtaatagttatttgaatctttatttatttaagacatatatatcactctttaaccgtatgacaagtatagattttgtgatgttgaggtggttgttattgacaatatcacctttaaccacaatgatcttagataagttcagttgctaaagtttagaccacttgataaacttcacatcttcaattcccaaactaatttaacagccttgttcagaataaatgatttggaaggattcagttcttgcaaaatcaggtcacctgtggtatgctttcaattctttaaagttcctcgtttcattttggagctgaaagaaatgaattctagcaactatgatctttcaaaacataagaattgactaaatagagtacttgcattataagacttccccaatgttcctatactatttttctttatattaacacccaaataatatcatactccatccttgaccaggatttggagggagataaagtctaattcttttatgcttttgctatagttagatgaaaacatcagtttttgtagcgtagttatatcaagcatgaagtttatgtggctggggaagatgattcgttcccatcttctttaccgtatttgcttactgtcagaatatattggcagg

SEQ ID NO: 51260 - DNA, 597 bp, Ricinus communis
  Intron number 3 from transcript 30073.m002278 (locus 30073 .t000088) derived from phytozome v7.0 (chr-ID 30073; pos 6 18465 to 619061)
aaggtccatttaaaggaactcaagttatttttaaggtaattcattgcctttatattgaaccttatcagagtgtttggaatgtcaaaattagatgcaagaattcaattcaatttgaattcgacttagtcaattctcatgtttggcaagattatagctgctagaattcgatattttcattttgaaaaagcaatgcatcttgaaagaaataaaatcatgccataattgacaaagattttgtacgaatttcattgaattgaattattgcacatgatttattccgaagaaaggctgcaatatagcatgtgtttgtactagaaacttaccactatttggttgaaagatagtttttgttgcttaagtctaattagctttacttgcaaattaagcgtcttataattgtcaatgaaccagaaagattatatatggacatatctcatatgtaaatgttcaaacaccaccttttcttttttcatctgtcctgctgcagagtcatccatctttgtttcaggatgcattaaaaaaattttagtgcactgtatcatattgtgatttgtatgtgaaggtttatcccggacaacgagctggtggttttgaagc

SEQ ID NO: 51261 - DNA, 534 bp, Ricinus communis
  Intron number 1 from transcript 29908.m006088 (locus 29908 .t000139) derived from phytozome v7.0 (chr-ID 29908; pos 1 527885 to 1528418)
gcaactcttacttccaaagaagagtggcacagaaggttagattgccttcctatgttgaccttgttttaattggcatttcttctaggcatcttattttggcatttcaaattgctgatgtatgcaatagaaatagtggtacttctttttggttatttatgccaataaggttaggagaatgttatttcttttgatatctgctaaagaatcactgtagcatgattctatttatagctgtagttttattttgctaagttcagagactaaaaaaggcgatatcttgtcggtcatccttaaatcttgttctaaaaactaaacttatctttgttaagcttgcatatgtatgctttagtttagtttgatctaattataatggtaatttgggcctgcagtctcgaactcccttcagttagtttttgcttttaccttttcttatacccttgaatttgttttaatatttctatttttctctttcttttgcttgcttggtgactttttgcaggatagttgaacattgtataaagaaaagacttcaat

SEQ ID NO: 51262 - DNA, 941 bp, Ricinus communis
  Intron number 2 from transcript 29851.m002360 (locus 29851 .t000002) derived from phytozome v7.0 (chr-ID 29851; pos 1 9492 to 20432 reverse strand)
agtggactgtcaagactactggtacccgtttctttactttctccttttacttagaatgagttctccttagaattgatcaactctattctttctttctttctttctttctttcttcttcttctacttcttttcttctttaaacaaaaaatgcaattcgtacggtactgtgttgaaatcttatgtaattatgttttactaaccctttcaatgatacaatattttattggcagtgtatatatataaatatgcataggtataagatagttaagaaaggtattacgtaagacggattggactaaagaacatgtcttggacccaatattgtttacgaattgtgactacgaccaaccccaacaagtatttatacttttcaatatagtccataactgttcaaatttttgcactattctaaatgcttggtttgtaatttcaattatccagagtactttgaattttctatactggtatcttatttaatttcgtcatgactacttgttttctttatttatggttgtggagcatcatctaacatggcattttcttttcttttttatttttttctttcttacaaaagagtacttgcacaattcgtactcttcccatattgtactcaagtagaaatgcagcgctatgtaatttccaaaagttagttaaatggtgttaggattgtttgaagtggaccggtggatgcaacgtctatcaagatccactgaaaaatcaagaatataaaagagaaagtctagctttagttaatgtggcattgaagcttacttttggatgtgaagttttggtcttgtaaatagacatctcatctgcaatgcatttctttgatctcatctcataatttcaactcatttaaataaaagaacaaacctctttcaacattgaccttgttttttcttttcttcttcttttttgtgcttgatttctgagaacagcgg

SEQ ID NO: 51263 - DNA, 701 bp, Ricinus communis
  Intron number 2 from transcript 29844.m003332 (locus 29844 .t000178) derived from phytozome v7.0 (chr-ID 29844; pos 1 010801 to 1011501)
acagcatcaagaatcaatccaatcagtcaccagaggtacttcatttatttattttatctatctttatatgtaatttttatttttggcttggagtacagttgaagaattgctgctagttagtaagtaaagtttgcatgtgtttattttctattttagaattgggttatggaaatctttgtcgtttattataattttagtgttttcttttttgggtgtttcttacaaatcacgcacgcatggttttgtgtgaggttactatttaggatttagacaaaaatcaaatttttggatgttggtttctctttttgatgattcctttgtttccttttgttagttctctaagagtttttatggattttgagttgttgtgcttctaaccctaaattttcacttgcaaaaagatgagaagaggagcaaactgtggttggaatgtggagtcgtaggctaatggcagttaggctcttctttcccgattcaattttactagaaatcaatggcttataggttattttattgaaatcgtgttctattaaagtgtcgacccatgtgagttattcttggtggagtgtatctaatcgagtctattggagtcggtttttattttgatagcagctcatcattgtctctgtctcgtatatgaatgagattgtctatactttgcactagaagccgcaggataaagaaagtgttccaagccagcc

SEQ ID NO: 51264 - DNA, 813 bp, Ricinus communis
  Intron number 1 from transcript 30138.m003954 (locus 30138 .t000128) derived from phytozome v7.0 (chr-ID 30138; pos 9 16736 to 917548)
tctttgacactggtgcgtctcttttattcctcttctttttgggttttttcttgaaaataaattttcttttctcattttcatttttgttgttgaagttcctgttttcaattcttttttgttggctatgatagggaagccactgaaattgttctgttagggtttttattttgttggtttattttatgtccttattgtttggcattaattctatattagtatgtttggtgctgactgacaaagtttttggctttatattctctttaaagggtttttattgcttatcatttttttaacccttgacattttatgtccacaggattgttattgtgtttgttctttatcgggttctgttgggtttatttttggaatttttgtactgctttttttttttttaattgtaatgttatgaagctttactgggactttgtttagaactaaattgaggctatttatggttttgttatggaatgtggttgaagcgtttgatgagttttcattccctgattacctttggttttttgttgactggcaccaatttttccattttttgcccgtcgctggagtatgggtatcctatttaagaatgaaagaacttatgatattttgaaattataatagcttaaaagtgtttaatatatttaagtaatgctatgtttatggtattgttaccttctcttgctaagttgttcatggtttaaattttacaacaattttcttttctttggttggaaataatgcatgcttgccttttgtgttgttgaatacttttggtgatcagctacgcagacttggagccaaccagtgataaaaggt

SEQ ID NO: 51265 - DNA, 601 bp, Ricinus communis
  Intron number 2 from transcript 30146.m003473 (locus 30146 .t000050) derived from phytozome v7.0 (chr-ID 30146; pos 3 32781 to 333381)
tcgatcaaaagccgtatatcattcacgtagtggaggtaaagtccatctccatctctgcgtttttggcaaaatatacaaatatctattaacacttacttcgggagtcttaagaaatagaagagaaagaatattagttaattggtacgccatgaaaagaaaaaaagcaaagattaaataatctcttatatgtaaatgaaaacactgaattgattgccatttatcacgcatcaagtttaagttctttcatttgtcatctatcaatattgatgaaatttttgcttttgtaacaagatatggctatgaagtatcagtattacgtttgaattattaagtctctaaaatatcgaaaaagaaagaattataggaataagaaagggatagctaaatcatttttttaatccttttcttttttcctaccccattaaacgcggattattttctattaccctttcatccaaaccaagtgcaaaatactatattatatggccctagagtttctgatcttgactaatcaatataagaactgttaataaaaggagagatataaaagaccttgattgatattaatttacattctactctacagtaggaattggtggtg

SEQ ID NO: 51266 - DNA, 309 bp, Ricinus communis
  Intron number 2 from transcript 30045.m000479 (locus 30045 .t000011) derived from phytozome v7.0 (chr-ID 30045; pos 2 72326 to 272634)
gggagagcttgtgaacaaccgaggtatgtctattaattctgtagtagtactagaaagatgtctccgcattgttttccaccaaatcgatttaagattctcgttctaattcgctttgctgcatggatttgaaaagccgtaattgcttgatacttctatgtgtttaaagaaaatggtcatttgctttgtttttgagtcattgtaatgtaacattaattatcagtaataaattaaaatatcagcctcatgaagtcttttcgttttgtttgtcttctaggttttgaagccgggggccctaatattccatcaaat

SEQ ID NO: 51267 - DNA, 757 bp, Ricinus communis
  Intron number 1 from transcript 30068.m002663 (locus 30068 .t000153) derived from phytozome v7.0 (chr-ID 30068; pos 9 97491 to 998247 reverse strand)
agctcgagcagttcgttgctctcgccgtctttcaggtccatattcccaactcgtaacttgttttctttgttcttttatgtgcttagggttttcttctctattttgtgattttgaattttgattgcgcttagggtttcttttttagatctccagattattgggaatttggtttccggttagagagatttagtagttttagggtttgtttaaattggctatgagaattttggcttttaaggttacaattagggttttatgtactgctggaaggttgggtttaaagatgggagattcttttagtgagattatcagggtttaaatttggaaaatagagtttctagatgtgtgctggattgttgttaatcatattgagtttcttttatgcatgtagccaacaacaatttgtcaacactaatgaataaataacatctcagtatcttgggttgtttcaattgaaagctttaataatatgtttgtgggctttagttcatctgttaaaagcattatacggtctgatgtttaatacgtgagtttatgcttgctcttgaatgtgattgtatgtaggcagttattatgctccattgatcttattctcacacatgctgcccttggtttgtagttcttatttcttgtggtggtctactttgatagttttctatcggaagggttctgattgtccatgtatacctgaaactcatttatgctattatattatgtttcaggctggtgacgctctgatacagttgtatcacaattt

SEQ ID NO: 51268 - DNA, 906 bp, Ricinus communis
  Intron number 2 from transcript 30073.m002288 (locus 30073 .t000098) derived from phytozome v7.0 (chr-ID 30073; pos 6 68385 to 669290)
cttgtaagttttttactttcaagttaaaattgtgtcttatacagttaaaatgtttttatttatttatttatttattttctgcttgttactgtttgtcatgcaagtgctgctgtatgagtggatagtaagttcttacacttaatttgaaatttggatttaattattgattttaaaaatacattatcttgtggtgacatggtttgaattatacgaagaaagaaagtgactagcacgtatttgttcaatgcctggcaatgcatccaatcttatttcttatgaacacaatttctaaaagtggatcttgaagaatcagttttgggcaaaatataataacgctctgctgcagtccctgcacatactgcttgagaaaaacatgctaaaagattatacatttaccaacaaattcattgaggaaaagatattgctgaaagagcaaaccttactggtgaaaacttagccagtggaaattgatgagagaaaggaaaggttaaatgtttaatgctatatttcagatggcaatagtaaacaggttttatctcaaaacaccaatatttgtgcattcatgaaatgttgttctaggaaaaaacaagagagtgaagaagtcaagaaaaggtgggtgcctgtaagaaggtaatttatatttttaaatgtggaagcccagatcttttgtctatctctatattgtccttagatttttatttttcgttgaatcttgtggagttctaatgttggatgactgcaatagaaacctcctatatctgttcatcttcactatgtttctaatgaatttttgaattgtacttggttaaatccctgcaaacgaattgtgagttttccttctcccttgttctttttcagtcgttgattcattatttgtgtacttttaatagcttttctctggaagtg

SEQ ID NO: 51269 - DNA, 1011 bp, Ricinus communis
  Intron number 1 from transcript 29912.m005410 (locus 29912 .t000136) derived from phytozome v7.0 (chr-ID 29912; pos 6 92456 to 693466 reverse strand)
aaagatcgaggtatttctaaatccacgtcttactatgagaatgatttttcaatcttgtatgagactgactgtaagcatcaagtcgagtgaattctaattattcttgtgaaatatgaaaagtttgcactttttagcatcggtttgatttatgcctctttttacgtgtcttgcttgttgccactgggagaacagtgttgttctgtgtctagaagctaattgaactatcgttaaaactcgagtggaaggtaagcagaatcctgattagtatgttactgatttaattatctggtacaaaactagctacgataattagctcaatgaaactttatgtaccatattttgctagaagaatgctcaacaactttatcaattacagggtttaagtagctagcaatattgctacttttcttgtgtgttgacatatgaaacaatacttctaacattgtgtttgattcggatcttgtacaaaatccatagaattttagtacattcatttgcctttgatttttgaattagaactaatttcaaatgaaatgaattctgtgtttggtttaagtattttgaatatactaaacacgctaaatttgggttagaaatgaattccacataaatttatggaatccatttataccaaacactgtgtaagtatactttggagagacaccttggcctgactcagacaatactccgttttggtttgactacgatagaaaagtttgtccatgccataaagctcttgccaagagaatacatcaagttgcattttttattatgaccaatacatcctttgtgtttatctgaaatttgcaattgcacttatcatagctatatttcttgaaaatgtgacttgactagtgcgggatatagtttcttttcctgtactgcattgtaattttcttctaatcactgtggttcgagtcgagcttttaaatattcttctgcatgcacaatttcaatgctttaacagttttatgtgattctttttaggatatatcaagaactttcaggtgt

SEQ ID NO: 51270 - DNA, 696 bp, Ricinus communis
  Intron number 2 from transcript 29901.m000416 (locus 29901 .t000012) derived from phytozome v7.0 (chr-ID 29901; pos 1 76197 to 176892 reverse strand)
ttgagaccaatttccaaaaggtatatcttttttaaaaaatttgcatatatgtattgaatgtatgcataattatatatttagaaaagctccattgaaaacgttagattttgagttttggagaatatatccgaattgaattgttttcagtaaatttaggctttgagtatattgtccattgattgaagatcataagttaatttcttaatttcctcaagtattggcaacggtatgtgttgttagagaaaatcaaactttagcttaatcgaaaatttcaactgttaggtctcggggtagcttttgatctctatttctttccattgtagtttccgttaaaggctcaatttttagttgaaacttaagtttcatgcacaaatcttctaggcttagtatgcggagaaaaggtcttgttaatggcattcttataaactgctgttggagcattcttcacattcatacatgttgcaagtctgcattatatgtcaatgtatagagaatcattaacttctgaatgcttgagctaagagccaggatgaaaagtttgacatatgaaactagtgtgaatttttcttaattcttttttgtgctttaacttatgcatcattgcatccttttagctcgtactaaatgtgcatgaacctttattgcatttgaattcttacaggccagttgcacactggaagctggagttaaaattta

SEQ ID NO: 51271 - DNA, 962 bp, Ricinus communis
  Intron number 1 from transcript 29869.m001172 (locus 29869 .t000037) derived from phytozome v7.0 (chr-ID 29869; pos 3 99748 to 400709 reverse strand)
agtgtacttgcaatctggcttggaggaaatcaaaggtgggtatcaggtttcttcttttcattttaatttttcttttcgggtttgaacaatttcaatatcatttatccttctattttttccttacatattttaggctgttgcgcttctgtggtttaatgtaccttgtttacctactatatgaatattctcttgtggctttagattggtaattcgtatataattttgcaaactgagggtaagctactgaagtccactttttttcttttcactttcttgaactaatttctttctgtctcctttttgtaggaattcctgtcttcttcttccatttcttttgctaatcttttattgtccattaccatgaaattttctctacaaacttttgaaaagatctatggtgggcctcttgtttcctatttaatttcttttggctctttgtttggcagcttgcatgcttaatttcttctgttggaaacttcagccttattaaatgacttatgtgtgaaagtggtttgttcttttcttgattaatattaaataaattctaatcaaacttcataccagagcgagatgtggaagaaaaatggtgtgtcatcatgcatactgtatcacccatcatgatagcttatgagaaagttcaagcaattaatggttcttatagatccatcagacttgctacattttctctttgcttcatccgtaaggtctaattcattgtccattggcctttttttagctatatcatcataccattttgtttcttttctcctttctcatcctacctttcatgaattatttttcctctgctttttttgattagtgggtctgagatgcatcagttaaacgctcatgatcaatctgggctacttgtcattctgttcttcttgttttcatcctcaaaaagaccaactcttgtcccattgtaatgcagagaactcgacaaaattcattcaagctattac

SEQ ID NO: 51272 - DNA, 616 bp, Ricinus communis
  Intron number 2 from transcript 30115.m001254 (locus 30115 .t000080) derived from phytozome v7.0 (chr-ID 30115; pos 5 23893 to 524508)
tttgtctcagttgttgagattgctcagtgccagaggtaaatataaaaaaaaaaaaaaaaatagaaagaaaaagaaaacaacacacactattgtagctcattagctttttctttagtccaagcaatcatgacattcagacctttcttttatcgaatgttaattcttctttggggtttttgccttgtgggtattgttttgtggcttgcaatatttgggtttgatctcttagttactattgattgtatttgtatttaaaaagctatatgacaagagtgtcatcttggtccgtaaagtacttatcttatttcttttttctaaataattccttctttggtatttattttgagcttccgctatgcattgagtgcttaacttaactactcagcgaagtgaaagtctagtttgagattcatatactggttaattttagtaatacctcatagtttctgatgaaatatttgatcacctggtttacaattgtatatctcgattaggcattcgttttcttgtttaattgttttcattttcaatagaattcttgcataattctgttttgtttggcatttgatgcttgtgaaaaggtgagtccattatttctcctggagtcaggcaagga

SEQ ID NO: 51273 - DNA, 749 bp, Ricinus communis
  Intron number 2 from transcript 29910.m000931 (locus 29910 .t000022) derived from phytozome v7.0 (chr-ID 29910; pos 2 95231 to 295979)
aacagcaaggttgacgaaatatataagatcgaagggttatgtttccacaatgctcttcagttgtttagtccgaatgctttcaagcacaaacatccgccattagattatatgcagttgtcatagaggatggtaaattatgctaaaggcgttccattagctctaaaagttttgggttcccatctgcgtaaaagacctcaagaacactgggaatttgcattggataaactaacaaaatctcctgactcacagatctagagaattttagaaataagttatgaggagctaggaaagagtgagaaggatatatttctggacatagcatgtttcttcaaaggatattatacatatcagatagaaaacattctgaatggctgcgggcttaatgcaagttggggaatgattcgtgtcgtggacaaatgccttgtagctattgtggatggcaaattagagatgcatgatttgatacaggaaatgggttgggacattgctcggcgtaatcatagtaaattatggaattccaaagacatctgccatatattggctactaataaggaaaggcataaattattttttttccttcatatctatttcgaaaaagaaaagatttaaatagaaattagttttattttattttttcaatcttagaaaattgaaaaaatagagatttaatataattattttatttcatgataaaggcatatgaagagttgtatactttgtgattttgaattatatgtatttatagggaa

SEQ ID NO: 51274 - DNA, 760 bp, Ricinus communis
  Intron number 1 from transcript 29841.m002874 (locus 29841 .t000138) derived from phytozome v7.0 (chr-ID 29841; pos 8 38091 to 838850)
atcttctcttgtttcatttacttctacacgatcaggtattattagatcagaacacatattttcttctttcagcttttcaagttcttatgttttcttgtatacagtgtttgtggcttcttagcagatgtaaaaagattttctgtatttcttcctaaacaggaaactggggctactaagttgattctgttcagaacctactctgtactggtccaggtaccaacattgactgtttgtatatattcaccataaaacacaaatactgaccacatttgagacattgatgtgtgtgtacataacaaaagtatgaaatttatgtaaccatacatctctctaatcttcagtgaactataagttaaatatgtaacatcattattgcttttacaacgaagctaggtttcattcatatgtgcactctttgacttccgccactgactttgggtttttgtcataagcgagttgtatgtccttttatttataattgaatcattcatctttattgcaggttctccatatttttttcttttataatggaagaattatatgcattgaacagttttgtacctgaatacaggtacatgaattgtggaattttactagttaaaaaagtatatcaagagatcaaatgatccatatatatatatatatatatattcctctgttttttaggagcctttctttttctggataactgaaaagcccatttttgctcattgcatatgcaaaagaggaaaaagcttcagctgctttgtgcagtccattc

SEQ ID NO: 51275 - DNA, 946 bp, Ricinus communis
  Intron number 1 from transcript 30091.m000222 (locus 30091 .t000001) derived from phytozome v7.0 (chr-ID 30091; pos 2 0871 to 21816)
ctgctttcctcgtcagtatatttgaaaaagaattctgttgttagtactttagaacatcaatctttttttgctactaggtaagttgtcctattatgtgtccacctctaaatttagggtttctttgtttcttacggattaggctaaggaatttgagctttggagaaattaatgcttgattctacttttacattttcttttatctagtaatctagaataatttagagcttggaaggtatttgcaagacttttagggttatggcagttgcaaaaaaacttttacgatctcgtctaaaccgttttggatgattctactacttcattaataaataattgagttagaagaagaaaaaaattaccatttctgctactcaaattagtattagaaaggagtaactaaaataaggaaaaattgagactatattaagtatatagacaatgatgtattaataaagttggtagggactttcccttaaacactttactcttttgttatttaaagctgaatttatgttgaaatattcccatttggggttttggttggcaaagggctttttcaagaaagataagttttgaaatatactttttcaaaagtagataaattaataattctttttttttattataaaaaacaggtttaaaataaattaaaaaaatttataaacctaatttattttaatatttaacaataatttcaaatcgatctaagatctttatattgattatattcttgaaaagctgatatattaattttaagtaagagtgaaaaataaaagagtgaggaccttctagaaaagaaaaattcatgaataacataataatcaaatccatcttgtcaattaactaataatttcccggaaaaccaatgtcaccttccattaaacagcccacgacattataaaattcataattaattctttttgcttgtgtcaattacagtgggttctac

SEQ ID NO: 51276 - DNA, 920 bp, Ricinus communis
  Intron number 1 from transcript 30128.m008558 (locus 30128 .t000019) derived from phytozome v7.0 (chr-ID 30128; pos 2 502416 to 2503335 reverse strand)
cagttacctgataggcctgttacggtatgtctatctcatctttatctatccgatttctctcttcttttttttaatccccttctcatcgtatatgaatgaaatattggaaatcaagtacaagtgtaaatatctgttgctcagactatagacgcgtttatgagtaaaaataatgaatatcaaaagtgtttaacttgtttgtgtgttttttgctgctctgattctgtgcctggttagattttccgctgcagatgttgtttccttggctttttttactaaacccgagttgactaaagctgcgagattgtacagctgctccttggatactgcctgtaatcatgtatcttagttatttatctgttttggagtgctttaaaggggaaacagggtcgctttcagtggtgacccatcaaagatatgctttagctttcccgcactacaaatttgtgcaactattccactttttgttttttctttatgttccttgtttcgatttttttatttttattctcgtatagaattataaatttaactaacattcttttttcctatttctcccacacttgataacggcttttttgaccatgtttttaattctttgttcagcatttatgttttggtattccatgacataccttgtcagcaagtctattaagcaataagggaattctgctctatttcatcctttgtttgctgatgataattaacctcagagaggccgtgttctagttcacaatatgttaaaaggtgctatgctgctgtaatcgacctctttttcaatgcactctacatgactcaatatgagtctacttgagtactcttttatttgatatggttactaaaataggaaatttttccttaacttctgtcgttttactgttttacacatgttcatctctttctttccctgtgtgtcagacacc

SEQ ID NO: 51277 - DNA, 161 bp, Ricinus communis
  Intron number 1 from transcript 30131.m006981 (locus 30131 .t000132) derived from phytozome v7.0 (chr-ID 30131; pos 7 67628 to 767788)
accagtattattttggtggcaataatacaattcgggtaaatttcttctctttttcttttgtaaagcctttcttagttcaatttatgctttgttagtgtaaattctgtgcttggtttgtgtatttttgattaaattttgatggattttattatatagggggc

SEQ ID NO: 51278 - DNA, 706 bp, Ricinus communis
  Intron number 1 from transcript 29851.m002412 (locus 29851 .t000054) derived from phytozome v7.0 (chr-ID 29851; pos 3 14649 to 315354 reverse strand)
agcataatcccggccaccagtccgattttgccgaggtatactagaatttgagctgttttctttctagggtttctagaatgttactggaagtgatttggtcaaatgctatttgcatttgattgagtggctgtttaatagcaagacttctctaagttcaagttttctgcaagttaaatttagggaaagagctgagcttggattgatgtaaattcaagaagttttttttccactaatgaaagaaatgatcacataaatgagaataaagatacatgctattacataaatatgttataccaaagctaattcaagaaattccatacattagctaacttctgtaattctacatcttagataatttaaaccacattaagacaaatgcaacttgtaacatagggtttgattgaaaaatacctgcatatagtattggagaaaatctgactagtttatcttggtaagtctttctagaagatgcatatgtatatttgaattgtttttcccaacaatgaagcgttctcagtttcgcacctgtgaatgattttgtctattctaaccttctctacaataattgtaataactttcagacttcttagattgaatgctaaacaagcttttactatctctcttttgctgcattgtgcgtgtggtttctaacactattgctttacttgcagactatctataaaataagctttggtcagatatactt

SEQ ID NO: 51279 - DNA, 631 bp, Ricinus communis
  Intron number 2 from transcript 30065.m001161 (locus 30065 .t000026) derived from phytozome v7.0 (chr-ID 30065; pos 8 39048 to 839678)
agataaaccattgaaggttgtaattgctggtgcaggtgatgataatcttatccaatttttgttttttctttattaatatatagtttaacttcttgtttattaatttttgaatcatgattggaaacattcacttgttttcaaatttttgctcatcttgttcacttagtgtaatgcttgtgatggattctttacatataaaatatttttgttgaaatccatttggtttaatgtggatggaagatttgatcaatttcaaatgcaatggatgatctcgctgtggtaaaataaacatacgtggttccaaggtgtttttcttagcatgttaattgtaaatgctaagtgtgctgcatgaatagattatataccatctgaaggtttttgaatatccttcttagggttttcaacttctaggtttattccttttctttccctgggttgcctatgaaatagaaatttggaacatgggtctgaactaggttgagcacttaagcgtttgatgcactctagctgtcattggagtgtccatgcttttccttaaggaatttgttttatcatttattattttgtttcattagagtaaattttcaatggtgcaggattggctggtttatcaactgcaaaatatttggca

SEQ ID NO: 51280 - DNA, 617 bp, Ricinus communis
  Intron number 3 from transcript 29883.m002034 (locus 29883 .t000089) derived from phytozome v7.0 (chr-ID 29883; pos 6 15256 to 615872)
gcaggcgctgcagccaaaagattttgaaaggacaggtggttattactgtttttgtctatctttaggttttgtttatctttgggaaatcagaatttttagtgatagttataaggatgctacagatggtgaacgaataattaatcagttttagatgatttttctggtttcattatttacatgagcggtgcaacatgaagcatgtttatattttggaatatgcagtcagtagttgcttttttggtttttccatatgcatgtatttgcaaccattgactcgtaagagcataaaatttcaatttcttttgaattttctggttagattgtcctatgcttccttgtacgctttcatgctacagtgtaacttacccttgtaacttttcctcctttttttttcaatttgtaccagttgtagccttcagagttactgaagagctgaattatttatgttacggttaattttcaatattagaaaattataatgcatgtttgacttcctttttttttcttttttaaatctttctgtattaggcatagccactaatgcttaaattatgtcacttttatatatctttttgatgaacaaattatgatataggttcgtatatcctcgaagcctg

SEQ ID NO: 51281 - DNA, 593 bp, Ricinus communis
  Intron number 2 from transcript 29818.m000396 (locus 29818 .t000008) derived from phytozome v7.0 (chr-ID 29818; pos 4 4388 to 44980 reverse strand)
aattgtctaatttacacaaggtcaggtaatctcatttttaattcttgcaattgagacctatacgtgtttctgttaattatttacttgttatatgtgatgtgcttacacagaattcaaaattgtgtttcttttgtgtgttttgtgtatgctttacgacaaacagggttgttgcatataggagaatgtaatctatgtattatatgttttgagaatgagttgtttttggagctgtaaggtttctagtttgaatgttagtctgcgccaaattaacttaaaagaaaataaaaattgtgtaaaaaagacattgggttgttgaagtgaaaaggtactgtctgttaattttcatattgaagattttcattatttttttttttttttggcttggaagaagtttgatgtttgaatttaaagctggcttggattactttgtatctaatttgtttctttgatcaatactttgtatttaatttatgttgagaaatttggcaatttctttgattaggatcttttttttctttttgttgtttatgcttaatgaatcttgtgattgttctttaggcaagcttctgttgctttgaacgtgtggcagcccg

SEQ ID NO: 51282 - DNA, 918 bp, Ricinus communis
  Intron number 1 from transcript 29912.m005525 (locus 29912 .t000251) derived from phytozome v7.0 (chr-ID 29912; pos 1 618607 to 1619524 reverse strand)
ctcgtccatcaatcgttgttagagattcggtgagcatatatgagattgccattcttgggattgctttaacgtaaatttctttcattttttccaatctttcttctttaatctttatcattcaagggaaaacataagggaacaaattactcttaacctgctttagaaattagaaaacagaaaaaaatatctaagaatgatttcacttttaccatattcttattgcaccaatttagtgggcaattttcttgaaaaaatgtctcttcattttccaattgggaatagtgggcttcactttgctataaataatataagcatttttttttttttggtttagtgcagaaaaatttctcaatattatacttgctaggaatatgttatacaacaatagaaaccaagcaaaggtgaatccttttaatgccactctgaccacttgccgagggagaattgggaattacctgtttgagagtcgactattcttctgaacccattttcttttagagtttcttttagtgtgtgtatggtgttgcttgactctatgttttgtgattaataatgtaaactgggactatagcaagtatatattttccactttcttggaatatgttttgcatgcgtagccatagtcagcattccaaaaactcatatatcgatcatacagcctgttaaacttttcttttcttttatataaaaagaaaaaaagaaaaaaaattctttctgtaacacactcgtggacattgttgcagattctaaagtatagaaaatagcatttgtaatgagataaatcctgaaagatgcaaaaatacagtcctttaaatatatatatatatatatatattttgatttcttttaaaagctttttaggtaacttttttcctttgactgttgctgttgttgcaggtgcacgtcctgccgcaagag

SEQ ID NO: 51283 - DNA, 452 bp, Ricinus communis
  Intron number 2 from transcript 29822.m003491 (locus 29822 .t000166) derived from phytozome v7.0 (chr-ID 29822; pos 9 49973 to 950424)
gtcatgttaagactctttacaactttgttataattttctttttcttttttttgtttcttgagtcaagatttatcatatggtttttcaattgtcgaggatatatttatatattgttcggaaagtctaaaagttgcaagaatccaattcaattgaattctattttagttaattctcatgtttggaaagattatacttgctagattcaattctttcaaattaaaataataataatacattcttaaagaaatgaaatgataccacaagtttatatgaatttgactctacatgattattctctgaacaaagccttaaaagaaaacagtggttgattgtaaagccagttataaatactgaatgttttatataatatcattgttattcattagagtgaatatggtatgtgaattcttctcattttgaaatttttgttattgggatgtacagcaactgca

SEQ ID NO: 51284 - DNA, 516 bp, Ricinus communis
  Intron number 3 from transcript 30128.m008911 (locus 30128 .t000372) derived from phytozome v7.0 (chr-ID 30128; pos 1 674244 to 1674759 reverse strand)
ggtttcttgtgtttcttgtttaccagaagtttccagttagttactgctggtattttcgttcttttgttcctttctagttggttggttgtatctcttatatcttcactgtagtgacctttcgagttcctggtcgtgtcattgtttttatcaatgtttatctcatggaatgctacactaagtacatttgatgtgggtcgttcttttgggtcttgaaaaacaaaacagggcgtgtggttcttttaccttttagaattgctgtcattttgatttctgggtaatttagtgtcatacatttttgttgaagctggtatttttcctttctaaatacatatctagtgttcaagctggtacttttaatttcaaagttttcccttttctctcttttattgctattaatatgagtttttgttttcaattatttttattggccctatttttttatggtttaggatttcggtctaagaactcggctgagttctcacattttctttttttgttcatgacaatgtgcaggaa

SEQ ID NO: 51285 - DNA, 883 bp, Ricinus communis
  Intron number 2 from transcript 30078.m002231 (locus 30078 .t000024) derived from phytozome v7.0 (chr-ID 30078; pos 1 43102 to 143984)
gcagctggtgttattgcacttctgaaagataaaaggtcagtctcttgatgcacagacttgaaatgttattgtgttgattgtttcttgcgttattgtgctcgagtttttttgggatataagagaatatttctctttatgttatttactgctggtgttcaatgatattggtgctgcttaaaaatgtgcttgtaacttgactaggggaaatgattttgcattctacattttgtactgtaattcttgtttaggcattcaataaaatgtccatcatacgtgcaattgcattaaacaagcaggacattgctctattttccattattgatagttttgattttagtgtccaatatgcatgtacttgtaaaatgctttatgaatatgcttaataaacattgacttatgatgaacggaatcaatatcggcaaaataatgtaagaaaactttttatcatttgaagaacgaataaatgcaagtcaggtacattacatgcttctcgatggtatgattgtttattgttgtagacttggacatgtgtctgtttaaaattaggattgtatttttcaaatcatatagatattttatccatgatcggtgtctcaacctttaattaatttttccaacactctggttaggattctggttttgatgtctgtttttgtactttcaactttatgattcataatgttgagtttttaaatttagagattattgttttgcaaaggcattagattcaaatcctataattcacaatagagagttgtccttgtagcttctttgattatttaaaaggaaaaaggaatctagtctttttgattgtaattacttgatatcattttgttcctattttctttttcatttgttttcttttaaaatattgttagtgttg

SEQ ID NO: 51286 - DNA, 473 bp, Ricinus communis
  Intron number 1 from transcript 29818.m000397 (locus 29818 .t000009) derived from phytozome v7.0 (chr-ID 29818; pos 4 7522 to 47994 reverse strand)
cgattctctgccttttttgtattaggtaaatttgcattttaaataatttgctgttttgcgtttttattcttcaagaattctactgggtttgtcttaattttgccttttcttttattcttaattatcaatattttgtaattgtgacttgtaagtgtgtgctttaaagatattttctattccgggttccttttatattctttaagaactatatagttctggctctcgattagcatttttacccataaagacatcagctccaagtttgcgttttctaaatacattgccattgcgtgtgcttttttgttttattttttttcgtttggtgcatagacttaattacatgttttctgctaaattttgtttcattgcagtagttttattgtgttaatttactagtggctgtttacttgtttccttggcattgctgtaccttcttttttttgacttcgtgttcttgttgttttctaggttca

SEQ ID NO: 51287 - DNA, 603 bp, Ricinus communis
  Intron number 1 from transcript 30099.m001691 (locus 30099 .t000070) derived from phytozome v7.0 (chr-ID 30099; pos 3 45654 to 346256 reverse strand)
gaattcaggtatacatctcttcggtctctcgttctgtttttttttttttaaattgtttcgttcggatctgttattcttaaagcatttaaaaaaattatgttgaaaatataatgtttaatcgctcttgatttggataatgcatgctattttcaaaaatctcggatctgcatttgttaagcaatttttacgcatatgtatagatcttgcttttgtgtttatttagtttaattttataaacgtaaggttcatttctcaaaattatctcgtataaaacctagatctaactgttcttttttgttttcatttcgaccttccagtcagatctatgagaatatattccagcttttgatgtttatattgctgcacatcttcttttgtattagctggattacctttttttaataattatgtacagttcatttctattctaaaacctatctaagtattagttatgattttgagttacattctttgagtatggatctgatttatcttgatggatctggagtttaccacttccattgatgcttttatttttatttgtaaattcatcgatttaggatatgctgattttgttttgttttgttgtgtttgtgtagcctg

SEQ ID NO: 51288 - DNA, 366 bp, Ricinus communis
  Intron number 1 from transcript 30078.m002210 (locus 30078 .t000003) derived from phytozome v7.0 (chr-ID 30078; pos 8 824 to 9189)
gcgtgccatccacatgtaagtttgttagagaacagaaggaaattagtggtagtgcagagggtactcatgccttagaatttcccttttaattattttaatagatttttcttgctagagctttgaatcccataaaacaagaaaaaagaatagttaggactttcctattagagcttgccttaaatagagcatatggctagaaattccatccttgtgcacccgctataggaggaacccaccagtccaataaatgccgaaagtttgagtgtttcagatagatgcctgcagccactttgcaaattataattcctcaactttattctcttctttttaggcttttatttacccctttaccgtcctctttgtgcc

SEQ ID NO: 51289 - DNA, 664 bp, Ricinus communis
  Intron number 1 from transcript 29917.m001970 (locus 29917 .t000039) derived from phytozome v7.0 (chr-ID 29917; pos 2 37644 to 238307 reverse strand)
aggcattgagtttcttgataagcagcagcagcagggtagctaagctggattttgcttcaattatgttgtttgaaaatgtagcccacttccattgaaaaacttaactaggggaggtttccttcaaaacgtctttttagaaaaagggtggagcaccaaaatagaagatggcaaacaaactagaaatcatgtcagaaacaaacaaaaaaataaattgagatgtggcccagttacaggaaagcaagttaagccagtatcgcgtactctttaacggtaattgttttgtcctctataaatagccatgcatcccatgcaaataattctcactgctgcgaaaatccaatagcacatccaagaattccctgtaagcaccaaaataattaagcatcatggaagttggtactttccttctatctcttcttgtcttcgctatggcttcttcattttgtgccactgcttttgatcctagtcctctccaagacttctgtgtagcaacagatggctctgattcttctggtaattaatattaaatgcttactgatgtttcaatttttatctcttttttgaactgatatgctttgaactctgaaatctcatagacatacagatttttccattatcattttcccttaatatgaattatattattttaatgcagtattcgtga

SEQ ID NO: 51290 - DNA, 527 bp, Ricinus communis
  Intron number 1 from transcript 30010.m000676 (locus 30010 .t000026) derived from phytozome v7.0 (chr-ID 30010; pos 4 06351 to 406877 reverse strand)
catttaaaaaagttcaaatccacagagacaatactgtaagcttttctatatatatttttttaatctagatatgtcaaatatgattactttaggagtttccattcttttttcccgctttttaggtacttttggataatggatttttttttttccttttgttgtttcagtgatatttcgtggtaaatttgacttttatattttcattcttttgaagctgattgattatgtacataatttctctgtgagagaagtcttgtgggtctttggtaatggacttgaaaagtgtgatagattagttgtttgtggtacttgatattaagtaaattaattcaatcaaaatgacatgctttattatacgaagggaagaaattgtttgaatagctataagtaaaacagcaagtgagagttaaacttagttcgggtttgtgataatatattcagtggcaagttgagtgcttggaactaaattcttgatggtgaactcattccttatattttcttctattaatttattgatcagacatttg

SEQ ID NO: 51291 - DNA, 521 bp, Ricinus communis
  Intron number 1 from transcript 29838.m001726 (locus 29838 .t000096) derived from phytozome v7.0 (chr-ID 29838; pos 5 15255 to 515775 reverse strand)
atcgaggtaatgaagaaaattttcgaattcaagtttttatttgattgacgtgcaataattgaaaaaattgagttctagtaactatacactttgatatgaaactttaactagatagaattcaattgaattgattttttcaggtaaggataaatggctttaattggattgtattctttttttttggttttcttgggcaaattttgaggtctagcagtattgtagattaagttaataaactttgtggtgttgaatttgtttttggttcacttacataagtggcttttattgaatatatatcttattaaatcagtttggtgattggcattgtgttgcatatataatgaaattatgtgtttcttccttcttcttttcaaatgtggatagtggattaaatttttgttatttgggccaaccttgtcatgtttctctacttgtatttcagtgatgtatttacacttgcttgtgaaattgctttgatattttcagattgagggcgatattttatctgtaaagaaagcact

SEQ ID NO: 51292 - DNA, 646 bp, Ricinus communis
  Intron number 1 from transcript 29844.m003238 (locus 29844 .t000084) derived from phytozome v7.0 (chr-ID 29844; pos 5 64316 to 564961)
gggtgagtaggactaatgtgcagctgggagattagcatttcagctgctgatcactacccatcactgagtttcaatcttttggtaggcttttgatccataatgactgtaaaggaatcatctttttgcagtgttttgtggtacccatatggttagaattgtcctttctatgctctttttgtattatactagcctttgttttcagatcatgattcagcatcaatgttctgttcacactttccggctcatgtgtactgtagttcattcgagattatctgtttccattttccaggtgcttctggaaatcaacatgcgttttctacttgtctgaatattagatttgatttttcccctttaatcattatgtgtgctagtttatgttctttatggttgacttatttgcagaatataactaacacaggattgtactggtcggtcattttaatctgcacattattggttcttgcatatgacttctggaaaatcaaaagaatgcatgctctcttctcttttctttttttgagtttatagcaccttggtttctccttatttcgtctgttattctatttcttcattgtctgactttatcttcacttatgttttccaattttcaggtttaaagatccgaatttcaccttgaatctacaaa

SEQ ID NO: 51293 - DNA, 990 bp, Ricinus communis
  Intron number 4 from transcript 29981.m000582 (locus 29981 .t000011) derived from phytozome v7.0 (chr-ID 29981; pos 9 9814 to 100803 reverse strand)
gcttgatagttgaaggtatgtgcatctatgaagtaatctcggcatcctatgttgatggattgtgtccatttgattttttgatgttcttaaatctagttggggtatttccatgataaactacagattttgtggttcattgacttgctacaatgtgccttttctcaatttatggtcttcccatcctatagtggctttgttattcttgttgtagatgtcatttcttttccacgattaagttactgaaaaccctttcccaggcatatctgtaaatatatcaacatggtctcctcttcaaaacctttatatagtagggcagcagcaaaaatattccaatctctatgctgctaaggatgattagcaataaaaataagttgttagaaagtccagtccttctcacatgtcccatgagcagtaagattggtttgcttctagcttaagttcaaccttctctagtaattgttattctgattgctaccttgttttaactatgaatttccacaagtgcagtaataatatatataattgtgttagaacttgatctaacatgtaatcacctctttaaatgggcaggaagagtttataatgggcagtagtttttgagtgagcaatagatcccgcgaagttgcttgcacatctaaaagacatgtttgtgttaattccgttcaagtgtataccccagcatgctttgatattttcttgtttgtattcattcctcaaaagtaaaaaacatgtcaatatctctgggacattcattgaaccaaaaagtaatctctatgttatgcatacttctctggaaaaccctgttcttgtctttgttactccacatctttttgccagctaaaaatcatcaaaatcttgacagatttgtttcatgaagattgactataccatcaagtgttgagcaaaaaatgatgttaaaggcagaaaattaactatgttctatcaatagagcctcatctagaaacttttgtttgtcattgcaggaagacc

SEQ ID NO: 51294 - DNA, 738 bp, Ricinus communis
  Intron number 1 from transcript 29848.m004627 (locus 29848 .t000183) derived from phytozome v7.0 (chr-ID 29848; pos 1 030887 to 1031624)
aacctttgattatcgcacgctttttgaggtaaaagaatatgaaaattgttttgtttggctgctgagaaagcggaggaagaaaacctaaatcttaccatcctttttattcttatttttactgcactgtttactttaaaagtgaaaatctcattgtaagtaacgtttagattcaatttcttttgtttcagtgtctttgattttactacacttgtttgtttggttactgatttgtaattggtgtgtttggtttgcatgtttatgctgggagcagatcagtgtaaaaatgacggatttgcccctcctttgcttgatgcatttagattcttgctttttatggtgaattttatatgagaaagttggatttgaattaggattttgttttatggatattaagaggtgtcaacttttcttaattaccctagtagtagaggctaaacctgtagtaggtatctgcttggcgaaagagtatgtctattctgcatatgtagtcattgcacgtgtttctttaactggaaattgtgctttaaacggttttagctcgagttagagcgttggtgacagaatttaatgctttttgtggtactgtcttgggcacagaatgttaaaagttttgactacaactcaaattttcattaacgcagaagcaatcttgaaaataatccttttgtagtactaatctgatgagtgttttatttatttatttatttgtatttttattttgcgtgtgtagagtgtgtg

SEQ ID NO: 51295 - DNA, 769 bp, Ricinus communis
  Intron number 2 from transcript 30128.m008656 (locus 30128 .t000117) derived from phytozome v7.0 (chr-ID 30128; pos 3 60687 to 361455)
ttgggacttactttgcaccataaagctctgggaaagtatgctattttctttttctactctcactataattactaaattcttgtgtttatttttggactatcagtttctgaacggttcgtttttaataaggcgacagtaaaattatgtttgaaaacttgaattaggtgtctggatcctggaaagttttgggtctgctgtgagatgactgctctagaaacaacttatttgctaatcttttattggagtttgttttctagttgttccacattagggtaacattcaaaaactttgattattcatttgtaatttcttcaaaatcttagctcgccaccccccacacacacagaaagacaaaatatatagaattatccttctttatagtcttatatataatgaagaaagctagttttggccccatcactgcataaatgtatgtttacattcataaatgtagtcatgtatttggatggataaatggcctattaagtttttttattaaacgtcctttatgcttctatcatttttattgccttttttttttttcgtgatgcttgcatgctgtttgtcagccacctttctgctaatatttgtattaattagttattgatctccagtctttcagatttgcactgaggtcattgtaagaattataatgcttgagagttgatattcatgtttggttttgttatttcagtccataaatgattttattatcttgattttggcaaacacagggtatttgaagtttggtgccttcatattccagtct

SEQ ID NO: 51296 - DNA, 959 bp, Ricinus communis
  Intron number 2 from transcript 29912.m005412 (locus 29912 .t000138) derived from phytozome v7.0 (chr-ID 29912; pos 6 96797 to 697755)
ggtatggttttcttttctaatgctctttctataaccttatgtgctttatttagctctttcgattgaatgtcactcacaaatgggtttttactacctgtttgatgcgtgtcatactactcgactctgtttggtacaagataatcaaagagggattagagttcccgatagtctgcctgtttctttttcttttgtcaatcagtatcctttttgagagaaatgttatgtttatttagggcttttcttttctgtgggtatatttcctgttgtgttttagagcttttagattattgataacaggcatgagcttgcaatcatgttttctctgcccggagaagatccatagtaataaaaatatccttgtggttaagactgagctttaagatatacttagtccttagtataaagttctctgtgctagcttcagcttaaaaggaactgaatttgcttttgcatgcacggtggtggttgtggtggttaaaaatggttgaggtagagtcaaagcaaactttcagaagagcagtaagaaaagtgataaatagttgacacataaacacaaaattttagagcctatgctaaaaatatgcaatacttatagggaaaattaaaagcttttagagttcagaaggtaaaatcagactgattcttgagggtagctaaaatacaaaggaaaattttgaagggcatattgtaaaaatcacgccaccctccacctcccacagttcatgcatatatctcatcaatttgactccttgcatattgtagttatgttcatgcttggttttaattgttagctggctgatttaaatttgcattagtctgcttctgatgatatatattctctttctttgctgcttcccctcacttcctttgaaaatctagattactacctttcttttaatatgttccttaatacttggtgtatagtttctagcagggaacaagtgggtgcttcagacagt

SEQ ID NO: 51297 - DNA, 421 bp, Ricinus communis
  Intron number 1 from transcript 30074.m001374 (locus 30074 .t000041) derived from phytozome v7.0 (chr-ID 30074; pos 3 09559 to 309979 reverse strand)
acaaagtcttgagaggtattctatttgggaactttttaaaaatccctaaaattaacaaaaataatattatttttaatgtaaatttattttttttttaaaatattattttttactttttaaaatttacggtatagttattttttagttatttttcaattgttttgtggttgttcttcagttgttttatctaataataatcaaagaaaaattaaaaagctataatttttaatattttactctaatttaataaaaaaaaagatcttaggtattttttatattttcccattctattttgtactattttcttttaaaaaaaaagactatagtaccagataaacctcacagatcatacacaaacacatgcaaagtttctttttttttttccagaaaaatactgaattgtattcccttatcagaacaa

SEQ ID NO: 51298 - DNA, 738 bp, Ricinus communis
  Intron number 1 from transcript 30146.m003495 (locus 30146 .t000072) derived from phytozome v7.0 (chr-ID 30146; pos 4 63135 to 463872)
gcagcgtgtgggcccagagcgccaccttcccacaggtcccttttctctttttttatccctctttgtttgtcctgatctgtttgtttggattgttagggtttttatttgtttgttcaatttgtttagatttggattggatctattacgtactgatacaataatcatcatttcagagttgtgattcacattggagaaagggattggtttttttattgagttaaaatagttaattatcttgatttatgtgattgttaaagatctgttgttagccttttagattagttatgttgtgatctggatcgaaattacgaaaatgaaatctgtttaaatgcaccatgccgatacgttggtgtgcccataagattgctcacgagtgaatagtcaggtgccaacatctgcgagaaggacattggaatgtttaagtccgatatacccttaacgtaccacataagggggaagaaagtttttctattttgccaatgatgtttgtttgatttcttaggctctgaaaaacgggaaaatgctagtttcaataccaattgaggataagcttaaactttatactgttaatgttgctgaaattttggatttgttacatttttgtgagttcaatgactttccatgtttggtatgcctttcaagtagacatgataatgttcatttatgtaagaatttgagtcatttaagattcatttgtcgatttgattccagttgaaaccagaagaggttactgcaatc

SEQ ID NO: 51299 - DNA, 1012 bp, Ricinus communis
  Intron number 2 from transcript 30146.m003495 (locus 30146 .t000072) derived from phytozome v7.0 (chr-ID 30146; pos 4 63949 to 464960)
aaggagagcctggagctgtgattcgtggaaagaaagtgagtgattatttttgatattattttgttactataattgatctagatatagtatagtatcagtgatatagcttttgcctaaggttttagccttataaatgtagctcaaatttgttttcccttttactttccaaattttcatgacattgaagagtgtctgttgtcaaatgaagtatagaagggcaatacggttcggataaaaaaaaagacctttttcccttattcttatgatgcattaaagttcagattgatttgtggaaataatgcagtagatgcgagtgaattctatggacacgtacctttattatgattaatgggcacaaacaggtgtttttgtctatcttttgaacttcaaaatctgcttgtgaggaattcctgtaaagtttgttatcctgctgtccaaacctatttaacactttgttatagaccttaaattcccacttgtcctcgaacaaataattataaagcttcaaggattccatactttggaccatctttaagagccccttactttttttttccatgacctggtccctttcgttggcctcttgcagacaacagagtattgatagatggatgacaggttgcttttactttagcaaggtttagttcacaaagtatccgcagtaggtgtccctaataaattataagatttaccatcttcttaagcctaggatgcttaagatctaataataatgctctgatattcgttttccattggtctgctgatgatggactctctttaatcactctgtacaatgtggaagagaaattgaatataataatcttcatggataatttgtgttccagtatgaatttcttgtatttggtggcagtaattggtttatgtttaagtcgtcgagattttaaattccatctagtaaaatgatatgcgatgaatatgcatgttaaatgttcttttatttataatttttttcgcagggttctggtggcgccactctgaagaagaccgggca

SEQ ID NO: 51300 - DNA, 714 bp, Ricinus communis
  Intron number 1 from transcript 29827.m002603 (locus 29827 .t000076) derived from phytozome v7.0 (chr-ID 29827; pos 4 21321 to 422034 reverse strand)
taagtggaagaatctcatcaatcgttacaaggtaaacttagcatcttcttcttttttccctttataatttaatgggtttgtaaatttcttgatttagggttgaagtggaaaattaattagaattttatgtagcatagttggtgttttgatgcaatgcatgcacttgctcttaatttgcagcgttatccctgaaaattgcatctacctgggcttagacaacactcttatggtttaatttgcaatttaacaaagaaaagcttcttgttatgtttctttttcattcccttgaaaccctactgcttaaaaccttcttttgaacttgtacaccacttaattacccaaatatatatcatactaacaagtaattaagttgtttgtagctgtttacatcagcacataccttttaagtaaaataaggcaatcggtccatttatatcaaagcatgattttcacgaattttatttttcttaaaagttttaatcaaacgtaatactattgttattaacttaagcctagtattcactatgaaatttttgatatcatactaacattaaatcctacaagttaaagtgctttcagatatggtgaattttgtaattgtttcctctttatgattttatgttttgggatttttatgcagtttctttgctgcattattctattttgatgaagctttatggtattaacagggcaaggaaacatctgatcctgata

SEQ ID NO: 51301 - DNA, 605 bp, Ricinus communis
  Intron number 1 from transcript 29908.m006032 (locus 29908 .t000083) derived from phytozome v7.0 (chr-ID 29908; pos 1 219091 to 1219695)
tggtgctactcaactcttcttcaaccacttgtgttagtttattcatcttcttctttttggtttttggtgttttcgtctgttatttatacttcatgcatgtcagtattagattctatataattattaatttttttgcatgggatttgtggatcatgtggatttccttcataatataatatttgctttcagtgatcttttcctttttgattcttttggagtttcccaattatattgaggttctctgtaatacttgcataattgcatgattgttgctaatttaacttgcatgcaatggactaatttattttgatggattggatacaatttgactttctattgttgcttattggttgattggtaatatgaaataaattgtcaaagaattggtctcagagaaattcattgtcccactattctgttttctcaatcttatggctacttaaattggttatctactgctatattttcgtaatatactgcagtgtaaattgatgatatgaagtgttttcttccctgaattgatgaaaattttcaattttaacacttattggcaaatttgtgtcttttcagatccaatttcactggttagggatcatcgggcaaag

SEQ ID NO: 51302 - DNA, 694 bp, Ricinus communis
  Intron number 2 from transcript 30131.m007156 (locus 30131 .t000307) derived from phytozome v7.0 (chr-ID 30131; pos 1 902068 to 1902761)
agagcacaagaggaattcctactccagggggggtaaatgtatgaaatttaattatccaaaagtgactggaaatagaatggaatttgttgttgggtagtctaaaagtggcattcaattgttaatcaagaaatatcacaaagagaaaaaggaaaagattaaaataacaatttctatgtgagaacatctgtcatttggcagatgaaataactatttacattatataagagatttctgtcatacaaaattgtttgagtaattattttcaaactgtatcctcttatgttctactcaagttagaagtgacatcaaaaaaagcatcttctgtgcaaggaattgtcagaccacccatcggatgatcataaccaaattgttcctttgctttgttcagcaaatcttgaaatgaaggctgattcaagtatgacactggaactaaaaatcgtttcttccctgtctccccaacatacactgccaagaaaccttttggaacatgcaaagatcttggggcagccttctttgcagccaacacagatggacagagaacactaggcaaacgtacagccatgccttctcggttgatgtatgtgagcagaagagactggatctaaatagctttgttgtttgagggataaggtatttgtttgtaagcaaagtatttgaagagaatgtggaaactttggttgaatttgagcagagc

SEQ ID NO: 51303 - DNA, 736 bp, Ricinus communis
  Intron number 2 from transcript 29950.m001184 (locus 29950 .t000068) derived from phytozome v7.0 (chr-ID 29950; pos 4 07622 to 408357)
aaccttctcgtgatcttggtcctcctccaagaaaggtttaaattcgttatactcattctctctctttctcctgcattagtttgaagatgagaacatgaataggaacagtgacaatgtgaacactattagatctgtatttcatcttttcaaagaatttgtcatatagcagcaatagtcaattgcgttattattttgcatttcttcctgctatgctaaaagggaatttagcacagaataccaatgtgactcaggctgcagttgtcggaggttgttgttttcctttcctttcttttcttttatctgttttctttttaatattcatgggccaactacacaagccatttcttatatttatcataccagaaaattcacctacataactgtttcttcttttttcattagatctctcgctataaaacgatcgctcacccagcgattgacttttgagttttgagtacatagatagaaattggccaacttttctttatatatatatatataattattttcctgacaacttctgtataaaaatgaaaaatgataaaatttgttgtagtgaagtggtaataaatttgaaagagagagagagagagagagagatgctaatgacaaagttgatgacgatgaggatgatgctcaaaaacataatgatggtagtaatgatgatttggaattttatggtgggtttaaattgggtgcagacgagaggggtgagtggagagaggaacagtagagt

SEQ ID NO: 51304 - DNA, 385 bp, Ricinus communis
  Intron number 1 from transcript 30138.m004032 (locus 30138 .t000206) derived from phytozome v7.0 (chr-ID 30138; pos 1 412022 to 1412406)
ctttcaatacgatcacatcattcctttctctaaaggtttaatctttggcacttctctggcattttaagcttctccttttcttttttaatgggttcttttctcttttgtttttcttttgcttcttgaagctgaattactacaacaagcatgtttgccttacttgattattacaagaaagctgaggccttcctttgattgtataatttaattgttaacaaaataattcaatttttcttgttttagatttctgaaaatacagttcatttgagttctgttatcattaattttcttgctcttttagaaatttaattaactaggaattgttttcccaatttgggttcgtattccaggaggtgaatctactgctgctaattgccaaatactt

SEQ ID NO: 51305 - DNA, 731 bp, Ricinus communis
  Intron number 3 from transcript 29950.m001157 (locus 29950 .t000041) derived from phytozome v7.0 (chr-ID 29950; pos 2 25677 to 226407)
gattcaatcgtatttttatttaattaattttttttaagtatttgttgggtggtggttgttgtttttatatataagttgatcttattaatttcttttcaagtttattcgccagcctaattgttatgatcctcttgtatgatttacgggcaattcttgcagtgcctgaatataaatgtgtatcttaaacttcaatcttccccttaaaaatcattgagttttgattttgcacttagtaactcctttttgtctaattttgtttagaatttattggaaattcaacgtcacaaaagtaaaaatatgaaagaagtgatggcgggatgattgcctctgtcgtattagattttaggtgaacttttgttgagataacttataaggattttcaaggacaaaaattaaagttcacgagttgcttaaggggtaaattaaagtttaagaatattaataggaaacacacctaagctcaggaatatgatgaaatgaccctccaatttacttaactggatctaaatctttaagataaaactcattatatgcaataatgaattaaactttaattaagctttcaagtgcttcctctaatttgtaatttttatagaaggcctaatcatatgcatgttgtgctctgtactatcactgaattggcatttttaacctttttcttgtgaattatagagaataaggatattcttctggttagttctttgctgatatgtatgttggttgatgtagtg

SEQ ID NO: 51306 - DNA, 704 bp, Ricinus communis
  Intron number 1 from transcript 29904.m002888 (locus 29904 .t000002) derived from phytozome v7.0 (chr-ID 29904; pos 2 1917 to 22620 reverse strand)
ggtagtccatttcctgtattctttagtgcaggtaattgttatttttagcattctcgccatgtaaagaatattcttatacttgctatactttgtttatccatcttttcattataggttgaagttctcttgatatgcatacatgtcgtagtttgtgaagtttttttctcttatgttctttagtgtggctgcttgttagtattcttgaaggtatgtcatattcttgtattcttttgtcgggagattttaggctggtcttatcttcatatacatacattatatttggtagtttttgaactactttcgaatgtttgccgttaattgtatgcttttgaattttgtagattctgcattgtcttttgaacattctgaataatttctgggtcatatgagaaatatcaaaaaatttcttttaattggtcttgttcgatggttactgtagaatgtgaaatttgttattggaagtaaaaagtgaaaaggctgggaagattttcatctggagcttgtgaactattaagtgcatggttgatgatagttctagaatcaggaaaatgtagtaacattgcttgcatgctgtttattttttccataaactgttttggacttgctattcttgtatttgggctaaatttattttctttagtggaacattttatggaataatgaagtgtcatcatgcaggtacttcaactggaggactgttgggt

SEQ ID NO: 51307 - DNA, 916 bp, Ricinus communis
  Intron number 1 from transcript 30128.m008717 (locus 30128 .t000178) derived from phytozome v7.0 (chr-ID 30128; pos 2 706383 to 2707298 reverse strand)
gcgttgagttcgagattgataagatcacagggtcagttcctcttcctcataaatgttttctttatagcatagcttttacatataataacgtaatagaaaatcaaggaaattgttagaggaaagaagtagaccttaaatttttgattatatatttgtttgtggaaactgtaaggaccggtgaagggagaatctccgatgatgtagatacgtgactattcgttgtagccgcttggctatccttgaaaaagtagagggagggggtttgcgattctaagcaggatatgggctttcaggctagggtttttcagaattatgtatgctttgattctttatcgctttaataaattagtctacgattaaattagatttattacaacttaagaccaagtaatagaatccgctctatctatcattaagcatttcagactttggtttcaaccgctatcttctcttagttctctttagcatacccttgctttctttttacttatatatgatctcaagtctaagcatcacattgtcttcaatttttgcttctactttgttcttctttttgtggcgtaagattataaaaaagaaatcctaggaactcaagcatatcttctatttgtagatgactttgtttcaattttcctgcattgcttctgagatttttgttcatactttttggtattgcacaaataattttactccaaacacctcatctgattagcttttcaccctacaccaaccaatcaggagtgggtaataggagtatatttgtcaacttgcaaacaagcttttctcacaaaataatatcctgagctttgattggtttaaaaaacaagaaaattctgaattttggaattttaattggagtaggaagttagtaccagaagcctgataaacttactcttgtatcataattgcagaagtc

SEQ ID NO: 51308 - DNA, 277 bp, Ricinus communis
  Intron number 1 from transcript 29889.m003381 (locus 29889 .t000147) derived from phytozome v7.0 (chr-ID 29889; pos 7 72055 to 772331)
tctctctcccttgtctatagtgttctttatacgaggtatctttcctgttgtttgtttgcatttcctgttacatctttgttccccttcctcaaatttaatgtctaatttctcttttacttagtcatttccattgcttttttcttttctttctttcttttcactttttattccgagatttttctttctctctccgcttcttttcattctttcgctgtcttaaaagggctaatttaattttgtttttgtcttctttttcacgagcagagcagcagaagta

SEQ ID NO: 51309 - DNA, 899 bp, Ricinus communis
  Intron number 2 from transcript 29864.m001436 (locus 29864 .t000012) derived from phytozome v7.0 (chr-ID 29864; pos 1 47845 to 148743 reverse strand)
tgagcaaatctgcgatattgaaagattcagcaaaggtaagatttttatgtctcttttcaacttcaatttttggaatatgaatacactaagtagagtagtaactttgtacaaatcgaggcaaaaacttgagaaatgatttagctcaaattacttttttattgtctgcaaaacttgtcttttcttttgcgttgcatgctggatacttcttccaacaacttatttctggagtcagctattaatgttccctagatcagataacattttgctttttgatggatagggaaattggtctatattatttatttgttctgttctaattatatgcaacagatatgtcataaatcaatcaacaatacatatgtttttttgttacatgtatcgaatgaagaaaaagaagctattatgaaagtggaacctaatttgcatatttactctagcaaagacctagacatataagccctttatattttattcaatttgctttacatgggtcattttgccttttgaagtaaagtatgcaatgtagtcatttgatcattccatggtgttgttaaaaaatttacttaagttaatgttcttaaggaacttggatctctcttgtttactttaagattttgtatgatgagggagaatatttaaaagaagttcatgaaaaaattgataagttaataaaatgtcggataattttaagttcaggttctataaaatgttgttcaataggaaattaattgcattcttgtttgaactgtgttgctcgatgtggctctttggagattattagtcttgttgggttttcttttcaaagcaatatcattttataatatgcagttttgaagtctgacttttcaaaactttcttgtttcatcctggaaaagtttcttctttctattgttgcagtg

SEQ ID NO: 51310 - DNA, 585 bp, Ricinus communis
  Intron number 1 from transcript 29864.m001436 (locus 29864 .t000012) derived from phytozome v7.0 (chr-ID 29864; pos 1 48773 to 149357 reverse strand)
gtggctttggtgtagtactgttagtggtacttaagaaattagaaagaaaggaaaggaataagagcacacatatgggttgtctctgtatttttttctaatacttgcgctgttttttttttcttcttctttttaagagaaaagggttaggaggggagatcattgtctactgctgcatgaaatcactttccttgtatcagcagaaaaataagagagactgcactgttaaattacagagtttagacatagactatagtttagccaattttgtgttaaattggaccaaaatatacttaaaagtgattttaatttcatttaaggtggagattctgttctttgattaatctaatatgcagtattcaatttggtttgagattgataagaatatggcaagggagatcataaatgacaggtcacttgcttcaaggtggtttgtctttgacactttctttcttgttcttttttttttttccaaaagttctagtttttgcataggtgtttatcaaaataggattaacttaatttctggatataaaatagtgggcttttatgtgattgcaggtggttttgacaccaagccgtctagct

SEQ ID NO: 51311 - DNA, 343 bp, Ricinus communis
  Intron number 1 from transcript 29986.m001605 (locus 29986 .t000021) derived from phytozome v7.0 (chr-ID 29986; pos 1 33533 to 133875 reverse strand)
gcagtaaaaataggtaagctctgtacagattattactgttattagttgggagtaaaacactatcgattctactgatattggcgtaatattggctttgctatcatttcttgttttataattttaaatggtgtatactgtaaaatagacgtgtgtatttatgaatagattatagattgtctgttcaacataatacacaaagaactggattttttttttgattgaccacaaacaaagaactggatttttgtaacgttgtttgttcttttctctgcagtgtatgggatgcctgcatcagcacatgaggtaaggactaacatattcaacagcgatttttgcatctctt

SEQ ID NO: 51312 - DNA, 353 bp, Ricinus communis
  Intron number 2 from transcript 29841.m002766 (locus 29841 .t000030) derived from phytozome v7.0 (chr-ID 29841; pos 2 41300 to 241652 reverse strand)
cactcttggtacgtataggccatgaaacgcactcattattggtaaaatatgtccatttgagtattttaaaccaattccaatttaaagcttaggtattaattgatatcaatattcttcttttatcaattgtgctctagatcttataaagagagtcactctagtaccattaagctaattaaaatttatagcctcgatattaagaattttaaattatgtaactaattcaaatgctactgggtaatgcttcaatgatagagtatcaatcctgtaactaattttcttggatttttctttttgcgttaaagatttttccttccgtcatcttataactatggtattgctttggcttaggc

SEQ ID NO: 51313 - DNA, 342 bp, Ricinus communis
  Intron number 2 from transcript 29986.m001603 (locus 29986 .t000019) derived from phytozome v7.0 (chr-ID 29986; pos 1 15818 to 116159 reverse strand)
aactcctagcgtttgggatacttttactcacagtcagtttctctcttattttaatgtctttttcgcttattaattaatcacttacttctgaatctttattccaaagcaaaattcgaagaatatgatatccgatatccagaaacaacgtcaaattttttccttatatttcactcgcattctcatttctccccagtcatttacttcttgaagttgattactagtgttttggcgttttttttttcttaaattattttttggggggtttgagtgggaatgttttatagttgttgaattttaaaaattgtgcgagtttacctgagattgaaattccaggatttgtaa

SEQ ID NO: 51314 - DNA, 652 bp, Ricinus communis
  Intron number 1 from transcript 30068.m002531 (locus 30068 .t000021) derived from phytozome v7.0 (chr-ID 30068; pos 1 26789 to 127440)
acgcggtgctgttgtatcagcaattgttctgtttggtaagtgctgtttccttagatcgtagatctgattttctttcttatatttatttaattttatttttattgttcgttttatatagaataaaaactgtaatgttacggatctggatttgttttagtgcttatattttaggttattattttcagtttacttaattagatctgtgtgttttcttttactgttttctatcattagaaagaaatgatgatctaataatctatgaaatgatacgacggcgtttaattattattaagcgaaatgttaagctagcgctcaggtcacgttcttctgttttatgatgttagtaataatatacttgcttattttttcatttctttaatcttagttgttcatcgttagctctcatgtctttaaaacctattcatgattgcgtcatttcctaaacatacatcaacttttaatttgagaatgatttgtttttaatgtgtcatttagtgttaaataactgtttgaatactgatattttatttgctcgagcgactgaagcgataacatgaattacatgatgaatcattacattatcacaccttgcatcatctattttatgtatttaaatttggtttttaatgtaattcaatcttgcattaatagg

SEQ ID NO: 51315 - DNA, 842 bp, Ricinus communis
  Intron number 1 from transcript 30032.m000464 (locus 30032 .t000014) derived from phytozome v7.0 (chr-ID 30032; pos 6 9489 to 70330)
gcaacctgagggctgtgatataccaaggtaaagacaagtatcttttatatgcttgttatctttatgcatggttttgcatggtcgtgttatgttgtgtagaatacaaatattgctagcaattttagaaaacaaactcataatatggttggtacgtcactggccctccatttctgtttactgattagattttgcagaaaagaagaattgtccatggtatcaaaagaggcaattttcagtcacttttataacgttttttgttttacaatcacaacggcatatatacctcgatgacacaaaaaaggaaaagaaaaaacaagagtaaaataaataaaataaaaaagtattattttttctttttctttgccagagcaaaatgtcctctattttctcgtcaaatgtcaatttgtgttttagaggacaggcttcagcctttttaatatacgttaactacatgacagaatctgtacagggagcattcacgatcactgtacagtaatagtggctgcatcattttgacaaactttttctaggccctactaattccaaggctgatatatcaagaataattataatcttttctcactggcactgaggatccaagtttgccaacagccttgatcataacaaatacacgaacaacttgtcgattagagaatagaatactgtaaattatttgtttcaagtatttgtcgcatagtataagaggtctgacatttcaccattcaaccttgacaactgataatattctcactagataaaatggctgtagaaataagcatatccccgtaactaaagtgagattataattatcattaaaccttctatatccctactcaggttta

SEQ ID NO: 51316 - DNA, 834 bp, Ricinus communis
  Intron number 1 from transcript 29864.m001429 (locus 29864 .t000005) derived from phytozome v7.0 (chr-ID 29864; pos 4 8117 to 48950)
gaacaggtccctctcccccctctttttaatttcttaaagaaaatattattattacaatttttagggatttttttgtttagtttttgattggttgtgtagtatttgatactcttttactgatttcgaatatttgttagctttattatttccagggatattatttgtgattgatagcttgacttagggctctactagagcgtgtttgaaatgtctgtgaggttacaattcaagtaaattgtgtttagttaattttctctttttttttttagaaaaaaatgtttgggagtggttaattttcttcttttttttgaaatgttgggtaagttttaagttgttatagagttcttgttcacacactttgaaagaaatatgattttgcaggaattgaactgaattgaattcttgcaaatgagtttctccaaacaagtcaatttgtccttgtgttgttaggttgtgaacaatctgtcccaaacgggaaaagacattattatgcaaaaaaatcggatagaatttgtaaacaagtagttcgattgaccatattatctgcattgtgtgacagtttggtaaataaacttgaggagattttgatgtttaattaatatgattgtagatatcaaggttcccatgtgattcattttactggactacttttgtttctgagagcaagttttgaacaaattttcacttctggaaaggcaacatttactgagtaggtttctgtgtcaaatagttaaatttgtctgaaaactaacctactggagttgaattttaattaaagtttttttctatctatatacttaccaaggtgtgtggaacaggtgtttggtgccgaat

SEQ ID NO: 51317 - DNA, 744 bp, Ricinus communis
  Intron number 2 from transcript 30055.m001566 (locus 30055 .t000036) derived from phytozome v7.0 (chr-ID 30055; pos 2 44545 to 245288 reverse strand)
gcgtgtgagtggtctcataatgtttcttgtttcttttctcattgtcattgagatatgcattgactttagtgtgcattaggagaaggagaatagcatttcaataaattgggatgctgacatatataatcaatcagaaactcagtagggaaacatgcctcattttgcttcgctaatgaattagtcgacgatattagagaataaaattttgcaaatgaattgtagaatgttagctgtccctaatgcagtcattttatgtaccgaacaatccttgaatcttgaatacatgactacagcctaaacaggtttgagattgaaagaactgagggaatggtttcaatgccgataaccagagaaatgagacaatggattcttatgatctatttagatgtttagtggttagggggtctacagaccctttctgcaggtatggttttgtttttcttggtgtagcctctggcttaagaagagttcagggaagatttagttgatttccttgtgttaatctatttacgtgaatcaaatggtgaaaatttgggttataaggtagaaattttgtccttgactcaaattattaggccttcttttaggtactaagttcaatggaaaatctgcatttaggatcctgtagtatagaagtttgagaagcagctaaagtagaaatccttttctttcttgatgccacattttttctagccattcaaatatgagtttgtgaatcatacttgcaggccacctttgagatat

SEQ ID NO: 51318 - DNA, 619 bp, Ricinus communis
  Intron number 2 from transcript 29914.m000204 (locus 29914 .t000011) derived from phytozome v7.0 (chr-ID 29914; pos 1 43819 to 144437)
aggaaacgtttggttagggagaaaataaatgtaagttagagacttttcatttttgttacaagaaaatgtttgctagggaaaaagtgtttgattagtgagaaaatgaatttgattgaaggacagatgttcttcttccttttctttatatgtttggttagtgagaaactgaaaagaaagttgaaattctttttaatctttgttggtcagaaataaacaaaaattatattttagtctatctatttttagtttagttattattagtctattttcctgacaaggcagttattttgaaaattacaacttaaaattttttacacgtatatgccacgtcattccggtggtccttatgccgaaaaatggtagaagagcttttgaaatactaaaattaaaatttttatagtttcatcatctaatcttctacatatccaataacttgaatcaccttcaaataaatgcgggatgcgtactgcttgtttgacaaaatgtctatgagaaaagcaatggctctaaacaaatgatttaaggcattaagtttttattatactgtaattcaactcttaattaaatgctgtttctcttccaatttatgtaaatttttgtttttgttcgtacgttatag

SEQ ID NO: 51319 - DNA, 499 bp, Ricinus communis
  Intron number 3 from transcript 29822.m003377 (locus 29822 .t000052) derived from phytozome v7.0 (chr-ID 29822; pos 2 60300 to 260798)
ccagctttcactttcatccttgctatcattttcaggtcagtggtggtggtagcctaccctttcttttttcttgtctttttatctagttgacgagcgtttattaattttgagtagaggtgtccctctcctatgctttgtctgtttttccgtttttccattttagttatttccctcttctgctttaagtatggagattgttctgtatggttatttgctgggctctgggcccaattagaggaagtgtgtatgtcttcctgtaacaagcttttgctttacatgctttgctgctgctacctacagtaataattttaacctgttaggctaaaaatagttccaaaaggggaatgatgatgacaattccttcacctttgttttcaagtggcttgaataggaggactagagtctgctttgagtctgtttctcttaattcacatggaccgctactaacttttattattccatctctttttgttttttgtctatattgtattcaaaaagg

SEQ ID NO: 51320 - DNA, 539 bp, Ricinus communis
  Intron number 1 from transcript 29900.m001548 (locus 29900 .t000010) derived from phytozome v7.0 (chr-ID 29900; pos 6 0068 to 60606 reverse strand)
agcttttgttcgcgaaccagaatttctgttacgaggcaagttataatttttctttctcttttttttttttgaaacttatcatccacatgtattttctttttaagtattgtaattttatttggtatctcaagtaatttgcagatctccaaatcttttttctgattgtttttagtggaactctatattttggtttatttttttgcttgaaaataaatgattcttttctcttcaattgaagctattaactaattttagaatttcttttttcaattcgattcacattctgttagtgcaagggtgttagagtttttttgtttcttttcttgaagaaatatatgattatgtttttaagggtctaattgaatcatcaaccttgcaatgggaatatatatggtgggcttctttatcagggtccagatagagtggttttatttgaggtgagatgtatagaaggtgatttaatgcgacttattatctgctttagtaaatgtgtaaacttatgattctctttttgcgctgaaggttgcaggatttgagct

SEQ ID NO: 51321 - DNA, 280 bp, Ricinus communis
  Intron number 1 from transcript 30147.m013955 (locus 30147 .t000226) derived from phytozome v7.0 (chr-ID 30147; pos 3 621919 to 3622198)
aaattaccaatttcagtctaatttagttattcagtttctgtttgattgcttctaattgtaataccactaatgcaagtgttgctgctgcctttagccccatgaaggataggaggagtcgatgctcacgagatttgcatgccccaaaccacctctcagtctcatccaaataaatattactacctctacgatatctattgtttcttgtctatcatactgttgtattttgttttcttcatactcaaaatgactagtaaactgatattgcaggaatcagcaagag

SEQ ID NO: 51322 - DNA, 379 bp, Ricinus communis
  Intron number 2 from transcript 29844.m003300 (locus 29844 .t000146) derived from phytozome v7.0 (chr-ID 29844; pos 8 44299 to 844677)
caatttcaggtatatttcttttctaacatatttataatcttttatatatactgtgtataatacagtgagttgattagatactttggaataataactggtttgtataatttatatatacagcactttttgaatgttttgcacttgtcattatttgtttttagtaaggaaaatgcaagcattaatcattttatttattatttatttatttatctcaaagtaagtatgagagaagagactgtttatcactatttccaatttgtgctgcaattgatcctcttccttatataattagttaaccttcactactatttcagcaataattgaagttttacatgtaactgcaggaactccggccgattgtgcttctttaggagtctca

SEQ ID NO: 51323 - DNA, 1041 bp, Ricinus communis
  Intron number 2 from transcript 29990.m000502 (locus 29990 .t000006) derived from phytozome v7.0 (chr-ID 29990; pos 7 7400 to 78440)
tcaagaaactcgggttcttgttgctgcattctcaggtaattttcagtatttcttgttgtaaccttctatcttcatttatttataggtactcgggtaattagtcaatgttgcttacttttgaatacatgtcaataaacaaattgattttcacagacacaaatttgttcaaattttagtgttcagcctttctattattcttctcgttctccttggttctctgccttttttgttttggtagagtgtaacccttttggggtaaggttgatgtcccaatgctaataatgtgctacctattatgctgtctaaattgaaaatcaactgatccatatcctattttcaaacaataagcgttggcaacttgcaatcatgattttagagggtgaaccttaatgcaatggtaagatgctctactagcttagtggttcacaagccaaaccacaaaaataaccttttgcaatttcatgcattaggatgccctttttttagataacattgttttcactctctagcaattttcttggatcgccaagagaaaataaaaacttctagcttgaattcaccaaccactgcttgctccttttcattgcaaatatctcttattccttcacctaaaatgtaattaaacctaaacaagtttgtttgcatccttcacatggagattcttttggtatcaatcagacaactgaaaagtttatggatcttcaattctcaccaatgcaaatctttgagagagagttttatgtacctatacagtatgataatgctgaattgctaatcagatacaacacaataacaagacctgcctccctgaaagtattttaattaagaagaaattgtggaactgcaagaatagaaattgtttaaaatttttcttaatatcaataagctcttgtatttctttctaatatcaattttgactgcaatcaacttaagttttcctcttcttttccaaattgttgaatatgaattcacaaatgttttgcttgtacatgcaaaacacttctgatcatatttttttgtgcagaactctacaccaagagg

SEQ ID NO: 51324 - DNA, 573 bp, Ricinus communis
  Intron number 1 from transcript 29900.m001590 (locus 29900 .t000052) derived from phytozome v7.0 (chr-ID 29900; pos 3 34103 to 334675)
ttagccacatcaactctcgcgcccaggtttgtttatcgtttctctaccttttcttgtctatgcagcgatcatgttatttcaatcgaggaatttagacaatctgaaaaaatgtggccttgttgggggttgggacccatatcaatggatggtactgatttagctgtttatgggtgtttgcatgtaaggaaggagcgaaagaacatagattcgcatattttgtgatagttgtttttgagcaattcttggccttgatgaggttgctggggtttgtttctgtaattagatttgatattttgagattgttgaagttgcatttcttctgtttatttcgaggtttgtttgattgtttagtgaaaaaattgaagaaatataaagttttttgttggagaattcatcactttgttgagtctaacggcctaatagaattacttgctttgattgatgttttctttttttcccaatcagaacaaaagattttccacttttctgcattgcttacttgtataatttcctttttacttgtattcattatcttcttgttttctgggatcatctgttgtcaggtttcagggt

SEQ ID NO: 51325 - DNA, 199 bp, Ricinus communis
  Intron number 2 from transcript 30078.m002326 (locus 30078 .t000119) derived from phytozome v7.0 (chr-ID 30078; pos 7 70180 to 770378)
ttatagggtatatacaagcttttaattatgttcgagttcaactctgtttcctttttgtcataaagaaaagaattaagaaacagtaatcaatgagttgggtttgggtttttgattgtcgttattgttttacttctccattgcaacttattttttttttgtcatgttattgtctccctgcagagttattcccaagacgctc

SEQ ID NO: 51326 - DNA, 890 bp, Ricinus communis
  Intron number 3 from transcript 30078.m002326 (locus 30078 .t000119) derived from phytozome v7.0 (chr-ID 30078; pos 7 70382 to 771271)
cctcgagaggtatgtctgctagaaccaggaaaaagtcttctatctttttcataatgcttcttcttcttcttcttcatatttttttttcttttaccttttcattttgcatgaaaggtctataacttgaactattctcttatgacaatggaatagaaatcaatagatttttgggtgccaattttctaactcactttcttccttatttatttcaaatagattgatctattttctgtgcttttaggctactttctttacctttgcttctccttctttataagttttttgattatttcttttttgcaaaaaaaaaaaaattaaattcttatggttctgtcacttgctgtttgtttctcaagatctcttttttacttatctttgggataaagaattcatttaatcctcaacgacactaaaatagcaagtaagcggtttctcaagaattctactattctgaccaatacttgatagccttatccataatagtatagtttagtagttgggacttagcacactacacctttttcatacatacttttgcgtttctccaccttctactgtttcctctgttcagttctatagcaatattttgttattgtgtttttctctcttggcttctttcagaattcgaattttccttctttcttttttgtcttttcatttatttgtccctcttactagatagataaattaatggctgtgaagttacttgattttaactcttttttggattaagtccactgttcctgcaacatcatcattgctcctctgcaaaaccctccagacttctccctctattcaatcctttaatttttatctgttaaaagttttctgtgcctgtggtaccaatttttgcagttaactggtcaaacagtgggggaactgaaggcagt

SEQ ID NO: 51327 - DNA, 413 bp, Ricinus communis
  Intron number 2 from transcript 29842.m003715 (locus 29842 .t000212) derived from phytozome v7.0 (chr-ID 29842; pos 1 093010 to 1093422 reverse strand)
ttaacaggtgaaaaaacaaagcttacgtatgttgggcttacttaagatgcttagaagacccatgcccatatttctttcattacatttaattcttttttctgttattaatccttctttaacattttaaactcaataaagtctaatgatagatttatctgacgacttagactgtacaattttttatccatagatgactttgaattataaaactatctcaggaaataaaatacaataattgcaaaatgacttcgcaatagtttatgcgatttgaaatagattggaaaatttcaaatttcaatataaatagttatccaatcaaatactataaaaaaataccccttcaacattgacttactattttttttctttccgaaatagggatcggttacttcattgacttatctacacttgga

SEQ ID NO: 51328 - DNA, 413 bp, Ricinus communis
  Intron number 4 from transcript 30076.m004686 (locus 30076 .t000250) derived from phytozome v7.0 (chr-ID 30076; pos 1 605565 to 1605977)
gccaacaatctgactgcactcttttagggggagaggtattatgaaaatttatgtatttgatgctagttgaacgtcgatggatggtaactctcgatatattatatagtgcttgatgttggatatggattttcaatgatcacatttataacattatcactaagagctaagagatgtggccatagttgctcattcagatagacttttgtagagtggaatgtgcatgttcccatcaaaacatcttatcaattgatcatgccatgttcttgcattatgttttttacaatgaaatttcctcgtacaaaaagcttatttggtcttttcttccttttccgtaccttgcttagaacttaccaacgagacatgtagatttgctttgacatttataattttttaatttctttcagactgcagag

SEQ ID NO: 51329 - DNA, 815 bp, Ricinus communis
  Intron number 3 from transcript 29851.m002475 (locus 29851 .t000117) derived from phytozome v7.0 (chr-ID 29851; pos 7 18751 to 719565 reverse strand)
taactcttgtgcaacagcgatctccagttgttaaggtagaaatttaattcttaaggtttttcttttcattttttctttaatattcttaaagttatacattttaatttgaaaatgaagttctatgtttttgtacgtcatatttgtacgccatcctagcaatatgattggtccaagtttacaatatttggaggactttcattgtgtgaagttccttttttaggtgcctctgtagatagaatttacctaaaataggcaaaatctataaaatttgcatacaatcttgcttgaatgagaggttacatggacaaattgacctcatttcttgaaagttgaatccttgcaagcaaatcacattgatagacattaagtttttctgctggtgggaaaaggcaaatattagtgtcaggacagtaaaacaacgaatttcatcatagcacatatgcgctgcaacttcagtctattgctctacaaagcaaattaatcaaatataaggaaggaatgctaccaaatgccgaattgataggttaattttatgatcagataatattttcctttaaggcctcttggaaaatgctgtattactggagtttatgcatattgaatgtaaatcaaacctgacagtgctgcaaatcagagattttagtgggtttatatccttcaaatttgtagatgattatcacttttggagtacacttataaccatgcatgtgaagttgggtattttattcatttgttacttcagcttaggattttgttttatcgacttgccctctggaaactatttgatgagcagaaaaatttttaaacagggaaag

SEQ ID NO: 51330 - DNA, 940 bp, Ricinus communis
  Intron number 1 from transcript 30130.m000283 (locus 30130 .t000016) derived from phytozome v7.0 (chr-ID 30130; pos 1 33395 to 134334 reverse strand)
cattacatatagccacccgaaaaggaagatctcaggtgaatcactcctttccctatcttacctgacacacagaagaagaaaaaaaaagaataatcgatgaagtatgtataaagaaagattgtttattcaactggtttactttcaccttcaaataatccgagagattgcatacggttgctatccacatgcctaattagttagtttggtcaaaccctcatggtaatctgttaagactttgctatattaaggaacaaattccttatattatgctccttatttatgagcctgaattttttatttttgtcttttcaatgctaagcagatatgtttggttgtgaagttatataaacaccacagctgttgcatatataatttgcttgttgtactgcagatacattgcttccatattggtttctgaaatttcattgccacttgacttctaaacataatcctgacacatctgacagtttgctgatttattttgaactagtggatgctataatattgtgaaaggtcaactggttgaactttaaactctcaggagcatgaataggctgtattgtaaatcagtcggatatttgttaatgatctgcttgttttaacctgaaaaggggggaaagaagaagaagaagaagcagaagaagaaaaaaccatggatgatggcttgaaaattgtgatcctgatgtcattttgataattctgctgatttcaaatctatgaattagttcccaaagctatgatgttttcctgaaatccttttagatgtacacatatgtcacagcattctttttctttcttctttgagccagacaaataagaatcagaaatataaactattatgtaatatgcaatttaacaaatatttttggcttctggaaatcagagaattgacatagtaatgttctgtttctgcagattgttaggttactactgaggcaca

SEQ ID NO: 51331 - DNA, 360 bp, Ricinus communis
  Intron number 2 from transcript 29969.m000270 (locus 29969 .t000010) derived from phytozome v7.0 (chr-ID 29969; pos 1 03336 to 103695)
aagaatttaacatttttgaaggttccttgcctctctctctctctcagttgtttggagactataaagatgcaagaatcagttcatttcaattctatttagatattgcttgtgtttggaaagtccatagttgctgaaattcaattcttttcacttaaaaagaatatggcattttgatattaatgaaatcatgccatttaattgaattcatgcacattgtttattccaaagaaggcatttgtctattcctgtgtgaaaagaattaggctgcaacacattagatatattagttacagttgtgataaacgttctgttttttaattatatgattcgatttataggggtaaagcgcgtggtagattt

SEQ ID NO: 51332 - DNA, 806 bp, Ricinus communis
  Intron number 1 from transcript 30138.m004005 (locus 30138 .t000179) derived from phytozome v7.0 (chr-ID 30138; pos 1 245797 to 1246602)
ctaaactcaaggcaatagtcccatctctattgattttattttatttttatgaaattctgatatcgggtttttcttcgtttcttttttttttgcgactaagtttctaaaccatgatgggtttttctcaaatttgcatgattatttatcattattgtgtttcatatatgttactttgtgtgttactacccataattttgttaggtagaatttgtatcagtgtgtgcaaggttatgtatgtgtgtttggtaggtgatttagggctgtccagtaatctagttaaaatggaatttagctagtttctcctcttttatagaatggttaattggatatatatctgcgtgttaattaccttaagattgtattagacatgctagaaatgataatattgtggtttatcttagaattgatactagacatgctagaaatgagaatactgttatttaccttggaattgatgctagatataccagaaatgatagtactgttgttatgataatgaatttacacattgacggaagtttccatagagtggatattgcttagtaaataagacaaactgatgaaatgaaaataatcccctatcttgtctttctcatcatgcttgagtaatttagtaggacatttgtatctgtggaataggcaagtgttactgtggcgtacatttgaatgctgatcgtttagataccataaactgatactacctggggaggtttgcttgttcacatggagtagcatgatctggcttaaatcattattttttttgttttgttttattgactactatttttgtgaacagacttttcctg

SEQ ID NO: 51333 - DNA, 518 bp, Ricinus communis
  Intron number 3 from transcript 29842.m003568 (locus 29842 .t000065) derived from phytozome v7.0 (chr-ID 29842; pos 3 17782 to 318299)
gcaccagtgtgaaatccaagatatttgcaaaggaggttagccactcctgcctagtttaatgcattactctcttaagctttgaaaatcagaaacaacaactaggtgattaaaggtcttgtactgaatcaatgctcctaaccttcaaaaggtcatccttaatcatatccgcttttctgtatcatcattgtcctaatgcttgagcctttgtttgactctgaaagagcttcagagggaagcacatttctcaactaggcttatcaggaatggttctgtctttctttcttttcgttcttgttagtttctaaatgcatgtcaagttcttttctggatctctttctaatattatgatgtgttccttatacatttgtatttctttatgaaaagggtgatttttggctattaactggaaatttcttttttcatgaacaattaacatcaatgatcagtataagttattgcagaaactgataaaattcttggattagaaccttactctttctaatctaaggtgcaggtag

SEQ ID NO: 51334 - DNA, 622 bp, Ricinus communis
  Intron number 3 from transcript 30147.m013745 (locus 30147 .t000016) derived from phytozome v7.0 (chr-ID 30147; pos 7 8632 to 79253)
ttctctcacaagctccagagactgatattgattttgtaagtggctgagtcattattatgtataacttatagttttttatgtgctaggaagtagaaggtgattaaagtctcattttgttagcccctttccctttttaagtaggcaataaaagaccactcatgtaaacgcattatatagtagataaagtgctagtttactttagcttggtttgtactttcacgtgaccagatttagttcgggtacgtaaagaaggcttttatcgtaactagatatttaaattcacgtaggatatgaataaaaaagattgatgttttgattgttaatgcttcttatagattttttttcaataatttttttaaaaaaaaaaaaaaaaaaaaggaaaagaggtgaagaaaatagggtagttttttaattcaagtttctgagttagtttacaatgtttatgcatttttttatttggtatagaaacttacttcattccttcttatgattagatttttgtaacaattctctaatcatcttatattctggctttctcagctgcttatgttccctgtatcagactaaatattcaatccatttgtgtttttacatccaggaatttctcaggtcggggattaag

SEQ ID NO: 51335 - DNA, 678 bp, Ricinus communis
  Intron number 1 from transcript 29848.m004505 (locus 29848 .t000061) derived from phytozome v7.0 (chr-ID 29848; pos 3 45938 to 346615 reverse strand)
tcgcctctgacccctctaatcacgagcttctctccgtatattttctcttcttatctctttaattttttgatttgtttgcttccctaattgaaggctagggttatcaaaatatccaatctgattttggtaaatatgcgaatgtgttgcccaattgaaaagattcaaaacttcaggttaatcttttttatacgaattatgctgtgatatttctgttaaaggcttcatggttgcaaaacgctaaccaggttttactatcaaattgttaactttctaacatgaacatatataaatttatgtggaaatttgttatcaatggatgtgtaagaagttctatctgttggaatgggggtcctcattatctggttggtattggattcctgcaaagtagagaaaataactgcggggaagcaatcttgctggggtatctaatgctcaagttagttctttgccaaaatgagtattctacaacagagagaaaactgagggaaagaggagcacaagcatttctctccattgattgcccccaaatctaccttagttaataagttggggtcagagttgtatttcaaatggtcttgtattatgtttatgtgaagattttttgcagtagttccatcagttgattggtaggaacttgtctcttttaggttcaagaggagcttgttcaggcaattaaag

SEQ ID NO: 51336 - DNA, 689 bp, Ricinus communis
  Intron number 2 from transcript 29841.m002828 (locus 29841 .t000092) derived from phytozome v7.0 (chr-ID 29841; pos 5 52227 to 552915 reverse strand)
aaattaatcctaaggataatcatatctcttttcaggtaaatttcaatctagtctatacttatttggtctttgtttctcaaggttttcgtacacagctcttaattgcacgtcatagtgactaacattataaatgagaataactagtctgttttaattatttgctattaaacattggaggaatcctatattagaggacaaaaatattatgctacatagaattttctataaatatattttatagggttcgatcgaataaatgttgggtctgagactttttagttgttggatcgaatgtgaaactagtactgctggttttgaagtttaattcagtacagtgtcgtaaaggttaaaagagtttggtatatccttgtctgtttcgttggtttcttttaaatgatatctataggtattcaattgtctcactaattactgtggagttgggaccatgttgttcacttttcagttttcttatagcagtcgcttagatttattttactttactagtggcaaaggagaaaagaagtatcaaaattgtacattctaacaagaaaattgatagatttgttgtatacttaacttggtattcaagggaaatagagttgaatccatttaatttgagcatttagagttaaaatccagttttcttttttgttttttttcttttccccctaatcttatagtgcgagagc

SEQ ID NO: 51337 - DNA, 577 bp, Ricinus communis
  Intron number 1 from transcript 29955.m001169 (locus 29955 .t000014) derived from phytozome v7.0 (chr-ID 29955; pos 7 70133 to 770709 reverse strand)
atttcatcacagccaaaccttcagaaagaaaagtcagttctaattattcttttttccttttcactattatttctcaatatatatatatatgcatgcttctggtgtatgcttttctttttttctttcttttcgtcttaaataatttatgtcctatgtttccgtctgcaattacttagtggctgtggtgacggctctgactatggttgtgtatatgaagttatggaaaaggaatctttatgttaaagttaagctcaacttctttctgatttcagtaatgaaaaacaaaagcaaaattaggatataccagatgcttactttttttatttattaaattagtagttttttattttttaatgattctgttgaagtttgtaacgtttatttgtatcttatggttaatatgtttatttgataatttttcttttgcattattagatcaatttatcaggtgcatactttttccgcaacaaatcctctgtctatattgcgtaattgttcttctttttgttaatggtctcttgtttgatattttgctttgacagcacaagttaactagaggtaaccgtgacaaagttca

SEQ ID NO: 51338 - DNA, 662 bp, Ricinus communis
  Intron number 2 from transcript 29908.m006168 (locus 29908 .t000219) derived from phytozome v7.0 (chr-ID 29908; pos 3 30957 to 331618)
gtactgaggttagtttctgtttctaagctttactcttaagtttgaattaataaagtaattaatagcactaatgtatatgtccttgagaattttatgatgataccattacttgaggatttcttcttggaaccatgcttcttaaattgaaatcttaataaccagttttataattgaaatggaccagttgttcaaaggtttgctgttggttattgtcttagtctttattttagagttgcattttttaattgtttctacaacttatagtgagccatctgtttaagatatcaaatgctaatagaactctgaaaggctcactaaatctgcattgtttcccatctcctttactctactgcttctctctgcttcccctcattagccatatcaaaagaaaaacaagtaaaccatttattccaaagtttgcttatcctcctggcatgtagtctgccatgttgggttatgccataaagtgtaaataccttctaaactttgagtggtattattaggcaaagatttatttggggttctatttactattaagtattgttaatactccaagactggaataggttatgattgaacttattcagtacatagttgcaatctcataataatatacttcatggtattggaatatatgtatgtatacatatagatatacgtat

SEQ ID NO: 51339 - DNA, 418 bp, Ricinus communis
  Intron number 4 from transcript 30076.m004684 (locus 30076 .t000248) derived from phytozome v7.0 (chr-ID 30076; pos 1 597271 to 1597688)
agaatctcttgctgagtttgtgaatagtgaaggaggtgatttttctttttccgaatgttgctctataattagagagttttggtttgcgagcatgtctatttctctttatctttgaagggagaggtggaggccttttactagtattgttaactgagtgatggttctgatcattttgttggtatggtcataatgttgtgatttttgggcacaattctcagttgtctcaaagccacctcaaggtcttagcaaataacatctttagttctatccaaaagtgcgtttattttaaagcttttgctctgttatatcattattgttttaggcatcgttgctgacttctgttttctcttcaccaatttttgtatgtgctgaagaatggattagaagttcctaatcaaattggtgtttgcaggtacca

SEQ ID NO: 51340 - DNA, 932 bp, Ricinus communis
  Intron number 1 from transcript 29907.m000652 (locus 29907 .t000031) derived from phytozome v7.0 (chr-ID 29907; pos 2 72493 to 273424 reverse strand)
gttgatcaaataggtttatctctctctccctctctctctctctctctcaatctttgtttttggccctctatttatttatatcattattattattattattattctatgcattttagtttgcatgcaagctttgaacaaagagttagcaactaggaaaccttgatttaacatcttgtctatgtccttttcatggaccctgaaagaaatctatttgaaagggaattttgccacctaaacctgcacttttcttttcttaattttattaccaattcctttttaggtggttcagtatctaatgaaatagaacatctttgtcctacctttatttttcccccttaaaacatcaactaggagactccactttgaaattttatttatttattgccaaataaatttattttcttaaattaaaaagacagaaaagaaaatgtttttttcatttataatctaattttaaaaataataaaaattatcaacaaatctaaagtataactacttgtgtcaactaagagcttttttttctatttttatgcaggaaagttcactttttacctcagttttatttcatctttgcatctgatgtagctttttgggtcctttttgtttttttcccctatattttctatttttttcccaatactttgattcctttttaaagcttaaataaaggcatccataggaggcttttagataaaaaaactaagcaaaaaactaaaaagaaattcttatttgttagtgcatgtgatctgcaatgatgacaggcaaccttcaacgcaaagttacatttttaagaaggaagaacaaacattatggattcatatgataggaattgcgcacttaatattttgatctgaaatctttgttaatatatggcaatagtagatttatctttatttgggtttaaaaactgtgcatgcatatatgcagctgaa

SEQ ID NO: 51341 - DNA, 720 bp, Ricinus communis
  Intron number 3 from transcript 29864.m001463 (locus 29864 .t000039) derived from phytozome v7.0 (chr-ID 29864; pos 5 69528 to 570247)
tcgtcctgttaatcgttgttcggcaactattgctggtatgatgttggttttattgcgtgaacatctactaaaatctccgtttaaaattttatatggtagcctacctgtttgtggaatatttaattcgataattatttcttgaaatgaaagtgactggtggggcctggttagtcaggctcactggactgttcctcttaattgagggaacagtagatattgaaatattgtgccttgtgattcttgtatgattaatttcaaatttcacctctgtgaaaagaatgcaatgaactgtttgaaatgaggttagattggatttggagttatggatttttggttaggctctagggcttctagtgctagtatgatatggaactaatattatagtacaatacagcaaaagttctttgagactgagggtttagggcattcatctcctaatatgtgaaattttattcgaagtcaaaagataaggatgtacttgcagtcttacacaagcaaatggattagttctgcagactaatgtccctgtttgaatcttggtaccttttttctgcacatgatggctttggcctttgacattgaaaagaatgcttttatcctatctgttcatgaacggtatggcacgagttcatttttttttttttgctataggttaatttatcacaatgcagtttaaaattattcaattgttttcttaaatgtggtgttgcacaacaggtc

SEQ ID NO: 51342 - DNA, 858 bp, Ricinus communis
  Intron number 1 from transcript 29912.m005389 (locus 29912 .t000115) derived from phytozome v7.0 (chr-ID 29912; pos 5 93656 to 594513 reverse strand)
taagcttctggtggtccttcctgctcactcctcaagtaatccttctttttctatttctttttctgttcctttttcctctttaatttcatctctctctctctctttttctctctccaatcatatcctaatgttgacatcatctgttatagctttgattgcttgaagttatctacctcgtttatcaagattcaatttcatgctaattggcctattttaattgctcccgtagtgtaatgcttaacagaatctttggttggacagtggatgatgttcttgaacttataagaaggtcttgtgtgataaaaatatttcttggcattgatttctggagtacaagtaagatcaggagcctttttcctggaattaaattgccgactcttgaaaaattgaatcctaatctttaacatagtatagtagcaaaacacgattgttattcagacactattagttccataatgaccttgatcaaatccggcaactgaacctatttgatgaatctcttaatcccttgttttaggacattgaatgaatgattatagagaaatgctgataatggacttgtgtaagataagcttaaatgtcattttcagtgtttatctagtggaacatgtgagatcttaaggaattaaaagaattttagcaaatctgggatgtgcagagtaggacatagaaaacatatcaaaattaattcccataatgagcttgactaatcataccaaatcattgaaatattgagttttaaggactatggtgtttatttttgtttttttcccttctatccatgtgacttcatattaactttaagaaggttgataatgatgactaaagttcatgaaatacatgttcagataaaagagt

SEQ ID NO: 51343 - DNA, 907 bp, Ricinus communis
  Intron number 1 from transcript 29991.m000636 (locus 29991 .t000018) derived from phytozome v7.0 (chr-ID 29991; pos 1 46327 to 147233 reverse strand)
ctggtgctcgttttgttctcaaatccaaaggtgaccttatactatatatataattcatctttctctttttcctttagttttctttttgtctgttttttcataaataatatttttcatcaaattataatggaaaaatcttctgttggaactgtgtgtttaattatgattcttgaccttgataaagtctgaaaccctacgtttatattttaatcgattttactttactgctaaactaaaatattaaatttaaaattttatatttctgtgcaaaggattaaaaatctttaatctaaagtattgaattggattagtattttcatcacttctccagctctcatcctcttcaacagtgcacagatagcatcatcgttctgtgtttagtggaagttctttgtgtacttcacttgtagccacccgctgactgcatcttttataaaatgaaaatttattaaatatttgtaaataatttagcagtaaatattattatgtatagcatagtatttcccatagtaattgtctttattaatttagctagttcattaaataagtatatgtagaggagagaaatagttttaaaacattataaaattaattagatgttttgtgttataattctatttaaaataattagataaatgaaaataaaccctatttttgtgggaagaaaagaagaacttttctatgtaaactgcatgtgatctcatgtttgacttgtccattctaatgcattttgtcacctttttcttccttcttttcacttgtctaaataaatagatcaagcttgaataaaagacgaatgaatgatgacaatattttgcattaattattacaatttctttttgggtatgtgaaaatatataattaatggattaatttaaaaaataataattaacgattgtataggaac

SEQ ID NO: 51344 - DNA, 559 bp, Ricinus communis
  Intron number 2 from transcript 30055.m001628 (locus 30055 .t000098) derived from phytozome v7.0 (chr-ID 30055; pos 4 89838 to 490396 reverse strand)
ctcctgagtatctcgaggaactctctgagcttcaggtactcttttgccttttccttgtttacctggaatttcttttactaattctaaagctttaacttcaaaaattgccatcaaatgaagtaaccggagtttaattgagttatgattactattccgattttaatccaattctcttttctcaaactctctataatttcttcccaatattgtcacatcgtgtttaagaaaactcctatgtagtttgtagctacagcaacctttaaaaggaaaagaatttgatccatttttcaagtgttatgtcaattccaaagtttctgtacaggaaattaaagcgtcgagcaatttttttcaaactaaaattagattgatcgaatttacacagagaactctactaattttccaattgaaattcttaaattgttgacttcgaattgaaaggacaaattgtaaacaaatccaaacctcaaggttgtttcttatttgttgcagttaaccttaataattattggcttttaaagacaaccttcaacgtcttgttgtcaatttgcaattgaacagg

SEQ ID NO: 51345 - DNA, 684 bp, Ricinus communis
  Intron number 1 from transcript 30128.m008966 (locus 30128 .t000427) derived from phytozome v7.0 (chr-ID 30128; pos 1 895537 to 1896220)
taatagcagctgctgcttgcaatcatcagaaggtaaatgctgtttaataaaattgcgacgtccctctcttgtttaaaccaattattcatcttaaataacctaatttaattaggtagattacctggtaaacaattctatgtcaaagaaattcatcgccatggtttttatgacgctaaaagaaaagcatatatttagcctcagaaattcgtttagttgtcttgatatcttttatatcctagtcattgggtaaaacttgcctacatgtcttttagaaacaatctatatagcgaatctcggtaaggtaaagtagaggtctaaatgccaataagggttggtattttcccttgtgaagattggagaaggtttcgaatttcaagtctctccatccaccatctaccaactccagctgttgttagtcacctctatgatatcattgaacaccctgcccccggcaaaaaaaaaaaaaaatgctaatgtttttctttttcctgagtttccttttgtgtctgttttagaaactttatgtctattttgaacttgggatttgtgtgtattagactatagacccaaataaaaatatagaactaggttgtttaagttacatcctgtactatatagtccattatgaatgtgcatgttgattttgcaggaatttctcactcaagagaagacacactggcagca

SEQ ID NO: 51346 - DNA, 911 bp, Ricinus communis
  Intron number 1 from transcript 29863.m001059 (locus 29863 .t000019) derived from phytozome v7.0 (chr-ID 29863; pos 1 40878 to 141788)
aaatttctgaagtatggttttccctctctgtctcactcgcatacacactctctcttgcgcgcgtgtggatatgcacacatgattatgcaattaatagtcctaccttaaccattttatatggtatctttatgtattcaaattgttatatatttatctccagaagaattataggagtggcattgctttttgacatttattactcacttcataagatttatgtttcctcattttctctgtaaaaatcctgttaaattcattaatgctaaatttattgacttttgggtcagtgttttggcattcatgaactcaatgtacgaagcaccctttgtggtttgggagtttctcatttacaactatgatagaagaaattcaatgaactctaaactggaagttatttggaagattttgacaataggatttaccttgattataatcaatgaaagggcattgcaattctgatttttttccgtctcaagttaattgggatgttacctcagtgctagatgaaaagtaaaagaaatcttttgtatctagatgaataaacatgtagcatgatttgagctaccatttgtttagcctgaggtaattgcgttgctgctgatgactaaggttgaactcaatctagttaataaggtagaagcacaggatcataagtaattctacttgctgttatatcttaagtaaaattattacttttttatcaaaccaaacttgctacacaaaattattacttgctgacaattttttccggagtcaaattgcatctctgtaattgtgtagcggtggacactacaagaaattttgttaagtctgccatattatcttgagaattattatagatttgtggaatggtattcttatactagataagtattttaatacctgatgcaccatcaactatcctttgcaga

SEQ ID NO: 51347 - DNA, 451 bp, Ricinus communis
  Intron number 1 from transcript 29827.m002554 (locus 29827 .t000027) derived from phytozome v7.0 (chr-ID 29827; pos 1 59323 to 159773)
cccactttctcttgttgacaatactttcttaaaaggtacattctctctctctccctctgtctttaagaaatttgccagcaccatattcatatgcttattgttctaatttgcacacctttagtgacattatcatatttcggtacaatcttacgtaggatataactgatgtttaagttattggtattagtttaatttgatattaaaataaagggtacttcttgttcgggttaaatgagattaacaatcaaagaattcatctatgagtaagcggttccaatttattttaaatcttcattatacatatcgtgtttcgatcatgaaattgtgtggttctcctgagtatttcctttttcctaattaaagaaaataaaatgttagaaactaaagattttgatgcatgtatcatgtatgagcaggtagagagctcaagtgctgttacaaagctaccata

SEQ ID NO: 51348 - DNA, 887 bp, Ricinus communis
  Intron number 1 from transcript 29904.m002903 (locus 29904 .t000017) derived from phytozome v7.0 (chr-ID 29904; pos 1 21028 to 121914)
ggcgtatttggcacctcactcgcaagaagaagcaggtcactccctctacccccccttctctttctctctctctctctctctatatatatatatatatatatatatacacacacaaccagatgtcaatcatgttttcagagataaatgaacaaacttatttatatgaggcaactctttccttgttttcttagattaacatgtcattgtcatcattagtttggagcaagtatttctgcatgcctatgattaattctgaactgatgggatcctgttgaagaaaagcctgtttcataagatcagagattagtttttgtatttttaattaatgggtattcaagatattatttttatctttaattaaattttgaattttttttgggtgatgatgaggtttattaccatgatttagtcttgtttaactgacgcggttacagcatcttaaaatatttgctcaatctttttgtattgatttttaaatgaattgggtcaaactatgattatattttgaaaaatgtgacagttcagataaaaactaagcttagttttagtgtttgtcatggctgccctgtctacatccgtttatatatccataccccaccatgcctttgatctaattcctactgtagcttgtaaaagtgtacttctttttttttttttttttctactctattcttccttaatggctaatagaaaaatccataaaaactttccaagggatcatgggttattcttattgttcttaatctcttcttctattgaattaaggattagtgtatcatcccatttccttcccttttcaattatgatgttattgccaagattaaaatgtgatgcctatgatgatctgaatagctggaattgggggaattacaaaggttggcgaatcg

SEQ ID NO: 51349 - DNA, 645 bp, Ricinus communis
  Intron number 1 from transcript 29841.m002875 (locus 29841 .t000139) derived from phytozome v7.0 (chr-ID 29841; pos 8 44471 to 845115)
gcttctatcttttgttgtggaaagggctcggatcggtaagtttgttttcaaattaggttcaatatataaacatgttttgaatgataatctggttttgaatttatggatgtagttgtgcttgttttcttaactattgggacttcttgagggttttgaattcgggtttggtttgatgttagatgttggacgtgtattatagccatgtgtattagggaccttttgttttgttgatgttagaaataactgtctttttttatttcaaatgattggagaagaaaagtacagatctttttgtctttagcatataaaactgaaggcactgtgttgccccaatgagaattcaaatagatttcgaatttgggtttgttttacattgtgtcgaaaatcatatcggtgcttgtttagagacttcgcactgctttattgacgtgctgctcagaaacggtaggatcctgtttcattgatttttttagatgggtttactgagatggattaagaacagtgaatttgaatggttaggagctaatataggcaatcaagtgaatgaacatttcaacttgtttatgatattcatattattggttgatgcgtgttatatatgaatgtataggaaagagcgaagcaagaaacagccaaagtggagga

SEQ ID NO: 51350 - DNA, 587 bp, Ricinus communis
  Intron number 2 from transcript 30072.m000962 (locus 30072 .t000036) derived from phytozome v7.0 (chr-ID 30072; pos 2 48484 to 249070)
gtggtcgccacacggtgtgtgaggaccctgagaaggtactcacttgtgtttcaattttagttgatcatgttccgatttttcttttttaaaacaaagtgaagaacttagcaaatactatttcataacagtagccttagtggaaactttaattgataaatgcccttaatgatgatagaggtgttgcaaggacaaaaagattttgtttataaaatagcaaatctattttgttggaggtataaagatgcaagaggaaggaatcatcaaggaaaatgaaatgatatgtgcttatttgttattgagagaaaggcaggaaaaatgtgatttaaattcatatcaactttgatgttaatgtattggtggatttgaaaggaaacaaaagcctacaaaacaccattttttttttcaccgtgttgagatcttaaatggaaaaatggaagtcagttcacttcttccatcttcttatgtacctctgtgcatctttcacttccattgtataagatggagtccatttgctttgacaagttttatgttggaggatgttaaggggcaaagtataagttttgattgtattgagttgctgcagggat

SEQ ID NO: 51351 - DNA, 730 bp, Ricinus communis
  Intron number 2 from transcript 30147.m013737 (locus 30147 .t000008) derived from phytozome v7.0 (chr-ID 30147; pos 4 6104 to 46833)
ttcgctttctaattgtccacagcctcttaaaagtatcttttcttcttcttcttcttcttcttcttcttttttcactttgtgtaattgttgatgattagtttttttttttgggaaatatcaattagttggtgattaggttgattagttgtttatcggttttgatttattatttatttgctgagtgtgacatgacaatccaccatacgtttggtgaatcagacatgaattgtaaagcatgtatgtagatatatggttctaataagtaataatcataattctatcttcgtagattatctaaccatagccacttccacacttcaactgacaaagaaagtcaattgagtatatgaaaaactattatatgtgaatgctttgaaaatcccaattcttttcttgttctcccccccagttgttggacttggccacttggaagttagctgtaaggagatttaatagagaggtaaaaaaatatagacttaattaaactagtttcattttgttgcattttatagcatataggggaaaagaacatggaatacttataactttgatgattctaaggcttacacagagttaaccattcattaagaaggcttgaactctaacaattacctactttttgtctttaattctgcaaaatgcattccctttttggtaaactatttcagctcaagtcctctgttgttttctttcttgattgttttctttggaaatgcaggaggaactaaat

SEQ ID NO: 51352 - DNA, 431 bp, Ricinus communis
  Intron number 1 from transcript 29841.m002847 (locus 29841 .t000111) derived from phytozome v7.0 (chr-ID 29841; pos 6 93145 to 693575)
ctcagatctctctctgtttctcttcatcatcataagttcgtcttctcttctcttctcttctcctttctgccttttttttttttttttttttcgcgtttagtctcagcttagctgatcattattctgtgctacaatctttaactttcacggttaatatctctgtgaattttagtttttggaaagaaaattatagttgggagtgtgattgattagttttctttttaagtcgaattttctcgttcgcatggtgatttgattgattacgctaaaaccaggagaaaagaaaagggaacagagcgatctgcttttttgatatctacacttgattttcatatagtgtaggttcatataaagagaatttttgtctgtattatgaagttaaaattaatggattgatttatttgtgttgttaacagatttacaagtgagaa

SEQ ID NO: 51353 - DNA, 1025 bp, Ricinus communis
  Intron number 1 from transcript 29823.m000209 (locus 29823 .t000001) derived from phytozome v7.0 (chr-ID 29823; pos 4 627 to 5651 reverse strand)
aagaaatttgctgaaggacttcagctcctttccaagtttgttttgtgtcattgaaatctcctttagttcattctgtttctcttgagaattaatctatcattgaattcataaaatgaacgtatatattatgtggattatatacagtcagaagttgataatttttgtttgtttttgttacatgttattttcttttaatatccctcttgaggctgcaagatgatattctggatgaatccaaacctcaggtgttcctctagtcttattaataaaacttgttccctgaattaataaaggttaaatgggttaaatggaagttcgtttctaattcacagaataattagagagtttgtttgttgtaacagttcaaaagaactcagttcagtttgcttctcaatgttctctttgtttcaagttcatggataagggaaatataacaggttgcttctcaattaaataaaccttctgtttttcagccctcttaaacttcacatggctagttaattccaagtacaaaaaagctgttgaaatctagtcttactccaatttgtttcatttatccatgctccaccggttagttgtgaattctatgaggcagtcagcagatatttctaactgatttatgtctatgagattcagctttctgatcatgacccaacaaaaaagtttgactatgcaacgggggaaattcaaccacacatattgtcaccatagatattaggtagatactataaaataatatgtgcaccattggcttttctacgatgagatgcgcagaagtgaattttaacggaaaaaagaaagtcatatggaacatatttatggaagaaacacgcattatatatttgtctttttctcgtccttttttttctttttttaattaattttaatggaagcataatgcttcggttcataatgctttttctcctagatttggtttgtactgtttaattttgcgcaccttatttttctgaaggtctccaacaattgcaggaccattatcagttgctgatatttctgctgattgt

SEQ ID NO: 51354 - DNA, 961 bp, Ricinus communis
  Intron number 1 from transcript 30147.m013834 (locus 30147 .t000105) derived from phytozome v7.0 (chr-ID 30147; pos 2 864902 to 2865862)
gaggtattacatacactctctcaactacttctagtaaacttatgtttgtttgtgatgtcatgtattattcgatcttatctattattaccttaacttcaatggttgataacttcacagaattgtagggtacggctctgaatttatttacgtttttatgaaattgatattcaagattcaaaattctataactatgctctttgtgtacatgttttaagttgcccagttgagttaatgcatgttggggatgttggaaagttggcgagggataatcttgggatgattgaagcttatgggtagagagaggaaaaattttaaccactgaagaaaatgatctaataagttgtattaagggacttcatcgagtatacagtaatgtctactctcttgatcattaatcggtttcagctatgccattaaatgcagtcctgttcgggttgtttgatgagtttaatttcaggctcaagttgcgtggacatactatgttctactggctattattagtggggctggtgttttcgtaaatgatactcaaatgtgcacatgcctaagggacttgcaccttcaaacactatccattgcagcctacagtgcagaggtcatgaataagaaattacctgccttgaagatttcacctccatgtttgcagatatagttcactgcatttctgtgattttgctttgttaattatagtgcgtatggttaggcattattgttctataattacagtagaagtaaatttttcttcaagaatactgtgcgctggtggttatgtaacgtgcttaactcttctttttgtttattctagttatatcatatagtgttatatcatggttacgtacatgagctccatttttcttttcttcttcttctttttttgtctttgctacgaactttgacaccgaaattgttcttttgacaattaatagcgattctttgctggaagtggcatcaataaaaataa

SEQ ID NO: 51355 - DNA, 531 bp, Ricinus communis
  Intron number 1 from transcript 29889.m003245 (locus 29889 .t000011) derived from phytozome v7.0 (chr-ID 29889; pos 3 6848 to 37378)
cttaggacttgtctttacgaaggtaagcgttaagagcttttgtaaattacagctcttcctatagtatagtttctcaatttgttatcctcatgtgtttttctctttttggtgctttgataaaatgatttgatttcttatgggtgtttatgtaacgcatcagtgatcatttattattttactttttatggagatatacagtaggagggcattatatttcaacatgtttagatttgggtgtgatgtcacatctgtaatactttaagctacaattatgttcttgtccaaattgaagcctatgcctaaccctgggaatttgtttgacctgagatgtatttgtgagatttctggtaaaatgaaagctacttttttgtgtgttttaaattcgatgtacttctgtctgtctatgatggatttggagtctcttttttttttttcttttcatatgaatttgtgtcaatgagagattataggcttcgtgtttgtgtaatttgattgattgatttagtttttatgggaattttcagttacaaa

SEQ ID NO: 51356 - DNA, 712 bp, Ricinus communis
  Intron number 3 from transcript 29848.m004614 (locus 29848 .t000170) derived from phytozome v7.0 (chr-ID 29848; pos 9 71844 to 972555 reverse strand)
gtgatcaggtatatatttgtggtcacattattcaaaaaatatatatttgagcattcttcctccagaatataccttttcaaatgtttccttagagatgaaaatagctgtatttacaaattcagtgcattttcatgcaaacttgtatacagagttagatggataaacttttgtgcttcccgttcagttaaaattgacaagaccatgatcaagtttttagattgctcaatctagatgttatttccagttccctggatgttttttattttcaccatcatctaaattctttagtttcattgtatgaaggttgtcaccttctacattgaatccctttacctgatcttggcactagctttgctagataagggcatatttgggggtttagttcactgactgccttggacttatagatgtctggaattcattgtaaccactgccttcaataatgattttagcttgtttgaaatttttcattgccaaggacattaacttaaggttcagtactaatgtaagaaaattcagacattggttttgaataagttaatttgtctgtaactggatgttcagaatgtctcgcttgtgcatttttccattttcacttgaaatatggttaacataaagatagcttttcttgatgctgacaattgcttctgaaaacaaaattatatgaatatgtgcagcttcaatttatccggcacatctcaaccagttatag

SEQ ID NO: 51357 - DNA, 929 bp, Ricinus communis
  Intron number 2 from transcript 29970.m000983 (locus 29970 .t000012) derived from phytozome v7.0 (chr-ID 29970; pos 1 06327 to 107255 reverse strand)
tttttaacaaactcaagatcactaaggtttgttattgttttctctttttaagttaatagatctttgttatttttaaaaaaaattattattcatgtggaattttttttaatgatttttgaagcatattgaagtgaataagctaataaaaggaagaccgcttgataatttggagttcatgcaatggatgaagcgttactgtgattctgtcaatggtggcgctgtcaagtaattttatttcttttttgagctttgatttttgcatttttctttttgtgaattatttaagaaaagaaaacaaaatcaatatgtgctgattttagaagagaatcacgatccatttgttttctggagtgcttacttctttgtaagttagcatgattgagaagtctaaaaaagtgagaattccatatcaattctattctatttagttgattttcatgtttggaaaggccttagttgctagaattcaatcttttaacctaaataaaaggcattttgaaacaaatgaaatgatgcaacaaatgacatgattctgcaagaattcaatagcatatcatttaatccaaacatggccttttatgttcaagtttcttattgcctgtcaattcaaagcaaagtttcctttaaattctgtaattcttttagtcttgtgcaattgattatgatgcatcaatcatttagtagtatgtatttgatgtttgggtatttgaaaatgcctgaactctgctactatgtgccatttgattgtttaattgggaagaaaacgaaaagctaactctgcaatttttaattgcatgcatgtattacatccctaaagaatatgtagatttctcgtgaaccggagtccccataaataaactagcagggtctatgtcaaataagttgtgtgattagagtaactataatttacttctttgctttgtggttag

SEQ ID NO: 51358 - DNA, 534 bp, Ricinus communis
  Intron number 1 from transcript 29977.m000259 (locus 29977 .t000011) derived from phytozome v7.0 (chr-ID 29977; pos 7 2137 to 72670 reverse strand)
tgagaaagctaaaattaaacaaacgagcgctcgaggttactctttctttatttctttaatgatataaattagctttgtgtagtgcaatgtagatgtttgtttaaatgcttaaatgagttactttgcatcgctgcttaggaatggctttgtagccttgtcttcatggttctgtaggttccgaaataaagacagatgcacttctaaacccgaggcaaagtaatgaaagttgtgatataatcatccttaccaaacatagagttagtataagcagagtatgcgatgatggatagtaatcaaaagcaaaaaagaaaagcttatatttctaaagattgatattttccttttcttggtaattcgtaatcaaataaattgctaaaaaaagcaaattttcatgaagcatgtttagaagagaagagggcatggtgctgttcttaattactaaagatatagtggtcttgtttagaggtagcacttaaatcttggagccttttaaattagatgatgtatttgagaatgttgggtttttggcaggtg

SEQ ID NO: 51359 - DNA, 967 bp, Ricinus communis
  Intron number 1 from transcript 30111.m000703 (locus 30111 .t000006) derived from phytozome v7.0 (chr-ID 30111; pos 4 4122 to 45088)
ttttcggtgctagcaatatcattaagttcttgcaggtacgtactcttaccattcgcatcatctttgttactccttaatatatagtcattatagcatcttaaacgagttattgttgaactggatttaaatagggttatatcactagagtgagtggcctgcattatccaaaaataggtatcaatcttatttgtgttccaagtttacaaaagtaaacctgctaacacagagatatctcgagtccgaacccttctacttgaaatctaaatatttggactaacttgagaagagtgacaaaaaaaaaaaaaaaaaatcaaaacagagaaaaaaattggtacccgattttccttttggtttaaagacacgggtagtggaaaattggttcaaaaaagtctgaagggcaggtcaggttcctgccgtggataacagggttaaccaaaaagaaaatgacatttctaaaaattaaatgtgtaaagggtttagcagggttttgctcatatagatctcaccgcttttaaattagaaagtctgtctaaattgtggacacacaccaaaatatacagaattttcctgagagagcctcaaagtttgaaagaaaggaaaagaaaagaaaagaaaaacaaaacagaaaatgaggtgtctatagtgactatacagtaaaaatacaaacttttctatagtttaaagtaggattttggttatgttgacttctagtatccttcattttcaaagattaataaccctaagtgtcactatctattcggtatttttatattttctaaattagattggttctagagtcatttctaaaactttaagtttccatttcaaactctaataaggatagagcgaattagtcaaaaataatattctatactaatcacttaacttttgctttagtattcagcgaaattttattaatgaaagagcgatcaaaaatttcaggaactaccagagtcacaaagggctg

SEQ ID NO: 51360 - DNA, 594 bp, Ricinus communis
  Intron number 3 from transcript 30101.m000381 (locus 30101 .t000013) derived from phytozome v7.0 (chr-ID 30101; pos 1 29850 to 130443)
cttccatcagaagaaggtacattgcaattttagttgctgagttggaagtactgccatctggttttgagtttcttgatcataggccaaagtatctttggccaaaatatgggctaattcttactagaaataaaaggagagaaatatttacagccaaaaatcccatctctaacttaaataatgtaagcctacagtaattagccccttcagttatttgaagctttagaatcttctcaatgttctgttgcatgcagaaaagcactttgtcgatgattttccatcctgggaattcctgatgcataagcttcctgcttttgagagtcaacagcgtgtcttgtatcatacagaaccagcccctacttttctttagagagtgttttcacaacttgaacctgaaaccttcctgtaaaaaagaaacaaccttaccgtcgcattcacatgtaatctttactaaaactgagtgactataaaacttcaccttttatctggaaaaacttctcttattaaaactcagagactcatgactataaaactacagttattatctgaagaaacttcttttctcattttatccctaaagaattggagaggtgatag

SEQ ID NO: 51361 - DNA, 342 bp, Ricinus communis
  Intron number 2 from transcript 30128.m008707 (locus 30128 .t000168) derived from phytozome v7.0 (chr-ID 30128; pos 6 24713 to 625054)
tcagtagcagctgtaagcaccatttgtttatttccccctcctttgttttgtttccaaaagaaagaatcttcaattatattttctgtgcacgatttaatttttttgctaaaatgtccaatatactgatctagataaacttatagtctgaagaaggaaaaaactctcaaaccagtctatgcagagacatctgatacatgcattttatagtactgagcaggcccttttctttgattgaattacaattatttgaaaatatctattctgagtaacattttcttgttttgtcattcaatctctctttgtttgtttaccattctgcagtactccgtttttggttctgta

SEQ ID NO: 51362 - DNA, 821 bp, Ricinus communis
  Intron number 1 from transcript 29851.m002491 (locus 29851 .t000133) derived from phytozome v7.0 (chr-ID 29851; pos 8 04969 to 805789 reverse strand)
aaactggtaattcacttttataacagcacttctgattgatcgcatgcaattcagtgttgttgttcttctatttggtagaggaggataatacaacaacctacagtatttgctcttgtttttttttattctcttggttttctgctggctgttgtttctatgcaatcagcctgagtgtattttcaaaatggtcaactggactttgattggtttttgcatgcaatgaaagtgagacacactatcaagtgcaatatgttcaaagtacttttagtttgttcttgaaaatatctatactctacttgagagctggaaattgattttaatatctaaacagtcctacatcccctagtgcaattcagtataatgtgacaagaagctcactttaacatgttgatcttctgattaacaagtgattgtgttattataggaattaaaagtaattccatgcatgtgtgactagaaaactaatgtaatgtcaatatttaaaaatcttattgatgaagttgaggtggtatcaacggtgaatttaaggacagagagaagtctgtatgctttacgtcgtaggtgaaatactttgtgattctcattttatggccagcctttcttgtaataactgtcatctgcaactgatttaattgaacctgacactgaagtacttgtttgagtaacgagaattatgcagcaagtccattaactgtgtgaaatatgaatatatagatgtttatccttgaactactttgttgaatttgcatttacatatattttctaacttgattaaagtacctgtagaggataccaactaagtttgtgcggaactttgggaa

SEQ ID NO: 51363 - DNA, 732 bp, Ricinus communis
  Intron number 1 from transcript 29968.m000633 (locus 29968 .t000002) derived from phytozome v7.0 (chr-ID 29968; pos 3 0779 to 31510)
cccttttagttgagacacatatcgactgcctcaaggtatatttaatgttgcacgttttattccttcacaattgtttttactttcatttaatttgcttcctttctttttcttcttcgcacgatcgtgcgtgtataagaactaatgggacgttatccaattagttagataaaagaaatccattataagctaaagtagaaatttagtccagctggagttttatagaaagataagaaatatgttttatttttatggtataaaatccaatcaaatttcttgaattaacagacatgttaacaaagtagatgcaaatatggccaaaatgctgatacagaccagatcagcggatagggagacaagaacataggaacacttcttctctctttatgctaatataaaactgatgacaggtgggcttaggtgaaatcgcaaatgttgatccgaaacaacaagcaaacgtagaacctcaaagtcccaaaaaaggatcttccgacctcagtctcttcatggtataaggctgttcctttacttctccagcttcaactctgcttaaattccagtaataaaattctaaagcaaaaacagaagaataaaaaattatgcactagcaattgcagtcttctttttctcttttatttaccttttcctgtaggattgtatggcatttggctcaaaactttttatctttttgggcaagcaggaagcatattgcgttgccttgaacaagctcaaaga

SEQ ID NO: 51364 - DNA, 367 bp, Ricinus communis
  Intron number 2 from transcript 29842.m003584 (locus 29842 .t000081) derived from phytozome v7.0 (chr-ID 29842; pos 3 99617 to 399983 reverse strand)
ggctaaaagctccttcaaacttgaacatcctttgggtttgtttctttctttttcctatttttgccgttcctttgattggaaggttctgatatttggcttctgtgaaatattgattcgggcactcgctgaattcttgtttttatgcctaattagcaactaggattcttcaggttacggtgcaaagttgtccttcttttaattgatgagaagtattaatttacttatttatgggctgccaaaataaatgataagacataaccttttcttgtttgtttgtttgttctcgtagttgtgtactttgtctctaatttcttgtttcttacaattttcagagaggaggcaggcagaagctgctcgcatcagagag

SEQ ID NO: 51365 - DNA, 644 bp, Ricinus communis
  Intron number 1 from transcript 29844.m003242 (locus 29844 .t000088) derived from phytozome v7.0 (chr-ID 29844; pos 5 93021 to 593664)
ttgcaggtaataactattctcctctttatttgtggtatttgttcttactatgttaaggattttgacgattaatcctagactaatcctagaatttccttcttctttctttcccttgttattacctgtactttttatcatgtaatctatcacatgctaaggcttacctgtcctaaattaggaggattaattagtttgatctgatgagctactcatttagcattttgggtttcacatctttaatggaaaaaactgagtgggtattagtggtctgatttggaaagtcacttggctggtcagttgagggaactgttattttgggattacataagggtgagggaattttttctacgcaaaaagatgtacattgtgatcttcccggtgttgggtagtcagaattactacttgcctggttttaatcagaagactgcaaagttttggtattaagaggagtttattatatcacatgatagtgggttatttctatgcgttcaagaaattattgccataaggattggcatatagttgcactgtatttggatatttgatatctaagagatcagtgagtctaccatcaaaaagaaaaatattggattcttactgtattattatgttggatattttagtgaagctattggactggggag

SEQ ID NO: 51366 - DNA, 816 bp, Ricinus communis
  Intron number 3 from transcript 30147.m013801 (locus 30147 .t000072) derived from phytozome v7.0 (chr-ID 30147; pos 2 650940 to 2651755 reverse strand)
ctgtccaatcaaattctgaaaggtatgatccatttaggaacagttgtcagtagaagcacaagtattttagcaaacttaaggttctatgttttaattgtataaacaaagatttggatatgcagaggagtaacaaagaataattcgaccagatcttagagactgtatttgaaattctaccttcttctagatatttcacatttattctttaaaaggttaccgttcacgttcatgaatttgatctccttttctgaatgagtacaaaactgataatgcagttcgccattttgtttctgatttttagtgttaggttgcaagctaatggaagagtgaagagtggttcctcttctatttatagctagcatgctattatgtcatagttcctgactataacataactgctgatattaattaacaaagtcacatatagtatgagatgtgacatatatgcatatgatgcgttttagaatataatttcctccatggtacttttcatactcatgggaagatgttaacaatcaattcaagagatctgtccacttctcctaatgtcaagacctcttattctgttgatatttttctctatattttgagtatgtcctcattttttagctgagtaaagtgtggtgtattagaagtgacatgtcttctttatgtttataccttttcaatttgttgcaataatatatagcacatcataacgattatgttattcaatatcagtacaatacttccattgtatttaaagttggttttacttatgaaagagaaactataatgcgtcttttgacaggttacttcttctctacgtactcgaaa

SEQ ID NO: 51367 - DNA, 777 bp, Ricinus communis
  Intron number 4 from transcript 29883.m002029 (locus 29883 .t000084) derived from phytozome v7.0 (chr-ID 29883; pos 5 77573 to 578349)
ctgaaggacggacagttgaacaaaaagtcctagaggtaagctggatgaatataaatctggttatggagtttattctgtatgtaggttgagatgatgagtaatataatttgtggagaagtgtttttatttttgaagtctcttgaaccagtaaacttttttttctaatttgctatgagcataaactcataagtcttggaatctaatgaagcaaaatgaatttgatatacaggaatcattcagagagtacaccttagtcacattaagccgggataaaaagaaatatataggaaaataaaccttaagattttctcttcagatgttagaatatcaaaataaagaatatctcttcttgcacttaagttgtgaggtatagcttgtttcagtatacatttgctgatgtagaaattcagaactgtatagcagctggtgcatagttcttgaattagttaggatcgcttagattgttttgagttctcaaatcaattactgacacatgctgaaagaatctagaactaattaaatctttatcaagttcccaattttaaaagtttgaaataagaaaatgatccctaattcgtaactttttttattgcttctcatgaagacatttagcgtccaatgctcttgttcttttgaaaaacttgtggaaagtgaaggctacttggtgccttcttttcagatgcagaagttaatgtttgaatttaatctttggaaaatgtgaagcttttatactaacaagtgctatgcagtcaaatccagttcttgaagcatttggca

SEQ ID NO: 51368 - DNA, 1027 bp, Ricinus communis
  Intron number 1 from transcript 30068.m002616 (locus 30068 .t000106) derived from phytozome v7.0 (chr-ID 30068; pos 6 68230 to 669256 reverse strand)
cttctttatcccttatcgtttctcttccacacaaggtatctctcgtggctcatgtttttttcaattcttctttctgtttattttgtatattgcgaatttgggaaatgtcaaaatgggttcctttctaatgccgcaaatcgcttgatatcagctttactctttcgtttgtctgattctcattgcattgggtagactggtaggcaaagcatgataagttgtcttacttcattacctaaaatttgttgcttctcttgcttgccctactattttgttttttttagaattcgctgagccccaacccaagcaaacacaatccctttctcataagttctaaatttgtattcaaagaaatatcatatggtttgtccaccctacagggtttactaccaaaccttgaaagattaaccctcctcgaaactatttaggcattgagttcatacttattcttcgctctggatgccttaaatatacttgttttatgtacattcctaacatctaaaacatatggcttaaaaactgagggaagaataataaatcgaaaaatctttctatccaaatgacaagaaacacgagagttgccttaagttagtcttcgtccaattcttgcataaggttgccaatctaatagtatgaacggggttaactgttcatacatatatggttcataaggctttaatattaaggagagcattggctgacatttagcaagataaatgtgtcctgtgtagcagttaattattagcaccacatgcaatgaagcaaaaatgattcttattttttaatcaaaaggatgggttatcgcttttagtatgtttatgctcccttgtcacatgatgtttccatgttaatttgttaaggtaacaggaagaagaggcaatatagagtatggagaaacatgtattattgaattttagctactgcatcccagaaggaatagaaataaaaattattgctgttgggagagctaagttattttttagttctcatacttctttgtaggaaagcttcctgctgaaggattgaagcc

SEQ ID NO: 51369 - DNA, 1001 bp, Ricinus communis
  Intron number 1 from transcript 30076.m004508 (locus 30076 .t000072) derived from phytozome v7.0 (chr-ID 30076; pos 3 88987 to 389987 reverse strand)
ttgggtctcctttttcatcgttttcaaccatcgctgtatgctttattggggtttgatactctattctctctcaatcctgttcccgcaatttcttctattcgttttcacttgtttttcttgtctgttactggttgatgattttgatctgttagttcttttggtatctggttcgttactatgtatcaaaaatcttatttctctagtttctcaatagaactttttatacttattggggtttttatgactggaatgttatattggagatgagaatctcaaattttatgtagcatatgatctgagggtaatcggaattactgtaggtgaaatatgatagtccatacgcgcttgcctttgtttacatagaccacactgcttgctgtatgtatattgtagaatatgatcttcattacacttcccataaatcttgtaaatgcagaaaacatttaaacaagcacccctgacacccatggatatatagatatgcatgtctaaatagataatgttattcttcaaggcggcttacattttgctgcatgcttggtggtcaaaatcttgcgccacatcattgttatagctttcagtttatcacatttatgcattgcactcgactggagtatttttttttgttatggtacatacaatgtaggtagttttggaaaattggaagtaacttattgctggcattgcattttttgttttgataccctagaagctgtaactggtgcatagggaagtaatgttcttgttactcatgggatagaatggtgtcttttcttgtatgcgtaatcttaggagtcttttctagcaaatgctacatggtttaatatattgaatgatttcttgtttagaactgattttgattgtttcaaaaagaaaaaaagctgattttgatggctagccatcttctcttcagggtttttaattgtggcagtcaggtattttcctgggatttgacttcttcctctaactagatcattgcgctcagacaacttcctgtgtca

SEQ ID NO: 51370 - DNA, 690 bp, Ricinus communis
  Intron number 1 from transcript 30073.m002230 (locus 30073 .t000040) derived from phytozome v7.0 (chr-ID 30073; pos 2 70983 to 271672)
ctctcaaagctcttgagaaggtactgtccttatgtacccatttcttgtttttgtttatttttcgattttgattgctgagaaatcactagttaatagaaatttgtagaattgtcggcatttctttagtgggtattatattttcatctgactggttttagatctttgatcatcatttcaatccaattagtaccccttttcttgaatgctttagtacaagattgattttctgctgagaaattattctgggattcttgaattttctgtatgttcccttcgctatatttaattaattatcaactacttgcacatagactgctagttttcttgaaattttctgtatgttccctttgctgtatttaattaattatcaactacttgtacatagactgctaggtttctctcaaatgttgcttcttcttttgttaggttttctttcttcttttttttttttccctaaatcatttccaatgcaatctgttagtcttgtgaaaatcatagtcatcacaatacttaacattgtactcagtgttagtcatatgaatatttgaatgcccaataatactcttttttcctttaaaacccatttgatctgttcaaacttcaatgtgttaagaaggacaatacacatttggattattaatttacataaatatcattcaaatctccattttatccaggtggacggacttg

SEQ ID NO: 51371 - DNA, 209 bp, Ricinus communis
  Intron number 1 from transcript 30128.m008986 (locus 30128 .t000447) derived from phytozome v7.0 (chr-ID 30128; pos 2 008169 to 2008377 reverse strand)
gttgcaaggtaaaatcttggatttttgttaaattattttgttacccttttgggattcttaaatttccttttcatttctctttgattataaaaactgaataagaaaagaaaaaaggtcttttatctctgcgtttgctgtatcatttgtgacatgaatttcatttggtgggtgcaggtggagttttggatctgtttgatcctaaccctttt

SEQ ID NO: 51372 - DNA, 813 bp, Ricinus communis
  Intron number 2 from transcript 29927.m000593 (locus 29927 .t000003) derived from phytozome v7.0 (chr-ID 29927; pos 5 2664 to 53476)
caggtatactatattgtattgactcaaatcttgtccgaaaagagaaagaaagactgctcctttttcatctccataagggtctcctctgcttttaattctttgacattggtttattgtactcctatctgtttcttcgattaattgaactgtttccaatattaaaatttgtaactttgatttagcagtggttcaagtttagccccttccgtatttccataagggtatcctctgttttcatttctttgacattggtttattacactatttttttttttttaatctattgaattgtttccaatataaagttcctatgtatgaattggaagtaattcagatttaactcctttacaagtgtttttagagtttggattgatttaatctcaaagctttttttttttttttttttttttttttgtatagtgtgagatttttggtaaattcggcatcttggtatagatctcaaactgggtttttggtgatgtttctatataggattcatcttcttgagttgcaagcactggaatgtaatatctcttgtttaacccacaaaaagaagaagaagaattgatagccaacttaaattcccaacttgtaaaagaaaaaactgagtttgtcttgttcttttgttttatatttcttttcttctatttttaactcaagctaagtatgtgcttaaatgctcttttacaaggataaaaagaatggccaaatttgatataaagcatataattgatgaaacaaagtagcgtgaaatatggaaagagggtctcacagtcaattctgtttgtgcagctactgaaacaaggtatctaa

SEQ ID NO: 51373 - DNA, 698 bp, Ricinus communis
  Intron number 1 from transcript 30039.m000230 (locus 30039 .t000003) derived from phytozome v7.0 (chr-ID 30039; pos 1 9504 to 20201)
attcaagctcaggcaaaaagtcactgctagtgaaggtttattaaattcttctctatcttgcatgttctgctacaattgtttattttttccagattttatcttttcattagctgagacaaatcaggctctttttattgttgattaccaaataaaaacctgtcaccagcttgcttttggctgcattagaatttaattctcaaaattattggttatttggcggaataactctgagtttgctataacaagattatgttccctatttcattgtagggtgaatgtttatacatcttattatctaactatggttatctttttccaaattctcttctgtctttctctctccgttgggaccttttactcggtgtctgcctacaactgtaaggatgctacatggactagttttttatgtatttcaccaatagatattttcttcctcgccattgtattacataattgtctgtcaaagattgctgttaaaatgttgtgctaaattaatttggctctccaagtttacttctctggtaaaagaaaagaattgttccattaagtttaacatggatgactatctagtgattttaatatttttcatcatttcttgtgctttttgttttgaattttttagattcgggaacattttctaaatagcctaatatcatgtggcagggtgcagtagaaaacttattggagagaagttcata

SEQ ID NO: 51374 - DNA, 688 bp, Ricinus communis
  Intron number 1 from transcript 29848.m004707 (locus 29848 .t000263) derived from phytozome v7.0 (chr-ID 29848; pos 1 562208 to 1562895)
tcacagaccaactgggaagctgataaaatgtaagttctttagtaatttttattcattttctcttcttattgttacaactttctatctgggtttctggtttttgttttcgcttgcaatattttactatgttatgtcacttgatttgtgttttggctagctgggattttcagtttctttgagtttttggacttaaagctatgttctttttcgaggctattctttgatactacattcgcattgttattctagggttttattttcttttgttgtgtgtcttttctgtttggtggtttgagcttttctcagagctggttttagttggtggtttggtgattgtttgattttagtatttgcgttccttctataattgagctggactttgtttgctggctacatggattcttctttgtttgtggataagctaggatcctgtactcgtatatttctgttactttttcccttctttatagcgctataccatttggtctatttcttctttttagtaaatcaattttcttgaccagactctattttatccaactgggtaaaagattttgggtttagtttttgctttgttaaactcgtttgctgctatgatgctggcaatgttaatttttgtactttggtttttatccctctccttaatgatatgaagtgttttttttttttttttaattgaacaggttag

SEQ ID NO: 51375 - DNA, 774 bp, Ricinus communis
  Intron number 2 from transcript 29923.m000812 (locus 29923 .t000027) derived from phytozome v7.0 (chr-ID 29923; pos 2 59512 to 260285)
ttgatcgtatagttattcattttttttttttcaatttctgctattgtccagcaatttatctgtattctgtccatgaaagaatgtgagtttatttcttggtctatgggggtggcttgctgcagttcctatatagattgcaattttaaaactctaggattttttgtttaaattgtcattcctaaaactatatgcatatggttccttaggactgacaggttttattggtttataacattctgtattttgagtcaatgctgcttctgcattttaattggtgatgatgttgcattgacaactatatgtttgttgcaggatgtctgaagtattggcagagttgatttatgatttagtgtttggttttgcttgatggttgcatgtatgaaattgtcttctgcaccttgatatggagccaatgataaattttggtttctgtcttatcccttaggattgctttgattggtgccacgctgtagcttttactcgaatttgttaaagtgcacactcttacttggctgtgttatattattgttagtgctttgaatgaatttattaaagtgcacactcttacttggctgtgttatattattgttagtgctttgaatgagacattctagtgttattttaatatgctctttaacttgtccttttctgactaccctcgtattgtgacttcatgtttattttaagagtgtctccaactcttttccatattctaaacatctttactgtcttcttgcagggaaatcaacacttacagattctcttgtggctgct

SEQ ID NO: 51376 - DNA, 145 bp, Ricinus communis
  Intron number 1 from transcript 29992.m001435 (locus 29992 .t000030) derived from phytozome v7.0 (chr-ID 29992; pos 9 36502 to 936646 reverse strand)
ttctcgattctttaaccggtaaaaaacaccgcatcgcaatctcacattttctgtttttgtttttttcttttcttttctttttgagtgaataatttggtgaaaaggtgtagaatttgtaggtggaagaacatcacttttatctctg

SEQ ID NO: 51377 - DNA, 656 bp, Ricinus communis
  Intron number 1 from transcript 29929.m004707 (locus 29929 .t000210) derived from phytozome v7.0 (chr-ID 29929; pos 1 229130 to 1229785 reverse strand)
aacaggtgcttgaaaataatccaaggataaccaaggtgagttttgttgctttctaaatatgttttgttcttggttggggtatatgaaaatgttttattcatttcactcagttgtaatacatatttagtcctaacttttctcctctcctgttttctttaaagttcaaaacaaaatgaattgtatcacaattataattcagtggtaaatgtttctttgaatgctagagacaggtgggttcctgatacatggatttttgtaccttgctactttgcagattgtgctcaattagtgttggcaccatttttatccaaaccctatgagagtttgaaatgtagttgtaattgagaagttaattattatttttggtacagtgttagtaacagtaacagtagtgttaatagataattataggcagtattcttggcctttaggctttaggtatgtttctcatcatgtgctatagacgtttattgtccaagataatcatgaccattggaagaaatagtcttgggatttactggaggtccaaattattcatctttgatactacatacttgttcttggttttcattgagttaactatatgtttgttgtgctgcattactaatttgattttatgctaataatctgtcccttatgcagctaagtgtgcctgg

SEQ ID NO: 51378 - DNA, 355 bp, Ricinus communis
  Intron number 2 from transcript 29889.m003292 (locus 29889 .t000058) derived from phytozome v7.0 (chr-ID 29889; pos 2 50056 to 250410)
tgcattcttggcctcagagtctccccaaagcatcggtacatgctctctctctctctctctctctctctgcagaatagaaatactccgcaagtatttttcttttagagcggagttcgatcaggattcaaactcgtaaacataattttttggttggtttccaaacttgaccgattttctttttcttagcgtatgcatatagatgaagagtttttttttcttttccatgctatttacaattgattacatggctcatcgactgttgaaaagaaaattgttttgccaactaagtaaatagtacgtttttgggaagtactgtgtataattattttcgtttcttttaaactattgtagacgg

SEQ ID NO: 51379 - DNA, 647 bp, Ricinus communis
  Intron number 1 from transcript 29983.m003142 (locus 29983 .t000041) derived from phytozome v7.0 (chr-ID 29983; pos 2 41949 to 242595 reverse strand)
aacaaggtacctgctttttttttttttcttgtttcattgattgtagtgttatgaaatgaaatacagtttctgttttagtgtttttgattgtaaaggtgtgtgcttgatttgtgttatatgtgtctcatctgttattcacttgaagaatgttgaatttgtgcattaagtctttccaaggtgtgtaatttattggaaagtaaaattcatggtttctggaataatattttactgtgctagaagctgaaaggtttctgctttcttgtaatgtttgattagaagcataaagtctgatgctttatatgtaagtaatcatgggtttggctcatttttatatgggttcgttccaataagtttgatgctatagtatgtgtctgtgctatgacgtttagtttcgttaatgtgtaatcatggtttgaaatgtctgccatgccttttcatcttctcggacttcagactctcctctaggatctactggatcttgtctctagcactgtagtatattttgtgagtagttagcttgctattatgtttttgcatcactaacttcggctgtttgaatggccctatgttgattgttaagttcatattgaaatgccattgccatttttacaccatgttctgatttcctattctatgcagttgacctc

SEQ ID NO: 51380 - DNA, 600 bp, Ricinus communis
  Intron number 1 from transcript 29912.m005583 (locus 29912 .t000309) derived from phytozome v7.0 (chr-ID 29912; pos 1 913303 to 1913902)
tgtaccaaggttctgcttccatcactaattctaaggtatgtgaaacaaaagctctctccttttatttttaaattaccacttattgcggagaattgaggataaattttgtgaattcaaccgaaaaatatggcagtgtagttccgtcatatgatctaatggcggtgaattatggagaaagtcaaaactttgaggaagcagacataagaacgtaccacgatgtttgaagtactcacttttcagatgaactactcattgattagtcttatgactattagaagaatttgcatgtgaaataatttatgaattttatgtttagggtctaagatataggtttgaagttgactactggtaccaacacttatactcttattgtcttttagctttatccgtttgcatatttttcggacactaagctgcaaatggaaattaggtggtgggttagaactaggttgctacacctatagagaaaatatccagataatctagcctttatagaaacttataatgcctcaaacagagtattatttagtgaacatgtgatttattattattcttattcttttttttttttttttttatgtagggatttgttggtcgaat

SEQ ID NO: 51381 - DNA, 688 bp, Ricinus communis
  Intron number 2 from transcript 30131.m006974 (locus 30131 .t000125) derived from phytozome v7.0 (chr-ID 30131; pos 7 40723 to 741410)
aggccaaacgtcctgacttaaaagcaatatccaaggcaagtgcaattttaatttttttttttttcccttttagccatttctacaactttagtagttgctcattctttattacttgttcctcataaatttgtttcttttgttcttgactgccagtagtgcgattgttgtgaattttgggactttaaccttctttgtggttacatatgtaacatcaaaggttgctgtaaaccatcctttgcataagataatttttaatcactattggaggtgtgagtttctttttatttcacacatttaatgaatcaactatttagttcatatcacttttggtctagcaataatgctttctagatatcagtttcagacacagtgttgatgattgttatttctgattgagtagttttataatatgatataggaccttgttaaattgcaatcattagctgctccaaaattgatatctttgtttcagtgcagttagatttttcatgtagagtgcgttgctcgcactgtataatctttaatgatagttttgttctctgctggttttgtcagttgttgctatgtttaatccttatacaatttgtgcacaatatgatagatggaagtatgttgtaagtagatggcttttgtttgtgcaattatgacataacctctgcttttctcttcaaatgaaattttctggcag

SEQ ID NO: 51382 - DNA, 758 bp, Ricinus communis
  Intron number 1 from transcript 29842.m003628 (locus 29842 .t000125) derived from phytozome v7.0 (chr-ID 29842; pos 6 22328 to 623085)
ggtacttcaaatttcatcttcgcctttcttatcttttacgggttgtttaatactttgtttttctttttttcttttccaaagcttattatagtgttttggactttatatctgttcatgagtactaattacaaatttttcctttaggtgtacgtaatttgttagttttatctgctttaaataaggtttattgaactgctttagttttcactggttgaaagactcaaacttggtaatccagtgaaatattcacatcaaatcacaaattataccactgaaaatatgatttgtgcttttcatggttgttgggagagttcatcaggacaggcattcgtgcttggaagtgcaatactaaatctaatgttttctatacttgcgtttgctggtggaactgtggcgtcaaatggttctaaaagcttgaaatcccactacttctatttatttaggctcttgataaggtagtagttatgttccttagcgaagtagctgcttagttgaagaaggtggcttatgattggtggtcaattgaataatggttgtggacaaaatgagtggttggtgacccatagacacattgttcaagatcacaaaaatgttcctgactttggaaattggtatcttaagttaatgaaatacctctagctgaactatacaaaattgtcctaatgcctttgtatattttatcttgaattcttgacagtcacttgtttcttcttcttcttcttcttgctaaaatttagttttattcagcaactcagact

SEQ ID NO: 51383 - DNA, 629 bp, Ricinus communis
  Intron number 3 from transcript 30076.m004548 (locus 30076 .t000112) derived from phytozome v7.0 (chr-ID 30076; pos 6 79324 to 679952)
ggaaccgaggagagcaggtgattttctttttttcttttgttaaaataacctaccgtttcttccccatcaatcatgttagttaaagggagatttcattttaatattaaagtcgaaaacaatccttattatctatgaagaaattggtaacgtgcttcacttgaattgggaattgtgatttcctgatctgtatcttaatattacacatcatgttcacctacttgggttctaaatccacttagtgaatgaaaactcttaaagtttctccatctttgataaatgattttctaattgaactatcattaaattcgcatctacttgggcacgttgtcttcgctcaattacgtgcctgtgttggatcatgtgcatccacactcttcaagtctagaacatatggtcccaaagaactatatactattcagatcgggattaccactagcctttgatcttcctctagtatcggagcagacactggtatactatacctttacaaagatatcttgaatttcattgaatttttcgtttcttttgtcaattggatcgggaaaataatacaagaagcgttgttttgcaataagtatgtatatgtaagattgatttaactcgatatgaatatgatacagaaaggggag

SEQ ID NO: 51384 - DNA, 652 bp, Ricinus communis
  Intron number 2 from transcript 29841.m002795 (locus 29841 .t000059) derived from phytozome v7.0 (chr-ID 29841; pos 4 06489 to 407140 reverse strand)
gcaagaaattgggggaaaaaagaaacctagacaaggtcagtttttgattcaatttttatgctttttattatattctttttgtttaattttcaaaaaaccgaggtatttggtactgaatctgctgatgcaccttatgtttaattcaatgatttttctttttctgctttatcttaattctctaataataaaggtatcgcggtgtatatttaaattctttacgaacgaatattcttgcttttaattttagggtttatagttgatgatttttgtttttggtgtttgatgctgtatgttctggttctttctagtttctagggtttaaattgaattgttttcaagtattttgcttcttctttttttttttcgttatttaatctatttataggtttagactgaattatttttcgtgttttattctttattcttccatatataatttatatttgtttgttcttttttttttttttctttcttttttactatcttgatcgtgatcattatactttaatatatgatataatttctccagatttctttgattatatttttattcctatgatgttagatttctgttattgtttatccttttttctaaaattttttttttgttgtggcagatttctgatttctgttcgttattaaaatccatcat

SEQ ID NO: 51385 - DNA, 461 bp, Ricinus communis
  Intron number 2 from transcript 29923.m000805 (locus 29923 .t000020) derived from phytozome v7.0 (chr-ID 29923; pos 1 78209 to 178669)
atacttttctgcttaatagtgtgcaccatcacaaggtactcttctctttcattgccctttgttacgatggagtaaaatgttctacattgcatgcttgaaggtattgtctttattgtggcacaatgaaatgagtttggtttttccattagattgacaatacaaatttcctttaaacaatcaagagattgtgaaaagtcaatagtcgggactcctttttggtatgtaatgtaggttttttctttcttttgaggggaatgtgatgagtgatgtagtcctcctactagggatttgttctttcttggtgcatgtcttatgttctctgttcctgcctgcaataatagtttatgctctccaattccttaatttactaaaagcatttttaattttaaaactacattcctgaaaaggtggcaatggtttttgcaggatttgctgttttcttacaacattgctgtggacag

SEQ ID NO: 51386 - DNA, 902 bp, Ricinus communis
  Intron number 2 from transcript 30078.m002249 (locus 30078 .t000042) derived from phytozome v7.0 (chr-ID 30078; pos 2 69124 to 270025 reverse strand)
acctaataagcgtaaaattaacatccgcaagactggtaatgttttttatcttcaattagggttttcttttttctttttccttttactatctagagttaattgtttaaagcaagtgatactgacttgatactgcttgtgaaattggtatgtttcaaggttatattttcttcacttcattaatcagggtttctccttttcttttcccttttaatttgtctatcttcaacaaggagtctttgacatattaccgtgaaattagtattatttgtttatgtttgaatatgaaaattagagatttggttatctgctattttacttcttcaaattattattattgtttttgcttttaacaagtataagttgcaatctttggtggttctgtgaaatcggtaaaaggctattccaggtatgtgctattggtttgatttgattttaaaattggttacttttattcaaagttatgttgagagtaattcaattaagaatttgaccacataatcaaattttgctaagtgaaacagattgaatccaagaagttaatatattgatgtagaagggtttattttacctaaggttgcctttttacctcactattcttgaattgaaagaagatagaaatgtagttttatagtgtagaaagaggaaataattaaatgcaaacttgattaagaaagtgcattgtatgaacttggaagaagtagccaacatacaacttgttggaaaaaccaaaatttttgtatgatatctttgtttctcttttggtttcttttttatctttattttaccacttgggacctgcaaactttgaggtggcagtatggtgactatatattaaactaaaagtgtttctttttggtctatgtgcagtcaaaattggtagacctgggtatcgggtaacaaag

SEQ ID NO: 51387 - DNA, 985 bp, Ricinus communis
  Intron number 1 from transcript 29908.m006137 (locus 29908 .t000188) derived from phytozome v7.0 (chr-ID 29908; pos 1 20888 to 121872 reverse strand)
agcaggtaggtggctatcgtccactccccaataaaatcaggagtttaacattggtttttagctgtaatcttgttttgtagaattctatcatctaagtttgtagtttacattgaaatttttacactgaaattttgacagaggttgatgttgatgaatttggcatctacctattgtttctgtacaaatcaatggtttttggttactaaattcttcctatttgcaagtacttactttgattggatttttaatacatttgaaagtctcaagaaagttcttggttggctgtccatgtgtcaacttctctttcattgtctgttgctctatagtacgtgagagacatcctacaatcttgctgtaccatggacattgaaattataggcaacacagaatatgactcggaaattattgtatttttgtggtttgggaatgagactgttcagttaatgagcctttgatttcttcctaataaggttaaaaattcagaagctgcaggtttccatgagaaataaaaaaagcataagatggcaattcctttactgcatcagtgggaaattattgtaaccagaaatacatgttaagataaagaggagcagtcacatattcttagatggtttggagcagaaaccctcaaggtgcatttctaaaagaaccaagaaaattttaaaattataaaagttttcttggccatgtgaaacccttgcatagaccttgagatatcagattgtcaacgggctcctcatttaccttaatggttcagtagatagaattggtatagaactttttgatttttttctgaaactgtcactttttgttttattatcataaattttcatgcttcattaaggacgactgttcttactcagctgactcctccctgagctggcatttgtttttatctggtaaatttcaaatctttgctctgtttgtattgttgatttcacccatttcatcattgaacaggacaacctgaaggcatccccaaata

SEQ ID NO: 51388 - DNA, 574 bp, Ricinus communis
  Intron number 1 from transcript 29923.m000824 (locus 29923 .t000039) derived from phytozome v7.0 (chr-ID 29923; pos 3 41420 to 341993 reverse strand)
tcgattcctgttcgtgcttatttcttctccactaggtttgttgaacttataattttggttgtgtctcttgttaattctgcattttgcattttacgttcccttttgatccttggtttggaaagtctaaaaaattatttaaatcatatgtaattgaatacagttctatttaaatcattactaaatccaaacaaagcatcagagtgaatgaaatgaaagcatcatgtaaaagaattgtttgtaaggaagtctgtttatataattcttatatgaaaaagagatatttattcaacctaaatatattcacattgcaatattatactcattttaatgctattgattgcacccatcttctgattataaacgggcaaaagaagcagaatttgcatttctggctgagccttgaaaaatggatttattttaatagaaaactaaatgaaaaggaatgcagcaagcaaaaccattatgcattcacttatattgtctggaaatgtatttgtaatatctgaagtttggagtgaatcgttgttgattgtttgtagtgtggatttgaagagcttagtggaacagaacaaac

SEQ ID NO: 51389 - DNA, 638 bp, Ricinus communis
  Intron number 1 from transcript 30114.m000507 (locus 30114 .t000005) derived from phytozome v7.0 (chr-ID 30114; pos 4 5534 to 46171 reverse strand)
ttgattggaacagcacataaacacaaagttataaggtaaagacaagatactaaaagatcatataattaagccggttagacggctactaacagttttgatttctctccctattatagccggccattttctctaattgttattattattattattattattattattattattattattattattattattattattattgttatttaatatttttattttatttcttttgccagcctatactcttttatttcattcttccttgccattcctttataatcctttagctttggaggactcagtcataatctttctttaagattttctcatattttcttcttcttcttcttcttcttcctgtcatatagttggggtaatttgatggggaagcaaaaccagaaaagtgtaacaaataaacacaatattactaatactaatattacaaataacagtggggctaccaaggtgaaacgtactagaagaagtgttccaagagattctccacctcagcgcagctcaatttatcgaggagtaactaggtcgatcatcaatctaattatctcttgattaataatttctgttcttttttctttttcaaaaaaagtagataatgaatatttgtatgatgaatttagacatcg

SEQ ID NO: 51390 - DNA, 652 bp, Ricinus communis
  Intron number 1 from transcript 29842.m003513 (locus 29842 .t000010) derived from phytozome v7.0 (chr-ID 29842; pos 7 3603 to 74254 reverse strand)
agctctttggaatcacccggccggacccaaaaccagtcagccttcttccatctctcttttttattctctttgcttatgaatccctaaaatgtttgctttgatgagcataaaatttctaattttgactttctttctttttttattttaaaaaattgattccgattagacccttttttcgtttgccctctttgcgaacaaaacaatatcaacctatggcgtttccgtcgtctcaaatgcgatttatttatttatgtctcaattttttgtccgacttgtatttatgataattcattcaattctccgctacaatttacccaatggaattagaagggaaaaattggacggaatgggagacaagacaaagtgttaaacacaattaacttatgaattcagccattctgtttccactatattaaccccaaatcataactttttcctgtttgttcattacctcaattacgttgtgggaaagctagcaattggaaagataccaacatcctaccttgatcacctatattaggctatcaaactcaatctaattgatcagccaatgcaggacctggttgtgctaacattttataaatttgacacttgtctgaccttcaattgccatgtttgctattgcagttcacttctgggcaccaacgtttaa

SEQ ID NO: 51391 - DNA, 807 bp, Ricinus communis
  Intron number 2 from transcript 30064.m000492 (locus 30064 .t000014) derived from phytozome v7.0 (chr-ID 30064; pos 1 09604 to 110410)
aaggcgagtcaaaggtacgtgggcttattggtgtaattcattttgatttgatttgatttcatttttattttgataggaaatgtaggttaaaaaatttattcttttcgtcattaaaagtattttttttagaaaaattgatattgtttggaataaatcaagtgcaataattcaattggattgaattcttgaaaaatcatgtcaattttcacaattggcatgactttatttctttcaaagtcttatttatttactaatttagtcttaagttgaaagaattgaattgtagcaactatatgctttccaaacatgaaaattgaccaaatattaaatgaatttttagagtttccaaacacagtgttaatttattagggacgaattaagttggattagttgtgtaagagattgttttcctttgattttcattcttggcaactgagtgcagtgtgtggattaaattatatgcaagaattcaattgaattcatgcagaagcatgtcgcttttcgcatggtttcatttcttataaaatcccttcattcatagttccttatttatttaaagtggaaatgattgaattcttgcaactataacctttccagacaaaagaatgactaaatggaatttaagtgaactcaattcatgcatattcagactttccaagcattatgaaactgatcagaaataaacttttaagtcatggtctgatatggttacttgtatttgctattctctctgtttatttggcctgtgattgacatatgcacacaaaattttaaaaaaaaaaactactgggacaatgcagagtaaca

SEQ ID NO: 51392 - DNA, 619 bp, Ricinus communis
  Intron number 1 from transcript 29848.m004547 (locus 29848 .t000103) derived from phytozome v7.0 (chr-ID 29848; pos 5 59226 to 559844)
cctgatctctccactctccttctttctctctcacagtatctttctcccaccttattttgctcattttgatatgtttatttgttttaggagtattataggtgcatagaaaatgtagtgctgcttcttctttttttcaacggtcaaaattctaaaacctaaaaacataaaaagttatagccaatgctaattgttatataagaaagttaaaaatggttatatgtgcagtgcaagttactgacagtactgtggaactttattagacatggtaatagagaatgctaattgattcaagcaattttttatggcattgtttggattaaatcgtatgtaagaattggaaaatgatatccgtttccaaacatgagaatggacaaaatagaattcaaatgtaaggcgtatatgtggataagtttctgaataaggccctgaattattttattgaactgttaaagagtgatgtaaacgtgagtgtcagttgtgatgtgcaaatgttaaaataggagatttatatctccttttggttattcatgtgatattcatgttagttttgctcttgaattgacgattctttttttttttttaatttgtttcagatcagaggatactccagcaaggtacc

SEQ ID NO: 51393 - DNA, 842 bp, Ricinus communis
  Intron number 1 from transcript 29822.m003471 (locus 29822 .t000146) derived from phytozome v7.0 (chr-ID 29822; pos 8 50969 to 851810)
tgataactctcttagtggcactactgctcagtgtaataatctcaatttttttctcttttctttttgattttttggtggtcaacttatgtttaattaagaatagtatgttttaggtgtgaagttagttttgctactttaatgttattgtagtttggttctactaaatcaggtaaagagaagccatatgttctttgaattttaaggactgattatatagtaacaacttttattccatcatctagggcccaatttccttggaatttaccatgttgatgatttttaacacttcttttctcctttcacttgaaaaaaaaaaaaggaattcttgttgttgatgttattttatggtgaagtagcaaatttgatttcttaggatcaaggatgagggaagccttgtcatgcatgtggtaagctgggatcaccgtaaaacttaatactgtttctttgtttcagaagtgagaccatacagggaaaagtgagacataaatgttctaaaacttgtctcattttatatcaaagagtttattgaaagctttttcaatatggtggagcctcaattaagattatgttggtttaaatggtaatttgtcgtactagagcatgtatgattaaacagccccagatgatcattttctatatcatctatggagtagctcctagatagcaactaccttgtctttttgtcactaaacttgcttgtatttaacaaattggtaaactgaagcaagagctgcatctgcacaaatgtaaaaattatagcaatttgaatagcaacatttatgatttccatattgctttggtcttcagtggaaagtaaatctactgaggagaagagcaaagac

SEQ ID NO: 51394 - DNA, 307 bp, Ricinus communis
  Intron number 1 from transcript 29827.m002600 (locus 29827 .t000073) derived from phytozome v7.0 (chr-ID 29827; pos 3 93149 to 393455)
attcagtatacttgtaccactgttcaaggccgcatgtatgctttttctatctaattatatttgaatttgtatgttttgatctttggggttcgttaaaagttcttatctttcactagtttctttttaatgttatgcattcaattcaactatctcacatttgtttgttttattaggatccttgatttgaatgaatcttaggttgttgatctccaacttttactcctcgagaaaaaacttaattttcttgttctattattgaagaatgaatttaggttgttgggttcaagaagctgtattggttgtgaga

SEQ ID NO: 51395 - DNA, 621 bp, Ricinus communis
  Intron number 2 from transcript 29827.m002600 (locus 29827 .t000073) derived from phytozome v7.0 (chr-ID 29827; pos 3 93489 to 394109)
aaatattattgggatttttcagttttgctaaggtctacatttggataatgttttccttttccagtgaaagccttttgattattcctaggagaaagggatttgtctttgtagaggctagatcagtttatttctaattgagcaacctgcttcttgggtgttgaattttggccagtgtaatctcctattctactgaattcagagtcttgcacatagttgctaagtgaacacgagcatccttattaatgtgttattgttggatattttgttatcatttagagtaatatttgagtctagaattaggacatagaaagcaatgtgattggtgttgtgcctttacggggtctctcctttcgtagcatttaacatcctcccttccatgagatttttgtttgaacgatcaaacaatattatgaaactgacaaatgaagattttcttgactattttctttttaccattgctcgagttggaaactgttaatagtttctgttaatgctcttcatatttttcttgatcacatcatgattttctttcctattgtaagcaggattattatcatcctggaattggttgtgataatttgaagagtgtgctatcattggaaatccggtatcagcacaaaa

SEQ ID NO: 51396 - DNA, 477 bp, Ricinus communis
  Intron number 1 from transcript 29827.m002653 (locus 29827 .t000126) derived from phytozome v7.0 (chr-ID 29827; pos 7 08952 to 709428 reverse strand)
cgtctgtttctcacctcgtttccaattttcgtaaggtaaaaattgcagtatttgttttagtttaattgaatcctattaacttaattcattgtgggtgttgctacttctaactgattttggacctagcttgttggatattagacgcttcgcataagcatcacatccccaaatctttaagcttgagaaaactggtttactattaaaccacttaagaaagaaacaaaaattacacttgattttgcaatttaattaatttaaactctttcacatgattcattccagactaggagtaactgcattttagttatagaaagtcttggttagcttaatttctgagtataggtgcacgtttcatttacatgtcaaaaatggatttgctgatgttaattattatgtctactttgaagtatggaagtgcaaggatcataatgtgggcctttttttcttctttgaatttttgacagaggctttgtgata

SEQ ID NO: 51397 - DNA, 868 bp, Ricinus communis
  Intron number 1 from transcript 29872.m000544 (locus 29872 .t000022) derived from phytozome v7.0 (chr-ID 29872; pos 1 77018 to 177885 reverse strand)
gtcattgcctcctttcttctcacctctatcgccgggtaactctttttattatttcttttactacttgtatttttattattaactgtctggttagttccacttgttatctgaattatgctagttaagtagtttttttttaatgttttattcttttaattgtttgttacttcattaggtaccgttagcttgattgttatagttaatgggctgcttttgttttgtttaattagtttttcatgtttctcttgttagtttagctcacacagtttgatgactattattaaggtttcacttgaaagtttgttagtggctatcatcagtgtgattatgattatagattggctatctactagttgattatcatacgtcagtttcctgatcgatattaggaggaaatttagcttttcatagtgtctggtgtctctttctgatatgatatgctcttattatactgtattatgcgtcgcatggttttttatgccatgaagtgggttcaagcaaacaatctgttttaatttgaattgggtattgggaatactataaagtcagctgtaaaacaatttgttgagctatgtgaactatctgtttcaacatgaactgagaatcaggtttgaagtgtcattttggtcagatagtttgagcagctgctctttctctctgtgttgagatgccatttgtttcttcttgctgttgtttttaagtgccagaaattcatcctcttaaagagtgatctgagtgcctgagctttttcatgtttgtattttgtatctattctggatgcacagatatagcaacatttttgttcttattgtgtgttaatcttatactttgcttatttctttcctctgatttgtgtagagctggattt

SEQ ID NO: 51398 - DNA, 647 bp, Ricinus communis
  Intron number 1 from transcript 29842.m003515 (locus 29842 .t000012) derived from phytozome v7.0 (chr-ID 29842; pos 7 6174 to 76820)
ctcctaataaccccgtttcctgcaactgtaagcattatcatcttcttctctgtctttcttttaattctatccatcttaatttgttgtatatggttttgattaagattaaggattttatgttcctcgatccacccatctatttggttttcccttaacaaatcccctctgattcttctaagtgcatttcagctgtcttttcaaataaatggctggaatgattatcgaacggaattactagtgagtttaggtttgattttattgtcatataaaggtcgaatgtgttgaaagtatgtctcttcttctagtgtctgagggtgtgtttgttgactattgagattgcatgtatcgcaacgatcttaagattgatggtgacccatatgcatatatacaacgtataatagagtggtctgaattctgatgtctcatctaaagttggtgttttgagagtgtgaatgcctattttcatcatcttatcttcattcgttttattgtgatcaaaacgtttttgtttctttttctgttcttttccttttaatttgttctgaactttgtgtaacagtaatggaatgaattcagcatctttttgcatttttatgtgaattataaataaatgtgtttctaataatttacatgcctctgtactgtag

SEQ ID NO: 51399 - DNA, 803 bp, Ricinus communis
  Intron number 1 from transcript 29827.m002587 (locus 29827 .t000060) derived from phytozome v7.0 (chr-ID 29827; pos 3 32835 to 333637 reverse strand)
cctcctccacaatatcattgctttcttcttccaaggtactggttttcattctttgccttaatttctgggaatttaactgaacaatttcttgatagctagccaagggaaagtaatatctttctcttctttgttgcttgctattcctacaatttgaatctgtatattatagttctacgattcccttaatattgggtctaagttatttatttatttaccacttctttttggtgcttaatttatatactattttccaacttcaagatatcaagtgcatttgagggtgaactgaaaactctagtatatcaactactattatctgattcatgtgttcttgttcgaattcttagatgcatgtaggtttcttcagtgtgcaagcacttgcaaaagataggccacctatatatctactgtcatttcgatgctatataacatttcaaacaaagcatggattgaattaattatgttgttttcttttgttttgatatatgaataatttactttaagatgttcattagatttatcttcgatttatcattcttaaatattctcaagaaattcaattttgtattcaaaaagaggataggcaacatatcaaagactaattttgggtgatattattagctaatacatcgtttttgcatgtaagtactctaatctatgttttctgaagcataatgtggtaccttctcacattttggtcagttttgcaatctttgagctggcttgctttacttcttcttacagttatattctgtttcttatctacagatcaatagtctgcttgaacaagcctcaaccttcac

SEQ ID NO: 51400 - DNA, 527 bp, Ricinus communis
  Intron number 1 from transcript 29881.m000477 (locus 29881 .t000008) derived from phytozome v7.0 (chr-ID 29881; pos 3 44532 to 345058)
atcaagtaagttccgtttaaccaatttatttatttatttctttaattgcaaccttaactttggacgtagaaatggcaacataattgtttaacagcaacctatttcaatgctaaaaaacttaaggaagttgtgaaaattctgagctttgaaattgagatacttctttggagtggctatatgattatgattccaatcttgttcacctattctcataatgtgctctgaaaatttctattgttattaattattttcttaataatcatcttgtgggttgtggtggccttaggaactaaatgcagttggtattttccttttgcttgtatatgatggagcatttcatcatctaatacataagtatctttatgtgtctcactccgttaaaatccaaaggcagaggaatgcagttatcagattgaatgattttgcctgtaatttgacttggagaaattctttatctttttctttcttcttttccttcttttgttgtcaaaggtatatccaactcataatcctcagtcaccagaagt

SEQ ID NO: 51401 - DNA, 807 bp, Ricinus communis
  Intron number 2 from transcript 29881.m000477 (locus 29881 .t000008) derived from phytozome v7.0 (chr-ID 29881; pos 3 45178 to 345984)
ccaaagttgcagaagaagcagtctcaggtatctgttatcttgccttctacattctgacttcagtaatgcaaaattaggtctagtgagttgataacttctgttatgaatgtgtattggataaaacaactagtaggaattgtttattctttcggcaacttaactattttattttgtagcataatgaatgaccactttcattgcatcatattatgatcgcttccacgcaacaacatgacccaattatgcatctactttcatactaattacatgttttctacttgtgacttctaatggggaaataacatcttttttcaaatttagtagacatacatatagacacacactccttttcctcttccatttggtgcgccctttattggacagatacacactcgcgcactaagcaaaatagaatgtagagaaagggagaaaagaagaccttatgtagccaacttcttactttggtgtaaacaccaagtcgagtccaattgattctagaccaatggatgtgtgtgcctgtgaatattcagtttgatttctggtccattttgtccttaagaggttttttatgcatgtcaataaattttccttctcttagtttttcattcaagtggttgcattaggcatggcaaagttactttgcaattgagtaatacaaatctataaagatgccgtttattcttatttcattcctttcattaacctaatttcatgaaaagatttccctctaagttgactgttagcttattttattttctatctctaatgctaggctgggagaaagctgaaacggaattatcgctgctg

SEQ ID NO: 51402 - DNA, 1012 bp, Ricinus communis
  Intron number 2 from transcript 29932.m000612 (locus 29932 .t000023) derived from phytozome v7.0 (chr-ID 29932; pos 2 31146 to 232157 reverse strand)
tctgctactccagtatagcgcccttaacttcagaggtatgttacgttcgttttctttattctcaagtatgctcgagtttggagttgttgcaggtataattaaatcagtagaacaagaaattcttgtattatatgatggcatgttttttcttggtttgaattgaaattcagtttcatctgtcatgagcttggtgcatgtttggtagaccaggagaaacagaagttttctggtcattctgaagatttctattgttaatgctctttatggcagaagctgccatagataaaaaaatctgagctgcaaagctaacgaatgaattttgcacagctactttcatacgtatttaccttatagaaagcagggaggcttgtgcattttggatgatgcccttttactaggtttctgattatattcctggcaattgatgctgtatctcctgctaatcgtaagggaaacatttcagagttttcaattttctagcagggcaattaactggtaagtgtagggtccaaacagttgcaaccaacttttgctctaacagcaggcaatgatcaagtcctctagaactaactctagctgtactgccatagagtttgatttcccatttaatgctattattgcattgaatttttaattttttttttgctcttctcatcatcaagaaccttctgaaaacaagaacaagaccacaggtaaggagtgtaattctaggaaggattgaattccccatgaagaaaagatgaattttgacacctctaacatgaagttcattttcccttaaaagcattaaattgcttgtgaaccttcaggagttcaactcctggcttcctgcactacaaggcaaatacttggccaccggattttacaatttggtgttatgttatgccttttgtttgagtaaagattttgttcagaagttcttataattcacaaaaagacagtccctgtcattgtttttaattgtctcttaaaaacagggttaataaagattgtcaagaagcacaacaagaag

SEQ ID NO: 51403 - DNA, 839 bp, Ricinus communis
  Intron number 1 from transcript 29842.m003508 (locus 29842 .t000005) derived from phytozome v7.0 (chr-ID 29842; pos 4 6958 to 47796)
ttcttctacttctatatatttattttctaaagcaggtaaggtttccttgcttttaatctctttctatttctcatgtttctttgttttctttcctatttttatggtataaacattggatcttttgctcctttcttttttgattttcagcaaactttttttttcgaatttggatttcactgtcgattggggtttctcttctctgcttcaattttgaatttacttctttgtgaaattaatccccatttagatgctcacaacttattgattacctgccttctaaagttcgaatctgtttttcttcaacaattcacttttcttatgctcttgttttcagattacaatgcttcctttttctaaaaaaaataaaataaaatgaaatagttgaactcaacctgctccaattgcaagtttctgctttctcttttatctatttccttcttttcagttgtcactgctgctcgagtggagtagtcttctagataggcctttgcctatctatgatgggcacaaatataaattgtcatcattttaaaaacccaaaacgatgtaactttagaaaatcatttaggtttgttgtaaccagcatgtttggttttctttgattttgcctttctgctgaaaattgcatcactattatgcttctgcagcaaatttaagttccctcactaatatgcatttcacacaatccatgcttggtctttctcattatgtaactttacttcatatcatttgctgcttttctttctgtatttgtcgtccctatccttctacctctagtactaataagggctcattgtatcatttcatgtgtcaggcagcaacccctgagccccatatac

SEQ ID NO: 51404 - DNA, 858 bp, Ricinus communis
  Intron number 3 from transcript 29842.m003508 (locus 29842 .t000005) derived from phytozome v7.0 (chr-ID 29842; pos 4 8389 to 49246)
gataggcatctcccaggattcagactcttgaattggtaaggatagtacatcatcttgtcgctttggattatttctactcttttagttacatagaactgaatattattttaattcaaatggcaactaatagatttatttgtaaaatgatgatgacagcatcttgaatggataaacttttgttttgactacatattttattttattttactttggtgcaattgagtgtcccagcttgaaaaaaaaaagtctatttgaactttttattcttttttcctagtgactgatgtagttaaacatcataaatttggctttattttccatgttcacaaagtaacaagtgcatggactcttttatttaactaaaaagaatcatgtatcccttgcaaagatcaagatatttatttttcaccacaaatttctaagattttctcaaatttatctgattacaaatttaagcttgtatgcttggactcttaagaaaaaataaattaaagcagtattttcaccacaaatttctaagattttctcaaatttatctgattacaaatttaagcttgtatgcttggactcttaagaaaaaataaattaaagcagtatctgtgttgttgctgatatgaaaagtaagtctgcttttgtactattttaattcagtgcatgcggacatatagaaggggtccggaatctcttgatccccatttagctactcaatttccaaaacaggaaaaaaaaaaaggaagaatagaaactccaatagaaatctaataggcttttgcatctaatgtttcattattctaaacatgtttcatttgagtttacaaatttctctattttcttgtcaggcatttctttttcactgcg

SEQ ID NO: 51405 - DNA, 572 bp, Ricinus communis
  Intron number 1 from transcript 29904.m002966 (locus 29904 .t000080) derived from phytozome v7.0 (chr-ID 29904; pos 5 39408 to 539979 reverse strand)
gagctaaggtgtattatcctctcttcatttagtgaatttgaaaagaaaaaaaaaagaactacagaagaaaatatttgaatttgttgaaatctaatttatgtttgctagatatttaggcaatgattatgaatttctaattgcttgtactacatcgaaatatttgtacttatatattcttatatttcatcttgtttcacttttgttctttgtactcaaatgtatgtttcttgacaacctaatttccactgtgatcaatcttttctctttatctttttcttagaaaaaaaaaaaattatgtctggattcttcacttaggagagaacaatgcgctgaaatgcgcaagtccttatgtactcgtacttttgatagagtaaaaacatttttgtccaacagtagaattatgttaaaataaaacgtgaattcttggtggttgtagcttatcctttgttgccttatgattatgctttcactgtttaatgcaatgtgttcattttgatggttaattgtccattaattgttttcttgttatgtttcaaggttgggatttgtgaacttccttttaatccaatcag

SEQ ID NO: 51406 - DNA, 343 bp, Ricinus communis
  Intron number 1 from transcript 29841.m002919 (locus 29841 .t000183) derived from phytozome v7.0 (chr-ID 29841; pos 1 143380 to 1143722)
ggtaagtacttaatagttttcaagcaagtctttttgtgaggttttgacgacttcattgatatgctttaattagtatataggaaacataatcaaaaaaatgtaagttatttgagattaatattttaagtgaatataattagaatcataattattaccaataaatactaacaagctttggtgcagtagtactagagttgtctccagaactgtgaagtaggaagtcgtgtctgcgcattactcttcatcctacctagtttatggtttagaccattttctcctgcttactgtgcttgtttatgattttgcagatacgagtcacagtttattcaaactattgtgaagg

SEQ ID NO: 51407 - DNA, 394 bp, Ricinus communis
  Intron number 1 from transcript 30099.m001665 (locus 30099 .t000044) derived from phytozome v7.0 (chr-ID 30099; pos 2 15974 to 216367 reverse strand)
ttgaggaatcctggagatcgaaatttaggacaaaggttagttttcttttcattgatttctgttgcttatttttagttagttgagtgaaaaatgagaaaggaaagttattgataggcaatgttatcttgatttggttttggtttctagaagtgaatctaggttttcttagtttgttcaaaatgtgtaaatcttgattttcctttttcttgattagaaatttaaaaaaatctgccaaaactgaaaaatctaaaatctatatatcctgaaatgtggtccatgtcaacagggcttagattgaaaatcttatattttaaagatttaattgttgtaattttttttatattattggtgtgctgattttctattcctaaaattgtcattctgcaggcaatct

SEQ ID NO: 51408 - DNA, 154 bp, Ricinus communis
  Intron number 3 from transcript 30128.m008772 (locus 30128 .t000233) derived from phytozome v7.0 (chr-ID 30128; pos 9 33582 to 933735 reverse strand)
atcgccagttgggaagttgccagcaagtgttgtaggtatttttctttgagatgattaataatcctttttgttttttggatttgtttcttgtcaaccagttagaccagttattggattaagagtttaaatgttttatgcaggagagtggaagcga

SEQ ID NO: 51409 - DNA, 1013 bp, Ricinus communis
  Intron number 1 from transcript 30143.m001162 (locus 30143 .t000001) derived from phytozome v7.0 (chr-ID 30143; pos 1 040 to 2052)
gaagtaggcagaagagcattgcagaaatcattcaggtggagaacttgaacttctgcttcttttttattttctttttgttgttttgttttggttttgaaacattacttgctttgaatgcgctgcttattgcaaatgctcagattttttaagtagaatgtagctgtttgatattgtatgttttccagtatgatgaaggaatggtgtttattgcaaatggtatgtgaaatatgatgatccttttcttagctatggtcaatgctgtcggtcaaaatatttttgtgaaacttagaatgtatttttaatttgcagtatacgtccaatatatactttatgatgtgtaaattctgtttctttttggaataatctgtcttagtgtttgggtatgtagcttgttttctgtatttaaggttagtaatatattggtatttatatttaagtctttattattgctctttcatttaccttttctaagaattagttgtaacagcattgattttgatatgattatgagaattaattcattttattttccatttttgaatatctattgatttctctatgttggtggatatggatcatctcagtttgtttcctctcgttcttttgtttggcaattatgtcccttctgtttagtaagcatgtgcctgtcgttgtcttgactacttaatgttgttatttctattgtttaatagtgttttgtaagtgaggacctatatgtttatccttttgcattttattttatttatcttgctttctcttctccctttgtatgaatatagattttatgattttgtacaaaaatatacaaacgtatgcaagtttttgttagtgtttgttaagtctgattgggatagctagcccgtacatgactgatttatgatagaatagtgtctatcaacactcctttcttgcgcacatcattcacagaatttgcagttctgcttttagtggtgcttttaacaaatgaaagtttaatatgcttctcgctaagtggtttggttttgaaatgcagg

SEQ ID NO: 51410 - DNA, 782 bp, Ricinus communis
  Intron number 3 from transcript 29822.m003518 (locus 29822 .t000193) derived from phytozome v7.0 (chr-ID 29822; pos 1 151550 to 1152331 reverse strand)
gaatttaaaaacttcaaggcgatccacgaaggtttcttctctataatttatttgctattctattttacttttaactctgctttgagccttgttgttctattatttgaatctcacagctacactagttgtgaagatgaatgtcgacatagtttcctcaaaagaaaaaagaacaaagaaaaagaatattgagatagttatcctttactagaatatcgttacgctgcttggtgatgtaattaaatagaaagaaaaatcatgtgctagatatcaattcaaaccatgtaatcaaccgccaaaactcagccttgtttgaaataaatcacatgctagaattcatttcaattcaatttttgcagaattatgttatttgtggaatgatttcacttcctttaaagtgcctttttgtttttttatattttcttttcaagttcaaggagttgaattatagcaactatgacacttatcaagaacatgagaattgactatatggaagtcaattgaaacggatacttgcatttttagacttttgaaacaccatgcaagtgaatgcaatcaaataagattggataaggacatttgcatttttcttccctccttgtttttctgagacttcttttttgttatttatatttagatggatcaatagcttttcatttctcacggtaatagtatgaccacataaactgttgaagtatgcatgtgcgggacatttatggttgtagacgagttatgccttaaaaataaaagtcgattcacttccaatatcaaatgctaggaagttc

SEQ ID NO: 51411 - DNA, 471 bp, Ricinus communis
  Intron number 2 from transcript 29904.m002922 (locus 29904 .t000036) derived from phytozome v7.0 (chr-ID 29904; pos 2 79801 to 280271)
atttgctgctgcaacaaggtaatggtcaatctgtctgtaactgttgctcttgttgtctagcgcctgttaattttgttgtctctttatgtactgttaaattgtgggatctctaatttacattatgcaacaagagctagtattataattattttttttccctaagtagaagaatatcttaaaagaacatttgtttttggatgtggtccttttctagggtatagcagcttcatggcacccaccctttgttagttaagtattttgaataatgtgtattatcactgttattataattgtctgttgacctcagtttaataaggaaactgtcaatgatggaactttatgcttttttttgttagctttgtgtttgcgagcagctaatgagccttctttctcctttctttttttctgatgttccctatcttatgtgtttattgggtctaatctttgcaatatttttctttgctttcatag

SEQ ID NO: 51412 - DNA, 806 bp, Ricinus communis
  Intron number 1 from transcript 29917.m002019 (locus 29917 .t000088) derived from phytozome v7.0 (chr-ID 29917; pos 6 35091 to 635896)
agagttctgcttctagtgaagacaggtaaactgctttactttactttactatttgttctgaggttaaacagatactgttgaacactggctctccctgatagctatgcgtgttgctgatatttatgcttcaacttatggtaattagggttgagagtgtgaccaacggccttaccttgtaaacatacttgcacgaaatgatattgcctccaattaaaaatttcaaggctctgagcgatgaatttccttagaattttgcattttctttttatgcttttagttggaagtgttttgatcagaaacttcttttctatatttaagttatatggatttggaaaaccttactgaaaatttgaattccattagagttcagcaagagtgttgttgattgtattatctctctcatgcattcatgcagtagtcaatcaagtattggattttaggaaactgggtagttgattaacctgttttatcccttagatcgtttatgtagctggcggtgcaggccaatctcttacttgcagttatctgtcctcaactataaaatgttttctggtcactatgttatatatatatatatatatatatgtattattcatctgagaagttttttttccttatatatagaaggccttttactgcttcatgttacttttgaagcttttcatcaattattaaagcttgtgtttccttacttgttgtcctcattttcttcattatttgcattcctcatttttctttttgttttgcttagttactttatgcatttactcattcattttgtcttactaatagaactaaccctcatt

SEQ ID NO: 51413 - DNA, 994 bp, Ricinus communis
  Intron number 2 from transcript 29864.m001472 (locus 29864 .t000048) derived from phytozome v7.0 (chr-ID 29864; pos 6 93098 to 694091)
gcttaagcttactagaacccatcctgatcttgcaggtatctagttacagtgttcttgacgaagtttcttccatcatatagttttcctgtgtttgttttgtttatttgttggattccctgatataaaatgttgcttcactcctaatttgcaaattttactgagttattttgtcttattgtcttattttccattgctggagcatttacatttctaggtttgctcaaaggaagtcttgaaccttaatctttagcttgtgcatgactggtagagatatagtatgttcttatgcctatggctaatcatatatttcttatgaaagttaattgagaagcatacttgcacttttattgtcttaatgctggtgaggagtataatcattgctttagatgttagaatactgatggatgataaacttctttttctttgatgctgggacatgaagaaaatgactgttactttaaatttatgttgtgaatatcaagcaaacatgaagaaaatgactgatattttaaatttatgctttgaaattcaatcaatgtgtgcccgcttctgcgtctaattttcctaacattaggatggtacgcggtagcgtgtagctcaactagcaggaagaattttaatatctcaattcataacctgtatcgtatttaattgcagtgactttactataaatctgtcagatccacagtttggagatccctctttttaattcttacaaatattttaaattgtatggatatatagatgtctacattttaattttattaggtctatgactgatgattctgtatggttgtttttgttttcaaaagatccattgcacattatggtttttatgagaacaggattccctgcttcctcgtgtttgaattacatctgtcgcattgattgactaaattaataagtaagatttgatttatcttatgtcatccatatggcaattctggtactaaatcaatttttggtctgactaaaatttatacaccaggattga

SEQ ID NO: 51414 - DNA, 837 bp, Ricinus communis
  Intron number 1 from transcript 30113.m001448 (locus 30113 .t000024) derived from phytozome v7.0 (chr-ID 30113; pos 8 39599 to 840435)
cttttttgtttcccggtcaggtcagtgttattattcggttgccttccaattggcaaatcttccttgtcttttcccattaattttttgtagcttcattagttgaaactgtttcttaattgttggaactgaagaaggtgattgcatttattggttttactaagaacttcaatcgtacaaaactaaagattgcagtatgctgttaattggttgtgggttcggattgtgtactactagaaggcattgctgcttgtacacataatcggaatttagtggaaggaggatttcttttttcttagaaaaaggaaatatctgtaagcaattatgcttatctgtctaacgtgtctaatgataattgccaaacttgactgtaagggactggaaaacatgtgaataaggagtaaaattaacaaaagtttggttcctgtctactgcacgcctcttctgcaacagccaacagtacgagatttgaagagcttttcacattttagttatttatcctgtaatgggaaattaaatgaatgagattattgcagctttgattgatgtcagtggctctattagctttgaagcttgtaaccctttttcagcctggcgtagagagttttactcatttgaaataatttatttgttaatggggaaagtgaaacaaatttgaaaaatgtatgaactaagatatatttaatgtagtgtccaatctacctagtgtgcagctaattatatcattttgtgatatgggattgtcattcaaattgtgttcttttataagtattgcaacttttcttttatgttttttcttttttgtcctctgaatacttttagggtgcacaagcggttggc

SEQ ID NO: 51415 - DNA, 351 bp, Ricinus communis
  Intron number 3 from transcript 30111.m000737 (locus 30111 .t000040) derived from phytozome v7.0 (chr-ID 30111; pos 3 27495 to 327845)
tggtgaggtatgcatttatacattatttatatacacacacacgcatatatcttatctaaaaataaatgaatagaagatacattggaatcaaattttgcataatgtggaggtagagtggcactaaagaaattcccttttgctttgtatagaaaaagagatgactataatcaaattcagtgggcgaacagtacataactatatacatatataggaattttcttgagtgagaagtagaattttcttggccaagaaaattattgaaacgtaagtggaattttctggcttactaattttaattatgagtttcttttctatttttccttctgggggatgcagggtaaagtcccgttt

SEQ ID NO: 51416 - DNA, 762 bp, Ricinus communis
  Intron number 1 from transcript 29929.m004727 (locus 29929 .t000230) derived from phytozome v7.0 (chr-ID 29929; pos 1 319039 to 1319800 reverse strand)
gctatcgcccaatctaccaaggtcttcacttcctggtatgttacttgcatcacattctcttcttggaatcttatcaattttttgggatctggtattctgtttctttattcttgtttgggaagatagcttggcttcttagtccttacttgtttgtcaatgagaccggtggtttatttctttctggttttggttagatcttgtaacgaatttgaattagcttttgagctaatattgtcatctccagcaacaaaacagattatacgttttcatttgctttaggtacaataatgctgtatttcaagaaaggacaacttaactattgattgtcttaggttcggtctgttgtaatgtatgggctggatagagagagcaattctggaatactacaacactgtcaagttgcatagggatggagaaggggaggtattacgaattgggaaagactacaggatggatatagtagccattttgatgaatcaaaccaatttagtattggtggtgacttgctattcttggaatagtcttgatgttcttatctttccttataaactcagttgcaacgtagaatttcagtagagggatttcgacctatgagtttgtttaatgactctgatacagcaaaggccttcgtagtccatctgcatgttgatgtgtttcttgataatgatggaagaaatgctgccaaattttctgataattttttagtctaattaccttaaagagtcttaagatttcctaaatttgcaggtataaagaaaggcg

SEQ ID NO: 51417 - DNA, 416 bp, Ricinus communis
  Intron number 1 from transcript 30131.m006983 (locus 30131 .t000134) derived from phytozome v7.0 (chr-ID 30131; pos 7 89164 to 789579)
caccgatcctcctcaatctcccatctctccatcaggtttcttcttctttttcttttttcctccctttatttctttttcgtttccttttggttctatctagttaattttttttcattttatgtttttgtttgtttgttttgttttgatggaaccctagggagtttatgtgagttagaattttgtctatggttgtcaatttttttatgcttttggttgtttttggttccagttgcaagctactgtttgtaacttaattatttgttttgtgacttaattgcattgaatcgctgtattgttagtttttttatatataaaaaaaattgcttggcgatttttgggtttgcgtgactaatctatgtttaatgcattgtataatgacaggccaattcgctccagctgcagaagaatctggtgga

SEQ ID NO: 51418 - DNA, 948 bp, Ricinus communis
  Intron number 1 from transcript 29983.m003218 (locus 29983 .t000117) derived from phytozome v7.0 (chr-ID 29983; pos 6 45511 to 646458 reverse strand)
caagaagaaggtttacagcgacgcgagtggcgcaggtagtgttttctttatcaaagtttgcaactttttaaagtaattagactaatggggttcagaaaagattgaatcttgagcaatagaataggttttgtttttatggaaaaatcaagaataaaaaatttatgctctcattttaagttgaagacaagatcaccgccatcagaaataaccataatccaaaatgttggttcagaggcatgatcaaaatgaactggaatttgaatttggtttacaatgaaatgatggttttgaattttgatgtagtagtaatttcttttcagttaattattagtcctttctgatgtctgattatacagaagttaaaaatttaacctctttggttcagtttgatgaatggtgatcttctaacgatcacaaactgggaaacaattatattagaaatacataatgtactatgaaacaatgaaggctcatgatttatgctgttcttcttataattacagctgatattcttatgcacatcttggcatatttgaatttttgatgtcctagaaagaagtaattcttttgatgatacttgacaacacaggtcaatgcccactgcttagcttattctggctctcaagcgcatttcttcatgtcatatatattcttttttatatataatttcatcataactatcctagactgaagtctttgtcattcaggatcagtgatcctgaattctcatgtcagtcttggcttctttagcatcttacttttggttcaatgccatgttatgttctcattgtgtaatcctaagtgtatacttctacattgaatagatatcttggaaatcttgttaacattgttcctcctgcaattgagacttcaaattggtaggctatgcaacctcttatatctatttttgcaggcaaaataccctccatcttgaggaaaaggagaaaa

SEQ ID NO: 51419 - DNA, 932 bp, Ricinus communis
  Intron number 1 from transcript 29994.m000444 (locus 29994 .t000006) derived from phytozome v7.0 (chr-ID 29994; pos 5 2475 to 53406)
cagccgctgctgcagtcgcctgctccctctcgccggtcaggtatttttgttgttttaacaagtttgacttgccatatattgattatacctttcattctcgatatttacttcatcagaactatgttaagaggataagacaacacatatttaagctgtaaactttattagcaattatatatgcaggatttgggatttcaattacagattcgatggtctaaataaacatcattttatattctaattaatctaccaattaagcctaaaacgttatattatactattatgattaatataaagcaagatgtaagcaagaatcagctaatgttgtaaggattcacatgatattgacaggcaacttagttaatattacttagcttccataattaaggttgttttgttttgctaggcaatagaactgaattccaacccgttgtgaacactgatattttatcttttgtttggtcttgagaatgagttattggataaaaaaaaataggatgaattaatttagagatttgagaaatggtctaaaataacaatggctgtaaaataattaaaccaagtcgctgtagcttgtggaaatggaaaaccaaaactaactccattagactagaaagaggctggtcttctcctcctctcccaagcgttttgctcaacctcaaagctatttacacatccagtctctttcctactcatatattcgaaaacccaatttgaattctttctctatttttagtctaagttgcaagtcggccgaaaattctatcaccatatgtagaacttttttattttgacactttttctctatgcacaccaatgtttgttaatatgtcaagttgaaatctggttttttagctctaaaaggtgaattgctgatttttttttttttttggtttttccttgtatttagaaacagggtagtaaaaacgagg

SEQ ID NO: 51420 - DNA, 671 bp, Ricinus communis
  Intron number 1 from transcript 30128.m008600 (locus 30128 .t000061) derived from phytozome v7.0 (chr-ID 30128; pos 4 1072 to 41742)
ttccgagaataaaactgggtaatcaaggatttgaggtaaataaccattttatattactggttctgtgtgtttttttttctttttcaagaggtaattaaaatcaaagaggaacatcaatacaaaataagagtttgaagctcattgggagcagaagaaatccaagcacaaggaagactcccagcacaatgcttatcagctaaccacctggcaatgcgattggcagtcttagagacaagcttaaaaccaacacccaaaaagcttgagagtgattctttaaatttataattacttgcacagtgtgaatgaaatccttctttttttttatcttgcattcatcagataaatgttaatagtacctctttatggtccatgtctttcaaatctttaacctgttagtttccttggcactctttttgcgtgtgtatatcttgataattcgttatggttattaaattggcaagtatgatctttctacttcttttaggctaatcccactggattattcattaattagaatttttagtcggtgatcaagacccagatatcagaataaatttatcatgtctatttcttcgagaagttaagatatactaatgaaggggcttgcatttatgttctcattcttttgtctggtataaattggattttcaggtctcagagttaggcttcgg

SEQ ID NO: 51421 - DNA, 710 bp, Ricinus communis
  Intron number 1 from transcript 29863.m001057 (locus 29863 .t000017) derived from phytozome v7.0 (chr-ID 29863; pos 1 29983 to 130692 reverse strand)
gcgaatcggttgactgaaattttcaaggtttgatccttttctgtttttctactattcatgcgaaattttaattttagtttaatgggttcttgtgattagtcgtctttatttcttagttgctgttatctgtttggttgctgaagatgttgagattcgtattacacgtgaaatttctgtttgtttgccgagaaaatgtaggaaaaaataaacgggcatagtatgttactatttattaattttgtttttttggttaatttgttaaaagaacagtcatgttatttaactcgaaaacaatttgttttaaatgttgattttttgggtgaaatttctttgcggtgattggattgaattttataaaatttataaaatttatagaattaattcataaatataaagtttatatattttaaatgaataaaaattaatttaaaaatttatttaattaaatttatgtagaatttattatagataaactaaattctaacaaaataatttaaatttttaaataaattcaaaatatttctttcaatttttattatttttattattttactttattttttacgttaaatgaaataaaattttcaataccattcattttttgtaaaaatgcactgcaaaggttctcttttttttgctttgaatgcgattttgatttatttatttaaattatacacaggcaaaggaaaatctaaactctaaggaaggta

SEQ ID NO: 51422 - DNA, 545 bp, Ricinus communis
  Intron number 1 from transcript 29983.m003129 (locus 29983 .t000028) derived from phytozome v7.0 (chr-ID 29983; pos 1 59896 to 160440 reverse strand)
aggtatcatacctttacttaatagtacctacggttcacttctcttcaatgatttgtggcattaaccatttcaatatttagttttttatctgattttattcttcaattgctttatcatgataattcttttctgggttttcacttctttgtcaatatcaaaacgaaaatgaaaataaaagtgaaatcttcccattccattgctttctgctgtgtagaactttaactatggcctgcagcctatagattatcgtttcttattgatttttctctgttttgaaacggtttctgttgttgaatttatagaagatactttctcactgtagcttgcagattttttttttttcctttttagtgctagcatgagggattccatctttttattctttgatctatgactgcaaagtgtacaactttactatctaggtaccaattttggatgacaccatatcgggacttttattattttgatatatgcttttcttaaaggaaaatgaagtttaatgtttttcttgcaggtccttagcgatccccaaaaaagagcagtat

SEQ ID NO: 51423 - DNA, 825 bp, Ricinus communis
  Intron number 1 from transcript 29929.m004533 (locus 29929 .t000036) derived from phytozome v7.0 (chr-ID 29929; pos 2 18484 to 219308)
attggcttaaagtctgcctcttttctcagaaagaggtaacatttcaaacttcttagagatatatattgttgagggcttctacttcatgtggatccataaccataaaagttactagagtgttttcttagggagattactttctttttcagtatcttgtcaaactgagtgaaaccatcttcactctaagatgcattctttaatcattcaagtttccctgatttattgctactgttggtggcatattttgaattttagtatagttaaactaatttgaaaggttcaagtttgtttcccgggggtcctttgcattagagtcagggttggaagggagatataaacatcttcaaacttcaaattttactgtagttaaactgaatcaaaaacaatataatgacaatgaaatggttctcaattatggctgttgaaaagaagagatatttgaagctgtacatcagttacataaaattattacaactgtcaacctaatggctgttggaaagaagatacaaacatcacttacataataaattcaatcatgttagtttgttccttggtttcagggatcaagtagaatttgagttatttttcttggtttattctatatcccatcatgttcatatgatgaatatcatatcattcgattcgtaatagcattttgtgaatcttaatttcttatattatgacactgctcttatggaagaaaggagtttgcctccttaattgcagtcctattctatgatgtttgatctagcatttcttatatcatttgttcatttcatatttgaaacagatttaagttgagcggacaagattggagaataccct

SEQ ID NO: 51424 - DNA, 723 bp, Ricinus communis
  Intron number 1 from transcript 30076.m004519 (locus 30076 .t000083) derived from phytozome v7.0 (chr-ID 30076; pos 4 83878 to 484600)
aagcatctcagctttgaccagctgcaagtaaattttcaattatgtgcctaaatattttgttggacaaattagcttctaatacttcatagggtaaagttcaaaaaactaaaatgtggtttgacgttttttcatttgagggatggatatttttcgtattaaacgagtttcaagtgcttcattttcttagcattttttagatatatatttatatttttattattttttaaataatttgcatatatataatatgagctattactaaattatgattttataagtaatgtagcatttaacgatatattataaaacatagatatattaaaatttcatttaaaatattatttttaaatttgattaaaataaaaaatatatatatgttttaacaatttgttatgattataaattatctaatcagatattaaattatttgaaaatacttatattattaaaatttatatttctagtaatatttatgatctaaaaaatgataaaaatattaaatatatttaaaaatgtttaaaaaataaaacatatattatttttttgatacaaaaatatatttgtctataaaagggtcaaattaagtaataatttttaactttatccttatatatatatatatgcaacaaaaagaaatatgtttgcaggaaataagatttcattctatatttgttgtatttgtaaataggtctccgtagggaagatcgaagggtatccctgaag

SEQ ID NO: 51425 - DNA, 710 bp, Ricinus communis
  Intron number 1 from transcript 30128.m008906 (locus 30128 .t000367) derived from phytozome v7.0 (chr-ID 30128; pos 1 634979 to 1635688 reverse strand)
tgcctactagtcctcgtcctgaggattatctcacggttggtgctataaagcttccctctttttaagcttttgtcttgctctttggtattgatatacttctttttatgctctcataatcctgtaatcgattttttttttttaatggtattggaatattaaacagagttaactatcaatcatagtcatttcgactgaaaatgtggttcaattatgatatactaaagttagtttcttccttacttttctgctagtcacataatgttatcttatttgatttactgacactgaagtataagctaattttggtgaaattgaagtcctatttagattgtagaatacgttgagcttattagtttagcaaagaaacgaagtaaaaaaaaaagtgagcctttcaatagtgcctaacgtatttaaatgattttgtagttgtccctggtataaattatttgacacatatataaaattttgctctacatccttctggtgcatttggaattggaatacttgcagatatcactgattagaaagtttatctttgtaggtttaattagtattttcacttttgccattttcttcagatttctgtttagtgatctctaattgcaacctgatgatttttttttgagactgatttagatttgtctattattacaataatctttcatgattcgacaggtattggcgttacccttgccgcatagacctttgtt

SEQ ID NO: 51426 - DNA, 754 bp, Ricinus communis
  Intron number 2 from transcript 30128.m008818 (locus 30128 .t000279) derived from phytozome v7.0 (chr-ID 30128; pos 1 186789 to 1187542)
ctaggcttcagaccttctttgacatgtaagggccgcccccattaccacttctttgattttatcatattatatatgcgttcaatatattttcggaaatagaattatgaaaattaatagctaaattaggctttgatctttttttatttttctttcttttgaataagtgtttgttgcaatactaaaggaaaaaagaaagaaagaaagagtataaagaatattataatatattattttatattaaaaggtggaaatctgaacattccatttcctccatttacgataatgaaatatttcttttattagctctaaaaggtttcgttcaacgaatcagaaaagaatttgttgttcacatggcccatatgaactacgaaaccattcacattatttatctaatcattttccttaacatagtcatttgcaagaggcacagcgctgttccacctaacctaatcatattttaggctccataattgaaaaccttagaccctttgttgaaaaaacgtaacataatgcaaagtatataatagtcaaattaatttattgtgggacaaaaaaaatgtcaatcaaaagtatgaatttcaaaattagatataatatccttgtaaaataaaaataaagctatgaaacagaatatatatatatatatatatattaattaagaagtagtacagttgatattttcacttgtgaaggtcttgaaaattaagtgtaaatagttgctaaaagaattgtttcaaatgcagggtggacaaaa

SEQ ID NO: 51427 - DNA, 914 bp, Ricinus communis
  Intron number 3 from transcript 29938.m000614 (locus 29938 .t000031) derived from phytozome v7.0 (chr-ID 29938; pos 2 15272 to 216185)
ctattagacgatccttacgtggccgtggtaagtgtttgtaatatttaagttcactgtattcctgcatttcttgcgccttatttctctgctatctgggtctgtagttagcctaaaagtttcataagtttatgataatgatgcagacgctctgaatttgaggatttttcttttttttttttttttaaattttgttgctcttcagatgatgcttttgatgtaaggcccttttaactttaggaatgttgaaactgtagaaaagcttagagctgcatcaagctttgagactttatattccaataacatgatgattcagaaagaatagatgaagagttttctttttcttttctgttttgataaaagaaataaaaactttattgaggaagaaggtaaatacagagttgagggctgggcaggttcattatatgtcataggcatcaacataagtctagtactaaatggaaaagagtaacttttttttatccctatgaccactttaggaaagaaaggaagaaaaactgcgtttgagtggggtgctaagttgcatctttcaaaatagagaataaaaaggagtaactttctggtgcttcctagggaaatatagatgtgagagcacatgcataaatatttataaatgtatgagaaaatagatatcaactgtatcttctgaactcacttgatgagcgtcaagcttgtttcaactgcactaagtcattgattcaaatggccatctgattgcatgcagaaggccattacttgcattttgtctttaaatattttctctactgctaccgacctagcttgatctcacaataaagcttatggaagattgaatcttttcctggtaatttcttagagaaaatgttaaagttactcactcaatctctaaaatttcagggtccattgaaaagctcatt

SEQ ID NO: 51428 - DNA, 848 bp, Ricinus communis
  Intron number 1 from transcript 29915.m000491 (locus 29915 .t000027) derived from phytozome v7.0 (chr-ID 29915; pos 2 28945 to 229792)
gttttgataggcatcagaatactggaactgaaattgtgagtttgttggatgtttatttaatgattacttttattttgtctcgtttgtttgtttttgtactttttaatggaaaagaaataccgcatttttgtttctagttaacttttagtgttgtattaatgcctgtaagctcaacacgttcattaatatgcatcacagtttcacatctcgaaatgcaatcaaagaacagaaaataatgtaattatgtgcttctcttgctattttgttgataaaatgtagacggcccttctatctgttttcataagaaaggagctttagcttgatctctgtgactgtcattttgtctggcaaatgatttccctctcgtgtagtgtatagggttgtgccttttggattatggggatatctatctattattataatatagctggttatttgatgcatttcagttctctagtaaggttattatacctccagtttatcattttaaggcatataagaagaaatcaaacacagtttgattagttgttgaaacctgtgagatcaagcgatagcaacaaatgatgcattccctgaaactttctagaaatgagccttctatgaacgcttcaaattctcaatatttgtacacttttgtcttctgatttcctatttgctatgcagcttctatctctttgatattaaagtgacaatttgattgattaaatttttttacttctaaacatttccaaattctttacctttttctattgttttagtgctgtatatcaagattgataaacagtccaccccctttgaaattctttttcacagtccatttcagtggaagctgagaaacaacagtggtt

SEQ ID NO: 51429 - DNA, 594 bp, Ricinus communis
  Intron number 1 from transcript 29933.m001401 (locus 29933 .t000023) derived from phytozome v7.0 (chr-ID 29933; pos 1 44257 to 144850 reverse strand)
atccagaagttaggattagatataaacttgaaaaggttgaactcctctcttagttgtcttgttttcttgaatattattaaaaaaagttttaattttgatgtactgtcttgatatttttttccccttattgtgctcattccatcagcatgatggagacaggatgtttcaagcaaaacttatgcagcgtggctgtaatgcttgtgctgtagctttgctgcattcaactgggtccttggtagataaaggttctagtaaccttttaaccataatgctggatattttaggcataaaagatatatactgttgcttctgtagtagtcctcataactcatatagaggaaaatattcttttctgtttattctttttcaaattgcaacagagaaaagattaattacttgttttgtggaatggtccttttcagtgattgtactgattagaagataaaacagcttctcagcatttggataatgatgttccttttatcttttaatttttaattgattgtcttttccagttgttctgacaaatgatccgctctttacatactaatttgtgtttattatcaactctgtataggccaaaagaaaggaagc

SEQ ID NO: 51430 - DNA, 714 bp, Ricinus communis
  Intron number 2 from transcript 30099.m001623 (locus 30099 .t000002) derived from phytozome v7.0 (chr-ID 30099; pos 2 891 to 3604)
cgcatttcattgccggtatgtattattatattttgttttaaattgttatttcatttgattatattatttgaatttctggttaagtatgattaagaaaatggttatggattagtacatctgaagttagttgatttcattggttaattaaatatttgtccgtattggaaaaacaatgtgttggttggataaaagcaaaatggtatttggatatgtggaaaagattttgatttgaacttatgcatgacctgaaatcagaatttgtattgtaactcaaggagcattttgtagtgcaatggtaaaagtgtcggttcactatctaattattgcaattttgtggccttagataatagattagccacttgatgttgaagaggtgaagggatgaggtttatactttactggtgttgaatttccattttgaaggtctaggatcataacatggtagtgccctttattcattttgaagttatcatttggcttagtttgtaggagcatacctttagactggctgatgtttttgggcaatttctgctaggatcttagtttcctatttactaaaattgctgcacagcaaccaaatttacttctgtttccataatatttttttatgaatgctctgtcattcacttcggaaagaactttagtgcacatgtttatcttagaagaatttatgcatttttttatgtttctaatgaattgcatctgttccgcagc

SEQ ID NO: 51431 - DNA, 586 bp, Ricinus communis
  Intron number 3 from transcript 30032.m000470 (locus 30032 .t000020) derived from phytozome v7.0 (chr-ID 30032; pos 1 24250 to 124835 reverse strand)
aatcggcgaaatacaggtttttgacttgatttgcattttttagtttcgtaatgcttaatcccctatatgagttgttgctctgacagataagtgagggtttttaatggttttcttctgcttgttgagtatggaacttgaatatgattcggcttatatttcaattaccaggtgatcaaccctagtttgaattttctggcctaattagttcacaactttttataactagccctgattttgtcagaaactgtaaaaatatatactactaaaaattttgtagaaaattggggctaaccaaccacataatagaagttaggggctaagttaggccagaaaattgtaacttggatttaattgcccatcgcataaattttcagaggccaaatagacatttaagccgaatatggctctatcatttttcaactttctgattggcaaatttcagacagacttctaagagaattattgtgactaaatctcatttcatggaaatttagttacttattgtagcatttgattactgaaatattgtaattatctttttgtataaacagaaaacctagtagagaatttattgggcgatttcgag

SEQ ID NO: 51432 - DNA, 655 bp, Ricinus communis
  Intron number 2 from transcript 29933.m001416 (locus 29933 .t000038) derived from phytozome v7.0 (chr-ID 29933; pos 2 24037 to 224691)
tcttgcggcgcaagcgcatcgaggagcgtaaaaaggtagaatttcttttatttgccaaattccaaagtttttttggcctttacatcgataatctttagtatcattaagtttgtgacagtcagataagaattcaggtttaccatttttcaatttgttttataagaagtgacgagacagcatagtttgactgctgataattttgatatgtaaaaccagtcagattgttaatgggaatttgcttataatttaaggttgccaataaaattagtgagagttaaaaaacttaatcctctcttgctgtcgcaaggaaaaagtctcctcaaatttgtcagtgatgaacacccatataagatgcatctagtttaacatcataactttcaccgtatcatgtacctactgaaatcttgcatagccaaaaaaataaggacattaggagagatagtttattgaaggagaaaaggattgatgctgttgaaactttaaagtcacacatcctcttggatttgttttgctaatatttttgttgcgtgtgtacctgtatttccgacataactgcttgctcctttaattgaacaggatatcttatatctttattatcctaaattattactgcctaacctgtgctagaggaaactggaaagacaacttgttttat

SEQ ID NO: 51433 - DNA, 969 bp, Ricinus communis
  Intron number 1 from transcript 30027.m000810 (locus 30027 .t000003) derived from phytozome v7.0 (chr-ID 30027; pos 2 9973 to 30941 reverse strand)
tatcaagaactcttgcgatcacatcgtaattgcaggtccattctctttttctttttgaaaaaaaaagtaattttagtttcaattcgcatttcttttatcggatcaatctttggaattgatttcttttcttttttttaatagttagtattgatgttaaaatattagtgttgtttcggcaggttactgctccattactagatttgatgttgagaatgtgatttctgtgtaatgcgtatcatactaaaatgatcagatttttcattggacacagttatgtttgaattggggatgctagttttgggctatgaaaacagctttatctgcattctgctattttagtggttagctttcacacgaatttgcagattaattatgtctctcctgtttgttttctctgtttcactttgttatctcctggattttcgcctacatttcacactagataattttattcttaatttatttttagattttattcccagcaagaaccctaacatgaccttaatttgattttgaactacttggtgaagtactagatttgtttttgttttctgcccgatatatgttaaagttagtggaaagaactaatggtgcaaacctcaggaggataaagtgatatgctgaaaagtgaaaagaccatagtgggcaattgcgataggttttctttcttttttttccatgcttaataatggatcaattgacagccccatcaaagttgatttaaggcaaatgaagcaatggactagaatatgatcaggctgaccatattgatacatgaaatatcatacagtctctatattatcataatgttgaaacatattcttgttacaagaactgcctttctgtcatataaaagtccgacatcaggctcaattccttgccctcttttatggtgccaattatgcagtgttaaacctagtgcttgatgttttatatcttcaatctatgccataaactttgcagtcgaag

SEQ ID NO: 51434 - DNA, 374 bp, Ricinus communis
  Intron number 3 from transcript 29844.m003336 (locus 29844 .t000182) derived from phytozome v7.0 (chr-ID 29844; pos 1 030246 to 1030619)
tagcttgcagttttcttggttcgtgactttaacctacttggttccatgtaaatgcgtttttcttttttctttttaatatcattcgctgaagaaatattatttctttctttccttttggatattgatattcttgctaattcctctgttttttttcttctctatattattgtagtattttctagaataatttggaatgttcatatatgcttatttgacttgatttccttttgcagtatgtcactcttatgttttatatataatctgttcttatttagaaggtccacaacgtttttaccatctaaaagtatttaaagtgttttttctttgtcttacgagcttatgttttgtggttattctttttgggaaattagagt

SEQ ID NO: 51435 - DNA, 930 bp, Ricinus communis
  Intron number 1 from transcript 30138.m003968 (locus 30138 .t000142) derived from phytozome v7.0 (chr-ID 30138; pos 1 012460 to 1013389)
ttcctttttcaaacttttatttccactttggaaaggtatcaagtgtttttgttttctcatttcatatttttcgttcttctttttttttttttttcattacatagtacattataatgattttttggcttaattatttataaaaatcctatattttaagggttcttttttttaaaacaaaaaattgaccaaaaatcttccaatttttttagtaaacaataaattaaaaaatattagatatttaagaaaatcccttaaactctggatttttttttaaattaagataacgattttagtaatttatcaacaacaaataaacttattaaaggaaaaaaaaaacaaaaaaaaacaaaagcaaattaacaaattctgactctttatgggactttttggactctttaaccaataattttgacaaataatccagcccatatgaactagtccccacctaaatttgaagtcaaccctaaattttatttatttattttctttaactgaccctaagaactaaagaagggtaaattggcatctctacttttattcatagaacaattcaagagttgcccataacagtattcaatccaatcatagccacacacgtcaccacatttattttttatcaatgatcactgttaaacaaattaaagcaatcaagaacttagttaaccaatattttgatgatagactgatatttatcagtttgaagctttaaatacgctaaacgaaaaaaagcattatctaaaaggaatattcctgattactaatagatccacggctaagaatcctcaaatcccaccataaattgcatcatcgttgttagctactaccatataaagctgaaaccttttgatttctgatcaaaagaaaacaaaaactataagtgcattttgacttgtagaaacagctcataactaggaaagccagtttaaaagt

SEQ ID NO: 51436 - DNA, 1034 bp, Ricinus communis
  Intron number 1 from transcript 29822.m003494 (locus 29822 .t000169) derived from phytozome v7.0 (chr-ID 29822; pos 9 70923 to 971956)
gttgtcttcgccggcagtgaaggatttaacagaaggtgagatggatagagagaggagatcattcaggaagtggaagaataataataataataataataataataataatcataataataaaaaaaagatagggtttctgcatagccaggtgttaaagattagagaggaagattcacatcttggtgaagatagcaaagaaaaggttatgaatattaacggatcagggtctgcttttaatcaaaatatgcagcagcttcgacgcgtggcttcagcggttgatgtggtgttcttttcaagacccatcttgccttcctcccctctcagccgaaaaaccactgtcaaacctttgccctgagttaagttaaaggttggttttcttttcttcttttttagttctttcactttcttgattaatttagtcgtttgtgctttgttttttttcctcaattttcattttcttggttacgttttcgtatcttctttttctttttccttttcaatatagattcttgaaaatctgatcgtccttgtatatgcttatttcgggaaattctgtaatgatatttcctatcttgttggttctactgtatatgcttatttcgggaaattctgtaatgatatttcctatcttgttggttctacatatctgtttggatcctgagaaaactaaagaaaacacgaggaaaaatcaagattttgaatcgatggaataattaatgtttaatccgaaattaaaacttcaatttttttattttcttttagatagttaaatctgtatttgtttcttttatagcgtttccttcccttttacccgcgcgaaaatattatcacgttttttttttctttaatttatttattcgggttgttagcttctcgagctgatttcttggggaattcgggtgggaataagatgaagatatcttgacccgttcgtttttttaaaaaataaaataaaatttgttttgttgtggattaattagtgttgttttgttgtggcaggaagagcaggcagcagtaagagtgaaggaaaagag

SEQ ID NO: 51437 - DNA, 543 bp, Ricinus communis
  Intron number 1 from transcript 29844.m003346 (locus 29844 .t000192) derived from phytozome v7.0 (chr-ID 29844; pos 1 091193 to 1091735 reverse strand)
gcctcgagcctttcacttctcaaaatccttctactgtacgactgtcactcttgttcatcatttttttctgagatttttttcttaattttctttttccagttttttgttaaattgaattaaaaaaatcttttatattgttttgagcaatcatcaacgtgaactgttaattgatcagttatacggttgcgaagtctggagcaattggtgaatttagcaatttattattagcgtattttatcattgtatatgcaattatatttgacttgaacattttaggatgttcaatttttagtatgatccgtcttttttattgttttatattttctttccctgcggatgttatatgtgaggccttgtttggaataattcataagcaagcattcactgtcgtgatttcttttcttcactttttgtacaaaaaagtttgaaatcattgaagttttagcaactttgggctttccgaacactcaccaagtgattgcagttatggatgttaaccttctttttaactttgtttcttgtttcaggtcaccagctgcaaac

SEQ ID NO: 51438 - DNA, 584 bp, Ricinus communis
  Intron number 2 from transcript 29838.m001688 (locus 29838 .t000058) derived from phytozome v7.0 (chr-ID 29838; pos 3 49304 to 349887 reverse strand)
tgctgtttcaaagtaagctcttgtcaatttcttttctcttttgctgttatattcgattcatctttggaagaaatttttttttttttatttgttgttcttgttgttttcttttcccctagctttgctcgaatttcctaatttcctattataatactgtatttttatgttgttaattccttgatttagctcaactactactctactagtcttataagttgttttggtgctgaattgtttccctaaagagatgatcttttcaattccttgagctgaagttctatgtacataaaaatgttagtttctctatttgctgtatgctgatttctgtatttagaaaccagcatgttccagatcatgcttaataagaccagaattatctctaaatgttctgttttagcagatttctagacatacctgttgttactcgagttcttttgatttaatcatgtctcttatttgataaaaattacaacttaagtaattcattgaacttgacattactgaagcatttgtttatgctgttacaaatgtcttcttcaaccttttcagcaaatcgggcttgaaattgaaggcctcaaaggagc

SEQ ID NO: 51439 - DNA, 830 bp, Ricinus communis
  Intron number 1 from transcript 30138.m003874 (locus 30138 .t000048) derived from phytozome v7.0 (chr-ID 30138; pos 3 70376 to 371205 reverse strand)
ttcttttgattgcaaaagtaccgctgactgcaagggtaagaaatgcatgtgtggtcagttaatattggtgcgttttcatgatcctgaaaaaatatcagggcattcaacattacaagggatggatatatatatatatatataaaagtttcttcttcttcttttcttctacctttgttacatatctttctttttagtaacaggccagacattattttgttaatgaagagtattagtggatataaaaattagtagctttcaaaaataataaaaaagagtttaaaatgtttttcaattttctctcaatatgtaaaacatccacctattcacatactcaataagtatattttcatctgtttttagggctgtaatgcgtttgagaataagttagtgcttacccttcctacaagattacaatctttaacaaactttatatttaattatcagttttggtagattttgaatttggtagttacaaatttaaatgaaaagaaatattagaatgtggtgtcttaatccagggggtaaacctcaccaaactttaaaaaagaagaaaaagggaaaacagaagaagtaacactcgatcccacaataatcagctcgtcattctttaattataggtcaaaattatagagcagaatcatcatatagcttataggatgtgaagagacgggagcaaagtctagctttcttatagttgcttctatttatattgcatcttgttacttcctctcgctctcagtctgaaactaatatatgtcctaattattttatgtaaattgaaatgatttgtctgtacagaaccgcgtattgtcggtggtaaagcttcgcat

SEQ ID NO: 51440 - DNA, 986 bp, Ricinus communis
  Intron number 1 from transcript 29983.m003200 (locus 29983 .t000099) derived from phytozome v7.0 (chr-ID 29983; pos 5 75080 to 576065)
cgttgtctgcgaagctcaccagactgtattggatcgtaagttatttgtttcgagtttatttaggttcgatgttttagttaggtcgaatcgaataagattttgattagctgccaaagatagtttctctataattagatcatgtttgagctgggctttcggcttcaaaattatagctctatctggtccgttatattcaaaagttgtgctaagttcctttttcaaatgatttggtgaatgaatccaatgaatgaaatatattttaattattttatatcaaatattagttataacattttatatttattatttattatttatctaattcttggtgtaaaatatctgaagtaataaatatatatatattttaatgaatggcttcattcatattattatatattgttttaaactttgaatggttgatagaatttaataagagtttgatcatcagtttaatcgttggactagggaccatcaatttgatcaatctgataatttcttaaaaaatattaattaataaatttttttaagattttatgattataaataaatatatttccaaatattagtttaaccaccagcagcaattggtcaaatataaccagttttgaatattaaattaaattggactgactagtttctgattgaatcaattgaatccgtcagtggatctagctttttaaaaaactatttttatttatgagaattaaaatatcttgattttaatttatttttttcacatatattaatattgcctgagtttattttttatgtttattttgttcttccttttttttttttctctgaaaagtttattgctcttccttaatcctatgcatcgaaatcgaaatcgaaatgagttgagcatttgactaaaaaagaaaagggaaattgattgttttatttccagtattacaatcatattttcctacacaacaatttgagttgaattatttggtggacttcaattccagttccaactgtgactg

SEQ ID NO: 51441 - DNA, 265 bp, Ricinus communis
  Intron number 1 from transcript 29841.m002880 (locus 29841 .t000144) derived from phytozome v7.0 (chr-ID 29841; pos 8 82441 to 882705)
tgccattagagtagtccctcacttcccaaaacaaggtaatgtttctgatcttggttctttgatttttttagagttcgaaagtgcttttcttttctttctcctttttttttccttgcagaagctataagcagctaactagcagttcttgaagagttttttttcccagtttgcaaatgtgtccaagttaaggttgttagtagttaaacatgttcttgttgtgtgttttaattttcttgttcttttaatggtgttcttgttaggaatt

SEQ ID NO: 51442 - DNA, 619 bp, Ricinus communis
  Intron number 2 from transcript 29941.m000222 (locus 29941 .t000005) derived from phytozome v7.0 (chr-ID 29941; pos 4 6380 to 46998)
tggtcatattctcggtaaaaccccaagttggtatagcacccactgctctttcctggttaaattttgtttgtaaaatgagatattcaaataggatatggttatgtttctgaattcttctttagagtcctttctcaagtttggaatggtcaatagttgctagaaaccaagtcatgccgaaattgacttgattcttgcaactgatcaatggtcaatagtttctcgacatatacttattgttggcttaagatttcactggtgtgaaaaaggaatgagttcaagaagcaagggatagatagagttaaaacgatatcaactgaagtgttaaaggaggatttaacatcccaaaatacattagaaagattgctttcaaatagaaaagaattgagctaaaatatctgtggagttaactaactgataggatttgaggtttcgtttcttgagttaagttgaagtgttgaattgtagcagtatgtgtgtctctttggcatgaattttgaatttttgtttctttctgcttatttgcatgagccatcttatattttaattttccccgtgctgatttttctttttatattttctattcttttttctcaaatattttactttgatgcagttaaag

SEQ ID NO: 51443 - DNA, 468 bp, Ricinus communis
  Intron number 1 from transcript 29908.m006144 (locus 29908 .t000195) derived from phytozome v7.0 (chr-ID 29908; pos 1 77436 to 177903 reverse strand)
ctcatatttctgctgataattccacttccattgaggtgttctatttttttttttttattgtcgtcttattttccgtttgattgttattaaagaaaaaaggacacgaagaaagaaacagttatggtcgttaccaagaaaattgtgatctagtctagttaattggaacttaataaattgaccttattagtatctaataattttttttgaactatctatcttttttttttttagattttatttatcagttttattattatgtgatgtgttgctgcacttgtcttttttatactattttcttaataacgagtggttggatttcttgatctttattaaagtagcagttatgtgaattgatgctttaacctttgaaaatttgatgatgctgttcgctacctgttaattatgattgcaaatatgctatttcttgatacagttatcttccgtgtggaaattcaaaaggaggtcaaa

SEQ ID NO: 51444 - DNA, 849 bp, Ricinus communis
  Intron number 1 from transcript 30042.m000466 (locus 30042 .t000004) derived from phytozome v7.0 (chr-ID 30042; pos 2 3532 to 24380 reverse strand)
aggcctccggcaagaagtgtcccaccggtgctacggtatgtaaattaccaaattcttttcttttgtttaatggctttgactcggtttcaacctggaactttacggtgcgagagaatttctccagctccattacgaatgggccaaacctgatcggttgtttcttttatagtgggagctatgcccactgttatttctgagtagagaaacgtgaaggggttatgttatttaaatttaagatattttagggttcttctcactccagattaaactatatttaagtaattattaacatcttaataatacttgtaaacaatatttgatccacatatgctttctgatttataagtacaaacctcaaagatttgagtaacaaattactgaaagcatactatatataatgtattttatcatcaattctttgatgatgagcttatgccataataatggaaaaattcttgcattcttgcctaggtctagttaatgtttctatctatacactaaatttatagatgattaatacatatttattaattttaaataatgtaatatttattaatcatctaatattaaaatatagaatacttatatgtatatgtcacttttctattagtattgggtgtatacacaagtctaggtaagatttttaatggatgtttctataggtttaatcttaagaatcggctccactgtagagtgtagagttatgtcagggcaatgattcattttccttgtttccttttatcattttttggtcattatatgaatccacagaaataattaatgatgatctattactatgcttatgatactgcagtcgttaggcttttccaattcaaacaacatagctat

SEQ ID NO: 51445 - DNA, 535 bp, Ricinus communis
  Intron number 1 from transcript 30138.m003894 (locus 30138 .t000068) derived from phytozome v7.0 (chr-ID 30138; pos 4 92566 to 493100 reverse strand)
aaggtttgtttgtttgacatttttcccctaaatttgtttctataatcgaaaaaagtgaagcgaatctttgaattgtgttatgtttttagcagggcctttatgttaggctcagctcactttaatctgttaaattcatgtctagataaagatgtactatggccttgtttggaataaataatgtgcaagaattcaattccaattttgttaaattcttgtctagataaagatatcatttcgtcatgatgccttgtctttttactgagttgaaagaactgaattctagcaactatagactttccatatatgaatatgacaagataaagttcgattgaattaaatttttgcttttttagacttttcaaacaagggcctgttcctgaagctaacatgatgatatgctgtagataggttcttattatatttgttttatttttgttttcttatgaattttgaatgttgctcatttgtgttgtttatagatttggtgtgatttctgataggctctgggtcagctccttccctttgtgaactgctt

SEQ ID NO: 51446 - DNA, 747 bp, Ricinus communis
  Intron number 3 from transcript 30075.m001196 (locus 30075 .t000063) derived from phytozome v7.0 (chr-ID 30075; pos 5 69566 to 570312)
tgaccttgtggcatcttttggtttcctgacgacaggtgacattatctcttctattattttcaaatgcttactaattataagtatttaaggacatagttactaattataagtatttaagtttttatttacttgtagaatgttttttattgtttttaaattcttaagagaaataagaactttttatttttgtaaagacttataatatatatttatttgctattatatagaaaattttatttgggtaatattttaaatttaaggaataaatttttctttatctgaaaataaataaatttttatataaaatatatagaaaacatattacaatttgtttttttgagtttagttataatttaaaaaatataaaaaaaattattttctatttttatttaaaaaaaatagcataaataaacacataattctattttctattttcatcaaaaattccctaaaagaattatatagtcatccaaagttttaacaagattgcttttattttttatggtttttctttacaaattatagaaaattggctacaaaattttctttttacagttcaaaatatttcaaaataaattcttttgaaaaacatcatgaaaatttcaaaaacaaatcataaaagaattttaaaagaattatatctcatgaaaagttttcttgttttaatttggtgtacttatgtaacagtttgtgttcataaattaaaatacaggacattggagttttggagcaagatttgtcaagaaa

SEQ ID NO: 51447 - DNA, 407 bp, Ricinus communis
  Intron number 1 from transcript 29822.m003384 (locus 29822 .t000059) derived from phytozome v7.0 (chr-ID 29822; pos 2 99945 to 300351 reverse strand)
aaaccacaaggtacttttatgtacttatccctatatcttttatctttcataattcctctcagtttatccttttaatcacttcagaatttcttgcaactggaaaaaaaggtctgcagtttattgtcatgtgtttggattttgattcgtcttcctatttgctagtttaatatatattgaacactgcagactataccagttaatcctaagcctttcttgaacaacttgactgggaagactgtaattgtaaaactcaagtggggaatggaatacaaaggcatgcttatttttccttattttttcttattttctcttttaaaatctttttcttctgttttccttattacttagttttccttatattttgtttgattgcccttgcaggttttcttgcttcggtcgattcatac

SEQ ID NO: 51448 - DNA, 668 bp, Ricinus communis
  Intron number 3 from transcript 29883.m002011 (locus 29883 .t000066) derived from phytozome v7.0 (chr-ID 29883; pos 4 79566 to 480233 reverse strand)
ctgatcttattctgcatcaggtaattaagatctgggtagctaaatgtattgttgagtacatgagatgttatgaagaaaatgttttttcaagcagtaatgctctggtatttatacaattacaaacaagatcatgagataagaggttgatcataatggatcaagaatctaaaattgtcgatctgaataatttcactggttgaatatggaaatcattagtcattctataatgtgtgatgcacgagatactaatacaaacagtaaatagttttgctatatatagatataagtgatgctaaaattatcaataatctattgaattttaatacattttgataattgcattgaaaccataatattaagatcaaagaaataacagttaatatataaccattttgataaaaaaaatatttaactattaaaaaataacaggtttgttcttactttcacacattttcctagcgatagactttatcaaatgctagaaattaagagataaacatataaacgattcgagtttaaactacaaataatgaaatgcaccttccattctgtaacataaatgacattagtatttaacattttaacgacaaatgaattcttaaaagaaaaacatgcatatctggacctttattgcattttaaccatcaactttcaggtattgagcgctg

SEQ ID NO: 51449 - DNA, 892 bp, Ricinus communis
  Intron number 1 from transcript 30146.m003621 (locus 30146 .t000198) derived from phytozome v7.0 (chr-ID 30146; pos 1 325803 to 1326694 reverse strand)
caaagcctggcaacaggatcattcaagccaagctggtgggtatgtcttacccttcttcttatttaaaaaaaaaaaaatcttttcttatcactttgcttagacatgattaattggtttatttggctggtaatttttgttagagttgctctctcttattcaattgtttgtctgaccatgctttctctcattacagggctataatacctttctttttcttttatctgttttttgttgtctccatttgttgcattgtttttattatggacctgatggcatcaaatactgaatgatcaaaaagattgtttgtggacatctcttgtgtgaggagagattcttgcagcacataaggaaaatgtgcatgtgttgcgtgctagataatattatcactagctgcttcacttcattagtggtgaatttcaaaaaaaaaattgatgatacaaaagttagttcttcaattccacaattaattgggtgaacattggaatttatagtcaaattcagtggctaatgtttgataagttattcagtttccttctaacattagcagtatgattcgtacaaatttgtaatcaaccatttctcatggttttgtcttataaaaagtgttctcagaaacatttgtgttttcatgttactatataaattagtgtaatgccccttgtgatctcatgccaagaccaggaccttgatcatgtactgaaaatcaaaatttgtgaaaaagattgctagtggctcttgaatcaaatttgaaaaagaaaatctatggagttcaacaaattccttcctgggtaggcttaattgcagccatcggccgacttggaagtatactcttagcatgtttaattacttactttcaggtgcttttgggggacgtggggactgggaaaaccag

SEQ ID NO: 51450 - DNA, 458 bp, Ricinus communis
  Intron number 3 from transcript 30128.m008996 (locus 30128 .t000457) derived from phytozome v7.0 (chr-ID 30128; pos 2 077884 to 2078341 reverse strand)
gctatttggtcagggctagcaggtatatgcttacttcgatcatgacttcttattattatgggcgcacatctatacctcttgctttgactgcataaaaatattcccgccatcttctcttctatgattatgtattaatttggtttaatattgtgtcgaggaatcaaaatttgctgtttggtaaagaacctactggagtataggagacgtttcttttgaagatggtgtttagttgaattgcaattttttactttcttataaatgattgatatgtattttaagcctccaccttctacttctcatagagttaaagaaaatttagttaaagattcaatttttgttgtttgatgcgagaaactgcatccaaattttcaatttgtgttattataacatttggattttggtttgcgtgatccatgctgattcataacattctatgcttctgcaggatctgggcagag

SEQ ID NO: 51451 - DNA, 472 bp, Ricinus communis
  Intron number 5 from transcript 30091.m000231 (locus 30091 .t000010) derived from phytozome v7.0 (chr-ID 30091; pos 1 22418 to 122889)
aattaccaggtattaatgaccttttcctatgcaatgtgggatgcagttttttagtggtttctgcatctttattgcaatttttctctttgattaatactttcattggagatccattcattgaagttgcttttatcctccaattaaatgtcaattttattcatgtcacccaaaatagacttagtagtttcattgggaatattgattcagcatggccacagatttaagtaattttttaattaatttttgacaaaagtaacattttggtgaggactgacttgcacatttagtttggacaatggttttaatggttccagagtatattgtggatgtaatttatacatattagattctatttagtatcttagcttccatatttgatttgttaacggtgggtgcatcttcattttctattattcaaaggttacatgttggtaattgcaggaaaatatcagtcgctgtgtctgtataattt

SEQ ID NO: 51452 - DNA, 928 bp, Ricinus communis
  Intron number 1 from transcript 30131.m007089 (locus 30131 .t000240) derived from phytozome v7.0 (chr-ID 30131; pos 1 450129 to 1451056 reverse strand)
tccccaaagcacccacaagtgttactgattttcaggtaattttttaatgctcaattcttggaccttttatcctgttttgctgaattcttaattttttattctttcttttcatatatatatatatatatatatatatatatatatatatatatatatatcttttctctctctttgcctggaggaagagagataggaatggtaatcataggattgtaacatatttctttttaaactgaataactattgggatttgcagataatggttttgtcttgcctcctgctttgatttatgtcatatttaggaaaaatttatatattctttcttggtagttggatatctggtagtttttgttcttaaacagctttcttgggcttcatttaataattattttctttgaaattttcaatttttcagtttccttcttcttagttcgtgttctattggtgatttgaaggggaactttgggtgtaggattttgttgctgctgtaattctcttgagctagttagtataaagagagttttttattatgttgtaactagaaatttctcactgataaatacttttgttagtattttcctttgaaatcctaaaaccaaatgacaaatctatcttatgattgttttgtcttaattcctttttcaaattatctgcatcgttgcctgttgaccattgtaaccatgaacacttaaagagtgcatgagtgtagagaatctgcttttagtgtctatggttttcagctttatgctaattgattgttttgcatattttccttgtgaattgttcctgtaccaagggagggcgtgaaacatgcatgtaacttaaaagtaccaaattcaaattctgcacttctgttttttccaatttgagacattcttatagctgttggtgatggaacccgtttccagtggccttttcagttgctcgg

SEQ ID NO: 51453 - DNA, 952 bp, Ricinus communis
  Intron number 2 from transcript 30068.m002577 (locus 30068 .t000067) derived from phytozome v7.0 (chr-ID 30068; pos 3 71518 to 372469)
caaatttatcagtggtggagctgacatcatagcaggtatgtttttcaccaatgaaaataattatcattagtattaatgtgactttattgcgacaattatcgtgtgtgaggttagagttttaatgggatgatttaattactttgtttccggaaagtatcattcaaggtaccattttagtattaatttccaaaattggaggaatctttaaggatttatttctgtctggacctatatatattttggttaaaaatcaaagttggtggcatgggtaccatccgtttttatgtgcggtcatatcgattgatctagaatagtccccaaaagatatttatatatatttatataatattatgtgtttaaagtcatatttaaatagttattatgaaaatcaaattcatattgaaaataatttaatgagagcaagactcgtggatctcttttataaaaatgaaaaggataaagatagagattaggacacattggtgtatcatatatatcgtaattcataggttggtggaactctttataatatgaacacgataaatatgtggcctttttcttgatgatgggcacggaacttttggcttcattatgtgagtgaagcttcttttcttttctttttcgttccacccctcttactcaatgaatgatgatgtctcgcttttgagagcatgcccactttatacaatggctaatgtactttttaacttgattttgagtggtttatcccagaaactgataagatgttaagatcccgcataactcacatgtgattctgagtttgatgtttccttttgtattttcattcgacgtgtcatgtattctgttccttggtgtccaagctcttttttgtatggatgcacaacagtgccacttttttggttaatcttgggagtgtgaaattgtcactttgtcaggtgctgtttgtggacctgcaagcctggtgaactca

SEQ ID NO: 51454 - DNA, 466 bp, Ricinus communis
  Intron number 1 from transcript 29842.m003612 (locus 29842 .t000109) derived from phytozome v7.0 (chr-ID 29842; pos 5 52079 to 552544 reverse strand)
attatataaatagctgcttcgctcacactggcgaggtaaaattttaaaccaagattcaaaagaaaaagtaaagcttcgtgttcttttaaaaattcacaaataaaagtttagggttttgttttaattgaaaaagaaactttaggtttctgttttgatttatatatatatataaaccttatgcttttctttattgaagaaagaaacttaccttattgcttttctttatcgaaaaaggaaacttaggcttttgttataatttgaaaaaagaaaaagcaagcttaggattttgttttaactcggaaagagtaatttagggtttctttaaaaaaaataaaggaaaaatgttcgttgctttgtggtgtgtgtgtctgttaattctatagggataaactacggttactgaaggtgcttctttttttttttttcttaaggttacttctgtaaaagtgattcgtaataagcaaac

SEQ ID NO: 51455 - DNA, 848 bp, Ricinus communis
  Intron number 1 from transcript 30131.m006855 (locus 30131 .t000006) derived from phytozome v7.0 (chr-ID 30131; pos 5 8785 to 59632)
gcaaaacccgcttggaaattgatttcccgtaacttccttttcttttctctctgttttcaattttatcttttgcgtggatttttggttcttttacggtttttagaggtaccgtttttgttatcttggcttgagattttgtttttagtagtactcgttgctttaatgtttaatttactgtaatagtattatataaataattgagttataacatattaattctgggttgtggttgtggcaacttaaagttgcactttctatagcttttaatactaccgttaataactttaaaatttagatgcccatttgaaattgtagatggctatttagctttatacaattacgttttataggatcttatgtcacaattgaaagagaatttaggaatgattatagaaaatattttataaaaacgaacaaaggccaatcttcttcttcttcttcttcttcttttttcttttctgacgttaattgaaatttaattttgaatattatgtttcggtagtaagttacgagtcatttctaatattcatgtgtgattccatgaattgttcaaattatgttaaagaatttggttagagaatcttaatttttaagtatataaataagactcttgctgtttgctgccaagtgtttggaatgggggattagcttaagaattgtagatcaactggccgaatgctcatcatactttgcttagaaattgtgaatttcctgcaccacttcttagttaattgtttcattttatgtgttgcgtgtactgcttatgcttattctttttctgtattttctctttcctctttgtttgcaacgcaggcccttgcctagcaacatttcatcttataaggtac

SEQ ID NO: 51456 - DNA, 473 bp, Ricinus communis
  Intron number 1 from transcript 29863.m001072 (locus 29863 .t000032) derived from phytozome v7.0 (chr-ID 29863; pos 2 47307 to 247779)
gtcactataaaagtaggtaaaacaaagaagaaaatggttgcactgtgagcaaagatagtcactcgtgcaaagtacacacaagatggacgacttttctctcattgggcattacttacgagtgaaaacagataaattattagtaaagtataaaacacccccctctctctctcttctctctctctctctctctctctctctctctctctcaatatatatatatatatatataaatttccttaaaatattttagaatattctgatttcttccattttatttatttttaagaaaattagatatttataactatgtttgccacaagttaaatttcttgtatatataatgtaaattctagcatataataggatgttctaatgtttcttcaaaattgcatagttgctaattctttttgtttttttttccctatgcaatgttttttttttcctggtaatgttatagtcaggtggccctgatt

SEQ ID NO: 51457 - DNA, 658 bp, Ricinus communis
  Intron number 1 from transcript 29818.m000406 (locus 29818 .t000018) derived from phytozome v7.0 (chr-ID 29818; pos 1 03339 to 103996 reverse strand)
tgaatttgtccttctttgattcaactagagatttggtatgttcctttttctctattgctctccacatatgtttattggtgttgcttatgattgaaaccgtataattttattttatttttaggctttttaaaggtgcttgaacacattttgtaagaattcaattcagttgttgtttacctttcatgagtttgatttggttcaagatttcttcaattatgatctgctcagtgattagtatctttatagccttattgggaataaatctgtgcaagaactgaattgaatttttacaaaatcatttcaaatttttggcatgatttcaaaatgcctcagactcttttctgttatttcatttaagctgaaggacttgggctctagtaactatgtactttccaaagatgagaattgactaatagcattcaattgaagtgaactcttgcatttctaaacttcctaaacaaggggtatatgtttccctgtagtttcttctcttaggactgtgattaagctttgttgtcggtatttgaagttaatgcctttctattgattttgagtcagcattataagagataatattgattttactttgggacttaatgtattcgactcaatcttttaaagtttttattttattttatgtaggcttgtagtttaattc

SEQ ID NO: 51458 - DNA, 683 bp, Ricinus communis
  Intron number 1 from transcript 30131.m006902 (locus 30131 .t000053) derived from phytozome v7.0 (chr-ID 30131; pos 2 87476 to 288158)
gcaacccctatcttcccagtgggtgcagtggtacgtagaattatatcattaagattctaatcattattagtattattattagtagtagtagaaatattaataaatagtttaaaatcttagaaattgttaaatacaaacttagttatcttttaatagtgccaccataagaagacatgaaaggtcctactatctataaagtaaaagtgtaacccactataaaaagttgttttagagtgctttctctagcaatcacttgttagccagctttttatgtaataaaatctttttaatctaataatttattagttttaaattatatatatatatatagtttgttttgaatgtaatgtatattttacacataagcataatcttatcgtcttatataacatatagttatatgaacaattcagtgttaatcaaatttaatatttataaatacttttctaatatataatcaaagatagcaataactatccaacccaaatacagaaaactaattagtattaaaaacaattttgtctagtcttggtatatatttttattatattttctttataaattttatgttatactagtatttttaaaatttaaatttattaaatatattaattacaaaagaataagctttatttgaaaccaaacttactgaatttggcatttcttatttcagatattgacga

SEQ ID NO: 51459 - DNA, 991 bp, Ricinus communis
  Intron number 1 from transcript 29844.m003249 (locus 29844 .t000095) derived from phytozome v7.0 (chr-ID 29844; pos 6 38328 to 639318 reverse strand)
gacacgagtcccgtaactggcgagagtgagaaagagtgtgtgcaacttgcgaggcgccacatatgtctctataatatacacacgtactcctgaaacgaagacaaagtttagcagatagaattttgtttgttatgcaaaatgcacttttatataatatctgccaaatttggtaccgattcaatcttatcttagtttctatttggttcttctgtaactcatgagtttggccctgtgcatgtccttttgttttttctgtgtctcccctgtcttcttagaagtttatttcactttccttttttccttttgtattgcccttttggttagtctttccctttcatttcttgttgatgatttctccttcttcactgtgtttgctaaacaacgcttctttattgtacgtatggccatctttagtatactttccgagaactttttaaatatataattatatattaattttttactattgattattcataatatgtttaatgatgtaagatataaatatgttttattttttactaatgcagaatccaatctcatcaagttaaaacacacaattttactgatcagtttttttttttaaattttcaattctttttacttcttttcattccaaatcaaagtcatcaagcatggcactttaagtaggtatttctgtcatcttataaggcatgttatccaccaagtttgtccgagtagtcggtaagatttctgcatcttgctttgtgtcattactgcatccttatctagctcaatcctgacagtctgaaaatgtttctggtatgaaatggaaggttgtttgcttgatttaacacaaacctttttcgtttttctggattttcttatggcaactccgatatcatattctttatcgagaaattgtcgctttgaatgaaaactcttcttacattttcttccacaagatccttttagaaagtcctcgaatcaaagtggcgcatgcagattgtgcacgttgaattcgtctaac

SEQ ID NO: 51460 - DNA, 559 bp, Ricinus communis
  Intron number 2 from transcript 29838.m001647 (locus 29838 .t000017) derived from phytozome v7.0 (chr-ID 29838; pos 1 18334 to 118892 reverse strand)
aggaagaacaagtgaattgtggattgatcaaacgggtgtaaggatcactaagaagcttttgcttaaatattgtactgacaaataatttagtaagaatagaatgcgttgctgctctttctaaaattcaatttctagtaactcttgtgttttcactgaatatttcatatatttgcccaattaattattgcttttttttattcttttaattaggggaaaaacatttcagttgaaagcatatctctagacatgttccaaattagagatgtagaactaagttctaccgcatttgagagaatgagcaacaaaacaaaatttgccatccctgcaaaagaactaaaatatgcctgtctaaagagctcagtttcttaccaaatgggctaagatatctgtattggtatgaatacccttcaaaatctttgccattgagtttttgccccgacaatcttcttcaacatcatttgataaaagaatttcaggtctctctctctttctctctctctctctctctctctatctgtcgcttcatgagtcctgattaaatattttttttgttacagaa

SEQ ID NO: 51461 - DNA, 607 bp, Ricinus communis
  Intron number 3 from transcript 29842.m003572 (locus 29842 .t000069) derived from phytozome v7.0 (chr-ID 29842; pos 3 35611 to 336217 reverse strand)
atacaaggtaatatatattatataaagcaatttttctgtttatcagaggataaagaaaagaaataaagaaaacataaggatatgcatatgcattttaatgagttaggtcatttacattaatatctttgctaatgaacagaaaaaagttgcttgtattggaatttacatttgttatttagccattcactaccatatttatatggttagatataaagacaaggaaaggaattaaccatatatggactacggtggtgtaagtactgaaactggttgaaaaatataacactgacacaaccaagaaactgtcgtcatgtgtatttttcctttttcatctatttattgttttgtacttatttttttaaaaaaattctgatgtaaaaatttcttcgtgaatatgtcagaaagttatcattgaaaagaagaatcacatcaaagtgacttatacatacaatagagtatcaaggaaatcttgtctttgtaggataggatgcaatgtattatggtatcaattttgtgtcgatagcatcacttttacttctcacctttacaattaacagcttcatttaatttatatatgtatatgacattcccctgtgcagaagcggct

SEQ ID NO: 51462 - DNA, 712 bp, Ricinus communis
  Intron number 3 from transcript 29968.m000645 (locus 29968 .t000014) derived from phytozome v7.0 (chr-ID 29968; pos 9 7384 to 98095 reverse strand)
attctcatcaccatttggaggtttctcaatacaaggtcactgctagactctttcagactgcttctacttttccgttgttcgttttgtggatgaatttaagagccaaatttgtagcatattgtgtcaaagcgtatgtctccttttgtgcaagcaggttcacctttctgctaattgattcttcttttactagacttgaggtttaaaaaaagaaattatggctgttggtatgtgatagcaacaacatgtccttgtaggtttgacttttacaacgtttctgacttagtggtgtgtcttttgagatggactatgtgccagaaaatgtctgtggttttctagtgaaaacgtgatttgggattgagagtatgttaccttgaatatggattcaaatcccatatttgttggattggaatcattgggcgcttttggaatttaaattgcaagtctatacaatggtgtcattttggacttggttagctggttcaaatatttaatgtcttctctggattctatctgttgtggaagtaatagtggttaagatctgtttcctttatcatacttgtaaacttatcctatccacaaacacatgcattgggttcttcttgttctatttatattacagatttgtggtagcttgcagttgcaataatgataaaataacctaaccatgtttgtggcaggcagttcaagaagccttctgcatcagagctctctg

SEQ ID NO: 51463 - DNA, 369 bp, Ricinus communis
  Intron number 4 from transcript 30131.m007279 (locus 30131 .t000430) derived from phytozome v7.0 (chr-ID 30131; pos 2 609680 to 2610048 reverse strand)
ataaataccttcacactctccacaagtattgacttcttcattcctctcttatcaatttcatttgcaaatgataccattagaggcttttccagattattttaatgtcctaggctcctactcgtgttcattctatgctattttattgaaaatgctaccacttgtgttgtaaacatgcatgaatgtcagtcacaagaatgtgccctggcggcctggacttctgtttatcgggcaaacactccaaatttccttatttttatacttttgtttctctgttttcttttgttcattggttttgacttaattgttaacaccttctaatgttgtattctggctctttctttttctacaggattataaaagctgcaaaaa

SEQ ID NO: 51464 - DNA, 802 bp, Ricinus communis
  Intron number 1 from transcript 30137.m000440 (locus 30137 .t000013) derived from phytozome v7.0 (chr-ID 30137; pos 2 50881 to 251682 reverse strand)
ttcttgaagagggtgctgttattttgggctctcaggtatatgtgccaaacttcttcatttttttttgtaagagaagataacaaatttcttaatttttttcccttatttttaaagatgcatttctgggcttgattgattttgaaacgtatttttgtctgatcaatgggctttccacaaattctaaacttgccatgagtttcttgtcaattttgattcttttatattaaattcatttcttttagaagggaatccctctagttacgtttttgcaatgattcatggagagtacagggggtcgcttttgagaaatgaataaaaaaaatgctttagttgaatttcttttaggttgcaaaaggagatttcaactttagtaagtttgaaatatctctgtagctttgtcacagttatcctgcacattgtccaccctcttgtagcccttttcttatgcaaaacaggaagatggtctgttgtgttgatgtgcaagtgcaattttatgggacctaaaatacctcaaagtgtgcatttggagccctttgcttaaatgcttttacatttatttgatgcacatttgaattaagggattggattattctcttgcagttgattatgatttagtgtaaatattgggttgagctaatttaaagtagaaagtatcttcttccctgcttcttcatcatgcttgttgtggtaatgtttcttgtttgggacagacacagaagatatgatcctggaatttgttactatttattctttcagattttgatatgtatatctatgtacttgaatgataggacccaaaaga

SEQ ID NO: 51465 - DNA, 731 bp, Ricinus communis
  Intron number 2 from transcript 30055.m001594 (locus 30055 .t000064) derived from phytozome v7.0 (chr-ID 30055; pos 3 43694 to 344424)
ttttcaatcttattttttttctctctctctttctggtgagtctttctttcaactcgttctgagtcaactctgcggctttcttttttttcttttttctttttttagttttcattattaatctctgcaatttcatatctattgctctggtttttccttttcttaacctttctgatccatctttttgttataattctggtttctggagtgcggattgatgcttttattttatcttttcttagagtaagaaagtgggagtgaaagaaagttgttaactttgttgttttttgatttcaatgattgagaagattgcttgatttatatcaattacttaaattacgtacatttaagtaagactttcttttttcctttattgttcttttaaacggaagatttaatctttggcttcactaattttattctgtcattctttgaattaagaccagattatatggaggattttctattgtaagagtatgttagtgagattagggcattattaagtgaaagtgaaagttcttaatttttcttctttatgcaatatgaaaaagatagacttgaccaaatttactgaattttcctaccttttccctcataactaaagccttgttttcatttaaaaatgatataagtagtttcacattgtgttgtcaataaatataatgttaattttcgtggaaatgattatgttcattgcagttgagcttgtgaaggcgaattgtgggatttctttt

SEQ ID NO: 51466 - DNA, 669 bp, Ricinus communis
  Intron number 1 from transcript 29851.m002400 (locus 29851 .t000042) derived from phytozome v7.0 (chr-ID 29851; pos 2 50740 to 251408)
gaaagattaaaggacggtggagattgcttagagaggtatacatttttcttttatctaaactagagcacaacgtgatgacattcagacttgattttgttataccttatatccttgtatgttttgtttttagtaaatttgagtacttgcttttgcccttttatttttagtctttggtacgttgtcttttgttagtttttttgtaaaatgaatcttttacttttatcctttctttacattttgctaattaaaacacgggctaatttaataagaaattcaagtgttttttatgttctcttttattataaaactggagctacatgtattaaattcttagaatagattaacacgctttatgacttgatggaaacaaattcataattgattgattttagaaatattaatttaataaggtgaaaaaatgtaatgcaggagaggcagaaatgatatgattttgatggattctatgtatgtcctgaaaaaacctgattttgaaggtactattgcttttcatagctaattcatcttccttatatttgaaaaaacttgaagtggagacaccagcattaaattctatattatttttgttattagcatttattgtttgacagggctatcttttgttttaattgaataggtcgtatcctcttcttgaaatattccggagttgta

SEQ ID NO: 51467 - DNA, 615 bp, Ricinus communis
  Intron number 1 from transcript 29828.m000377 (locus 29828 .t000002) derived from phytozome v7.0 (chr-ID 29828; pos 1 0130 to 10744)
gttcaaagaactcaggaacttagagttagagaatagtattttacaatttcaacacttgggggtattttttgcatctccaacttttctgaaatactgttttacattttcttaggagtctttaatttttaattctcgtcggtttaggataagtactattcttattttatttagagttcaaatactttgaggattagaattagttttatgagtctaaagtctttagttttaaggattatatactgttatcaatactcaggcttgttattgtttattttcaatttcagagttcaacaaatttttttctcctgcaaattattgctttaggtttgtgtgattcaattcttttctaggcgtgatttcgaagaaacgttttctttggaatgattgcttctaggtgtgattcttagaagttttctatctttctgttgccaatcaaatatcggatcggaaatcctgagataggcataagatttcagcctttcaattatctattttctgcaaattttaccacagaacaacttactctaaatccgtcctacatcattgacattaacccattttgattttaaataatttgcaggattgggtacacctgttcgacggggtttagggggc

SEQ ID NO: 51468 - DNA, 831 bp, Ricinus communis
  Intron number 1 from transcript 29996.m000136 (locus 29996 .t000007) derived from phytozome v7.0 (chr-ID 29996; pos 6 3561 to 64391 reverse strand)
tccctctccctctttcacctctttcgcttcttcaggtacgcgtactcttatcactatcatcaatagctttgcttgttttcctagaaaataaaagggaaaagaatagctctttcttttgttaatcaattcacttcattttctcagtatacaaacagtgatgtagtcaatgcattatgtgtgctgtactattttaagcttttatactaatttattgataaagttatgatttttatttttctttttgtggtttaatggttgggtaacagtatgattatcatttgttttctgattaagaagtagtcgtaagattcatcatattattaactttgtgtttttttttttttttttattattattgtgtatgtttattaacattagcgagaaattttaattctcgaggcttacaattgactgcaattttatacctttaaagtaattgagtgccagatgagcaaattgaaaagctttggcattgtttaccttagaaaagattgttgctttagaagcatctgctttttttttttcctttctttaattagattttgaaccttttctgtgcagtccttgggcatttaatttagtttgtttttcttttctttatatttatgctgtgatttaagcttatataactttttcgaatttagaatgatgccatatagtatcattgttgtaataattcgaaaatatctatttggctttactaggttgttacattgtttgatttggtgtagttatgttcctatctaattttattggtatagtgatattgattaacagactcttttttttttatgaatttcttttattcctgtctgttacagttctgtgaag

SEQ ID NO: 51469 - DNA, 988 bp, Ricinus communis
  Intron number 1 from transcript 30137.m000433 (locus 30137 .t000006) derived from phytozome v7.0 (chr-ID 30137; pos 1 43937 to 144924)
agacttcagctgtgagattgggaaaggaccgaaaggttaaatttatgaaattcttggcttattgatatatgttctctttgagttaccctaatttactgataatatcatttgaataatctctatggaaaagagtgacatgagctggaatatgcattttgtcttttgttattgctattttaagctttagaagttggtatatgtcacaagtacatggttgtttaagctttagacagcttacaaatttcacatctgtaagaaaacaggattagaaggtgggaaaatgataacctgccacttggagtgtcaggctttttttatatagtttgtctatagaccactcaaatgcacatggtaacctccttgttggcaacctgtgcatcacatatgttagttcttgaaataaaagccatattcgacaaagttcttttactaaaattgagaagatacagtaggttgtaaaatttaatttatcatttggcttatttaatgggatttagattcacttgttgatatcactcaatcatttaattcttttttttcttctgcactactttaaatgtaaggtcttactgtatactattttggtttttttcatattaggacataggagccccgttggttatgggaatatattagtaaaaggaatgatttagttcttgtttataaacctttagtccaaattggacataaacctctagtccaagttggacgtctttggaaaaaaaaagaaggtttctgtagtgtttgtaaaagtgattttctataactggttaatttaattggtatgacatcatacatttgcataatttagagcttcctttttccttcaattgcatgtggaggttctgttggtccaatgttgattgttatttattctatattttgcaccaactgccataataatgttgctgctatttgtgctttttgctcaatattgtaaaccttttattcttctccagagagtttcacccagctttccagtgggagt

SEQ ID NO: 51470 - DNA, 771 bp, Ricinus communis
  Intron number 1 from transcript 29904.m003013 (locus 29904 .t000127) derived from phytozome v7.0 (chr-ID 29904; pos 8 85793 to 886563)
tgctcctatttctacaagacccatttcaacttcatgtatgtactactactacttctacttcttcttatttttcttattttctaaagatttaacaaagagtgaatttgaatcttggtgtatgtaagtttattgtttattagagctagctgggttgagaaagtttttgtgtttggtaaagtatatgatattacttcattattgatgtgtctttagaaaggtggattactattgttctttgttttctggaattgaaggggtgggtaattgaaggttgaaactaaaagaaatcagtagcacttagtagaatatttgatggttatttccacgagtcaatagtaaggggattaatctggaagatcttctcttttattcaataaaatagtgcattgatcaagatttaagaattttaagagtgtcagacaaattgaatctaatattgcacatgactgtgctgtgttcggctggttgatattctatgcatttcttttattatgtaaaacatctaaattcttaaatacatttggaaacatgttggcattttgaatttagttgagttgatgacccattcaagtgttaatgctgcctcccaaaaactgttatttgcttatgttgtgtataatgcttgaagaacaccaaggcatttcattatttgcgatttttcctttttccacaatgcctatcctcagttatagctgtaatggataaccaaatgacattttttgtaccgtgtttgcagtaagatacagagagaggttgatttctgattttagt

SEQ ID NO: 51471 - DNA, 834 bp, Ricinus communis
  Intron number 1 from transcript 29929.m004521 (locus 29929 .t000024) derived from phytozome v7.0 (chr-ID 29929; pos 1 69482 to 170315 reverse strand)
cattattcaggtaattaataacaagtttgtattatatatattatcttctttttattaaccgtttagttgaaatcaataacttcattgtaaaattttccctacaaccataaatcgagtttctgttgcttttatgtatgtcctttcttagctttcaaataaatgtcacgactccctttcaataaattgcattgcatatgactactatttcaacttccgtgaaattcataaatgtcttatggccgtctacactgatgtctaccaagaatatttctaggaaaattctttttttaaaaaattaattggcaaaatacaaagactagattatataggaaaagacttgtcaatcatctaaggccctagtattaaccgttcatagtgcgtgtcacttgcggtgtataaactaagactagataagtttatataaattagaaataatgaattttgtatctttgatttgatattctattaccctttattttcaattgaattattgatatcttattagaaatttgaatttaaatttagaaaatgggttattaattggataatagatatgaactaatgattgtgaaatcaatggttaatatatatatatatatatatatatatatatatatatatatataatctatcgtgttaataacaattaattcttgaaaaactattaattaattgttgagtattagaaagtcacttataagttattctcacaaggcaacattgttttattttattttattttatttattaaaaataagctcagatattataaatatttaatcaattggcgttactctcttgaaggtgacatcatttaagtgtggtgggtttgta

SEQ ID NO: 51472 - DNA, 1016 bp, Ricinus communis
  Intron number 1 from transcript 30055.m001534 (locus 30055 .t000004) derived from phytozome v7.0 (chr-ID 30055; pos 3 7660 to 38675 reverse strand)
ctctcaggtttgctactggtggaggtgaccacaaggtattattcactttctcttccttttttctctttggttgcaagcaaaatgcaaaacccccttttgattgtgcacaatgccactagctggcgaagcttgccttttgtttcttcatgattgttttggttgctgataaaattagattttgggtagtgaaacctttccacttaatgagtgaactacgacttggttggtgggatctttgtcagcatgcataatttatttaattgtttagaaaatgtaagcagaaaaagataatcaatgttttgaaatcttgtacggtctattatgtagaactcaatcgtgaaattgcagatgaaatggttgtgcgtaaatgttaattctcgaacctttattctgtcaattattttctcaaagcagtttatgttagtttcagcatttcagaaactgtaaactttagagtgtatgcaattatacatcttgctgagttgcggtcagttagtgttgttggtatggtggcatagatatgatatgagaaagcagtaatggttgttctttttgagtataggtttcagatcatgcataattgtgtactactctttatggttaatggtaattaataatagtactgtctttgagttgtttatatccatagtcggtggtgcttaaattttttttaccatcctgtggctatccatgtaagccctctgcaaataagtacacatagtatgctatacattgtatgtgatattttatatatttggcggtcgcgtttctattctcacatttcattttatgatttttggtaagtttgttattaatttatgggataattgatcttcaagctaaaaatgccatttaacttagcttcactctaagttgataaaatcaacttgctattctttatgtatctctttagccgtaatgctacttatagtatgttacatttatcaatttgtgtgatgaaattagtttactgtttatacttattctcttgtactgaattatatgcaggttcgaat

SEQ ID NO: 51473 - DNA, 606 bp, Ricinus communis
  Intron number 4 from transcript 29953.m000442 (locus 29953 .t000019) derived from phytozome v7.0 (chr-ID 29953; pos 1 81224 to 181829)
aaattggatcagcaacttctcttgtcaagtaagcatcatttctgagctttatcattcgtttttcaagactcaaatcggcatagacgtctgtaagagcctgaggtttgataatcattaatttgctaattgcatatccctgttaatacagagttgtatcaacaagagaaccaaaaagaacaagtaaataccaaaagaattactacgtaattgaactttagaaagaaaattgttatctgtttcagaaaatctaactctaagtgagttaattaagatggaagatgacaagcatgaaacccaaaatatgcatgagatacaggtaaaacatgtttcctagccacattcagaccatgtccagctactgagaccaataaaatgtgtgattgtgatgagatctatagggagttactttatatttgtgattcatttctgtcactttgaaattgcagttgctgaccttctgttaatttattcatgtgaaactacctatagcttcatactttgtttgatatcatatgtaaagtttggatttatactctttcttgtgatttttaattctgtgtcttcattttaggtttgattgttcaagcaatcagcttaaggaactcc

SEQ ID NO: 51474 - DNA, 581 bp, Ricinus communis
  Intron number 2 from transcript 30129.m000366 (locus 30129 .t000017) derived from phytozome v7.0 (chr-ID 30129; pos 8 8022 to 88602 reverse strand)
aaccagttagttgcatcttctatttattctacagtaatattttgcatgcacttgtataggtggaattttatttatttctggtgctctaacaactatgtacattagttgcgctattctatcatacctcctaatctctgcagttgtttcattcatattgtttaggatacttactttttgtctgccagtacattattaccaacttaagtgcgtactgacttggatcggaaaggatccaataccacgcattagttgttagaatgtgctagaaactcactcctctaatgcaaaagtagaacaaagtaattactattagagtcgaatattttgttttggtgcatgggcacggactgtgcggataagatgcattactttttacattttcccagcacaggactctggcatcttttagaaatcatgcaagtgctggtagcatatatagaaagttgatgagggattttgaatttcacttggttaggcaccgtcatcattttattcccttatgaacaaaaatgtactttaaagatctatttagcggttattttgaacttaacattgtgatttcaggtacatctctggtttgg

SEQ ID NO: 51475 - DNA, 759 bp, Ricinus communis
  Intron number 1 from transcript 29938.m000591 (locus 29938 .t000008) derived from phytozome v7.0 (chr-ID 29938; pos 4 3116 to 43874)
gcactacttgtggcaaaccttgccgatctaaaacagtatggtttcatcgatattaacttcttatttgattttggagaagtttctttgttattatcataagtggggttaaatttagaatttggaatttattaaagttttggaaatgttctttttttttttttttttatttgtgggaatctggaagtatgaatctaactttactttatggaattgaacttagtaattgtgcatgttagtttcaattgtataagattcggtttcaagcttgatttagtactttctgtgggtgggaaaacagtttagttttttaggttttaatgaagtttgattctttgctcaatattatcttctgattgatttggacgaattggtttgtaattatcataattttggaagatgaaattttgaattttttttgttttgtggttccggtgggattttgaatctgtgtgcactggaactgaattagagttagtaactattgcatgttagtttgaattatatgagattaagtatcaagtttaatttgatgcttggtttcctggtgcgaaaagagtttaattttgtttggattttaagtaaagtttgatgttttaattcttcaatgaatcaatttatttcatctaagaaatttaagtgtatagcatttttctttttcttttgatgaattaataattatttagctgaagagctttctgtgttttggttttattttgcgatgaaggaaagtgatcttcacacaaagagaactgggcatac

SEQ ID NO: 51476 - DNA, 851 bp, Ricinus communis
  Intron number 1 from transcript 30020.m000211 (locus 30020 .t000012) derived from phytozome v7.0 (chr-ID 30020; pos 8 9487 to 90337)
ataaattcaaggtcaatttggtctttctgtattattttttaaagttccttttcttccttacttgcataatgtggacgatgagtgtcaaaagtttatgtttttactattttgtagatttctttttagtaaaaagtttctatttagcttttaagtttatatgactaaatgactaatagcttttacttttgaatattgttctagtatttgttctcggttcatgctttactatatatttcttttaaaatttaaatttggaaataattacttgatttttacatcatgtgattgaggataggaattttatacgtgttagttctttggtctgaaaaggcatctataagtaatttaatttaatctgagtattacttgaagctagaaaagtaatttaattcaatttaagtattatttgaagctaggaatagtaacttctggttagatgaatttacttctttttgcgctgttgggttttttattgaatcttcttttggcaagccttactctgcgcgtggaatgttcatagcagtttgttggcttttcatggttgagcatttatttttgaaaatgaattagtagtttgagactttcagttttcactaattaggacttggttgaactcgaatataatcctgtggttgttgaagtgatttttcaaggaacttgagagattaaaaatcctatatgatatattagtcatattcttttgaaaagatcaagccaatatacagttcatgcatgatgtcttcttattgtatatcatcatgttattctcggagctgttaatgttacctgctattggtttcatggagtaattttccacttctttgacatgcagttctgcacttattttgtag

SEQ ID NO: 51477 - DNA, 836 bp, Ricinus communis
  Intron number 1 from transcript 30147.m013839 (locus 30147 .t000110) derived from phytozome v7.0 (chr-ID 30147; pos 2 882732 to 2883567 reverse strand)
ataactacaatagtctagagcaggtgagataccaatgctacatactgtgatagataaattttggtttaagaatcaaatggagctctcaaaatcaggaattcatggatttttaattgctaattactattgtttagggactatacttttgagaatcagttaaatttgaaattatcagtgggttttctaaccacactcaagtctgtggccgaaagttttctgtcaacctcactgcacagataaaaaaatgcagctctatttttaagctttccaagaagggtattaatggcagtttgtgctgggtaatttgaggaagttccctgagggggtgccttaatacaactgactgcacaactaagatgtttaggaatcagcttcctccttaatgcaaaggttgctgaatcatggccaccaacatagtgttctctaagaacgagacagaaccttatccaactaaattcaatcttcttcaaataatcaagcttccgaatagcctatcctttataactaaacaatggaggctgccaagcagaggattgaatgaattgagatgcagatagaataaatggttgagaccatttgccgttttacttctgagccagaaattcattgttatttctctgcaccaaaatatcaagaatttggttcagttggaaggcatttttattcgttttgattaagaagcttttgtgatgtctctaacttctctgagggagtggaaatctagtcaaattatattattactatttttattaaaataagtaaattttagctggttcaggatgcagaatagtgattactttattgctttacaatcaatctttcctcacaggttactg

SEQ ID NO: 51478 - DNA, 680 bp, Ricinus communis
  Intron number 3 from transcript 29957.m001435 (locus 29957 .t000044) derived from phytozome v7.0 (chr-ID 29957; pos 9 39886 to 940565 reverse strand)
caaagaagaagaagaagcaagaagaaaaaggtatgctagaagttaattatcacttctctttattgtgcttcttttcttcttttccttttttcttttctctttattatttttaatagctgagctggactcttggttttgtaatgtaaaattatgaaccaattttctttttgttgttagagaccttccctttcacaagtaacacatgctgcaatgagcaaagaaaaaaaatgtttgtattaggtagataatttcaaattaatatcttggtctctctgtttcagagagtagtatagactagaaatattagcactatcaggtcagactttgttcctttttttgtttattttgacatttgtatcttgtgagaggctgatactgttgtttctagaacaccatcgtcacatatgtcatttaataaacaagtgtataacttgctttgtgaaattacaaatggtttgccaacaaactttatacccaagtataactatattattttaaaagatagagccgtagacagcaatataaactagtgctgaatatttctatgtttatgttgttatattaatatatttgttctatttctttattgatttaactgatctaagacagagttgcatttaatctgacataagtttgcgtctgcagctgagcgaaagagacgtgctgaagaagctcaacaa

SEQ ID NO: 51479 - DNA, 400 bp, Ricinus communis
  Intron number 3 from transcript 29955.m001180 (locus 29955 .t000025) derived from phytozome v7.0 (chr-ID 29955; pos 1 028576 to 1028975 reverse strand)
gggttgaggtctcttcttcctcttttctttacaatagctgaaatcgctgtgggtttcatataggttgtgttctagttatcttgaatgataaaattccttgctaaacttgaaccagtggtgaatctcctaggaggatgccagacacttatgcaggagcttagcactttgtattccagcttttctttcttccttttctttaaaggaaaaaacattataatcattttgattttgcagagatacattagtcaataactggaaaactattataatttatttatttattccaactcttttatgttcctcttggccattacattctgatactgctataaatatcctagtaattatagcatgatgttattcagggtccaccaacaccgggtgttgttttgaagtttga

SEQ ID NO: 51480 - DNA, 207 bp, Ricinus communis
  Intron number 1 from transcript 30024.m001701 (locus 30024 .t000018) derived from phytozome v7.0 (chr-ID 30024; pos 3 40389 to 340595 reverse strand)
ttctgctattgggtttaacttgatttctcagtctggtatgtttcactctccataaattttcttttctggcttttttgattttctgggctctgctttttatgttgtttctaattctattcttttcttcattcaatagttttggttagttgtttattctgttttactgttcttctctggttactataattatttacagatatcctataa

SEQ ID NO: 51481 - DNA, 671 bp, Ricinus communis
  Intron number 1 from transcript 30000.m000373 (locus 30000 .t000003) derived from phytozome v7.0 (chr-ID 30000; pos 2 3907 to 24577 reverse strand)
atttcggacgctgtctgcctgcaaagttaacaagggtactatgcttaatcaaattcttacatttatgtttcaattttccactttttgcgggaccatttctaaaaatgttctgtcaagtctacatttttttttgtgaatccctttagttctttatagcgaagcttcctgtctgttggtccttttggggtgtcgtattatgtgttaatgctaatgttgaagagaggattagaagtataggtttatgtgattggtaggatcataaggttcttatcatgtgattggttatctttccttatacctagcagtggttttgattaatttcttttccccttgtggaaaaggagtatatattttactcaaggtcatcaagaagaggcctagaaatccagcctattgctcaagagtatttcaataataaggttcaccaagtttgatagatcgtggtcccattaaacatgagttctttttggttgacataattgattgttttaaactaaaaagtgtaaattttctttctttgttgtgtcagttaaatgcatcatgctcgttatgttttttcagcatagcaatgttggttgtaaaatttcatggctttggtttatttcacttctcttgaaataaatgttaaatgtgcagtttgccctttgaatttcacacagccatctgaggta

SEQ ID NO: 51482 - DNA, 838 bp, Ricinus communis
  Intron number 2 from transcript 30005.m001304 (locus 30005 .t000070) derived from phytozome v7.0 (chr-ID 30005; pos 4 59512 to 460349)
aattgtcaaaagagcaagatcttcttctttgcgttagattttgtttttgattacttcagcttttgcattttgattgattggtttcttcgcatttctggattatcatcgactctgttaaatcgtaaacgagcccgtgtctccctgcaaatttgcactacttacatacccttgcctgtgcagacatgtaaatagatgcttgtgcaggcaggttctcttaatatgtttctgcatgttcttttgataattcatttttacaatcagatgttgaattttggttcgtctaattggatgttgtattcatcttataagacgtggaggtgtccctttctgctctaatttaatcttaaagtttgagatgatgttgttagtatcatgttatctttaccatgtcttataattttcttgctcatttctcttataattgtttatagttcttcactcattctagtctctaaggccttgatgtttaagttcttggatgctgaattttgagtttgcttctgatatatgtggattcataatcacctagagggaaagagaaggaagaacccttccttttgagaaggaggtattaaaaattgcagtaaacctgatcatacgggcaagagcagtagtttgtgttcatggctcttttacttaagactctgcatctttgaggaatcaacttatggtcttttctgcaattatttttatgcacatctgcacatcctttattggctcccaactgtacattcttctagctttagcagttgtaaaaattgtccttcaggatcttatttacagttattcattgatgatatttatcaggtctccatcaacctctagaatccgtgccaag

SEQ ID NO: 51483 - DNA, 666 bp, Ricinus communis
  Intron number 1 from transcript 30045.m000470 (locus 30045 .t000002) derived from phytozome v7.0 (chr-ID 30045; pos 8 3276 to 83941)
ttagccaatctgagaaacctgacgtcacttacaatgtacgtttttttcttgaattcttgaattctttgtttttctttcgaatttcaaattagggctaaatattgcaattagggtttcaatttattttacttttttcaatgaatttagtattgtaaactattgttgctagacgtgtttatatagcttttgtgctgattgtggtcaattaggttttctgcaattaggatttgttgaaagattgtatttttgatttgtttcacaataataattttggacggagtaattgtagttatccatttgggtttatggtcgtgagtgactagctaattgctgttggaatataaatttgtgaaggccattttaggtgggttatttctgaaagtagtcaaacatagtttcgtttcttggggagtattgtgacatcaagttttgctaataagaactggaattgatgacatgtgtggatcttgataaatcttaatcttaaaaaataactgatcttattgcatatccattgttttctaaagggagcaactacattacaggccaacactttatgatggtttcttctaaattagtaagcaatttggtatgaaactggtatgatcttaccatctaactccttactgaccctttcttccttttgttttggcaggatattggagg

SEQ ID NO: 51484 - DNA, 595 bp, Ricinus communis
  Intron number 2 from transcript 30054.m000824 (locus 30054 .t000039) derived from phytozome v7.0 (chr-ID 30054; pos 2 43415 to 244009 reverse strand)
gccttgcctgtcataaggaccatcaagctattcaggtatggtattatttgtcgtttctaatgaattcaatcatttcttcgtttccaaatcaaacccattttggcatccgacttttatccctctttatcgaatgatatttttctttcactcttttcctcttttatgggtttttcaatccttatatggcattcaaactcatgtattcagtattctactttctagatttcattccctttcatagacatgctttttgagctctggagtgaaaatgaggtttttattgtttaaataatggggaacagcaaaggtcaatttgagtgttgattatactttatcagaatcagaggattttcctttacctaattttctcatcctacagacggaccatttcgccattatattgatatgaggaaaaaaaaaaaaaaacttactctgaattgaattgggttttctctgttcacttattttccattttgatgggtttgcattttcttcatttttggcaatttaaaagaagtcatgaaattggcatggactaacactgtcaaactcttgttctgatactgtgaatgacagataaggagatcttcatacc

SEQ ID NO: 51485 - DNA, 533 bp, Ricinus communis
  Intron number 2 from transcript 29950.m001173 (locus 29950 .t000057) derived from phytozome v7.0 (chr-ID 29950; pos 3 23636 to 324168 reverse strand)
agggtgagcagctcgcatcttttaacttacatatatatgccaacttgcactgatgatgttataatctgtgaattattcttttttcttttgttcttgttctttttgtcttcagaatggatattaggttttaatggtaaaaattagcaaggcattttcccaagtcaaaagttttggttaggatagcgtgtgccatttattcttattcttagttgtcctatatttgtttgttatgtatttttgaagaggcattactttaaaagtaacagtactgtctatcactatatatgaaaagtgcatgcatttggatttggatttgtatttggatttcatccttaaaatggatcccactttctaaaatatccttccatgaaagcatctaagaaaatcattcaactttcggtctttgagttagtaatataataatcgagtatcttaaagtaattgaagatttaaaatcctactttaaagttttctggatggataaacttaaaatattagaattaagacatttcaaatttttatttttcagctag

SEQ ID NO: 51486 - DNA, 499 bp, Ricinus communis
  Intron number 4 from transcript 30078.m002303 (locus 30078 .t000096) derived from phytozome v7.0 (chr-ID 30078; pos 6 15994 to 616492 reverse strand)
cttcggtattatttactatataattacttaattgctttattcacatacatgcataaattactcaggaaaaacttattgaaatatagaagggagattttgaaaatgttgagaaatatatactatattcttctgattgttgattcttcatttatgctattctaaaagcatgttagaactttgcataggtaaagaaaggattccttggctcaaagaaggcctttgtagatcaaaggactgagcttttcttgtttaactagtgtttttggtccaaaacatggttaggaatctgtcattgtttataagccttaatgcatcccaaccgagtctttagttttctcatttcatttcagtgatgatgatcagcaatatgggttgtcaaaaattgattctttctcatggattacttcttccagcttgaacagaattgcatttgtttctttttctaaattttctagtatctgcaggtggtctttattggaaaaatacagctgcaaagcct

SEQ ID NO: 51487 - DNA, 1026 bp, Ricinus communis
  Intron number 1 from transcript 30146.m003431 (locus 30146 .t000008) derived from phytozome v7.0 (chr-ID 30146; pos 6 6692 to 67717 reverse strand)
agtttattaaggttggttttcttgcagctgtctcattctgctttttttaatgatcatgcatgatatacgtttattactaattcgtcaatgaccatatgctagttcttgcatttcatattttaaaatgctaataagttctctgttactttgcaaatcatgtcctagcataatgggaaagagtaattgtgtttttagatgggctgttaagcgacagaaaagactacatcgcattagcaagttatgtttcttggattatattcatgctgcatatcaatcttttgctgcttttgagctcaacaataatatctcaaatagtttttagtatagtacttgcagagaactacttgtttgtatttctcatccccttgaatatgtgtaatgaatggcgtcctgccataagtggcacctcagcttctgtcattgatacttcttgcctttgattttaactatttacattggaattagtcaattttccatcaaaagaaacaatttttttttcccttgaaggttgtactagtttgcccttcacatgcgtgtttttaggatttactaagcagtgtggatggaatccttcatatcaaagttttgctagttgaaaagagtcgattagtaaaattatgtttgggattatccaaatccctactgctaatactcaagaggtcgtatatcaatttcatttttgtgattttcatatatctctgtcgagtgagacagtaatgaaaattactgacagttctaccgatgatatctcttagttcatgatgccacaaagctatgtattctcggtttcttttttagtgcccctggtaggttaaggcaaatatgttgtttgatattaaataactgaccttttctggaatttgatcagcacatgtagtgttgaataaagaatcattaaaatttatctgttactttcttttgaccaaatctcagtaggtgcattcttgtcatgcttaagttcagttgctaattagtgactattttccttcagttggctgctcctctggtgacattggggaaggctgc

SEQ ID NO: 51488 - DNA, 819 bp, Ricinus communis
  Intron number 1 from transcript 29929.m004740 (locus 29929 .t000243) derived from phytozome v7.0 (chr-ID 29929; pos 1 384996 to 1385814)
acgacacctgtaagaaagaaaaattaaactaggaattgaagacctaagaagacacatctctggatgtttcatgcaattaattcatgagatgaaagccaatataaataccataaaaggaccatacatatccatattatgtcagaatcggaggtgatgttgactttttttttaattatttctaaaatttcttaaattaacataatataaagcaaaagataatatttctaatacaataaatttaaaatatttataataattataactatagaattaatacgatggtcaaataataattataattgaaactaataagatatgttgaacaaaaattattcaataaatataaattaaataaaatttatataaaaattaaaaaattttaactaaatattataaaaaaattagtctaacatctttaatcccataatcatggtgattaaatagttaaacataaaaaataacaaaaaaaataaaaacttactcgagatctataatattttcaaggcgagaagatttctcactctttaatctcaaaagtttcattgttttagaaagaataattaaaagtcttaactaaaatatttatgatgaaccgtaagaaaaaattgtagaaacataaatggtgaaagacgtagatggaagagatgtaatcgaaatttaatactaaacctaaatttacagatatacatatagaaagagtaaggataacaattcagcagattttgattcctatatatccactcatgtagtactttttttcattttacgatatataaaatccatatgtatagatatcatcatctacacccagaaagccgt

SEQ ID NO: 51489 - DNA, 284 bp, Ricinus communis
  Intron number 1 from transcript 29827.m002664 (locus 29827 .t000137) derived from phytozome v7.0 (chr-ID 29827; pos 8 00253 to 800536 reverse strand)
acctgcaggagttcttggatgtatgttcttttattcttcagcttctttcctatgtttccgtttacttgtatgtttatttaagattctgcagctaattttaacttggctttctttattgggtatgcctgttttctctagttcttacattatcaacctttgtttttttgttataataatctcaacggtattgaaattttttctttttaattgttctttgaacttaatgaattaaattcatcatttcggtagattcttccacctgatttgcacgacattcttctaaa

SEQ ID NO: 51490 - DNA, 753 bp, Ricinus communis
  Intron number 1 from transcript 29830.m001404 (locus 29830 .t000021) derived from phytozome v7.0 (chr-ID 29830; pos 1 89357 to 190109 reverse strand)
cagaggtattaagtttaaatgtcaccaagtagtttaaaagaaattatttctgttatgtaattcatttgaaattccaatagatcgaagtaaacatttgtacttatatttatgtttttagatgtctacttcccaatatttattttgtttaaaataaaataaatataactttgatctatatatttatttgggagttttaaggcaacaattttgtatggatcaaggtaagacaatatgcacatcaaaatggatcaaaacccaaagtcatagataatttcatactcatgcccccccaaattctctcaaatctatatgaaattttttaattgaaatcaaatacaatttggtctgcattttacatgaaaagaatatatatatatatatatatataaattaattgttaatagttgccaaataaattaaattcctattccaattgtttgtgtaattaaattattaggtgtatccgcctagagaacaaaaattttatgtgctcatatccctcaatccagactggaacttaggacaatgacccattaattaaattagacatttaacaattacttcttcctgttattatttgccacctttctgcttataaattcatagtcatgcatgtactaaatcttcgcagagaaatcaaactaagcagcaatttttcagagtccaatgatcagaatggaaatgggaaagaggtggagtttatcatgttttgtttcacttattgttgtttctaattttctaggtttggtcagc

SEQ ID NO: 51491 - DNA, 338 bp, Ricinus communis
  Intron number 2 from transcript 30147.m013962 (locus 30147 .t000233) derived from phytozome v7.0 (chr-ID 30147; pos 3 674472 to 3674809 reverse strand)
gagattattgctgcagttaacggaatcagtagaaggtactcaaattgtttttgaatttcttgctctgaaattcttccttatttttgttaggatactacgcttagacaaattatatttcttacgtctcttttttcttttggctattttgaaaacccaatagtttggtgattatcgttcttaaccagtgtggaattaatatttaagagtgtttatttctttcggtgaaagacgtaattggtattagtctttggcatttgttgatgtagagcagtttagtctattgcttcaacagtgtcctgttggtggcagttatatcgttccagagtacagcttcctgg

SEQ ID NO: 51492 - DNA, 326 bp, Ricinus communis
  Intron number 1 from transcript 30147.m013962 (locus 30147 .t000233) derived from phytozome v7.0 (chr-ID 30147; pos 3 674986 to 3675311 reverse strand)
ccgcctttccgcctcagcaaccggtattttcattaccccataaagtatcttactttacaaattctttttgattggggttaaactgaacacgtcgtaattttaaagaccacacagtaccattaagccaaagctctttgttgtataaatttagtggtttttactatatacagtataggatacattattcaagatttctgtgtatttgttctaaagtttcagctggcaataatcttattgctcttctcattattggttttttggtgttgaaattgtttttgtgactaagtgaaggtactacttagtgagagctggggaatcagaattcg

SEQ ID NO: 51493 - DNA, 729 bp, Ricinus communis
  Intron number 1 from transcript 29908.m005954 (locus 29908 .t000005) derived from phytozome v7.0 (chr-ID 29908; pos 6 94217 to 694945)
aggcttatctcgccactgacgactcttcacctgacgtatgcaattcattttctttttttctttctttttttttttttaattttttttaatatagttaccaaccatgccctttttaacagtattgtacccaatttgtgcgtgctatgcataagccattcagtttgatattttgtggatatccatgtttaatacagtcactacccatagaatttattggagattgctacatgaatgtgctgctcttacaaacatatgtgtgaaacaaagatgtgacaactattatgtcatataagtattcgtaccatatgctaacttaaacaagtttggatttctccaattttggaatcactgaacatgcctgcattatgatggttaggggatctctttaacttttatgttgaatcaaagtgatcatgctatggtgaagcggccactcattagcttgctccctcgttctgacactcacattcgcactcttcaataacttgcttttgttttttccaagtttagatccaatttatgatatgatattcaccttcctcaattctttactataacttatgtttgatgatttctttttcccttaagatgagagtcgttaataaaaatgattaaactaatttcctcctctggcataatgtttcttatctagattataacaaagaggagaatcattggaattcaaaatgatcaactcttctgatataattgttttcatccagacaaata

SEQ ID NO: 51494 - DNA, 477 bp, Ricinus communis
  Intron number 2 from transcript 29953.m000427 (locus 29953 .t000004) derived from phytozome v7.0 (chr-ID 29953; pos 4 5500 to 45976 reverse strand)
gtgttcctctctccaaagaaccaggatttcaccaggttagtctatttgcataagctttctcttctgacaatacactgaatatgctttgaagaaaaatgatagttattcactgatattggccacctctttactttggttgcttatgttgtatagcaaatggcgttgtatacaaatgttgcaggaattttgcaatatgattataaataattttgtatactcatgttttattactaccctccacgtcctctcttgttcagcacgctatagatttttcatattaactataatactagatcaaaaggaaaaactgcagaacttctatttctaacatttaatacagactattacataattactggatcaatgtatcctttaatttagatccagcatttaacattcaaaaactgagtttgtttctgctattttattgtttaaaacatattcatttctggttgaaatttgagcagtttgatctat

SEQ ID NO: 51495 - DNA, 601 bp, Ricinus communis
  Intron number 1 from transcript 29933.m001417 (locus 29933 .t000039) derived from phytozome v7.0 (chr-ID 29933; pos 2 30199 to 230799)
ggccagcctgataaaaaaagacctgctttagctaggtaaagtttataacttacatttaaagattttttgtttataattctaactattgcaggtttatctttgattatgacgtgactgtttaaatcagttacttgttttagttgtagacgtttgtcagttgattcacttaaatctttgacttgggtttgaaattggaaactcatttctgtttctaggaatctgtcttaacctaacttcaaatagtaatccacgtaaaagaaaaatgagtgatatttcaaactgagggataaagaaatcattttcctggtcaagctttatgttttgagaaaggttctgaaagcagaatgcactaaaaatatattcttctgcttgcgtttgattctattctgatgactctgcaatgaaatgaacttggttctcagtgtcggtaccagactctaaacattgtatttgatggtttttccttttatttcttttttctcatcgtctcttttggtaatccttcttacctcttacttgctttaaagtttattgcatatcgtctacatttttcaatttccttgcagtgtaattgttgaagctctcaaggtggatagtctgc

SEQ ID NO: 51496 - DNA, 840 bp, Ricinus communis
  Intron number 1 from transcript 30146.m003564 (locus 30146 .t000141) derived from phytozome v7.0 (chr-ID 30146; pos 1 047419 to 1048258 reverse strand)
gactcctcaaaaaggcccagtttttccacttaaaggtgagagccattgattctaaaggatctaactattagtttaagtttatggtttagttgacctgtacttgtttatttgaataaaactaactgtttctcatttaattgggaatatactggttaattggttcagttgaagtgtacttgttaactggtgattaatggaatggatgaaatactgatttgaatggtgtcgattcaattttatattttttttttaatgattgatgcaaatgggagtgataataattgcacttggtctcatttgttccttcttttttttttttctcaagtatccagaaatgaagctttaggctggttcgagatttgattggttgtactgggataaagagctcaacttctctaattttctctaatacaatctataatcttattacctatttcatgcctctattatgtctaggatgaacttttttgttctatttctattttcatttgtttctttgtatagttggttgcaaaattactaatttaagggtctcttataatgggagtggtaataattggttgaacttgcctctccaaacttttaataattaaggtttagttggttaaattattccttaaggggctagatttttagatatgtaacaaatttaaggcccgataatacttaaagctttaagaaaattgtatcttagatttgtgaattgaatagtgagaaaaggaacctggattaaaatcctcctgggttctggcacccatgctattatttcccccctatatttcttttcttgaccttccacaatcttgccttgcagagacacagaatcgtgttgctgttgtc

SEQ ID NO: 51497 - DNA, 777 bp, Ricinus communis
  Intron number 1 from transcript 29991.m000642 (locus 29991 .t000024) derived from phytozome v7.0 (chr-ID 29991; pos 1 93154 to 193930 reverse strand)
gagttttggggttagtcagcctgccctctcctttctgcttctcaaaagtttttgttttgttttacgagttcattatctgtttctttgtttctttggttctgtattgttttaggaacttgctatttattttttcatgtcattgttgatttttatgggaactaaagcattgagtatatgttttctttctcttgtaatctatagcaacatggtgcttagcagttcattttctaataatttgattacatggtttttttgtaaatatatttcaattatatcactttcttgctttgggttgtgaatttatgaataggaaactgtaattatttgtgtgttatggtggttttatgctttaaagtaagaagcggtttatttgtttacttgtagtattgaagtttgagccttctataggaaagttctcttttcccttcactttatctatatgaagataaacagctttttatttgctcatctttttactgagataacttgctaaaggattggcttctattcctatttgtttcactgttattttttgatttcataaatggtttcagtaatgattttatgtgatttattttgattcatggtctttgtattgtgtcttatgaatccaatttgcttcatatatttgtgttttgtcaaagttatttattgagatgttacattttttgcatcgtccaatttctcttaatttaatgtgccttagtttttcgataacttaatctttccttcattgtactaggtgttgaaattaaggctggggaaactcttaaagtg

SEQ ID NO: 51498 - DNA, 463 bp, Ricinus communis
  Intron number 1 from transcript 30076.m004695 (locus 30076 .t000259) derived from phytozome v7.0 (chr-ID 30076; pos 1 646733 to 1647195 reverse strand)
tgtccctcgacgtcttccgtggtctcacaatcgcggtacgaatcaaacaaattaaaatttgatgagctggcagcaaatgtttctgttgtttattacttttttttattgtgccagttggacttaaaaagaaactagaggtgtatttgttgtgataatcttagtgctcttttattgttactttgtattatgtgtatagattaagaaattagtaggattattttgttaaggcaaggattatctgttaaagagttacacggagattaatgaaagaagatacttgattaatttttacattgctttgagatagtttgttagtcacttgattaagctaattcaatactttgctacctgtttatgaataatgtcaagggtactgggttgtaattatcttttaaggtactgggttgtaattatcttttaagtttgattgcattttatagtttttttttttttttaacagctg

SEQ ID NO: 51499 - DNA, 685 bp, Ricinus communis
  Intron number 5 from transcript 29917.m001947 (locus 29917 .t000016) derived from phytozome v7.0 (chr-ID 29917; pos 1 16298 to 116982)
gccatacacatagttgctcagaaccaaacaaagtggtaaggttaaccttgacaattttcttgggcatttttttgcttgttttattttctagtctaaatagtggattcttttgtcctagtgtttatttaatagcaagtcatgcatctgcatagagaggccagttttgatgtatttctaactcattagatctcatgaccagaagataacttgttaggccatttgagcatggtgttttgtagaaatcttatgcaagctgttaattttgatatacttgtgcttctaagcagttgcaataaataaaatctttttgagtcgaagtgtagaagaatggagttttgacttccaataagattcaaaaagatgtttgcagcttacattactcttgtagtaactgattttgtgtttcctaaaagatgcatgggtcttttctctattataaatggttttgctctttttattagatccatatttaacatgtcatatctcccaggtggcttgatgaagggtgaattatttttagttatttgctgatgcctaccatttaattttagtttgttttaatttgcgtttacaatttggtattctaactccagtattaatacttttttcaactttgtgtgttttgtttttaatttttatattcctcttaggtggtttgcgaaacgctttctgcatccagctgttg

SEQ ID NO: 51500 - DNA, 747 bp, Ricinus communis
  Intron number 2 from transcript 29843.m000285 (locus 29843 .t000001) derived from phytozome v7.0 (chr-ID 29843; pos 5 4377 to 55123 reverse strand)
gaagaaaggtatttctctttcaagaataacctgatttcttttttcctcgttgtaatttatttttgtaagagtgacctgtgacctgcgacctgcatttctcttgtaacttgatagttgaagctatgttatttcttcctggtattttttcttcttcaattgtgtaatgattgattttttaaatttttgggactgctttttatgcctagctagtcttttatgcttggctcaatagttggggacttcaatccataggttctccagagaagtcatcagtttcttacctatgctctgtggaatcttttattttgttgttccactgctcactttttgtctctctggatgtcctactgcttaaattttttgttcacacgaaattctgggagttactttcaattaggttcactttagtctttaagctgtatgcaaatcacatcatgtggatgatatttggtgttatgaaaatgttcagagtttagatttgttcttttggatggaaacaccatcgtgtttgtaatttgagatgtatctagaggtgttgggttgaaccactcagaaaatatctatggccactgaatatttaatacaagacaaatttagatggtaacatcttggtggaattaactttaagattgattactcaaactttctaactttaatttgatcttatgtatgaattatttttgaggtgttctactctaatttaagattcttgcagacttgctcttgttagtggattgaagtgggtgg

SEQ ID NO: 51501 - DNA, 1010 bp, Ricinus communis
  Intron number 1 from transcript 29929.m004764 (locus 29929 .t000267) derived from phytozome v7.0 (chr-ID 29929; pos 1 513264 to 1514273)
ctgctacaaaagcgtaagctttcaatcttagttactctttctttcaagtacactattatcccttttttttttggttcaagtactgtttttcttttatttgggttcagattttacatactgtgatttattctctattttatataatattgcatttcaaaatcacatttaactagtgattaaactgaatgaaatggatcactattctcttcaaaaacacaaacaagaaaaaaaggaaaatagaaaagaaacagaaaaggttactgattcttttccttcttatagaaacacattgaatattcatgtgagttctgttgactgtagagtaggaatttaagaaaataggtgtcagcatgcatgtagtgttgtgccttaaatcaatctgttttgggaaaaaggaaagaaatgccaaggcaatagattgctgaatgtcaatagtttctcccatgaataacagcgtcgcacatgcaattgtcagatttaaatttctttattgctgttacttacacttgtgaatcagtttgcaaaatcaaaaagttcacgtattgtctttttatagatggcctttgtaaatagcctgtgaagttttgctggaacctatttaatggagttaacgtgcgacttcaactatcaaaaaatcaaaaaagaaattatctaaaattatacatacacaatactaataagagtggagagagtttcttcttcaagcaaaagttgacaattcttttactatatagttagttttctaaaattttttgaagaaaaataattattttaatttttcaataaattattatacaaataaatctctgaattaaaactcaaaatcaagcacttaacttttatttgtaccttggaaaacaatctcatctgccataaaagttatccatttatttaactaaatcatttcgtttgtgtttttctttttaatgaaaatcatgtctctttcttgtcctcgttgtaattcaagtgttgggtgaatcataatgtagctatatcgatcgattatcaag

SEQ ID NO: 51502 - DNA, 380 bp, Ricinus communis
  Intron number 2 from transcript 29917.m001972 (locus 29917 .t000041) derived from phytozome v7.0 (chr-ID 29917; pos 2 47606 to 247985 reverse strand)
ggtttttcctgagaagctgcagccgcccaacaaaggttaattataatagattattgacaccaatagcagttagacaagtgtaaagctagtgagatattttatgtatatgaaacatagaaaacactgtaagaaaacaactttttcaatgtaaaaaaaaaaaagaaaactttgacatggtatcagagcaacattttccccttttcttctcctcgttctgctctctatgccgcctgcctttaggctgtggagaggtttgagtgtgaggctttttcgttgcctcctgccatttttgttgagttagagcagctgttttccttgtgagtatgtgttttggtgttagagcagcttgaagaaaaggctcggattgaagcctaaatcag

SEQ ID NO: 51503 - DNA, 755 bp, Ricinus communis
  Intron number 1 from transcript 30057.m000082 (locus 30057 .t000002) derived from phytozome v7.0 (chr-ID 30057; pos 8 535 to 9289)
gcgatatccgccggctctcacatcgccgttttcaggtcatactttcatatctctgtctctcacactgtttatgttgtatagatttgttatcgttgtatttttctttagtcctcgattcttttcatatattatgtttgcaaactctctaaagattcatttagtgtttaaagtcaaaaaaatggaatatatatatgtatatgttgaagttggaaaaagaaaatcgatagctcttatatctaaaagtgcaagaattgaattcaagtgaattttatttagtcaattcttttgtctggaaagtcgatattttcttagaattcattatggtttttgcgttaattcaaagcccagaaaggtccgttgagtatttcaacttaagaaaaagcaaggcattttgaaagaaatgaaatcatgccaaagaaaatgacatgatcttacaattgaaatcttgcacatgatctgtttccaataaggtcattatgtttggaactctctaaaaatttagagatttcttcatgttgaagtaaaaaagtgaaaactttgcgtttatgtgaatattctgaagttggaaaaggaaattgataggtctcaacactatatagtatttctttaacgatactaattagggcttagatttaattatatatatagtatggggattgctaatctgttctcagttgattgaactgattggtacttcttctggaacaaatctgttctgaatttttctacctgttctttgtgcctattatagagaa

SEQ ID NO: 51504 - DNA, 772 bp, Ricinus communis
  Intron number 2 from transcript 30057.m000082 (locus 30057 .t000002) derived from phytozome v7.0 (chr-ID 30057; pos 9 450 to 10221)
tacaaagcaatgtgagtatatagcattttaactgctttgttttaggccttttgctttgttctaagtggaatgctacatgtgctcaaggttcttaaaattcattgttatggaacttacatgctcaaagttctttagttaacatttctagtgcttttacacgcttacactcacatttgaacttagatttgtgatgttgtggattgctgtgcttttcgaaatgatttcctggtgtcaaccttgtttgtgaaaaatgaaaattattttcccttggcatggtttccatatgctgctgcggtgcctttttttttttcttctttttccttttatctccccagatgttcctgatgctatattaggcattgaatgaatttaaaaaatgatgcactgagggttgataatgcccaaattttaactttatttggcttggttgtttgttggagtgaaggaaaatagtacaagtgccttccatgaaatagaaaataaaacgtcattctaaatgcttgttacagtaacagttacatattaatttttatccgatacttgttcaaattatttgttatggttctgatatttgattccatgggattctctaatgcccttgtcttggtgtcgttaagtgattgaaatgtccaaaatgttctcaattttgtataaatgcagtggtttcttttgttatcaagcaacatttgaaggtatgtggctatagctgacttctttttctcaaaaaaaatgaacagataagtaggtatttctctgatccccagtactattt

SEQ ID NO: 51505 - DNA, 472 bp, Ricinus communis
  Intron number 3 from transcript 29912.m005406 (locus 29912 .t000132) derived from phytozome v7.0 (chr-ID 29912; pos 6 75668 to 676139)
acgactgcgtggaaaagaaaggtatgatcattaaatactagtactgtaaatttccattatcatttcttgcgtttttttaacatttgttcctggtgatgccaattgaaagctatacgttttcatggatgatcattttgattgatgataatctctgagtcatcaagaaggcagaggaaagcactttgtggcctgcagaaaataaaatgcattgtcgagcccttatgtgatacctaaagttatgattttgttgtttcatgcctgtaacatgaagaaagtagaattgtgatgttaatcgactctcatatagtccaattgcttgtcaggatagaaagcaactctcagtttgcctcctgatcttttacattattaggtttttccgtttagctgaacatttgcattgggaataattgtatatcaattttagggttttctttagtgagaagtaaactagtaatactttttttcaggtttg

SEQ ID NO: 51506 - DNA, 943 bp, Ricinus communis
  Intron number 1 from transcript 29981.m000575 (locus 29981 .t000004) derived from phytozome v7.0 (chr-ID 29981; pos 4 9699 to 50641 reverse strand)
catcatctatctctctgtacgttactttattactctctctgttatttcaagcgttatgttttgctgcatgtgttattgtttttcattttcttttggtgaataaaatggattgaagggacgatttttaattgaaattagtaaacttcttttgggtgaatgctttgacttctcaggatttggtgttttttatacggcagaataactataaaaaaatgtcttgttaggtggtgtgaacgtgtcgtttggtcattttgatgatttgaatagtatgacaacttggcaagtaggaccacagctgcgcttattttttacaccacaacttcaactcaattaattttaattttgtcttcacttgataagcttaggctttcatatattgtcgacagatttttccgtttcgtttttgtagctttcaactctctaagtcaagtttttgcatgttactctagcatacagatgcacccacttgcatatatatattatcaggaaaactgatatttggtcatcaaatgtctatgtggataactccgttttaaaacagttcatgggacttgaagtttgaacagatcttgtattataaaatatttgtttaagttattaagtcaagctttttattaaaattatactggactctagtaccatatttataatacattaatcccacctcagaataccaactgactttgaagcatagataaaatgaatgctcgttttatctttttatgagatacttaactagtaaatatgagagtgactgaggatggaattctaaaacttttgaaaaaagaaaaagtacaccattcaacaatttaaactattaagtgagatttcaaatattgtttaatcagtaatcccttttttctttaattgaagtttgaggcgactactaattactattatcagcactaattcactattaatatctttaatctgattgcagggg

SEQ ID NO: 51507 - DNA, 642 bp, Ricinus communis
  Intron number 2 from transcript 30005.m001302 (locus 30005 .t000068) derived from phytozome v7.0 (chr-ID 30005; pos 4 48632 to 449273 reverse strand)
gtcgaatctctgtaagtttttttttttccttaaactcgtttgaaaagagctgcgcctttttgcaaacgtctggcgtacattatatctaagcatatgaaataatcgactattccaggtccttttcttttgatggtggttatgtgaagtacttcatgatggtctttttgaaaaaaaaaaaaattatgaacaagccaatgtgtgatataaaatttgctgctttttgaagttatatggtagtagggtgatgaggtattaataatgaagaactggtttgatgcgttgttatcttaattgtacttttggcctagcttgactgggaaaaagggaattcctaaaagaataatttcgccttttggaatagattagggaactcccaagctagataaccgctaaagatgcttttttccccacttaagaatagaagatttactttgtactgggtcatttattttgctttatatcattcgtagagaagcgatggacataatataagatgctcactgctctttcttgcaatttctatgttgattttaaatttgacctatgctttctttaacttgtttgaatgactgatttgtatctttcttcctttcttttttctttttccttcttttcactttttttacaattatgatggtatag

SEQ ID NO: 51508 - DNA, 876 bp, Ricinus communis
  Intron number 1 from transcript 30068.m002529 (locus 30068 .t000019) derived from phytozome v7.0 (chr-ID 30068; pos 1 14800 to 115675 reverse strand)
ggtgacactgatcctagagttggagagacttgcaggtagtgtgtaatgttttgaaactttacgtgttttcttctgttttttgtgtgatttagatatttcggtatttattattatttttggattttttgttgtgatgtttttgtaaattttgttttgaagtttgctgctttgggctaaagtttctatttttagatttatttgtcttcttttttctcttattttggatttttctattgtgtattaggaacttgatcgtcttgtcagagaattgtatacttgtgtaagattcagtttgatgacaaaaaagattgagatttagcattaggcatgcagaaatttgattagaacttctggctttgaattttatgtatgttttgttattcatctttgtctaatccattctctaactaatgatgtgtccatatgcatgcatgtaaattactatatagtctatatacacgcaagcaatcacataatctggactgctgatgcaattctgaggaccaaccaaaaagtctgggaggagggatcattgtttatctcaacataggaattgaaagtcgtatgctcatttcctttgcaagtcgaataggaaaaagcatttagggaaagaagaaaagacaagatctaagtgttggtcaattttagcttagcaacctacattagaagttgtttgaccgtatgatgccattaattttgaatgtatgtactattttatcttcacatattttaaatgctgcaattttatcacatcttccatttgaagttaatctgcacggtggttgcagtatagtcagatcagcatgcttattttatatctttgaactcaatttcagtatatttatttgcaaaatgacaggtacttagctgaggccc

SEQ ID NO: 51509 - DNA, 614 bp, Ricinus communis
  Intron number 2 from transcript 29986.m001610 (locus 29986 .t000026) derived from phytozome v7.0 (chr-ID 29986; pos 1 51621 to 152234 reverse strand)
ttcgtgagagagaagtagaagatttattctacaaggtaatgcagtactggattcaatttgaatgtgtattgtacctttatgtggtgtgtctctctctgtatatggattaaaaaagcttcacagtgaataaagctgtatggttttctttttatatggagtttaaactggtattgttgtgctaaaaaatctgaatacatgtaagtttaatagtaggctaaattattaaacttaaaacaccagaatataagttaaagttttcaggcagaaacagatgaagccttgcactttgttcttgtagttactgctaacatggtattagaaacagacaaagagtaagggttgtgattaaaattgataataggattggctcttgtcattgttgttatcaatagtttcttcttgagcgatcatgggtgcaaggatggagtattgctgtaatctttatgagtttctacatatttgttaagaaattcattgatgttattagcagtcggtcacttttcttgaaggttttgacatgtaggagttatggatcacacctgaaccagtttatactttgtttaattgaagttgctttttttggaatatttgaatatcaattttttatttgcagt

SEQ ID NO: 51510 - DNA, 315 bp, Ricinus communis
  Intron number 1 from transcript 30131.m006920 (locus 30131 .t000071) derived from phytozome v7.0 (chr-ID 30131; pos 4 01064 to 401378)
ttacttgcagcaggtaagttcatttagagttaaaaagatagattaaatacagtctgccttttatgcttaacattcaagaaattaataattctattaattattatcaacttagctggtccttcaatcaaatcttaaacaaaagatctgcattcgttttgttctgttacataagctactaaatctaaatttaatagacttttcattcaaaacaatgaaacagcaaggaattgcaagtgaagacaaatttagaacaaagtaatagaaagtgtttcaccgctagaaggatcagccacgctaattgggtaccagctgata

SEQ ID NO: 51511 - DNA, 247 bp, Ricinus communis
  Intron number 1 from transcript 30005.m001240 (locus 30005 .t000006) derived from phytozome v7.0 (chr-ID 30005; pos 1 6341 to 16587)
ctcaacttgtaattggccctgctggtagtggaaaggtacttttttttccttttctttcttcacattgtattttgttttattattatcttattgctaattatgtcataaccatgattcaaaaactgatttcttggacattttcttttctgggttcggttttaatgcttttttgatcctgatcgttttgtgtgtctgtttttgttttgatgcagtccacttattgctctagtttgtatcaacactgtga

SEQ ID NO: 51512 - DNA, 745 bp, Ricinus communis
  Intron number 1 from transcript 30076.m004449 (locus 30076 .t000013) derived from phytozome v7.0 (chr-ID 30076; pos 6 9584 to 70328)
aatgttagtaattttactaaaccgttatgtaaggaataattatgtataaaaaaaaaagactatttatgacacaattaatatacatggattgcatagaataaattcatatagtacaaaaacaaaaaatgagttttgccaaataatattaatgatatttggtaaccaaaataaatatttatatatccattaatgacatattatttcaaaaattgaaaataatatctacttctaatatccaatcaaaattccgtctagttggatagagatgtgaagcatctttaaaaaacgaaagctctaaataatattagagagatttttatttagaaattcttatttgatttgttgtatatatcacaactaatatgtataaatattttttaccttaatattaaatgattaaaacatacttcatcatttacaactaacgaacctgttttaataatctatcagtttaccctacagcagcagaagcttgacaagaattttctataatgttaaggtatttctctagaaacttctctctaatgctctccctgtgggtgctcttagatatattcttccttttccctttctctcaaagaatctggagaatatccccaattaggattcattcctggggtttttcatttatctgacattgtggaagcttaggggaaaattttgaaagatatccagcaccttggtgggaatgaatactccatctcttgtttgctatttacgctgtaacatatttggaaggccagaa

SEQ ID NO: 51513 - DNA, 303 bp, Ricinus communis
  Intron number 1 from transcript 30005.m001262 (locus 30005 .t000028) derived from phytozome v7.0 (chr-ID 30005; pos 1 69365 to 169667)
tgtaatgtgtttgtggctacgtataatatgcgttttcttttttaatcgattgaactgaatactattgcaatcttccctttaaagggccaaaaaattttacaagactgggtagccacccaacaatccactgggaatcaaacgcttcagagttgctgaagctacccagtcagcaggtttgttacaacatctaggagtaaaactaaccctgctagagggaatataagactaacctaataaaatatgtgatttgttgagtaatttattgcagttcttattatcctattgtaggtgggagtcctcctg

SEQ ID NO: 51514 - DNA, 1027 bp, Ricinus communis
  Intron number 2 from transcript 29848.m004491 (locus 29848 .t000047) derived from phytozome v7.0 (chr-ID 29848; pos 2 55181 to 256207 reverse strand)
ctggaccgtggattaaaagttgatagccttagcaggtattgatacgtatgcttctccttgtttataattcatcacatgcctttgattgggattgatgcttattttggtccacgttcagtttatgtgtctgtttgtgctcaagtagtttatcaaacatcaaggttaatacatagaagtgggcttcttatcaggccatgtagattcccgcaatgtgatcatggatttttgaaaattgaaatatgcagttgcaaggccatctgatatcaaacaagtcaaattacaggagatatttatgtgttttattgttataatcagaggcttttattcatgtacttaaattgacagatctaggttgtaatctaatgaaatgtgcttaatctttatccgcataacttggttgtaatacttgctaagttatgtcatatagattggaaaagtgctttgccacatctatcgagacagtttgtatgcctgtcttaagccgtctttattttccctcaggaatgaattatttgtttagcgactcgttacctttttccatagtcacacaatagtttttactggataaactttttagttgcattttaaacatagtctgtaataactaagaaacttttgattcatgattttcaacctcaaatagctcaatgtatttatagaccagttaaaaaaaaaaaagagaaaagatttcttagccttcgtttgctgaaatgggtgtgaagcctccatcaactttgcggcttttggctcctccatcaagactgattcttactatcttaacgttgacaatgtggccaaagctggctagaggatacattctagctgtttgcgcttgccagtccagaatttaaagttatgggtcattattgatcgtggagatgtttgttgtacatgagaagctttgacctttctaaaatatgcaaagaatcttttctagtgtagacagtgttgtttttgttggtttccttaatcttaatgtttcttcctttcagatctggtaggtcatcagtacgtgattcttgggcca

SEQ ID NO: 51515 - DNA, 847 bp, Ricinus communis
  Intron number 1 from transcript 29848.m004649 (locus 29848 .t000205) derived from phytozome v7.0 (chr-ID 29848; pos 1 134855 to 1135701 reverse strand)
aattggtccggatccgccacgattctgatagtggggtttgttttcttagctcacccatttcatttcaaagctccattcttttaataaaaatatttgtttttgactgaaggcctatgactttgctagcattttaatgtggatctgagtattagcaatctttatctgagttggaaaattggtgagcgggtctttattaatttttccttttaacaattgagaattgactgttaactggttggagtgcattattatgttgggatctagctgttagcagtctaaaagtgagttttcagttagatgtggagtttttttttcttttagttagatcagcagtcatttctttaatatcttgatacaaatccgtttgattttcattttaataaccatttttaaagtaaattcttattgttattgaatgctctgtggttttttggtcccgagaattggttgatgtgtgagagtgacttctgaactcaaaactttggactttttgtggttcgtttagataaactttggtatttgatttggacttgaacattgaagttagtcctttcatcatctatttgttttttacctgaaagctgaattgtctttatcattgtgattttgattcctgaatcattttaaggaaatattcccattcggttgcttacttctcattttctttttttgagaaataatggcttttggtgtccttaaaaaccaatatcatacattaggcacgagcaatattggaatataatggtgatttctgtgctcatcgcaattatcacatagtatttgtttccagaattctaatttttccattgtcaacgactaatgcagcccaaacccctcaagaatctga

SEQ ID NO: 51516 - DNA, 827 bp, Ricinus communis
  Intron number 4 from transcript 30065.m001137 (locus 30065 .t000002) derived from phytozome v7.0 (chr-ID 30065; pos 2 19576 to 220402)
ttcggaaggtttgtatgattatgaacattgaaattctcctctcccttgcacatttttcattcagattttatgcataaaatgtagtccatgtcaggatctgggctgcttgggttctcacctttccggagctagtataattaatacaatgtttaaacaggagtagataattgatagaaataaaagaattcgtcaggcttctaaagtttgtttgtccagattttctgcacaaagttttcttgctcaattttgcaagcagtttcttaggagttgtcaaaactaattctttattatataaatgaaccagaggacagcatttacaagcatggcatacgcaatttctgttatagcccaaattcagtactttgattctcatgaccccttgactccttttttttttcgtttttaaaaaagaatttttttttgtaattaaattgctagtgttgtcatggtcctgagagttcgacttcttgtacattgctaaaaaattttcacagtttgttaagaatcctagaagacagcattttggcatgcttgcattaataaaacctgtagaacgtaccacatcatggtcattaagaagctggcctgttggaggaaacctgcctcatcctccactattttgcagtactatggcaaaactgtccttgccgtgttttgctaacaagtggggatggatatttcttctgtgcaggaggattagttttaagtcctttcctatgcttagcttaaaataagccactatgatgttttctcgagttgaatttactagtgagtttgaaataagaattttctattgttgcagtatttgcctaaattccagcctgaaa

SEQ ID NO: 51517 - DNA, 875 bp, Ricinus communis
  Intron number 2 from transcript 30005.m001261 (locus 30005 .t000027) derived from phytozome v7.0 (chr-ID 30005; pos 1 64716 to 165590 reverse strand)
actgtaagtttctcattttgtttttcttctcctaattgaggatatgttttcagttgaaaactggaagagtggaaacgaaatttagggcaaactgttatttggactacattttttttagaaggaggagaatcacaagggaaatctgaaacatgttcttgttaagggtgaaagagtaacaaagattcaaattatcatatagatagcaattagattgcttaacggattttgatgcctgccaattatgcaagtatatgtgtcatatatatttgtcaaatgctcattccatcaaatctatttgaatgcagaattcatttattctacagattaagcaatttattatggtacgaagctaagcatttaaccacactttaaagcacctgcttttcttttctttttggattttataatgggagtgctggtcagtgtggttggttattgggaaagataagacctttatatgatgaattgatttttgatttattacagaaatttttttgaactgcatttattggagatatcgttttatcttggtttttttatcatgtttgggaggttatttaacgagtctgaatgtctgttttcttaccctaattagtcctacgttgttttcagaatcttctctgaatgattccttggtcttttctctcttttttctttttgttcttttatgatgctggtttaactacagaaagatataagcttctttataattgggagtaactgtcaaaccgcatctatactataatgtaccattgcatcatgtggaatgtttgtgcaatatactgcagatgcatgcacgtgtatcatatatgctgactttagcatattatgtgtgaaagtaacgggctatatcttttattctcagaaaaaggaaa

SEQ ID NO: 51518 - DNA, 695 bp, Ricinus communis
  Intron number 1 from transcript 29929.m004742 (locus 29929 .t000245) derived from phytozome v7.0 (chr-ID 29929; pos 1 398618 to 1399312)
gtgatcctggcaggtaactgtttcaatttcaatgtcatttaagtttaatttgagattaattagttgagtatatgatttgtcaattttgtttgtctaatgatatcaagtttttagccttgtaattgccatgttagattaggaataccaataaaataataatggtgattgtggagtggtttttgatataattatgatgtcttttatcataattctttttgtttatcgatgccatgggaactagtatatttcttttacaactcaaattattgttgaccttttattatgataagttgaaaagaatggccttatagccaattgttttttgaaatttcaatggatataacttcagtcaaatttgaggttttgaaaagtagattaaggacaaattatgaggtttgaatgctaactgatgataggatcacttgaagtttcgtatgtgaataggattcattctaaacacagtaaattgtccgtattgttcccacatcatgaaaccgtgtgaacgtgcgttgtaaagtggaatccgattttcaacttcaattgattttcttggtggaatcactctggctgcatataatgatcaaattagctgcatgaatatagttattaattattccataacttctgcttgtggctttaaatttttttcccctttgatggagttctttaccgacttgttcttgttaccagaacag

SEQ ID NO: 51519 - DNA, 587 bp, Ricinus communis
  Intron number 2 from transcript 29826.m000744 (locus 29826 .t000017) derived from phytozome v7.0 (chr-ID 29826; pos 3 27840 to 328426 reverse strand)
tatcgcctttaatcgccgtggaacccttctagctggtacgccatatcagtttgtatagcattcattactatgatatctcctgcattgttttctatttatattttcatcactctcttggtttgtttcatgtatggaagctgttgccttctagttgtaattggattaggccaatagttttgttttttctttaattaaaatttacaagctggtgtcaaaatactcaaaaagtatatctttttaatttattatcagatattctgttcggagtaattgtgtatgagtgacacggttgattaaaaattctgtatttgttagctggatagctagctaatatggtggcaccatgacacttccttttccttggagtatttatttaacatccttacctcatacacttctcatcatgattttatatttttgatatgatttgaaagagaagccatgccttgtttcatgtgctttaaagctgtagttaatttcttgttttccagtttttactcaataaagatacttttcaatgctgatggaagatgttctagcttcccagatattagctattgattactgattttgtctttcccagctgg

SEQ ID NO: 51520 - DNA, 412 bp, Ricinus communis
  Intron number 2 from transcript 30073.m002243 (locus 30073 .t000053) derived from phytozome v7.0 (chr-ID 30073; pos 3 83813 to 384224)
gaaatttgttgtaagttaaaatctcttgactactgtagttttgttggttagagattgtttcacaaaagtatacttatgtgctcagcttgatgaaattggggcccttgatataatttgatttggaatttcttgttcttttttatttttatttttttttaattttcaatatattgtatatagcctgagcagggctatctttctgtatactgttgtcttcttttctgttttaagttctttattgattttgtttgtgttcttttacttctagtaattatttaaatcttttgttagcctttatcttgagcatctttcttcttgttctattttcagtaaactatcatctgtttgtttaattgtaatttattgaattattttaggcaaaccaaaatccacaacataggggcaacacttg

SEQ ID NO: 51521 - DNA, 691 bp, Ricinus communis
  Intron number 1 from transcript 29897.m000363 (locus 29897 .t000009) derived from phytozome v7.0 (chr-ID 29897; pos 2 23192 to 223882)
gtgccaatcagaaccccagcactcttggtaagtggcatttgatagagggaaaacaaattagtgagggtttccaatttggtgtttttttcttcacagctctactcttgttttatatgttcacgttgtgtacattgcatactagcagctatctatttcgccgagtttatatagaaaacaatttgaatttatatataaataatcaaatttaaaaactgaatttgattaaatataattactttaattcttatttattttttttttattatcgaattatcattatttatatataatttagattacatagagattataatttactcttctcattgttaaggggttgaatgtatatgcatgcatactgtctcattattggatatattccagattccagtctcaaacaccaaatcatcaaataaatttcacttagtatcatgtagtattgtacatgaatctgcataggtataaacaatatacttgttggcctcatatttttaataatcatgcaaaagaatcattgaaaagcacaggataattatatgaaataatgatgtacagcacatggttagttgcactttataatcatgttttgatatggcctactctttctttctgtaaataaaaaacaattggtacaaaattacttatcaacaatactacaatcatatgttgttaccaggaggagcttgtggat

SEQ ID NO: 51522 - DNA, 689 bp, Ricinus communis
  Intron number 1 from transcript 29846.m000181 (locus 29846 .t000001) derived from phytozome v7.0 (chr-ID 29846; pos 4 670 to 5358)
tccagatcagtcaacgggtactcaagatctatttctttttcaatatttcttttgctaatttctttctagttttttcaaatttggtctcttgattggattatcatattttgaattttttttttagaattttttttctgtttctatttgcctctcgagatgctaactgagaactaattgatctaattaattagaattttacttagctttgttggaaatggctgttagagaaccttggatttaactctctttgttttttcttaaaatagaaattactatattcttcgatgtataaatccctcattagttttaacatgtcttatagattttaatttgcgattcagttatatatgccttgaatcagcaaaggaattttgattctacgttacgttatataattgatccgtcaaatttgatacttggaaacccataattttgattgtagagtgcttaattggttaaacattatcatgctgttctagcagactggaaattaatagtttagattccagagttctgtattttctgtttgattttttacttcttttagtttaagcacttatttccatacggtaataggaagtagtatggtcttgctgtcggtgttaagtgaggaagaaatggttacttgccttttctaagtaggttaatctaattgattttctaaaatttacttttcagtttactgggat

SEQ ID NO: 51523 - DNA, 885 bp, Ricinus communis
  Intron number 3 from transcript 29904.m002890 (locus 29904 .t000004) derived from phytozome v7.0 (chr-ID 29904; pos 4 4925 to 45809 reverse strand)
tcgcgaagctacagggactcctaggggacgcttgggtaattggcctttttctgttttttgtaacctatatgaaatgaatttttctcctagatgcttttcttttcttataatgctttttgtttgagatccttctttatttttcctttctttttttgtaaactgagcttttatttccatgtaatatagctctcgagaattgaattatactttgtataaggtgagagtaatctatgatgtcctgatcaaaggtctagagctaacccaggtaggcgtataaactgagtttttattttcatgtgataagtatcactgctacttctcagcaagctcaaacataattgtgtaggataagattaaatgtgactatgcattaaagttacattttatagaaccttatcacaattttgatgcgtgatcaaagatgaatttgcttcattcttgcgttggcttttgacctagtactggtttctatcttcattctcattgctgattgcatgacagtagccattgttatcttaggacgacatgactgacagaaaaattggtgctaccttttgaaactttgtgttgaaaccttttcttcccttctgaatgttgattaatactattaatcttcttagttttgtatcgttgctttttgattttcattctgataacatactactcggagatttttttcagtgctatggtttggaattattttatttcctctaaatctgaacatatttgttcattaaacaagctgcgttttagagtcaagcttttgttatgaaaagcatattttatgtccttttcacatggaattggtatagggctctaaatctattttgatgtaaattgtaattaacagctgcagccattttgtgcaccaactgcaaaacaaga

SEQ ID NO: 51524 - DNA, 704 bp, Ricinus communis
  Intron number 1 from transcript 29904.m002890 (locus 29904 .t000004) derived from phytozome v7.0 (chr-ID 29904; pos 4 6259 to 46962 reverse strand)
tctattgtatatcgccgttttcgtctctcttttgggtaagctctcttactttttcgtttatatgatttaacttgagtgatttttttttttaattattataatgcagatgcctttctttctgcctgttaagatgttcaaaaagtttttaaattttttgggtttaaagtattagcatgtgggattgttgcaactgcttattgggtttatgcaatttttaagaaattaacatgctacttttgcatctgggtaatttcagctagttttaatattaaagaagttttatttatttgtttgtttatttttggctttttttgtttaactatcagcatggtggaatcattgatgatgcttattgggttttctgtaattttacgataaattggcttgctttttttctttctttccgtagtccgggtaatttaggtttttatgttgaaaaagttttgatttcttttaagggtttttacagtattagtgtttggaatgctaattgggttcttgcaattttataagaaattaactttttttccctgggtgatttagatttttatggtgaaaaagttttgacttcttttcaaaaggatttttacagtattagcgtttggaatgatatctgggttcatgcatttttgcaagaaattaacatgctttttttttttttggtttgtttgtttgtttggtattctagggtttcttctgatttg

SEQ ID NO: 51525 - DNA, 184 bp, Ricinus communis
  Intron number 1 from transcript 29851.m002452 (locus 29851 .t000094) derived from phytozome v7.0 (chr-ID 29851; pos 5 89088 to 589271)
cctgttgcgtaagtgtatattttttgcagtataaaattaatattttcttttatcaatctcttcttgattctagacgatgcccttttcatatagattttattttttatattttgtttttacaatcatgaatcttatatttttatgtatttttgatgtaacagtgcaaggaccataaaaacaacta

SEQ ID NO: 51526 - DNA, 776 bp, Ricinus communis
  Intron number 1 from transcript 29908.m005968 (locus 29908 .t000019) derived from phytozome v7.0 (chr-ID 29908; pos 7 66643 to 767418 reverse strand)
atactcataaagaaacgctatttctgttcaattgggtaagttccttacgtattcatggtaattccatctgtgaagttataatttttgatttttgtgttatatgcatccttttattcatttagcaaataatttaaatttaaatcagcttgttagcttaattgggaagatgatcttatagttgcagactgaattgtgttgataatttaaatttgaattaatatattatggcatttctgctgttggattggatccccaattttccatttataggaattgtacttagtgattgaccatcagtttttagggatcattcaaattagtgatgtattgccttagtttgtaggaagtgtgtttagtttgcgtaggttgctgactgagctgttctccacataaataaaattattgaaagattttaaatttaatagtgttgtcctcattgcatttatcataattttctgagctgatatgaggactaacaagggatatggcagcgtaaagatgccgtctcttatgttagtctttcaactttgtatgtatgctgttttgatttgattaggataactagatcactgatacacaggtaccctttcctgttgatttgtgataagtatgataaagtcttcccacttcaccttatcttccaaattttctattttgttattgggtttttattatgagatgagatctttttataaggaaagctgttttccacatgtcatattagtttcatttttgtgccagcacaatctaaacctcaagtttttcggcctcgcaca

SEQ ID NO: 51527 - DNA, 533 bp, Ricinus communis
  Intron number 3 from transcript 30076.m004545 (locus 30076 .t000109) derived from phytozome v7.0 (chr-ID 30076; pos 6 55400 to 655932)
agtttttgagcgtctaatcgagcccttttgttcaggtataattatcttgtttgtttgtttgttttctctttccatatctcagtttgtgattgttataatctcatttcaaaaattccgttcgcgtgattgttgttaggttaggtctttcccagttgaaagtgatgcatttcttttggggtttgtttgagtaggattcatttgcggaagctgatatttcagttgtattttactcctggtatgaaattgtagtattgcatgaaatccattggactgatttctatttaatccttcatgatcatggtgttattgtaacattgagccgtgtaagatgaggaatttgttgctgcatcatccaaatcgcattaatcaagctaactgcagtcagttagttccttgtgacgagttacccctcaaacttatcattttgcaaatgaaaattcttcaatgttctaaaagttacaatacaatatggtatagtttgaatgtttgtggttactggttttatctaaattttttgttatgtgcaggtgttt

SEQ ID NO: 51528 - DNA, 857 bp, Ricinus communis
  Intron number 2 from transcript 29867.m000424 (locus 29867 .t000005) derived from phytozome v7.0 (chr-ID 29867; pos 1 93698 to 194554 reverse strand)
ggctaaacatttttgttgcccaagtttgacctgcttttatgtttctgttgtaaatgaaattgcctacttctcttgcatttatgtggtttatatattatatcttgccagctatgtttacaaaggttatgcacttagtatcagataattaggcaataggcttaacatttgaccacctttctcccatttcataaactgtgagattaaaaaggaaaatttcttttgttgttccttaggcccagtgtagtatctttaagaaaacttcatcgtagtttgttttctgtcttctgaaaatggttttgttgttttaactcctcaaagttacaaataaaactatctcggttgaaaaaccatgtttttgtggtttgtatgtggcttttgaaacagttataatagacttgttgaataagcctgcaacaattcaagtattctaccacacagaagtggcaaattgtacatggtgcatccttagctcagtgaacgatcgaaagtttgaaacaatttgggagatgtcagtttccaatttgaatccatattttgttacccataatatggtctcaaaaacgttgagaacaattcgtcttcttgtattataatttgaattttggctaaaatggttcaaaattttagacaacccagaacaaatgacaaacaaatccactatctgtttttatttgttttatattgatacaaaaggccattttgttttgaggggttgtaataggggcatttaaatctaaaattaattggcatttcatgatgtagtcgacttgaaattgtttgttaaatgagattgcacatctctctggtaattgcattgttattcgttttccttttccttttgttaatgcagatctttg

SEQ ID NO: 51529 - DNA, 846 bp, Ricinus communis
  Intron number 1 from transcript 29841.m002856 (locus 29841 .t000120) derived from phytozome v7.0 (chr-ID 29841; pos 7 59225 to 760070)
gaaaggtttactttgagagtaaagttaagaatctataccaagccctcgtagacttcttttttctttcatccctaagtaaaggtcaagaatcttctcctttccaagattttaacaattaaggctaagaatcttttgatcattttcttgagaggttttatggcatacctcaagagcaagaattggattatcatccaaagggttcatctttttgcttgcacttttcataggttacaaaagactggaacataccctctccttttttacaaatggaatgctctttccttgatagtttatcctccatcagactaatgggtttctctactttctttctttggcttcttctcattttctctgtcatcttttctaacagtatggattcttaatctttctctttctgttttcattttccttttcaagatttttatcgagttaattacatatatcattgttatgaattgtattgagttgaatgagccatttttatgtcatgacattaagtataagaattcaagatagaattcaacattagattgttggattttgttcaaaatgcaccataactgttgccttttgctctccgttatgtgaataaatcttggatgtagcctttaattttataagacatgactcaattattgtcggcctttatccactagatcacttcttttctttttatcctcattttgtggatattagtataaaccttgcagaatgggaaccaaatggctcttccgtaaaagcaaaaatagcagttcattctgaaactatgactaacgttttatcagcttatcatggtttggcctaaaagagctttaattgtcttttttgttgcagttttgacagcgc

SEQ ID NO: 51530 - DNA, 466 bp, Ricinus communis
  Intron number 2 from transcript 29822.m003338 (locus 29822 .t000013) derived from phytozome v7.0 (chr-ID 29822; pos 7 1616 to 72081 reverse strand)
ctaagtgtgtctctctattcacttttttgttttgttttaattttgtttctaaaagcaatttatcttattttaattgagaatatgtgttttaataaaatatgtgttttaattgtttattatctgtagaaaatgaattgttggatccggttttttcatttttttggcctgtctgctgaaatcgagtggttacagatcatgattgtataagcatagcacaggttatgatgcaattaatacataaaacttacagaagatatttctcatattctgtgtataattttatgctagctagttgaatttaggaaggtttatttcgagaaaaatgctgttttgagacattatgagttctttaccttttttcttttcacatgtaaataaccaaaaattattcatgtgccaaaattgagttttattttcaattcttggtgcagtcggccttggctttgctactggatcctgcactcaa

SEQ ID NO: 51531 - DNA, 767 bp, Ricinus communis
  Intron number 2 from transcript 29840.m000625 (locus 29840 .t000023) derived from phytozome v7.0 (chr-ID 29840; pos 4 21932 to 422698)
gggtgttgcactgattgcccctgatacatctccaagtaagtgcgcattaccttttagaactatcagcattcttttctttttatatatatgatctaaatagtcatttagtaatttgtgagtctattactatttcactctgctattattcaccccatgtgagactatgttgttgaccaaccagaagactaagttgttgaccaaccagaagactaagttaagtgtattgattgctcttcttgacgcccatactgatgttcctatgtttgatatttttctttctcttttagaattctttggatcagaagtcccagggatttagtaagagaagcttgtgttgcctgtctgcatgcgctcagttcatgacacatggttatatcaatgcattaacttcttttattattcactggtccagccaaaaatatatattttctattgcctgaaaccaaggaattttgaatgcttaaatagttctgctagtttttgttgtctacagataccgccgtccttggatttcctaaggatctatatgaatttaattgtttcgtgtcattaataaagcaataatttataatgcttaaatatggttttataaaatcttgattagaatggaatactcaattacttgctgttgttcagtgtgcttcaatttcttttcatagttatctttagaataaactataagtttcagaatttgaatatgctagtggacatgatccagaatcctttgtggtgacaagttgttttttcttgtattgcaggaggcctga

SEQ ID NO: 51532 - DNA, 232 bp, Ricinus communis
  Intron number 1 from transcript 30128.m008568 (locus 30128 .t000029) derived from phytozome v7.0 (chr-ID 30128; pos 2 538939 to 2539170 reverse strand)
ccttctctctctttatttccctttcaattcctcaggtatctctcttgctccacatttccctcgatttctccgtttaactttacactttcttatttgcttttcttttcttacaaaaaaaatttaatattttttatcattctttttaattttataataaatcagaaacttttgctttgatttttaatgttgaatcttgctcccttttttttttttaatctttcagcagtaaccc

SEQ ID NO: 51533 - DNA, 968 bp, Ricinus communis
  Intron number 4 from transcript 29826.m000730 (locus 29826 .t000003) derived from phytozome v7.0 (chr-ID 29826; pos 8 3298 to 84265)
cccccaagtatcttgcagaagcaaggtttgcatttctgttgttagttgcacgttgaattatattccaatggtgttagaagtttaattgcacttttaagaggggctccttgtgaatgctaagcttacatgttaatttcaactaggttctacttggaagttgattgtggttataatggtcaggcccgttaatctgtgtctcaaatccatctttttgcacatatgaatagtaatactccaattccattttttgttacttcaagtttacttgttctctgaatggtattaaatccaccttcgcacacttcataagagattaagtccacctttttttttttttccttttctacattttccttcctttttcaagtccatgctttttgcgattcatctcaggtcaaatctactctttgtgttctggcacatataatcatgtccatcttgcattttcatttcatgttatccattcttttgttttggtaccttaaatgcgatcaagctcacaactttttccttcaaggacactcttccgtgaacagaaacaagttcaccttttcagtttcaagctcttcttatgcggtattttgagattaaatgtggtttgcttttttcattctctgaatgcactctaagaatgatttattaattggctccagcctgccctttctctaacaaggagttgtctcgggttaatcacatatgatatttcttctttagctatgttactgttcactcctaatcataaaaaaaagctctctgagtttgagtaagaagaggttttcattttttgtacaagctgtatttcttatatagtgatttggtaatgtttgtagcattgctgcttcatggttgctgttataatataatgcgctagctagatgcttttggatattttgaattgtagtgcttcgagttcattttatagtaagaactattccatggtccattcttatcctgttctcgaaacagaa

SEQ ID NO: 51534 - DNA, 814 bp, Ricinus communis
  Intron number 1 from transcript 29844.m003165 (locus 29844 .t000011) derived from phytozome v7.0 (chr-ID 29844; pos 6 7670 to 68483)
gcggcaacaaggtaaaggttcatctttctgttccatttctctggagcaattttgttttctttattagataattaagactaaattgtccaggtcatgttcaagttaattcaatcaacttggtttattataatacttaagaatttagtatcttgtagacacgttattgtagtccaattggcttttttcttttttctttttttaaaaaagggtagtccatttattagctttagtttttataaattttgctattataaggcaatttaatagattttatatctttcttcttgtaggaaataattgatcaggcgcgattatacttgcccaatttagctttccaagtattagaagaaaagatcccattatctgaattttcctgaatttgttcagctttccgagtattagaaacatagagacagaaaacttaatcctcttcagtctctagaatctagttctgggataatatcattaccacaagtagctctggaatgacgttctttaatcagattatcttattttaacattatctgtctgctaactttattttgaaaacatgagataaatttataagcatttgaaattgtgcgaatgtacagctttttgtattttagttttttgataattcaagtaggtgttttactccctcagcttttttaggatatagtcatttaacaatgtcagacgtggcacactcggttgacacatcacttcaaaattggttttccgagcgatgccaatgatatatgtttggtcagaaatttttgatatttatcctttggcaggaaacaaagatttgaaagggtgaccaaggacttaa

SEQ ID NO: 51535 - DNA, 468 bp, Ricinus communis
  Intron number 1 from transcript 30005.m001297 (locus 30005 .t000063) derived from phytozome v7.0 (chr-ID 30005; pos 4 15235 to 415702 reverse strand)
gcaacagcatcaggtatgtttttagctttcttattgaatgtaatcgatatatttgatatcgttttaatttgcttaacagaagtcatccatgttattaattcggcttctttaattgtgaatttttgttgcaatcggctgattaagatcattgagtttagatatttatttaggcttttatggtgattatgatttagggcatggatttcgatcaaaattaagtaatatttagactgttttgctttcctctgcattaggtattagaaaggggaattttctttttgttctttgttggacataatttatatagtgttaaatttcttttctttcttttttaaatttttttaatttgagttttataacttatttggatgtttatttcagtggaattgtaatcgggaaagctaagttaattatgttatttgcatgattgcagttgcgtttaagtctagggaggaccataggaagcaa

SEQ ID NO: 51536 - DNA, 389 bp, Ricinus communis
  Intron number 3 from transcript 29913.m000155 (locus 29913 .t000006) derived from phytozome v7.0 (chr-ID 29913; pos 4 2049 to 42437 reverse strand)
atccctaaggtatatccacatttgatgatgacttttttcctaatcctactctaagtaaaccataacttttgtatcttcatttgatgattcatttgtgtttgttgatatactatttgagttttctgcacgagtattatttgtgcactttttcttattactactatttgcagtaaatccttgacttgaatcttctgaattttgtgggttcaagaacttctcatattgtgtgattttgaaccttagtaactttcctatagagttctaaaacgactccaaaataagaacagttcgggatcaagcatgcttggtgcgttatttgaagtatgttaaaattgctgaactttgttcgctttgaataataatgacagtattctgtgctctcgcagttc

SEQ ID NO: 51537 - DNA, 842 bp, Ricinus communis
  Intron number 1 from transcript 30138.m004050 (locus 30138 .t000224) derived from phytozome v7.0 (chr-ID 30138; pos 1 522652 to 1523493)
tctttcaagttaaacaagaaaaaggtacttgctttctttctttttttaaggtctatcttttgatccgtgtgctgcatgatgctttttgctattttagtataaaactgcatgtgtatagtataccgtgctattgctatttactaaagctgttattctgtgaaagctgcttatgaaattaattattgtacagacaagctaattactactattgctgataaatatatcctattgttataacttaaattcccaaagtgatttcactgtgaagagtaatttgttttataaatgtcatttagatttcttagctgacaacttttttctgaattttaaaagcattttttggtaatgctgtttgacattcttacaaattatatgttatgtttcttattattcgggatcgttacctgtttgcgattctagtttgcttcatctatctcacgacagctacttctttgtatttgtgctgaatttgaagaataattgctattgctattgtttttagcagttcagatgaatcttcaagttcttgtagcagactagcattggctgatgtgtattttttctgtttctagtgttgaaaatgaacgccaacaatgatgagagggaatgggatacactcgctgggcaaacttaattgccattttcttgcagattttagtgtgtttccaccatgatttcctaattgtcttgctcattttgtccatgacctttttatttctgcccagcgtaacatgatttgttcctgaggtacttgactctttttcgtcgagctgacatatgtttgcttcctattttatcaagtcctaggttcagaaggtttctcaaggcctgctggggaccct

SEQ ID NO: 51538 - DNA, 587 bp, Ricinus communis
  Intron number 1 from transcript 29930.m000629 (locus 29930 .t000025) derived from phytozome v7.0 (chr-ID 29930; pos 4 21564 to 422150)
cttcttcctcaacatcaccactcctccatcaccaggtttatttatttatttatttttcccctctcttccctttttctctcattccctattctttccagtctgtgcatattaggaagataataatcattaaagagaagttacagtttttctggagtttggtttccttctccatgtatttccattctttgaataatgctggaaaataacattttatccttagaatctagtactgaacctgatatcatcgtctctgcctattgacattatttacttctgggattcattatgtgtttgttttctcagaaacttttatcaagaaaatagattatagtgttcaatattaagtcaagagttaagactgaaaatggttataagttttgactagaaagaaattgtcttttagtttagatgtttagttactttagaaatccggaagttgtttataagtttgtcttactagagattgtctataggataattatccctggaattttatggggagtatgtatggatgaattaggaatattagttgcctgtattgagattgtataacacaatgcatcttatacattggtagatttgtgaag

SEQ ID NO: 51539 - DNA, 893 bp, Ricinus communis
  Intron number 2 from transcript 29930.m000629 (locus 29930 .t000025) derived from phytozome v7.0 (chr-ID 29930; pos 4 22239 to 423131)
tcataaagcgtacactggaggggaaaccatacctagtaagagcgatgatggcaataccattcttgtttctaaatcccaattgttgtttttttttttccccttttatggttatatttgtaagaagatgcttgactacattcataaatcatatctaaggttggtatcaagttttatattggatagaaaaaactttgctttccaaaggtagaaatttcattcgaactttggttagttgtctgtgcaaatcatggtcactgtagagctacaagagaagtgtcaaatccaactagcataacttggctatcaataaaagtagttttccttccatgcctgcttaatttagaaatttttagtgacctatcccctttcctctgtcttcactagcgtagattgaaatttaaactatacttttgatttcctgggaacttgacaaggtgtgtatgtgaagttttcccattcttatgtgtactttgtagggatatgaagagtcatggatggagatggtttctagttagctgatgttgtgatgcttgcttcaaacattcatatgttttctttttttgtttttcatttatgttttggactcattatttattggaatgtcaaataggaggttatttgttgtgttgctcatgattctaacaaaatgttgaagttccaatagttaaggaaattaatatcatcttctctctttctttcttcattcctttttgtgatttatattattttcttccgtttttgaattgacagtgacagcttctatcttctttagtgtgaatatgatgatggccacttggtataatagttttcagtgtatatcacttctttctattacttctaatttatggtaatgttttctacaagttgcaaacttttccatgttgttttcagga

SEQ ID NO: 51540 - DNA, 545 bp, Ricinus communis
  Intron number 1 from transcript 29912.m005495 (locus 29912 .t000221) derived from phytozome v7.0 (chr-ID 29912; pos 1 454477 to 1455021)
ccactgctgccgccgcaaccgccagtcagggctatgtaagtctgttattattgttgtgatttttttttttgaaatgagaaagttttgtttcttttctgttttcttttcttttcaaaaaataaaatatttgtaagatgtttgagtgtttcaaattaatttgtttgaaaatcttactgagggtttttagttgctgctcttgctattaacaatttaagattagcatatagttttgctttaaaagtgaaaagtcaatggtattttttgtgtgagagtgtgaataaagctattagcaatcaagttaagtttatttatccggcccatctctagagaaatatatgacttcgaacttagttcttctacaatttatttgcgagattaaattttgcaccggtgacggcttttcttctgatattatttatagagaaacacacatgactactttaatactatggcattgtgtaaaactatgtattcatcaactttggtgctaacactacaccttttccccagaaagcctgaatcaccaaaatcaaagccaagaccaa

SEQ ID NO: 51541 - DNA, 1008 bp, Ricinus communis
  Intron number 1 from transcript 29826.m000734 (locus 29826 .t000007) derived from phytozome v7.0 (chr-ID 29826; pos 1 34946 to 135953)
cgtggaaaggtaaaacaaaagcttgaactaacttacattttcttttgtttatttatggccattgagttcggttataatgcaatgtatataatgtgctatcttaaatgttaaagctaactcaatgttttagcttgtaaactgcttgtgagttataaaaagttgactaaaagcgcgtaatcattcttgcgtaagaatttaatcccagtgaattgaaatttttgcaaaaaatgatttgttctcttttcaattcctttctttcctccaaaagttggacataattgaattgtagcaattacgagcttttcaagcatgaaagctgaataaatagaaccaaatggaattgaattactgcatgtttataaagactttccaaacaagagtgatatattttctgtcttttctgttgttggaatgtatgctatgtatgattactagaatgacaaattaatgacatgacatgtctccacaagttctagacttatcagacatttttagatgacgttttgtacattcttgttaatttatgtacaaaaagaagattttgttttaaatacgtgttgatgctcataaaatcttcaggcaagttgctgattctttcataaggatgataaatgaactattattaaagcaaccgagtctttaattagatgtttatagttttgattgagggtagagatctttaaattcacaatttgttcatcctattgttttggcagattatttggtaagttttgcctttgtctgctttagtttgctataaggtaacagataagcatctgccacagtatgatttccatgtgatgcaatcttttccagatgacatcactattttctttactgccccttgtgagccagttttatgcgatattttaaatactaagttgataagtgtatatatatatatgatgtcggttgttttgattaattgagttgctcctccaccttagaattggggtcccgtctgtaatggcatatgatgctttctttcttgtattcagggcacctctt

SEQ ID NO: 51542 - DNA, 497 bp, Ricinus communis
  Intron number 2 from transcript 29889.m003323 (locus 29889 .t000089) derived from phytozome v7.0 (chr-ID 29889; pos 4 29240 to 429736 reverse strand)
ttggatccgttccaaggactgctagtgaagaagacgtaagttccattatttgatgctcgggatgttgttttagtaattactgtggaatcatggaagcatatgatcgggctaataattttaaacatgtgtgtgtgtgtgtgtgtgtgtgtctatatatatatatatagcatgcttatagcgggaacctcgcattaacacgaccttcccactattgaccattggcaaagctcatatatggttcatctatggtttatggcccatttgagtttcacttgccacttcttgttccttcttctcctgttatcttcaagtgatagtgacctaggtatgccatatagttacattggtcatgttgcatcagtaattgtagtgtgagtctatctgcagtcatagcttctgtgattatataattaattttttttatgtttttcggttcaaattcctgtagcctgtttaacttcttatatgttgccagattcgccccttgtttgaacaac

SEQ ID NO: 51543 - DNA, 525 bp, Ricinus communis
  Intron number 3 from transcript 30076.m004567 (locus 30076 .t000131) derived from phytozome v7.0 (chr-ID 30076; pos 8 33975 to 834499 reverse strand)
tggagcttatatctgagttgaggtctatacagaaggtatttatttgtggtaaattgcttagattatcttgcatctttaaaacataactcaaagaaaatgcaaaggaattacatattaacaaggtgttcaatgtttcagtatggtcaattgatatttcagacttttgtaattatgaaaatggtaagaaaatggttctgtcttattgctgcattggccacagttgctcaggtgtcagagctgaacaaaacatatgtttgccttatcttctgtataaagttacatatctttgtcatgttgtttatggaccttagtctaagcttactctgcttagattaagacattctaaaaggtacacgatccaatacttcttgtatgcaagttttcaccatgactaaaaataataataaacaaatcctggtgattgaggaaatcacaagtcatttcacacccttccaatgcatcttatcattgatgaggtggaaggagaatcattaggtttgctttttgtgaccatgtaggagatcg

SEQ ID NO: 51544 - DNA, 438 bp, Ricinus communis
  Intron number 1 from transcript 30076.m004567 (locus 30076 .t000131) derived from phytozome v7.0 (chr-ID 30076; pos 8 34719 to 835156 reverse strand)
tgcatctcacctcttttctcgggcttactcaaccggttcgtttcgattttttgaattaaaggttttcctttagtaaatcattgcttctttttttcttttctagtttgaattgtcctgtacattatttttttggtgtgttgggttttagtgggtttatgatagttccttctaaaaccctagctttgttgtcatggtaatacttttcagttaatacgtggcatgcgcatcttttagttaagtcaaataaacttgtaaaggatgtgtttgatgaaaatattgcaggtgcaattttgagcatttcttaattcgtgtatgatcatttagctttggaatgtattagcaaaactcttagttttcattgatcatatttaatcttatttttaacacttttctctatttgcagaattgcaatcacatttatcccctgaccttattaga

SEQ ID NO: 51545 - DNA, 393 bp, Ricinus communis
  Intron number 1 from transcript 29917.m002021 (locus 29917 .t000090) derived from phytozome v7.0 (chr-ID 29917; pos 6 47212 to 647604 reverse strand)
agcttcttttactggtaaatctagggttttcttttggggttaatttctaagggttataaaatgtgaaaagtaataaactttataggccttgtttggaataagttactcattgaattctttcaaaatcatgtcaaatttggcataatttcatttcttttagaaagccttatcttctctaacttgaaagaattgaattctagcaaatattagttttccaaactagagaattgactaaataaaattcaagagaccgtttagaaatgcgttggttctttccccagaaacttgccttgtagaaaaagaaaacattatactttgcttttgattgaactaatagttttgactgtattgggttctcgaaaatgcaggcagaggcgcaagaagctgtaatac

SEQ ID NO: 51546 - DNA, 458 bp, Ricinus communis
  Intron number 3 from transcript 29912.m005314 (locus 29912 .t000040) derived from phytozome v7.0 (chr-ID 29912; pos 2 58712 to 259169 reverse strand)
gtgttgggttcttggtctcccacttgtataatcaggtatgtatttgttcaatatgtttattttcctgtttgcgtctaatagttgagcaaatatatggttgctgttctatctgtaatatgtgtagtattctcttcagtcaggttataggataataccgtttttgagttctgcatttggttgcaatgtacacatcccgcaaatttaggctctttaatgctacttgagatgccccttctgatagttggtctgtttagctaaatattttgattgcagaagttagtaaaacttgcatgtatttgctagattgtctgcattcaactaagcacatccttaacattgaggtcagaatacaacatattgtttgtgcccctatgtcattattatttccatacttctgttaaatttcatcgcatttttctttaggaaactaaagggaccagggataccagcaactgtgc

SEQ ID NO: 51547 - DNA, 311 bp, Ricinus communis
  Intron number 2 from transcript 29842.m003653 (locus 29842 .t000150) derived from phytozome v7.0 (chr-ID 29842; pos 7 40923 to 741233 reverse strand)
ataacaaagaagttaacccaaattcaagaattacggtaagttttctctttcaattcttcacctttatttttttcttttagttttttcaagaacacgcatacatacatcttaaaaaatttagtcatggaagtgtaactttttttagataacgagttaacaactttgcggtgattacaatcaaattgaatgtcttttgcaatagttgctgttaatgtttgattatttagtgatcaataaaagaatgttccttgacatgttattttcatgaattcatagttgcagagaagcctttccagaaaagggtctctgcg

SEQ ID NO: 51548 - DNA, 500 bp, Ricinus communis
  Intron number 1 from transcript 29908.m005991 (locus 29908 .t000042) derived from phytozome v7.0 (chr-ID 29908; pos 9 05939 to 906438 reverse strand)
tgcagctcattgtagaggtgtgtgcattaaatttgtaatttgttcagagttcttttattgcgtcatatccagaacaaaaacattacaggataactaggttcaataagggacatcctagcaggaagaatctcggtaaatgttattggttatcaactgctttgattaaaatcacttactcctgctacaatctccatgaaactgaagaaactttaactagttgattaaatgtatggtataagtaagttatatgctttaattgtgctgtatcatgtggtctagatccttgaagtcctttcttcaggcatttcaaaatattatgaacatgaattaacggatatgaagctctttcttactcttacaatatctaatgctatttgatattatatgggcattctaccttattctgatttttttcaaaaatgtcaatcagttacttaagaaagctgaaatcttgctgtccttgttggttgtctgacaaaattttgatttgtggttaccag

SEQ ID NO: 51549 - DNA, 471 bp, Ricinus communis
  Intron number 1 from transcript 29895.m000310 (locus 29895 .t000004) derived from phytozome v7.0 (chr-ID 29895; pos 3 7824 to 38294)
gcgtttagaagggtaagctttaatttcttttatgtttctttttcttcttttagtttttgttattctataattgctttaaagatctttatctgttgccttttctattcgttctgataaataataatattttgagtgttcgtgcggtttgatgctcagtcggttctatacttaattacctaaaaagtttttactaaaagcacagtcatgacggttattttaattgagaatattaaacttctttttgtttttagtgtttctagagagatttcgattctctttttttataactttatatgtttgattttgttgctgaattggttagttaacaaaattgatgttttggtttaggattttaatattaagaattttaatgatttaaatgcacataaattttaagaaatgcgttaagtttagttgcaattataggtttatgattacagtgagaattgaatgaattttgttgaagcaggc

SEQ ID NO: 51550 - DNA, 660 bp, Ricinus communis
  Intron number 2 from transcript 30108.m000236 (locus 30108 .t000003) derived from phytozome v7.0 (chr-ID 30108; pos 5 8765 to 59424)
ttgttcgattatacgaggtttctctcccttcctcattttcttctagtctttaacctattatgtatataacttgcataaaataaacttcttcaattatatttcttaatgaaaacttttgattctgctgcatctttctgtcatatctaggccacattagattttctggttcttcgcattttgctagaatttactgagggttgggtaagatgtccagcgtgtttgttatcaatgtaaattaagcttaacatctctttatggaatggtggaaggactgtggacaaagatatagtgactcattaaagcaggcttccgaggtgatagtcaaaaagttaaattattcaaaacaagaacataataaatttcctggaacaaacttgttaattctttttatttttattttttggtaaatgtgattatttctcttaatttagtcctcataaacaagattatatcttaaatgctattatcaattatcatcttcagtttgagttaaatcttcattccatgttagtgaaaatgggtgtttatatctctatgtaatagaaatataattatgattggactgcccaaaataattgttttagaaacctgaataaagatgtgatgtccatttctgcttgatgtaagctttatcagatagttatgtttcttttccaggtg

SEQ ID NO: 51551 - DNA, 645 bp, Ricinus communis
  Intron number 2 from transcript 29904.m002977 (locus 29904 .t000091) derived from phytozome v7.0 (chr-ID 29904; pos 6 07832 to 608476 reverse strand)
taaatacaccttctagccacaataataataataatgtaatgttttctttgctattacatgtgtttgttgtaagtcaatattttgtgtgtttcttatatgaaaaggagacaagtaattttatattttcttaggaatttatagttagtatgagctattctttgtcctgcttcagtgaaatgctgtaggagtgtttgtttataacaaatcatgggtaattgagttaaattcttccaaaatcatgtgacttttggcatgattttgtcttttaaaatgcctttttttattttctttttcttttaaattgaaagaattgaattcaattaactgcaaggtctacaaacatgagaagtgatcaaatagaagtgaattctttcatttctagactttccaaacaaggtgatagtaattttgtttaaattgtagcttcttataacaaaggctcgtcatttttccattgccataaccttaggaattcattttagcttgttgcctagaagttactacttgtttgtgtttatgcacttggaagctatcattgtttttccaggtttttcttttttttcttaagagaagtaaattgcatttgattgttgcattgttatctttgtaggaggacaaggacaaacagagttctactcatacagt

SEQ ID NO: 51552 - DNA, 581 bp, Ricinus communis
  Intron number 1 from transcript 29848.m004466 (locus 29848 .t000022) derived from phytozome v7.0 (chr-ID 29848; pos 1 06070 to 106650)
gccgtaccgatctgctcgctgctggtcgtaaaaaggtatttcagacctttcataacacttttggttgttttagaccttatacttttcacttcttcatccatagctgacactttgtgcaaacaaacaagcattcaaacttgaagtgaattagttctgattattagttgctttacagtatatttggtcttaattttgtgaagcaggttgtaatttaatagtcatgcacgctccctcttttctactattaattttcttccttaatttcggagtgtagtgttaggtttctacttgtccgattgtgacacgagattagatacagattgaatggtggatggagccgagaaataatgaaaatgaaatatggctttgttattgctctcttgaaaccaaaacttaaaaccttagatacgctaaattgttgcagtaggatctttttaaattggaccttgtgttctaacactaagattttcataattttgcttgatctttaactcatcaaacaaatagagcgtatatatgtgattgttgggaatctaatattttgttttctcatcagcttcaacaatatcgtcagaaaaaag

SEQ ID NO: 51553 - DNA, 486 bp, Ricinus communis
  Intron number 1 from transcript 29908.m006189 (locus 29908 .t000240) derived from phytozome v7.0 (chr-ID 29908; pos 4 60965 to 461450 reverse strand)
gaagagtgattatagattttgttggtgagtaaatgtttactcaatcaagcatatatatttagtctagtcattcttcatctatttgattctttataatatcaactattatcgattaaattttactttttgattgatctttttaaaaaatttactattaacattaaaataaataatataataagtcgttatagcgaataatttgcattgcaataccaaaatataagccaaaagtcaaagcatgatcggtattatttctaaatgccacttcaaatcttctatagcaattgctgttcatctacttaaatcaatcaattgggtagataagaacaaaaataaataaaagagtggagacagcccaacttaatttctgaagtgcagcaatatcgtttctttttgtttgatataaaacttcaattaatgacaatttcaacaaattggatttatttttcagctcagagcttcaatctcccatatcttagtgcatac

SEQ ID NO: 51554 - DNA, 326 bp, Ricinus communis
  Intron number 1 from transcript 30131.m007225 (locus 30131 .t000376) derived from phytozome v7.0 (chr-ID 30131; pos 2 355864 to 2356189 reverse strand)
gacgaccacactgcttttgctattgtttctctggggtaattaattgatatctttttttctttttaattattgtcctatcagtattttgaattccaattgtttatttggcttcttgtttgatcttttttcttttagtttcagataagtcttcattattttttgttgtttacttttatcttcttgaattgagaaaaaaaaaaaaaaaaaagaatcatgtccagagtttctatgcttaattaggcgtagagaaagagtctgcctcaatgaattttgttaaagggggtttcttctgcattgtttatatgttgctttcgcttcttttcagg

SEQ ID NO: 51555 - DNA, 948 bp, Ricinus communis
  Intron number 3 from transcript 30131.m006960 (locus 30131 .t000111) derived from phytozome v7.0 (chr-ID 30131; pos 6 44474 to 645421 reverse strand)
ccactttaccaaacagctacatttaagcaggtaatgtcgatgaagtatttattgtgttccaaatttgtgctgacattgataattctattgttggagtacaagagagaataggctagatgctacatctttagggatgtataagagggtgcagaaagagagagcctgatttttggcggtagctttaggggatagtggaggtttacaatattgcttcatccaattcactcacttaatgggtttgctttagcagtgatgggtttcattttcaaattggggtttacttttgttgacttctgccctttttctccttttcttttctttctttttccacacattcctaatgtatcaagaaaaataatctcaaatttctgtatctgtaacttgtacggttgtgaggagtggtcctaacttgtacagttgtttctctctctctctgtctctctaagattaaaacacttacaaaggtttatctgtagtataacctttggtattaatacaacataaacttttccattgttgaccatttggcgccttattaacgatctttatcttcaaaataacttgttgcgtgtggaagtatattgataaaatatgcttagtgaataagctttataatgtaggctgcttgaatctcaaatgttaagtaaaaggatgcaatgcctgttgtgttataaatgaatttcttgcttaggttgctacttttgagtttcaggtatcaagtactcaagttgaattcaattttttatttcattaataattgctgagagtttgagaaaaatgagaaaatatcaggacaacaaggaagatatttaatctctgcatgtttgcatatttatagtggggttctagttgttatgtgcattttctcttctccttggtatgatagctcatcatgattttagctgactttgtctgacacactctggtttcagccatcagctacagaaa

SEQ ID NO: 51556 - DNA, 898 bp, Ricinus communis
  Intron number 1 from transcript 29910.m000929 (locus 29910 .t000020) derived from phytozome v7.0 (chr-ID 29910; pos 2 73745 to 274642)
ggattctaagaaccacaggtaagtgtttagtaaaagaacacattctacaggatcttaaagtatcagtattacaagtttcatttcatatataagtctacaatgctttgagacaaacaaaagaaatggtcttcttctgatctgtttaggtactgaaatatatgatctccaaagaacctctttgccatcttaatttggatcatagttgagacaagaaaaaatagcatgaaatcaaatcgttagcagactctatattactaaagtaagactctacaccagtgggtttatttattagttattacttaaatgttaacaaaatcttttgttaatcaaatagaagtgatatttgataacttttaataaaaataaaaggaagtgttaaaaaaaaaaatcgttgtaaaactcaatagtaactattagctagttttgtaatttttaataaaaaatattaaacttttgatttgtacctaaatgctttctaaattataatttaaatacacgatcatcaaattttataattaataaaaaggtatcaaatttttgatttgttaagtaaaaaagtactgcccatatattttgtaaaattaaattttggtacttttttattataaaatataaaatttagtacccgtttatataatttatcatcacattttctaaaaaaaactcgatattattaaaattagaattcagtaattatttatttataaattaataatttagcatgtttttattacaaaataaaacatttatcttcattaataaaatctctttctcttctcattttccttctctttttcttattatctttttgaattttgtagtctatatttaaaatatactttttatttttggtcgattgccaggcctgattccactttagttgaggtagttgtcaaag

SEQ ID NO: 51557 - DNA, 559 bp, Ricinus communis
  Intron number 1 from transcript 30143.m001187 (locus 30143 .t000026) derived from phytozome v7.0 (chr-ID 30143; pos 2 36459 to 237017)
tgtgtgggacccggtcgaagggatctgtaataaacgtgagtttcttttttttcttaaaatctttttaatgttctcaaggatatgatgggggtatgaatttgtgtgcagctgttacttgtgaaggttctggagggtgtgatggttctggacagacaggactcatagctggtaatttactagatccttaattaataattttaattaagctttttttggagtcaaaagagttcctgatgagtgatgactttgcaaagaaaattgagtttaagatcagtccattctattaaattttgaggtgtttatctcaaggaaaatgattataataacaaataaatcatacccaagagagccaaactttgcataagatcgagtatatataaatacatttttatttatttgattcctgggaaaacgacgaaagattaataaaaggaaatttgaatcttgaaactggtttctgcatgcaatatttttcttggattaagaaaaagagagatgggattcaatttcaaataactgtgcaggtttaacttcgggtttaggcgcatcattcttggca

SEQ ID NO: 51558 - DNA, 608 bp, Ricinus communis
  Intron number 1 from transcript 30076.m004564 (locus 30076 .t000128) derived from phytozome v7.0 (chr-ID 30076; pos 8 14742 to 815349 reverse strand)
ataatagttctctactgcagaacaggtgtgaactcgaaagctattgtggatcactaattgtatatctggaagaatatcaaaaaaaaaatatcttccttgaattctaagttgaaggagactcataagataatatctgaccttgagatggatattcaagcagttatccaagagaaagagaacctatctaaaagaatgaagattctcaactacgaccataagaaacttttagcaaaggcattgcagcttgcattcaacaatgaaaatccgcataatgaggttactgatttgtaaaaccaactggttcaaaagcttgggaatgagtggatccaattattgctaagcatgaaatcactttcagtcttgttgtaaatgagatgaggataaagaggaaagaaaggaagagatattgattgctgactatttgattttggtaagaatttgtgggtcatttttaactattcaactaaaaactatcttcttatgtattatttcactaatattttcttttgtattatgtcactttttcattattttatttcttgactaaagagaaatgaactctacattcaacccttaatattgtcgatcaagtgagataaaagcttttg

SEQ ID NO: 51559 - DNA, 220 bp, Ricinus communis
  Intron number 1 from transcript 30147.m013859 (locus 30147 .t000130) derived from phytozome v7.0 (chr-ID 30147; pos 2 972615 to 2972834)
gtcgggtcagttgtcgtttctgaaattcttctttttttctgtaatcggtcctctattgggccttttctttttctcgttatgccaatattttgattatttttgtaatttagattttgtgcttagattaattataacagtgggatttctattttcttgttctgcattgtccttttctcgttttgcagtataaagaggttttaggtagaggtgctttcaaaaa

SEQ ID NO: 51560 - DNA, 811 bp, Ricinus communis
  Intron number 2 from transcript 29917.m002011 (locus 29917 .t000080) derived from phytozome v7.0 (chr-ID 29917; pos 5 75256 to 576066)
ttatcttgactgagcctgctggttcctcagctgaggtcattctagcctccctttcttcaaattttcctacttttaagttattatttgagatttgttaatttacatgaaatgagttttgatgttctttttgttgggattagattgtatgctacgcatgtgtcttactttttggatgatgagctgtaattggagttaaattttatgattggtttgcactggataaatccaagtgatgatggtggaaagatagtaggttcagcgcatattaaatcagaaaaacaatgatcttcgagggaaaaggaatattttttatgaccagttgaagacccaatacatttcttaaaagttctgagggttcgggatgatgattatattgatttagaagaagaaagaacacattcgagcgtggttccataaaattgattgtgataaataattattatttttctcactgaccacctagctttctagggggtcaaatattttggaaattttttgtcaatgatgacctgcatatgtactttcttggattgatagaatctactcttaacaaatccttataatttgaaagatcaaacaacagttctatctagcaaaagaaggctgctgatatgagaccgcatcaacttttaaaaggataatctggagatgatgaatgtcaatcaaattaatgttagactttcttgtttcttattgtttgccataggcaaaaaatgattctctaaaaaaatgagaaaaatgaaaggaaagaggaacctcaactttttccagtcattaacggtttcgtccaaatggtttcaggtgcttctgt

SEQ ID NO: 51561 - DNA, 642 bp, Ricinus communis
  Intron number 3 from transcript 29917.m002011 (locus 29917 .t000080) derived from phytozome v7.0 (chr-ID 29917; pos 5 76123 to 576764)
agcagcaaggtgagccagtgtccatagctattccgaagaatcttgagcccttaaatgtgttctaagcatcctatgatttagaaatgatgctttttaccttacagaatttcctttatgaataactctgtctttaagagataatagctactagtttgtgtgttgaccttcaccttcacctttttgatgtctgaagtaattcaatcttgagaacttgggtcaagggagatccacctccttccagcagtttcagaataacagcttaattttcatctggcagccttgtcaacatgatggtaaacaaattatttggtctaacaagatgtataaacacaagaaaaataattaatacaaatgttgaacctactttaaatttttatgtgatagagtcatctaatcttgatttcattaattttaattgctcttttgcatatttgattcacacttttctcagtattcacagtcattaatttcagattttttattgttagaaaaagagcaggctccatatttgcctcattctcagctatgttgtttgagttgttatatatactgaatgtactgttgtggaagttctaaatcttaactgccctggaattcctgtctctaggctgtttggaagtcacctaaagccatcaagggagg

SEQ ID NO: 51562 - DNA, 733 bp, Ricinus communis
  Intron number 3 from transcript 29830.m001449 (locus 29830 .t000066) derived from phytozome v7.0 (chr-ID 29830; pos 4 83706 to 484438)
agaaaagctccacttgcctccaccaccatttccacgtattactactctctgttctcttcttttatttagtttctatgtattttcaatctttaattaatttaggcagataaatattagtttcatgttaaattttagttggttttctggtagatgttaaggaaattgcatcaagtgatcaaaatattattatactggaatgcttttacagcaattgatattgagattaatatgggtattgaatttgagaattttaatgcattgtttgctaaatgcacctcttgtgtggtttacacatggtatcattctaatttgttcaatgtccatgtttgcaccgataacaaggaaaatctaacttcattatttagctgactcaaatgttgataattgatctttagagcattttagtgaatctgaaggatgatcattttcaatttatttttaatgtgtattaagaattgcactcagtgaggaatacatcatcagtgtttttcctcagtttgatgatgtcaatttagttccgatgatgcaaaaccaagatgtatattcatatagttgtcctgttgttttttgtttaaaaaaccttgagctataatttatgcttggtgttcaatttggtatttgctgttgcatttgtttcttgttggttttgttcaaacaggatgatctatcgcttctgaattttaattatctacaactaaaatatctctcctaattgcagcccagagtcattcag

SEQ ID NO: 51563 - DNA, 639 bp, Ricinus communis
  Intron number 2 from transcript 29844.m003294 (locus 29844 .t000140) derived from phytozome v7.0 (chr-ID 29844; pos 8 21903 to 822541)
attcaggtatggtactctaattcattcttttagtgttgttattgttcttaatcataatactggcgtttctgtttgataatatgtttagttcttgaatcctgacaacccaatgctctgctggcaaaaaatatatatataataggtaactccagttgtttcagatgggtccttttcactgcatatattgtctttcattccagttccaaactcctataagttctatgttattccaactagctttagcttagtgttattgtgctggctgtgaggtctggaatttgaatctagttggagcccaatttatcagaaagtaaataatttcagtcactaatctgcattactgtatgaccctttatggtgtatcctatacttttgttgtatgcaaattatagagagagatcatatggcgtgaagtatatagctactgttgtgatgtgtgtagttattgacttacattaatacaagaagaaccactctaatgcttctggcgttactggattcagtttgctcatagattttgattctgttacttgatttcgatcctcttgtttttctgttccttttgctttgttgctttatcgtatcacttctcccgtgtttgcaggttggattaacaggccaggctagttcacttcaaaa

SEQ ID NO: 51564 - DNA, 492 bp, Ricinus communis
  Intron number 4 from transcript 29981.m000591 (locus 29981 .t000020) derived from phytozome v7.0 (chr-ID 29981; pos 1 63008 to 163499 reverse strand)
gtcttctttggctaaccaggtaattcatatttgctaatgtgtttgtcatttgtttaatttggggctgcttttttggcttttatctttgttataaatgatataagaagattgaaatgtataatgcgtttatcattgtggaattaagtgatgctaagatttgttgagtgaaaaaattgcttaggagctttgtacattttgagaaatcaaatgaagtacaagaaatgttttgaaaatcttttactggaattgcatcgtttcattgttgttaaactagatgaaatcaattgcaattaagagaacgagaaagtaagtgtagaattctaacctttgattgacatttttggcacatttatattttgatgtgaaactattttggtttgtttccaagtgacattggatgaactgcaggtaattggttttatttttattcttatgcaattgacagtcgcatgttctcataatcttattaatctttgagaattcctcagagca

SEQ ID NO: 51565 - DNA, 415 bp, Ricinus communis
  Intron number 1 from transcript 29981.m000594 (locus 29981 .t000023) derived from phytozome v7.0 (chr-ID 29981; pos 1 79957 to 180371)
ggacttaaggatcttcatctcaagctcaaggtatgcctatgatttctctgcttatgcttctcttctatttatcaagatcatatgcatcttactcaaatctttttagattataatcaagagtgttctttctaatgttgcaaaatttccccacatgctaataatttccattttgtttctccattttggactaaagaaaaagttaaaaaagaaaaaggtgacgagttctcgattgcttttctagtgctagaaacagtttcatgattaataccaatattgaattttcctatatacatatgtatatgaaaaaatattatatgaagtttaaatttttttgatatcgttaagccatggtgaacgactgttaatgtgtttttgttgaaaaaggcatttcggcttaaacgttttctcataagag

SEQ ID NO: 51566 - DNA, 516 bp, Ricinus communis
  Intron number 2 from transcript 29852.m002002 (locus 29852 .t000021) derived from phytozome v7.0 (chr-ID 29852; pos 8 73859 to 874374)
acatcataagacgtctatataaggagaaaagcgaagtaagaaaaggcagaagttactttcagaaattacaaagagtaaaattttgcattctttaagcttattctttataatttttaaaaagaattcaatttccattcattcttcttctaaagctaaaacattgtacttccttccgatatcttttctttactattactagaagaactaagaatctaaaaacctatataagtttattttattaataaaacttccagctttgtaaattttcttgttttgaatcgctttaagtatgctctgtatttattcataattgtaatagatgttctaattgttaagtgttaaattttatatttgtttcaggcatcttttattttctagtatttattttattgttcttattatttcatttatttttttattttggtatatattatttaagtttgattttagtttagttttgttgtttttgtatattttatagacttggagtttttgcattgatccaaaggattattt

SEQ ID NO: 51567 - DNA, 794 bp, Ricinus communis
  Intron number 3 from transcript 29852.m002002 (locus 29852 .t000021) derived from phytozome v7.0 (chr-ID 29852; pos 8 74443 to 875236)
ttcaacttgctttggttattttcttgacatgcctagttttaagtttcaaccacagcttgttcattgtttattattgaggcaattggagcagcctaatgtgaatgagttatggatttcagttgccagtcgtcgtttgcgcttttctattgaagaatttgcattagttacttatttatgttctgctggataagtgaataaattgtggtatatagtcataataacacattaataagtaggtattttgttggagttaataaaattaataagcaatcagttgaagggtgttttatgagtcaaatgtggatttaaaatgaggatgctttaaagattacattattatattattcatgtttttctgttgtcttctcctaaagaaaaatacatcagtgaagaagattttgatattattaatagtgaaaaatataattcttacccttgggagaaaaaggtctttgatgttacattatattcttcaaaggaaaaaattaatattgggaagaaaaaaagatgtagtaatttttatagattgattgggtttccattagcattgcaagtttagttttatgaggtttgcccaatgtgattggaaagttggttttgacaaaagaagagttcaaacaagttcctcgtttgttaagatagaatttagtttcgtagcttacgcacaatcaactttcaaatggtttgtttgcccaatctgacaaaattataagttgttctctactttttttgcaactttcacttttttattttttttagctgaaattgaagaatattagtcctacctctattga

SEQ ID NO: 51568 - DNA, 967 bp, Ricinus communis
  Intron number 1 from transcript 30071.m000450 (locus 30071 .t000026) derived from phytozome v7.0 (chr-ID 30071; pos 2 17784 to 218750)
tcttttacgctcccgtattcaagatcttgtcaatagtaagatacccattaatccttttgtttttttctttttgaatcttttcttttcttttattgttcttttcaagtgttttatgtaggttcatgttttctttcttaatgaaagttgaggtctttgttgttagttttctacaagattggatatcaagaagctgtttttatttatatttcaagattggccttttgaattgttgtagaaattgatagcctgattataatttaggttctgatgataatggaactgtaagagttttaagccaaattgtgaagggaatgtattgttttagattatgcgagtacaattatttagagctttatattggttgcttgtttttgcaaatattatttcaaatatctaggaatagttcaacaacaatattgaataaaagctttttacttaaatattctcaattatgatagttttaccaaaactccttttgcttcatctttttggtgttttctaaggaaatctggaatgcaatatacaagttacttcggcaacctctttctaaagtttcaaacttttctttctctactttttttttcttaataaaatgttgttgattaaatgttttaatgtttgacttactaagtttaggatcctaggctgttgtttgagctatcttcccttgatttctctttaagttgttcatttatttcctgattagtattttttatcctgaaaatgaaattattcatacttaatgctatttttcccttcatattttgcccttttcacagagaaagctagtaaaatgcctttgtccaagggtggcaccatagcttcgaaagagtttcagcttgcagatatgacaaacatctctttatataaaaattatgcggaatctctatcacctgggcaagagagccctctttcaacctctaactgaacgcctgaatctatttactcagcaagaaagaacgggcag

SEQ ID NO: 51569 - DNA, 572 bp, Ricinus communis
  Intron number 1 from transcript 29908.m006135 (locus 29908 .t000186) derived from phytozome v7.0 (chr-ID 29908; pos 1 10700 to 111271 reverse strand)
ctttgtgtagatcatctaaacataactctaaaaaggtatttcttcttttagattctttatctgcttagcttatctgggcagtagctgtttttcattagcttggtagacatggtttcttttgatgtataatatatacatatttgtgattatctatctgggtacttgttaaacttattggaaaatgactatattctaagatatgggacttctgatggatttcatttgctgaagttgaatgtaaagctactatctttatagaaatcttggttaaggttatggattcatgattatcaatagatacggctgattctgtaatatcttagcctgataagcttatcttactgattctaatctagggcaagcacttaaattgatatgatatattagttctaactgggattgctgtcagttattatggtgtgtgaatatagtttttggttctagtcttttctgaaaagtctagattcttgctaacattctagaagcttatatagttctaattttctaagcgatatgtgtttgtgtctgtgtttccagggggttaggggtgggtttggggtgtttgcggtatt

SEQ ID NO: 51570 - DNA, 332 bp, Ricinus communis
  Intron number 1 from transcript 30075.m001134 (locus 30075 .t000001) derived from phytozome v7.0 (chr-ID 30075; pos 1 474 to 1805)
tacctggaaaattcagtcacttgctttgtcccaaggtatttttttttttgctttttcttcgtaatatgataatattattattttgtgatggatatcttctaatattcttaagagtacactacctacttcccatcaaagggtattttggatgtattgactgctgcaaaagttttggcattttgtgtattggtattgggtattagtagaagttcgttagcttattcaggccatgtttaagtgtttggacaggctgtttgtaattttattttgatttataatatggttttggtaacgtagtgcaagggtggcaaatcagtggagaggagtttgtc

SEQ ID NO: 51571 - DNA, 456 bp, Ricinus communis
  Intron number 4 from transcript 30075.m001134 (locus 30075 .t000001) derived from phytozome v7.0 (chr-ID 30075; pos 2 148 to 2603)
cagagggcatagcactagaaccactgggtgagaaggtattgaaattgcctttgtttttttcccttttacaaagttaaatttagatagtaatattagatgcatgagtgtgctttttcttttaaatcttttcatgcatacagttaggtcagagattctctggatgcatttcttagtaatcttcataagatagcaagaccaacagtattattgtccattcctcaaaatttgatggaaggtagttggatcatattttaagtgaaaatgtgataaacccttttactgccccatatcctaaaatatttccacaattaagatacagacatttagaactactcatcttttctttttcaattctttcttttttaaatttctagtcccaatataaattattgacattcccactgttgatttttttttccagctaattgcatacttcagtgatagagggatatctaa

SEQ ID NO: 51572 - DNA, 681 bp, Ricinus communis
  Intron number 3 from transcript 29929.m004658 (locus 29929 .t000161) derived from phytozome v7.0 (chr-ID 29929; pos 9 80636 to 981316 reverse strand)
aaagatctttgcaggttttttctttttaaagttcttcaagctcaatatggattttgttgttgttatcatttgttatttgatgatagttttttcaattttctttagtaatcaacattcaagaagaaatcattgtagtgacgagtgattaaaactcttatgtcaaatggcataacaacttttgactgaataataggtttcaacagatattgtgagtgaacatgagcaataatagtattttagaagccgtagctttttactaatttgtggttgctgaatctgttgttagaaactgtagttcatgtgctattcatgtcagaactgaacttctagtgtctgatgagcaataagtaaatgaatatatagaaatttccaattatcaaaactcaaaactggatttactgtctgtctagcctaattatgagacatgtttttgtgttgcaccatgaataggagagtagcttgtaggaggaacatagatagtattgtaaatatccagttgaaaattgctttataagtctaactttttatgttcttgaattacaaaactcttgtgtctgttgcagtccctagtcattgcttaatctctatatttgttatatggtctgtgtagttttctagaacttattcattccataatatatgtaaaatcttattgcaacttgttttttcaaaagggctttt

SEQ ID NO: 51573 - DNA, 874 bp, Ricinus communis
  Intron number 1 from transcript 29912.m005329 (locus 29912 .t000055) derived from phytozome v7.0 (chr-ID 29912; pos 3 69193 to 370066 reverse strand)
gatctactggtaatagttacaatttttatattgtagtttgttggaactccactttagttggtttaattagttttgtaattcaaagatttcgtgatctgggttagtaaagtttcatcatggtaatgttaatctgcatacgtgtggtcattttgtaatcagattccctttttctttgatttattgactataagagtagaattaaaccagtttggactgttgaatctttagtaatctgaacttctcaaaagttttatgaaattctttttgccaatatatgctcctcaatcatataaatagaagttacagcttctaagttcaagtataagcgatttaaatggttccaagaacttataattgtgctaatttgtattcttgtgaatgaagaagtatggctaataaacgtaacctcagctcaggcttcttactctctgattcagcacagtcttattgttaggagcagttattcatatacatataggcattctctttaagtattgtatagttcttgggcctcgttcaagggatgcacattgtctttctttattaattcattgtttaggttccattgtctaggttagcttgttatgtttgtcatgtgagggcaaaggtatttcctggctatggaggtcatatcaatggtggataaatcctttaacatatttacagactgcaaaatagctatcctttaacctcataaagaaaagaacaattgcttctgtagtactacgggaagcaaaaaaatgtctgtaatgttgctatagatacagcaaaagatatttcttctggttgatattgcttactatagtttactagatgctgttggtttttatcttcctcaggataccatatctctccttctccagcaatcttttct

SEQ ID NO: 51574 - DNA, 874 bp, Ricinus communis
  Intron number 1 from transcript 29912.m005289 (locus 29912 .t000015) derived from phytozome v7.0 (chr-ID 29912; pos 1 16966 to 117839)
ccgcggtcagctcctctgtgtctttttctctttcatttttgtttttcactttgttagggctcattgcttttatgtcattttatttttaaaattttgttactggtgttgaatcttgtggatactaaatctgctaggcatacaattagcttaatttgactatagtaggtgttgttgctgtttcatgactactgtcattctgttaagattcaaagtacgacttggaaacacaatgctgttaaaacttctttttagcttcaaatcaggcacataattagatttctttcctaatgtcaatgtgaatgtgatccatgagttgaatgtttgccatagttattctagcataacagagctattgcacaacacttttgcattgttttggaataaatctatgtacaagagttcaaattaattgaattcctgcaaaatcatgtcaattttggcatgatgttatttttttcaaagtgccttttttctttttaaagttgaaaatattgaatctagcagctatgggctttccggagaaaaaagttaacttagtagaattcgatttaactggatttcatgcattttagaccttccaaacacaccttttatgatcttcgtttgatttctttcaattgcctacaagtgcaagcacacaggatgcatggacacttgtttctgatgtgaagtgtgtagaatgaagtaaattagtatgttagacaaacatacatgtggaggacctaaattagtatgttaaacattcatatgcatgacctgaggtgttatttagctatttttcttctgaaatgtcattttctaattcgtgtttatttaggcttagataatgatgctgttaactttgcaggtccaaccatcttgtttttccaggaga

SEQ ID NO: 51575 - DNA, 516 bp, Ricinus communis
  Intron number 2 from transcript 29912.m005453 (locus 29912 .t000179) derived from phytozome v7.0 (chr-ID 29912; pos 1 140216 to 1140731 reverse strand)
attctcaatcaccaggtatgtatcttgtattgtctattcattaatctctcaagcttttttgctgggatatctggatggttacttggatcatatatattggatttcttttaattgattgtcaacttcttcaatatgattggtatttgtctgcttttggttattcaaacttggatgttatcagaattaattatttcatgttagagctgttgtttggtgaaaaatgctattcccaagagctttaagcttaagaattaggattgatggaatgttgttctgaacttataaattagaatttgctgccagactttgataaattaacttgcaaaataattttatatttggccactttcagttatttttagccaaaagaaaaacacaaaaacaaaaagagttggagcagaatatttattgagaatgaccaaattgcagttgtgtcattactttaattaattctagccttaaagctttctaaagttattttttgaattgtatcttattgatcttttgtatcaggtc

SEQ ID NO: 51576 - DNA, 366 bp, Ricinus communis
  Intron number 1 from transcript 29822.m003458 (locus 29822 .t000133) derived from phytozome v7.0 (chr-ID 29822; pos 7 06573 to 706938 reverse strand)
ctctaaaggtatctctactcttcttcttttttttctttttcttttggcaacattttaacaagagtaactgcagtattttttttattttttattcggcgattttcttgtctagactgggtccgtggcggagcaacactaaaataatcggaagtattttcatattatttgtcgaaaacagtgatgttgtttgatatttcaaaatatgtcagctcaatttaattggatggtttgaaatgtgtctaataatgagggagtttcgtgtttttcttttcatagcagtggaatttgattttctagattatcttcttgattatgaattttgtttttgttttttattcttccagaaaaagaggatttctgaactgg

SEQ ID NO: 51577 - DNA, 834 bp, Ricinus communis
  Intron number 1 from transcript 29822.m003399 (locus 29822 .t000074) derived from phytozome v7.0 (chr-ID 29822; pos 3 84425 to 385258)
cccctgctaaacgtcttgtccttcttgttggtacgttctttctttctctgtttgcttttatgtctcaatgaaacgacatatgtatttttcttcgtcttcttaatattactattacatttacatcgtctgtgctaatttggttgttttattgaagttagaattgaagtgtgttcataatgagaaatggaactcatttgaagtgtattcatcatagacaactaacaaatcttatgaagctgtctaacataattttaagaaagctaatactagttactttcgttaattaatttggtcgagtgaattgttgagctttgaaagggatcaagtgactagaatgagatacggggatgatattttaaaatcattgtatagtttgacatcttagattgactattgatgcatttttagtaaaataaaggtattaaaaggaatggttgtagcataaatatggttccaactcttattgaaatatccattttagttctaaatatgctccttcgtttacatcagtatcattaggctgactgctataaatctctttctttgcaattcttctcagttatctctccttagggcttgcaagagttcaactgacttgaaatattgcagaattacgtcattttttatatcatctcattccttccaaattgctttttttctttaaggaaagtagtctaacaaattgaattgctgcaattatgagtttccaaacacaagaattgactaaatagaattgtattgaaacgaattcttgcattcaaacaagaggttttaagttataatttcttcaatttttctgctaaaatcttttggtggtaaacatgactgcagcgg

SEQ ID NO: 51578 - DNA, 943 bp, Ricinus communis
  Intron number 1 from transcript 29848.m004612 (locus 29848 .t000168) derived from phytozome v7.0 (chr-ID 29848; pos 9 66035 to 966977 reverse strand)
caacctcactgccggtgctctcgctctctgtgaatgtctctttcatttgtcttctatagtaaacgtattctaattaataactatcttttccattctgttttaacttactctgtttcaattatgttcctctgttattaataattctctctttcagcttatacctttataaataattcgtgcaataagcaacgaccctattactgttaccctctcttgctttgtatttttcgtccaaactctcagtaatttttttttttctctctttccctctctctttcttttttgttttattttattaatacagttaggtaagaagggcaattgaattcttgattttgatcattattattgttattatcttcgttttccttcttctcttggttttatgggatataggctttgtttgtttctttttacgttttgttgagctaattttagaaaaagaaattggacccctttgttttcagacggaaaagaaaattgaaaaagaaatggaatctttcttcttttctggattaccaaacgggtcttaagcaaaactaattggaatatttaaatatgatgctccagtttactagtgatttgaaggtgaataaaatgagtcttggcattagctaaatcttagcattgctggctgacaaatagaacttaagtattagctaatacatgtgatcttctatcttcttgtggtgattgattggttgtgtgagttatttatctgttctgttcattgtcttgcgtctttgactgaagcataagttggatatgaactgctttgcttaggcttctcttgcacgatttttacctatcatatatattaatcaagaggatataaatttgtattattaatatatgtatgtaggcaggcagagtaatcctattaacgaactatgctgtatgataattcgagttaaccttttcctttatcagaaataaatacata

SEQ ID NO: 51579 - DNA, 785 bp, Ricinus communis
  Intron number 1 from transcript 29863.m001113 (locus 29863 .t000073) derived from phytozome v7.0 (chr-ID 29863; pos 4 81137 to 481921)
gggaggagtaagttacctttaacattctgtctccatccaacaacctatttcttgttagctcgtataagctggaaatgcttgtttggattctatgaattaaatgttaaacataaaaatgattgcttttagggcttctgttggaattgttatatgttgtggagtatgttactcttctatttattattttagactttttgtgatttaatttctgttgattaaatggttaggttaattaggggtatgaggtcttgtatggagcctattgtcgaatacaaaatgattagaaatgatttgatttgattaaatgtttgtttagattcacggcgtctattacaataaataattattcggtgcttttcgtatattgaaattgaatctttcaaattatggtttgagagactatttcagccggataccatttcctgtaaatatgctaagatggttaactataattgagaggaattgaatggatgcaacagaagatttgtctactttgttgttattatgttacatggattttgaattctaggtcagtcacatgttttggtaagtattcatggctattgcataagaaagctgttgattaatcctacttgttattcatctgaatttaatttgtttgaaacttgtgtattgtgctattgatagatcttctttgagttagctagttttggttctggagattgatcctgagaatgagtattgcatcatgtatattgggttaatattttatctgttatgattttgcaggacctgcaaggtgttaccgccagatcaagaataag

SEQ ID NO: 51580 - DNA, 322 bp, Ricinus communis
  Intron number 2 from transcript 30138.m004058 (locus 30138 .t000232) derived from phytozome v7.0 (chr-ID 30138; pos 1 582699 to 1583020)
caggttgtggaggctgcaaagcccttcatccaaaggtatattatcattattattgtcgatattattttatagctacttaaatcacatgttctgttatttgatattagaaaagattactagatttcaagttttgtttatttgctaattggacagattaatctgttgaaggcgagccctattttgaaatctaaacaaatttagtataattctttaaagctgctgttttgtttctgttttactgggtaaatttcttacaattttatatgtcttggtttttcctttttttcttatcagatttgtcaactggcagaatcaaaccctg

SEQ ID NO: 51581 - DNA, 697 bp, Ricinus communis
  Intron number 1 from transcript 30111.m000700 (locus 30111 .t000003) derived from phytozome v7.0 (chr-ID 30111; pos 1 3626 to 14322 reverse strand)
gtgattttaactctcctctcgatcttaaccgtggggtaaattttttccttttacttcttatttaattatcttgtttttggtatgtagctaaaattggcatttgttaggattctggttttgtttgtattattgtataatgatttgtttgttttctttcttcttgtttctttcccttttcattgattatttagtggcacgatgtagtagtagtggtgtgttctgttctgtattagagagaaaagttttttgactctaaatcatctgattaatatatataagaaatcaagattgtgctccttttcttttcttttatttttaaaaaaaaaaaactactacctgggcagtaatcaacttcttgatttgtagttactgataatttctgttacttataattgcttataataagctataaaattctatctgttgaatgttttttttctataatataatttttatctttcattttgtagatgtgtgctgtagttttgaatgttaaggtggatgttatctttttttctatttttatttctttctagtgcagttgttattggaagtaaataagaagtggaaatgaaacaatcaattactgttttacttttcttctaatcatggctattgttttcaattgaactagcagtcattgtgattctggttattgatttattttggtgagcatatcttgggtttcaggtgcacc

SEQ ID NO: 51582 - DNA, 905 bp, Ricinus communis
  Intron number 1 from transcript 29844.m003155 (locus 29844 .t000001) derived from phytozome v7.0 (chr-ID 29844; pos 9 801 to 10705)
aaaagggcccacagaatcgtacaaaggtgggttagatttctaaaaattagttttctccgctaatctttgtgataaatcctagttatatacagtggtgggcagtatagggaattgataattattgggtagaagatgcactttacattttgttggaggttgttgtaatggttgccaagctatttttgctttgcagagtttagaataacttctgagacaagaacctatgttggttcttgttgtgatgtgataaaagaatatttctatatataaatatcataaggtttacctcatcgggctttagcctcaatgcagtttcaatatttcatttgctgggatagaatcaatggtattaaaaaagaactaaattttcctggctgcattgctagtggtggtgtgtatgatgttgggagatggtggtgtatggtctttcgtgtgtggcatctctcttaacaaaattgaattatttttgctgatgtgtttgggaggaattaattatgctgaaccgaaaatgcttgaacaggaattgcaattccattcttctcttgattccagaaaattaaatttactactatttcttatgatttgcatcttatttctgctataatggaaacaagaaaagaagtttgtgttagaacagggaattaagttcttacaatgatgtgtaatttttgtttctatctatatatttaagcatttattaatgcatagctcaaagtgttctaagtttgagaaaggggcatgtatatatttatagattttagtatttgcatggatggtgtaattaaaataaaatggaaaatagattctgtcttacaatattactatcccttggatttgaagtggtctgtgttctttttgtagttattgcattttgcgtctcaaaaactgtttacacttttaacagg

SEQ ID NO: 51583 - DNA, 353 bp, Ricinus communis
  Intron number 1 from transcript 29851.m002377 (locus 29851 .t000019) derived from phytozome v7.0 (chr-ID 29851; pos 9 4545 to 94897 reverse strand)
ctaacgagaattctgatcctcaaaaggtaaatgtgttgatttttagttttttttttctcttcttaatccatgcttaatttgtagcttagttgattttgtagcattttctggtaaaattagggttttaaggtggaatttatacgtgaattacgtcttctttgtgaggtgtatttgatcctcaacatctggtggtgatttttagggtttaacttatgcttatttagagcttatttgatataggaatttatggtgttgtttgattaggtataggttatattttctctaggaattatggtaattgcgtgctctgattggtttttcttaattgttctttttcacaatcttgttaggtt

SEQ ID NO: 51584 - DNA, 651 bp, Ricinus communis
  Intron number 1 from transcript 29991.m000646 (locus 29991 .t000028) derived from phytozome v7.0 (chr-ID 29991; pos 2 15318 to 215968 reverse strand)
ggagctcgtatgtttcttgcttatttttttcttcatttagatattgtttgcaaatgctcttgaaacacatatgtaatataggttttggtatccatggttttatattctcgtctgcggtttatagttgaataagttatattatggaggaatgaagttgattgacttggttactacttgttgtgggtaacgcatattgggtttcgttgaatttcaagctattgggagttattagctggttgttagttgatttgaatggatacaaaaacatagattgtttatttttctttctttgtcattgttttggtttagaaatacaaattagcatatgaatataggtgcaggaatgtggtttactgttgaaaatttttgtgtgtgggggaattggagtttattgacttgtttactccttgttatggatacttcatagtgttctttagaagattttaacatttggagtcattaaatggatacaaactcgtattctgtttgttgttttgtctagcttttattattgttgctattcttaatttaaggcgggagacctgtccgttttatctaactattctgtcttgttccccaccctcattcgcagacactgaggtggaaaataatatcgttactgattgccatttattttgatttcttctaggt

SEQ ID NO: 51585 - DNA, 528 bp, Ricinus communis
  Intron number 3 from transcript 30128.m008972 (locus 30128 .t000433) derived from phytozome v7.0 (chr-ID 30128; pos 1 933775 to 1934302)
aagagagtcagttggaatcgttcactttctatcaggtttaatttcatcagtttaaccctaaatttactcattttgttttcttaatgagtattcatatgttttaaaatttgctgatcttttatacttatgaattgttttaaattgtttagttggtgatttttagtatatgtgtatttcatatcgtctgctgcataatttatgtctttattcaaagaactggttaatccttccggaaaaaaaaaaaaaaactgctaataataacttgtgcaagttattaatttattttttgtttctctcgttttgcctttcgaatttggattcaccaaatgctaaatccataacttgagcatttttttaacctatgagaagcatttctgtattataagacttttactcagacctgagagaatacccactgtgttccttcttctgggttttgtttctgtattgttgtttatttcatgtccttgtaatttagctttgtgcttaacagagggagagtcagtattgctgttactgcttgtgttg

SEQ ID NO: 51586 - DNA, 683 bp, Ricinus communis
  Intron number 2 from transcript 30115.m001243 (locus 30115 .t000069) derived from phytozome v7.0 (chr-ID 30115; pos 4 75883 to 476565)
cttatagtcttaaagaacttgacatgtatgtatgtatgttctttcttgtttttgttttcaagatttggaagctgggtggtggttgttgatttgtgtattacttctaagtttatttaattattattttcagtgatttagattttgttggtttgataaaatcagttagtagatgctggatgttaatgaattcagaaaagtacttatgtttgattattgaattttaggataatttgaaccagttattagttttgagtataatataatcctggtcaactaacccttcaatgtcagtaatgccaactcagcatcatatccacttaacacatccattagccatgattttcatttccttgcatacaattgaaatcaaatttaaaatatgtgccatgaataattgagtttagaagaattggatagaattaaatctggggataaaatatgggtttgaacccacatcaatttgattgccagttgccagtgcttttagtagatattgcaactaagtggatctggatcttctgtgcattcactactgtgtctaattttttccaattggtttgaagttattatgtgagatgtggagcttgccttgcattggcaatggcaacggtaagtacaaaagataaaatctttctcatatgtttccagttcaagaagccgttggggttgccagataactgaca

SEQ ID NO: 51587 - DNA, 997 bp, Ricinus communis
  Intron number 1 from transcript 29990.m000514 (locus 29990 .t000018) derived from phytozome v7.0 (chr-ID 29990; pos 2 06633 to 207629 reverse strand)
tgagacttcaaaagattgtgagaaatccgtttggagtaagatcaaaatcaaacgttatgttttataagaggcaatttcataaactgtctaaggggagcatgaagatgtcagattatttgaaggttgcaaagagacttgctgaaaatcttgcattagcaggaaaactagtattattagaggatttggttacacaagtcttgataggacttgattcttttgactacaatcttatggtttttcagatttatgaaaaagaatacataagttgggttgatatataagctagatcattaaactataagaagaggctggaatatattaatgctagagttgcatcaatcaaccttggacaagtcacaataaactatgctggtacaaagaactttaataaccagaataactctagtaaagcagaggaggtcactaaggaacacaaaataaaaatcaagggaattttgaacaatagaacactggtcagtataacaactcttatggaggaagaggtggtaggccactaaaaggaggaggaggcagaagtaataactctagaccaatgtgtcaagtgtgtggaaaagttgggcacgctgttgtgaagtgttactataggtttgataaaagctagcagggagatccctccaatcagaacaactctccaaactctgcttatgttgctgctcctgaagttgtgagtgatccagcttattatatagacagtagtgctagcacacatgttactgccaatgcaaacaacattgttgagaaatcagagtattatggtaatcaacttcttatagtgggtaatggtgaaaagctctctattgctcatattggtgattctttattgcatacattaaatagtaaaattttgctgctaaaagatatgcttcatgttcctacaattaagaaaaacttacttagtatatctcaactcaccacacaataatattttttgttgaaattgatgattttgtttatgttttgaaggaaaaaaggcaac

SEQ ID NO: 51588 - DNA, 662 bp, Ricinus communis
  Intron number 1 from transcript 29983.m003265 (locus 29983 .t000164) derived from phytozome v7.0 (chr-ID 29983; pos 8 87007 to 887668 reverse strand)
tgccgggggaaacccattggctcttgaagttttgggttcctctgtgtagtcagaatgttgatgcatggaatagtagatgggagaaattgaaagtgatcagtaaagaagatatttacagcaaatcaaaaatatgttgtgattctcttgatgacactgaaaagtttatatttcttgatattgcatgtttttcattggttataataaggactatgtaatgagcatactggaagattgccatttcttcccaactgatggaatgaatacactcataaggagatgcctcgtaaaaattagttctgataataagttggtgatgcacaatttgattcgggacatggggagagaaattgttcgatgacagcatcttatagatcctggggagcgcagtagattatggcaccatgaagatgtaattgatgtattaacagataaaaggtcaaagtgagttttttctgttggtctaaagtcaaagcatagatcttaaagcagcaaattcatttaaaaaattggcacgtaaaagttctgtttattttgaatttattgtttttgtaccctctgatggatttctctctttcttcaaaaaatttcagttttccttttaattatgcatggtgcacacatatatagacctgcttctcttcactaacaggagtgatcgtctt

SEQ ID NO: 51589 - DNA, 954 bp, Ricinus communis
  Intron number 4 from transcript 30051.m000523 (locus 30051 .t000006) derived from phytozome v7.0 (chr-ID 30051; pos 2 12070 to 213023)
cttcagttgttattgtcgctgcagagttgcttaaggtaattgcagcttatgctacaagtctagttaaaagcgaaatgcgcactcaaggcgatatcgccttgaagcacgcttgcctgaatgaaggtaggcgcacaatctctaaaagaattaattggcaatatagccaaaatacataaatctttagcaaacaaaaatctagtaagataaagcttgtgagaagtcactccatgggaaaattcgtataacatttaaaaatgtaaaatatggaattatttaggaataaagataaagtttagtgtgccatagtagaagagttttatcacctaagtggtgccatagtttgttatatttagcaatatttttaaacccggcccggacttcgaccaggtcaggtcaagggtcaaaggttcaattcaggtcgaactggggtcgaactagtattttttaaatatgtattaaatatttataaaatcataaaattaatagcttttatgctacaaattataaatatattaaattacatcaaatttactaaattttattaacattataataaaattaatatattcaatgggttttagagctgaccgaaccagaacatgctctggttcacggttcaacaggccgggcccggccgggtttgataactatgatatttagcaaactagatataacaaactgccgactatgtttaaattgttaaaaataaactgatcacctcttaaaagaggcgcttgatgtattaaaagcgatggcccctgtagcacctgacttgtgtgcctgcatgcacaaggtgacacatttgactatgttgctaacttgctattctgtcaattgggttatttttggaagttgtagcttatattttctctttcagatggatgttagaagtttcatgatgtttttagagggaatggaaattcataattggatcataatttttgcagagagcaa

SEQ ID NO: 51590 - DNA, 880 bp, Ricinus communis
  Intron number 1 from transcript 29901.m000419 (locus 29901 .t000015) derived from phytozome v7.0 (chr-ID 29901; pos 1 94634 to 195513 reverse strand)
gctcttgctcagtttctcaagatcttcactaattggttcgtccatttcaattagtaattggttctgttgaaaagattctgattttatttctaatttatcagttttgttgcctgtaagttcgttgggtgcataaaattttcttaattctttaaacaaatgggctaacttaactaaaatccgatgttacaaattcattgcctaaataagttttaattcacacctatcaaaaagtaaaataaaaatcaaatctttatctcaaatcctccatagctttaggatatatttgattttttcggggtttattattatttattgtatataattcgttttcataattgaatacgcaaggcacatgtagttcaaactatatgtagctcgaatgcagcattgcgatttgtaataattagtgagacttttatgggacaaagaacttattgggttattgttttcagttttgagtagaatgctactgtttgtatatgtagggaagagatgtagcattaatctattaggtgatggattttgaatacgaattgccttcttctttgatatggaataagggtcagttcgtatgtttcaaatttgtattgattaagtaaactggcatgcactaaatcttcaagttctctggttgctgcacattttatttttacgaacctgtaaagtagatttggtcttaagccctctttatgctagggaagagattctatctagctgcttgagcagattatattaattccttgaatatgcttggtcctattgctgtttgtaaatgatgcacaatgcatttattggcatggtcagatgcttgaaatcctgctattatgtggcttaattttgcaatatgtttctgctagatgctcaggtataaagaaaggag

SEQ ID NO: 51591 - DNA, 920 bp, Ricinus communis
  Intron number 3 from transcript 29964.m000156 (locus 29964 .t000007) derived from phytozome v7.0 (chr-ID 29964; pos 6 3099 to 64018 reverse strand)
ttgagcataagggacaggtaaatttttttttctttaattagccaatcaatgtaaattgaaattcagatggaattatgtggtctggaggaaattagacttgattaatgcagttgaattcctggactgaatgcttgcattctttgtttattcaaagtggtagaatttgttttgtaattcgagtttatcagtaagtcactgtaactagtgagtttgctgtctattcaaccagtctgttaatggagtcttttttcttttcttgtttatttttaattcaatgcgagtagctaaatatggtgttgatatttctaatcaattaatgtttgcatccatagtctgcactaatttgtaaagcttgtttgcacgcctttgagaatatgaatgaaatacttcaggctatgtttttattttttttcctttggaattactcttaggattatgttttctcgagatccattgcatctcttccatgaatcataaatttttcatttgaatttcctccaatgcattatttctatttagtaatgtgaattttgctagattgattacttttgaaactcatcattcaactattttcttttggattatgtttataagtaaattgaccccatggcttcattcacgtttgtcctagacattggaaaatttacatctcaatgtaacatgcatatatcgatctccagacaaaagtaacactccacaagcttctccatacgtcagttttattatctttattttccctttttctctttgggtggtggtgtgagaagagaagcagtttgtcaaggagtttgaaggttgggaagaagagcaaagacagcataagcatacataatgaaattgcatgcatacattttacatgctcataaagtatttgcggatttgcaggtggatttagtgacagaaactgacaagacttgtga

SEQ ID NO: 51592 - DNA, 491 bp, Ricinus communis
  Intron number 1 from transcript 29830.m001451 (locus 29830 .t000068) derived from phytozome v7.0 (chr-ID 29830; pos 5 08962 to 509452)
ctagtaagtactgccaatttgaaatattttttcttctattattatgaatttaatctctcaattctcatttataagagatcaggataaagtaagttgatttttgggaagaacttggaccaaatgtgatcttttatagtttgttgctgaaatttataatttcagtttttcagattttaccaagtcttttcctgcagaatcaaaattaatgggaaagcttatatgatgcttaatgttaagatgataattaaacatttaaatgtaagtgctggtttgctttgccttggcagaagtagccatcctcctccttaattgcttaacagttttggtgggctgtttacttgttgcctgaaagctaaggcagtttgatacttaattgtttgaaaaaataagaatttctttttcctgtcttagcttcaaaaatgaaaagtaatgcacgttccactgtgtgctctgcaggattagaagctcctcgtaacagtttggagctgcaa

SEQ ID NO: 51593 - DNA, 748 bp, Ricinus communis
  Intron number 1 from transcript 30131.m007251 (locus 30131 .t000402) derived from phytozome v7.0 (chr-ID 30131; pos 2 468857 to 2469604)
ggaagtttgatcttgaacccaatttgaggcctaaggtatggaaatttctctctttcgctttcaattttgtattacttgtttaaagcctttggcttttgggtgaatttagtgttttgctgcatgtttgacttgtgatctgtttcttgattttgctttatttttcattgaattctgtttattatacatagaatcaaggaaggatcttgttaatatttgttttagcttgtcgaaagtgagaaccttagctcaacttagaatttaccaagtgcgattatgtcttaattatcacgttaaagtttttagttcttgttgagttgagaacttggatcaacactaactgtgtgaagtttgattcgaggctgaatataatggttgatcttggcggggtgtctatgccatacttggtttctacataagacatttagtttgctttggaaatcaaaattgaaatgtatattctttatgtttccctgttgtactaacttaaatttggctgaaactaaatccaaatttgggaatgcgattcttagaataggatatctagatggcatctatttccactttagaagtgaaccaaatatatgtcctaggagttgtaaacttgtatgtttcaactttttcctacctttatctcagtatgaatatgaattgttttcttctatttccttaatgattgatattttctgagtttatataattgatctgaatgtcataacttgcaatgccacttctgacttgatgtccagat

SEQ ID NO: 51594 - DNA, 630 bp, Ricinus communis
  Intron number 1 from transcript 30143.m001194 (locus 30143 .t000033) derived from phytozome v7.0 (chr-ID 30143; pos 2 91702 to 292331 reverse strand)
cttttgtcaaagacgttaagcgtctcgttatcaaggtcttttcgctccatttccttatttctgctaaagcctcaattattcttttgaaagatttgatttgatttttgccttttttagcatcaagtaatgacagtacttctgtcgacataagcgagaactgggttcttttcttttctttttttcttaaattcttaaccgaatgggactgatttttactttggtttcatgtattaattctaaatgaaaaagagttccaacaaaaatgtgtaatttcggacttgtttctgtgtgttcattgactgagtattttgcgttttgattatatttctgctaaaattttaattttttatcaagaatattcgatctttttgcctttttagtattaaagaagaagattttgttttgcaaggaatgaattatttatgtcattttcaagaatttattcttctttttgatttataaagtcttgatgttgtgtgatttggaattcaaaataaaattagaaggatatatgatgtgaaatctgggaggtgtttacgtagtgtacatttatatttacatttttgttcactgacagtattttgtgatttggtaacttaaaggttgggactgctgttgtgacaagaggtg

SEQ ID NO: 51595 - DNA, 561 bp, Ricinus communis
  Intron number 1 from transcript 29970.m001035 (locus 29970 .t000064) derived from phytozome v7.0 (chr-ID 29970; pos 4 65080 to 465640 reverse strand)
gtttgtggctcaccatctattcccttttctccacagtaagtttttcttttgattatttttcatttttggagtttgtttggctgatgggaaagtgggagaaagctagaaaatgggatgtttgcgatcttagtctttgttgcacttggctgatttttttgactaatttgctgacactaggtttggtgttttattttggttgaggttagtgttgcacttttgggaattcaatttcaaatatcataacaaggaagagaagaaaagaaaattaaggccttagtttcacttatctgatgaatcaaatggtgaattattcagagatgtattatatgtttggtggttgggaaactaagtctaagaaaagaaaagaaattgggtaattgggatgcaaagatttaaagtttggcttaattatgctgctagctttagccgtagaatgctcggttagcatagtgaatcactaaaacaataggttaaaaactttcgattttctcaagtttcttcttacttagatgattttggctgccagagtttgcaacagagcaaggtgggctatcaacagat

SEQ ID NO: 51596 - DNA, 667 bp, Ricinus communis
  Intron number 1 from transcript 30116.m000372 (locus 30116 .t000003) derived from phytozome v7.0 (chr-ID 30116; pos 7 5892 to 76558 reverse strand)
gtatgataattataataattatatttgagaaacaaactaatattaatagaaactatttaatatatatattttattaattattttgtaggaagtgttttattaattatttagtttatattataaattataataatttaaataagattttattaataaaatatttttttcaattataaaatataataaatttttccactagatatgaatttaaaattaattccataattagaatatatataatttgtcaataaatatttaattgagttctactagcttagtaaaaattcaagccacatgcaattttaactatcatttgatagacacttctaaaaaagataacaagtatcaaaaaattccgaaagcgtgtgaaatcattactcaaagaaaagaaacacatggctaaactcgcttccgctttctcttctctaacttttgtctctttgcaactctttacttccgttactttctttccttcctcctcctgctttctctgaataattccaattattatcatgaactcgaagcttgaatcttgaatatcccaaaagatacacaaaatgctatcaaaactcccttctacacactctaaagcatcaataccaactatacccagttctttaattttgttccagaggaacttttgcaattttgggtactctgtattcaa

SEQ ID NO: 51597 - DNA, 931 bp, Ricinus communis
  Intron number 1 from transcript 29841.m002740 (locus 29841 .t000004) derived from phytozome v7.0 (chr-ID 29841; pos 4 0635 to 41565)
ctcccaaagaggctaacctcttcaagctcatcgtcgtaagtttctctctctctttctctctctacggttatagtttagttaccgcacgatcgtacttcatttcttagtttcttacttatagtctctgattgcggttttgttttggttgcctctggaatccgtgaactaaaattaaaattaaatattgataactcaaactttgggctctctttgtctgtgctattttttttctctttttaatctcttatattgttgcatttttattagtgaagttgtgcagttaatagcaaatttttaatctctaggctgaatttttagggttttgtgtattttttatccattgccccagaatgctcttgtatgtacatatgctcatatgtatcatattatgttaatcgttacataaattttattcttgactattctcttatgggaatggatgcacttgcaagataaaaggtcagttatttttagtggattgctaattagtgctattagctttaatcatgtccattactgcgtaatcaatgctttctatattgatcttgttttggtaggaggtaaggtgttattcgattctttctcacatgtgcatctgtaattttatttgatgaaatggcgtttatatacttctatgcagtgtctgatttgccagttctttatgatattttaataaactcgaaaaggattttgtcttgattttctattaagcatttggcattatttctttaactatgccgatagtaatagaagacacgtatgtgggatgcctccatggtttcagggtgctatttgattatcgttatttattactattactagattattgtgctgaccaaatttatttgcaacatgaacttggtgggctatttgcatcaaccatttgttgaaacttatctttttcatttctcttaatcattgcagaaatcat

SEQ ID NO: 51598 - DNA, 984 bp, Ricinus communis
  Intron number 3 from transcript 29848.m004677 (locus 29848 .t000233) derived from phytozome v7.0 (chr-ID 29848; pos 1 296930 to 1297913 reverse strand)
caggttctggtggatcgttacccaacgtaaacggcctatagcccattatacagtcttttcaattcagtgaataaatttgtgatcatatatgttttaccatttggatttgatgtttctgcattttgtcttcaaattcaagtttggtctcacatatgaaattctttggggtcttgttcttcattccactactactgccctcttctctagtgtttgaatccaaaacctccaagtcggatctgaatttttaagttaggctagtctcatgctcatgttgtacacagctccacatgtgattacttgctgttagtttagtttgattgatatagagagctgtagtttgcatgtaaaaagcttgaggcccatcatagtgttattatcatgcttcttttaggattggaccaacaatgcatgctcatgcttattagctaatactcttattactaggtgagatgttatatgatttgatttgcagctattttcaaacgctactgttccacattttgtgatttggagtgaaagatggatttaacatataatttttgtgcataatatcttttgcagtctttagttttctggagcctatatctttagttttttatttcatatagctttttcttcaaaatttgtctgcagctgcacttagcacttgtgcagagaaatggtcaatgatggctttagcagtttaattagtgtgtaaatgcttgaggctaggtaaaacattgagaaactgccattaaaggttcagctaagacaagacatgcattaaggtgtagcatgcaattcagttactcatggttgttctgtgactgaacctttggttgctttcaaagcgttaatatgttttccagctttaagcacgaacttggcatgattgctataggtgcattttgagcttggtgctttgcattgtggtgaggattatggaatagataattttacatgatgacccaagtttgattggctgaaatatgttctacaggggtg

SEQ ID NO: 51599 - DNA, 889 bp, Ricinus communis
  Intron number 1 from transcript 29848.m004677 (locus 29848 .t000233) derived from phytozome v7.0 (chr-ID 29848; pos 1 298746 to 1299634 reverse strand)
tcctctctcgctctccgctggctggctggctgtaggtgagatatggagttttacggagatctatttttgtgtgtatgtgcgtgtgtgtttatatatttgttttccttcttattttcttctctttgcattttctcttttgatatgctttgagtctgtttggacgctgcgaaagtttttgaggtaatgaggtgctcaactgtgtaaaacttgtgcaattttggccttaattgaccgaaatgaacctgtttaggttaggtcgactggagagatctgagatttgttgttttaaaccttttcttttaattcatttctcacggaccaaacactgcatggatcctctctctctatctctagctcgttcttttctgtttgaaaatagaacgtgtgttttgctgttttggaaaagaaacgtatattttgcttttcacaagaaatgttattcattttatttttcttttccgaaaatctgtggttatatgatcagatctgctctgtttttctttttcctgtagctacgttttggtatcttttgttttttttttctctccttctgctgacaatgcgtgcaaactctcaactttgtttggccttttgaactgtactaaagttttcttccttctattttattattttgattttttttaatcagaaaatgtgctacagttgaagtttcttttttattccatcagccacaatttttttttaattagttgtttagttttgtttgtttggttatctctctgttattcatgattgagaaacttgattccagtgtttggacgttttgctttatcgtcaagatttgtgattgattatgacatatttttttcatttgatcatttaacagtagatttctgattaattacgttatgttttattgtgcagaagt

SEQ ID NO: 51600 - DNA, 409 bp, Ricinus communis
  Intron number 2 from transcript 30068.m002528 (locus 30068 .t000018) derived from phytozome v7.0 (chr-ID 30068; pos 1 08348 to 108756 reverse strand)
aacatcatctcattcttcttgttcttatcgcctgtgtaagctttgagtgatggttgcatttagagataaaagaggggggaaaagaaaaaggaaaaacaaaccacccactcacacacagacacactgtataaagaacatgttattataagaagaaaggaagaaagataagatggtcaagaacccaaaaagcaaaccaacattttcaccctaaaggtcacttaaactggaaaaataattttcaagaaaagaaaaaaaaggcacctgttcttgtgagttgaaaccaaacgccataactagctaagacaatcccatgtctaagaactagctatatatatatatattgttttaaaaagtgagtctgattcttgctttgtgatcattttctcctcaggccgacttttattcaaat

SEQ ID NO: 51601 - DNA, 308 bp, Ricinus communis
  Intron number 1 from transcript 30146.m003455 (locus 30146 .t000032) derived from phytozome v7.0 (chr-ID 30146; pos 2 61430 to 261737)
caatctattcaccctctcgatctctctcatctctcgtaagtatgtctcttcaacaatttatgtttcttgtaattagattggaaaaaagaaatttgaagtctttttatataaatttatagcttaaagaataaaaaattgagggtttttgttaagggattgtgttatgagttaaattgggtacttcttggttgttaatgcttgaatatataaagaatcaaacttttggtttctttcttggggtattattgatatgtgttatcaagttctttaaaattaagaacatgaaagagtgtaatttattcaggaaa

SEQ ID NO: 51602 - DNA, 484 bp, Ricinus communis
  Intron number 2 from transcript 30146.m003455 (locus 30146 .t000032) derived from phytozome v7.0 (chr-ID 30146; pos 2 61892 to 262375)
tctttgcagctcgaatagtaagttaaatctttcaattttacctccgtttttcatggttttgtctcaaataatattagctgcactcattttgatgaggtcttctgaggaatgaataccttgtagaaggaaaaatcaagtcttttcttgtaccagaatttaacgttatacattgcatcacattgaaatcgtccagatgaaaaatgaaaataaaaaagaaatcaaaatcccaagtagaattcatagttggatggtattctttagaattgaagccagggctataagtttgagagctgatattggagcatgatgtcataggaagttgacatgttaatgatactgttatcatatgatcagcatattcataagcttttataatcagataatgctgagaaatctgtctgtacaccataattatgattttttctgaattgactgtaatcatgtggcagggacgagctttatatcatatatcaaaggcttttac

SEQ ID NO: 51603 - DNA, 288 bp, Ricinus communis
  Intron number 4 from transcript 30147.m013939 (locus 30147 .t000210) derived from phytozome v7.0 (chr-ID 30147; pos 3 466837 to 3467124 reverse strand)
cagcaggccataagagtgagtttctttacattattctatcatagatcatttttagttatgaaattaaggagggttcaaaagtttttgaataaatatatctgcagatccaggctaatttgttttcttatgtgatttagaggtataaaaattcagaaattgaattacttatccaaagaactatgacaagaagcatagtatcaactaaaatttgtcttttcatcttatgttcaatttattatgtttgatcctacagggagttgtggaggagtttggcataccccagagaga

SEQ ID NO: 51604 - DNA, 590 bp, Ricinus communis
  Intron number 1 from transcript 29910.m000942 (locus 29910 .t000033) derived from phytozome v7.0 (chr-ID 29910; pos 3 79609 to 380198)
ttgtgagttcttcttttcttttattatctactgtttggattggtttggattaggttttgcatgtttgaagtggtagatctttgtgtttgatattctatagtggcatctaagtaaatatgtatttggttatagtaagaagaagttaaataatagctccaaagcgaaatgaatcgaaatgaatcattattggtgttaatcaagctcaatgattctcaatctagctggaaatggatcctgtttatccccagctttgaattagtcatcaattgaatcgaatatgttagttagaaagtgattgttccttttcctgacaccatgcggatgaaattcttgtctataaccattttgtacatagggaatttcgggatttatgtaggttctgatgctttaaatttgtatatgcgcgtgtggaacattgattaattttcttttgtagtgacatagcattggatgagttgctgtttactgatttatgttttggaagttgtactttgttattatcatctactatgtaagcatttatattgtttttctgtttgtggggcaaatttttagggtgctggtaaatcggcagttttaaacagcttgat

SEQ ID NO: 51605 - DNA, 1046 bp, Ricinus communis
  Intron number 1 from transcript 29864.m001487 (locus 29864 .t000063) derived from phytozome v7.0 (chr-ID 29864; pos 9 57078 to 958123 reverse strand)
tgttggctgatatattccctcgtgctccggttggggttttattcccttttcttgattttaagcaatgggtctttttttttttttttttttcttttattgatagaatgttgtgtttggtttaaagaaagaaaggcatggggacgaaaaaaggaaagagagggatggggtttctctcgctttttcgatttgagaattagcatttgtaagcttaattagtttgatttgttgtgtttaaattatcatagagagaaaaggggaaattttgtgtttctaaggtttgaacaatgggaggtttttggacgttccattgatttctcagagaatgtggggaaaaggataatgaaattcagtttaatcaaggcgggaagtttgggcattttgtgatttatgttaagttgtagtttattaggtttgcatcttttaaccaatgattagtttatgcatacgtgttgtttggttgctaaagagtgtttgggatacttcgttatatgagtaagactattatgcttttgttcttgccaagggtactttctatttactcattgagcccaatatccagggaagggaaaacagaactctggttttaaatatttccttctaattttaggttctagaaatgagaaactagaacaacctggtcgccctatgtagcttagtttcagtagatgcttctaatttgaagtttgtctctttatcatcattgtgtgaggcatgtaaatttttttattaaatgttttattattaatagtgagaataataacaggttgaaacttgaagctaattttttgatttaataaccaaattggtagacttactaattttatattagactccaatccattcaagctgttctttcattttcaaattctgccttcaacatgaaattttagtaatcagatactctatattatatctcttttgagggattctttttactgccaatcatgcaaccttatactagtgtttgaatttccttttgttgtaatcatattcagtggcttcaaattttgagattcttcttttattttgtcaggaggaacaactga

SEQ ID NO: 51606 - DNA, 912 bp, Ricinus communis
  Intron number 2 from transcript 29844.m003273 (locus 29844 .t000119) derived from phytozome v7.0 (chr-ID 29844; pos 7 35499 to 736410)
tggagctcttattggtggcactgttgcatttgcaggtttttttctttcaattcttgtctacctgagtgatcattcttctagatatgcatattgcttaatatacttgtgagggtattaaataagtcaatcatcaggattaagcctacccttagatcttaattccatcattgctttgtttctgacatcaaatgttaattactccctcaaatagttgtgtctattgtagttgtacctatggcgggctaaaattgatatcttggctataatcaggaaagcaaaaaagattgctggtcgaaatactacttatttgattgttatttaagaaaagattgttgactaccttattgtaaaatggaatttcctttttaaagaacaggttggaccttttgaaactgaaacttgattttcatttatactaactccagaaaagtataaaataaaaaaaatagagaattagctatttgaaaaaaaaaaaaaaataataatttaactagatttctgtttccatcttaccaaatcagtttttgaattttacgctgttatgctttgtaatgatttcataccaattaatattggttactcatatatcaaaatattcaacctaccgttggaccctactaaagatgcttgcagcatgaacttctttcaatgataagttacttctttgttttcctgaaggatggtttcatatttagtatgttttgcatttattttatttattatttgtagtttctgctgcttttcatagtttgacctttatcttttagttatctctctccagtttcctttaagctttcactatctggttagctcaaaattgtgcttaattcaaaagcttatactatgacttttctgataatttctggccttatggcagcaacgcggaagctagatagattttctcaggtcttt

SEQ ID NO: 51607 - DNA, 546 bp, Ricinus communis
  Intron number 2 from transcript 29912.m005407 (locus 29912 .t000133) derived from phytozome v7.0 (chr-ID 29912; pos 6 81018 to 681563)
ttgagtctgggcaggaccggactgccagaattcgggtatgttgcagcttcttttgttgagactgtgtctcaaattttttatcaactatgtaaaagaggatatgttattcatttgttgttcgacttttgagcacgatataggacctgaaaaagaaaaccagagtggtcttaggttttagtaaaagttgaattaatattgaattgttatactatcaaattgttaaagcaatttttttttttctagtagtttaattgggagattgtatcagtcgtttgattaagtaactagtattttcttttttgtttaacggaggtcgttattcggaaagaaagtaaatgtcacagttcatattagtggtttacttagaaattttttggcgggtggtcaaatgcttccttgacagtgaagtctttttgatgtttattctttgctttaacagttacgtctcacactgtttgtagtttggctagccttgtttggggtatctgcattgatatctagtaagttctaatttgttatgtttctattttggatggcaggttgagc

SEQ ID NO: 51608 - DNA, 921 bp, Ricinus communis
  Intron number 2 from transcript 30128.m008631 (locus 30128 .t000092) derived from phytozome v7.0 (chr-ID 30128; pos 2 00234 to 201154 reverse strand)
ctgccactgataaaacttctgttcttaagcttcaggtattgcttgttacttgaattcgttggattcttctattgatattttgggtttccagtgtttatttcattgttcatgtaagttgagcaaaatggttgctttatgctatataatgtattagagatgcttaggtggaaagaattgctggctaattaagcaggttatttatgactgatgttgaggcagctggtgctttcagtgattttgattgttcaggtactgaacatggggtttatctcattgcttacgtgcacaagtacttttccattatggcgtatgtatagtattaggaccaggtaagttcaaaggaatcatttctgtgtggtttaagacatcggtgtgcatgtggtgaaggcatgatagttataatagtagtatgttgagggagaaagtgaatccgttacttcacatatgggaaaaatgtggaatacgaactatattacatggataaacaaataaaaatgtaaggggttactaagttgttcaaaaatgggaagattgagagggattgaaaaagtggaaagctactggaagttatacagtgatcttttctttttacttagctccaagctaaaagcctgaattgtgtaagttcattatttcagcttatgaggaaagaaagagggatttttcttaattcaggtgacaagaaaaaacaagattcattgcacgatgatgtatacctaattgctctaaattcttactaatgtttttgacaaacttttatttaatgccatgtgattattatcagtttatcattattgcaatagttccattataagttgtaattctcctggatgatgctcttattcattcaagggacgctgtttcgtgactataatgataattttccttactattttcttttcctaggttggattgttaggc

SEQ ID NO: 51609 - DNA, 677 bp, Ricinus communis
  Intron number 5 from transcript 29904.m002891 (locus 29904 .t000005) derived from phytozome v7.0 (chr-ID 29904; pos 4 8988 to 49664)
ttcgctagattttatttcatcaaaggttagtttggttctttattcaatcaaagattcattggctgcaaaagccattattttttacttagattaaatgaaaacgtggctcttatgagagactgtgaagctaattatatgttggtatgtccttataggttgttcggttgaatttttgttcagcttaaccaaaatggactttaatttgattcctcaagaatgctcgtctcaattttactaagttttttacatttgtattcttcatgtcatttcttgaggttttgatttatttgatgttttcttaatggattctatgctgctcttattcataattttatttgagaaaagattacgtatatttgcattccacacgagggggccttttctatttgtggttgcactatattggattttgtttgggaggggagctctgacgagagtccaaccccttagtgcttatgcataatgtggccactcttagattggtagtgagattttggcatttactgattactctcacccttcaaaatggaccttaactgtttgcctaaaataaaagatgtatgttagatgtacaagtacggcaacttctaatcttgtcgtgaagaactgctttatcctgatgttgatgtgaaaactactgcggctggtgccaatctattttgtgtacctttggtagg

SEQ ID NO: 51610 - DNA, 778 bp, Ricinus communis
  Intron number 2 from transcript 29938.m000588 (locus 29938 .t000005) derived from phytozome v7.0 (chr-ID 29938; pos 1 5325 to 16102 reverse strand)
atttgctgttgcaacaaggtgaaataaaccatcttgttataattgcttgtttgttcttgttacatgttctacacagatattattcaccttctaataaagggcgcttacaaagtataagtgcaattttgaattgattttaaaattgctggcattcatgggcatggtccaatactatgatgtgtattcacattattgaaggattatgtgttgtctacctctggagaggtaatggtttgtggctccggtcattaaccaaaaactatttgtggtccaattccctctctcccatatgttgatactttatgaaaactttgcccagctaccctggagataattttttctctcatcactgatgagaaatggtttattggtcagttgttctttaaaaggaactattgaggataagtccttggctgtccttctttatttgttttgccattgcgatttgattttgaatatcttttgtcttttcactttctttactttgtaaaattttcatgcacataaatgttccttttagcttctagcaatcaaaatgaatttcattaccgaacttaattgtgtgttaagtttccttgcattcctcctgctgtttatatttctagcccaaggtcttgagatgctataaattgaattcttctgatagacagccaggaattttctagtttattacaaatgaagtctttattttctttggtttatgctttttcttgttggctttgcgatccttggaatgaagttgatgttagtttaatttgtgttttttcgccttctatag

SEQ ID NO: 51611 - DNA, 846 bp, Ricinus communis
  Intron number 1 from transcript 29889.m003347 (locus 29889 .t000113) derived from phytozome v7.0 (chr-ID 29889; pos 5 24055 to 524900 reverse strand)
ttaacggtacaatcagctgtgaaaatatagtaatgcttttttgttgactatataaatagctcttatgtttaataatagatctgagtgagtcaaggtgcttataagaggatcaattgtgctttagttaaactaatgaagtacaagttacgtgtctattttgttggcttgtttaacgccagtgccagtggtataaattactggacttattgatggaataactggcatttatttattccaaatcaagtaatgtgcaacaatcaagtaatggaatacttgcatgctctagttgttttgatcatcatttggttattgtatgcacgaacaaatgttaactgtatgcgtgtgcaaggctaaattcagttgaagtttacttagtccagaagggtctttggaatgcttatggctggtagagtataattgttttaatctggaaaagaactaaggtatttgaagagagaagaaaaaaaaaaagaaggcatgatgttgcaagaattcaaatctattgaactcttcaacatgatttattccaaataagtccttaggtaactaagatgtgtgaaaataataatttcggaataggctaggaggcttgtataatgaacaagaaacgcaaaactaattgccttttgtagtgtggtcatagagattgagggaattggtatatgattcctctatgtgaatccaatcatgcaggtgcatggtagataaaaaaattcagtctgctgatattgaattttgagattgttcaaggacttgatacttttgagaaattttggcctgtatatttttgtcagaagaatctgtgattaaggtgtttcgcgctatgtgtttcagcagaagaagaaa

SEQ ID NO: 51612 - DNA, 806 bp, Ricinus communis
  Intron number 2 from transcript 30146.m003561 (locus 30146 .t000138) derived from phytozome v7.0 (chr-ID 30146; pos 1 032702 to 1033507)
tcaacatttcttattattccactgctaagactcaggtaccctttctttatctaattatgatctttcttgatggagtcataaattgttgatgctattacttatttctttaattgaatattagctaacttgagttttagttaaaattgtacaagaattatgcaccaatcaattagagaatgaatttaatctatgcagtatgcagaattattctttggcttaataaccagaaaaactcattaactttcaccacttctttcaaatgtaggactatgaaaattgtgttaaatgtagcacaaaattcaactattccactaagaattctgaaatgttttactgcaaaagataaatgggtttaatctctataactagtataaatgatgataaagtcaagaataggcatcacaattatcgaatttttcgttacatatttgattcatgctgggtttcacacaactttggtagttcatgctacaatttaaagaaaaaaagaagaagatgaagaaggagaaatagtagttcttgctatatttgaaaaattggtgaaaatttattatcaggtaggaccgagacgcttgtttcatgattcacatagctgaataaatatgtaagagaaatagcacatccctgtattctatgtatgaatttttgtgaaatggtcatattaatatatgattaggtttcatagtttatccactcttatagaggcaaaaggtaataatacgagaaaaatcaggttcttcctgttgtttattcacttttgctaattgttaggaagaagtggagatagaggcaaaggttgtagggga

SEQ ID NO: 51613 - DNA, 1013 bp, Ricinus communis
  Intron number 1 from transcript 30143.m001164 (locus 30143 .t000003) derived from phytozome v7.0 (chr-ID 30143; pos 1 0543 to 11555)
gaagtaggcaaaagagcattgcagaaatctttcaggtggacaacatgaacttctgcttcctttttgttgttgtttttttttttttttttgaaacattacttgctttccatgcgccgcttattgcaaatgctcagattttttttaatggattgtggctgttagatattgtgtgttttccagtatgatgaagggatggtgtttattgcaaatggtatgtgaaatatgatgatccttttcttagctatcgtcaatgttgtctgtcaaaatatttttgtgaaagttagagtgtattttataatttgcagtgtacgtgcaatatatactgtgatctgtaaattctgtttctttttggaagaatctatgttagtttttaggtctgtagcttgtatgctgtatttagggttagtaatattttggtatttatatttaagtcattattattgctctatcatttatcttttctaagaattgattgcaacagcattgactttgatatgattatgagaattaattcatcttcttttccatttttggatgtctattgattgctctatgttggtggatatggatcatctcagtttgtttcctctcgttcttttatttggcaattatgtcccttctgtttagtaagcatgtgcccgtcattatcttgtactaattaaagttgttatttcaattgtttgatagtgttttgtaagtgagggcctatcgatttatccttttgctttttattctgtgtatcttgctttctcttctcccttgtatgaatatagattttatgattttgaacaaaaatacatatatatgcaagtttttatcagtgttcattaagtctgcaattgggatagctagcccatatatgggtgatttatgatagaataatgtccatcaccaatgtttctttctcacttgcttcattcactgaatttgcacttctgcttttagtggttcttttttaacaaatgcaagtttaatatgcttctcgctaagtggtttgtttttgagaattcagg

SEQ ID NO: 51614 - DNA, 757 bp, Ricinus communis
  Intron number 3 from transcript 30026.m001446 (locus 30026 .t000010) derived from phytozome v7.0 (chr-ID 30026; pos 7 1899 to 72655)
ccgagtattggaaatttgagtaatctgaagaccttgtaagttgccagtactgtcacgtttgcttcctttgctactcctaggttatcgcagaaaataatcgattaattggtatactaggagataaggaagcttccagagcttcagattctggacctttatgaattttgtttttgttttttcttttactttcattgctatccaaattaagttgcgcttggttttaatcttatgcgtcctgtaaagctgccggatatggtttcattaagttgaacaattggaaaagaaccaaaaatcttgccccggaaaaattgtactactagttttagttgtcactaatttatggatggcaaagaactattctactcaaaaaggggctccaattaatagttttatatctctaatacactccaaaatgctcatggtgtttgaagtgggaccaaatgcagctccattttatcttgtgttaaaatatttaattaatatgatggtggtcaactattgaactttagatctttcgattatagaggctctggtaccatctcaaataactattccacccaataagctgttaggtgaggcttcaagaataattttgtatctctaacattggagatagttcttttttttttctttccctcattttggtcgcctgatatgagtgtaatgaattgaagtttcaatggtgtattttacaattgctagtgaatctttgctacttgtaggctattgcagaacaaccggttaactggtcccatac

SEQ ID NO: 51615 - DNA, 572 bp, Ricinus communis
  Intron number 3 from transcript 29883.m001987 (locus 29883 .t000042) derived from phytozome v7.0 (chr-ID 29883; pos 3 19463 to 320034 reverse strand)
ttgaaggaggtaaaccatcatacagtaccgtgccaccttcttgctgcaatgccactgagatagattggtcattaattatttcaaagttcttgtcatttgggttggtgactgataaacattggttggattaacttgtgcttgatattaactcacctcttccagtctgagtgtcgattagtggtacattttccagatagtagcgttattttgtctgtcctgcataggaggtctctacctttttatcaaacaataaaaattgaatctttaaaatattatcttcatgctgattcctatcatgctattgattgtcaattcaatgttacccaaatttatgcaccaaaagaaacaggctcaataatgccttctcatttcattatttacccttttgttaaggtggcatgtttcactatacatgcctaaatgaagaagcaagtaaaaaataataggcacatagtaattctgtttacagcttttttgcttttttcctttaaaagtaaagaatatgttcttataccacttcaatggttcactctacaggtggttccacaattatcctgtcctattgctttatt

SEQ ID NO: 51616 - DNA, 1004 bp, Ricinus communis
  Intron number 2 from transcript 29848.m004594 (locus 29848 .t000150) derived from phytozome v7.0 (chr-ID 29848; pos 8 74057 to 875060 reverse strand)
gtttctatatcgctccaatctggtttgtaacagaggtatgttttgttcaggactagttgttcattctaaattctgcaacatgcaaaaatcaatattgtgcataaatccattttttagttttggaaaaatctatcacttgatataaatgtatgtgagaattgaatgatttcctctcttcaatccctgcatttatattgtagtcttgctctcaaaatataattggccgttgaaaaataagttctctgaatataatgggcgctcttaacacaatgtgatacatgcacataaagatgagtttttgaatattgttttctgatacaagccaattcttattatgctgtgcgactatgttaatccatgtgctcctacattgtgaggataggtatccaaagagtgatgcatgagtgcaagttatctagctagataatcaggcaccaggtcacggatccatgacgcctttcttgtttctggtttttctgtatataaaatattctaacatcaagtaggtctctgggtcaactggacataggtttcattagttttctacgccatgtattgctgtcacacatgatcaatacgaatttgcggggtttagagcattattggctgtctcattggatccactaagcgaacaatatgtgaggttcagtgagctgataaaagaacaactaggatagaaaaccgtaaaatgtgtagaatcattcacagccattgtaagagaaagagaatcatccatagccatttttccaaatgcttgtccaaatcaactttgtccttaactttatattgttgcatggttaaattgattaggccatataatttatgcattgttttatgacttttctgttatactatcagatgcatgtgtatttttgctaaaagatttagaattatttctggagctcctttgtcttgttcacaaaggattttggttaaaatcagcattaaggaattgagtgaagttcttggttatggttttcgttgtggagaacagtatttgtcaa

SEQ ID NO: 51617 - DNA, 586 bp, Ricinus communis
  Intron number 1 from transcript 29826.m000743 (locus 29826 .t000016) derived from phytozome v7.0 (chr-ID 29826; pos 3 16925 to 317510 reverse strand)
cttctggtattgcaggcttgactactgctttttgggtaagtagtaatactatatatgctagctttaacttctatgtttctttttcttgaaaatctttgcacaaaactataagctttttggtttgtatacaaaacatactatgaccttttttacattcccacatgaaacaaccaagtaaaagcaaaattcctaaatgagtttattttttaattttatccttttccatgtttgcatatatgaataatgaatttaacatccaaatccttgcaataattaaacataaaataaaactaagggttaacatcaagacactaaaactaaattaatgcattaattgaattctttatatgttgtgattgttctgttacgattgcattaaagtatataatataagatggaaactgcaaccaatttattataaattttaagctgtttgacctagcaaccaaaaaaccaagatgaatatttttcagaagttatttaatttcttttaaaatggtcttccttgagttgaggagattaaagaaaaagactacaaaattaaaatgcaggtaggtccaagatcaacaaaggacagggagagatt

SEQ ID NO: 51618 - DNA, 606 bp, Ricinus communis
  Intron number 1 from transcript 29983.m003269 (locus 29983 .t000168) derived from phytozome v7.0 (chr-ID 29983; pos 9 04794 to 905399)
tcttactccaagcttcttgttctcttcactgtcaggttttcttttctatttctttacctttttcatttctttgttttttctgtttctcttcttggtttctgcacgaaatgcatttaacttgatttgaagtgatctactaattctttgttacctttttccttttaattttctgggaataaaggcagctaagagttctagtgattgtggtcaagctataaaagagatgagagctctaaagtttgctcttattgcctttcccttctctttcttgacatgaaagagaagaaaagattgaatttttggaagatgttactgaataagaagtaacattcttttatcatttcgggaaaaaaagatttttggttaattgttaagacaaattcagtgtttacttggctttgactttctcttttcatttggctcgaatatcttgatttattgtttttaaatatttttgttaaagaaaataacttttgttaaggtagaataacttgaaatttctaaaatttagatcctgcgtgctagatcatgtctactttaatacatttttgtggagatgaaggtacattttcttgataaattgcagtagcggtggtctagtagcat

SEQ ID NO: 51619 - DNA, 239 bp, Ricinus communis
  Intron number 1 from transcript 30059.m000471 (locus 30059 .t000017) derived from phytozome v7.0 (chr-ID 30059; pos 1 31604 to 131842)
ctaaagaagaagactttaaactcctcaagatccaggtttctctctcttaaccacattctttctgcctctattttttttttttaagttgattatatgttccgttaatactatactattattgtttctatttctaaggctaactttgattgtggttttctctttcccttctaagacttcttgaattttgttgttttgctttcttctacagacttgtgttctcaaagtgaacatacattgcg

SEQ ID NO: 51620 - DNA, 600 bp, Ricinus communis
  Intron number 2 from transcript 30059.m000471 (locus 30059 .t000017) derived from phytozome v7.0 (chr-ID 30059; pos 1 31853 to 132452)
gcagaaagtcaagaaactacttcagagaattgagggtatttgcattccaagcttctttttgcattaaatatatcttctgtcatttcttttataattcttgctgttggagtttattcttctttcagctattttagtcaataattctttctcctgtggttatttctgtttgctgaaaatttaatggaaaagagcatcaacgttttcgtttcttctcttgaaagcaaagaaaattagttcaactcagttctaaattttcctttgaattcttttgagtttgtagcattagtagtagtcttctcaattttcttttcttttcactgctgtccttttttatcttttgactacctgcttttggttgaaaggaataaaattacttagaaaagattttgtccaagaaaagtcaataatttctgttgaagtaatgactatggatgattctctgtattgactaatttattcagccatcgatcttttatattcttttgtagtgtcctagagataagggcacttaaagttcatattttgggccaatattcttttaaaatcttgaagctttttgttacaggggtttaccaagtaagcatagaagcagagcaacag

SEQ ID NO: 51621 - DNA, 292 bp, Ricinus communis
  Intron number 1 from transcript 29822.m003517 (locus 29822 .t000192) derived from phytozome v7.0 (chr-ID 29822; pos 1 142996 to 1143287 reverse strand)
caggtaatttaggatctgatgttttactgtttaacagaggattttaactcagagttgggacatacaaaagcttttagctcgagtcttttttctttcaaaattatgaaaacaattgtttccctaggaataatttgctcttcagatttagtttctcaaggtaatttactttttcagtcagttgcttgtctatccttggtttcttttgtattctctgtcagaattgtgttctaagaaaatggttgagcattaactaatcaatttgagtttgaaattttagcatcccccttcctcc

SEQ ID NO: 51622 - DNA, 636 bp, Ricinus communis
  Intron number 3 from transcript 30128.m008766 (locus 30128 .t000227) derived from phytozome v7.0 (chr-ID 30128; pos 9 01456 to 902091 reverse strand)
ctggtttgtatattgtttctttatgatttcattttctgtcttaattttatgaatagctatagatagtgatatgtctaattattgaattgtttgtggtgtaacttaagctttctggtttcatttggtgtcaactatgcaaagttagattttgatatatgtactgagaaaatgtatacattttagcatgagtaggagtttatattaaaggcttacatatttgtattgcatggactcatggtagtactagtgaagatttctatcaagcagagatttttagcaacttgggcgtggtttggaccaccgggaaatccctatggtttttggataatctcttaagactactcaaaaataggagaaatgaccttaattgattgggggagtgctcttcttctatatcaatttccaggcaaaccgagtgaaagtaagctaggagatgttgattgaaataaatgtagcccacaaatttttgcttgaatatagcttccttgaagctgctaacacagcctaaaatttttcatacaatttcattactttgtgggtagcacaagtgacttgctcatagattgcagatgggtcaatataatggccagaatttgattggtgcagatacattttcaaaaccagtttctggttctg

SEQ ID NO: 51623 - DNA, 461 bp, Ricinus communis
  Intron number 1 from transcript 30025.m000575 (locus 30025 .t000003) derived from phytozome v7.0 (chr-ID 30025; pos 4 8345 to 48805 reverse strand)
cgtctgacctgcttcgacatcgagttatttcacaggtttaattttgatgatttctcttcttctttttctttttctgaaacatataattaaacaattcgaattcgatttaaggatgttcttttctttgaagatttatcattttctggttttataaattttgagaaacaaaaaaaaatccaatacttctgatttttcttggttgagaaaagaattatgtttatcttctgtgattttgacatatcatgctaaaattctagtggctatgatattattcttacttacaatcaggataatttacagaaatattgaattaaaacttttaagaatgaatttttactaatttcttttagtactgctactgcttaatgaattttctttcaaagaaaagtattatgaattttaattttaattttaattttgttgcaggttttggagttgggaattgtggtgcactctgtaat

SEQ ID NO: 51624 - DNA, 642 bp, Ricinus communis
  Intron number 1 from transcript 29929.m004526 (locus 29929 .t000029) derived from phytozome v7.0 (chr-ID 29929; pos 1 83365 to 184006)
atctcgactctccttattcaggtgaacccttgctttttccatcttcactcttgtttctttgggttcctaggcaacccccccaccccaacaaagaaaaagaaaaataaaaagaaaagctttgatttatatttgtatttatgtcatgtatgtccaatttgtgctatcaaagcctcatcttttgctctgtttttctttttcctcttattgtgctataacctaactgggaattgatacttgtggagaatgtgcttacagcttacccattttggaaaaaaagttgtagaggtctataatgttggaattcaaaactgatatgaaactaaaacagcttgggaatgatcattcagcttttgtggtcttgtcttgaagcactgtccattactgatttctgaatatttttacgcacacaaatcatggttttgcgaagaagagatgctgttctctctggtatcatgtttgactcttttttctttttctggaaagtctcttgcttttacgtgattgttcttcttattgagctacttaaagtccttgtactctcttcccattggtcattacaatatttttgtttctaattgataataccacatgatacattgacgaacagtcgagaagacttcagctactacctctcctccttgg

SEQ ID NO: 51625 - DNA, 705 bp, Ricinus communis
  Intron number 2 from transcript 29841.m002878 (locus 29841 .t000142) derived from phytozome v7.0 (chr-ID 29841; pos 8 68674 to 869378)
ccaacagtctgattgttcctggcaaccaaacagaggtaagtccgagcattaaatctctccctctctctgcttgttgttattattattattaattctcttttctgtacatgttcatatctcgatcatctaaagcgcttataatatgttgttatgatcttattttcattataaaaagtacaataagcatcgagttatgtgaaatatggaggtattttttattgatcaagtttttgcttaattggtgtttctgatgcaatttggtaaagatcacaaagataacaaagctttttatttaatttctaaggttttgctcttgtacgtctctcactgtatgtctttctatactacaactatatagtttgtagatagattcattcttgaaagatttctatcaggcgcaaggctctgcgagaggtgaggcacaaaagagaagtgaaattcttgagagaaaataaaatttatatacacgcatgtatatgatgatacataatcctttatttgtaaaaaagcaagtacacaaaacttatctctaagagacatggcataataaagaatttaacattcatagtcggattaagtcttagttaactttgagtctttaaatggatcttcgatctttttagtattattagtttaggttagtgtatttgagcatatcagtgaatattttacagcaatatcattctttcttcaataccaggggaa

SEQ ID NO: 51626 - DNA, 740 bp, Ricinus communis
  Intron number 1 from transcript 30073.m002293 (locus 30073 .t000103) derived from phytozome v7.0 (chr-ID 30073; pos 7 02388 to 703127 reverse strand)
tcttccaagaccaagtaagtttacatgaacgtacatgtataattctgtttctctagatctgattttatctcttatgggtcttataaagttcaaatttttattgcaattacgaaaattttgttcttaattttgttattagtggattaggtttggatctgttttttgttagggctttccttttcttttcccctctcgttccttctttatttgagttctaagtctatccctttttttctctctcccttttttttcactgtaactctatttctacactgtaaacacacacaatatgttttttttatttgtcaattttgcttttaggttcaaaatttgatatgggttctacttcatgttcacagtttcttaattctgatcttatttataaagttttctagtgatatttaaggtttcattttttgatctattcatgatttcatgtgccttttctgcttgaaacttcaacttgattgctttaatttagtgtatgtgctattagtgaatgtcaatttcttgtggattaacaaaattattattagcacttcacaaagttccaaactttggcatagatccattgtttttgaaattaatgaaattttgtgagttgggtttcttgcatttggattgtaaaaccttgtacctttatctacaatggattttctttatctcatgttgtaatactaatgttttttaaaactgaatgaatagatctggtttatccgaaaccccaagcaaagcatcac

SEQ ID NO: 51627 - DNA, 528 bp, Ricinus communis
  Intron number 1 from transcript 30138.m004030 (locus 30138 .t000204) derived from phytozome v7.0 (chr-ID 30138; pos 1 407061 to 1407588)
aggaagagttctcccacatttctcaagacatttctgtatgtcgataatcgatctcccacttcccacttttctttttctcttgctttatcttcatttacattctgtctcagttcttgtcttctttcattgttgtaagctttgataataatgtttgacaaaaacataattcatattagtaactcttcaatgggtgttcagattttacatttctaattatataatcaacatttgctaggaattggtcgagagagataattcagaaagaacaagatctaaattgctgatatagttcttgaacatgtttaaaaaagcaatgcaattttgattgctacgccatagatgtatgcatatctcaaatgcagagaaacaaataatgagtgaaaatattgatgttgctgttcttgatattacaaagtagaactcttatctgtatttctgtgttactggcaattttcttctattaaatttcggtagatattctgctgttacattccagactttctcagacactgttgaggagaaggcaaa

SEQ ID NO: 51628 - DNA, 514 bp, Ricinus communis
  Intron number 1 from transcript 30024.m001748 (locus 30024 .t000065) derived from phytozome v7.0 (chr-ID 30024; pos 1 205027 to 1205540 reverse strand)
aatccagagcatcattaaagctgccagtaactcaggtaaccctctcgggtcctattgcactgtgaagttgaatcatgacaactacttgttgtggaataacatggttcttcctgttattaaaggaaataagatagaaggctttatcactagtggcagaccttgtccacctaagtttattaaagttgcagtagacaatacaacagatgtgaatcttatcataaacttagactatgaagaatgaattgctcaaaatcaaatactccttggatgactctacgagtctatagatcttaaagtagctgttgaagtcatgggaagtgcaacttctaaggagctgtaggactccatcaaggagctctttagaatgaaaaccagatctaatataatctatattataaacgagagttcaataagatataaaagggcaaccttaatgtggctgactacttcaaaaatataaagaaacttgttgacaatgtggctctgtcagggcatcctataagcattaaagatc

SEQ ID NO: 51629 - DNA, 610 bp, Ricinus communis
  Intron number 3 from transcript 30128.m008616 (locus 30128 .t000077) derived from phytozome v7.0 (chr-ID 30128; pos 1 18746 to 119355)
gcaaaacccttgtcaccagaactcaaggaaccaaggtctttctcctgttgcctattcattctttctcttattttatgcattcggtttttatattttttagatcattctgttttttaaactaacttgtttagtttctgaattgttgtcatgtcacatagaacactctgttcactctgtaagtgaattttgattttgttgcaagccagtatgtattgtcagctttcaaattgcaattcaatgtatattgctatgctcagcactcaaattacttgctggaagaccctcaattatttataattgacacggtcgtggttttcaaataacccacaccccaaacacaacccacccacccccctgcattttggaaaaaatgtacatcaaaagaaaaagaaaggaaagatgcattttttctgttccggacctggggaaattgtaaaattagtgatagctttcatagctgttgatttctatcttgtgtgtgcaaagactagagcaggaaaattacataagaatgatgcttggtaaaaaccataaagttcgaaagattcttcattggagtttgcttgtgtatacagattgcttcggagggattgaaacatcgagtttttga

SEQ ID NO: 51630 - DNA, 782 bp, Ricinus communis
  Intron number 1 from transcript 30072.m000979 (locus 30072 .t000053) derived from phytozome v7.0 (chr-ID 30072; pos 3 34622 to 335403)
ctagggtgcgttacttttctctttctgctgttcaaatatgttagtacggcacccatttttctctttctgctgttcagatatgttcgttcgacacacataaacacactcacaaaaaagtgtgagatatctttgttcccttatatttttgacttgctactctaggtctcatgtggataatcaatagagttttgctttccagtgaaaggactaaagctctatagatttcttatatatatattgtacaatttgaagtgcagtagaaattccatcaattgaaagctaaacaagaaaaagtgaataaggaattgcatcgattgaaagccaaacaagaaaatgtgaataatgggcctaattatatttcttcaagtggcttccaagttgcccccctttggatttgtttataacaattgttggtttctaagcattgggatacatataagacacatgtatctgggttgattttggaaacttctggtaatgagtatttactcatgtaattttagttcctcagcaaatatccacttgttttcttacgtgttagttgtacacaagcagaatctatcattaattatctgttttctataaataactgctttagtttatggaaccacttttgacagtctttggaaatatttcctcatacttattagttgtgggtggtaaaatattttccttgggtattctagtactgaaatcagatctatagcattctgattatgtatttgctgagacgtttttacttttatcacttgttgcaagtccttgaccattttcatttcagg

SEQ ID NO: 51631 - DNA, 686 bp, Ricinus communis
  Intron number 1 from transcript 30075.m001182 (locus 30075 .t000049) derived from phytozome v7.0 (chr-ID 30075; pos 4 12820 to 413505)
atcattcaggtatattagctgaaaatgttcatccattaagcaatttagtgataactttatcagtatataatttctttttactcggttatagactgatttaagatattctgttctacattgcttttatcagggatacatgggattcttttttttcccacacaagtacttggataagctttatatatttctcttagtatagcagaatcctggcaatcgtggggctaatacatgttttaaggactttcaggtttcttaactaagcaaaggattattgcacctaccaaattttgtgggaaatctgtattctcttgtggagggaatgttctactaatggtcaaaaaatcgggccgtaagatatttgtattttctgggatttctctagtgtttcagtttgtcttggaagagtatcaatataagctgacactcttccttactagatatagtctttgatgctcataatgaacactgagcttggctttctcaataaggtcgacaatacccacatttttgttctactccactactagcacttcttgtgggtaaaacaggagccttaagaggatcttgtgcttaacaaatatttgacggtctaggcagtttaatcaaattgactgttatggtgtctagagtttctcttaatgcttaacaatatgatattaattaagatgattctccagataatagtg

SEQ ID NO: 51632 - DNA, 807 bp, Ricinus communis
  Intron number 3 from transcript 29908.m006145 (locus 29908 .t000196) derived from phytozome v7.0 (chr-ID 29908; pos 1 87298 to 188104 reverse strand)
cttgcagggttgttattggttaattggtgaactgatatatcgtatttttaggtttattaagacagacatcttttgtttttggataatgttagagaagtattttattctttgataattaaggttgccccttaaaacttgtcaaagaggattggttcttccctttgcatgagaaatgactcaaaatggggaaacttgtaaatatacatttgttggttctgttgtttttcttctattcaagtgggcaagaattaattgcattatctatcctatgtgatcataaaattcaattcagcatattatttcttttctccatttagtatttttaacctttaggttatttctaattgcactttttttactagtttttttacacacccttcatatttagacagttatttatatcctataaaatatccttaaaattattaatttctatatattaatctttaaatagtaaaataatcaatttctaaattatattattattaatatcccaagagcaacatattttattttcatttgtaatataagaacttatattaaatgattaaataatttatttctctatctattcttttcaattttcttattgtaattaaatttgttgtttagtttaattagttcaatattttattttcatttgtaatataagcacttatattaaataaccaattatttacttttctatttattttatttttgtaatcaaataataaataacaatgtgaagtttattttaaatgaaaaacagtaatttaataaaatatcgcaggggcagcagctcttcgtctcactaaagatatcgca

SEQ ID NO: 51633 - DNA, 582 bp, Ricinus communis
  Intron number 1 from transcript 29844.m003219 (locus 29844 .t000065) derived from phytozome v7.0 (chr-ID 29844; pos 4 38834 to 439415)
tcccaagagtgaaactgggaagtcagggactggaggtaagcatgagatttgtgcaattactttacaaaatggaaatacaatattgcaagaatctaggtggtttctttctccaccttatttcttgtgggtcattattattgactttaggctttgattagttggaattcctcaaatttctgcaagcaattctagacctattcaacaagtttcttgtcatagtcaactttttcagaaagcagataaaattctgctagtcttctacaagtcaaacaggaagaaaacaagatgagatacaacaagaagcttttggcttttgtaattttgaacattttatcgacttctttgaaattcaatcctggatcatgttaattatatggtgtttgatggtgattttcagagctttaatgaagcatgattgtcctcaactaggtgtaacaaagtacagcactaggtggtcatatcaaataaccattgaaattcttacaaaaaattttgcagtcagtgtatgactgctgaagggctgtcattttcttgtaatggtgttgattgcaggtttctaaactgggatttgggtgcgcggga

SEQ ID NO: 51634 - DNA, 551 bp, Ricinus communis
  Intron number 2 from transcript 30078.m002304 (locus 30078 .t000097) derived from phytozome v7.0 (chr-ID 30078; pos 6 25347 to 625897 reverse strand)
aggtactcagaaatcttgtttctttaccaatatctcctagttggttattgctgtacttaacatcagaggagttcttaattgtaattttgcttaaaatccttttcttgatgagtaagtggtactcattccaactgtacatgtcttctctgctgctgcctatttttttgacttcttgtctttgttattgttaaatattattgtattctaaatattagcaattctccattcattactccccctttattttttagtggaaatggaataattgaggttttatgttaacgtttctgaattacataatactacttctatattttgagtttgctaatttctgcttaattgggtttcacattgcttttttggattttcatgcaaaggaaatttgatgtgctattctgcttgaactagtagcctgattgcatctaatgattcatcaggttaattggcttaatctgcataagcatgaaatttctaaactcagcttttgtttgtaaatcccctgtgacattattgtattataaccgggttgtgcttttaggctaactattgtg

SEQ ID NO: 51635 - DNA, 513 bp, Ricinus communis
  Intron number 1 from transcript 29844.m003334 (locus 29844 .t000180) derived from phytozome v7.0 (chr-ID 29844; pos 1 018213 to 1018725)
actcccagtaaattccaggttagcttatttccctttcaattcattattcgaagcacaaagttttctactttgtgcacaaaaagaaagaatttaaagtctggtgctttttaggttttgttgaattcttgaggtgttttttttggtttttatttgaagcccgtttcagattttaatttcgtgagtctaatttaagtttaagatagggaaagaatcaatacttgtcagttcttgttcaggtctaacttttgagctcttatgtacaggaaatttggaagcttggtgctttatatattttcttgatttgttgggttggtatattgtctttactgtgaaacccatttttgggtattccctttcttgagcctatttcttaggttttatataggcaaagaatcatcagtcttaactatttttgagcttaagtttgctgtttggaatttgattattattatacttgagcctactttaggtttaagttgtgagtcctatttgaatttttttagtggctgctac

SEQ ID NO: 51636 - DNA, 860 bp, Ricinus communis
  Intron number 3 from transcript 29888.m000319 (locus 29888 .t000008) derived from phytozome v7.0 (chr-ID 29888; pos 8 9776 to 90635 reverse strand)
atagtaagttagatttctctttctgttggtttaatactgcacaaagattttgagctaattctgtatgctaaaagtttgctatatggggtcttgatattttgggattttatacattcagggttttggatttggtcttctttggatcataggttttgggaaccatttacttgctgagatccctagaacagataacaaccattgagtttcaagcaagttgtctgcgctgaatgattattattattattattattaaaatgctgattcagtaaagtctccatgtctcccaactcctattctttattctttattctttatgatcatttgaaattgattgtcaaattgttcagtgggaattatactgcttgtatccttgttaaatgtttctatactcattggaaataaaaagcgtgcaagtactttgtaaataaagatttgcatgttttttttccccagttatattcatttaggtgaatgtggataattatttgaaatttaaggatttttgttctcagttcaaattgtttgaataaggatttggatgaaataagtatgcctcagccaaaatcttacgtattatctgacctactaaaaacccatgtattttaacgtcattttaagtattcaaataaaaaacctaatgtttctacttatcataatgcaactttaatatatttttgttttgtcattttggtgagctcattgcactagtttgtgcttctctattgttttaaatttctttgttttattttttaaaattatatttaaccttctttttaaaattttggaaagttctattgttcattgccaaggaaatgtgtgtttcagggtaaaattaaagacattgaattgaagggtcatac

SEQ ID NO: 51637 - DNA, 991 bp, Ricinus communis
  Intron number 3 from transcript 30120.m000361 (locus 30120 .t000012) derived from phytozome v7.0 (chr-ID 30120; pos 7 9607 to 80597)
aggctaaaagcaagatcttgaggtattcatgcaataattttagctatttgaatgaaaagagaatgtcttggatcttctgcattttatctcaaatttttgtcttgcataaaattctgaaaatggatcagctaaagtatgagaaatcaagcattattattataaaaaaaaaggatattgaatttttttttcttctaatgaggcaaaggttaatccaatattcttctgaggtttcattttacttgacacaatactaattagcataaaagagaaattcagaaaaggaacagtgtaactaaggtattgcaatataggctttgctcttcaaaagcaaggtccatagtgtacatactactgtattatagcttcattaacattctggaagatggtaaataataagagtggagcatctgtatgttttagtttgttctacatctagtagttgtaaatttagaattatcgaaaacttttgatgaattcattatgtgctgctcaattttcaaaagtaataatactaaagaaatcaaatgactcaatcttttttttgtgagtctctgtataactcattttcatctgttgtgcttgtagcctaactcattatgaaatcttatatacaaggctgcctttaatcaggctagttgtttagctttccagtctttgaattcaattgtttagcactaataagtaatagttctggaacttgcatcaatttccatgaaagcacagaaattacagatattatttgatttcatgaccttgctttaatgtgatcaagactgtagaatgtatacatatagacagtcttttcattatcataaactgttttggtacggcattatatactttattacccattataagttctgctgcttttgtcaggaattttttttttttctgaactgctgcttatattaggaattttgcattatatgtttttttttctaaattcatgtttgaagttatacacctggaggttggaaggagaaggttggtg

SEQ ID NO: 51638 - DNA, 850 bp, Ricinus communis
  Intron number 1 from transcript 30098.m001738 (locus 30098 .t000033) derived from phytozome v7.0 (chr-ID 30098; pos 1 131141 to 1131990)
aggtaattctaatttctccagtttacttttttctggggttcttttctgtggcttagaatggttttggttctgtaaagcttggaattgagtttctttattgttatagaaaagattttatattggtttgataaattattattaacttgggatttagagcccaccaaagggaagtatgtatattggtagtttaagaattttctggtgtaaattggactaatgaatcgtttggtaacgactagtaacagatttgcaagttggaggtatttaaaactctaagcatgtagttgaatggcttctttatgtttcatgaattgcattttgcaactctagagatactgtataatgcccttgtatggattttggaggtcgaacaaatttcaaaaattaatatcggctatgatgatgtctgacattcttggtaatggctgaaattttctgatgattagtttcagagatatttatgtcaaatgcagaaagtgaatacctatatgtatgaaacatccagctttaaatgagaggagagagatttttaggtgagaatctaagttactacccacttcttttatgaatcggaataactattcgtgctgtgatcagtagacctaggtttggttatttatgcatgatataaacatcataggggacaagaaaaaaaaattgcattggagaagcctttcctctttctttttggcatatggaagaagatgcaatttctttccagcaattgattttattgtataaagctatgattgattctgacgaaggctctattaggtttagggtcaatatcattggttgagtaatattaaattgttgcaattatgattgatttctgtttgtttttaacagg

SEQ ID NO: 51639 - DNA, 680 bp, Ricinus communis
  Intron number 1 from transcript 30138.m003958 (locus 30138 .t000132) derived from phytozome v7.0 (chr-ID 30138; pos 9 55613 to 956292)
taggcgtctcagccacaggaggcttcctcctccaggtgattttttttttaaaattttctaactgggtattgcttagctttgaactcattgcatcactccgttaagatccatagcttgtcttattcctgatgaattgtatatgcccaaaactgatatattttcttctatttattcagttgttaaaaagtactatcaatggctttttatggcatcagaaatattaagatgcaagcatcagaacgggctttacttctgaagaaaactttctgcattgtcagtttctgtaatttttttgatgctgatgggcaatgtcgcagtaatgtacattagttgtgaatcatgtgtttatggcgtgtatgtgatttcataaagatgcatttataagcatgtgcatgtagattcttgaggcatggctactcctccagttttaactgtattttttcatgcattgataattttaagtacatttattgcagtaattcattttattgttgatgattttgttgattaattaattgaatttctttatctagctggagctatctatttaattgtttaattaagtcaaatcatttatccttcggttgtttttcttcttttactgatttgtgagctcaaactgtttgtggttattggattctaatgcttctgtaatagtgcaggtgatctccacttgagca

SEQ ID NO: 51640 - DNA, 818 bp, Ricinus communis
  Intron number 1 from transcript 29900.m001623 (locus 29900 .t000085) derived from phytozome v7.0 (chr-ID 29900; pos 5 33216 to 534033)
caaataggtatgtaattatattttcttgtttacagtttcggtttttagtttgtttatcttggttgttctttgacttggagacagcttgatagatccctttgaggttcttgagttctttctgttctttggcatttgtggttaatacttgaaggaattctttataattagagttcatttctttgaattgtgtttgggtgtttctttgctcgagtcatccttaaccaaagaaaagtgacccgattatggtattagttaaaaacaaagactaacagggtataaggagtatatatttgaaggaaaattcttttaggaggtaacttttgtaattgggtatcattgactggtaccctttagcaatgggttcgagatggcgatggctattttttatgcttatgcacccccgcggcgaaggatgggtcattatcgccatcagaaatttgtcctcttaaatagacacgtaatcagtaatacctatgggtcctagactcctatattcctgcatgcacagatgcctatgtaaagactgaagtcaacggaatcatatgaaataaattctattctatagaaagttaaccaaatgagctcaaaagtaagtgacggccccaacaaaagtatagcccatagtaaatctaagctcaggcccaacatgctcttgaagcccaatacttgtcaccaactgaggcttgctgaagaggaactattcgctgaagccgaggccccccttgctccaattattcatttcgtaattgagattaaagctcagctaacataagtttgttttctgcaggcctcagcaacatactgtcgatcaatccaat

SEQ ID NO: 51641 - DNA, 952 bp, Ricinus communis
  Intron number 3 from transcript 30076.m004598 (locus 30076 .t000162) derived from phytozome v7.0 (chr-ID 30076; pos 1 066047 to 1066998)
aagaactggagagattggagacggcaagattttctgtaagattaaacttctttctttctttcattagttttagtagtggattacataaacatttttcggagactttctgcctaactatttaatagtgccttttttttttgggatttagtagcagcagtttttgctattttacggggtcgggtttagtgatttactatagtgctttggaggctgtcaaaagttgcagcttcagatagttgatttgaattataacttttacataagaacaaaaactttttttttgcttgggtttcctcttaggcctctcttccattatgattgaatgtgtgcttgcagtgcacatgctcactagtgcgcgagagatcttgatgtcatcaataattatgatgtaaatggtgcactaaccctcaatagcttgtgaggaatattgtccatgcaggtttcaatgtgttattatgtactctagctgactatttattgttgataggtagatgggaaagccattgtgtttttcttgcactcttatacatagtttcttctctcataccctgttgtggtgggcaatataataattaattacctagttactcattgagccataggtcaattttactataccctcttgtcaaaacatgtagtatcaatcttataagcttctgctgggctatattttatggacttggctgttacacaatcaccatgaattgtataattatctcataaagtctgagacactaagttagaaatgcagaatgaagatatatattgtataccatcaatcaagagaaaaaagctaaatgatcatgatacattatgcagtaacgacgccagtgtgtgcatatcaatctaccaagtgtaaacagcttggtgttttgagttattagaaagtgtaaggtatatcatcaagcttctaatggtgttttattggtttctgcagtgctgcctgtttcag

SEQ ID NO: 51642 - DNA, 463 bp, Ricinus communis
  Intron number 2 from transcript 30093.m000370 (locus 30093 .t000021) derived from phytozome v7.0 (chr-ID 30093; pos 2 28095 to 228557)
gtgcacgtaccgcgattgttgttagaagctcagtaagataatcactctttgcttccatcactttctctctatttattttttagcccttgtttgtaatggaatatttgtttatttttctttttaaatgatttattttaattttatatgtgaaaagaacttactctaagtgaaagtgcatgtcagacacttgctcttggttgtcatggtttcttatataaatgattaaaatattctaaaaagcatatccacatttttttataaattatttaaaagttgatcgatgatcatttttaaaaagataatctctttttaaaataacgattattagtttttgaatgcaactactccatgcatgcaagactagtgtcaaatctcaaacattgctttattattattattattatatatataattacaattagttactaattatataaagggctatgttcaaatttatagttgc

SEQ ID NO: 51643 - DNA, 794 bp, Ricinus communis
  Intron number 1 from transcript 30131.m006877 (locus 30131 .t000028) derived from phytozome v7.0 (chr-ID 30131; pos 1 37269 to 138062 reverse strand)
ctgtcagtactctcttcaagattgttatttcaatccaccctgatttacatgtgatcttgtgaaaattgagtgattaagttaaaaaaatttggcttccttgtatgaacccataagcaaggtgttaaatttaatgtactgtgccacaccgtctgcccaaaccagtaacagcttcaaaataatgtaaatttcattggtgctttacttaaatgatttaagttgtgattgtgcatcagcactgctagacattttttgcattattcagttgttcccagttagagctttgccacctgaactcaatcttttgtttcctttcacatctgacatatgcggcatgctttatattgtgcatttaaacattacttgtgagatggatatattggcttataactgacaggacttcttctgttagcaatttgaccttattcacaatagtctgcgaactaaattgaatgaaaaaaaaaaatttgactgttaactttattccagccgaaagcataatattcacataaagtggttataagtagctgaagcaccaaggagattgataatattgtcattttaagtattttctgtttagtttacatgagtttttatgttaataaataaactatgcttcttttgtcttttgtgcttttgcagactgatgaaattagaagtgagaaattgatacatattccttatgaaattgtatttgatgcatagaacagagattttgcactagggacttaaagtttcatgatttttcaataattgtgttttcctgcccactgattttatatgaggtgtttaacagc

SEQ ID NO: 51644 - DNA, 708 bp, Ricinus communis
  Intron number 2 from transcript 29924.m000096 (locus 29924 .t000002) derived from phytozome v7.0 (chr-ID 29924; pos 5 4982 to 55689 reverse strand)
gagggtcctccttttaaattcaagctatctcgcaggtttgttattattatacaaatattcttttttctttgtcaagttcattttgttatgtgttttaccttttgataatgcattcacatgaaaaatatgtttagaaattgtctcaacacacaatggtttgttcaattgcgctcctagtgtgtgtttctctatgcttccatccattttcatggcaaagaaagggtagtcttcttcttttttctttttcttttttctttttctttttaaaaggagacattaatccgatgactagtccatatatcaatttataagaatgtggaacctcaaaattaatactgtcataaaatgatcgtttggaaatatataaaccaatttgattcaaataggataaaaaattcagccttcagctattaattatttagttatttcaaagcattcacagtttgacactagttggatactgtctgactgacctcatattttcctttgtttagatggtcgagaatcaacattatcatcctgaacggttactttgaatttaatcttcttttactttttgttaattattaatatggaggtgggactttgggagcgaagtggatgttgaaaaggagctggcatgtctttagggtgttgcttcatttgctcaagggcttggttcacttatttgcagggatcattcaaattttgtcaattgcgttagatatt

SEQ ID NO: 51645 - DNA, 620 bp, Ricinus communis
  Intron number 1 from transcript 30128.m008685 (locus 30128 .t000146) derived from phytozome v7.0 (chr-ID 30128; pos 4 96327 to 496946)
actctcggcagtgtcccggtaatactctctttctttctcttcttttgttgatcacttcttttttttccttttcatttctttatgagaaatcacggttgaaagaaaggagacaaaggagttgattattctgttgttttggtttctgggtatctgttgttttttgtttcatcttattattcaaacaagccaagttaaatgatcatagttatgtttgattatgggtttcgattcttttgaacttttcgagtaaaaaatttgcgtaacattgacctctgcaatcaagaagatgaaactatacctgttttccatttttgaaattctatttctcttgttgtttggttaatgatgagcttgagaaaaataaatatgcaaatggagtatgaaatgttattaaagttttgtgcagtttaatcctttttttaaatctggatcagtttagtccattactggagaaaaataaatatgcaaatgatggagtatgaaatgttatcaaagttttgtgcagtttaatcgttttttaaaagctggatcagttttagatctttacatatcaattttgttttagtttttgaatttcttttgtggaaaacagttcactactgcggatcttcaaattgccg

SEQ ID NO: 51646 - DNA, 870 bp, Ricinus communis
  Intron number 2 from transcript 29844.m003229 (locus 29844 .t000075) derived from phytozome v7.0 (chr-ID 29844; pos 5 03605 to 504474 reverse strand)
tactctcaagtttcttccttgcgtagtacctaactgtaagtttctgttcctctccttctgtaatcaataatctcttactgaaattctatgaaatttcctagtatgatttgagtcttttgctgttccttatatattgataaaagtgagtccatataagttcttttgcaattacctctagtatcttatacattcatttggtcaactctatctcctctctgattctgttcattattgtagctttgtgttgtctattgctagtgattttgttgatgtaatgaattttcttgtttatttggctgtattttatttggacagttatattggaaaaaggagaaatcagtgaagggattgtgaaaaataattgaaaaacgaatttgttctaaaggttgctaaagttggtggccgttaccttaggtttaattttatctaaaaggagatgaaacattcttccaggagagctgaatgagtaagaaagaaagttaaacagtatctgaatttgggatctataatggagtcaaaggctgtatggccatattttttataaaaaaagaagaattttttgcacatttgtattacttgggaacataatttatgtctttcaatgagttgatgatgttttatataagtgggtagggcatgttaatcagtgtcgtatcaacgacccttgttcaagacagaaaaatgaacttttatcaagatttgatggtgatattttacccatatcaggttaaagattagcattttatgtttcttctttttaaataattaaacctttcttaagcagtgtttcttgctgatttctatatacttgagcctttgttaagtaataattttcctgcattgctgattgattctaatgtgataggtaca

SEQ ID NO: 51647 - DNA, 212 bp, Ricinus communis
  Intron number 1 from transcript 29844.m003229 (locus 29844 .t000075) derived from phytozome v7.0 (chr-ID 29844; pos 5 04596 to 504807 reverse strand)
tgactttttagctccacttctctctcctatctttggtactttgtttttcttcattccctaatcagtctctacataaagttttgattttcttcatttagttcatagaattgccaatctactttgatgggttctggtgtcagagacttcttatgaactgggtcttctttgtttcttcttttttggtgattttgaaaataaataaataattacag

SEQ ID NO: 51648 - DNA, 735 bp, Ricinus communis
  Intron number 1 from transcript 29844.m003244 (locus 29844 .t000090) derived from phytozome v7.0 (chr-ID 29844; pos 6 01475 to 602209)
ccttattagttctcctcaccttgttagaagggtacgcttctttttgttaattttcttgatttttcttttgtttttgcggaagttactcaaattattatggtaatcttttaaaggtctatgtgtcatatagtgtttttcctatttatattatatattatatttctttttgggatgattttaaatttataattttgttcacccggttcggaatctaacgcagaacataagatttctgttcaggaaaaaaaaaaaaaaaaaccacagaatatataagattattcagaccatgtcaggtgaattgtaagtaaaataaagtgagttatcttctgacaaagacgtggctttgcctatcttgtccagctcatttgcatttttcatggtatcatgtgattattttcacgacacttgtctgtttcatgcaattaaataatgggttttctgtatgtcgcagcttctcgagttctatatattgatagaatatttctcctattcataaaaatatttcaaagatataaacttaaaggaagatataaatcatcctaaaattacaagtaagctgcatgaacgacaattattttagacattaccatacaaaattaaaattatttaaaaagattaacggtctgtaaagcttcaatccgtgccctattttagagtcgattataattatctcttgttaaatccgttggttagttgattttctttaattatggcaggtacacttagattatattg

SEQ ID NO: 51649 - DNA, 697 bp, Ricinus communis
  Intron number 3 from transcript 29889.m003372 (locus 29889 .t000138) derived from phytozome v7.0 (chr-ID 29889; pos 7 39099 to 739795 reverse strand)
taagttatctccagagccacctgttaggccatcaggttttcatttacttcttatgcaatcctatttcttttgggggatatttttgcacgaatatttttaattggatcctgattgttattctcctttttcacttttctgagacaaactttgaggtgttatatagctttctaaaaataaataataaataattaaaattaaacttatactgtaaaatggggaatggaccgtgatagtacgttcagacttaatccagtatttaggaatatcattattatgttctcatgcagtagattctgggcattggattttgtttcgaactcttaacggagtataaatagcttagatcccacatcttccagagtcacgttgagggtgccagattatccatggactttttaattaagaaaaaagataccaaggattgaggatgcattatcacccactcttacagggcaattctttatgtgtggctctttcaaatagattgcacgttctagaaaggtgtcaactggagacaagggctgctctctcttacttatacttgcacatctgttactttgtgatcatatattactagttgataactattccttttagagagatgatatcaactatttctgttcgtacatgcaaacagcaactgaattatatttgttttttagctggttcgttgttcctgtttgatcgaaaagcactt

SEQ ID NO: 51650 - DNA, 623 bp, Ricinus communis
  Intron number 1 from transcript 29889.m003372 (locus 29889 .t000138) derived from phytozome v7.0 (chr-ID 29889; pos 7 39932 to 740554 reverse strand)
tgatactagaagataccttcccaatcaaccacttggttagtgctcccctccctttcttttttccctttttttttttaaactttttatgctgctgttctgtttttctttttgatgcattgtattgtatcattagtctttgttttttttttctctttaaattttgtcaccaagaatgtatctcctgtaacacacagttctcagttgcttcacatgcacgaattttaacctgaaaaccaaaatatttgatggtagaacaacaaaaagccttctttctctccttttctttaaaaaaaaaaaaaatctttttcgagtgttgtgttctgtgattggctctaaagttttaatatgtaaaagctgctcacttgcattttgaataccgtaggacgcacaatttaatatcttttatgtatggacttgctttacgggttatcttttcatttgagtttatcctatagaaggggaaaaaagaacaagactttgacatgttaggtagttgtaattgctgtcaaatgtggcttttaaacatatactttgactttgtatggaagcttatctttcacttcattgtgaagatgacctggttattgttttgtattttgctgtagtgagtatatttgttttcc

SEQ ID NO: 51651 - DNA, 449 bp, Ricinus communis
  Intron number 2 from transcript 29993.m001049 (locus 29993 .t000018) derived from phytozome v7.0 (chr-ID 29993; pos 5 02314 to 502762)
ctcaacaaattgtgaactacatttgtagttgaaagtcctttcaagcaattaaccatgctatggtataaagttacttttgatgatttccttttactcacttgttgcaacaatttaatttattcaatatttaaattactttatgcttatgtatgtgttttatagtaagaagcaactgcaaaataacttgatgcagctttggaaaatgactcatatgcagtctaatggtacttgggaggatcgtcgctctgaagagatttatatgagcatcaattttctgtttttgcttcttgtttcatgcttgttaaggaactgtgtagttattaaataaatttttactaccttttcttttagttaatcattttatggaaaataaaatgagatggatacatatggcgaactcttgttattatgcaggagagtgtagttgagattatctctgaccaactgga

SEQ ID NO: 51652 - DNA, 774 bp, Ricinus communis
  Intron number 1 from transcript 29839.m000433 (locus 29839 .t000007) derived from phytozome v7.0 (chr-ID 29839; pos 2 06020 to 206793)
tcaacttattgcccattttcagcttctttcaggtccttcctctctctgttatttactgggtttatgtctgttaatctgctatcattcttcatttttgctttgctaatgcatcatttattttctttgaggttatgttcactcatcttctctttttttctctccaaaattgaagctgattgatttcttacttttctctgtggcgactatgaatggatgtaaaagcttaattttttgaacaatacatatgaaagaattgaatagcataaatgggtttcttcagcaaatggataccgattttatttctctagttagcatttaaattgtatgattcgttattttctagtttcagagaaatccttaagttctgtaaggcaatgtctataagtactttctccaagctatattcatatgttattaataggtaacctgtaaacaaccctttgtttgcttttttaagtgcctttttttcaatggaatgatcttgattcatatgagcattccaacagaattatggaaattactcttttacctttacatgcatgataccttgttcttacatattttttagacttggtgttgtctgtcgtaatgtattgttgataatctaagctttgaagcaggctttagatgcatttaaatatagagtataatcccacattgtattaccttgataaaatttaggtcataatcaacttattctgagcaattataagtgtcaagtaaagtaagtactttagagcagcttttgaatatttgttcaatttcattttagga

SEQ ID NO: 51653 - DNA, 1017 bp, Ricinus communis
  Intron number 2 from transcript 29864.m001484 (locus 29864 .t000060) derived from phytozome v7.0 (chr-ID 29864; pos 8 63363 to 864379 reverse strand)
tggtcagaagccggcaaaatattcaacttgcttctgtaagtgctaaggatctatttgttgacgcttctattaagctattgctatattcttttatcatgttttgtatccatgtctccagcaactaggaattcttgtatcccccaattaggaattcttgtatcctctctttgatgggcaatatgatgatatgatcacatttcttgaattcacccatcaacgttttgtttatatcttgagaaacttttctgtatttaatgatggttttaaactttcatgacatggttttctgaaacagattcactgtagaaagtggtatttgtttaagggtttatagaacactcagaccaatcaatggatgggtcaactttacaaaatagggcttcttaaaatttcaaaaatttctgttcttattttcctgcatgatcaagaagaagcttgcttaaaattttgtagatatttcattaatagtcttattctgtgcgcataactgccatctcattaattcatgttgaatcagcaggacaagttcttgtttgatgcgtctgcatgtgtgatgctcctaatattgggttgtttacaattcgaattttgcattattctgcacttaatatgtcaagtttaggaaatgggtgctcaaagtgagagatccaggtaaaataactttttattagtacgaggtactagaatgattctagttattgaataataaataaataaataaatacttaggaagtttttgtagctgattctcctcctactcttctgttaacttaaaaacatttgcgtttgtcatcttgtttgacttatatgttcccctgttgctgttttcttgtttgaagttcattgtgacttctatcttatggtaaaaccataatttatttgctattagtattcatgtctttgtctgtcacatgcatgcacatttcgtttcttggaaattattccttgtaatgtagattcttctgcaaattttggaactaaaatctctaactgcctgtgcacagtgcactacagagc

SEQ ID NO: 51654 - DNA, 357 bp, Ricinus communis
  Intron number 1 from transcript 29864.m001484 (locus 29864 .t000060) derived from phytozome v7.0 (chr-ID 29864; pos 8 64522 to 864878 reverse strand)
ggaggattctgaagagcagcaaagtcaacccattggtaattaattgtcattattataaacttaattgtttttatgggctatatgcataggctttctagttttaatttaatctattttgaaatgatcaatattaataaatatgtgattcatgaatgtcataagtacctttcgttgaaagtaaaatgagatatgtgcatcacctacttataatactttctttggtttttgatcattgtaggtttatagagaagaagcattttgtttgtgcctctatttagtcttagttttctgtctgcaacaccataaaactcgatacatgttcataacttttaacttgtatactctttgcagccaaag

SEQ ID NO: 51655 - DNA, 980 bp, Ricinus communis
  Intron number 2 from transcript 30131.m007074 (locus 30131 .t000225) derived from phytozome v7.0 (chr-ID 30131; pos 1 332844 to 1333823 reverse strand)
tggatcctcaggtatgtgattgtccctttatacaacaattagatactttaccaggtaaagcaagtgatgtcatagtaaaaagtatgagatcttatgttatgtcaggttaggtggtataatagatagtgcctacttaaaaggctttgtcagttgacttagttaattcattgctaaactaagttagacaaatgagatgcttgatttgcataagaaaagaatagttactcaaatgtttgaagataagtctggtggagagtttgtctatattggagcccaaatattattcgctgagatggtctatcatgctttttgataagaagtggtttatttattcgcaatttgttcgactttagaatttcaggaatcggaacttgagccgcattattttttatatgaagttatagtttgttgcattggagttgttttagaagtcatcattgctgatcaggttccagaattcaagttcttttttttttttgtatgtgtgtgtaaaagcattgaaattgagttacacattgaaattgattaacattgttttagttaaaacaaaccgtaactatctggttgaccacttcatatatggctttccatctttttatatgcttggatgaaacaatgcgggtagttttcagataagtatctgtgtgacccacttgcatgatcaatagaatcactgtaatcaaatcctggaaacatcacagcccaccacctctgtgtttttaatacagcctgttatacctagctaatagcccatcgacccatgctgatgtctcctcattttgtttccatcaccaactaaatctctaatccataagaatcaagatattggagttatatatcacaaactatagatttgtttggagattaagctgattaattgtctaaacgtttgtgataaaggctgtagttgaagtttctgtatttgaaatctttgttatgattgctaaatattttttgttttgatccttaggtccatcctt

SEQ ID NO: 51656 - DNA, 958 bp, Ricinus communis
  Intron number 3 from transcript 29917.m001979 (locus 29917 .t000048) derived from phytozome v7.0 (chr-ID 29917; pos 2 90999 to 291956 reverse strand)
aaatttcagttaccgtaagttctcagaatgtcttttgtcacttctattttcaagttgcttgcttcgtgtgttgctttcaattaatagcagtaccacttttacatctatgtgatgaattatgaaccctttgtaaattttacttctttaaatataaaattctgcagttgatgaggatttcaacctaagcaaaaaagttcatttgcattaggtcgaattaataatacctacacaccagctaaagacagtcgactataatgaaaattaagcttttctaatcaagtgcttagtgtctagctggaagtgctcttttgtccttttggcacaaccctttttgtaatgttttgggtaatcaagcttatggaatctgaatgctgtccttcaaacagttgaaaagcattttaccatgcaattttcatatagaaacaatatgggccttttcttgagggcaggtatagaggtgaactcatagcacattcaaaagtgggaaaggctgacagatgaaaactagcttctcaataggtggtagacgtagctaaagaaaacaaattcataaggaagaataaaaaagtgatcccctcggggagcgggcgtcctacaaagaaaatgtatgagagacgaaggaagaaagttccatttacagaaccaatgacctcacatcaattgctagtcttgatagatgtttgtgatatcctacgacatggaatcacaatctgtttatgataatagcagtattccaaaaccgagtacacaatttggtcatgggacattgtgtcatagctctttcggcacttcattagctgatagtaacctgaattcgtattataccacactaatacaacttgattttgatttatggggagacatgagatttggcctctttagaccgcttagcaatttgtcttgattatcatttgtcctggtcaattgacctgtttcttttgatactaatgttagggag

SEQ ID NO: 51657 - DNA, 787 bp, Ricinus communis
  Intron number 1 from transcript 29917.m001979 (locus 29917 .t000048) derived from phytozome v7.0 (chr-ID 29917; pos 2 92643 to 293429 reverse strand)
ttatcgcttctatttaattaacccatcaccttctggtaaatatccctctcttctttttgatccttttttttttttctttctctctttctttaatttcagatctgattctagacggaaattctagggttttcttttttaaccttttgtttggttgccggctattaaataccgtacgacacatcggaaaagcttcttttttttgcatgtttgcgtttttatcttctctgagatctgagagaatttaacaatttttctggtgcgatttcagctttttttgttaaacaaaaaaaattgatttgattttattactggctttgtataaaatttgatttttttttattagatggtagtattcttatcttgatttcacttctaggtttgtttcgctgtgttggcgataagtttgtttagattttgcatgttactgttgttagattatgctatgttttgttaattaaaagcaccatttttgtcatgctgtttgtggttactagctgcaatacgaagttaaaaggaagtgcttatgctgatggggcactctaaattgaatgtttccctaatttgttgcctagacaacagtttttctttttggttcactgtttttgggttttctcaatactcatgcatttacctgcaattatttgttaactagacgttacttggctttaatggattattgtgtggactgataggtttatttgtgcttcaaattttatgtctaactatttgtctttatatttggtttatttattttattgtagatttgtccttggtgggtttgtttgca

SEQ ID NO: 51658 - DNA, 763 bp, Ricinus communis
  Intron number 1 from transcript 29852.m002020 (locus 29852 .t000039) derived from phytozome v7.0 (chr-ID 29852; pos 1 409835 to 1410597 reverse strand)
tgctagtcctgacattttgaagacctactccatcggtatattcccttcttcttcttctttttgacgtttttatttcaataatagtaagtttatcaatttttttacaatgttgctgttgctgcccctttattactatatattgtccccaatgaatagcactgcacgtattcctcttgtcaaataaaaattaatagcagttaatattcctttccttttgcattcttggggtttttaaaacttgatattcgggttctgatatcagtttatatggacatactctagttgattcatagtatgtatacaatattatttttcttcataaatgttgggtcaattcctctgttaaccccaagataaaagcaccatgcgttacaaactttggcttttcttttatgctttgcatattcaatggagtttgaattacttcttgggcttggaattctaattatattttataatgtctattagttgaggtgcttgcatatattttaaaggctttaaggttcttctaaagttttcatttcagcatatttggttctctctgtccttttattacccttttcttatgtttgttgctgcatttgattgtctgtcacatcaaactactgaagaagaaactgaatttggcactcaataactcttcagttgaatgtatgacaagaataactgatgaaagtgatgaatgtcaataaaagacagaaaggactaaatgtttcttcttgctgcaggtagtgtactgagtggcggtgggagtgcgccactt

SEQ ID NO: 51659 - DNA, 562 bp, Ricinus communis
  Intron number 1 from transcript 29838.m001661 (locus 29838 .t000031) derived from phytozome v7.0 (chr-ID 29838; pos 2 16190 to 216751 reverse strand)
tggtcaaactgtcacagttcactgcaccggttttggttagcagctctttctctcttaaaaagaaaccctagattttttgttactctcatttgctatttgttgccttgttctttaatctctgtgaaaatgtttggggctttgcttttctctgtctaatttggggaaattactctgattgaatttattgtgtttaagcctgatgttttgattttaaggttttgagtttgcttatgtgagtgctaggctgctaaagcattggtctttttgtgggaaaatttgataacatggttaaataagagtgaaatttcatgtcttcatttgatgattaggaatttgtgtgaaaagtattagacaagcatgtaaaaataagctgattagaattgggtgcttgtgattgatagggtaaattagtactctgtatgcaatatagctgcagaagcaagagtacattaataaaattggatcagcgaaatggaatttggaaaataagagtgtagataacgtatagctagatattttagaaaaagcagcattttaatgctcctcatttctgcaggcaaaa

SEQ ID NO: 51660 - DNA, 636 bp, Ricinus communis
  Intron number 1 from transcript 29929.m004583 (locus 29929 .t000086) derived from phytozome v7.0 (chr-ID 29929; pos 4 98326 to 498961)
agtatgttttctcatttctgtccttcccttttacttctatttacatgttttgctattgtttttttccattaatttatttatttgttccttgattctggttgttgacacgtaaaaatgtctttgattgatttttttttttcatttttattgggttgcttgtttcatttcttttttcttaaaaaattaattttcatgtcttttatcgtgtttcacatgtttatgtttgtgttttgactttgtatttggtaggtttgttgggactccggttttttcagtaaaaataaacttaatcgtcaaagtttcgattttcttctcattttccatttttatatgtttaattttttttttttggtgggttctaattagattactgatctgatttcaaaggtcgagtctttattgaatcaaagtaagaatggaagattgagatttgagattttttttttggtctatcaattggtttagttggacaatggaggttttgcaattttgttgaacttgatgatccatttgcatgatggttattgtgattcttgtttgacttttgcctctgcaagtttaatcaaagttggaagatggggctatgtagtatgacttgttgtataagtatcttactcccattttaatgtcctgcag

SEQ ID NO: 51661 - DNA, 357 bp, Ricinus communis
  Intron number 2 from transcript 29929.m004583 (locus 29929 .t000086) derived from phytozome v7.0 (chr-ID 29929; pos 4 99003 to 499359)
tctccaaatatagctgtaagtttctgtaatgactttctgctagttaatttcttatgttacagccttctttggggatttagtatcttatttatacagattcttcttaaatactttggactgtctttttatgtgaatgcacaaccatctgtttttgctaattcaagtaatccaaagaaattgtcatcatcgcaatttgcatgaaaggaatgaaagttaaagtctccgtttagaactttgagttccattttttgttattgtgtttctgtaactcaaggaaacatggtgcaatgcctgcagattaaatgatgaccatattgattttctcgtttgatgcttttctgaatttgcaggtcattt

SEQ ID NO: 51662 - DNA, 785 bp, Ricinus communis
  Intron number 1 from transcript 29950.m001165 (locus 29950 .t000049) derived from phytozome v7.0 (chr-ID 29950; pos 2 60307 to 261091 reverse strand)
ttaactctatccagtctctgtttttccatttcaaggtactttctctcttcacccattaatagttttatgtgtttttgttaattttattgtcttttgtggcttatgcaaataatttctgggtgtttgttgtactctgctgatggttattcgtgtaggtttaattttttgctcattttctttttcaattggttgctcaatttcatacttatatttttgtgggtatttttccaatttgtgtatcgttttgttaggatgtcgtaggtgcttactggtttctgaagggtagatttttgtgtttagaaagatttagttttttggtggttttgtgattctaggtgatcgtatgtatttttagaagattttatttctttagggatattatgatattatttctttcaggagatttttcttttgtggtcgtgattagaaagtaattttttaagattctgaatttgctcatattgtattgatgatgtaattagtgtagtgcctttttggtgtaccttgtaaatgactataaaacgtaatcttgagtctgctgactgttcaaacataattatacttgtctgtttacagttttatgcactttttaaagggcccttttgttatcctggaacttgtgtttggtactttttttaatgattttttttttcccatataatgaaaagtctagtatttgtgaatttaattattgttaattatctaattgcattattctgaaatttattggtactttgttattttgattatgtcaggtgtgcttttaaattggtttagttgggtaa

SEQ ID NO: 51663 - DNA, 765 bp, Ricinus communis
  Intron number 1 from transcript 30128.m008733 (locus 30128 .t000194) derived from phytozome v7.0 (chr-ID 30128; pos 7 35509 to 736273 reverse strand)
gccgtctcattgttgattttttgagtaatgttcctactctagacctaacccaaaattttcataactagtcatgcagtactcaactttagtcataaacataaacttttcactatttagcattttttttttcttactgtcgagcatgtgagttagggaggcacagaagtaaagtaatgacaatacaaaaagattaatgttgctttcttgtttttgctttggcactttcaactaatttcaaatcaaaagcaaaactttcattgtacacaaaatgaaatgacccaccactatttttctttttctgatttgcggttggtaacagacatccaactgaaagctacatttctttctttctgctctttttatttatcttgattgagaacacactccacgattcaacattgccaatggcagcccagaaaaggtgtgccctcaaaataatattcactgtaatatccatttccatcttcttttctctagcacactccatagactttgatttccctgctgtttttaactttggcgattcaaattctgatactggtaaccttatttctgctggaatcgaaagcattaacccaccttatggccaattttacttccaaaaaccttctggaagatactgtgatggtcgtctcactattgattttctctgtaattctctcccttattattgaatatattcaatttattggctataaatttcctctgttttttagcatttctggagttttgatcctaatgttgctatattatgatctgcagtgg

SEQ ID NO: 51664 - DNA, 1060 bp, Ricinus communis
  Intron number 2 from transcript 29912.m005386 (locus 29912 .t000112) derived from phytozome v7.0 (chr-ID 29912; pos 5 65731 to 566790)
ccggtagcttcaataacagtgtcgctggacagcaggttgataatttcttctctcgttttcttttcttttccttttttttttttttgaagttgctttggttctttgttagctgcgccgcatagttgaatggtttacttattggaatgtgcattttttgcactacttatgttttcaagcaggtgtggaacttttgactgtaggtttggtagtgttagccattaataggtccataacatttacgtttagattatatatatgtactttggtgatgctagacgattgctggtaactaaattagaataaaagctataagaattctcatattcaggtaaacataacctttttcttgttctagtttagttattgaaaattaatactgaaatgttttttaatatcaaaatgctgatggctcattacaaggttaaaaggaaaagaaaatgggttgcaggtgttatttgggaatttgttggagttgttaccaagtttaatcagtcgggctgcccactgtaaactgcaaaagcaatggctgcaacctttattgttaaacaaaagtcaactttgtctaactgggaaaactggtaaaatgatttttcacatggtaaaaagtagtagttgagttaaaattcaaagccaagtcattctgatagtgaaaaaggcattgagagaattgggctatgaacatggttaacatgtggtgacatttttagctaacgttatgatctgaagttgtatatgttggggatggatttaagtgaagagcattttggaccttaaattaacacttagattgaacttttcattatttgactacctatgctactagaaattatggtaaggcagaaaccacttattaacaactgcatgaagctgtgtcatttggcgaaatgggaaaagaaaacatataacagctgtgggtggtgatgtgcatgtatggtagtaggcttttataattcgttacttctgtattgcatgagcaagctcatggtcatatatgattgctgaatgcaacttgtttaattcaccaggcagttttggaaactgttgccagatttaagtcaaa

SEQ ID NO: 51665 - DNA, 839 bp, Ricinus communis
  Intron number 2 from transcript 29868.m000341 (locus 29868 .t000005) derived from phytozome v7.0 (chr-ID 29868; pos 6 2995 to 63833 reverse strand)
gagatccaaataggaagtttatttttgttgaagtaagcagaaaaaaagttcttccgatatgtttgcttttccattgtttgatattggttttatgagtttggttttacatatgttagcagttggaatttctgagacgataatgattctgatgatgcatgtatgtaaactcactttgcataaaagttcaaacttcaatctgcaagcttcattgaataatcaggcaactaatgaatgattaattatttgcagaaagcaatttgattttacgtgatatgcacattgcgcatagttaacactttctggtaattcatacctggtcacctatttgattataattaaaatggaaaatccattcaactgaaaataaaattaaacacatatttttatcaattttaagaatttaaacaatcattgtcggattgaatgattaataagaataaataaagcttagctttcctgccacaatcatgagactgataactgaaaataatgatggtatatgtattcttgagaattcactaatcagtaacataattaatgatcagttgactcaggcataatttagaatggataatttttctgcaaccacatataaatttggatgttaggtgtgcatatagctgaaagtgttatcaagattgtcacacagtatcattgagtgtcctcaatgttttgctgtacattttggttgttttgggcggtttattagttttgcatctgagagagtgatgtgaattgtcttgtgtcacttgttattcttttctctttgtatttgctcaaaaagtgtcatatactgatatctaatgaagcttaaatgcaccataggcttttttccaaag

SEQ ID NO: 51666 - DNA, 780 bp, Ricinus communis
  Intron number 2 from transcript 30068.m002650 (locus 30068 .t000140) derived from phytozome v7.0 (chr-ID 30068; pos 8 84090 to 884869 reverse strand)
cggctataaggtagtatatgagttttatgccctgtcatttattcttcaatctttatgtaaatttatttaggtttttatgagatactactacttgcttcctttgtattttgttttagtcataaactttttcctattttaccttctttaatctgttgaagcaaataataaaattatattgggtaaattctttgagttgaataagcaacatttgccaacttcggtagttgatagcatgaagcatgcagcttgatgatgcctgaaatcaagcatgggttcctgaatgaaaagaaaagtcagaaatggcgctgggaggtgtcccagcaacaccactttgatggtaaactcagctcctcagagaatagattcagagtgggtagagagagaaggtgaaaggttttgagagtgttttgttcacttgccttcttctcctttggaatggccttttattcccgttgttagggacatatttgctattctaacatgtgtcttaactttccatgggtgctattcttttctagttctgttcagaatgaattctttcatacctgttgctcgaatatgacaaggaattgtctattcagttcagacaattgttcattatgctcttcaaatttcgacagctccattatcaccacagcttaagatgaattcacatgttacttatgtctgcgtcagagtttttgatggactgcaactgaatgtgtattcatttagatgttacattgttttgatgacattttctgtttgatttattgtgctttccattatctagtgatttag

SEQ ID NO: 51667 - DNA, 669 bp, Ricinus communis
  Intron number 1 from transcript 29933.m001441 (locus 29933 .t000063) derived from phytozome v7.0 (chr-ID 29933; pos 3 45909 to 346577)
ctggaggcccatctgtttcccttcaaacaagacgagtgcgtctatcggattcttgtgccgttaaagcgctagccaccttttaggtcttattaccaaagaggaaacagaactccacgctgtatccccttcccaaatccataagaacgacgatttcatagctcgtaaacagcatcagaacgcgaaagcttgataaagaaaaaattaataaataaaaattgaaaaatccatgagaaaatgcttgcagaagcttcaacaacaaactttacatcgtccattgttattattcaccacgtgcggactttagcaacatccaccaattttcgcggttttcgatcgccatgtccaggtttttcatctctttttaagaaaatcgtttttttttcttttcttaaagctgtgtatttcctggtttcttgggggacgggtaaggttaggggatttcttcttctttttcttttttcttttttaatttaaaagtttgagctaactttttttgatcccgttgtttatgataaatttctagccctaaatttacgtcaatttccaaggattgagctcgttctttagggaaaatatctctaatttgcatctttattttgctaattgttgacccggtcttgttattgaaagggtattaaatttggtaatatttttgcttgcagatttttg

SEQ ID NO: 51668 - DNA, 777 bp, Ricinus communis
  Intron number 2 from transcript 29844.m003366 (locus 29844 .t000212) derived from phytozome v7.0 (chr-ID 29844; pos 1 224109 to 1224885)
tgttaagtggttatttgctttgctaattggcattggtatgttatattagaaatatatatcaaaaaactgtcctctatttgttgcaattacttgtttgttgtgcagttcttttccatatcttgcattaattattttcagttatagaacttaaacagaagatagttaaaggagaaatttgatgcaaatttggcgtggggctactactaggactagttcactttaaaatgcactgtttgagtttgtaggtttcagagaacattgtctggacttataaaacttgtaagtcgtcttggtatggcgttctcgtactgcttgtttctgggatttaaaccaatggagtatagtctccaacaagacttctgcctatggctaagaatgatctaagccacttgtcagccataaatgaaacaccactgaattagataataaatgagctaagcccaagctagctaaaggtcaggtcagctcattttcagcttttattctgccccacaacagtggtaggatttttaggctgtgaaaagttaggcattgtattatgtaattctgaaaaatgtagggatggtgagttgcaatgggtcgaactggtctcttataattgaatctcttggatctttgttaacaaagttaggtctgatgcatactgtcaattgctttcactggagagttcttacaaatttagagttcaaacattatttagtcgtctatctgatatacaaattttcttatatattgctttcaggtactggattagctgcagttttcattaacttatct

SEQ ID NO: 51669 - DNA, 924 bp, Ricinus communis
  Intron number 1 from transcript 29908.m006206 (locus 29908 .t000257) derived from phytozome v7.0 (chr-ID 29908; pos 5 77072 to 577995 reverse strand)
tttactggcaatccaaagagtatttcctctccaaggtcctctctcaaatgtttattctgtaatctgcttcaactttttcttttcaagttaatcaaaaatactacaacaatagcagaatacagtttacatattacatttcttgcacatctatctatcactcttcaaaaatttcttctatttcatattttatactaattgacaagttttagggtttcatttggattaagaaaacatgtaattggtttaattataaagaaaatagagcaataactaaattatttttctatagatatatttaaaatttagtatatacctcttctataaacttataaaattttacaaaaccaattataaataaggttaatataaaaaaagaaaaaaaaataaaatgacaaataattgagatttcttttattttaaaaaaaatcaattagtaagtgacaagatcgattattcttatatatattagatgatatttcttttatagcgaatgtaaaggagatgttactcctattatatattttatagcctacaacctatttaatgaattttaataaataaataaaaataattaatgactaaagtattaggctatttaaaccggttgaagtttaatctttaattaattttttttttaatattatctattgatttagttattttaacgataagtttttaaaagaatgaaatcgcgtaattatatagaataatgtttagaaataccatgttcaaaaagaaaaagtacgctgaagataaaacttgatccagttatgaattgataagcaattcaacattaatgaagaattttattcaagatctccttattctcgcccagacaacccatctctttttttttttttgttaatgttcatttttgttctttcaacaggttcctataccgccagctcatattgttccagtaag

SEQ ID NO: 51670 - DNA, 521 bp, Ricinus communis
  Intron number 1 from transcript 30111.m000731 (locus 30111 .t000034) derived from phytozome v7.0 (chr-ID 30111; pos 2 54072 to 254592 reverse strand)
ttcgctttctttacattgttgttgatctctctagggtattgtttttatttctatttctcaatacaataatttttcatttcaattattgcatgtattggcggcattgttttatgttattgagatattacttcaacagaaagagcaagtataggtgtaacaggtttagtaaactatacctttcatgtctatgttgttgaaattctggattttacctgttttttctgtaagctcattcagcaaaatgtatgtaattggtactctcaaacaaatatttataatgtataagtacttctgcttatttgtaacttgaataatgctgaagcctaaaattcatgtccaacatataagattagaagcttggttttgagctatgagactggaactaccctacgattttgtggaactgattagatcagaaatctagactttaaaggtttctcgcaagtcgcaacttttgtgtttttccatatgctccatctcttcattttctcattgttattattttgtaggcagctggagag

SEQ ID NO: 51671 - DNA, 169 bp, Ricinus communis
  Intron number 2 from transcript 30128.m008623 (locus 30128 .t000084) derived from phytozome v7.0 (chr-ID 30128; pos 1 51689 to 151857)
aggtgttgctcttttaaatctctaaggccttatggtgctatcaaagatcttttgatgtgtttgtttatctgcaattattttttctttttaatcccgataacttcatcctgttggaattccaaaagaatgtgagtttaaatcacaaatgtttctttgcaggtggacatat

SEQ ID NO: 51672 - DNA, 477 bp, Ricinus communis
  Intron number 1 from transcript 29848.m004481 (locus 29848 .t000037) derived from phytozome v7.0 (chr-ID 29848; pos 1 88721 to 189197 reverse strand)
ctcccgttgtaaatctgttagatactggtacttttattttaccttcttctttttcttttttcaaaagatatatattatggattaattgttttacttgtggttctaatttttcatttttattgtatttcttgattcttgttttattgccagaattggttactagtggtaatttatgaggtcttcttgttttctgatgtgaatgtaggttttattgtttctagaatgtgatgatttatttacttgtttctttttttttttttttacttgttctattatttcataactatgtgttttgtattttctcgcatacactgcgttttatagctcttactttaatgcttgtgttacgtagttttggttcagcaaatgacattagtcttaggggcattttataactattgcttttggaccaggctttgagattttgtatgaatgctctaaagttttaatctttcttctcgttatcagctcaacaga

SEQ ID NO: 51673 - DNA, 575 bp, Ricinus communis
  Intron number 1 from transcript 30098.m001709 (locus 30098 .t000004) derived from phytozome v7.0 (chr-ID 30098; pos 4 0141 to 40715)
gatactactgctcagtggccacaggtaaaagacatcctccttttctttgcttataattatggtgtttgtctcttttctttctcttttcttctgggttgggattttcaaggctagtttagaatatttattttttattgggtatatttttgataattatctgcagggcttaccttttctttatttatttttttcttttccttttaagatgatgtttgctcagcccccggctgctgcctgcagcctccactaatatttcaaagtttatgtggcttgtcatttgaaaaattgttttaatttgttcgttgaaagtactgcgcttttcttgctttttttttttttttttatctgatatgtaaagaatttagacaaaagaaatgaataaataaaagttagtataatttgtttgtattgctattgcaatcctcaaaaagtgtaataaaaagcagacttgctttgtttcctttgccttgtttgtttcctctccttttctttttcttttttttgtttgtttttgtgttgatcatgaaaattatgggttctttctatagtttcaggggattggagtgggtaaaccc

SEQ ID NO: 51674 - DNA, 947 bp, Ricinus communis
  Intron number 1 from transcript 29838.m001633 (locus 29838 .t000003) derived from phytozome v7.0 (chr-ID 29838; pos 2 280 to 3226)
tcaacaacaactagaacagctctaccttataccttgtgagtttttctcctacacccatctccatttaatagctttacacgtttaaatccatctgggttattttttcttattgggtttcttgaaaattttcatccttttcaatggtgtgcaaattctttttttttttttttttttttttttttttgtttcaatgcaatttggcttttctttttctcttttcctacatgttcagttttccagtcaacgctttttttctctgatttgttcttatttaatggcattgaatggcttttgactagggatatttgatgttattttgatcatttgacaatttttttgtttgattgagtttatccaaaagatgggtcttgtattagatcaaacatttccatcaagtttgtttatagaagaatttgcagaatggatgtgaatgatagaatagttattgttgtgctaaagctatgaactatccctgtatttgggtgcaaatgacttgaaagaatcagactttgttagcactcatacttcaaatgaatccatcaagttgattggtttttgctcaacttagttgataagaactttagatatattgggtctggaacaatatttttactcatgacatagagtcggcctttttctttcgtttccactctcttatagttgcaatatgcagcaactaatcggaaaacatctctctacagagcttaattctctgaaattcatggcttattggcactgctattatgcttttattataagaagtatttcgcagatctattaagttcaatatgagattgttgatgcatcacagcttctatgtcctttgaaaagtttactatggtgattttcctactatctattgatcctatcctttcttttcaagtacactcacatgtttcttaatttcttacttttatgcagggcaaggaagaactttaagttgttca

SEQ ID NO: 51675 - DNA, 590 bp, Ricinus communis
  Intron number 3 from transcript 29838.m001633 (locus 29838 .t000003) derived from phytozome v7.0 (chr-ID 29838; pos 3 917 to 4506)
aaaaacttcgtactgcattcacagtgacagtggtaagtacattttttttttcctggagatttcattcttggattttatgattttctcttctcaattcaaatttaaaaattagaaagttcctccttcactggaagcaatttaaacttttctgaaatgtattgtggtatataaaaagaaaaagtaaaagcctttgaaaatatgaagctaccatatgatttacttgcttctttttcttcttcctcttgatcttcaacttcttatcatcataattgtcgcagtcatcatcatcatcatgtaaatgtaactgagttcatcactctgctttcttgtctaattggctattttaatagcaattacctggcaggactggaacttatacaaaacaaaattgcttgccttataacagttattttattatctctcatctccttgtatttagcggctgtttattccctgagatcttgttgagcggaggtttatagtcaactcaattttccagatacatgcgattaaacataattttactcatcaatctactttttagaataataatccatagttgggttttgcctgtgaataccttttgcagg

SEQ ID NO: 51676 - DNA, 954 bp, Ricinus communis
  Intron number 1 from transcript 30147.m013846 (locus 30147 .t000117) derived from phytozome v7.0 (chr-ID 30147; pos 2 907393 to 2908346 reverse strand)
ccattgacagaacttgcatcaaggctatcatcctggtaactaatcctctccctcactcaaatattctgtttaacttcttcatttagcatacaactaacttctgtaaaaagacctcgcctgcatttatatatgtcatgcatccgccccataaatgcacagcctcgaacatgcatgcggatggatctccaatttgattctgaaattttttatgaaaattacaattttactgtaacgaaattaataataagaataatatctattttattttaataattttaaattaaattatatatatatattttaatattttttattattataagtacttttaaaatatttaaattttattaaaatttaattattgttaaaattaaaaataattaaataatactagttaattatatttttacaaatattaaaattaatttttgcataaatattagactataagattttaataaaataaataaattataagggagaaatagtataaaatcaaacataattaatagttgtttaataaaaattctaactgattggatttttagtataaaaatactaaataaaaatgtaaaaaaaatatatcttttgagtgtaatgaaataataagtataatatagaaaaacacgtgggacaaatagtaattaccaggttctctagattagaatatgtttgagaaaatataaaattgaaaaatccagagggataattgcaacatgaagtacatgacttttggtctcgaatgtaaacaagattatttatttttaaaaatctacatttgaattgcttgcgcaaattcgatgttgaccgcaagatgtgcaaacgtggtggtatcaagattttagcaccaaatgtatatttgggtaacgacataaagattttctttttgtatatattatgaacggtttatttcaagaattataaatatatgtatgtgtttgtggttttggtagg

SEQ ID NO: 51677 - DNA, 871 bp, Ricinus communis
  Intron number 1 from transcript 30093.m000368 (locus 30093 .t000019) derived from phytozome v7.0 (chr-ID 30093; pos 2 14619 to 215489)
gttcaaagagtaataaattttcagtcttttagatttttcttgtgcgtgtgtttgtgggtataattgcagtttctgttattgtttaatttttagatgttttgattacatataaaaggagctgaactttagaatttattggtgggattaatgaaattctgatctaaacatttattaattccgtgggttggagtttaggcttctgggttagagttagtgtaattgagtgttctgcctgaattttgatttgagctcttgtttcgttggttgaggagataattaagaaataggaaaaggaaacagataggcaaatgttggttctgattttaggctcagctgaaagttgtcaagtagaaaaagaagaagcgagaaggtactttttttgttgattttccatgtgaaagcagatgttttgagacccaatcaatgacaaattcagaacatacagtgattgggcttttctaatagaataacggtcctttactccttcttcctgttttatccaataatatgttcctatcaggaaattttggtgtataggccattgttctttgtaactgacatgttattgtaagtggtatgaatgtgtaactccatattcaagcaagggctacatttacatgtgaatactaattgttgtcattcgatctatgtatttgtgtttatttcttttacatttctatttcactaaattaagactggggataaaaactgtaatgcagtcttgataattttatacatttcaagttctctttttctctactttattaattttttcttgcagtttttctgtgtggttgttaccaagctgtaaagcttatgtagtgcttttcatgctgataatctgaccaacattttcttagggtgccccaag

SEQ ID NO: 51678 - DNA, 612 bp, Ricinus communis
  Intron number 1 from transcript 29896.m000119 (locus 29896 .t000003) derived from phytozome v7.0 (chr-ID 29896; pos 3 5568 to 36179)
gtcactaagaccattttggagattgtcaaggtaaattcttacatatttctatacctattcatgctttctttgtttctacaggccgaaataatgcatttatttcctctaatgcattcagcatatcatagtaattaatcctgtctgtcttatttacaatagactggattaatatgaactacaatattatgtttttcctctttgattttttcttcttaaaagaaaaataatatatgtctgaatattctctttgtttggattatatgaatttaaaaaaagaatttatgacaattacaaaatttccagaattctaatgtaataatttttgaattttttttttaacaaagtaaaaacaaaatgatattccaacatgctactgggtccaatgaatgtgacaatctacagaagttcgtggttgatttcaatgtgtacaacggttcttattttggaacctcccattaaactttagaaatcgcattttcgtacctgtagaatctggatgatcatctatcaatcactccattcgtatatgtgtgctccggacttcttctctatggacattgttcgatggaaatagctagctatttaagaatgtgattcataattcttgcaggt

SEQ ID NO: 51679 - DNA, 520 bp, Ricinus communis
  Intron number 1 from transcript 30147.m013881 (locus 30147 .t000152) derived from phytozome v7.0 (chr-ID 30147; pos 3 079998 to 3080517)
tgttttccctcctattacttatattcctacaccaggtaattgattaacacccatcactttttctttcccctatttctatccagtcttgcattcttgactttgcattcagtgttcggttacttggcaattcgtgtttttagttcatatcagcttaatggtgaaatttttttctgttttgctagtctgaatagaattgtaaaagaaatgtgttaatcattcaacaatgaggcatggttatgttttgatttttcaaatgaaaaaaaaaaaatcaattattgaggcttttatatgtaggaatagattcttgacgtaatttaccacttaataggtgacttggatatatatgctttttgcctgacgtgaggcaggctatctggtagggtcaggtcaggccaagaagaaactagaaatttagtgaatgcttggtgatgcaagttaattgtattcttttcttattgatcttttcgctcgctattgtttgacagtgggaagactatctaggagccaattgagccaagat

SEQ ID NO: 51680 - DNA, 773 bp, Ricinus communis
  Intron number 4 from transcript 30138.m004046 (locus 30138 .t000220) derived from phytozome v7.0 (chr-ID 30138; pos 1 506995 to 1507767 reverse strand)
aagtccttaagtattgtgcaaccgttttgttcttggtaagtccatagttttaaatcgatgtgtaaagttacagttttttttacctcagttcctttagggatttgggaaacgagaagaattgcttattttctgctaaatattattgaatcaactttgattatgaatatgatccttggtttattctttacttgctctttgtttctcatagtttcttcttttaactctttctgggcttttgtatccagattttacttaatgggtttatttgagctcactgacaataacttgcctgtcaagtttattattttacaagaagtatgttaaaagcttttcaagtttgatgcgtaccttatagtctctgctttgcctcatgaccctgaatcaactcaacccccaatgtgtacgtgtgttttataatctatttaatatagctttattatttttagaggaatttttcttctttggctagtaatggaaattatttaaaatttgaaatttatagtaaatttctgttattaactggagctctagcttcttacttgtttggctggctgatttctcttgcattttgcttcaaatgcttactgtccttgtttggatgcgcaattgattcaactaagaattccttgttgcatagggggcacgactgatgtctatccagatcattttgcatgagagttggctcgggtggtactgaaaatgcatgtttattaggataactatgtgagatttaaccaaaaaactgttctttctacaggagtcaagcctcccag

SEQ ID NO: 51681 - DNA, 810 bp, Ricinus communis
  Intron number 1 from transcript 30032.m000469 (locus 30032 .t000019) derived from phytozome v7.0 (chr-ID 30032; pos 1 18246 to 119055 reverse strand)
ctaccgtggcatagctactaagctcttcgtgggaggtattctttctttttcttttatttatatgtttaccaaattcatgttctatattcgtctgatcatttttaaaatcttcatcaaagtgtttgtagaaatgtctgaccgaaatcagttcacactaaaacttctttttctcttcttctatctaattggcgacgcctcttgtttattatttgtaatgagttttacgatatgatgtgactaaaatcttatctgctactaccaagcagttgccagtggcataagttttaaacaagcatgtatgtatagctttatggccttgtatcaaatcatttcatttgcaagaacatgtcaattgttggcatgattttatttctttcaaaattgtcttgttcattttctaaattgaaataattgaattttagaaagtatgagttttccaaacgtgagaattgactaaaattaaattcttaccatcttttagactttccaaacaaggtactagttctttaattatccttttgattgtctgcgagaaaggttatcttaaaaagctttcaaagaatgacagtaatacaagtttttctttctcttttctgtttttgggtgatattcatgatcctgtttccagaaaatgagaagactaaatacacggtcgcatcattagagttatgaatatgacgcttgttttcagaagattgactttgctgtttactcatgaaccgctgtaaattttatgtaccgcttcttagatagacgtaactcgcttctattacaggactgtcattttacacaacagataagggattaacg

SEQ ID NO: 51682 - DNA, 894 bp, Ricinus communis
  Intron number 1 from transcript 30042.m000471 (locus 30042 .t000009) derived from phytozome v7.0 (chr-ID 30042; pos 8 2743 to 83636)
aggccactgccaagaactgccctagtggagccacggtatgtaacttttcctgcttttgaaataagggtttacccgtggtagctcagtatcggaacgcttacattatattacacaggaggttaggttatcaaatcttcatactaccattcccctttaacaaaatgtataataccaaaaagaaaaaaaattggtttaggtgatgaactcatgaatataatcaaataactaaaaatgaccattagcataaaaaagaattcaaagggatgataatataaatggtcatttaactttgcatttgagtttatttttaccacaaaatttttatttatttcatttcagtcattcaactttaattttgattgtaatttagtcactttgccaataaaagattgacatgttattttttttaattattcttttcttattggtcatttttgccacatgttaatattttttatttgctaagtaactaaattgaaattaaaaatgaatgatttaaatgaaactaagtgcaaaatccagtgatcatttatataattatctcagaattcaaaccttatgtccattttaaacactaacgacactagtactctctatcacgtgatagtaattttagttgagaattcctgatattttaaataactctggtgatgttttatataaaattacgtaaaatgcattaaccaattttaatagatttagttaattattcaaaattattaaaaaatatattttttttgataaatttatcaaaatcagaaaaatcagagataataatcaaaacactataaacttttaattttctataccaacaagccaactaaaaatgtataatactaacaactggaataaaatttaaggtggttatgtgattgcagtccttgcggtttacca

SEQ ID NO: 51683 - DNA, 576 bp, Ricinus communis
  Intron number 1 from transcript 29820.m000990 (locus 29820 .t000011) derived from phytozome v7.0 (chr-ID 29820; pos 5 9818 to 60393 reverse strand)
gtttgccaggtcaagttcccccttcttctccgttacttcattttgatacattgaattgttttagaaatttgtaattcctggcattcaagggttagaatttttgggatttcacagagctcataaaagttatcaaatcttgagaaacttgttcagggctcaatagattaggctgctgttgattcttttaatctttacagcagaagttttagttaagcatatttctttagctttctttttgggtattatggaaaatgagtcttcattttggtgtttctggacatacttttatcactataagtactaattagtcaattcattgaatagcatggcccatgtttttttttttttgttgatttagtgtttcaccttgttcttttcataactcatagaaaagctaaaggagaaaacagggtataaccagtttgtaagtctgaattagctcgagtaagttaagtgcttgatgattctatagtcaatccattagttggtactaacaaataattacatgatcggaaatgtcatttgtagccatttttatccatgcttttgattatttttatgccaaaattttgcaga

SEQ ID NO: 51684 - DNA, 301 bp, Ricinus communis
  Intron number 1 from transcript 30015.m000215 (locus 30015 .t000003) derived from phytozome v7.0 (chr-ID 30015; pos 7 2167 to 72467 reverse strand)
ttagcccttccatattccatttctacgacaagcctgtgagtttaaaatcttagctacgctaattactagtttaacaatcagaatcgtgtgtttaacgttattaaaataaaatatttctacgtttcctttgttatttcacttggaaagaaaagaaaagatttactttttgtgtaagatccaatttgctttttattaatcatggaatcttgttatcatataaaagatcacacggaccgttggatctaaaagtgatgatgtgtcacctggaatattctttttgattggcagctgaacgtggtgg

SEQ ID NO: 51685 - DNA, 457 bp, Ricinus communis
  Intron number 1 from transcript 29941.m000227 (locus 29941 .t000010) derived from phytozome v7.0 (chr-ID 29941; pos 1 12932 to 113388)
caattagagagcaacagattggtggtattattcaggtatttttttttgtcggagaggatattaacgtatctgatgatgggaaaagtttcatcttttgttctactttatattccttatgttttaggaatttaatgtattgctaaagtttaggaattggaagatacctcaatttaaagaattaaaaaaaaaaaaaggtttgattcttgcaaaagactatacctttaatgggaaagctcaactggttagccaaaagagagtggtcatatttgatatgcatcaattaattatgggcgtccctagtagttcatggtttaatggtatataaaatgaaaaactgaatatctaactgcactaacattgtgcgggaatgagaattggtgtggaacatgccttcctacttattaatttgaattttacttgttcatgtgtttgtttgcttctctttaggtgggcgcac

SEQ ID NO: 51686 - DNA, 790 bp, Ricinus communis
  Intron number 3 from transcript 30076.m004601 (locus 30076 .t000165) derived from phytozome v7.0 (chr-ID 30076; pos 1 076443 to 1077232)
gtaataggccctggcgagtctcgcacgtttcttcggtaagtgttcagtactgcaaaaaatagtttctaaatttacaaagaagactactagttttgtctcctcattttcgtaattggtggaaatggtttggattggttttaatactatctttgtctccttttatgtttcaagaggggatgagggaaattgtggcttgtttaggtaactcagaggtgtgatgtgtgtcatttcttcatcaatgcgtctttggtcattatgagaaccatcactccacagaaatgcctaaactgtgtgatagtttaggttgtcaataaatatcaaataatcagctcgtcttatctaattatgctccttaattttctgatttagacggattgagattgttaatgcattgcagaacccttttttgattgataatacttattaggtggttaatcaagcgccttcatatttcatattcatgcgcatatataaatgtgtatatgtgtatatggacagtgactttccactgcttgaaactaattttagtcaatagttcagctcttttgacacccctaaaatacaaggatggctatgcattctttttcctggtcaaggtccaacctccatttttttttcctgttctatcagtggtttgtttcatttaatcatcctttgacttctatatatatgcacacttacttgctaaggccatcatattttctaaagtcgcttggcggaagtactaatttttatttctgttattataaatgaaggctttgctaaaaattggtattcgaggtgttactgt

SEQ ID NO: 51687 - DNA, 639 bp, Ricinus communis
  Intron number 1 from transcript 29904.m002964 (locus 29904 .t000078) derived from phytozome v7.0 (chr-ID 29904; pos 5 24984 to 525622 reverse strand)
tttaaggtaaatatgtgaagaaaagggccatgcttagcattaaactattcctcaacattgacatctttgtagctcctataaaaatagttataatacatggcttccctctatgacttccttttgtttcaccttaagtatagtgtacatatagatcaaattaagttcaaaactgtgagaactgaagtgtgatacaatctaaaatatcagagactaaattgcaataaaactttcaatgaagtgtatggaaaattaattctttttctccttttcttcagtggtattgctaaacacatgcaaatacaaatactaattgactagtatatattgttatcaggaaaaatcatggacggaagcaatgctgatgatcactataatttatacatggtataattcagatttttttttctagggctttctcagctaataactaactaatacccagtatatctcaggtcggacatacactcattgaattaactgtttatgcgatataattataaacaaattttcaacactttctttaaagataattattattttatatcttgaattgaggttttggtatcactaacaaaagacagtgaaatggaaattttctcatagagtgtaatctataaattacaggaagacatagagtta

SEQ ID NO: 51688 - DNA, 747 bp, Ricinus communis
  Intron number 1 from transcript 29848.m004551 (locus 29848 .t000107) derived from phytozome v7.0 (chr-ID 29848; pos 6 15660 to 616406 reverse strand)
cgtgagttctttttttcttttatctttttgcaatttttaatggctttgctagagcccgagaactcaaagagctactaataatcttataagactaagtaatcttgaatatactagataagagtacattcaatttgggcgaatcgtgatcttgttattatttttattttgattacgtttttgcaatgtttaattgattttgtgagatgcttttttgtttggaggtaactgtgattttgtgaataggctgaaaattcataaaatgtgatactaaggagaagtcgttttctgtgtgatgattttgttgttgtgttctgagtataatttggaagttgttgttcccttcaattctacattattaagattaattaggatactattttgatttcagattgataatgtgtcgtcactttcttgcctttgctgttttctctttcttatattactgttgttttgatttgcttttccgcactagtttttttttttttttttttatttatttttttaactctacccacaaactatatgcatatctcataatttttctgagatgtcactttctctgtttcctgtgctaatttcttgaaacagttcctttctcatttactcttgttttgttatcttctctcattttcttttcccaaaatttaattcttctgttaattcagttgtagagaaatatattaaatgaacactttctggaattcttttgcaggaataaagctgcaattgtcaaagcaggggccgttc

SEQ ID NO: 51689 - DNA, 592 bp, Ricinus communis
  Intron number 2 from transcript 30074.m001376 (locus 30074 .t000043) derived from phytozome v7.0 (chr-ID 30074; pos 3 18344 to 318935)
aaaacgatacgagaagggttagtaggggtaaaaaggtaattatactctatttttagtgaaaattatttattttgctttttaatgtattattcaatcatttattgatatatcatttgtgatttttttaattttgaattataatgagtcatttatatttcattccattattttaaatattcaattattaacagaattaatggctgttattattcaaaatttatattaattttaaaaatttatttacgtctgaaaatagtttatagattaaaacgaccgccaaaccacgccgtctcagtatcaatcgcgtttcagtaatttacaacttccgaatattatccagatagccacgcccacataaagcaagcccgttaaaaactcctcccattgctgcagctcccagtactcctcttctttgctcgagaaaaagaaacaaaaaggaaatacacataaaaattcactggttgtttttcgatgagttgtcgtggagcaatcctcagtctctcaagtaacgcaactgcgaccacccggtttcattttcttaacaataggttctctacccgaattttatacccattagtacaggtgaatttca

SEQ ID NO: 51690 - DNA, 672 bp, Ricinus communis
  Intron number 1 from transcript 30064.m000493 (locus 30064 .t000015) derived from phytozome v7.0 (chr-ID 30064; pos 1 15816 to 116487)
gcattaccgctttgcgttgggagtctgctctcaaggtttgtttctttgttttcttttttccagtttcagtctgcttttcgctttttttttctttgcatgatttcattttctctttaagaggaaaaggcaggagtgcaattcaattgaattctatttattcaaatctcatgtttggagtggcaatagttagctagaattcaattctttcagcttaaacaaaccttgttttggaatgaaccgaattctggcatatttggactttcaaaatgtattaatactgtttatttttcttcttttgaagtggcttttatttccttgaaattttttctgtttgggtgcagaaaaaagtgtgaaacagactgttaaaatgtgtttttcactttcggtgacacaaagaacacatatcttatgctcaaattttaatttttggttgttatgccgttcttggaatacatgtttatttgggacatgaacaatagatatgcttgtttatggtacaactaatttgagattttttttttttaacactaataatttgagaattttattcggttccttgtactacaattttcctcttattgatttatgcttctttatgaacaaaaatctgaatgaagtgtgaggcttgtttgttatttatattcaggtttttgaactactccgggagcagat

SEQ ID NO: 51691 - DNA, 432 bp, Ricinus communis
  Intron number 1 from transcript 30125.m001246 (locus 30125 .t000003) derived from phytozome v7.0 (chr-ID 30125; pos 2 67643 to 268074 reverse strand)
aggctataccaagtgtttaggaaagtgccatacaggtatttctttccactttgtttctctattttttttaatatatttatttctttaggctatgaaattaatcaatgtaaaatattttataaattccattctttctttctttttgtgaggatagaagaatggtgataatattttttaatttagtttataaatttccatcttttctcttttctttctcatctgattttaaatgcttagattgattaacgaccaactcagtctaaagtttaatcaaacattgaccaactaaggcactggagctttatttttcatataatttttatttagaaataagttcttttattttattttcttacaaatacctcataggtacggtatcatttgttattattttcaggttaagactgagtattgtttggtgctggataaaaa

SEQ ID NO: 51692 - DNA, 451 bp, Ricinus communis
  Intron number 1 from transcript 29948.m000687 (locus 29948 .t000001) derived from phytozome v7.0 (chr-ID 29948; pos 1 4653 to 15103 reverse strand)
ccgaggaagtggcttggtttatattcctggacaaggtcatttctgtttaattttgtgttaagttcttatgcttttggatgcaattgtgaaaactgaaaattacatttttagttgtctgctgtgacatgcttctgaataattgactggaaactcttcatatattttgcagatttaaataatagctaccggcccctgacttcaaggtaattttggttgctgcattttcttatgtttattttaatcttttatccatgtcttacggattgttaaatcgatgttgtttttatttcttttcattcttttgttctttttccgttttgcagcacaggttgtttgttttggccttctctacaaattaaggacttctttgatgattaagcttattaagcttacatttatagttttaatataagcaggaatatcaggtggagctattgctggaatttgcatt

SEQ ID NO: 51693 - DNA, 543 bp, Ricinus communis
  Intron number 2 from transcript 30099.m001711 (locus 30099 .t000090) derived from phytozome v7.0 (chr-ID 30099; pos 4 71883 to 472425)
atacagagcagaggcttgaggtctgtcttacatctaacattactcttttgcgattctaatgaaataagctgtgcatgatttttgcattactatccttgtactgcacaacttattaatacaagtgttagttactttatttgataattttagcttcttttcttcccgtatgatcataatcataaaatactaagttttctttgtcttgtctgaataaattaactgtgtaatttaaatcttaatatttttgcctctttaagtgcttctacttctaatttgtgaagttaaaaggaatgaaaaacaaaaatctttagtttccttggatggtttacctcgagttagctaaggaatttgcttgaaataatggaattgaactcttatagtttctcaccttttaagtttgtttttttggctagttgttagtgtgtttcaatctatagcatcagcaagttatttttagttatagtttgactacatttatccttttctatcctttatttgaaacggttaggccttacatcatccatttacggcacctaatcctga

SEQ ID NO: 51694 - DNA, 740 bp, Ricinus communis
  Intron number 1 from transcript 29950.m001148 (locus 29950 .t000032) derived from phytozome v7.0 (chr-ID 29950; pos 1 66338 to 167077)
gacacttctttggagggttttgatcttacttttaggtaattcttttacctttctttttgcagtttggtgggtttgattgatgattatgtgtttgttttggattgattagacatgagtggaaatgaaaatttaatgtgaaattattttgaataaccatgctgcaagtggaaggatgtgaaaggctaaaagaagctcaaatttatttaaaaaaggttatctgatctaattagttgttttatctggtgaatggcgattcagttgttgatgagatttgtgctcgagtcataagttaaaattatgaacttttttctgtgttgaggttaactatgtgatcttgaatgtttatgtagctttaacctttagatgattgattaaaatctgagtaactgtagttcgtgctaaaagaattatcccccctaatagaaagtctctgcattttaatcattcgagatttagggaaaagaaggaaatttagttttctttctagatttcaatggtcagatgaaggtaaactatgttgaatgtggtgacatatagaagagttggtctttaaagcatttttaatcatacattgaatttgcagcacaatcacttgctaccaatctatcgttatagccttcataaagattggactttttgatttttttttgttctgataactttgattcttttgtttaacttccataataatattcccatcttcagtatcaacactagaggtgcattcttgtgctgcaaag

SEQ ID NO: 51695 - DNA, 880 bp, Ricinus communis
  Intron number 4 from transcript 29927.m000605 (locus 29927 .t000015) derived from phytozome v7.0 (chr-ID 29927; pos 1 44082 to 144961 reverse strand)
gacctatttgtcttgccaggtgaacttatttttcttctccttaaattctatgtcgtgtctagcttggggttggattggtgaaattgctgataatatctatgtttttggtgtttataagtaactgaatgtttgtagctaaggactcaactatatctggtttttagagctaaaactgatttttgaactaattttgtgtgggtcatattgcaaatgtaaaagaattggtgaggactttacgtttttggagttgaaaattgtgataatcttaaccttgttttctgcttttttttcctggagaagtggaggggagctatgtgttggtgttactgctccttatgaaaatgctgcactattgttcagtcacatcatttaagcttgagctggctagaataattttttgaatttcagcagaacacttttggctgcagcatgaagttaatgacttcttgttcaattactatatgaatgagaaagaaaatttattgtggaaaagttcaatggttagagaactgcatcgtgtttatcttgtgcttggtgtcctttgatgatatcaacccaagaatatgtctcaatagaatttagagcatggggcttgctttagcatttagttcccagtatatcaagtatgtggtttctagttggataatctttattgtgcatgaaagagaagaggatctgcacgagattatagagcatattagcttaaaattatgaacaataatatgcattcatccaaagatgattctttcaactgtttttctgcacaaggaaaaatcagccagtgctagatgggaaatgcgttctatgagtggcataatccatttcataaaaactgaaaattggaagcaaatagctatactgactcagaattgtatcaggt

SEQ ID NO: 51696 - DNA, 650 bp, Ricinus communis
  Intron number 2 from transcript 30073.m002306 (locus 30073 .t000116) derived from phytozome v7.0 (chr-ID 30073; pos 8 07323 to 807972 reverse strand)
accaactgcaatttatcagttcgtgccaattaccagtacgttattctggacccttttctctgtcaagggcatccaagtggtatggaaaccttgcatatgagacatgctatctttcgatagaatggtttttatttctacagatattttaacatttcattttcttttattgataatatgagatcaagtaatataagataagcagttcagagttccttcccatctctatttatcttaccccagctctattatgctctaattctattgcatgtataagctcgcgagacttggaaaataattatgtttgctatgcagacaaaaaaatggtttcatttattcgctgaatgctggtggaaatttgcaacatatgcatatatacaaatgatgcttctttaacatcttttagcagggaacaactctgaagaagtgaatattagataatttcatgtccctttagattccaaaaggactcttttgatcagattactgctcgagagatcttcctatagcttttgactttttgtgtatttggcctaactttgattcattggatgtttcttttagaattgaagtactggtatttagtctctccttataccctccttactctgattttaagatttgtcttataatttcctttattgcgggcagag

SEQ ID NO: 51697 - DNA, 758 bp, Ricinus communis
  Intron number 1 from transcript 30073.m002306 (locus 30073 .t000116) derived from phytozome v7.0 (chr-ID 30073; pos 8 08039 to 808796 reverse strand)
gcagccagtctcgctcctgtatcaatctcaggtacttaaatcttctgtctctgtttgttcgcttgtttgcggagaagattttgttatttgcatagataattctctcaaaaacgaaatccaacttactctgcttttgtttctatttccttctttggaattcgcggtagaaactgtttttcatcgtttttgtatttagatatttttattttaagaatttaattattattgctcaaaactagaaacgaccataattgcgtttagttttgtttttcctctgatttctaggcgcagtagatcaagaatatgtgtctgtgtgtgggtgatatggtaaaattacggttagtgaacatctaaataatcatttgtttctaatgctttagtagaacaaatattgttgatatttatttttctgatttttgaatttaggttcattaaaactcaaattggtaatttagtttatgctctttagatttttgttgagtgggttttgccactggctatttcggcctaaaaggtaaatagctcactttttctagcaacattactgagacatgtgtgattagaaagccctgtaggtttttaaagcagtaataatttatcagacgcatcgcatcgagattacatccacttgcttaagtttgacataagtatatggtaatctgctttgcctattgatcttgcgggagttctcttgcaattataatgcttatatgttggttataggtggatctaacttgaaggcacgtgagctttgctcc

SEQ ID NO: 51698 - DNA, 630 bp, Ricinus communis
  Intron number 1 from transcript 29986.m001598 (locus 29986 .t000014) derived from phytozome v7.0 (chr-ID 29986; pos 8 6553 to 87182 reverse strand)
tacagcactgtcctcatcattgcccaggtattggacttgcagcatgttaattttatgatcattttcattttgatgcctttttctttttctttttttcttttcttccggttgtttgattagaccaaagaaagtgaagttctcttctgcagatttctgcttgtaactgatcctgaaattccatttcttcttgaataatgaaggacttctttttgaaatgttgcagagtttctcatctggattggatgatataggatttcttggttttattccgtcaactctcttaataacgatgataattccatttctttgcaacttccaatttgcgatgagcaaaaataaaaaatttattattacataacaaaactaattgtggtaccatgacggagactacttgtcaaattcttgttacaaatcttaatctgctatcttgctttttatatcttttccccatctctttaagcgtagacttttggatttgtaggcattaggagaaaattgattgaaaaatgcccacatctaatcattctgtcatgttggtactgtttctgtaattgagagtgacacatttgaagcagtttcttgtattaaatggaacagtttttattgtttttgatttgcatgtagtttgcg

SEQ ID NO: 51699 - DNA, 311 bp, Ricinus communis
  Intron number 1 from transcript 30076.m004678 (locus 30076 .t000242) derived from phytozome v7.0 (chr-ID 30076; pos 1 556854 to 1557164)
ttcaagtaatttcttcttcttcttttttttttcagctcaattgtagcccattcttgtccgtttctttactcttgcttaattattaatacaagtctagtggttaattatctcactcagtttagttaaattcaacgaattaagactttctttactgctacatcttcagattttatttgttttcttgaatttgaacaatcagtcaaagaagaaaatgaatcattttcttcgagggtgatgattaagaaacgataattgttaatactgtgatgatttcaggaatcttccaaggcatcagtttggtaatctgcaaa

SEQ ID NO: 51700 - DNA, 686 bp, Ricinus communis
  Intron number 2 from transcript 30076.m004678 (locus 30076 .t000242) derived from phytozome v7.0 (chr-ID 30076; pos 1 557341 to 1558026)
actattgaggtataattctccttatttcttgatctaggtttctttcaacaattttcactatttgctgtgttgattctaccaaattgagtttccagatcatttcatagagtggttttaggttgttgaattaccatttgtcatattcttttttagctttcacctactctttgcttgtttgttaggagattgacagaaaaaaaaaaaaataataataataataataataagcgtttcattttaaatttcttaagcggttttaggcacgttgtttcaaggcattgaaaaatttgattcatcttcatggtcaaatcttttatttggatcatattgactggaaacctgtggcctcaagtttccaagcattgtatcatgattgaaaaaaaaattaaaaaaattaaaaagaaacttactttgttgttctatgttctcaactaccatgttttccctagaagcatacctaactaccagtcagggagaattagcagcattaagttcagtgagtgatagttctttatttttactttgtttttgttataacgttccactttgaaatattttctaagaaataatgcaattctctcatttttttttctcttgggctgttattaagttcaagttcttagtctgtttatgcttcttcttttttttttcactttatgaattttgcttctggtacggtggtttag

SEQ ID NO: 51701 - DNA, 1002 bp, Ricinus communis
  Intron number 1 from transcript 30093.m000359 (locus 30093 .t000010) derived from phytozome v7.0 (chr-ID 30093; pos 1 35067 to 136068)
cttgaaaaaagctggtgcttctggtctcagggcaggtatctatttattatataatcatgtagtcgttgttttttatgtaagattttggtgtaatcagtgacttacgatatgtgggattgctgtgaatagaggatttttttaagatttgctttggatctatgttctcttgtttgtgatggacaatgtgaaaagttttctgtgttcgtttggactttttatttagaaagcttgtgcattttgccgctagtaggcttggatcaggaaagagggaagttgaagtaacaccaatgagtgatttgtatgcagctgattacttaggctcactcattatctacttaatcaagtgtttgttactggttcagtgcattatcaggatacaattaccaagtgtttgagtgcttctttgattttatttagagcctatgtagaccaggttaagattaaagagatagatttccagaatcttgtactttgggagttacattatctttatatactggttcaatagatcaatattggaatttggaattcatgagcagtatcaaactgtgatcttttgttttttcattcgccagttcaaattaatgtgatggaaaagtgagaacttcaacttattgctccatcaaatacacaagtttgtgaaatttgatttaggaagatctcttttttggttataggaggtaaacattactcgagttttcttatggtattgtacttgctgccacatcgatgatcaggtagtttcttgataaatgcaggttgaatttaaattttgcatgtgcaggtggtaatctgtagagatgttcagttgctccttgctgcaggaagttgagcacttattgcatgtttgaattgtgttgctaatatctgcaaaagctaattggatgaatgcaaaatgcttcctttttatatataataatctatgattatgacttttatgagtttctctgatactcagtccattcaatgtaattgcaggaagtggaggctattcttacttat

SEQ ID NO: 51702 - DNA, 986 bp, Ricinus communis
  Intron number 1 from transcript 29851.m002493 (locus 29851 .t000135) derived from phytozome v7.0 (chr-ID 29851; pos 8 15918 to 816903 reverse strand)
acaagaagctggtactatttcctctacttccctaaattgaaaagtttccttcttctcttttcttttttaattatttttttgctcattaaatgatgagaaatctttttcggtcagcaaaggttgctgtttttcttgctacatgtaaaagtagaaagaaagaaagaacttcgtttggttgttgggaaaattgggatttgcttttttctactactataattcaaaacgtttgcaagattaatcgactttttataatctttttctttttctcttgtcctattcatcatgcatttgatgattcagtgaacttaattatgtttcagagaaagaaagatcaaaactttgtttgatttcggggaaaatcaagaaattgcaggagaagaatgaaatgtgcatgtgctcggatattctagttttgattgtttgcattgactagctttgggttgtggaccctcccgttattacttcctgaggcttttctttctctatgggcttgtttggaataaatcctgtgcaaaaatactattttctttatcccaaatcatggtaaaggtgacaggatttcatttctttcaaaatgctttgtctttttgaatttgaaataactgaattctagctactataatcatcccaagaactgactgaatagaattcttgcaattttatgttcctccatttagtagtagcttttttagctttgagcaatcatccttttctcatgatttttatctgttttatcttcaatttctttttctttgtttccttaatgatggttaggtggtatcctttgggacagtaattgagtgagataagagtttcattcattgtagaggtctaactaatggacacctgtcagttattaaggagaaccaatgattgtttaattaacaaatttctcctatttcttttctccttccgtgcatatgaataatgacttgatttttatgccaacagagaatcccggaaaagtttgtcaagaaatatagaga

SEQ ID NO: 51703 - DNA, 214 bp, Ricinus communis
  Intron number 2 from transcript 29869.m001167 (locus 29869 .t000032) derived from phytozome v7.0 (chr-ID 29869; pos 3 36217 to 336430 reverse strand)
ttggtattcaaggtaaattatgggttttgcttttgtcttctttaaaagaaatcgaatgatttgtatctgatctctaattgcagttctgtaacatatatataagcctaagcatattattatttttcttaatttgagtctaatctttaatctctccttttcttattttgttttttatttaggtttttggaatccgtatcaaaatatatttagcctt

SEQ ID NO: 51704 - DNA, 560 bp, Ricinus communis
  Intron number 2 from transcript 30131.m006910 (locus 30131 .t000061) derived from phytozome v7.0 (chr-ID 30131; pos 3 31855 to 332414 reverse strand)
cttagcaaggtatattctgtttcttttgtgctattgagacttttcgtcatccgttctactacctttttttttttttttttcaatattttggtggcagaagaaattttggactggcatctttgaatgcttttaccattcaattgaatggtgaaattgattttcagagtgtttaagttggttagaagggtttctatttttatgatagaaatggttattaaagatttttactcagttggcttttgtttggatatatataatatctccactgatcgtgcattatggtggtgatactttggtatttgatatgtgtgggtgtttcactttggtatgatgtaattatgcaaagagtttaagttattttgttttgaatgaccagttctttttttctttttttaatgaatgtctgcattctcttttgtgggtcatttaggtttgtcttcgagagtgcattgattattagtacctcttcctatggctgtatccttatcttgttcttccgctcaatttcttctttttttttttcagagtaaaacttcaggttcatctgggacttcatccac

SEQ ID NO: 51705 - DNA, 626 bp, Ricinus communis
  Intron number 2 from transcript 29904.m002972 (locus 29904 .t000086) derived from phytozome v7.0 (chr-ID 29904; pos 5 76168 to 576793 reverse strand)
gagcaagaggctttcaccaaggtaatattgcatatctagtcttcctaaaattgtgttgatcaaccgtagcatgttatctctatgtgtatgtttgtaatataggtccatgtttgcaaaggtgcataaaatgtggtaagttttaaacataaggatcgtattttgctctttgggtttaggagctttatgttagtatagtttactgatccagtaaattaagtcatgtaatgtgaaacgatatcttatcatatattaactcattatgggcatgtgataataatcatcaaaaccaagtttactgttttatggttttcagttacctgaggtgtccaatctcctttatcagaagattcttgctagtgatgaaccaaagaaaataacctcattaaccaatatatggttttgtagacgatctgatattatatgattattgcctgtttatgagtttattatgtgggtgctttgcttctttcgcgtggtatcaaatggtatagatgaaaaactggtgattttctgggatgcttgtaattcggttgagtatgcctaatgtataatccttttctagatcaatgaaaaggcccatattatatgattctcacccattggttttgtggtgctgaaggccttgc

SEQ ID NO: 51706 - DNA, 556 bp, Ricinus communis
  Intron number 2 from transcript 30147.m013815 (locus 30147 .t000086) derived from phytozome v7.0 (chr-ID 30147; pos 2 759754 to 2760309 reverse strand)
acacgagctcttcccgtgaggaaaagcaggtaacatctatacatagaataattttgaacagtatcacctacaatatgagctgtaactgatttgaaaaattacccaactgtctagttgatgaagagttttcttggtaaacctgcgatgtgcattgtgagactgtgactttgcttgggttcttgacccatgcaagttttgagattttcatgcttgaggagtttttctcacattttaactagcaccaggagggaagaagtaattgttcggaaaatggaaatatttccaaatgatctatcttttatctcacaaataacgatttttttgaacttggatgtcatatgtaggatgtttcaagctaaacaaacaaaatagaaaagaaaattatgggatcgcattgtaacatctaattctttaggaatgcagtattttcataagttcttggagaggcataaagaacagtttcatgcaagtaaaattgaagaaatgtgtatgaaggtcaaacgtctaacatttacttataacctattttattttttgtgtaatcatgcagatattg

SEQ ID NO: 51707 - DNA, 955 bp, Ricinus communis
  Intron number 1 from transcript 30138.m004053 (locus 30138 .t000227) derived from phytozome v7.0 (chr-ID 30138; pos 1 546299 to 1547253 reverse strand)
cgaaggagggtggcggaccttgcctcagaaagctggtcagaccctttactcaattctttgctttcaagaatggctatgtagcttgatgagctaacaatgcattctgattcaacactccaataactttcatagccaagtataaccagccattatatagaattcttgaagcattttgggttcaagattccatgattaattcttgatgatctgatgactcataatgcatgtgaggtgtaccttgataatgagttggttatgatgttgccaaaataggtctccaaagatgtgggaagagctgccggttgaggtggttcaattaccttaggcctgatatcaaaagaggacagttcagtgcagaggaggatcgaaagatcattcaactccattctactttagggaacaggtgaagtgatagtaacagaactttttgatattcaatatcacgttcgtttttttcttttctttttttttaaatcctatcaccaccttctcttactccgatcccattaataattggctaaaaaaagttatgaatggatgcaccgccacttaaaaaatcaaaccatattttccttatcatcataatgatctatgaacaagagattcaagattgtttaactctaagaacctagtgtaccactgggagaaaaagaaaatgtctctgataactttactcatcacagtcaaacaagcattttttaagtttgcagcaaactatttttaaataaataaaattcttacctaaaatatattttaatatataaaaaaataaatatatatataaatattttattatttaaaactaataaatatatattaattatttataaatttaatatagaataaaaattttccttcaagcagtttccctgtaaatgattagactaattaataatttgagtatttgtcttattatgcagaaagtcaaaaattaaaattgcaaaacctgctttca

SEQ ID NO: 51708 - DNA, 804 bp, Ricinus communis
  Intron number 1 from transcript 30106.m000648 (locus 30106 .t000005) derived from phytozome v7.0 (chr-ID 30106; pos 1 29782 to 130585)
cccgtaagtatgtggttgccttttttatttttctttttctttttttgatgttgatgcttttttatttccttttgcttacaaccttcttactggattagggaagctgcagattttattgtcccaaccgctacttcctttgggttccctttaaatgctgaaaagaataatgctatttttgaagagttaggttttgtctgagaacaggtgaagctttttcgctttcaaaccctagagtttttaccagagaaagcttttgtctagtatctgcatttgagctaatttcggatgactcatcggatgtccctagttatcaatgacttcttttctcatgaggtccgaggtttagtggcctactatgcccttcatcttgagaagctgcctgaagcgtattgtaaggataacgctcttgtaaagcatatgaacaagttaatggcataagcgaaggctaaaaagactttggctctgcgcaagcaaacttttggtgctctctttggttgtttgcaagatattacaaactgggacatacctatgctcgagcattagaagttggtggccaagaaggaggagaattttgtactatattggttgaccttctagatgagattacttgtctttggatgtctcttatctctttgaacgagaaggttgtcgagagtcaggaacctacttattaggctttagataagtgccgcatgcccactaataagctttgtgacttttttaatgccctatagatctttgagtttgtacttattttattttaatgaaatctttgtttatgttacttttttatttagggcagtt

SEQ ID NO: 51709 - DNA, 710 bp, Ricinus communis
  Intron number 2 from transcript 29851.m002362 (locus 29851 .t000004) derived from phytozome v7.0 (chr-ID 29851; pos 3 7120 to 37829)
ctccttggttcaccaaagctacttttgagaggttattctccgagcattcctctattctgctatctgcttcctttcctttttgaataatttgataatctgttcctcacataaatttaattttggatcgttacttaatatcatggatttgttttgaatttttcaaacattagtcaattgagcaagggcatgatattgttcccatgtatttgaataatactgctgattatttgtagtttctcgattctcatctaattaatggacttggaacttttggtttggaaacatgttctatcccacgtcctatatactgtgctataaattctcaaatttactgcaatttacaagtgggatgtgacttctccatcttagtttcttttcctaccataattctctcgtttaacttcatggtgggtaatttcgcaaatggtcatttttttatggcataaatcttttgttgatctacagaaccatttaattcactggttaggttctggttatgttaaataaatactcggatactgtaatttcctgttggcagttaattagcttatttgaaatcatgttcaggctaagaagataaatgctataagggaattagcagcaatgatgcattaactttcatcccaaaagtttaaaaaattgtttttgaaagatattctcacttcttttgcacagatttgtgcgctttgtcagcacaccagcagtacttg

SEQ ID NO: 51710 - DNA, 618 bp, Ricinus communis
  Intron number 2 from transcript 30075.m001135 (locus 30075 .t000002) derived from phytozome v7.0 (chr-ID 30075; pos 1 5692 to 16309)
ttcccggacaatatagtagtttactgtgtcctgtagttctttttttatttttaacatggaatctttgtcgccctttaatattagctttgctttagctgcttctgggaattgagaatatttaatgtttaaattgactttctttttttcttttcttgttcttcatttaatcttttaatttattaattttatggctatatgcattaaagttttcaacttttaagcttactcatgcaaaatcatgttaaaaatggttgatggctgacttttagatcactaaaggaaaaaaagatcatgacaagattgtattttcatgaataactgccagtaccataaatttaccttaagctttaacagcagattgtctttattcctttctgcttttcttgtgaaagatggaccatacctatgcaaaatgtttgaacatttgtaataattatttttttttttttcataaaattataagcaatgaggctgaatcttttgactccaattttgtaaaatttcgattcatatttgctattaacctttccttaacattgaatcccaatggttagtaatgtgtcattttttgtttttgcattagtgcaacggtgggcaatcaggggagagatcattatc

SEQ ID NO: 51711 - DNA, 733 bp, Ricinus communis
  Intron number 3 from transcript 30078.m002255 (locus 30078 .t000048) derived from phytozome v7.0 (chr-ID 30078; pos 3 09225 to 309957)
aattgaaaagggttagtttttcttattagtttctctcctcttttatactttttatagcttagataaagcataaactttgatagtttatttcataacaatctgctgtttcgcaaagaaaaaaatgcagggaaaagaaaaactagaatataaaagatctgttatctttcatatttctttatctgtacttctcttgggggttaggatttcatatatctcgtagttgtttccttttcactttcacaatgatgttttgaatatatggtgtcactaaaagagttataggttctatcaaaagatgcaaaattttctttttctttttcatttttctcttagaaaatatacatatattttggataaggttcagcatcttatcttttgttctctttagcttattggcatatttaattgtacctaaattttcctttttcctttcattttcgtttcctgtctcttctcctttttggttcattgaatgaagtacacaaaggggatagcattcctacttcctaaatagccctcgccaatttgccgatagtgattgaaatgtgaaatcttcaaatgggaagttccaggcttataccttttgtctgtacccattaggatttgcctatcattttcctttttgaagttctttgatatttcattagtgtaataccatcaaaggcttgttcatcacttaaccatattattttaatatttcaggtaatctgttccttgtgtggtaaagaacagg

SEQ ID NO: 51712 - DNA, 752 bp, Ricinus communis
  Intron number 1 from transcript 30054.m000798 (locus 30054 .t000013) derived from phytozome v7.0 (chr-ID 30054; pos 8 5274 to 86025)
accgcaaggaagaggcctttcttggtttgtttctttcttctccctttcttcttcttcttctcatgtaaatttacactaattgttttgattttagctttcttgggttctaccttttttttgttaaaattgtgaatcgcactttatttttgtggattcggatatttttcatctttgtcgttaacccttattgatgggtttttgctattttatgcaatgcactagttttttgatttgggaaaatgtagggttagtttaaagaacacaaattcgaataatggtctaatatgcactttgtgttcctctgctaaattttcttttttctctaaaagaaaatattcaacttttggtcctctgttgaatttctttatgcttctgaaccattgatcaaacttgtatggggatttcctttttgggttttctgtagatgctcttgagtttggcttgctggtatttatgagcctgtgagggtttattacatttgttaccttagcctcttttcacttgctaagaatacaacagaaaaaaagagaaatagatgagctttaagttttactcgctctgctttcctagaaaacgtactttaatagagagtgtgggaatatgaataggaaagattaattcgtaaatagaggccctaaaactgaattagcgactattatatctatacattctcatttataaagcaagtagagatttatggtgttcttggaactttgattgttttctgccttgcagttttgaaagctgatcta

SEQ ID NO: 51713 - DNA, 887 bp, Ricinus communis
  Intron number 1 from transcript 29983.m003303 (locus 29983 .t000202) derived from phytozome v7.0 (chr-ID 29983; pos 1 055984 to 1056870 reverse strand)
taaacacaaccttgcaggtttcatattccttataaattctatcaaatttgatagagtttgatttggttataaccagtttttatgagattaaattccaaatgaatttccatttatataccaaacaaactaaatctggatttgtaaatgaatttcacaagaacttatggaattcattcataccaaacacattgtatagaaaaactcttagtgaaagctctttgaaagatattataggatatagagcttagaaaagctttcatggttctgttctataatgctctggtagtgttgttgactcttttgccttgcatgtgaaaaaaggaaataaggagggaaaatattaatttcttgtttactctctccttccaacatgatttgtcatcatactctctcactttgccaagataaatatatgaggacataaaaatactttgattcatttgaacatgttttcttccattttctctccttttcctctccaaattggagagaattgtagagaaatatattttatttcctccatcttcccgaacatgagaaagttgatttatttttactttcccaaacataatattaggctgtagttgattgaattagcatcaagcgaattttaagacttcagtttcttttttttttggttccccgttttctcttattttgatgcattgtcatcatgctaaacatgtttaatattgtattgggatatcagatgactattacttggtaaagccaaatgccctttgtagaggcccttggacatttttcatatgttattattctgcttctgttaactctactatatttttctgaaattcatgctctctttgattctgtatatataaaatattgataagctgtatgttttaatatggctgcaggataaaaag

SEQ ID NO: 51714 - DNA, 501 bp, Ricinus communis
  Intron number 1 from transcript 30068.m002624 (locus 30068 .t000114) derived from phytozome v7.0 (chr-ID 30068; pos 7 01621 to 702121)
gctgaaacatctaatttacacatttcctgttccaggtacttaattaattaaaccctaagcctctcatttgtattttttttttcttttgatgttctcttctttcttttaatcctgaaaggcttttccaatagttgctttttgttcgtaattggattcgcgatttcctttgtttagtagaagaatttaacttcaatcatgactttttttttcttagccatcatttttcagtttgattcaggcgattttttattgttattttttttctcttgcattgtgcactatatagtaatgtagtagaagatcccaatctttatcttcagtttcttttcctatctttggtaataatgataatgcttaatgccattcaatcagttttctttttcttcttttgacgtttaactctctctcttttgttgattgcgtctttgagaataataattacattgtatatgttgtctctgtgcaggacagagagactgtttcctgattttgggagcagcg

SEQ ID NO: 51715 - DNA, 832 bp, Ricinus communis
  Intron number 1 from transcript 30061.m000285 (locus 30061 .t000004) derived from phytozome v7.0 (chr-ID 30061; pos 7 9066 to 79897 reverse strand)
acagtttttaaactcaggcagaaaggttagtttttgaaaaaccaaggacaaaagtgtttttgagggtaaacctaattggtctataaggattctcagaatttgaacttcaacaaattcataactattcacaggaatatttcaaggtttcagggtaggttggatcaaccgtgtcaaatttggttaggataactaaggatgtcagttgtgttaatgttgtccttgtacaagatcaaacaagcaagaaatgaatgaatataggtgaagatgtgactgttaattagttaggtaaactgctattactttatgcggattgattctgaaactgataataagaacatgtacatagcaatagcttccaattttagtcttttaaatggagatctatatttcaacattgttttgagtgttatctgattaatggacatgtgtaagatagaaaattagcaattgcttgctgctatccaactaatagataaatcaaatgaatattgtattctaggcagaatgatctgcttcattattattgttttggaagaatttataggtgagaagttgaactaccaaaccacaagcttaatttcccaccaaatcccccttgaaacttccccatttctccactccccatatctataaaagctgaatacaagtggaaatgtaaccagaaacatactactcatttctcaacagctcagatattttttctccttattatggcttattttcgctttcgatcatccttttttctgctcttgttcatcgctttatcaatccatgtagatgcccgacaacttcttgagacaaaattgccagaagtccaaaacgagaatttcct

SEQ ID NO: 51716 - DNA, 852 bp, Ricinus communis
  Intron number 1 from transcript 30079.m000452 (locus 30079 .t000010) derived from phytozome v7.0 (chr-ID 30079; pos 4 44188 to 445039 reverse strand)
gaaggtaagcttatgttaatgttattaccatattgctcaagttatcttttgcctgcaaattggttgatctttgttccagctttgaactgcataatctattagtattaaatgctcggattttatgtcccagggataatttttttgttcatgatgtgtaaaattttgcgcacaaatttgatatttgttctaatcatgtgaaactgtaccaaattgtttctttgtagtgttttatcaaatttaccatatgatgctctgttgtatcagaacttgtgcctactaaattatgagtgctgattttatgacttcatgtaattgaaagttcaatatataagaacataatttgcacagcaccctcgcatgattttattacattttacccaacttttctattttttgctgtctttacttctgctgattgtttaggcaattacataaatgtttattaaggctgtatgagttaactctttcttcagtttttatgcaaaagaagagcaagttatacagttaaaatcatggacagaaatcttctttcattgctcaacttattatctaatgtcgaagcaaattaatggcgtcctgttatctttttgttcttctttgtgcaattggttgaatttaagaaaattttaagtgaatcgcagtgattaatctttctaatttctttgtctatctttcaacttttggttgaagataagcaaatttgaggttttctccattattcataaccaaatttgaggttttctctgttattcatctttccaggaatttgtttttccattgtcacgttaatttgcagttaagcataaatttcttatctcctttgactgaccatttgaagttcatgtcaggttg

SEQ ID NO: 51717 - DNA, 957 bp, Ricinus communis
  Intron number 1 from transcript 30111.m000707 (locus 30111 .t000010) derived from phytozome v7.0 (chr-ID 30111; pos 7 1438 to 72394)
cgcagtgtttgttcttgcttttgcaggtaaaattatggtattgatatttcattttttttttccttaacatttgtttgttgtttggttggtgaggaaatgaagtgcattttcttttcttatggaatgaatttattatgtcattgatccattttgcttaagagagaagacataacatgggttattggctattgagttcattgacatttctattcctttttctgttaacatttttgttctactcattcggtacagtttagatttatagataagagaagtgattatttctcccttgaacttaggcacaacaaatgatgtatgaccttagcttgactttcaagcttctgatttgatgtaccttctaatagatatagcaaatattcaggtaggcaaaaatccatctttacacacatttatctttttgtattatggagatttggagtccacagacagcttttggttagtctaggagtgatgcaatagatgtgccattgccacaggatgaagataagtattactatcctagcaaaaatgattccactgtaagtgaagagaatctggttagatggtatctaaatccacctttggactctggcttggacaattctgtggacaaatgacttttaagtattaagttcactattcctcataataatcattgttttcctgttcactacaaagatatcaccctagtgtttttaccttgaaaatatgatgttaacctccagcagttgtgatctgtgactgtgcaaaggtctaaaaactaattgttatttgttttttagtgagaggtaaataaataggacaaatgagctaattaattcactctttctgtctgcttcagttgttacttaataactttgctgctttttttcccgacaatatagctgtttgaatcatgctgacgtggtttaataatctgcagtcttgagtgtaagtactgaacgagatacctctacc

SEQ ID NO: 51718 - DNA, 886 bp, Ricinus communis
  Intron number 1 from transcript 29822.m003476 (locus 29822 .t000151) derived from phytozome v7.0 (chr-ID 29822; pos 8 83225 to 884110 reverse strand)
tcaacaatatctctctcggaggccgtggcggcactgtaagctctttctctctctttttctcgctctcgctctctctttctctttctctttctctttctctttgagcggtcaattgctgtgtattattagccgaaaaaacaataatttttgtggtttttgtggtgttcgagtcgagtcacatttttttctgggtgcggtttgaaaccctaatttctcaaaaaaaaaaaaaaaaaaaacttttcatactctcttaatatctttatttattttcttaatcggtttctttgctggaaattaggaagcggaagtggtgatttattattggtaaattatgattcagtttttgaaaccctagtttcattttctagccctaattttatgttccttcggtgggatgtttttgggttttacatggtttaggtactcaatattcgtaggataaggtatcaatgattgtcattattgttcttaagtttcatgtcttggcagagaaccctaatttattggatgtggtgcaacttaatttttgagtaaacaatgttgtttttattattttaattatactgattttggtgaattgcgctgaagaagtgaaatgcagaatttttcatctcttttttgtaattttgttattttagtcatattgctatctatagctgcatccgccttgattagttgctccacttgaacagctggacttcttgttgatacctaatttatcagattttaggaataatattaagtcaatttttgctttgtcttgcttttcaatttgggaagtgagatatccttaaaagtggaaaatcggaatctaataaattaggcttgtatggttaaatcgtgaaatgcagaatcccgggcaacttaaattacattctggggggat

SEQ ID NO: 51719 - DNA, 687 bp, Ricinus communis
  Intron number 3 from transcript 30068.m002576 (locus 30068 .t000066) derived from phytozome v7.0 (chr-ID 30068; pos 3 57380 to 358066)
ttggtgcgaacattcttgtcaattatttgggtgaggtaccaatcctattccttctaattagcttgttaatgtgaatttctttacattatcaaattcatgcttgataatatgttaaatgcattttgttgtggtatttagttatatttgctcagctcactacacaattgtatagacaagatgtttacttcttattccaggttttttattttttttttgtataaactatgaatatgttctaaaacatttctcttcactttttgttgtatggtttatgttgacgtctctgtggccaaatgaagaacataacaaagacattaactcggaatgatgaaactaagatttaatgattttatgcttagtagaacttcatgaaccattttaagctgtgaagaagatttgacttgagattgagagggacattgaatgctggtgtagttggagtattgaggttcatttcagttttgaatactttcattgtaattagaatggtagtttatgacattgattcatttagaattcaattcagttctttaccagacatgattggtgaagtattgatggtgtgcttatcatttttttcttctcttgtatccatttttttattgcacttctgcttctgtttcatacatttgtttcatttttttacttgcaggaatctcaacattgtcctctaaagggcgccgtctc

SEQ ID NO: 51720 - DNA, 390 bp, Ricinus communis
  Intron number 1 from transcript 29869.m001159 (locus 29869 .t000024) derived from phytozome v7.0 (chr-ID 29869; pos 2 40167 to 240556)
ggctgttatatctggatttcccacaagtttttcaggtccctttatgtttttgtgattgtcaaattatctatttttgtaacctttttcatttgcactacaaatggaattatattctatgaacagtcccaattactttagaacatgtgatactgaaatgtagtagtaagtatagtttggacattaactttaaattgtatgatactcctaaaactagaatggggatttaaatcttgaattaagttctgtggtttccatttccatttctctttgacttttgtctagatgagaattaaacaagcctaaattacaaagacatgagtgttagttatccatttgtgtaacgtgttgctcttctatatccatttatttgtttcctataggtttggttac

SEQ ID NO: 51721 - DNA, 229 bp, Ricinus communis
  Intron number 3 from transcript 29869.m001159 (locus 29869 .t000024) derived from phytozome v7.0 (chr-ID 29869; pos 2 40847 to 241075)
ccttttttgctgagctttattaaggaagccatctggtattactatctttgaattttctttttaatttttctgttatgaagtaattgccatcttttcaataaaagtataagctcagtatagtttcttcctttttttttatgatataataataggaactagatctaattttgatacagataaataatgtaatcaaaactcaagagatgatgtttaatattcttccagggct

SEQ ID NO: 51722 - DNA, 605 bp, Ricinus communis
  Intron number 2 from transcript 30090.m000238 (locus 30090 .t000003) derived from phytozome v7.0 (chr-ID 30090; pos 3 5513 to 36117 reverse strand)
ctgtaaactcagtagtaccttacctacatctcaaggtatgtacaagaatgatggtttcttgtctctaaataatttctttttcattaaagctctatgaaaaaagaaaaaccatatttcaggcctgtgccagctaattcatcttcaagagctagatatcagctttaatgatcttagtggcacattgccctggtgtttggcaaatttgacatcccttcagaaactaaaccttgtaccaaatcacttaactgtaaacatctcctcatctccccttagaaatctcatatccattcatgaactcttcctttcgagcaataatttccacatcccaatatcacttgcaccatttttcaatcattcaaaactcaaggacctggatgtgtagaacagtgaagtgtatgctgcagaggaggagcataacttgatcccaaagttccaattacagtctcttcttctttctggtcagggttacggtggagcatttcctaaattcctttaccatcaacatgacctaaaagtttttgtgctcttcaacattcaaatttgggggacttttccttattggttattagagaataacacaaatttaataaacctttatctagtca

SEQ ID NO: 51723 - DNA, 759 bp, Ricinus communis
  Intron number 2 from transcript 29908.m006095 (locus 29908 .t000146) derived from phytozome v7.0 (chr-ID 29908; pos 1 565429 to 1566187 reverse strand)
tgaagttatacaagcacgagtacgagagacgaggggtaattatattttcctgtttctttttcacctcagttatgtttgtgaaaagtagattaaaaaatttgttaacgttgggaactgtgtagcgcatgaaggaaaaagttatttgatttatgtgaatttgattgaatacttggttagttgaacggcatatatgaagtgtgaagtttggatattatgctttaaattgttatttttgaatttggaaaatgcatactggagcatgtattgatccttaaagtagaatgagaactgatgtgttgttttgttgaattatttgaaaggctaatctcttggtaagcattcatacttaagctttattatatttgcatacaggcaaacacagctgaggtttaattggtccattccttttcctgttatgattatcggctggttagtcaagatacttgtacttatagggttttggcttgaagcatgctgaatgtttgtaaagttcgagttaatgtagttgagtatgcatgattggttaatagttacaagtgaatccactttaatataggtactattttttttcagaattcacttcccatttttttccttctatttatatttctctttcacccccttttcttcacctttcatatcaagttggcaatagcttgccaaaattatattgtgcaatttaatcattttctagttaaaggtgacttatgcataactttatgtgccttataggatacatcatcttctgagagcacagat

SEQ ID NO: 51724 - DNA, 596 bp, Ricinus communis
  Intron number 2 from transcript 29929.m004507 (locus 29929 .t000010) derived from phytozome v7.0 (chr-ID 29929; pos 8 7196 to 87791)
aaagaacaggtagcatttctattttaagctgtgctgtcctattgaattcaatatcaatcaatgactttggaggagagttggtgatccatcatttatagtttttcttttccttataagaaaaattaatcaaatctttatagtttgttactctatgtatagctttttgttcataaacatggagttggaacactcagctatagaattatgcgaagataatagataaaatcttttcgaaggcagacctcctttttctttttggtcttaataactatgaatgcccgctgcaggtttgcctcaactctattgacatgtgaagtgaagtagagaataattgtccaatattctgacaaatatccttcttaaatgttatctaatctctcatttaggtttttaagttgtcaaggaacttgagatgctatgcttgcaatttgagaacattatggtacaaatcagtagtgcagatatatgtatatacatatacagggtattctaggaatagaaaaacatatctgggtttgtggacagttccttattgaagaagaatgttggtctcatgtaaattcataacttgtaggaggcactgaaaaggaagctaa

SEQ ID NO: 51725 - DNA, 746 bp, Ricinus communis
  Intron number 1 from transcript 29974.m000235 (locus 29974 .t000006) derived from phytozome v7.0 (chr-ID 29974; pos 5 0248 to 50993)
ggatctcccaggtatacttctagttcttagttagttttctttctttctttctttattattctttaaatttttctttcactttcttgcatgttcaagatttcgaaaccttgtatgtgttttccgatatatatatatatattcacttgtggtcatacggttgtttatgtgtacaagttgagtctcactgggatagcaaaatcattacttggaaatgatatgtatatgtacaggtttcaatacacagtagccttataatcaaattaatggtactgatattagagcacgaattttgaactgctatatcataaattagttgaattttttttgttttttatgttctctatatggtgaaaacacttgattacttaaacattcgcataaaagggttttataattttttgatgtatatgctgtaaaagagaggaagtttaggttttaatacatgaaatgagaggaagacgacctcccacatctattgttgcaattggtgctcactgagatagcattgaacaaaatttaaatctttaaatttatataattttattcttggtctagtaatattattcaaagaaatatacagtttattacttcataataatatatcaactgagtcatttttaactaatttcttctcaacatataatatattgtttttgtttatagaaatgaggtcgcatatgataaagaagaagacatataaaatgctgacagttataaattaaaattttgttgtagccaaagcttct

SEQ ID NO: 51726 - DNA, 652 bp, Ricinus communis
  Intron number 1 from transcript 30114.m000526 (locus 30114 .t000024) derived from phytozome v7.0 (chr-ID 30114; pos 1 66437 to 167088)
gaggtcaatctttcatatctttattattatatgttaatactttttattattctaatcagtgttccttttttgtattagatgttaaagtttcactggtttatgtgtaaatttgactttttagtagttttaattgtttgaaataaagtcattacttttcaccactaagtgagggttatttgcttttgtgtagttcatttctggttatcctatgtttaagtggaaaaatcttggtggttattgctatattttctccttcattgaggctgttgatgacccacattcaaatcttttcattttttgggtttcttttctttctttaattggatatccgagttaatcactgtcaagtactgttccattgaatgctgctgtcttctgtgttaactggactcagaaagataactttgtgatcatacgatatgacatatagctagttttgatttctgaatttttgagtgtttgtttctttttgttattcacgtccttagctggttaaaatgagcaagtcaattatactggaaatgtcctcaacttgctcattttttatttactgtgttgaaactattcagtatttatactctgttatatactttataatacaaaagtttcctgaattaatttctgacgcaagaaagttccttttaggacctgg

SEQ ID NO: 51727 - DNA, 129 bp, Ricinus communis
  Intron number 1 from transcript 29889.m003303 (locus 29889 .t000069) derived from phytozome v7.0 (chr-ID 29889; pos 3 09147 to 309275 reverse strand)
aagatcgccagctcgattccactcgcgttcaagaggtttccttttttcttctttttctttttattgtttctgtttcagattatttaaaaaaagaaaaggtaattctgaaatttgatttttgaataggct

SEQ ID NO: 51728 - DNA, 392 bp, Ricinus communis
  Intron number 2 from transcript 30076.m004465 (locus 30076 .t000029) derived from phytozome v7.0 (chr-ID 30076; pos 1 56964 to 157355 reverse strand)
aggcaattgggtattgcgtgttatcaatggttaagctttctatttatgtttgattgttcagtttctataaatttttgtatgtctgtcataattgggtaattgccaatgttttttagctgttcaaaactgtacttaaattcatccttcgtccagtttaatttaattattttatgcaattggatgtttgatggcctgtttgcttgcaatttagttgagttatacagagttttttagaatctagtcatatttaggaatacttttttttttcttctgtttctaggattttttttttcttttgctttagtagtgcatgcgtgaacaaaatgaagaaagagggttttatttttttttttccagctgctgggttgcaagtgcttcaagaaaatcatctt

SEQ ID NO: 51729 - DNA, 697 bp, Ricinus communis
  Intron number 1 from transcript 29848.m004698 (locus 29848 .t000254) derived from phytozome v7.0 (chr-ID 29848; pos 1 450684 to 1451380 reverse strand)
atcgatttggacgcaggtgcttacgtcacacagtaattgtagttcattatgagatcacacattaaacatacatatgagtttttgttttgaatcattgttatgcaggaaatcaatccaaaagtatatccaatgtttgttgtttatattcaggcttcaggcaccatatcaattacgaaattctgttttgaattctttatggcctgcagaaatttgtttggtgcgcttttgaattgacactcctagtttagttatgtgtttacttaaaacattgttcacataaataaatctgctaaaacatggatttttctttttgtactttgacgaaaagaatttaaagcactttgcaataattcaaacaagaaaagatatgatatttctttgtagcgtcaccctgcttatataattctataagacatgtttaaatttattttgtttgtcaccggaatgaattagaagttacttgataggtgttaatttttgtccaggagagaaaaatataggtgttaattttgtagttcaactctgttgttgtatgttattttattagtgctactatgaatattattattgacatttactgatatccatttttttccataatggggatgcttcattttctcccttgttgatgtgcttaaccaaatttatatatgttcattcaggattacttctggcagaaggaaattgcaggaattca

SEQ ID NO: 51730 - DNA, 909 bp, Ricinus communis
  Intron number 1 from transcript 29908.m006121 (locus 29908 .t000172) derived from phytozome v7.0 (chr-ID 29908; pos 5 700 to 6608)
ctccgtatctaaattccatctttttttatattatttctttctctcgattgctgttattgaaatctgttgagatctctatttttgttgtgttaaacttgatctggtttttaagattttgattcaaccttgttagaggttaatcttagtttttagggttttatgtttgaaattaaatttggagtgtgaattataactgcatgaactgattgaggtggtgtctgtattactacgatgattactttacaagtcaattgaatttttgaactttgatccggatttgatctgtgttatcaatcggattaagtgaatcgattgagattaaacgtctgaaataaatgatgttaatattctcttattttgagcattgtatggctcatgaaaacagcatcagatgtagggttaatttcttatttttgtaaaaaaagtttttaccttgatgacatagcccccacctttacaactatttgttatagcaagaacgtggttgaatcatctattgacacataatagttattagtatacccatcataaatgcgacaattagccttctctttataatgcgaatttagtttgttgtgtaatggctatatgaactttttttgggcctaattttggtattttagaatggaactttgtctaatgataattatataatttctctagcaaattctaatagatgaattatgagagcttcaagaatcatatgagacatttggtttagagcttttctcatcatctcttcctaatgctacagccttttgctaaaaaatttattcgtctattctgccattgcttgacatcttaccactatattaagttccagtagctgaagtgttctgaagatgtaattctgatcttgtctcttttcatgcaggtgtgggcactgtaagaagcttgctcctgaggtga

SEQ ID NO: 51731 - DNA, 633 bp, Ricinus communis
  Intron number 2 from transcript 29989.m000424 (locus 29989 .t000017) derived from phytozome v7.0 (chr-ID 29989; pos 1 63730 to 164362)
cagtcctacgtatgcaaaatatactttcaaaatttctgatattgttctgattttatgttcttctaggcagtattatgatttgaacaattttcagtgaattcatgaacacatgtaaaccagcattctggttgttggcaagcccctgctctgatcaggcggcccgcgcaaggctgatagaatactgtttgttggagtaattatattaatgattactgaactttgcacttaatatcaatttagtcacgagttgattcatctcaactttcattccaatttagtttcctcagctaatgattgattatatagaattgtaaggaatcaatctctcatcgatgaaggtgactaaattggaatgaaaattaaagtcaatgactgagactaatcaaactcaatttagtgactaaattgaaactaaatgcaaatatcattaatcgttggtgtgctttactcgccatcttatgaacagcatctttgtctgcaatgcatgagcatctttattgactatacagactatgaataaaacctaatggaagaccctgaacgcaactacttgaattttctttttctttttctcatgctgaactgggttattgtacagggagatcaaacgaccaagagagcttggattggcca

SEQ ID NO: 51732 - DNA, 636 bp, Ricinus communis
  Intron number 2 from transcript 30147.m013861 (locus 30147 .t000132) derived from phytozome v7.0 (chr-ID 30147; pos 2 984483 to 2985118 reverse strand)
caactgggattcaagtgaaaataatttcaatagaggtgagaggttaattgtgaattgacctatgagcaatggtgatacttccatacgattttaaatgtcgcgagttttttcttagaaagcaacataagaatttcttctccctttagcagctggttgaattggaaactttctagtgataaacaattcaaagatgtattttgttcggagactttgttcctagacctagatgtgatagtgaaggattagagaagattgttcaagatttcagtttagtttaaaggtactctgacaaagcaatatagtatttacattcttagagattgttcaagctttgcctgtatctatctatatgatttatattagtgtaactatctatatgatttatactctgctggtttgataaagtctggatgaactatcctattgcaacacaataatctcaggaatgattgtttttctttattttctccgttgttctccactcttttgagtttattattcaattggtagccttctgtaagtgctttcttttattgtcttcactgtcacttttgctgatagattgaagtcaattgtgtaactttttgattttgttccatttgtttaatgtttctacagatcatcatttgctaatag

SEQ ID NO: 51733 - DNA, 630 bp, Ricinus communis
  Intron number 1 from transcript 30147.m013861 (locus 30147 .t000132) derived from phytozome v7.0 (chr-ID 30147; pos 2 985325 to 2985954 reverse strand)
tctatctgctgtacaagctgctaaatacaccacaggtacttgcttctgtttcttcaaaatgattggttgtttcagagattttattatatgggttatggaaattctttctgaatcttttgtctacttggcgacatgactaaaaaggatcctctttcttaagttctaaaaatatttcttacatacttcagtttaattaattgtttttttgttgtgtttcagttggtcttgcaagatgtgtcctttattttttggagtggttttaggatatggattttgttgtgaaagcaggacttttgcctctatcatactgataagtataaaagtagaggcatagttgagtccttatttggatagaattctatgattagagttcctgaattctctttataactggagttgttgtggactcctataaccgagtccgcacaatcttatttcataatgaaaacatttatgattaaggaaattatagtagggttaagagaacatagaagatcctgtcataagcagcttagatgaaggttaattatattggagcctaaccaattatcaaaatcatcaatcaatatgataaattatactggggatcctaaagggaatagttcaattgagaagaggtttgataagatt

SEQ ID NO: 51734 - DNA, 932 bp, Ricinus communis
  Intron number 1 from transcript 29908.m006062 (locus 29908 .t000113) derived from phytozome v7.0 (chr-ID 29908; pos 1 392375 to 1393306)
tctttttcttccctgtgtttgtggcggataaaccggtgagtctgtttcagaaatccaaatcccaaagaaaacaaaatctttcttctaagaagaaaaagaatacccatttcttttcctttttttttttctgcaggtgtatgtatttgcaaatctatttagatttcattttactttctttctctttctttctttctttggggaagctttaaaaagcaagaaaatccaactctgctaatcttttgttttctgtctttcgctgttcttgatttcagaggatttggaaacatgcgattttctcttcttttctacttgtcatgcgttttaaccatgcaaactttacatgcaaatgatgtttctaagcagttttcctctgtagttgtagggatctgtcaaaaggttcttagtggatttcttgtttgttcattgattgactgttcatttcttgattttttttgttcagatcagttatttttagttttctctttcatttctatcaatattttggtacagactttgttattatcggaaaataaattaaaagatattgttggcctgatttctttatttgttatactgatgttgaatggttatttatctccctttttctcttcttctcatttttggtaatttgctgctccttctcttatctgatcttatctctttgcttgtactctatctgtctacttctatgattgtcaaattcttgttctttttgtggatactgaaaataacacatcttttaccatttaccatttattagtgaaaattaattttttttattactgcagatctcttgcttatgcgctttagattcttgaattctgcacattttccgtgtaaattatgacattcctataaatgaaactttcgtgagagactaggacttttctatttgagtttctgaccttggattatgtgcggtggcagtaaaa

SEQ ID NO: 51735 - DNA, 868 bp, Ricinus communis
  Intron number 1 from transcript 29910.m000923 (locus 29910 .t000014) derived from phytozome v7.0 (chr-ID 29910; pos 2 03232 to 204099 reverse strand)
tggtaagacacattaccctataaacacatagacgcattcagttttctttttaactcggctccgattaggatttaatctgagtaatctcttagttgtggagatgaatttaactgaactagaaacctagaagtaccgacacttttgaaagataaaagtgtctgtgtcagatatttttcaatccaaatatacgttcaatgtaaatttttatatatcgaatattttattatttttaattttagtgacacgagatgaacacaactaggatacatttaggacagggcgaagacacttttaaaacatcaatagggcaattttaaaattttaaaaaccaaattaattaatagcaattgactcctaaatttacaaacaattccactattagcactaaaattaattttttttttatctaattagtcaataatatctacaaacataataatcgttgataaaatttaaaaaatatttctatcaataataaattaaactctatttatataaaatatattaatttttattattttatttttaaatttgaatgattataaattttatattttaaatattaataatataatatatttaattaacatgaatttctcatgccattttttaattttttaaaaataattgtatcaacgtgtatttagtactgcttaatttggaatatttatctttatgaataactgtgtcagcgtgtctgtgtcatattgtccatgtccgtacttcttatgctagagactatcggtggcgtatttgaatacttaattcttttttatattataaaaatataatactgaaatgctacttaaatttcaatacttaattctttttactccctacgaataatgcataaatactgaaatgcagg

SEQ ID NO: 51736 - DNA, 367 bp, Ricinus communis
  Intron number 1 from transcript 29912.m005509 (locus 29912 .t000235) derived from phytozome v7.0 (chr-ID 29912; pos 1 525530 to 1525896 reverse strand)
ttggtgatagagtagttgctgagaaggtaaatactttgttttttcttttgctcaattttgtttaatgaggttttactctttattttttgtgtaagagttaattgtatgttgaaacaaggagattcaagcaactgaagtttttttttcttttcttttgggtgaagaacacagttgaattgatgatatcttttaagagtaaggttgtgtatgaacattgaggattatagtcaagaaaactgggttttgatttacagagtagctagacttctacggtcacatataattgtttcatgtatgaaatgtcgtgtataaagatttaatgtttggaattttcaggtttcatattatttcagaaagccttgtgcaa

SEQ ID NO: 51737 - DNA, 778 bp, Ricinus communis
  Intron number 2 from transcript 29904.m003019 (locus 29904 .t000133) derived from phytozome v7.0 (chr-ID 29904; pos 9 12412 to 913189)
cgcattgttacgcgatctagataaaagtttgcagggtatgccttttactgaattataaatttttagggacaataatatcatttttctctcattgatttattttctctgtttcaagtatcaatattttagtgtgttttattattatagtaattgagttccttgtagtcatctgatttcatatggataaagaatttatgattaaagttaaatagttgaaagatcatatcaaatgtgtaacctttgcccttgttgttggtttggccaagtacagacggattttctatcatataggataacaacatcatcctcatgctatgctactatgtttggagtaatttcatgttgacttctgtttgcaaagatatggtattatagtaccaatatatgatttcttgatcatgcattgttaaatccatatctgttctatgtgtggtgtatgtgtgcttgtgtcagactaaacctattatttcaatcaaggcttcgtgtttgagaatgggatagagaaaattgtatttgtctgtctctgtgtttgtgtcagacattgctttgtaatacatcttttgtatctgtctctatgtttgcttatgtgtttgtgttctgctcaacgtgttatccttgtacattcatattttccagttttcttcattcccccactttgtggtgcaggaataggaaatttaaggtttttgcgtgtgtgctttataactaaatatcctattgtcaagcacaacctttttatttttcatttaatgtgtatgaatagaaatccaacgacaga

SEQ ID NO: 51738 - DNA, 630 bp, Ricinus communis
  Intron number 2 from transcript 30147.m013912 (locus 30147 .t000183) derived from phytozome v7.0 (chr-ID 30147; pos 3 282030 to 3282659 reverse strand)
caccaattgcaaatcaagcttgtcttcatacagtatgttcaaaaaagttgtattgacatttgaatttactggattgcatctccgacacttggatgtttagaaatctgcaagttcctgggattctgaactttttggtgatagctttactgttttggaatgccttaggataatttctggaagtgtcataatctaaatcaaaattatattgttttaggcattaaggatattacaatttgagtcgttatgtatgttttacaataccatatagttccataaagtagaaggttttctttgctattacatgtccatatacttcatttgacaagctttgtcctgtatccatggcattgaaagattaaggagaaacgtgtgaaaactagaggaattcttggtacatatttgccaacagttgactgcaatatttaatattatgtattatatcacgatgaaatgatggtctgccttctatccacaagttttatgcagtaatcattatgctctttccttaatgtatctggcctttctttcttgttgaaggaaaattaaagatttacattcaaagtgtttgtttgtaactttaatttgtgttcttcaggcaatagaatttttaatttgacagcagccaccaat

SEQ ID NO: 51739 - DNA, 556 bp, Ricinus communis
  Intron number 2 from transcript 29848.m004476 (locus 29848 .t000032) derived from phytozome v7.0 (chr-ID 29848; pos 1 56025 to 156580)
tcatcgatcttattgcagccttacctcttccacaggtaaaagtaattaattgtcatatttggacatctatgttgtttcctgtttacttaattggttgtgcagacagagaattgaaggcaagattttccctaaaagctaatatacttttcatttgagtttctgaattgaagtctcttattcagagtgaataatccggcacatattatggtctgcttgcttgtggaaaaattagaagaaaaatcaaataaagaacttggagtccttatatagtgggatgaggttgaagtggcttttgtcactgctgtttctcctcaatttgttagacatatgtttcacttctcaaagccttgattgcaatttctgaatttgggtacatttgaataaacttgactatggctgttcctttctttaaagatattagttgcgggcttgtgacacaggttttgttttatgtatcctcgtatgtggagcttttgtattcttatcctcttttaattcacagaatttgaatcataagcaaaaatgagttcagattatttcttttgcagattgtgat

SEQ ID NO: 51740 - DNA, 624 bp, Ricinus communis
  Intron number 3 from transcript 29933.m001389 (locus 29933 .t000011) derived from phytozome v7.0 (chr-ID 29933; pos 7 6903 to 77526)
aaaataggtgagttttatcctaacacccagctgatttttgttataacactttctttttgtttatataattgttaaaatcagatgaataggtcacgagattttatgcttcattgtgataaagagatctaatcttttatcttgttatcttttctttaaaagagttagattttgctgtgaagagctttatattttacattttcttttgagattgggtaaaagaaagagattttttcttttggttttcccttgacgtgtgctgtggtaggacatgctagttataacatgccatggtgtcttgagatgctctgttaaattaaacaggaggtagttttaaattggttactgttcatattccaattatgctagtcatacttttgaaataatcttaagtactaaaaatatgtgaacaagcttcaactttttgatttcttaaattatggaagtaaagacaaccttatctttccatatgtgcattatgatgttatggtcatattgatgtgacaattagtggcttttgactgtcatttatctacttgacatgccttgcttcaagttattagtccttatttatcttctaaatttgctatagggactttcgacagccaaaatatcaatcagatcgaa

SEQ ID NO: 51741 - DNA, 566 bp, Ricinus communis
  Intron number 1 from transcript 29848.m004564 (locus 29848 .t000120) derived from phytozome v7.0 (chr-ID 29848; pos 7 10645 to 711210)
gcttggccttgggatctaccattctggcgttcaaggttttgattactttccttctctctctcctcagatatttgttgtctgtttgtctataattttgttctttgaatattcgtttctgtatgtttttacgatttatgatattttagctcggatctgtatctcagaaaaaaggtcgctttcagtgtttggcttcagagaaactgaaactgcatacaattatcattaactagctattattcagccttcgcacaatgtattaagaaaagaaattgccggctggctctagtaattttgcatttcttatttttttaatcaattgattttgtcagcagtcaagagctggtaaacaaaagaatggaaaattagattactgaggtgttgcttttaaaataatttctattttcaacaaaatgacctctatgagataactcaaataaattatgattttaattctaatactggtcaagtggtcatggtcttctctggtttaataaatgactagattttggtaaattgaccaaagtttggattttttttgttttttttttttcatggttatgcagttc

SEQ ID NO: 51742 - DNA, 669 bp, Ricinus communis
  Intron number 1 from transcript 29970.m001011 (locus 29970 .t000040) derived from phytozome v7.0 (chr-ID 29970; pos 3 13834 to 314502)
ggctggtgttattattactgcttgtgattggtaaaattcttgactttcactttactgttgtttgtgctgcatattttctgttcttttttgtgtttattgttaatttctcttgttgggtctttgtcttttgaatttcatggcctttggtatgccgacttctaatccgtttttgggaattttgaagtttgagaattaatatattgcgtttaagtaagtaatttgaggttttagattttaggatttcttctttttaaaaattagttttgacttctgaagttgagagcttgaaccacttcagctatgtgcatgatttttcatattgcagcttaagtgagtgatccacaaattcaaaagaaaatttacatatcaactcttgctgtaacttgaagtcggctgtcaaaatatacatcacaaagtcttaaacatttattgttttcctggaatctggaggataatgtgggaaagaagaatctctttttctttccttaatattaatagttggtattcgcaatcatatatctgtcttctattcctcattgttttaactataagggaatttttatgttttcttttggttttatgatgctttatatagaaaagttcagttcactatgttgatgcagttttcatggtcttaatgcagtttcatcttcctgtttcttgagaact

SEQ ID NO: 51743 - DNA, 604 bp, Ricinus communis
  Intron number 2 from transcript 29822.m003435 (locus 29822 .t000110) derived from phytozome v7.0 (chr-ID 29822; pos 5 91322 to 591925 reverse strand)
ctaagccacctaggactacgcataggttgcttcaggtaataaattttgttttgagatttactttatatttggcatggtagttcaatttgaggtcattagtgtttttttctttaggtggaaaaatgatgtagtttgaagtattttttgccactattatttctgcagtataaaaatctgttcttcaagattttgtaaagcttttgcagctgattgaagtctctgcaactgattatttattatagaatctaactgaatcagttccatcgttccatcttttcgtttattatgtgccagtatgattattcttattgttgtcaattcggtcattgtttaaatctgatagtatttgatgggatgtgattgtgtttactgttctaaaagtactgttctcattcaccatgctggctcattgttggtatgaaatcattaggaacgttatcgtagatctaaagtataaatagtgttattcttttttctgcttgccgctgcagtctgctttaatttgttttttcttttgcattgaaattcaattcatagttaagaaaataaaatgttggcaattttttcaggtattcggaggaaaggctaaaagaaagaagctgct

SEQ ID NO: 51744 - DNA, 974 bp, Ricinus communis
  Intron number 1 from transcript 30078.m002317 (locus 30078 .t000110) derived from phytozome v7.0 (chr-ID 30078; pos 6 95103 to 696076)
ctgtccacaaaaagtcgatcccatttcaccaggttttctaatttcccttagtttcatttggcttgttttactgtctcaacacgcttgaagtctggagataatataacatgcttttattcaacatacacacatgcaaattatatgaattacgtctacataccaaaagttttcaatttgatatagctttcgcgataaactattctacgggctagttgatgtcctttcttcgatgcaaagaaactaaagcctggcctagtgtggaagatactgagaaacacttgtcagtcagaacatgtgtctcttgcattatatgttcagattctgatttacagctttgctcatgaaagatatacaaaaccagaaaataatatctgggaatatcatacttgattggcaattagattaggtcagactggctactatggaatatagatgctccagcttgacagcaagaatatcttgattgtgagaactcatatatagtgaaattgtacagtttccttagaatcccaataagcttgaactttcactccataatactgatatattgattaattagaagtctctgttttattcatctttatcatactcatcactcgccagaaatcttttttgactcttttacttatgaggctaatcatcacgattgatcagtcagttaacattggcttttgtattgattatatggtttggtacataaattacggtcaatggaagtacactaattttgctctgaataggaaatggaactgtacattatcagtcaattcccgttaaatattttctggctgcatgcataacctgacgtgttccaggtggccactggccacattcaactttcttccttctgtttagagtttcagaagttttatcaaggaaacttgaacatttaattgctgtaatcttaataaattaagttctgcttcctattttttgcagtcaccaatacctatagtttcattgcctctctctgc

SEQ ID NO: 51745 - DNA, 880 bp, Ricinus communis
  Intron number 1 from transcript 29910.m000962 (locus 29910 .t000053) derived from phytozome v7.0 (chr-ID 29910; pos 5 26228 to 527107 reverse strand)
gcgggtaattctgtttgattattcatattctgtttgataattcatactcaatatgaaccatttggctaatatattagagatcggaagaactgcctggtagtctattagtcaagagttcaaaacccgacattcctatcccctttaaacatttcgaatgtgctggaaaaaaaatggtaatctgaataataacttaactatatgcatactgattcacctaggtaaagttcgcgatacaagagtgccaaatagctataggatgtcaagaacctataattcacaaggttagagacgattcaggctttgtgcttggggaactactctaatgctttaagttagttatttgagtaagattaaggataatagtgtttgaagagtcgcttggtatttataggagttgtcttgaaggttaatcctcccatagatcgtggataattgtgttcgaaagaaggagagacacgggctccgcattctaaaggactgatgatcggtggtgtttaccctgtcctgagactcaccatgttctctcgttagtcatatgtcacgcgagttcctagaataggatgacccttataggcgagtctgcctcagttagcaatgaggctttagtctagtggtctaggctgaagccttcagacaaaaaagtctgaggtactattctctctcctagtaagagtttggttatattatttatggtctgtttaccttttttttttttgtaagaaagaatttgtttaacattgtactatgcctatttctaaattagaatatgatgatgaatgatgtatggaaactgtctattggccaaaaatcgcttgcttataagtggttgttatttattggtacagacagaggtcaatcttttgggaaggttatctcatcc

SEQ ID NO: 51746 - DNA, 844 bp, Ricinus communis
  Intron number 3 from transcript 30073.m002227 (locus 30073 .t000037) derived from phytozome v7.0 (chr-ID 30073; pos 2 54569 to 255412)
tttctgctttcttgaagcctaattctcctgaggaagtgagttccatctttgttatagtttattgtgatagtgcttttattatgaagcactgaattgcattaagctcgcttttatttatagcatctcagcgatggactgctgagactgctaactggaagttttatcttaaattgtttttaatgtgtgtgcctatgtctggacaagttccaaccagtaacttgctcattttttttttattgttctgaaaaacaaagaaatgttgcactgccttagaatgtgggagaagtggaaagaaataactgatgaagtaccttctgaatgtggtaaagattatgagttgtagcaagagattctggattatctttatatgtggaaaattatatcaatttaataattggcaaaatttgatatccttgtgtctgcagaggactttttttttttttataatataaattcaatttaatttaattgcattcttaatgcgagtggaattttcaattcttctctatccttttctccttttgaatcatctatcatgtgtgcttgaggacgtgagattaagacgtgtggttatttctgagttgcctgtttgtaccaaaattagttttgcatacgagaactccccttaacaaagattcactgacaatgagctagagttttggttcaatataattttgttgtgtgcttgtcttaggtaacttggtcctctttatcttgaagttaagctgtattcaataagcaaatgaatatttatcaaggtatgacatgcaagtgacttcctcttattttctttttttcaatttttgcaggccaagattgcacctcttcttgctaggtccaattt

SEQ ID NO: 51747 - DNA, 317 bp, Ricinus communis
  Intron number 3 from transcript 30131.m007196 (locus 30131 .t000347) derived from phytozome v7.0 (chr-ID 30131; pos 2 151820 to 2152136 reverse strand)
gcagggtacaatctattttcttcatctttatgtctacacattctctttgttctttttgcatagtgttaactatgtcactggtagaactgctgattaatatcacccaaatcaaattgggcagttcataatcatttactaaaaaaaataaacaagcttaacacaaaagcagaaaaagaaataatagttggatagattttccatcaattactgcccaagtgtgatatggacattctcctctaaacttttctgttactttatgcgtcattaattgccgtttgacaggtcgccggattttgttgcactttgaagctgttgat

SEQ ID NO: 51748 - DNA, 775 bp, Ricinus communis
  Intron number 2 from transcript 29827.m002637 (locus 29827 .t000110) derived from phytozome v7.0 (chr-ID 29827; pos 6 01989 to 602763)
agtccctcctcaaactagcgctatcatcaccaacggtaaaaaaattaaatatttaaagcatttagtgttctagggttcggtttcataaataaattaccattgattttttgtattttattcgttcttcccaaatattagataatttatagtagtctgattaataatttttttatcattattctgctcttgaacttttttatttaaacagaaaaatgagaaataaaggcctcaaatttgtgctaataattaaagtgtatatcagattttctttttcctttttgtgaaaagtgaaaaagtttctgtgatgatatatatctaaactgaatttaggtgttgctttatgctcatgtttatactctacacttcatccagtgttgctttatgccctgtgtttttaaaacggaaaattcccatgagagcacaactttgactttatcagcttccgattcagtttttgaatgattttgcaaaatttgaaaaaaaaaaaaaaaaaaaaaagaagagctgcttgcatttctcatgcattagtgttaggatgacagtagaagaaccttgttaaatgggttaatatcatataaccgaattggtgatggggaaagaacatttaaattcttggttggtgccattgaaaagtgccttagctagataaagtctctggtagtttctcttactttagctagcctagctcagtcaaattgtctaattaccttttggatgcttttcattctatactctttgctttttcttactccgaaattattgtgttgatatccag

SEQ ID NO: 51749 - DNA, 732 bp, Ricinus communis
  Intron number 3 from transcript 29844.m003364 (locus 29844 .t000210) derived from phytozome v7.0 (chr-ID 29844; pos 1 206128 to 1206859)
cttgccacgacagatttgtaagttttcagatcctcttttggtttaaattttaggattctgtaaaagcagtcagtataagttctgtttgccagaaaaatgttgtaccctttacttgcttgtgtacaccttcacttagtaaatactgtgagcattttcccaagtgataattctctagaaaaagatgttcttaaatcttcaggaaatctttctaaacagaattacaatttctttttctagaattaatttttaaagctcgtgttctcttattatgttgattgctttggatttgggtagtgtagtatccccctagatttatcctcctttctttcaaagacactgttaatatgtttcattatttaaaagattattttggtcgaaagcaccttacaaattattcttctttcttagtaatttgatttaggctttttcagtgagaaacttagatgagctgccttcttttgttggttagctaggtaggctttatcatgtcctatttttgtagctcttacttggtgtttttatttaatggatttttggttcattgagttagctattttttgcttctaattttctggctttcggtctctgattttgtgctatcttataatcattccttgaaggtgcatctatgactttaaggtgcatattcctgcttgctacagttgttcttattatgagtggattgtttttgttacagttaattgctactgctgctctgtttcttgcttcaaa

SEQ ID NO: 51750 - DNA, 956 bp, Ricinus communis
  Intron number 3 from transcript 30115.m001214 (locus 30115 .t000040) derived from phytozome v7.0 (chr-ID 30115; pos 2 69937 to 270892 reverse strand)
aaggtttgtcctttttgtcctatttttgtttgccttttctttagaaaagaaaaatattcaatctttcttgctgaaaattgtttggttgttatgccctttttgttttgtcttgttctgtgctctgcctggacttgattcaagggctgctttctactctggttttaattctgtttggctaaatttctgcattcttgctttatgttatgtctctcagtaatagatattcaaggttcaaacacttaagttgcatgttagctaagatgtttgctatgttaaaatggttaaagtacaattgagttttgttgcagaagatatataattttcatatatacataattttaatgattacccttttacttcaaggggctgtttctgctaacagcacataaataaaaatattttctaatgctggataagtttcacacaaagtacttagtttttgtctgcatcccatttaatttagtctcactttattactctgtagaattgtgggagtggatttattttcattactgaaactatgtttctaattaccccctgaatcactttaatcagtagcctttcttgttttaccaaatagttggtagatgattagtttttaacacattataagctgagtagctatcagtttagttgagaaaaactatagtgagatgttaattttgagattgacatttgataaaacttcaggtgcaaaagtaattgctaatgcagtattttatatgtttaggctataatatgcaattttttattttttgtgtcaactatcagcttattttgaattgacttgtgggatttagacattctggcggctccattctcatcactactatggaatccttaaaattagatttttcctttgtcctctgactctggataagtttttgatatcttttcattttactctttttcatgttttaggagaggtcatcaggtcgttctcgtggttttggata

SEQ ID NO: 51751 - DNA, 551 bp, Ricinus communis
  Intron number 2 from transcript 29851.m002430 (locus 29851 .t000072) derived from phytozome v7.0 (chr-ID 29851; pos 4 56888 to 457438 reverse strand)
caatacaattagaggtagtatctacaatctatatcatagtctcacttttgttttcattttttggcattcatggatagttttacactgtactaacgctgtttggttgactggtggttcgtgattgtgagcaggctgcccccctaggcttttcaattatagtatattggtagactaattttctcactgtagaagcttaatttgaattgtaatttggtaacaatgtggcaaagtgattcttgttgatcaaagaagtaatttaatttacttgagtggggatgacagagattttatacgcataatatttttatgtatctatagttaattattcttatatattcttctagatatacctaagtttactagttcaaaatgtacttaagaaatctgtccatgttggtttattatgctataacaaaaattatagaaattccataataagatttccaatgtgcagttacccttggaatgcaagcaacaatggcaaattctcactcgacttatcctttggttttgcaggaagcagttgaaaaagatttgccattggaccacaa

SEQ ID NO: 51752 - DNA, 892 bp, Ricinus communis
  Intron number 2 from transcript 30072.m000969 (locus 30072 .t000043) derived from phytozome v7.0 (chr-ID 30072; pos 2 83271 to 284162)
tgcagcaaaggttgcttacaaagctctaaaacagcgtatgtaaatagacctaatatttcatacacatactgtatggttgtatttatattctttcatgcttatttcgttctatcagccaaattcttgattttttgtcagcaatctcttaattaataaggagtttctttaaaaaaaattgtggtgacaaacctttgatagttttactagaaagattcaggcttctctcactatactttatcaaaggatttagttcctataaaaaccttagggtttctcttcaagaacttaaattgctagctagtatttgataatgggaaaacccagttcaggattgcattaatactgtggtcaggatagtgggaaaggtggaagaaaggtgaagccaaggaagaagaggctgttttgctatggtatgaatttatagggcactgtgtcttctcttagtaaataaaattgtaatttcaccaatatgcattttcagtgatggcaagaaagctatgatcatttatgtttagcacgttctcttctgagctttcttactggaattctgtagccattgtttgcataaaggacatcaataagtagttccactaaaggaacaagggaaaaattggggtcaagagaaatgccatgaaatggagttttaggcttcatgaacggcatcaagtcagtaggtaaagtttgtgacactggaggatagtctgatagtagattgtaaattgatgcacttcttgtcatccttttaccaaaaagggaaacagtaattcaacaagtttggaagcatttgctaaaataggcgtcatgaatgtaatagtctgtttctaatgctcaataaagtatcatggcttctttttcaggcaactcaaagcaaagctcaacggttcttcttcct

SEQ ID NO: 51753 - DNA, 786 bp, Ricinus communis
  Intron number 1 from transcript 30054.m000786 (locus 30054 .t000001) derived from phytozome v7.0 (chr-ID 30054; pos 4 870 to 5655)
gattatattggttagagatcttaatttgccccctctgcttctttttttttctcttgaccattgtccttcttgaatcagaaatcttgattgcattttttacatttatttcaccttaacttatctggctaaacttgtctcctcttttgtccctaaaggcatttaaagcccatttctattaatgatttctatattattcttgatactgatctggtttgttgatttgagtttcctttaacttagaaatgacaatgacttatgtctaaaatataaacaggaggtgatgtgctgaaatgcttaaatgtatcttaaataggaattttctaacttgatcaacaaaagtgagaaaaaatcatctctaccataaataggaatgttttagatggtaaatacaaataatatgattcaagttgtgattgaacaattgcggtccaaatggtggaaacaccagaaacttatactccctttctttatatgctaaaatttcttgacttttttggttctcattaactttttgccaatttcttgttttaatttcttttccattgatgttggaattttgctaaacgaaattagagcctgaatattgctggtaaaaaccctgacaatctaatgttctaactacataaaaatatcaatcatgtcactaatagttgtttcttggacttcttccaatggttatgccatgtctttaacatactgttatgataatgatctgttttcttccgctggactttctctctgtttgtatcctaacctttttattccctccagtttctttattctgca

SEQ ID NO: 51754 - DNA, 568 bp, Ricinus communis
  Intron number 4 from transcript 29929.m004668 (locus 29929 .t000171) derived from phytozome v7.0 (chr-ID 29929; pos 1 036745 to 1037312)
ttcaaggttttaaagatctttctaaccgactcaaggtatttcttgttaattttaagccccattaagagactagatgatacagtttgctgactctagaatcatgattcatgagttttgttatacacatcatcacaattgcatttctcttagcctttggtctctgatttacaggaaacaaatgtattgtacttaaaatgtaacctaagaacttgaaatgtgactttgacctttagggagagattgcagttgaaagagtgggtgaagtcgaaaaacataagttctatcagctactactgagataaaattaatgctttatggaaggccataagttttatgtgtagagaatgtgaagtttattttgatggagaatatatgcatgaagaatatgaagattatcagctgctgttttttattggcttgcaaatgtacagaaagttaggattgaaataattgaagctctctactctagaggtttatgctttatgcactcctgttgacatcatatttgctggtggactctggtaatgaaccttttgacattgtaatgcttatatcatgcagctccaag

SEQ ID NO: 51755 - DNA, 283 bp, Ricinus communis
  Intron number 1 from transcript 29977.m000262 (locus 29977 .t000014) derived from phytozome v7.0 (chr-ID 29977; pos 9 6471 to 96753 reverse strand)
atcgaatacgctgccaaagccgtcgataacagcgggtctctctcttcccctgtctttcctttgttttctgtttgtttctcgaggaatttctgtattaatcattactgttgttttatttgtttgtgttatgatgtttcacttcgaaaggaaatgcaagtgtctgagtgacattagggtttatttgtttttcttttttaatgttaggtgctactcatttgactttttttttaataaattttggttttcagtactgtgattggaatcaagtgcaaggacggcattg

SEQ ID NO: 51756 - DNA, 1021 bp, Ricinus communis
  Intron number 1 from transcript 29908.m006232 (locus 29908 .t000283) derived from phytozome v7.0 (chr-ID 29908; pos 1 786891 to 1787911 reverse strand)
gtgccagaaaagaggctattgattggataggaaaggtgggttgtgttattttcttttggatgtttaatcacataccgtcaatcttttgttagtcttccccacttcttctttctcttatttctggtgaaaatatatggtcgatacaattatggtcttctttttcttatcattgtcctggacacctgaattaggaaggagaagaaggaggagaaaaaggaaaagggaaaacagttttttcttttaatctcaattttggctacttgtttagagttaaaatattttctcaaattaagttagaattgtcaaaatttaaagatttggacaaagttgcaaaagtggaaaagatttggatttctttttaatcaataggccttcactttatcacaacattgttgtttctattatgttctcataaatggaatcctttttatatttcttgcttgaatgaatggttgaggtgttcactagtttctttttcaaagagcaagacattttgttttaatattggggttttgatattttttaatgtcaagtttctggagatggattttgattgatttgaatcctctaggcaagtattgccatggtgtttgtgctcctctttgatattggtgttaaatgaaatgggtagggcatgtatgttgttctttcttttttctttctgttggaattttttgttccctttcacagttgctctatctgaaatgggtttggtgggttcccttcttttctcccctttttcgggtagatgcggatttgttaattgcatttttgtgtatgctttatgcatattttgtctttgccttttttctcttccacttgattagtctcatgtgcatatattttcttactttggttttttgttttctctcttttgattagtctaatgcctaacatcattattaatatgagttgtaattttcttttatttcctttctgctctattcaattctcttgcaattcctttgtggaattcagttggcggtcaataatgcaaatgctttgttggttcaataggttc

SEQ ID NO: 51757 - DNA, 498 bp, Ricinus communis
  Intron number 1 from transcript 29889.m003326 (locus 29889 .t000092) derived from phytozome v7.0 (chr-ID 29889; pos 4 45716 to 446213)
atcggatctgggttttccttatctttctcttcaaggtactttttcttttccacttttttctttttctttttcctgttatttcatctcaaagtttcaatcccttttagttttaacttgtttcttttaacttgtgtttttctattctttaatctctaaagctcattctttctcgtttccaattcctcttttcttaattcacaatctgttgtgcattgtttgtggtggcttgttttgtggcttttgattggttctcacaccctacattttctgggttcatttgatcatacacttctgttgcttttattcgcctcaaagtttgttccttgctttatgtgcaagtttttttttttttctttttgcttcttttgtgattccaatgctgaagccatgttctttatttctggctttttaattttttaacaattatgagacgctttgcacattctatttttggtgtaattcatttttgtatttgtaataattaaatgcagggattgt

SEQ ID NO: 51758 - DNA, 616 bp, Ricinus communis
  Intron number 2 from transcript 29912.m005506 (locus 29912 .t000232) derived from phytozome v7.0 (chr-ID 29912; pos 1 513103 to 1513718)
actgggtgagtatttcattcttattttatgagcatactttatactgtctttgtccaatcttttatacactccgatatcatgagtttttagatatatattgtttttgcataggaaagcactgaggcgcttgacgtttcattagtattttatattctgcatacaaccttgccccatagccacccacttgaaattttcctttaatccaagacaaattaatatggcttcttcattgtgctatatccctcattctgtcgattttgaggaattaagtcacccaattaatcagttgggtattggtcgttcacagctactacatatttacgtaagaagagatctttatggtaatgcaattttactggataaactaaaagctttttaacattggaataatgtaacagatgtaatgtcttatcttttttctatttggcattcatttgactttctcttttgatagctttccaaatgagatcaaacttgtgctcgtgatgatggaaaatgataaaccgatgcttatcatgctcaatgctgttatcggtcctgctaactcttggatctcctttttcttttattaatttttgcagtgtaatcctattcccaattgctgtcaccttttaca

SEQ ID NO: 51759 - DNA, 1052 bp, Ricinus communis
  Intron number 1 from transcript 29917.m001975 (locus 29917 .t000044) derived from phytozome v7.0 (chr-ID 29917; pos 2 64603 to 265654)
aacaaagggctgcctcagcaaggtaataaatgaagtttccctgatatttagaattacttggtataattgttatgtatgttgacattgagttgtgtgttctcagtttgtttctatcatggggaacactggcctttttctctaatcaaagttttaatagcatgttggtgactcatctaattgagatataagatctggttgggtattaggagctattttgatcgtctgaatgctatcagttcaaattgactataacgtgaaaaggcaatctcttcttcttgtatacaacagtcattatatacatcatatctcttcttcttgtatacaacaatcattatatacatcatatctcttcttcttgtatacaacaatcattatatacatcatacatttaatcaatttctcagaaaagcatgcttttagttatgaaattggacaaatgccaaacaaaggagagggaaggcacaacatttgtttggcacttgacctagttgaagtgagattagaaggttttagataagtacgatatgttatgtatcacccgttctctaatgggattttgacctccggatacattacatgggatttctaaacaactcagtttctttttgtgtttcaaactctacctacgttttctaactccatacattctttttagctttccttattgaactgttcactaaagagtcattggccattatacttctaatttacatggaaattgttcttaaaaattcacagtaacgaggctgttcagtctgataccattgcaccatttttcataacagaatgattcatgatactgttttctgaaatcctggattgaacctctccactctgcttaaagctacgcctgagtaagttccgtttttcaaggaggctgtttgttggaaggaggtcttgagggaacagggggtggtgggataggggatttcttggggtaagaagaggctattcatatccaggttctagacgaacatattgtaaccttgttcacttctatttttgttttataaacagagaagattttgaaaagactggagtaagcagcttag

SEQ ID NO: 51760 - DNA, 823 bp, Ricinus communis
  Intron number 1 from transcript 29864.m001503 (locus 29864 .t000079) derived from phytozome v7.0 (chr-ID 29864; pos 1 147734 to 1148556 reverse strand)
ccaacttcagaggcttctaggatttggattttacagtaagtaaattctttcaaaattctctttaaatttgtctttcctctgttttcttttccagatatgttcttttgtctctaaatttcctgtttcttctttcaattatgagattctgtctgtttggggattttcctgtttggtttggtggaaaagttgagtgaaagtaaaggaaattggaaagcttgctgttttgtgtgttcttctcgctgttgttttaattgtcattcatttattttttatgtattagaactagatatattataatttctactgtacttaaaggatttaagggtatttttttactttaattaattaatagagataaatttgtttttcttcatgttagttaagtggagattcttgtattttagattataaataacttttagatttttgtaattttgaattattattatttggaatggaactttgaatcttctgttagaggcttttcttctttccttttatttatttatttatttcaaattcaggttcagtggtgaatgtcttattttagaagattgataattgagattacttgttaccatgcatgcatatctttgacatttggtgtttatggattatgttatagaatcttagttgatatatgattttatgtcttaagtcaatagagcagttttgataagttgtgatgttttcttttcttattgaaacatccaaaatgcagttacccatgtttcactttgaacatccgtttgctttaacccttttatttattttttttgttttggggattaggctactgattttttccttaaggaagtgaata

SEQ ID NO: 51761 - DNA, 656 bp, Ricinus communis
  Intron number 1 from transcript 29912.m005447 (locus 29912 .t000173) derived from phytozome v7.0 (chr-ID 29912; pos 1 106395 to 1107050 reverse strand)
cagcttgttactccttggactacctctgtcgccaggttactttcacttcatttttgtacttgcactaatgtctttttgtttaaccgaaagaaattccaaaattcttttgtttctttaacttagttttggtatttattgaagaatcacggtaactactcttgatttatatttgatcatggttatcagtgattatactctgttttgaccttataatacaaacttctagtagttcaagaaatggatttatcttcttcttttagatgttttttttagtaacctgctctatttatatgctatatgttatttttatcttccaacatcttttcatctgcagctcaccgcatgggccgagccagatttcttttaatatattgtttaatattgttgtcatttgttttaagatatgtgcttaattctactagtaatattcacaaaagttatcattgaatctcacaataaaaatcagcaagatcacttgatgttgccttaattcaactttgatatatcttttaatttgtatttccacgatgtaagtattgcagaattactgaattttccgctaaaatctggtaaaagtgaccttattaatgatcttagataatatgatgcggttgaatgcagcggatactcgttgttgagggacccacgccataaca

SEQ ID NO: 51762 - DNA, 600 bp, Ricinus communis
  Intron number 4 from transcript 29905.m000422 (locus 29905 .t000001) derived from phytozome v7.0 (chr-ID 29905; pos 2 415 to 3014 reverse strand)
cggtaagttcaatcttgagctcattacatatatgagatgtactatggatgtattttagtatgcatattatgtatttctaaattttatgcagtatgtcatatggttttaaaaatatgtcgtacatgctgcaagctttgctcttcttctgttgcccttttgcgtcaaactttcaaatctcaattaaaaactgaaataaacagtaccccaagcaaactttgatgtggaagaggacccacatcaaagtctgtgattgttatagcaattagcaataaacagaaccctcaagtctgtgatttctaattgcaagctgagctatccaagtcgatgtggatccagaatttttaaggttgttatgaaacaagccatgtccgtcttggaatattgtgccttgtccatcttttcttatttagctgtacttgattaattgggttgaattgataggtgcatgtgtttgtcttctgctctagatcctgttttagcttttgcttttgttctgtttctgattagttgttacttgaaatgaattttagcctactatacacctcaattcctcactaatttgcaggttgaaaagctggtcctcatcaatccaagtgtata

SEQ ID NO: 51763 - DNA, 886 bp, Ricinus communis
  Intron number 1 from transcript 29851.m002392 (locus 29851 .t000034) derived from phytozome v7.0 (chr-ID 29851; pos 2 00911 to 201796)
gtcttgttagacctttggagcctcacgcaaggtttgtcacgttatatatttttttttctgatttataattcttgggttaagatttaaatttgatttatttttcttagggttttagaaagtccaagaaagagaacaagaatttaactccatcgaattctattttgttaatcctcatgtttattattgttgtagaattcggttttttcagtttagaaagcattttgaacgaaatgaaactttgtgataggtcacacgttttggaagaatttaatttgattcagctgatttcttgcatttgttttattctagacaatgccccattgatgtttttgtttgagaattttgttatttgtgtttgtttgcttagaatcggaatatgctaatgaaatttttgtgctttaggttgcctaatttagtgggaatgaaacggatttaaattcttttaggatttagaccaacttgtggatttttttttttccaattcttggattgtgtattcatcaatgtttgcagacttcttatggcacataaacatttccagacttttgtagctataattttaattgcttaattaatgatacttgaggataattaaatgcagagcaaagaataactgcttcttacatcaaaagttaattgcacatggagaaaagaaatagttagtatatgaactgattatcttcataattattacaaagactgtaaaatttaatgaatagaccattagcagaccattaattatgcccagatctgaaatgtgtatgtttctgtaatattccatcttaattttatcctaattctgtctatttcttttgaatcatatctgattgctttctcttatcttttttcagcttgttggaggctatagatctcattcttgaaggtg

SEQ ID NO: 51764 - DNA, 478 bp, Ricinus communis
  Intron number 1 from transcript 30135.m000189 (locus 30135 .t000002) derived from phytozome v7.0 (chr-ID 30135; pos 8 3183 to 83660)
gagctgatacttcaagcttggtggtacttatttttaggcaaatcaactgtctaattagatattttaaatatatttcttgtatactttattttatctttgttattttaagttattaatatattgttattaatatattaaaagtatatctatagtataccagtttaattatatttgaatatttcttaatattttaattttattatatacttctaatatttttaattatgtttgtctttatattttagattggtgatggatagtttagagataagaatgtaggtgattgtgttgatactgatgatgatggaaagaattcaaaggaaaaagataatgacaataccattgtactgtttcttttaataatttttatattataatgttgttatattttgttatttttctaataagattttttttatatttttcttttactttggtcataaggtttaggaatctagaaatattggaggtcttggtg

SEQ ID NO: 51765 - DNA, 924 bp, Ricinus communis
  Intron number 4 from transcript 30074.m001363 (locus 30074 .t000030) derived from phytozome v7.0 (chr-ID 30074; pos 1 94568 to 195491 reverse strand)
ttggggcttcttagaaagcaggttggtttgtttaatctagtaaaggataagaattgaggaaaaaagaaaaactaaaattcactttgtgctggagaatttgtggttaaacaaacacataaatatctgttgaacctcttaaatcagaacatcatgcattgccgattgatagaacatggaaaaagaaagtgcaaagtattttatttgttacatttaccatgtgcataggattatcagatctgaaatctgattcctcggaatttacttttctatttcacatgaactttctagaacgaattgcttgtattgagcctgcacgtgatgagggctacctcatgtcctaattcagagatgaatatgtttgctgggaactctgatttgatcttccgtggacattcaccaattctttcaatgaaatcttctgttcaatatacctggcattcaattagaagttgaagcttaactctgactgtaatcccgttctggtttataaatttactgcttaaaccatgaccattgttctctctcaaaattctacaaggtgaaagaactttgtagtaaacaagctctggcatgaatcaattcagttagaatgcatatgatcagatttttgataactctgttttcccctgcatgcatcacattaatttaccttatcattttgttagggggtcattcttactagaaggtaaactgatatctattggagctccaggtttctgtcaagacagttctcctgttggtgcttgccatagatatgcttttacttcgtttgatttggattttgtcctcgtctatctgtgcatcttgcttatgtttcttcaagtatctgaacttccgtatgctgtcattattctatttgcattcttcctcttaagttttgctagtaacttactacgtcaccatgctaacttgttgcagaatcag

SEQ ID NO: 51766 - DNA, 600 bp, Ricinus communis
  Intron number 2 from transcript 29851.m002455 (locus 29851 .t000097) derived from phytozome v7.0 (chr-ID 29851; pos 6 00372 to 600971 reverse strand)
agattattcataaccctactgttaataaggtctgtacactcatattctgttaacttgcttaataatcttcatcagtttcggaatttggaattatgatttatagtatagctagtgatggttccgatccagctaggctgagctggcgatctgtgggcactataaagtactaagaataagggtcagaggggccgatggaccttgcttccgattggctcttgatagtgacagtcctaacttggattttgaataattggattttgataggttggaaatctaaagttctttgtggaaactgttttcattatctctaataattttgaggctacagttttaaaaaaataaaaaaagaagccaatttgggagctaactttccagcaatgctaatgtaactcgggatttttaagatgtcaggtattaagagtttttgctttttgtgatttcgagcaatatgatttttttatttcttgatccgggtttttaaagtttatgaagttggttaagataggtagagcttcaaaagatgtgttggtctgctatccttcttcttcaatctaactgtttctgaaaatgttacattaaatatggcagcgtttggaagag

SEQ ID NO: 51767 - DNA, 494 bp, Ricinus communis
  Intron number 1 from transcript 29851.m002455 (locus 29851 .t000097) derived from phytozome v7.0 (chr-ID 29851; pos 6 01113 to 601606 reverse strand)
agccaagaatataccagtcagtcctttttctttcttcttttcttttttcttgttactggcttatattcaattcttttggattatgactcaactgctctactactagtcactccttctcttttatttcttgattcggtaatctttgtaaagttttaacttttaaatcagattctttagattattctagtcaatctttttcttcttaattatttgtcgttaaaatcttgattttagttcttgataaagtctgattcttttttccttcttcttgttattgacttatttagcttatcagtcaagaatacactagtctgtcttttttcgtttagtttctgttttataatattggtcttatttagtaatcatgataaacttgagttctttttcttattcctgtttgctggcttatatgtggaattgtttgtctattttgaggtttcttatttttctttttttttttggtgcaggtgatattattaagactttgaaggaga

SEQ ID NO: 51768 - DNA, 1030 bp, Ricinus communis
  Intron number 1 from transcript 29895.m000316 (locus 29895 .t000010) derived from phytozome v7.0 (chr-ID 29895; pos 8 3184 to 84213)
tgttgaagggaggtcctggcctgcccctataagaggtatatatctataaaagatggaaactttacttattagattcttttttacaataggcgctttgttgcgtgcagttgggtttgttctttccagattattcagttagatttggattgctgttgtagaaggggcaatgatcttgattatcagaagcgcaattaatagcctggggaaaaatgctttttctatttatttatctataaatatatttttcaataagttagtggaatttggcaatttatgtcttatgacaatttggaaccatgaagaacaagaaagaaaaattaatggcttaaaaattgcaattttaagtagctttcttgtaaaccctaatccataaaagagatttgaagattctaatccatgtaaatttggacaaatcttcccaaccacttgatttaacctcaaattccatataattaatagtttaagattgctctttgtcgaaagtatacgtagttcaatgtttaggcacagaacaaaacagaactatattacttcttgtagtggattgaggacaagatggaacgaattaccaatgaagagccacaaaattattcattgttaatagtgtaccgaattgcacttaacaaaattgcagaagacctctgcattaagtattaaattggagtgaatgctttcttggcttatattgtaatggaccaaagggaaaaacatcttactgcaaccttctttgctttgcaaattcattttgccatatagctgctcaaagtcatagttgttctaggttaaatgttttgagtttttaacataattgaaatttgagcaagaagcgaattttaaattaaaagggatattcattttctttcttgttgaacttcaatgcgggtgtgaatttacagagaaataatgtctgtctatctctctctctatctcttttgtacatatcccaacctgatctatttgtttgcatggactgagaaatgagaatacttcttactatgtaaatattttgttgaaggccgactttggattc

SEQ ID NO: 51769 - DNA, 687 bp, Ricinus communis
  Intron number 1 from transcript 29908.m006113 (locus 29908 .t000164) derived from phytozome v7.0 (chr-ID 29908; pos 1 670052 to 1670738)
gtatccttgttatatataaagcggacaagtcacaggtcagtctttgtcagataaacatatcaatataaaaacgcaatctttatactgaaaagtctaaaacccaggctccatttttatctctctgtccctcgatctcgctgtttcaatatctaaagatttgatctttttattgttttctattcttgatttttgttaggtttttacccatatctcttcaattggagatttctagggtttcaagtatcgatccttctgttccctaattcaattaatattcttttccttgtttctctaaccaaccaccccatctgtaatttttatacgtttccctatcgcaattggctcgtaaaggtttgttctttaccctaattgtacgctttctcctatgatatctttgatgaattagtgtatcaattcaggaattattcaattggtgttacctttgattcttgatagtactcatctaatgcaaaaagcaactaattccttatcaattttgtggttttaggtttatcctggaccgcatagcataaaaatttgcagttttcttttctcttatttgttggcaatgaacgaatctttatttgctttcagattgtagggaaagaagaaccccgcaatccagtttttccctaattcaatgtactgttaactcaattctttgccatatttagtttcttttgattg

SEQ ID NO: 51770 - DNA, 818 bp, Ricinus communis
  Intron number 1 from transcript 30146.m003546 (locus 30146 .t000123) derived from phytozome v7.0 (chr-ID 30146; pos 9 20737 to 921554 reverse strand)
gtagtgctcctgctgcaaagtaagttcgcctttaccaacaatttctacttcaaattagtttcttttacttgtgttgtttttgtttgtttgttactttgtatgttccttcaccaatctttaattgcagtgataattgtggaagaaacgaaacagtgagctaattaaaccatttataatgtgtttcttactgctcgtcagcggttaaaattaatggagaagaactattctcaggtttagctgctgtgttgtacttaaggcagtaatattattaattgtgcttggtaacttaatttctcagttcattttcttttctaattacgtgtccttttcatctgtttttttttatatataaaaaaattgatttttctttcctctatttcttatttcttttagctttaatcaaacaatcaagagtttatatgattccgactagagaagaaaattactctaattggttcaattgagctctattcgcctatcttgatcagttgatgttttctgccgattaacatttaaatttctgtttagttgtcactttctttgatacttaccatggcagcatttcatttttatatgttttacttgtctagtctcctacgtgagtgatttggtttgaattaattgatttctagagttcttttcttgtttacttcattttttatccctctgatttttatattttccttcagttttgcagctttcatccattccttggcctaacaaagtcaatttcaagggtatggtaatgtttggtgaatactgatgcaaaagtttctgtaacagggcacaagtggtagggtggccacctattcgatcat

SEQ ID NO: 51771 - DNA, 693 bp, Ricinus communis
  Intron number 1 from transcript 30138.m003835 (locus 30138 .t000009) derived from phytozome v7.0 (chr-ID 30138; pos 7 7358 to 78050 reverse strand)
aaactcaaactcaggcctccaaaagaaaagtccaagtaaaccaacagaaaacagagcattaatatattaaattatagtatcaaacagggcccttgaaaacagaatcataattaaacttttaattaatcaaatctattatatctttgtcatgtagtagtaattaagaaaaaagaaaaagaaatgagtttttttttttttttattcaactctccggagattttaaagccgcatcttactatgcaaatatattatttataaataaatttattttagttaaaaaggaattatttatttatttattggtctaatagctttatgagaacgtaacttatttttaactaatattacacaatattctttgcaacggaaaaattgattattaccaaaaacaaagtccattgtttttaaaaggacttgacgttaccataaagcaagctctgtttctatgcatatatgaatcttgaatattgtgataatgatgatgataatgatgccatgatagtctaaagaaaataatcatgcaggtttcacattcaaatcaaaacaaactgattgtttttttcttttcttcaattctttgaggagagggtctccatcagtactgctttggatttgagaccccacaatccgtgttcctgcttttgagtttcctatgcaggagtgaggaggttcaagaacagagcaagccagttc

SEQ ID NO: 51772 - DNA, 524 bp, Ricinus communis
  Intron number 1 from transcript 29844.m003171 (locus 29844 .t000017) derived from phytozome v7.0 (chr-ID 29844; pos 9 6625 to 97148 reverse strand)
tcttcacacctgtgagtttctctttttttttttttttttatcctctgttctttgtcgattcaatttcggtttctcttctttgattttgtgtttttcttttttatatggatagtttttcagtctacgtaatcttttatctattttctatatttggaatttaatttacctatttagcctattgcacgtaatcaagatttttgtatttgctttttcttttttgctattattagcggttgtaccaatatatagagtttctatgcaccatttttattagattgctttgtttttgagtactacacttgtctatctgatgtcatcggcattgtacccacatgatcaataatttcaaactagcttacatttttgcaagctatgattattagttggactggcatttgttcatgttaaattctttattacttaattacctcgagataattgtatcacaaggcatgtcacaaggaaatcatattaacaagcagattttaatctgtctctttaatttttgaaacagtttgcagaaa

SEQ ID NO: 51773 - DNA, 428 bp, Ricinus communis
  Intron number 4 from transcript 30128.m008591 (locus 30128 .t000052) derived from phytozome v7.0 (chr-ID 30128; pos 2 642782 to 2643209)
tcctactcagtcctctggaatttgtatcagattgtgtgagtattttatttaagagtttttaatcatggtgtgtatatactagtccatatggtacataaagaaggaagcgaaacgtagccacataataaatacttaacagtactgataaagttggaaacaaaggaaaatgaatggagcaacataggactacgagttgaaattcggggaaggtttgacggaaaccaccaacttttgagctggcgtgcacaggcacagtttattcctgatttctttttctaatttgatttcttttcaattaaaggaaaaaaaggaaaaagagtaagtctgatgtgaaatgataatgacagcattgattgaatatgatagcattgtgggaaagagcagtaattagcataaacttgggaatggaaaatacaggttcttcgtgg

SEQ ID NO: 51774 - DNA, 811 bp, Ricinus communis
  Intron number 3 from transcript 30072.m000960 (locus 30072 .t000034) derived from phytozome v7.0 (chr-ID 30072; pos 2 40478 to 241288)
aagagtctacttgtaagttacttgagctttgagatgtatctgttctctttgatttctttgattgcctgtgcctgctgtcagcactaactacactagggtgtcttgtagttactatgtttgttctatttcttttctgatgctgtaatttgtcttaggttcccaagtgatggtttgatgcatgactcttaagtttgggttgctatgtcttgaaaacctgatatggccggaactttacccgtttaccctgaatcctacagttttctgatgtcaaattgtctttgttgtgctaatttatatgcgtattatcacaatgtttctattagctaggtttggatggagtataataatctaatcccctgacatgactactgggcccttttataatcagatgtgttgtgtcctgttttgggcttcccctatattgagaattaatttgtgaatgaatgaatatttggttttatctattaattatatttttagaaatttagcttttaagattatcaaagaactgtgtttcctttattccactgcatatgttgcatatgagcaagcttctggcatgcagaaggatgctattagtggtgatattgaactatattacatccttcacccactacttgtcaatttggccccatgtaatgaaatgattatgaactgcagcatcttgtagtgctggtgcttgtatatagttccaaggattttaattgtccaatatgctagaaattgagatttttagactttgcacaagtgatttaactggatctggttgaatacttgtgttttgcagctgatttggcctccgacggtgata

SEQ ID NO: 51775 - DNA, 754 bp, Ricinus communis
  Intron number 2 from transcript 29927.m000624 (locus 29927 .t000034) derived from phytozome v7.0 (chr-ID 29927; pos 2 60572 to 261325 reverse strand)
cttgtgtatgtgtatgaactttaatcttttaattctctacgacagtccaactaattaaggactcaaattaaaatcttagaactttttttaaataattgtcaaaccaatttaaactttttggattcaagggtaagataagacatagaacttgaatatatcttacaatgcattatagtgttttaactttattcacattgaagggattttgctcattttgatgtgaaatttttcattggaacaactgtcttgtgtttactccaagaatcatggacgacttgtagttttacttcatacatcaacccagaaaaagaaaaagcattgtggaggtcatctccattgttcttatttgagctagcacattgatatgaagtctaatgtcatctgctctgattcaagtgtcttcaaccacaagttcatttatttcacagtgcattctatggtttcatattttagtttatttcacacttttaatgcgattcagaagttgcagaatggaattcatggagcattacttgattgtgattttctgacctcagagtgcattcttattcaccaatatatagtattagtgatggtcttagtagctatatatccaggcctggaacctttaattgaaaatttctagatgtcttaagtttccggatattgaatgttttcctgatccatttcttgttctctattccggtcatttgaatttgtaatttgttggttatgtgcagctgacccacagggtttgcttgaggcaaaggcagct

SEQ ID NO: 51776 - DNA, 584 bp, Ricinus communis
  Intron number 1 from transcript 29852.m002004 (locus 29852 .t000023) derived from phytozome v7.0 (chr-ID 29852; pos 8 99124 to 899707)
tccgcctcctccgccagagcagccgccggagccaggttaggttcggttctctaggttttttttgacgttgtcttatttattaattatatattactagttttcgttatgttattaatttggtggttctttttgtgaaatggtgtttattagggttttaattctggtaaggggaaactgtttttttgtttattttttctattcttctgtttattggagcaattaatggtgattaaggtcttgattatgtcaaatttataaatttgggcttttgtcttagaaaagtgaagtttagcgttaaaatttggagtaactgctttgtttctttcctataggtgtattatttttgctttagttgttggagaagtgaattttttcacttttggttatgctttgatttaatagtttgtatttaagctaacattgttttctacttcaatgtatttagtgcctgaatgttttgttggtagaaatccctttcgctgaaagctgtttttcttttttaagcagttggctggtagtattaatgcaattttatgtgaaggaatttaattaaacaatgcctattgttttcttaatagaggcaa

SEQ ID NO: 51777 - DNA, 740 bp, Ricinus communis
  Intron number 2 from transcript 29983.m003275 (locus 29983 .t000174) derived from phytozome v7.0 (chr-ID 29983; pos 9 32645 to 933384 reverse strand)
ttgctttcaaggtatgggatgctgtcaattcattttctctattcattaccgctgatatctcgtaacctttcttgcacatggttcagtggctctcatcatgatatgttatagttttgtagacatttattgcataattctgaatcctgtttgccaaccagatctaatgggttgtcaataatgtgagaatattagcattattttctgcttacatatttggaaagagggcagaaaatgtgccaactgggacccatgttctacctgtattatctgtgaatgtagtttaaaaatatgaatgcactatctgttaatgtagttctattaaattatgcagtttttgctacattttgatgaaatagataaaaaaaattggcttgaatcttgatagctgaagcacctctagttagcaattaagtgacatatgaaaatagggaggaattctagtaaaagtcaaaagttatggctgcctattttgatctttttgttttttgtttctcttattgttctcttctttctgaaatggtgcactaattgattgagaattcttcttcctttttctttttgctatatttcatgattgggattaggtgccttcagatttcatttttttcttcttttccacttctggtatctctgtggtttaacttgctaatgctattaaccaattcaatatctatgggacaatcttactggtgtcttattggctgctatagttccaaacaactgcaccaaagagctgttac

SEQ ID NO: 51778 - DNA, 527 bp, Ricinus communis
  Intron number 1 from transcript 29983.m003275 (locus 29983 .t000174) derived from phytozome v7.0 (chr-ID 29983; pos 9 33445 to 933971 reverse strand)
caggcttgatcctcctaacaagctctattttccctgtaagcctatgctattctttaattcgattattctgttctgggtacattttttatagttgtttcttttctatttctgatctaggtacttttagtttactaacatgatctgtgtctgattagcttctttttctttaattctttttctattttgatttgtttacattgcttagatatatgtattaccactttaatttgaaactcaggaatgattttcatctgttcataattctctgtgtttttctactaatatttctataagctttcccagcatttgaatttcggttttaatgcttgttcagctatatcttgggttaattttaaagggtaatcaattcaaacaacttggtataatcatgttgcacttttaccattttgccttttcaaacactaagtagcaatgctagtgaaatttcttgtttcactgctgtttactgattacctaaattttattttcgtcagtatctgatttctttcaatcttactgttttgaag

SEQ ID NO: 51779 - DNA, 900 bp, Ricinus communis
  Intron number 2 from transcript 29904.m003051 (locus 29904 .t000165) derived from phytozome v7.0 (chr-ID 29904; pos 1 080813 to 1081712 reverse strand)
aacaatagagaagagacatgtatgtatcgttcccgtttctttcaattcatttacatattttttttggtgggttgctgttttctgatttaattccgttgcgtttatcctaatcactgaattatggcttgattgacctttagtacggtaataactagctctaaattgttacttttagtaaatgtctactagggctttactgttgtcatgtttatttatagttttgatcctttaatgaactttttcctattctttgatgtcggtgacccttattaatcttttagacacgatgtttgtatctgttcaatgatagttctctcatatttttaaggatgtgagcggttctgacctgttggaatatgctgtggaagggtcttaaattcacgttccataatagacttactgatatgtctcaataatttgcttatatataacatcattttaaaattttaaaatttcaaaatttatgttttacattttgctaaagactattactttctcatgcacaagcttatgaacattgacttttttcgtcactagcaaaggcattgcattaacgaccccccaccccctatgcctaaataaattgagtctgtttcaatttatactatcagttaatcattttgataatctatggttattcaattcagggagaaagtttcattcttcgtcctttaatgagagagttaaatagctataagaaaaagaaagaacgtgcttattcataaattggtaatttgcacctatttgcagtataggcagagaaccatatctgactgcttcaatttcaaagcaaaaccatttattgacaagtcaaccttgcttcatctatttgataatagttaaagcatcgcacttgtaatgcaccactttactaaatcttattggcttattttgaaacag

SEQ ID NO: 51780 - DNA, 670 bp, Ricinus communis
  Intron number 3 from transcript 29841.m002751 (locus 29841 .t000015) derived from phytozome v7.0 (chr-ID 29841; pos 1 24147 to 124816 reverse strand)
ttggggcagaaactcttcttggcttgggctgggtatgagaaatcgatcttgtttctcttttcagaatagttgacttgattaccaatgaactaaggttgtcaccagtactgcacgagacttgttgcctgtgagattgagggagggctgtaggaaaaatccgatattgatgaggtatcggatttacagggcctggaaagtagaactgagattgtgtttgattgcgtgggcgttcttgaccatgtttatatccttgtaggctactgtcagatccccaagattgttggatgtgcaaaatcaaatgcagggtgtgtgattgtcgttggaattttacaagagcgtcgaatgggttgtgtggtcgaccgtgtagcctacaggagttcgtgtttatttgtttgctaatttacatgaacatgttatttaaatgcatgacggttgattctgcgggacagtgatttttttttgttgctttgttcgctgttttgccattatgttttgagaatctatgaatattcaggtttaggattttgtcattaacctttcatcaactatattatcactgtaggatcatgtattagcaaatttgagagttacgtttctagatttgaaacttattgtatatgcgctgcgtcagatattgacttttcttcccctaatgtgagttttgcagggt

SEQ ID NO: 51781 - DNA, 844 bp, Ricinus communis
  Intron number 1 from transcript 30068.m002527 (locus 30068 .t000017) derived from phytozome v7.0 (chr-ID 30068; pos 1 01858 to 102701)
cctccgtttctctgattatccaatttttgtcacatgtcagttgcctgtctattcttgtacaaacttttcttcttcttgttttctctgagttggatagagtgatagttttatgacctgtaccatcctaacttaattgaaagtttgatttttttggccgattcttactttttatcctacctgcctttgaaaaatgtattgtgaatctgatttgttatgtatatgttttttcttctttctctgattttatttctgattttatttggcggttttgttgacttaaatagtgcttcagttttttttacctttttggtttttccttgaagttcttaattttgttgatataatgttgtaaaggaagtttgtaactatggaaaaacttttcccatcttgttatgcaatatcttttctcttagcttgtgatttgtcagaattttaaagtttattttttaaaagctcctgttaaataccatctgaaacaatgaaacagaaatattaatcacacttccttgttgtttcggtaggctactccacagtctgttggagaagaagaaaccaaaagataactgtcaatttgcttggcttggtctcttatggccttattttagtctaccttttgtactggatgttgctcctatccagcctagtgtttggtttggtgactttgttccttttaacaacaaagtcataagcaacctagtcttactcgtcttgtagatatcttagtatttatcatcttgcactttcttcgtgctattgcagctcaccgagcacgatgtggatgcaaaatggttttgtttttgactggagattttactcaatgcaggcaatcctaattcaggttata

SEQ ID NO: 51782 - DNA, 550 bp, Ricinus communis
  Intron number 2 from transcript 30131.m007124 (locus 30131 .t000275) derived from phytozome v7.0 (chr-ID 30131; pos 1 698158 to 1698707)
gcaccttacagacgagagtcacgtcggggtttcaggttttatgatttttgatcacttagtatatttttcttttcttctatgctttgcaagtggccaacggagtaaagaaaataatcattaagtgattttcattgtgtttgataatggtcatcttcatattgagtaaagatttcctgacatctgtaatcggggatctctccatgtttctttctttttgatgtatgaatctggataataacatgctatttctaagctgggcaattttgtagaactattaacattggcccataatatgacaatcagcacagacagagtaattccaggaatggattttagtgtcataaaaattttgttgagtatttgttttctagaaaacagttgtggaacatgtgtgtcctacttttggaatgtgggtaaagatttggttttatttatgaatgggatatggcctgcagcctctgcttgctttggtaattgatttatgcttaatgctgagtctgccttcttcttaccagccaaaacaatctgtgcaaaaactgcaaacggcctg

SEQ ID NO: 51783 - DNA, 389 bp, Ricinus communis
  Intron number 2 from transcript 29863.m001111 (locus 29863 .t000071) derived from phytozome v7.0 (chr-ID 29863; pos 4 72746 to 473134)
ccagggtatgcgaattcaactttcttcttttttataagtgaatattgatatttgaagttttagcatctattattttgtgaattgagtgtatgtttatgcttacagttgttcatttcgtagttgtagacttaggcatactttaaatcttgtttcattttaggagctgaggattatggagattgatatttctcctcaaagattgaagatcactttcgtaaatcagttcatttgttgcaaatgaatcaatgattttaacagaacctaatcgatagctattgagaaattaattctcataatgcaacattttgaataatttggtctttttcttaaatattctctttgttggatgttcagacactgtcggctgctgacctccgtgatcctgaaat

SEQ ID NO: 51784 - DNA, 528 bp, Ricinus communis
  Intron number 1 from transcript 30128.m008653 (locus 30128 .t000114) derived from phytozome v7.0 (chr-ID 30128; pos 3 34588 to 335115)
cgcactagggctcagcaattacaagatcttattcagtaagttgtttctttcttcttcttttctttttgtgttattaggttttttctggttgttaaaaaagatgagattttatggagtcatgcagaagaatattattgtaacgttagttttaagtagccttttttatgtataaggatgaaatgatttactcagtgccactgatttgattaaatccttaaaagggtattgtaagctttgatctaacagacaaaagggagaaagaaagagtttttgtcactttaatgtgtagcattttatttgaataatagtagctgttacatttctctcaatttgctgaatgattggaaaactggtctgtagctatgaaacccattgtagtcaatgatgagaagtgccctgcttgtctgagatcttctcttaaagactctagcaatttctgttagaaattaacaaaaacttcatgcaaaggggaagcttttgttttaaatgattggactgtatttttcaggtttaagggtatctcacatt

SEQ ID NO: 51785 - DNA, 411 bp, Ricinus communis
  Intron number 1 from transcript 29820.m000995 (locus 29820 .t000016) derived from phytozome v7.0 (chr-ID 29820; pos 7 5953 to 76363 reverse strand)
agcaaatcaagtcagtttttttttttatattttttttatctgtttaatttctggtttttgtttatgatgctgtttggaacgtctaaaataacaagtattcaatctatttagtcaattctcatttttggaaaacttatacttgttaaaattataccacaaagtgacatttttgcaagaactcagtttggttaaattcttgcgcttgatttgtaataaacatgtccaaattttgagttaagagtacgtacttagatctgcaaatttaggtcttttagttaatcaactgaagaaatttgtcgaatttcaccttttcttttcaaaataattccccttttatgtcagtgttaatgatcctatattgataatcagcttcgaatgcgttttgtgatttctatgacagtgtggagtaca

SEQ ID NO: 51786 - DNA, 843 bp, Ricinus communis
  Intron number 3 from transcript 30128.m008918 (locus 30128 .t000379) derived from phytozome v7.0 (chr-ID 30128; pos 1 704501 to 1705343 reverse strand)
tgcggcaactccagcccatccagttggattatgtaaggctgttttaattatgtctagttaacctgtgattagcatgaaacacgggagctcttttagactgtatagatggtttattttgtaccgtaatcatattactatcacaaagcttttatgaggtgcaaactttgctttccatgattatgatatggagttcctcccttcttatttagaattgcaggccaaaagtcgagtctcttatgttgaaaatgaagttgatgtcataagtatgtgtttaagaagcatctaactgttctggtatcatgagatttaatcaacttctttgtatcatccagtaagaggcttttggatgcctagaaggtttattttccttgaactgagaaagtctgttaggttgtccaatgcccttattttctctagcataactagttaaaattatgttaccttgagatcttgggctcattgtgtctccaaaactcatgcagcttcttttacttctttattctgttagatcaatatcatcattggtaatgtagtatggtgcattaagtggaattgttatcttcttttttttttttttttatggtgtggcatccattttattttaaaccaatatctaatggtggcagatgctttatttgcatgaccttgtagctttgtagcttagaaagtgttccaaccaatctggttaataatgcgtatataatagcttttgatatattagttgacatgtttcttgctgaataatctcttgatgtagcgattaaattttgaagtcagttgatgaaattaatgccagatgatcttcacttcctgacatgaaggacttgcatgttacagcatttt

SEQ ID NO: 51787 - DNA, 602 bp, Ricinus communis
  Intron number 1 from transcript 30147.m013960 (locus 30147 .t000231) derived from phytozome v7.0 (chr-ID 30147; pos 3 667287 to 3667888 reverse strand)
ttgaacaagttgagagttttgcctctgtcctcaaggtacgttctgcttttctttttaattttattttggatttctttctttgtgagaaaaagtactgaatattgttactgagaatatgctttatccagaaaacaattgggataaaattgctatgctattgtctgaattctctcttagaacctgtaaattctttttcaaattttttttttatgccacaaagaaaatgaatgaattttacttttgggtttcaaaaagctgtttatattttcgtagtcaatatcaatgtgatttttttcttttccaattttgatatttatttgatcagctgttgttaataaacaagttgccaatcagctcttggcaaaattgattactggtcttactttataattaagcaagaaatatacctgcttaatgatcttctagtttgcactatgcgtgaaacttgactctagtacctgcgttcaattttcagtgctgctaagtaagaagttcaaattaaagagtaagctgctcgcaaattggatatttctttatgctaaccaccaaaatgcatgcttttgttttttccaataaacaaattaaacagttccaacttgaag

SEQ ID NO: 51788 - DNA, 769 bp, Ricinus communis
  Intron number 1 from transcript 30005.m001282 (locus 30005 .t000048) derived from phytozome v7.0 (chr-ID 30005; pos 3 24455 to 325223)
agaaagagcttttacagatcttgtgcttctatgtaatttttcttgattcttcttctctgcttgtctatgtagtctttgtttgtctatgtgtgtctgtgtctgtctttttggttagttatggaggtagtgaaagtgaaaaaaaaaaaggatcctttatgtagtttggttattaatgaatttcgattctttttctgttatgttctttggtgttcttggatcctgattggtttttgtggtttattctcacaactcaaaaatcctttagctgtttctttttttcttttgtggtttatttgacttgatttctttgtcaatatcactacatcaaatggaaatttatttattttttgtttatttaaagaaagtagctcatagtttctgttcctttggccaattgctgattttcatttctttttaaaactaaaagattagttgtacatatttgaaaagtgcttttgattttcggcaaaactttctttttatagttgaaagactctagctttctgtttcttttgttgaatcacaatttcgaatttcgcaattctctttttttttttttttttctgaagtatttctttaagaaacttcctttgtttgtctccttttggttttcttgccatgtagggataaaagtgcttacaaaaattctaggagtcaatactaccagtctatctttgtaatatagataattgtgcataaccactaatcttattttggtattatacttctcgaaggttgtaaagcccttggtggaaactgtactgcatca

SEQ ID NO: 51789 - DNA, 704 bp, Ricinus communis
  Intron number 4 from transcript 29917.m002020 (locus 29917 .t000089) derived from phytozome v7.0 (chr-ID 29917; pos 6 44222 to 644925)
ctgagaatccaagtgattctggaaaggttagcgtctcataatatcttcaaatttatatgattctcttatttgtttgaattggtatgacctgtaaatattgtgcatctattgcgcaaggcatcccacatctgtgggcgtcaattgtataaggcgttaattttgtgcatatattggaaaaaacagctgcatatctttcatgctagcttaatattgagtggagaacaattggtaccattctaccttctttcttgaagtttcaattacatgtacttgttgacttttaggatcctgattatttaattcattgtcctaaaaccatattttctcatattcattccaagttatttaagttcctaaattgtctgtaaactccaattatgaagttaatcctctttctgtaagtttgcactcacctgcaagagaaagagaggtgttttttctgtggtattttttattctatagcccaccaacatgtgcagtgtcagttgagatttttattttctcctattcctcttgtttgaaagccaattcatctgaattgtttagtgcatatggcaatctggcatattctaggatgtccaaaatgctggctctagcggatatacgaagtttttgttttttaataatctttgttatgattgtagccctgaactgcatttgtaaatgcaggtacatagtacagttcggcaaaggtggcttaacgg

SEQ ID NO: 51790 - DNA, 962 bp, Ricinus communis
  Intron number 1 from transcript 29957.m001418 (locus 29957 .t000027) derived from phytozome v7.0 (chr-ID 29957; pos 5 98529 to 599490 reverse strand)
actgctttgttaatgtactctctccctcttttgtacattgaacatttgttcaacttttactttctttttgtttttaatcatgtgttggtgtttaagggatttgtagaaatgtatgtgtgattatataagagcatgcatggaaagacgatagaagagttacaatgagatgttcaagtgattcaataacttatgcatgcatatattaataccactactataggtgctcaagggtcaagttggctcccaaattatttttcaaggtccagctcgctctaaaactgattggccaatttacactagaactttctattttttggtccaatttacccccaaaaccttggcgtgaaagcttcgagttgttccttcatcctttgatgatggcaatggtccatttccaaaggaactgaagttacatatctttcctatttccatttaagttcttatgtgtaatatctcttgagacctcgaaaaatggatgatttccttttctttcgaacacttccatgccccttgaagccccaaaaaaatggataaattccttatgaacaagtataaacttggtcctaaatgacttggctttacttaggtattctaaagagtgcagctcgtgttttagtttcaccggcaacaacgatatctagaagataatatcgaggggcaaatggtctctttgaatttctttagctggtttagatagtttttaaaggattggaatataaggatgaatttcccactttatgagcttcattccgaaaagaatattcattctgatccggcgacatttatgatcgaattggggcaaattacaccacaaataaaaagttgcgatgtaaattaaccaagaaaatttgattttggagtgaatttaaccttagaaaatgctttccgagtcaagttgaccctttagccctcttctcttttatatgttattttgacgaaattgtgtattgccttgaacaggg

SEQ ID NO: 51791 - DNA, 871 bp, Ricinus communis
  Intron number 2 from transcript 30138.m004017 (locus 30138 .t000191) derived from phytozome v7.0 (chr-ID 30138; pos 1 317096 to 1317966 reverse strand)
caacttgtcctcaagaagccattcttttgcagcaggtatatgttattctacattattttcgtttgttaattgttaccttttctagtttacaagattctgagctgatgtttgttgttaatcttagactattttatcttcacatgtgattgttgaggttgtcatgccagttcttgctttgtgttccgttgtatattatgaatgttatatattttacatgcgaattggttgtacaacttggttccaaagagcgtcaccagttttcttgattcaactgctaacgggcgcatactattagcaagagagatgattgtaatacttgattgatgttgcgagtccctaacgtgttcagtgggtttaatgcattagtatttttttctaaatttgaaaagcccttgttcggaatgatcattgaaatgaattttaagccattctttcttcttgtttttgtctcatctacttgttcaaacgcttttgcattggggctggtgaagagcctgatctgtgttcttctctccattatctaccaatttgctagttaaatttagcggactgatgttcagaacatatccatgccttaaatttagtattttttctttaagacaatcaagcatcaacaattgcaagaatttaggatgagcaaatcaagcacaaccatattttgtatgtatagaactgtatatttgagtactaagttatagaagattgaggtgggcttcctgttgcacatctctcccttcagaaaatgatgtctttattcgcctatgttgtttcagtatgatatgatatgactattcttaagcttcatagatttctaacaatttggtttctttctgtaggatatcgttgaggccaagggatttctaaagcaaaa

SEQ ID NO: 51792 - DNA, 462 bp, Ricinus communis
  Intron number 2 from transcript 29908.m006129 (locus 29908 .t000180) derived from phytozome v7.0 (chr-ID 29908; pos 7 1218 to 71679 reverse strand)
ctggtgttaggtaagttttttgattttgacttttttttatcatttgtttgtattattgtttgttgtatgatttaatctaatgttggtaacttgtttctgcttccaaagtaacctttttgcattcgttacctatactgtttgatcaactgtgctgtaggagtggatatttctctattgtctgtggatatggacatgaatttcatacttggcagaagtataaactaaagccctgatatctgattttaagccttattagcgcctgtattggttaagaaatgatatccaagattttaccctattggatgctgactctggaaaattattgttctgcatatactattttgatttagactttattgctgttttacttgcttgtcttctatgtttcgtccgtaaatctaattgtgttttttcaaacattgttcagggccaacgcccagcaaccaaagctgtttgttggga

SEQ ID NO: 51793 - DNA, 357 bp, Ricinus communis
  Intron number 1 from transcript 29908.m006129 (locus 29908 .t000180) derived from phytozome v7.0 (chr-ID 29908; pos 7 1954 to 72310 reverse strand)
cttccttggagccgcagctgctctcgtattctcttgtaatatagtaacatcttccaattctcattttttattcatttttcgttaaagaagagaaagaaatgcaacgcaaattgttgggtttgtttgattttgataagtgggttttaagaaaagaaaagaaaagaagattttatttgattttgataagtgggttatgaagcaaaagagaagatgattaatgggtttacttgattcttttaataagtgagttttaaagaaaagaaagaaaaaagattaatgggtttttgttgattttggtaggtgggcttgaaagaaaagaaaaccaatttttttttttttttactttcgtatgcaggt

SEQ ID NO: 51794 - DNA, 899 bp, Ricinus communis
  Intron number 2 from transcript 30146.m003429 (locus 30146 .t000006) derived from phytozome v7.0 (chr-ID 30146; pos 5 1420 to 52318 reverse strand)
ccttctgctgagatttgcagtaaggacttttttttttcttgtcaggttcttttgatgccccttcaaatttttttcttttttaattactggcattacagactttttttttattattggcattacagactgtttaattccgtaaccgatagctaataaattaacgattataattagtaccttaaatgatcattaagtgtataatttatcattaaatatattttgttttattatattatttttctaatcatacaaattaatgaaaatagcttataataattaaaaatgttataattaattttatttagtttaattgcatatattatttaaaaatattcataaaaattattttaaaagtaaaattttaaatttaaattttgactaataaattataaatattataattattttaaccattaaatgtaattttaaaaaaattatttattatttatcagatattgtaaaaaaaataaaaatttaattaaaaaaatattattcaaataaatagaaaaatcgcatcagtttttaaacaaacactctctatatctaccacggatgatctacaagcttagtttaggatgttaaataatattttgtcacaagttggaagcagtggcatatccaaaaaattgtcagcaagagtaatacataagataattaatagggtttgaaaataaacatataaaagattaataggaatttgaagcaaactgtaagactttagaagaaaattttgagggtccatgggaatagttgcacccactcacccaagcatagattcgccaatcgcccctggttataaacataattttgtttagttagtattaataaatattatttgattgacttaattctcatcctatgtaggacgactcttacattgagagctacattagtacgat

SEQ ID NO: 51795 - DNA, 276 bp, Ricinus communis
  Intron number 1 from transcript 30128.m009022 (locus 30128 .t000483) derived from phytozome v7.0 (chr-ID 30128; pos 2 198249 to 2198524)
ttctgcaaccagatacaatgtaaatccatacccttattatgtttatgtagttcggaagttcttctctttttatcaaaaaaaaaaaaaaaaaaaacatcttgttcgctcttttgtttgattattttctttctagttaataatagacttgtgcaattgagctcaaaaagaatgtatctttctacttgtcccgaaagttaacttgtattagttgcgtatgatgtttccttgtgaatttgactaggattcatacaagtcagaacaattaagaaaggtatt

SEQ ID NO: 51796 - DNA, 819 bp, Ricinus communis
  Intron number 1 from transcript 30076.m004455 (locus 30076 .t000019) derived from phytozome v7.0 (chr-ID 30076; pos 9 1444 to 92262)
ggagtttactggtcgaataggagaacgattcagtgtgtttgtaagttttttttttttttgtggcttacattttttcttattagataatgaatgctcaatatgaatttgcatttgtttgtttttgttgaatatgatatgcttcggtgagccacagctgaatttttcttttctctctgtatttgttttttttttttaattttagttgtaactaatgtttatgatttgttgcgcgttaattctctctaatgtctttgttttttgtttaattattgaaaacattttgttctttgtgttcgtctttatgtaaattctgttttcattttagttgcaatgtcacttttatgtttcttttaatgacggcaatcctttgattcaatattaaacttgatattgaattgaatacaagcgttacacgtctctgttttgtttggtcttgattcagcattaagcattttctgttggttccttcacctaagtaatgatttattcacagaaatgattagacaaatatgcctgcttttttggggaaggtcccagtgtcaaggtcatgaatcccacttgcaatagtttgtaactttaccaattaacctgacatagtgctagtctatggatagcttgaattttatataagtagctgttctgcttcaatgtgagaccagataccttaattttttatttgcctgtttttttactgtttgatatttgttttttagctctatgatccctattgttacgtatcatttccctcctttgtgaatgagaagatccttttttgacaattaactaacttaatgaattcaaaggtaacctcttatacgt

SEQ ID NO: 51797 - DNA, 351 bp, Ricinus communis
  Intron number 4 from transcript 29912.m005371 (locus 29912 .t000097) derived from phytozome v7.0 (chr-ID 29912; pos 4 96438 to 496788)
agagatagttcaacccatcaacacattccttacaggtcagaagaattcaaacttgcagtaacaccttagattttgtttgcaactcgtgtagggatgtcaaacatgttccgtgtgcaaatttgtgttcttcgtagtgtgtttaatagctgtaaaggttatgtcagtggatgttgagattattttgtttatttatttatttattttttgtcatggatctgttttatagttcttctagggtttttattgtcttatattccctgtattttagtggttgttgtggcaacggattgttgactgtatattgtaatatacgttgcagggaaaataaaaatttaacaggaactgctagat

SEQ ID NO: 51798 - DNA, 770 bp, Ricinus communis
  Intron number 2 from transcript 29841.m002841 (locus 29841 .t000105) derived from phytozome v7.0 (chr-ID 29841; pos 6 44446 to 645215 reverse strand)
cattatagattctggatttgagcatccttcagaaggcaagttcttttgtcatgtatttatttaatagtgatgtctttgacattaaatgagttggactgaatctagatatattccttttgattgtttgcttttgtgaatctgaattcctgcaaccatttggaattcaaaatttcagagtttcagcaaaattgaactcctttcaccccaaatattcaatttcttcaatctcaatgcatataattctaattgcagttgttccagctcttagttcggccattaggccctctactagtcttttgcaccatttacacgtttaacttcttattcaagtcagatttgctgccccacacttctcccttgacctgtgcttgtgtgatttgaaaacttcaatgtgttgtttaaatggaatagccattttaatatgttacttcctccatgtctcatattaggaagcggtcattttctttaataggagaatcggaactgtttcctgaactgtacaatagtcgagaagttttctatctttcattctgcattcacattgggcaatttttttctcacactacttttgactttctttttaacattttgcaggtaactactactaactatatttgctgaaagtcatagtttcagcaagaatactggttttcgtaaacctttcctttaaaaggatctggaaggtctttatacttaatcaggattcatccactacgattttgtttccttcattagtgcaacacgagtgcatccctcaagcaattctagga

SEQ ID NO: 51799 - DNA, 665 bp, Ricinus communis
  Intron number 1 from transcript 30024.m001705 (locus 30024 .t000022) derived from phytozome v7.0 (chr-ID 30024; pos 4 69736 to 470400)
agtttagcagcccaccagaaaattcagaattactggtaagttcctttgaatttatctcatatcatagtgcttaattagctatttgtacagagctattactgtcgacttgttgatcatgtaaaattctagaggttaagtgaatgtataatgaggccatcagagtatagctaacaaaattattcaattacaaaactataaattggcctggcaaactcagatgatctcgctgtccttgtgaatcttgtagctaaattcttttccttgctttcctatcttctattaaaatgaatatcatgcgcagagtattcttggaatcagtgattacatctcgtgttaaatttcattcatcaggctttcagtaatgccaatatgtacatttttttttccctggtcgatgccaagctaaatggatcgcgatgcttgctttgctaccttctttttttgtttagacatcaattgttgtgcattgtaagcactcgaattttcagtaatgctctgtgctgtttgttctatttaagaggaggatatctttgatcttgtatttcgttcatctctcattaccttgttattttaatgataaaataatggaaaacggtataatggtccattctaacctcaatttttcatcaggacaatactgagagcaaaaaggtccagaggaactt

SEQ ID NO: 51800 - DNA, 767 bp, Ricinus communis
  Intron number 1 from transcript 30110.m000726 (locus 30110 .t000016) derived from phytozome v7.0 (chr-ID 30110; pos 5 57351 to 558117)
ggtacttcacttaggtaacacctttaaaagatttggggatgtacgatgataacttgaaaatcttatatttaaagtataatgcgttgttgcagtacatgtaggaaactgtatgcagggtttatccgtactatgcaggactggaatcttgatcaaatttaattcatacataatttcttaaaatttgattctcaaatttataaaattaattcttcaacttcggcaaaaatctttctcagaaatctagggaaatgagaacttgccgatgcctttcaacccttggtttgaatgagatgcattttgtgccaggtaacatctttcttttatttcttgactaaactgtgctgtagtactaagtcaagcttcagccatgatagtacactttcatcacaatgttatccattgggtaacaaaatatttttggctgaattattccccttcagtttcttccagctttgcattgatgttcttgttatttggttgttgaatctaacttccctagtctgcatgttttttattcttttagggtgacataacatgagtcgagcatcttgatcgcggaatccccatttctggtgaagagtagatgcacaaagtctacaatctggaagaaagtgatggcaattcaaatggatactgttgtaatgtccttaagtcaagcttatatatatttgctttgttcttcttcttcttttgcattttgtgatgcaaactacagttgagcaatatctcactgttgtttttgttttctctcttttttgtgaaagctt

SEQ ID NO: 51801 - DNA, 915 bp, Ricinus communis
  Intron number 1 from transcript 30131.m007201 (locus 30131 .t000352) derived from phytozome v7.0 (chr-ID 30131; pos 2 204531 to 2205445)
ctaggcctggtcctgtggagagagatattgagttggtaattttttttatatatttattttttttaaggatataaatggttgtttgtctgttagatatttatgattgcctctttttttttttcttaaattgaatttgtatggtaatttatgtagtatatttgcatttgctaattttattcaaaattagaaacagaaggcatatgatattgagcattggcaattatgatcagtaataataaagatatcaaagccacttctgaagataaatatgctatgtgttaatggaattccttacgaaaacaactattttaacatttattcaattctttttaaacgagttttaatttttaatttttatgatcaccacctccaaagtggtagatcgatgcctctattttcactctgccatttcatttgtgagttatttcatgaaaacaaatcattctgtatagcattgatctatctaaaatggaggaaatattcttaggcatcaatgtttagaggtcactattttctgggttcaaacattaaataactttattatttcaattgaatttgtttgtaaatacggatggtcatgtagatatctattggcatgaagcacatctatctatccttttttgaattaagaaggcaagacttgtgtgggtgcttgcattaagattagaaatggatgtgaaagagtaaggtttataacatacaaataacgaatgttcaaaagagagaatattatttggctgttggttatctgatggtaaatatattcatgtttccagctaaatgctaatgtaattatgtttcagctaaaacaacaatttgtggagtctgcttagttttatttcagttcatgttttggttcatttttttttcttaattgcaggctatcactgctcttaaaaaaggagctcaattact

SEQ ID NO: 51802 - DNA, 730 bp, Ricinus communis
  Intron number 2 from transcript 30005.m001292 (locus 30005 .t000058) derived from phytozome v7.0 (chr-ID 30005; pos 3 99116 to 399845)
gagttttccaagaaagttaaaggagaggtcactaggtaagttttgcttattttatctctctgggacttgctatttgttatgtatttttttttgttatactctctgttaattgttgcatatatccgtctcaagatgagagctattaagttatagttaggatttttggtgggtatttctcttagtaggtgcaatcgtgcacatcttctcttagaaaatagaagcaggtgggcaacttttaaattttgtagttcttattgtttgagaacttgaaaggttcattttttgcttagtaataatggttggtgaactctttttgaaggaaagatgataatagtaaaaaaagaaaaagagaaacaacttagtagttggagtaagcggaagacaattacatcttctgctattggcaatttctaacttcctctgtttttatgtttggattatgacaatatagatgtaattgttattagttttatttgggatttttctttgtttaaatgaagtttgtacagctgcttttcagtatagaatatgaacaattctgcaatcacttaagactttgagttagaaagtctcctctcagaatgcccagttgatattcatagtttaatggatttgctttttgtttaagttccttaccttatttttcttctaaatgagtatttgcctagagtaataatctgctttgctggatgcagaagtcaagaatttcaacagtcggtcaaggagctga

SEQ ID NO: 51803 - DNA, 963 bp, Ricinus communis
  Intron number 1 from transcript 29908.m005974 (locus 29908 .t000025) derived from phytozome v7.0 (chr-ID 29908; pos 7 97716 to 798678 reverse strand)
tctcaaagagaagataattgcacagtggccaaaaggtttttttttttttttttaagaccaattttatgcatcttcaattattatttctgctcaatctttgggattactgtttcatattggtttttgattcattccttcaagatttgaatattcagtttttaatttatgattgagtattagttggggtgttaggtaggaagctttggttctaagtttttcttaattctggcttggagatattgattttatatgccttgtctaccttgtccacatgtcaaatttttattgtctttttcaattccaattcaagttatttcacaagtttgatggtgtttctcttatttgacttttctgatctctaagaaaatagttgtgcccaattcttgaagcccttttgtggatgaaaatcctgcaaaagggtctagatttaggtaaattacatgttaaaatggcttgaactctgaagatgcagtaagtattgttttcttaaacagtttgctttggtgcaaaaagaaggattgattgtctagataaacattattgccgttatggttactcagttgccttgtttatgctctttgtaactgacaagaagatcccactctactgttttggaatatatagggatttagaatgagaatggtacaatgctgaacttatttgagtttcatggctacctccatgttaatggatagactgcattgttttcttctaatatgcttgagctttcattctgcattttatttttgtgcttgtgcatctgaaaatttgtttatatggtaaattagcaatatcatgcatcaacacactccagcaccgaaaatgaaaaagaaaagaagaaagaaaaatctaaagtgcccctaatcttgaaatgcgtactttagttactataaagttgtggtttgttatctgattggattgcattttctaaagagtgcggtgcttatttggcagataaagaaa

SEQ ID NO: 51804 - DNA, 378 bp, Ricinus communis
  Intron number 1 from transcript 30045.m000472 (locus 30045 .t000004) derived from phytozome v7.0 (chr-ID 30045; pos 1 39693 to 140070)
ccttgcataccaattatgtgagatagtttcttgtttttctgtgttttatagtttattttcttgtttctctatgttttgcttttagatgacaatgttcataacttccttgagttgtatcctcaaaatttggtcacttccttgggacatgagaggtttgttttagagtctttcatttgggtgggctacaatatataccctagttgatttgaatatatgctaacattaaacttattgcaaggtttatcatgttattgtaatctgttttcttatttgataatctggcaagctttttcatatcttgataatggtttatgaattgaaaccatctgatgtttcctaatcttcgttttgcagattgagtttgaacccgagtactta

SEQ ID NO: 51805 - DNA, 935 bp, Ricinus communis
  Intron number 1 from transcript 30146.m003491 (locus 30146 .t000068) derived from phytozome v7.0 (chr-ID 30146; pos 4 35725 to 436659)
ctttagccaaagatcaaaaggtttgatttttatcttgttttttcttgataagattatatgaattatgcgtccaggtgatgtgttggctaaatgtcgctatatttatgctcataatagatagaaataaatgtagattgatttttatcttagatggccaataccgtgttatgatattttaattttatgttgttattgttttaaagtaggttccttattttgatagttgtaaattatctatttaagtttcaatttcatgccactataggattggatattgctattctctaattggctttcaagtgtgtggaaatgttgtttgattattgcaattttgtgcataaggtgcctcaattgtgtttacatatatgtgagctgaattcttctgttcttcctgttcaatgagcaattactgtaacttttgaattatataaaagaaagtatcttgagctatacggcacagggttgggtgaatttttcataagtgctgctaaaagctgataagttactggagaaagtttgaattgaattgtatgagtaaccttagtgaagatactcactttcagtgatttaaagaatctttgtcatatgtcaaggttcttaaaactcatcgcttattttcagtgcatagttgcctctcttactgtcagtccatgaattcacagtaaaagtttagcagaaccataatgacaaagaaacattgaaaagtgaggacaaagtaatgttttctagcttgtttagttggagctgccgcatattgcaacattactttccaatactactaaagcaaatgaatacgaagtagggatagctgcagtcaatgaattcaattcactcgtcttcattactgttctactgttcatatcatcattgggatcctgattatctgatctgcagcattttgacaggttgaccaggctttcaaggtttttgaagac

SEQ ID NO: 51806 - DNA, 742 bp, Ricinus communis
  Intron number 1 from transcript 30005.m001301 (locus 30005 .t000067) derived from phytozome v7.0 (chr-ID 30005; pos 4 39457 to 440198 reverse strand)
attgcgtgtaatgtattggtaacttaagggtgagttacaatattgactggaagaacgattgaactaccatatctttttatgaatattctcaatgatctgattgcatatgcaggccccagatgtgactgtggaatcatattttgatggcaaattatacaaaaacaaaatttggattcgcaacttcattcaaaaaactttcttggaattactacggaaattactacaaaataaaaaaaaataaaaaattggaacattatttctattttgatagtttcttttagtttatttagtttaactaccgaaggtttgcggactgctgagatatggactttcccttgtagctagttctttagttcacacattgccactcacaggagatgttatggttgaataacttgagcacatggaagtttcaagagatgattaattaattaattgcccttctgaagtcgtgtagtagcttcaatatcaataatcaattaaagcatatcatatacgccaaattttttgtcaagaaattgctgaatgttatgtccagctgttatgtgcaatttatctaaatagtcattacttctatggctgataaagcagcactgttacatcttctgcttttcttaaattaaaaaatatgttctggtagtgcctgcaaaagcatataaatacatagaatgtgataagcttgcagttaagttatttttctgtatcagtatattcaagaatttcaaagaactgcagggctctt

SEQ ID NO: 51807 - DNA, 802 bp, Ricinus communis
  Intron number 2 from transcript 30028.m000249 (locus 30028 .t000007) derived from phytozome v7.0 (chr-ID 30028; pos 7 2483 to 73284 reverse strand)
aaggtgagagaaaccgcatatagatgcatatttgaaagaaaaacttgagagacgttggggcgttttccatggaaatatcgctttggactggatgataatgagtttgctgctccaaattcaaagaatatgaactggctagaacatctttattttctacatttaatcttgattataaattttatgcgcagaagacgaagcacctctctccgttatgcctagatatacagatcatctaccttcttgttcgttctaaaatatatcaagtaagatttcacaacaatttgcagttatttcgagcacagaaagagttctgagataaagttcataaaggtcaatgttcataaaattcataatcttttcttcattttcttttttcatcaaaggaaatggtgaaatctctgcaagatgcattggcattggttgatgaatcaatggtatcattgaaaaaatctccaagaagaaaaagatgctactgtcagatcctatatcaaaggtgagtgagtgatgtaccttttgttcttctgctaaacttcgtcaaacaaacgaggaggaaatcgatgtcacgaaaaagatggaagcagtcctgcaagaattgaaggataaggaagaggtgatgaaagacttgaagtttcttaatcaaaatcatattatcagggagcggatgaacaatgatgaattgcaagatgctcggaaggcgttaataagtgcaagtatctagaactagaaatataatattttcatcataagttctcattgagagtgagctaaatgaactgataaaaaaattgaagtcaatagcaga

SEQ ID NO: 51808 - DNA, 620 bp, Ricinus communis
  Intron number 1 from transcript 30020.m000208 (locus 30020 .t000009) derived from phytozome v7.0 (chr-ID 30020; pos 7 5935 to 76554 reverse strand)
tttgaaatttactaaagagcttggcaggtttactggttagttttttttactgatcagttatttgttttattgagtgctttgtttacatagtttttggaaagtctaaaatggtaagaattaaattgaatgaattttattttgttaattctccactttgaaaaggttgtagagttataatttgctagaattcaattcttttagtttcaaagaaaaaaaagaaaaggaagaaggcttttcaaagcattttgattttttgaaagatgctataaggcgttgtttgaaatcaataaattgaattcctgcaaaatcattggcatatatgccctgatttcattattttcaaaatgctcttttcttttaaaaaaaaagaaatctaacaactatggcatttccaaacatgaagattgatcaaatagaattaagttaaattgaatccttgcatgttcaagcttaccaaatgctatgtaagtgatatgcttttgcaagtattcaatagaaatgaattcctgcaaatggttaattccaaactaggccttaatgtttaacaaatgtggagtattttaggctttttatctcttgctgcagatcttcgagctagtttattggttggtggtgatagc

SEQ ID NO: 51809 - DNA, 461 bp, Ricinus communis
  Intron number 2 from transcript 29864.m001430 (locus 29864 .t000006) derived from phytozome v7.0 (chr-ID 29864; pos 5 7977 to 58437 reverse strand)
agacttctttgcctcgctctactccaaacccacaggtaagttcttctttaatcagcttttgtgattatagaatattgcttcagcttttcttcttcttcttcttcttcctcctcctcttcttcttctttaagtagttttttatcagttatgttaacaaatttggtaaagcatttatttaatagtttgaagtcaaaacacttttaaggctattaattagcatgttatacaaaattgtcttgaattcttaacgccttgaatgttagttatgaaaaagaatttactatttttgcccttttctcactgattagttgaaaattttcctgagttttctctctctagaaaagatataattttttttctggattttcaaggtagttaattactaacagaagtatttgggatttcttttgctttgtgtttgaccagccatcaataacaacactcaattcaagaaggtatac

SEQ ID NO: 51810 - DNA, 395 bp, Ricinus communis
  Intron number 3 from transcript 29929.m004509 (locus 29929 .t000012) derived from phytozome v7.0 (chr-ID 29929; pos 1 11127 to 111521 reverse strand)
ctgacgtagcagtggatcactaccatcgatacaaggtccgcatgaatgggattggctattgagttttgtgcatttttctttgtgtcctcctagcgtagccattttgttgttcgcagcagccatggactgctgaatataaattttcatgtttgatctcacaattgatgacgatacttatctactgtgccatccaattaaaagattttgtttctttctcaccgtcttatccaattaaaagattttgtttctttctcaccgtctcactcagaatttccatattatattattaatcaagtgaagcattcgtcttttttcaccttcttcaaagttttgcgtttacacctcattcctgatatataggaggatattgaactcattgctaagttgggatttga

SEQ ID NO: 51811 - DNA, 470 bp, Ricinus communis
  Intron number 1 from transcript 30008.m000820 (locus 30008 .t000036) derived from phytozome v7.0 (chr-ID 30008; pos 1 75179 to 175648 reverse strand)
acctggaaactacccttcctaagccttgtaagtcgttttgattcttgatttttaattgttcttatttcttagggtttatatgttcattggaaagaagatggaaaaaagaaaacaatacccttttcttaatcttggcatcgatattgaacagtctaagcagtacccttttcttaatcttggcatcgttattgaacagtctaaacagtacccttttcttaatcttggcatcgttattgaacagtctttctgtaaaattaacttgaattttcatgtgaagtttagggttcataagatttgtcaagctagtagctctaaattaagttatccaaagttgcatcattttacagaatatttggtcatttgacctttttgggccatttgcggttagtttttggataggttttttatttttctttttcttttctccccccttttcatgcgttgaacctgttttgtctgtaaacacagat

SEQ ID NO: 51812 - DNA, 407 bp, Ricinus communis
  Intron number 2 from transcript 29864.m001459 (locus 29864 .t000035) derived from phytozome v7.0 (chr-ID 29864; pos 5 40186 to 540592)
cccgttataacatttacgatcgcaggtattccattccattgctttctttctttctttcttttcttttaaataaccgaaccagccaaacggttctttcttctttctcatgtctccgtttttggaaatggcggtcttgtttggtgttttctgaaatattttctgacatttttggttttatataagaaaataaatgttttaattttttatcgaaacgacggggtttactgaatttgaaatgcatttggagtgatcaataagagacagaaatgaaaactttgaatttggtttaggatttcaaaagcatgaaaaactgttcattatagtgcttaatcaactaattttattttatttttatcatttttggggttttagtgggaagatatttccaagtggagtagcggcagatt

SEQ ID NO: 51813 - DNA, 1020 bp, Ricinus communis
  Intron number 1 from transcript 30146.m003575 (locus 30146 .t000152) derived from phytozome v7.0 (chr-ID 30146; pos 1 106881 to 1107900)
gggattttgagttgacaactaaggtttgtgcttttttgtttctttctttctaggttatatttgtttaatttattattatcttcttggatatgaattgattaaaatggtgatttctttaggttgttcatttgttcgtttctttaaaagaaagaaagttttgcttgacaataattttgttcggaattttgtgtttcttgataaaacagtaatgtgaggtcgacaagcatgattcttccctttctcttttgctttttggtttcccagaatttgttgccactgtcaataatatgttttgtttgatagctgatttgagtggtatttgtattgaggttataaaatccagaggagctctctcctctttaggggtgagataggaaaaagcttcaaaattttcataattgggtgcgtctatccatgattatgatttcaagactttcaagagtcacatattatgccaatgatatgttcagattgaagtcctttcttgcctctcttgtcttaagtcaagtagcaggtttttttttttcttttcttttcaaaaaggattagaaaaaaaaaaatctggagtaaaatcattgttggcagacagcctttcatggtaggaacatactagcaagtaacatatacagatatatcattatcttctctgctgtatgggaaattaagaattgacattacataaggagctcaacaagccacatgatattatccgagtttgccatgtatgtatttggtacttgcgtcaggtaattttcctctcaattcttatttgtttattctataatttcttttcatgttttcttatcatgtattatttttagttattcttagtaacttcttcttttgtgagaaagaaaaaataacttttatactatttactaggatggttaaatgtgtttatgacttgaaaatggagccactgtttttttcctctttcaattccaatgtatatttattgatttatataatttgttccgtggttcagttcagtggtaaatcaattggaatagttgggttggg

SEQ ID NO: 51814 - DNA, 880 bp, Ricinus communis
  Intron number 1 from transcript 29827.m002648 (locus 29827 .t000121) derived from phytozome v7.0 (chr-ID 29827; pos 6 67809 to 668688 reverse strand)
tttagtctccatttcttcttctgggataaatcaaagtgagcttgtctctgagcccttctaatatgaagtttaagtaggctgattagaaaagcgaaccaacaaaacgagggtcatgattgtttcatgagacaccgaagtaaaaaccttcatgtcctttgtttataaggttacagatctgtcttgaaggcatgagttgggaaagaattgaaatgaccacagctctgtttgggatttcagtatccaaagaaagtctccattgaaccaggccaaattaaatcagaaaatacaattattgacagtttttcttactgttttgctttttaattgttttgttaataatcaatagtttgctataagtttcggaagaatcatgcaatctataacttcatgaatttgtgactgtggagagcaatgttgggtgcttggctggtcacatggaaaattctacgagcatgaagtttagacaaaagggaagaaaggggaggggtggctggctgtacaatgttcctcaaatatggcacacatttgttgatgtgacttgatggttgcatatcttttcggcaggaagatgcccacggagtctaaaatgcccttcttctgcacaattgttaatgcccatttcttcttgtagggtcagattgactttgtctttgagcctttctaatatggaatttaattaggctgattagaaaagagaaccaactaacccaagtgatctcttgttggttggttttttcccattctgaaatgcatttagtttactcttgttcttgaatttcaacttgcaaccctttctacctatataattattctgggaaaaaaggctgatgataaattttttgcagaaattggacagcttgtgggatcagaagaaagacca

SEQ ID NO: 51815 - DNA, 1004 bp, Ricinus communis
  Intron number 3 from transcript 30146.m003477 (locus 30146 .t000054) derived from phytozome v7.0 (chr-ID 30146; pos 3 57862 to 358865)
cttatctcgtcagagcattctcaagatttgttaaggtgtggtgctattatttctaaatgctttaatagccctgtgcagagcttgaaatgcaaatttcagagggaaaaaagaaattgtaataatggggttaggacttagcggtatcaaattcgttcgcaagctgtggttgcaagttgtaatacctgttggagcctaatttacttgaagaggagaaaataaaaagaaaaaaatataaatttttattattttttatttttgttataatattttttccttaaatacttttattctttattactcacttttcttttttttatttatatctcttcttcttttttgtctctttgtttattgcatttttaaaaaagaaaaattaagaaagagaagtatttggttaagttcttatctttttttctttttctatttctttttcaactcagttttacaagaaaataaaaccattttctttatatgaaaaaatagctcaatatcatactttttaacagatatattaccttcgcaaataaattaaaaatttaattaatttcctcccttttattagatccaattttgtttgaagatacaaaataattgatttaaaacagtgatttgattctttcttttttattagagatgaaggaaaatgaatagtaggctctcttcaatttatttattttttatttggttaaatgcaaaaatgaaatcctttctttctttgaatttcttgaaaaataaaatagcgataaggaatagatagaggaaaagaaagagagtgtttaaatcaatttactgttaattcaaattaaatagtataaatattttaatctgtagaatagataagaaatactatagtacatgtaattgagcacaaatttgattgaataaattaaaaagaaatactttaaatataaaatagtaaaaattgaaaagttaagaaattaaatttataattttttcaaaagaaaataatgggttggtttgtttgtttgatgaacagggtttgt

SEQ ID NO: 51816 - DNA, 898 bp, Ricinus communis
  Intron number 1 from transcript 30000.m000371 (locus 30000 .t000001) derived from phytozome v7.0 (chr-ID 30000; pos 8 900 to 9797)
gaaagtgtttgccttgcactccaggttagttctatttaccaatattttttaatttaaataacttcttcttttctcttgtctttctgtactttctctgttccttcattatagcaatatattacagcatcacccagcaaccacaatcatacaaaaatctgtaactctactaattaactgtgaaaaggggaaaggggaacatgtggttcgctcttgaagagttgtaatattgcaatggcttagaagagttctgaaatatatatatgacaaattagtaaatttttgttatttcaaaatctctcatgaaatggtttcaccttgttcaaatttctagatttatcttagttggtagggttcagaaacttttactcttagcaatgtagccattctctgactttaaggaatagaaaggaaaggaagaataaataagtgtttggacttgtgcctggcaaaacataagaaacaattagaaccaaagtgtgcacctcttttctagaaaattcataacatgtgcagtaagctaactagctgatcacttaaatagggcaaaaggatattcttatatggttttatgtatagtaactttatgcttagtgttgctagtgggaatttcatagcaaatgtttttaaaataatgctgaagctttttaatgttcttcttctttatgattctgaaaatacttgttggttcatgatgtcatattctttttcttttatatgtatatctttctattttgattatgtgatgtattcagagctattcgccaatacaatcagattggttagaattcgtttttagcgtgcaattttgtgtaaatgatgatatttgatggtctcatgacttgtcttgactcaattatttgcagactgtaaatttaagaagcactgcaccacctcgact

SEQ ID NO: 51817 - DNA, 692 bp, Ricinus communis
  Intron number 2 from transcript 30078.m002265 (locus 30078 .t000058) derived from phytozome v7.0 (chr-ID 30078; pos 3 70407 to 371098)
tcattgttggggttgcaattgctctggccctcaaggtatgtatgtatcatttccccttttcttcattttcttttcttttctttttgcctgtgagcaatgttgttttttgtgcttaatgttatacctcagccggctgaggaaaagaatctgtattaatttatgtaaaaagctttactactatggcaatacattaattttagctgtgtcattgtcatcaaaagaatcatagataagtaataatcacgtatatacatagaaattatattagtttcatacatgcaggtcaaagttgtgaaactagacaagaacacgaatacttgtgtcattgtcattaatttccatctctattaatatgtgatagaatgagtaattgagccgaaaatttaggctcgtgaaaaagaaaaatcagatcaacaaatgtagttgttaaaaagaatttaaaggccatagccatacaaaatcaatagaacttttttatttcttttttctttcaacaataatagttttagcattattcattattttatagggaacaaatattcaaaattattaattggaatcataatgatccaaaaaaaaataaaacaatggctcgtcaatggcctgcacgaaaacagctgccgtcactatgtaaatatcagtcgtataacaaatcttgttcttaattttgcagagaattcccaggaagaggg

SEQ ID NO: 51818 - DNA, 567 bp, Ricinus communis
  Intron number 1 from transcript 30054.m000814 (locus 30054 .t000029) derived from phytozome v7.0 (chr-ID 30054; pos 1 77949 to 178515)
actaagtggttccattaactaatctggaaaaataggtacttcttttttaaatttgtttcttcaagttaatttggttcccttaagctaagttctgttttctttagttattaaaaagaacaacctttcttgttcaattaatctattattgccattatttttcagcattcaagtcttagaggtgctttctttcccaattggttactctggtgtttgctttgctttgattttgatatgaacttataggtactaagctagtaaaatcttgtgactgagaatagctgtttttacctcaaaggtttttgcttgtcaatttgaattttcgacagttgctgtaaactttagatagcaagcgggtcatatttctatgcgaaatgcagactatctcaaggtttggataatttttcgtggtatttgatatccattacctttttttttattcgtatgcatgtaagagttgcatttttttaaaaacattttttatttattacatggaaggattttttaaagattctttttccttgtttctaatcaggtgtagcttatcagaatattcattgtctaagataa

SEQ ID NO: 51819 - DNA, 746 bp, Ricinus communis
  Intron number 1 from transcript 29929.m004559 (locus 29929 .t000062) derived from phytozome v7.0 (chr-ID 29929; pos 3 47331 to 348076 reverse strand)
ctgttgatccgctgcgatttgagaaggatttgaaggtgggtacttactgcgtttgatgttgattttgagtttttttaattgagaaattccgtttttgtttttgaatgaaaaagagatgaacatcatagggaattttggttttacttttatgctatgcactgcacttatttgactttgtggacatgagctttttgcgttttggagaattgtagcttctgaatgtatatatactttatagtttcttcatatttgatatgtgaatataattaaaagaatgctacttttcagtttctattgcgtctgatacagattttgcaattttttattttatttgaaagaatgtgaatttaattgggttttcctgtcctgatttctgattgattatcggttatatttgatatggggtttttgtttttgaatggggaatggattgacttttttgggattgtggtgttcattttggtatattatgcccttcacatatatgtagaaagtaaacaaaatctttttaagaaaaaacgagccttttcaccttagatattgtccaaatttctagcttctgaatgtaaatactttctgttgtacgttagtttaaatgcacttaaaagaatgtttctttttgaggttactgtttcagattatatgatgatccctgtttattccatacattcagttaatatttagctgatattcactgttttgggttttcaggttcaatcaggaaagcttgaatataaaattgcgca

SEQ ID NO: 51820 - DNA, 943 bp, Ricinus communis
  Intron number 2 from transcript 29848.m004494 (locus 29848 .t000050) derived from phytozome v7.0 (chr-ID 29848; pos 2 77564 to 278506 reverse strand)
cgcctgttagcggtggtggtctcaggtaattttttttttttctatcttttttttttaaaaaccttttaattaatggcttattattgttgaattaataattatttgatctaaatgtttagtcatatgtgtttgcttctttgttgatcataattgatgttttgtcctataatgaattttgttaaatttaggtgctttttcttattttcttattctgattgactgtatgttggttatgtatgttaaaaatttattgaagttacaccatgtttgtttaaaaatgatgtatctagatatggtaaagttgaacgatctcttcaattttcttccttttagattaggtctgctatttttgtcttcacctaattgcagaaccatgtagtgcttcttattccattggttgtatgggtgacaatcttttaaacgaattatatccgatgattgaagagagaacatagaaaagtaattaatgttttgttagtatgtggtggaattttgtggtcggttctttagcaaattaaatgactgaaattcaattggatattctgtggagactaattgaattcaaagggtatctatgttatcttgagactctgtttctgttgtccgttttgcagctgtttatttctatagtgagtatcttgtgtgctgttttcatattttgggcaaagtgcaagatgagacaaacacatcttatttcacatattggaatgaatttggaactcctcttgcgagaaaggttgttggttatcatttatttgttagttgtccctagtggaatgacttattatccctctggtcataccgggtcatatcgggatatgtggctagagggatcacatcaaagggctttaacttcatcccctgatcaataaccttacatcttatttgtgttaataggatttttctggtactaaaatctggcatgtttattgcaacagtcaaa

SEQ ID NO: 51821 - DNA, 240 bp, Ricinus communis
  Intron number 1 from transcript 29989.m000415 (locus 29989 .t000008) derived from phytozome v7.0 (chr-ID 29989; pos 5 6670 to 56909 reverse strand)
catacaggtggattttctttttaatggcattgttgtctcttcattttttgttgttttctcttgtttcattgatgctctttgtgacgcctttggtgcatttgggtttgtagtcttttattggcagcaaaaactgctccattgtcattctgcaccatgcttacgtactcggtttaacttaagattattgttaacatttggcccatccgaacttaatttgattttgtctttctgttgcagcaa

SEQ ID NO: 51822 - DNA, 862 bp, Ricinus communis
  Intron number 5 from transcript 30055.m001602 (locus 30055 .t000072) derived from phytozome v7.0 (chr-ID 30055; pos 3 78853 to 379714)
caagctggatcaactcaaagaattgaacactcttggtattacttggttaacattcttacatacttttcatctattaatctcattttgttaatttcttatgagttcttagtgtatgtttcatgtctatcaaaatctatatcttttagtttatgaactgaggaggagaccatccttctggataggaggaaattctggttgatattccccctgaattaaattttgttcaagtatccactgattttttccttgtaattctcttcttgaaaccacatggcacgtgagcattggagcctctgaattgttattaagcagccccattctacattctcatcgtattttagatgcatggtggtgggatccattgtacagttgctctgatgtcaaataggcagaccccttggaaccctttaaggatgactacttacaactgaatcgtcactttaactctgccaataatgtcctttatgtaaaacatttatctttattctctacagtttactcttcctactgtttttcctacttcaactgtcttgatgattctctaagcaactcttaggcaattacaagttgatgtctttgatctgtccattctctgtaaaggactatgcataacttcacttattgtggctatatattttatttctgcactgatagaaagcaaggatgttttttgtaggatcatccaacctaaattttcagccttttcatatgatgttttaatacataagctgaatagatattttgctgattggagtctggaactggatctattagcattttatctccagaaattaactatgctcttttgttttgcaattctcttgtagtcctttctagaaatccaatccgcgaaattggtgaa

SEQ ID NO: 51823 - DNA, 620 bp, Ricinus communis
  Intron number 1 from transcript 29904.m002935 (locus 29904 .t000049) derived from phytozome v7.0 (chr-ID 29904; pos 3 34124 to 334743)
taattacgactctgtttggatctcttgggttacaggtttctttactgctctttagttaatgttcttgtttctctttttcttgaatatgcagtttcttttctgttaaaacattgtataagaagttggtactttgctttaagacttttagcaggaaaaaaagtttccttgtcttctttttcaatttgtaatttttttgttttggagcataaagttagttggaacttcatgggaaaatgttctgttttggcaaattaatggatttgatgcccttatcaaagaatggactttccttgcagatgcatgcaatcaaataacaagattgaaattttacatgaatttctttgtttttatggtagatataggaactgaagcctttaagaacatttgcataaatttatgcctgcttactaaaattgagtcggtgcatttatcacagataagtctgatattcattgaaatgagtggaaaacaagaatgacaagacatgtggaatcatgttaagaacaagaatggtgaatcgtgtaaaagaaatttttaggttgttggattattttacttctttagtaggctgaatagacatatttgcttgaattcgtttacaggggatttccaaattggcg

SEQ ID NO: 51824 - DNA, 825 bp, Ricinus communis
  Intron number 2 from transcript 29848.m004510 (locus 29848 .t000066) derived from phytozome v7.0 (chr-ID 29848; pos 3 64704 to 365528)
gtttatatcttgctccagtctggttcataacagaggtaagtcgattcaatcatcacctattctttggtgatcttgcattggagcttatttggagattttaggatgaagtatgcatagctataaataaacataaagaaaaggataaaaaaggcattaccatttaaaggctaagtagattctctttccaactaagttcaaatgttttgtgcttatcatttatacgttggtataaaagtatattatttttgcatttccttgcgaatagttaccagaaaatcttaaataaactccttcatttagaaatgttggcattactgattctaaatcagtatagcaacaaatggggaaagttgtaattcatttaactggggaaacctgccaatgatctgcaattgtctttctgatttaataagttttccagcgattggcagtatccgttttgatttgcaagtttcctgtgtttttatagtagttccaccataaatctgctgatagtgttgctgtcatggctgctgatttgtagtatctgatgttaattggtaaaaatatgcctgaacatgatagttcatagtgtggcccacttcctgagatagcatatcccaactgttactttaattgttttcagcaagtccgttgtactttctccaaaacttattctgcttctgcatttgttattgaagaaccaggcaacctggtctcacatgtagcataggtgttcttgtttagtcaagagatggcatgtaccttatcggacattatgtataacttcttagtcactttaataatgcagtatctatcaaactcagctttagcaaatacgagcgt

SEQ ID NO: 51825 - DNA, 158 bp, Ricinus communis
  Intron number 1 from transcript 29968.m000660 (locus 29968 .t000029) derived from phytozome v7.0 (chr-ID 29968; pos 2 59592 to 259749 reverse strand)
tctctcgaatacactatctcttccatcaagtaatctcttttactattacctatctcttctttctttcttaatttcttttgtttaaagatgtgttcttgcatgtatatgattaatgattttgtttcttctttttctttgctttctataagaatcgagtt

SEQ ID NO: 51826 - DNA, 755 bp, Ricinus communis
  Intron number 1 from transcript 29873.m000163 (locus 29873 .t000010) derived from phytozome v7.0 (chr-ID 29873; pos 1 50864 to 151618)
tccacttccccttccccctgataaagagaacccatgtataggaagttgccatcttttattgtaaaaatgaagggttgtctaaacatcaaaaaaaggaggttccaggggatttttggtaatagaaaagcttagtaagagatcccctttgacttgtctgaatcacaattcatggctagacacaaaaagtaaataagtagaaattaagagggataatgatacaaatggtccttaaactttgcgtttggtttcgatttggtcacaaaattctgatttgtttcgttattcaactttagttttaattataatttagtgacctttccaacgagggattgacatattacatgtctttctcttaattactctttttccattgactaattttgcagcgtgtcaatctctgtgaagatgactaagtttagtaaccatttatatcattattctattaagataatataaaaagatacaataaaaaatcttgtcagtatgttctttagatgctagaaaccaaccattagttgttcacatagaaaatacttggtcaattttaaatcatggattctataaatattagctatcaaatttaagtgtatcttaaactataaatatttcctttttactctacagtaaaattttccaccacttacagggccttgtatattcaaatgtaattggctatcaaatttaagtgtatcttattttttctttttcatcattgtgcaggataattttactgctgcaattacacattatcataa

SEQ ID NO: 51827 - DNA, 654 bp, Ricinus communis
  Intron number 1 from transcript 30138.m003973 (locus 30138 .t000147) derived from phytozome v7.0 (chr-ID 30138; pos 1 037155 to 1037808)
tgaaagacagagagagaagaggatcaattttaaaggtttatcttaatcctattatctgctttttgtttgtttattttgttttgttttgttctatgttggttttcgtttccatttttattctagggtttgatcgatcatcaaatatctttaacttgatcatttgatgtcttttcctttgcgttttgtgaactctgttttctgaagagaatatctgttttgtgattcatgaaatttagggttgtttggtttgcttcggatgccgacatgagaaacgaaataatttatgttcttacatttccttcattttccaaatttacctggaaccaaatagagccttcactatcatataccaagaatttttcttttctagattgtgtatttgctcttttttttttctttctttttggccaatcattaagttatgctttcatatctatttgtcattgttgctttgtcagttttttcctttttatgaactgagtagccggtagctcgctaggtctaactgttatgttatacatattggaaaaatgaaaaagaaaaaaatgggggtaatatatggagaatttgatattgtaaatttttgttaattcttcttatcttgcaatattttctttgactggaggcattattttgttttttcaggttgttgca

SEQ ID NO: 51828 - DNA, 309 bp, Ricinus communis
  Intron number 2 from transcript 29912.m005421 (locus 29912 .t000147) derived from phytozome v7.0 (chr-ID 29912; pos 7 41766 to 742074)
aggtataatcaatcaccattttattttattctttaatttttgtgattttggtttcttttcagttaatatatttctgagcttttgtttttgtttataattttgttgattgttttgactcgaattgtttctcgaatacctgattgtttactctaattactgtttttaaaatctcgttgcataatatgttgatgcttacatcattctctgttatgtggttgattatatatgcaaaattatcttctttttttgtatgatttgaccttctaatctcattaatctatttacttgtgtgttgaatagacacttgag

SEQ ID NO: 51829 - DNA, 550 bp, Ricinus communis
  Intron number 1 from transcript 29848.m004607 (locus 29848 .t000163) derived from phytozome v7.0 (chr-ID 29848; pos 9 44893 to 945442)
ggtaaggtttcgatccatttcaattttattttaactgtttttatttcttgtattaaaattgttggttagaatttttttggttctgcggtttctgaattaattacaatcatttgctcaatgctttagaaatggaaactgctattctactaacacaaatcaaatcataatgataattattatacattaggtgaattaatctcactctgtatttccatgtgtatatataatgacacttgctacgtttgttcatttacatttaaagagcatgccaaaacaatcctatctcttaactgttgcattataattggtaattacttattttaacaagtctttcaatttttcctttttataaacatatttcttaaaactttccttgtgtttccactctattcttgagtcctgacggcttttttttttttttggatattcctcttgattcttgcaaaaaattcaattgaattgaattcttacgaatgatttcttctaaacaaagtgttattgctatcttgtaattgtatcaatatattatgaacaaattctcttgtgcaga

SEQ ID NO: 51830 - DNA, 913 bp, Ricinus communis
  Intron number 1 from transcript 29940.m000403 (locus 29940 .t000008) derived from phytozome v7.0 (chr-ID 29940; pos 3 10415 to 311327 reverse strand)
gtggcaaactccatttcctggagacgaagtggaaggtacttgatgaaacccgccaattcttttacatgattctttccttggtttttcagtgtccaactcttgtctatccataattctatgtttcaatgttcactactatcgtttgacataagggaagaagttttggaccatgacaaggttaatctgaacttgcaaatatctaccttatagcttagcgtattatacatgttaataaatagagaataagatttaactatgctattgaaatagctatcgcagcaaagtaaattagaaaagtcactgccttatgacactatacttatgcaacatcatacttttaaataaattaagtcttttttattttcttattaagagcatctctaatagtattatttatttaaaaagtataatttttatgataacaagtattttaaagtatatttagatataagaattaaaataatttatttaaatttaataaatttttatattttatttttatttttataagtattaatagttttaatttttttatattattaaataaaaaataaaaattataaatatcaataaattaaatatacagaagtagtttctctctatatatatacataataaaattaattctttattttatatttaaaaaaaaaatatattaaaatattattttattattttattattttatttttgaaataaaaaatttaatatatatataacaatgcattaaaaatactttaataacatgaattataaaatatttctttatttgtgaaaatattataggtccttatatgaatgcatcaaactccaaccatatattgtatgttgcccaggttttcttggggcgcaaataaaagatgattgctgtttgaattgtgacgtatgtcttaattactttcagttcatttca

SEQ ID NO: 51831 - DNA, 668 bp, Ricinus communis
  Intron number 2 from transcript 30147.m013796 (locus 30147 .t000067) derived from phytozome v7.0 (chr-ID 30147; pos 2 629319 to 2629986 reverse strand)
tgatagctcttctgctagtgcttgccaatctacaggtgattctaaacagcgacgaatcaccactatgccactgctttacctattttccaaatataacgcttctccacatcatttaagctcataagatagagagttaacgggtgctgtcagctatgattctgcaactacttcccctactttcagcaactgccggtcttctgcaaacacggaagaacatgagtctcgtacttcttcttccgagcgtctcatgtgagatatgtataattgtattcctatggtgaaagccccataatttaccatactagattttggggcgttaggggaccaataagattattacctgagtgagcactctgctttggcttgatttgattctattatttcatcaagttaaaaacacacttcttgttgtggtgtgtgtaacggggaaaatattcaagatacattatggtgctttaaaatagaaacgaaagtatgtttgttatggcgctgaaactggcagaagtttcaatggctattccattgaaatcacgacagcatcagctatcacaagatttcacatacaaggcggcatgtatatcctgctacccgggcaacaggaattattattattattatttttaattactatatcgttttattttgcaggaactaaagcaccaaaataa

SEQ ID NO: 51832 - DNA, 622 bp, Ricinus communis
  Intron number 1 from transcript 30147.m013796 (locus 30147 .t000067) derived from phytozome v7.0 (chr-ID 30147; pos 2 630169 to 2630790 reverse strand)
taagatcttcaaagacgaccctctctccatctacggtatgtactaatgccatatcttcttgctattttgttcctcaccgagttccctacaattctggtgaaaatggatttcatttgctcttctcccactcaatcaactatgttcttaagctggccattcaaacgacatgccgtctcatacttcacatttaacgtgttccttagattactttatgcccgcccccaggtctagctttccgcgttgcattttgcgaattgaggtgtcaatgagaaaatgcgtcttcagcagggaattcaccttttcatatgatttgcagtttttctatgattattctgaattctgtgtttaaagagttatacattaggtcatcgtttcaggtctcagattttaggtttgttttcttaaaaacaaaaatcttaaaataccatacaacaattaacacgtcgagcacaaactataaaatttctggttatctttattcaatttgcttgatcccgattgatcatttctttgtgaattttctctatgaacttgttactccattcaaagcctttgtttgaaattcatcaatgatgtctttgttgcagagactacattgataaagcttaaactaggctctcag

SEQ ID NO: 51833 - DNA, 812 bp, Ricinus communis
  Intron number 1 from transcript 29887.m000232 (locus 29887 .t000004) derived from phytozome v7.0 (chr-ID 29887; pos 1 9574 to 20385 reverse strand)
tctccggtctccatatccttaacgccctcgatcgagtaaaccactctcaattttactgttttaattttctttttattgctcaatatttgaaacttttctttatattttgttacaattggtattgttacgttggtaacagtgctgcatcaagtaaaggcagctgattctttttttttttttttttttggttggggaaggagggggtatggttatttgaagtaaaattttagccaattattcagagagaagattggatcttttctttttcataaatttgcatgtgaactctttataaagtttaaaataaaccatgtaagtaactttgagaatcaaaattatatcctttatatatagtgttggtaatctataaatgtaagccaattcttatgtttggaaggttaagtttgctagaattcattatttcaacttaaaaataaggcatgttagaaggaattgtgaaagaaatgtaatgcaacaaattatacgaatttttaagaaatctattgtaatgaactgctgtacacgattcgttcaaagcaagaccagtgtttgtggttcatattttttatgtattaagggcttattttatgtgtaaattgtaaaagcctatgatttttctaggatttgtgaacatttaaaagtggagtgagttcgtttgggtatcaaagtttgaaactttaaacctgctacaattacaagatggtgttccttggagattacctttttcatcaatgtattttacttagtttttgaagtttggagagtataattgataagtctgttcttgcttgacttgttttaggtagataaag

SEQ ID NO: 51834 - DNA, 904 bp, Ricinus communis
  Intron number 1 from transcript 29840.m000610 (locus 29840 .t000008) derived from phytozome v7.0 (chr-ID 29840; pos 1 46503 to 147406)
gtcgctgctaccgtactatccaatacccagattctgtatttttcttctcttctcatcgttcttttttttttaacttgctttttgtacattgaatgatgggtttaaatttttgttcttttttggcttaattggtggccttggtcaatatctaacaagccaaatttgataacctattttagttttaagttgttttgattttggatttttaattttctgcctcggaatgttaccactttcagttgtttcttgttatttgtcttttttgagattttcagtgtaagctcagaagtaattaatcgtcaaaggtggtggctttatcttatttcttgcaaaaagatattggaattaagaaagccgtttggttagtttcaatctatcgaatggaaaatgtccaaaagtaggtcgattaattcatctttctcagactactagttctggaaaattgaaatcagtgtgtatgtatgaggaaatgaacgattttatgtcttgggtttctttttctttttctctttctctgtgcttttcatggtctcagctatccatggtaatatatggtacctgttaagtgtccctgtcattggattatagacactgtcaaatcaaacagaacaaaaatgattgagatattcatttagaggtgtaccggatattctatgagatgttatttattttctgattttgttttgagaaaatggagtgtaactgtatcaagcaagttgcatgatctctgatagggcacaatttttctattccaagtcttcaatattataaaacttagatcccatttaattttcttctttttgatccatgtgtccagccatctcgactctaatggtttttgtttcattttgtgataatgacgggtgcagcaagttaatcgacttgaaataaacccagacaagcg

SEQ ID NO: 51835 - DNA, 567 bp, Ricinus communis
  Intron number 1 from transcript 29908.m006202 (locus 29908 .t000253) derived from phytozome v7.0 (chr-ID 29908; pos 5 56046 to 556612)
atcaggaatatacctaatcagtttgagtaggtccttccactttcttactgtttttgtgtgacacatttcttttcattttgatatatttttgcctgcctattctggatatcttttaaaaattcttatttgttgatgcttattccaatactcgctagcttctgtgccttttctattcattctttttctattattgattggtagttactgccgctatttattactttgctcgtcaatcatagtttagtatgttatctgcttcttttcgcttttgatcttccaaagactgttaaaagctgtaaagatagagatgaatgaaattaaatagccatcgttttgttttccttgtcctgcggaactaacaagttgttaatgttttttacccccaaaaaagagatgttattaatgatcaagtctcgttcataatgaaggttctgctatttagtgatgggtttttatgctatttatgtgcatgcatgtaatgatatgtggatgataatattttacatttctttaaggtcttggtttttaacttttttggtttaaattcatggtagaaggaacaaattg

SEQ ID NO: 51836 - DNA, 695 bp, Ricinus communis
  Intron number 3 from transcript 29929.m004696 (locus 29929 .t000199) derived from phytozome v7.0 (chr-ID 29929; pos 1 179818 to 1180512)
ttccagctgttccaaaccttttggatactgtgcaggtataaagcttgagctttttcaatttagttttggatattattgaagctcactcatcctgaattcacaagtagatcttgtattattgaattatgaataaaggccttgtttggcacatgtcatgtgcaagaattcaatcgatcatatacaagcattcaatccgattgacttcttgcaaaattatgttggtttcattttttttccagatttgaaagaattgattctagtaactatggactttacaaacacaagaattgattaaatataattgaattgaaatgaaatcttgcatttcttgatttcccaacacacaaaaagatctatccttttggagtatttacttggaagaggttcaaattccaatttttgttttttctttcaagtaagtttcaaaaaatggatagcactttgtgaaacatgcacagagaaattttttattgttcttaagtgagggaaacaagattaagggtattcaaaaataagtttgtgttattaggactggatagttttattgcttatatagggtttaatatatgctgaaaaggcaacaacaatgtgttttatgctgaggtcttggcatccttatgaactttctccagaaaagcatcacatcttcaggtttattacatggatttacatgtaggttgaagggacatttcctg

SEQ ID NO: 51837 - DNA, 423 bp, Ricinus communis
  Intron number 3 from transcript 29904.m003050 (locus 29904 .t000164) derived from phytozome v7.0 (chr-ID 29904; pos 1 075029 to 1075451)
gcacttcggttcttgaaggtagcttttagctttagatagtttaaagatattaacaagcatgaacaattttatttgctgtgttattgtatcgatgtgttactttcaaatgtttattttatttgattgccgttattactcgtcccacatgcatactagtcttgtttttagtcattagtatcattctttaattttgttcaataaggaaagcttgtgatgatgttgatttcttttctctttttgggttaatccatttgatattttttcctaggttccatcggtgtctcaaattgatatgtgtggagctaatagttttatgcaaattacaaaataagttttggcgtttctagaagagaattgaattcgaaatagatccgatatgttccaattgtttggctcattggtcagtgcaggtattcaaatcct

SEQ ID NO: 51838 - DNA, 818 bp, Ricinus communis
  Intron number 1 from transcript 29962.m000052 (locus 29962 .t000003) derived from phytozome v7.0 (chr-ID 29962; pos 4 4185 to 45002 reverse strand)
ggtataaagagataggtacatatatatatataagtatttttattatcttgtgattactttttgttggctactttcaatagtattggttaatttagtttgtgcaatctgagatatcctgatatggaaactatgtaactttgaatttgaaatatggtttgtctaaagtttgaattttgatatttgtttgtactttgttaattttgtatgcgaaattggtaaacctatgattaactaactgaacaagtgagaaagcaaaagttaagaaaccactatcttctccttcttcttctttttttgttagtatgaattagaaaagtatgtgtttaatttggaagtggttgttttaatgacccagacaaagttaattgtaattgtagtttgttaactataactagctatattttaatttttctctattaattggcttacatatgtataatatctgttatcactccagatttatttggataagaatatgtcagtaggtgtatcttttgttatatgaatgcaagtgtatagatttataacatcttcattagtttttctgttatagtaaccttaagattttgtggagtattacaaaaaaattcattgttctcactggaactataatgtttcatgatccatctaagtggaaagagttctgcaattctggagtcttaatttagtttccttataagttgactacggttaagtgctagagaaattttccataaattttttctttgttggttttaatattaagcttgttaatactgtttattcttttctcgaaatcttaaggttttagtaaagtttcagggatacagtggcccttc

SEQ ID NO: 51839 - DNA, 786 bp, Ricinus communis
  Intron number 1 from transcript 30128.m008876 (locus 30128 .t000337) derived from phytozome v7.0 (chr-ID 30128; pos 1 460127 to 1460912 reverse strand)
tttcaactgtgagttttattatctgggattctctttgttcagtttctcaatgccatttttagctttagttagcctatcttcttttttagggatttggttgtgtaaaaaacaaaactttgagatccagtttctattcttcagttgagatttgtgtaattcttgaatgaactttactgggcatgttcttattgattagggtttcttttatttttctaagtacaatctttctataatttggattaagatttttttgtaatgaattgattagggaaaaactatataatatggtgagattatgggtgattgttctaaattgacattctgaattgcattggcattatgagtttcaattttggagatagactagcataagctagctgttctagtttttcagtttggcggctgataaagtatgttattgtaaattgtttttgagaatctatacaaaaaaaaagttgagatattcttttttgtgatttctctagtaaaatataagatattatgtgctaaggttctgattgattcttatattatggttagaaattctcaggaaatattaattttcacctgaaagttggtatttttcttatgtacactttctacataggttattagttaattacgtattgtttttgcacttagattgaaatgtagatggttatttgcttttaggatatgaaggtgaaaatttgttaattttgttaatgagaatggatagggttttggcactggggttgtggaaatgttgacacctaaactgccatgagccaggctgaagtttcgagg

SEQ ID NO: 51840 - DNA, 693 bp, Ricinus communis
  Intron number 4 from transcript 30128.m008967 (locus 30128 .t000428) derived from phytozome v7.0 (chr-ID 30128; pos 1 899631 to 1900323)
tgctccattgattgctacacttcctctggaggttagtgtcagttattcatttttttatttattttcatcagcatctgaaatggtattcatattagaagtttctttggataattcttttctgaatgaaggaaaagaataattctttggacataaagaaggccttttgttcgtgttagattttgtcgaacttattggtgtttcttatagtgttatacataataaacactatatcacagagttatcctgatgtcagcccttttgtcgggagcagctgtagaaatgtttacttaggagttgggatcacctgatcggtgtgagaagagtagaaatagaataaatatctaaaacaagatggaaaggatattatatattcctgatggaagaagagcattgaaacttgctgatactgttaatctgaattttggtaattttagtatgttcaacctaccaaagtaaataaatggataaaaaactgatatttattgatcaagctatgacttgtggcatcaaattatgcagcatgctcaatgctgtttcatgctactgcctctttgatatatttcaaacttcttacaattgataattcttgtaatcgtttttctttcttcatatctctctgtcggtttattattttttatgcaaatgggtagttctatatttctgcagattcgaggtaaaattggtgccttcata

SEQ ID NO: 51841 - DNA, 865 bp, Ricinus communis
  Intron number 2 from transcript 30131.m006918 (locus 30131 .t000069) derived from phytozome v7.0 (chr-ID 30131; pos 3 94060 to 394924 reverse strand)
agttttcttaattagttgctgctgaaaattttagcaattctgcttattcttctttatttagcttaggctttgtttggaaatttctcaaattgaattcagctcttgaattttgtaactttccgaacaaggtgttaatgtttgtgcatttcctgtgaataaatagtttttatctaattataaactagtttatgagcttacacttttttaaaaataaaattgcaattttattttctttccttgtgttgatttgtttatggattattaagacttggatattcattgaattcaattttttttgctttgtcttttgaacaggataaagttggtaagttgtaggttttgcttgcacaacggtgaagaaactgtgatgaaattatgttggagtaagataaattggtagcactatttttccaactagttaccttaatatttttaagtagtttttgtcaaatttttattcccatttctttaatgctcaaattgacttaaatattatatgatatctagatacttttgcaggctttctttaaatgaaatttgtttttgatgtatatatgagatatagaattaatcaacagtttctcatgcatgttaactatcttgtttgatatgctattgggcaggatgatactcatcagacttagctgtatttgtttcactacccgttcactttatttcttcatattggtgtgtttcttacatatttatttcatcttagattgtttaattcttatgtttaacacttgcacagtaaaatcctctatcttggccttagggaaaaatttgattgtctggtttaacaagagcagttattgaaattttttgttgcttatgttctgctatacacatttgctcttaatgcagt

SEQ ID NO: 51842 - DNA, 363 bp, Ricinus communis
  Intron number 1 from transcript 29904.m002939 (locus 29904 .t000053) derived from phytozome v7.0 (chr-ID 29904; pos 3 49021 to 349383)
gccaaacacgaccttgaaaaagtctcaaacctctggtcctttttctctctccatctgcaaatttttgactttatttgtcgtctttttttccacctttagcaacaaattacaaatctctctctcctcgagcttttcttcgacgtcaaagaatgactcatatcctttattatatgcttaatttcatatattgtaatgcccccccgtttttttttttggggttttgagattttagtttaattgcgtttcctatttaattattttgtgaaactattgtatttttgttattttgttttccttaacttaattcttcttcacgcggaaaccaaagggaacgtgatcgtgaaagagcccaggctcgcaccg

SEQ ID NO: 51843 - DNA, 281 bp, Ricinus communis
  Intron number 2 from transcript 29904.m002939 (locus 29904 .t000053) derived from phytozome v7.0 (chr-ID 29904; pos 3 49414 to 349694)
gattaacccctgagcagcgtcgggaaaggtattaattgttttctttctttttttctttttaaagtttgatttgaagattcagtaaagtttcaattttgcatctttataataatttgttgattaagtcttgatctttgggttaaaatggaattgggtattgagaaagtcaaaagcactgcgtttttgtatctcttttcacttttttgggggtaaagttttgattttttggttaatttggttttgtagggacgcaaaagctttgcaagagaaaacagcgaaga

SEQ ID NO: 51844 - DNA, 512 bp, Ricinus communis
  Intron number 1 from transcript 29848.m004499 (locus 29848 .t000055) derived from phytozome v7.0 (chr-ID 29848; pos 3 06165 to 306676 reverse strand)
ccttccatcagctgattgcgaacactctaccaaaggttctgtttatgctaattactttatcatattcaacattggagaaattacctaatgtgtatgttttctttgcatattaatctgccaaacccaaatcaaaatgatttgaaaatcttcaaccattcatatctaagttcttgatgatgatcagttgattgtgtaactttgcacataggatgtcaaaatgtgatggtattttctttttcaatcaatacatgtttgtcttgtttctattttctagtaacaaaaggaagattaactattttcttctttctttttcccctgtgaatgaatacgacaatccaactacttcagacaattcgtttcatgcacgcttgaattgtttgttttggatttagttttcttgatgagttattacatgcaataaattgatattcgatattcttagttgaactcttacaataatttgatacgactgttcagtggcccaaaataaggcatcactaaaagtagtccac

SEQ ID NO: 51845 - DNA, 373 bp, Ricinus communis
  Intron number 1 from transcript 30075.m001180 (locus 30075 .t000047) derived from phytozome v7.0 (chr-ID 30075; pos 4 02120 to 402492 reverse strand)
gcccattctgcagcagtttcacaggtcagcctcatccctcaaactcattgttttcaattttttatttattttttaacattctcttgcattcttttgaatttttttttggtttcccggaaagaaaagtaaaagaaaagcgaaaattttgtattgattataacgattatgtttgctatgggcatgcactggacactttataaattttgctcctttcttagccttttccttcattttctgcaatcaaacttagttttaatcataccccagttggatgattatagattagagattgattcttgacaaagttgatttttttttttttttgtgtgtttctgcaggtttctttagctgtccctgttgggagcgattcgac

SEQ ID NO: 51846 - DNA, 393 bp, Ricinus communis
  Intron number 1 from transcript 30143.m001196 (locus 30143 .t000035) derived from phytozome v7.0 (chr-ID 30143; pos 2 99515 to 299907 reverse strand)
atcttcctactagtcacttgttaggctcagtacctgtaagctcgaattttctttcttttttcttctctatttatgtatcattttcttgagttaattttcttgtttcgattttattaatttgccattttgatcaatttcataacttaaaaattggtaacttgttgattttgtattagtaatatcaaagcgatttatcttctgaaagaatatgtttttaaatgtgacttaggtataaatgataacgcaatttgtgtgattaatttggttccttctttgtttttgttactattttcttttgctctaatgacattgatttttacaagtaatgttaagaaattattttacattttttttataggctgtagttagtgaagaaaaaagtacaacgactac

SEQ ID NO: 51847 - DNA, 482 bp, Ricinus communis
  Intron number 2 from transcript 29908.m006078 (locus 29908 .t000129) derived from phytozome v7.0 (chr-ID 29908; pos 1 494063 to 1494544)
ttagctgtccaaaaggtcagttcttttttaattttatgcattctactttaggtcttagttacaattgccttctggggtatttacttacttgaggaagttggttaatctcaatcaaaaattttatggtgattgtgtgaaaaactcttaaagcttgtttatgtagccccacattctctcctcatttttcatttacatgtggataataccattatagtaacttaggctcttaaaaatgacatgtagtttgatgttacaaaatttcggtttggagctacataatgctgccattcataaaagttgtgacttttgtctttaaactagggttgattgcgattgtgggtctagagtcatatagcacattggtttggcataaacaaatagataaagaaaattaggaagaaggtaaaagctagtttgcttctcattttatctaattggaacttccagatattaggaagttgaacggcttcgtggagaaagga

SEQ ID NO: 51848 - DNA, 247 bp, Ricinus communis
  Intron number 2 from transcript 29816.m000678 (locus 29816 .t000015) derived from phytozome v7.0 (chr-ID 29816; pos 1 61391 to 161637 reverse strand)
aagaaagtttcaggcaacaccatactttaaacccagtaattaaaccacatacccacctcaaaaatcatctctcttttttatgttattattcttttcatttgagctctttcttcgaactcgacactttacagctaatacgagaccatttacatacatatatacattaaaaagaaaaacaaagaaagaaagaaaaagacttttctgagtttaattttggtgattgcagaggcagaaagaagcattggct

SEQ ID NO: 51849 - DNA, 831 bp, Ricinus communis
  Intron number 1 from transcript 29929.m004565 (locus 29929 .t000068) derived from phytozome v7.0 (chr-ID 29929; pos 3 89844 to 390674 reverse strand)
tacacccagtaagggaatttgtgtttttctttttttcagttttcggttttaaccatttcttaaattttaatgtctgaatacgactgccgtttcttggtaattaaacgactgcccatggcacatggcttattattattataatatttatatatgtgtacaaacaagcttatgcatgtcaaaattgattacaataagaaatgaaaaagggttcctcttcgaatttgtgaagctttcatttccagccttttcttttttattagtctgctccaactggaggttggcctcgagactttatggcccctgaagatgatttcagtactatatatccaattatttccagtttcagggcgttgaaaacatttttagcagtaaaactctagtctgctgattaacagaaaatatacaatttctttagtctatgaagcaatgttgcataataataaaccactgagagaatgaggtacccatgcccactgttaaagtcttgtaaagcattatatatagtaagaggcaatgcttagattatagtaaaacaatcaactaatgctaagaggctctggaaactcttttctcagcttaatttccacgagctatcaatcataaaaagtactggtacagtaaacttgatctttcttctttcaaaggatccttgaatttggataaaattatgacatcttgcatcaggccactcagataaggggttgtcttctcacttcagatcccaatcaaatgtatattccctatatgtaattcaattatttggaaaatttctcactgatttttgttatttctttttcgcttgtgttgttcaggtgtggcccttgtaagatt

SEQ ID NO: 51850 - DNA, 558 bp, Ricinus communis
  Intron number 3 from transcript 29827.m002620 (locus 29827 .t000093) derived from phytozome v7.0 (chr-ID 29827; pos 5 08569 to 509126 reverse strand)
gagtccgtcttgtttcctataacattttggctcaggtattgggaatttacctatagtttttagcttccgagatgtgcattgctttatttaaactttctctgttacttttctcctttttatttatttctcaatgtgatatcttagcaggtattttgtatttttgagattttgaatctgaaaataaagcattaatgtccagggactttggatgtgtttcgtgatgttacagaattgttctctgctgtttggcctttttccactctgggatactgagataatgtagtgacctggtcaccatacatgatttagaaatgcgataatcagactttgtgctgaaaatgaactaaatctgactactctacttttaccattatgcagccatgacaaacatatgttatttttgttttgattctgtctgcatagggagtctcgatggtactatgtgaagaataaaattctttgatgcttaaccattgccaatttgttggtccgaaccataaatttattctttgtacctttattttctgatggtgtaaaattgctttattgtgtaggttt

SEQ ID NO: 51851 - DNA, 925 bp, Ricinus communis
  Intron number 1 from transcript 29933.m001426 (locus 29933 .t000048) derived from phytozome v7.0 (chr-ID 29933; pos 2 69828 to 270752)
ttcctctctaagtttgttgttgtctgcgccatcaggtacataatctgctttcagattttcttttctatttgttcttttatttctatgagagttttctgatttttgcctattgttcagtataaatatattcatgatgctgaatattacttaattattgcatattctcctggaaatctttttttttttttaatattaatttgcttatgttattaattatataatactttcaacaaacaatttgcactttgtaatacttagtagaaattgcgttgctggaaagcgtcaatatgtctggatctgttcactatagctactagagtataaaaaaaaaaaaaaaaggaaaaacagagtcatggtgtaaatctttgagattccttgggaaatagataaccagaagtatgcattttggttaatattattgtttttcaatgtcgttttgtttagtttgtatcattttggagattggtgttttttacggtttgatgtcttacaagtttcaaatgctacaatggttttaggcgaactttagctgatagtttaactacatgaacggttgcttactggaagaagccattctaaaaaatgtgatattgataaaaactgttgctaattcgagttgattttcatcatttccctttctttttttgtcttgtacaacttctcttctgctataaattgactgaagaagctgcaatatacattttgatcaaataatagatatcaattctagtgtttgctcaaaacgcaagaattcaactgcattccagacaaaccctgcagctctctgtcaaatttgtcgtagaactataatcaagtcactatgtcatcgctttttactaatttcatttttttcctgggcgaatgtaatatgtctggttgctcaaaaatatgtaatatgtctgcagtggtgggggccttgtagctt

SEQ ID NO: 51852 - DNA, 673 bp, Ricinus communis
  Intron number 1 from transcript 30078.m002302 (locus 30078 .t000095) derived from phytozome v7.0 (chr-ID 30078; pos 6 06262 to 606934 reverse strand)
ttcccaaggataagttttctaaggtcagtatctccatataaaaggctgttcttgttaattagaatttgaattataacgtagcatccatgtttatcattcgaagttcagacatcaattcattaatttgggaatacgtgaataattttttatttttaatcatggtagaggagcatatagggtctcgaacctgagtttccacccaaactctataaagcttttctgctaaactgatgacttaatagtaatacataattaatgataaattttaggaaaggggatatagcacaacctagctaatacaattatttaatagaaaaaaaatctatctcggacaatgtaaaattgtatagcaggtctatgtagaaaatacttatttaaaataaagcatatctgcacagttaatgaatccttaatttgaatataatatggccccagacgtgtctaagtgtttagattctaacaggcttagataaaaagtaaaaaagatactaacttagccggccaatttaacatgtttagattctttgaaaagaaacaagacttttgtggtattggattgtccaagtgttttcagaggtcaaaagatttcactatagaaaatcaatagtattgtaattaaactcattttcacatctgatgattgattttttcattctccttttctacaggtcct

SEQ ID NO: 51853 - DNA, 651 bp, Ricinus communis
  Intron number 1 from transcript 30128.m008927 (locus 30128 .t000388) derived from phytozome v7.0 (chr-ID 30128; pos 1 753549 to 1754199 reverse strand)
ctgacgctgttgaaaagcgggtacgtgatttttaataaaatttatttgctctcttttcttcttttgcttaattttccggatctctgtttttttttttttttttcttttggtttctctttctaaattgatgttggcgaatgaaggttcctgtttagcctccgagaaaatgtggcggtgagggaagatagaaatcaagtgaagcaacttgatttgtgaactagattcagcgtataaaatttaattggcctgttggggttttcattttcaattttcaatttaatataatgcaagatcaacttaaattaggcgatttatttagtgaatctcaatgattagccgaatacctgttataatcgaggttttaggttacagtttttctggctaaagtaatggtttctgatgggccgtgggatacagtcaattcattggattgaaataaatttttttatcaaagtagggatagacgagcctgttgctttagtttttagtatctgaatttgttaaaatgttgaagctattgaaacaaagatcctcacttggcctttttggttttatcttatagctacatgcgtgatgtgatttaaattttatttgaatacttggtttccatatgctatgttgttggtttaacagctggagagtattcctgtg

SEQ ID NO: 51854 - DNA, 639 bp, Ricinus communis
  Intron number 2 from transcript 30131.m007112 (locus 30131 .t000263) derived from phytozome v7.0 (chr-ID 30131; pos 1 617061 to 1617699 reverse strand)
cttcaaacttggttgctacttcccttgccagacgggttagttttcttttactgattaatcataaattacggaagtagttttaaaatgggaatatgggaagataaatggagatattaaaagtccaagggtgaggctagaggtttactcttactctttcttgatgttgctaatttgacgccaaatatatgtgcagttggtggctagttgctagaggtggacaaaatatatatgctcattaaaatgatatgcataaacaaaatctgtgtttggtttgaaacaattgacgttcttgataataaatgaaaaggtaatacccttaagctttcaagtgacacatctactgatttgaatcttgaaatcagttgagatttaagtcctacatattaggatcatatactaatattgtaatcaatactagaacgtacaaagtgacatattgttcttgatggtcctttcacactgttgtgacagaactctcattgacaatattgtaaaaggctaatttcctatctttcaatttgcttaaagacataatttctgctgcgagtaggtaagatcatttgtgctatcgttcactgattgctctgctaagagtgaggctgcgattttttgactagatagtattcatgcagaataaaa

SEQ ID NO: 51855 - DNA, 370 bp, Ricinus communis
  Intron number 2 from transcript 29900.m001619 (locus 29900 .t000081) derived from phytozome v7.0 (chr-ID 29900; pos 5 12597 to 512966)
aaagttatgtgaaaagcataaaaggatatagaaagaaagttgaatcagaactttcaagtatttgcagtgatatcatgactgtgattgatgaccatcttattcattcttctgctactgctgaatcaaacgtgttttattttaagatgtgagtgctttttaaattcttttgattttgtatgtattgttagtggctcccttcggttggttttgttttattatattttagttgttttttttttttttttttttttttgtaaaatgtttgtgttgtaatactccatactaagatggttatcttatttcaaaattgtactaactcagtttgaaatatccgattcgtttcaccaattatttgcagacagcttttact

SEQ ID NO: 51856 - DNA, 741 bp, Ricinus communis
  Intron number 1 from transcript 29822.m003351 (locus 29822 .t000026) derived from phytozome v7.0 (chr-ID 29822; pos 1 48880 to 149620 reverse strand)
gtgacgaggagcgtgcttatttgaggtatttgttcttatttaaaaaatgctatctttttcagttttctaataaggtccttagaatgatactaccgaaccatttaagaatgttttggtactaacgaaccatataaaaatgttatgtagacttaatgattgtaaaataggattaaaatctagttgaaataccaataatgggataaagattaaactgcaagctctaaatgttgtaataactgaactacatgagctcttggaagaatcaagaaaccaacttctttgaatttttttataaattttgttaaaataattcttaattcaattatttgtgatgaaattctattataatcatactatctaagttacattatcaggtggaagaaatcaatagttttttttttgaattgcttcttagaatgtcttgttgttcctgtgacaccatttgttcctttgcaatcccagtctatcaccacttgattgccgaatatctttattgctgtgattgttaacaagcatgctgcaccagcacaaaaaagaagttgcaattgggtttcatgatttgtttcaagcagacctttttttaaaagaaaaattgttgcaagcaacttggggaacatttagatgctcactaactaaaatgaaaatgtaagtgattatttctttctctgacatgcaataaatatatattggttgcataaacttttaggaagcacgctctgggtgataattctttcagtggaa

SEQ ID NO: 51857 - DNA, 331 bp, Ricinus communis
  Intron number 1 from transcript 29915.m000470 (locus 29915 .t000006) derived from phytozome v7.0 (chr-ID 29915; pos 8 2183 to 82513)
gacctggtattcccttggtatctttgactagttctttatgctatagtttgttttatggcagagattcttacaatcttctattctgccatcgccctaggatttatagtacttaatggttctgcatgaatactctgtactagttaaaacattttttgttgaattgttcaattatgcaatggtacttagtagtaaacttgagctaaggtcttgatggttggtttgtcccagttaacgtgtattgaaccaatttttctcaagttttttcgctactctttaattttatttgacctttacagaatacttttgaagagtatcgtctcggtgagaaaga

SEQ ID NO: 51858 - DNA, 840 bp, Ricinus communis
  Intron number 3 from transcript 29842.m003576 (locus 29842 .t000073) derived from phytozome v7.0 (chr-ID 29842; pos 3 53757 to 354596 reverse strand)
gtggcattgataaggaagccaaactacgtcgagaggtactcttcatatgcatgcatataattccttgattaatattttaaaggtgatcatcgtgtatttttaagggcaagactttttgtgctctcaacaatgttgccctttgaacaagagcctatttgaatgtttttgcactttcaagcatagtatagctctaggtaagaggtatgaaatggatttctcttacttccgctatgtacttatcatttattagtgaaacactaacatccagttatatagtttttagccttctgttccacatataaattttttcctcaatgaactttcctggatattttatttttatcctcttctggtttggtaaatttattattttatttggtttggtatgtctaatttaaaagcttacatgaatcctactgtgttaacctgtgttcttcatgtagtcaccttgttttttgggtgcaaaaatgagcattctgcaatatatggtgttaaaagtaatatgaagagttagatcagagtagtttggagcaatggtaattttaatactcccattaacagtgttccatctccgaaatgaccaatgttttggcaaaattttgaaatgctcaatgctcaatgcttctgttcaatgtaagggacattatggttttggataatttggatgcaagttgattgaaagaatgtcactggacatgggcaagctgctaatatctgtattgagtgatgtgatcaactggaagttctttattcaactgtaaattatattacaacttttgataatttgttgaaacctcttgtgcagcggctcaaggagatattagcaaagcaggctgagtt

SEQ ID NO: 51859 - DNA, 612 bp, Ricinus communis
  Intron number 1 from transcript 29816.m000685 (locus 29816 .t000022) derived from phytozome v7.0 (chr-ID 29816; pos 2 50146 to 250757)
tggtagtagtttactttctttcctttctttaaagaaaactatgattatttagttgtacaaacgttttagttggaattattcattcaactgttatttgcaaatttaatattaacttgttgaaatggttggttgtctcgaagtccttatttaactcttgttgttttttgaattgagctcttgtattgctagcaattgtttaaagtttgtcaaattagaacaacagtgcttacttactgatataagaaataggttttgtttgcaatagatcatgtcaattgaactcttgcataatcatgtcaattgaattctagtgaaatcatttcacttgtggcatgcttgcatttcttttaaaagaattggatttcaaaacaccataattcacaaaatagaatagaattgtatgaaattgaattctagtgttgttaaacttcccgtaaactgtggtatttcaaaatgagtttttattagtgtgagattttgtgtgtatgagctgatgccctcttcccttgaaattgttatgaaattatactatgaaatttgtcatagtcttgttatggggaggcagcctaattaatcaaattatttgtgttgagatcatgcagtcttttgatc

SEQ ID NO: 51860 - DNA, 623 bp, Ricinus communis
  Intron number 2 from transcript 29846.m000187 (locus 29846 .t000007) derived from phytozome v7.0 (chr-ID 29846; pos 8 4451 to 85073 reverse strand)
ggtaagtaaaattggtttccccatttaatatgaacaatttatcattatttttctccagttctactggctattcttttgatttgcaatggatgctgtgcgttcttcttgaactgctttggctaattggctgtgaatgcctgcgtgtcatatctggagctttactactaagggatatgtaataaatgtactctcaagaactgcattatgacttaagtattgtttgttagacagatgcatatagcattgtaccgttataaagactaatttctgataataggtgaccacattcttgtaattaggtacatgatgcactgactcaacaaaataaaagcttgattcgtggttttatagataggaagatatcctatcaaacattcctggtaatggtaatagtagatttctgtcaggtggagatcttttttatggttaatctttaaagttaaaaatacatatcagaatctgttacttcagcaatgtggacctttgttttatttgatagactagcatgatatcaatttatgcccacgccttttgggttaagaatgcaagttaaaggaattgcattgttcaaatctgtgcggtgataatcttctcattctttctaggagttggaaatccaggat

SEQ ID NO: 51861 - DNA, 783 bp, Ricinus communis
  Intron number 1 from transcript 29846.m000187 (locus 29846 .t000007) derived from phytozome v7.0 (chr-ID 29846; pos 8 5180 to 85962 reverse strand)
aggattttgttttcaagtttaatttctttcacaaggtaaagaaaattgtttcccttcttatttgcatgttgtgataatgctgtttgtttcttgcgaattggtttctgatcaatagaatggagagcatcagattgaagtgtaagattttgaccaaattttatggctctcatttgagtttttctgtttataattcaggagtaaaaagatagggggattttctttcatcaatttctaattatattagtagatcagaatggaaaattcccgattctttttaccccaattccttgctctgccttgatcgggggtttgaggaatcaagtatgacaggattatgggtttctttgttagatttggcccatctcttctgtttgtatgttcaatgaacgcacatacagtttaactgctattccttttttaactgtttttttccttttgtccttattgtgaatctgagtttatttaatcctcgatcaactttcatattcactatatgttaacaggttatagccttctgttttagttagggttttctcgccttaaatttgaacaatttttagtaatgtgaaagtgttcatcttttgaaaacctgaaatctggtataaatgattatgatgataatgatggggcgtgcttcaaatttacttgtgttaacttggatcaggtttaacaagactagctgaagtcatttgtcacctaagcacgtccagaagaaagaacactgtaatttatgggaaaaaatttgcagcatagtaactctccgatctctatccagaatagtgg

SEQ ID NO: 51862 - DNA, 960 bp, Ricinus communis
  Intron number 1 from transcript 29976.m000499 (locus 29976 .t000014) derived from phytozome v7.0 (chr-ID 29976; pos 2 45338 to 246297)
aaacatagctagtgtttcttctctttctcaacaaggtcagttgcatatcaaagttgaaaatatcatctttttcatagttgtgcatgatattggctttatagtttcacttgcacataaaaaaaatgccattctgctagagctttgggtataactatgatgggacagttatcgttatttaatttattacatgtaattcacgaatgcattagcatttgtatcttgttacgtggttaaataataaggttgctcacatgtaactggaagcccacattggaaactatctctgtgcaaaagtaaggaaaaggttgtgtgtgataaacgatattcctgtaagcctcacaaagtggggagctttgtgacacggtaaatcctttatgtgtacgttcctactacagtttcctgggactatgcccatgagcctcctatgatgacgaaatggagtaaaatgccttgccatcccatcaatgccacaccagcaccacctcttaactcatgccagtaccttcctaacaaccaagccattgaccaagggaatacaatccaaaataagttagcaatcatggtcaggaataattatattttcttctttctagtaatgtattgcattgatggacttcagatacatgaagattatatagaagtggattgaggctgaggcaatttgtaaccaccaccaatgctgtgaatttaaaatttgggttggaagcatataatatttttcagtatctcaggttttacaagtatagcatacctgtctgtactgtcttggatagttttaactatagaaatttaactcaaatttaaatgtctttcccgggtacttcactactttagcaatcgctgcacttgtgcttctgttccgtcatgtgcatgtttcttagctaggatctatcttttagatagtttctggaagattgttaattgtcttttcttctccccaggcactacagtagcttctca

SEQ ID NO: 51863 - DNA, 628 bp, Ricinus communis
  Intron number 1 from transcript 29917.m001945 (locus 29917 .t000014) derived from phytozome v7.0 (chr-ID 29917; pos 9 6435 to 97062)
gcgaagcgtggatataagctgcgtatccttttgttttgctttttttcttgtttcttttttatgtaatattgctgaggtggaatcagcttggattttgatgcatttggtgtgatttttagggttttacctgtgtttgagcttcatttgcatgttaacatccgattttgcttatctaaatcgtgattttactgattctggactttttatttttatttttattcttttagtaatgttggaatgatatgcttttaggatgctagcttatttcagctttttcatttgtttttagtgtggatttttagctgaaactgtgttttcattctcctaatttcttgtttggtcatatatgaatcttgacttctgtttatttttggagttaaggttttttggtacgtgtgcacatttggttgattgatcttatactaattaaagttaacagaatttttcagttttctgtttttgttatggatgaagccaagtttaagtaaattgcaacagaagatgctttatgctaaactaagattaaattttgaaatctaaggaaggaatcgttggaaagataaatccaatgcttagtttctaatttaattttaattttataaatttatttagcagttccttgactgaa

SEQ ID NO: 51864 - DNA, 558 bp, Ricinus communis
  Intron number 1 from transcript 30066.m000722 (locus 30066 .t000018) derived from phytozome v7.0 (chr-ID 30066; pos 1 06156 to 106713)
aaagtgcatcagactcaatcttttacatttttcaggtttaaaagcttattcttgttctcccaagttttttatttgagtgtttgacaatccatggaatggggttgaatttgtaaatgcattaaagacatggataaataggacaaacttaaatctgttgtgtaatgagtcatccactgcttcaaatttttgcttatcggctcaccttttctcctagaaacttctaatttcgtaccttccatcctttccaacttataggggttctgcctggttgaataagctattgtctttgttaagctagttttggaccttttgctcttgggccaaattgtacagaatattgggcttcttccatccgttttgtcagtgataaatatgtaatacattacttggatatttctgctttgtttccctcccttgatactgtgagttagttttcacatttgaataaaagtgcaagatgaaacatcgatgcttgcgcgaaactttgacacctctgatacttattctgctgggaatttcttttgttgttgtaactatagacattgcaagattgcgagg

SEQ ID NO: 51865 - DNA, 513 bp, Ricinus communis
  Intron number 2 from transcript 29957.m001428 (locus 29957 .t000037) derived from phytozome v7.0 (chr-ID 29957; pos 7 80705 to 781217)
aagtcattgatttacaggtcaactattcatttcaagacggccccaattttgttttttgttttaaatttattttagagaaaattactatgtcatcctttactttttattttcaatgcactttacttcctctatcaaaataatatgtacgttttagtccctaaatttgtacttaaagataaaattttcatggttgaatttaacgaaatgcaaacttttagtccttacaaggttgacaattgtggaactaagacattattttgggggactatacttcgtatttgttttaaaaattaagacataaaatataatgtgaagatttggtatatgtttttattaaatattaagacgaatttattcaggttgcaaacaagagggacggaagtgtaagtaagatcaaaacttagggggggaatagtattttgctctctattttactacaaaattacattattgacttcaaattattttctttttgcaggacaatatcgcaaacttaaattataaattaagaac

SEQ ID NO: 51866 - DNA, 789 bp, Ricinus communis
  Intron number 2 from transcript 29841.m002765 (locus 29841 .t000029) derived from phytozome v7.0 (chr-ID 29841; pos 2 32720 to 233508 reverse strand)
ataattttgttgtcgtcattggtgaatctctccatgtaagttattttccttttcaggttccatgatgtcaatcatttgattcctacctttgcttatttattttattttattcatcaaactgtaatttattttcttctaactattgaattttaactgtgttttattttaattatttttataaatttaaaaatattatagccaataaaaaagaataatcaagcgagagaaaatgcgatgtcttattctttaatcgaaaatatgattaaactatgaccaaaaataaaattaaataattaaaataaaataaattaaaattttataattacagtgaaactaaatatgtaaaaagtattataatattatttcataacattcaacacccactatgttggccaatatttgacactgaaattaaaatataaaattacaatacataattaattagtttaaaaaaaatacttggatcggtatgagtcttttattttttatataaacaaaataaattatttttttaaaaaaaattaaataaaattattaaagtaaataataaataaaaagtttaattcttaatattcattatccaagctagattgatcccatacctaatatttactagagatggcaagccctgatttagtttagaaagaaacccatgtaaacctctaaaagtccataaacacgtatatgaagattactaattaacaaatgtaattaaaattaaagattactaaagatatatgaagtattacatacatgtaattgttagactaacattttgggtttgtaggc

SEQ ID NO: 51867 - DNA, 991 bp, Ricinus communis
  Intron number 1 from transcript 30000.m000381 (locus 30000 .t000011) derived from phytozome v7.0 (chr-ID 30000; pos 1 18820 to 119810)
ttccaattctacactcttcttctttgcactcggaggttagtcatcctacatatattctttagggttttttttttctttctctgttcaaacttccttaaaatgtgctcccctaattccttaaaatcaacacatcatttttagttaaaatattagaaagcggtgaaacagatggagatatccgatgatttagaggtgcagttgaagtattttgaaattttaggatttcatttcattttatctgagaatttaggggctcatttatatctgttgtctttattttattattcttaaagtgcgctggttggagttggggttttgtactatatagacataaaaatctagacccgaatctctctctctcgtcttcctccttcagcttcctgtaagttcctctctctcccaacttggaaagagaaaaaaataaacactcgaggttagaatatttggtttgcagttgaggcttcaatctttccatttgcttgtgggtgtctatatatgttatctgtttgcatgttctttgatgaactttatttttatttactcccatgtttgttttctgagaaaagggaggaatcttgaagaacggaaacatatatttccccctattttattttattttaattactttccactccttcctcaggagtagatgtttaccgtatagtggtggtcagttgagtgaaggtttgagctatactggtttatgaaacagaaaacagaaaacccagtgcctataatggaattttaccatctgggttttagtctacttgaattgcccgttagtcatttgtgtttgagcattgtgaaagtatactgtttttttattctttgaaatatgatgtctgtttgtagcggattcatgtatttccattggtgtcttttgttttgtagtaattcaattaactagttcagtttagcccttattgatttttctcttttcatacatgggggtgtttatttgctgcttcttaatgcaatctttgcagtgaca

SEQ ID NO: 51868 - DNA, 572 bp, Ricinus communis
  Intron number 1 from transcript 30068.m002546 (locus 30068 .t000036) derived from phytozome v7.0 (chr-ID 30068; pos 2 26230 to 226801)
gatactgctcagtggccacaggtagattgctagatctaccgcttataattctttgagtgactgctttttggcttttcttgaaaataattctagccctagatcattagattttagtttcttgtttattgggtttgttctcttttcgcaaaaggatgatagtatgtgtgtgcgtgtgttcatggcagctggtgcaagtccccactcggttttggatttagtttctatcagtttcttcaacacagcactttatctttctcttttgcttcagtgatataagaaaataaagagtgatgttttcttttcttttcttgttttctttccccttttatggactcataaaatttgaatagtgtaaagtagctaaattgttttatttgtttgtttgtctttctgtcagtctctgatttcctttttttttttcttctctctcttttcttttcttttaatcttgaactgagttatgtgtttgatcttctagtcatggttactttctgtatgtcatttatatatttttttcatttcttttctttttattaggagatactggtgaaaccaatagaagagttagtcac

SEQ ID NO: 51869 - DNA, 534 bp, Ricinus communis
  Intron number 1 from transcript 29970.m000985 (locus 29970 .t000014) derived from phytozome v7.0 (chr-ID 29970; pos 1 19815 to 120348 reverse strand)
gaccctgaagtctatcctcgttcttcaggtatttttccttattttcaaaaatttaatttaaattaagttttcgtgcatttggatttctctgcaagtgaagaatgttgaaactaagttatcgtacactatactactaaaacttcattaatagagaaaaaaagaagaagttaggattgaaagttgagtcaaatccgagtttgagctcgaattagctagcatttaattttctgtacattagtaatttatcatgatttttattgtttagttatgagacttgaggtaaatattttacattgtacaaggaaaaatatttaaaatattcaagaagtctggagtctggcatattgtttacttcaaatcaaattatgaaattcgtttcatttgtaaacgaacttgatatcacaaattttgcaaattgaatctgaatagttcaagaggaatttacgtacctatgatcttattggtacataattcttatttgtatcttggtattacaacaaaactgaatttgtattggtttgttaggggaggtgt

SEQ ID NO: 51870 - DNA, 983 bp, Ricinus communis
  Intron number 2 from transcript 29908.m006028 (locus 29908 .t000079) derived from phytozome v7.0 (chr-ID 29908; pos 1 190710 to 1191692)
ttaccgctactatactctgtttgccacttgacactgtacgagaaaaacttctgattttctttccctattatagataatgcatatttttctgctgattaaacttgactgttcacggcgtttatatgaattatcaataattctttatttccagttgtcaaaggtatcttgttctgcattatgtgtattctgaggctgcatgtgaaagtgagaatgagtactcttgttttctttgtgtttttcttcgtattcaaggctaatattgctttttctcttttttttttttttctttttttttttggcatttattccccaaattcacctccttgcatcatgtcacaaataagtgcttatatgacttaatgtatcatatagaatttctgtttgttacagacaatgtgacaccttgtcagtgttttattttgtgtcaaatggattttcaaatgtttgctgtagataggttacattacatggaaaaatgcaataagcttagttggggctgttgtatctgtgtaggcttattacaaattgcaagcatgctgctgattatctatctttggatgggacatattttttggtgggcactagtaatctttttgaaactggcacctgtgctagacatgataccaactacttcgtaaggaacccttcctgctaattttgcaatttcacaggcctttttgaatctggagtaatttataaattatcagagcaacaaacagaaacttcggctccaaatgtgatatagttgtaaaggattcatgaaaccatccctaactagtttgtagctggggctaagttgatttgagttgagtagaagtctagattattgatggtacatgtggggaattaaatggtttgtgtttgaagtattctttgttccaagatgtcactaatgctcccgtgatcatcagtaaatctaaatcacgcttttgttgatatatttttcagattcggaccaagattgttgcacctggtggggaagc

SEQ ID NO: 51871 - DNA, 291 bp, Ricinus communis
  Intron number 1 from transcript 30099.m001690 (locus 30099 .t000069) derived from phytozome v7.0 (chr-ID 30099; pos 3 40101 to 340391)
acagaaagagaacaggtattcttcacatttttcctttgttcatctttcaattacttaatagaatacactgcataatgggttatgatcagtccctgaactaattaacctcaagacagtaatttcttttgtttattattattattagatctaatggttcttttcatctgagtatgggtttcttctctttcacttcatttgatttgtacaattttttcttttttttttttggttttcaaatctgtttaatttgttgaaggaacattggtgactgcaagtgctcatatcataaca

SEQ ID NO: 51872 - DNA, 439 bp, Ricinus communis
  Intron number 1 from transcript 30032.m000451 (locus 30032 .t000001) derived from phytozome v7.0 (chr-ID 30032; pos 1 592 to 2030)
tttcttcctcaccccgtcaaaggtaaccaaagaagatattactatttgtctctttctcgttattaatttcttcttacgattttcctctttgatttttatttttattttttgtctaaagaaaaacatatatactcttacttagttgatcttatatcacctccacagaagattcagaatatttcttttcatactttgggagtttaatcttttaaaagatttgatttcttttttctaatttatttgaaatttaatgagatgagcatatgttacattggtcgtaaaggccataaacataataataataataataatatggaaaagatgacttgaattcagtcttttccagtatttcctttttcattgtaagatgtcacagctctttcatcggactaatcttttcctctattactatagactatcaaaattgaacagttgtcca

SEQ ID NO: 51873 - DNA, 803 bp, Ricinus communis
  Intron number 1 from transcript 29827.m002680 (locus 29827 .t000153) derived from phytozome v7.0 (chr-ID 29827; pos 8 84141 to 884943 reverse strand)
aaacaccattgcgttcttctgcagtctttccctctgtacgtttatgagtttcttttattttattctttttatgctagtttgtattttgttttattattgtctgtatactgtatgaggaaacctcacaaagaaatgtacttaaataagggccctcttttaatattctaaagttttgaggatgctaattgatttcttggctgttgaggaaatacgcaaagtgagaaccaaaaagctagaatttggaagttaaaaaccgggcctcttttattttcggtatagtgtatgaggaaatatcacatgtaaaaccacttaaaatggctttcttttaagctgttcttgatacaggactcttgcacaagttaaatggaaattttcatgtgctcttttaatgtttatattctacttgatgaggaaatgctgctgagaaagaatcatttataacttctattttttgctgcttcttttcttctttattctgctgattcagggaaactaagagacaacaaacttattcggattttgatgtagccatgatggtttaactaaatgataaacactttggaaactcttagaagttgtttaatgccatttattctgttgttcatgaaagacatgtcctgaaaaattttgagtcataatattccagtggggagatttctttcatcttatatcttatgattttttattggtactgatttaagtgcgttcatttttcattaggcattgtcaacctatttccctaacgcaatgtttctttgtgtttatttttttctttttctgaatttagttggtgcaggtacgtc

SEQ ID NO: 51874 - DNA, 635 bp, Ricinus communis
  Intron number 1 from transcript 29929.m004599 (locus 29929 .t000102) derived from phytozome v7.0 (chr-ID 29929; pos 5 61185 to 561819)
tcaccctcctttggcatttgcgtttggcatcttaggtatataattaacgccaaagttactctttcacttcactttttcatttcttggaaagggctagcttgagttatttcaatccttcttgtcctttcctcactttatcacctatgtttgtgtttctttcgttgctgttatgatctcaggtttctcttgttttttttcatctatgttttaggaaatagctcccttcttcttcaaatctttgctttagtggcatgcagttagcccttgctttaacttatgaaaagaaattaacttcttgtcctataagatttctatttccagttggtttctagatagaagtatatttccattttagtcataatgtatatgaacatttagaaaaatttgatctaatacaatgtaatattcttgataatgttcctgtaagtactttcccttattatatatatctacctcatcattaataattgcactttgtaaaagatttgatcacctttttaaagtgatgtcgataatctttgtaactgtgctcatgttatctataatcaaagtgatagatcttatactaaatcaatttatttcttttatcatttatgacaggtaacattatctcaattttggtatacctggctcca

SEQ ID NO: 51875 - DNA, 281 bp, Ricinus communis
  Intron number 3 from transcript 29933.m001467 (locus 29933 .t000089) derived from phytozome v7.0 (chr-ID 29933; pos 4 77666 to 477946)
aaagtggtaggtagctccctgtgagtaataagattaaaaactttcaatttattctctgtttatgttaatatctgcaccagttatgattagaaacgaaaagaaaatttgactttaataaacaaaaaaggctaatcatgatgatcttgtcagtgtctgatcataacattgcagcatactagatagttgagctcattgatttaaattatttgcccaagtcttaagattcaggaaaataaaagaaatgatttagcgcaggtgcaaagaacgcttcagtacaacga

SEQ ID NO: 51876 - DNA, 523 bp, Ricinus communis
  Intron number 1 from transcript 29822.m003378 (locus 29822 .t000053) derived from phytozome v7.0 (chr-ID 29822; pos 2 66919 to 267441 reverse strand)
tactgttttggctattggcactgagtgtgatattggtatgctaatgttcatttcacttttcatttgttaatacattgtacacgatttatctggttgcttaatccgacaattgcaaagaaaaagaatatgctttttgattttgttgagtttctttgtacgagattttgacagagttattgaattccttgggaagaaaatggagcaaacttgtgtaaatctataggcttccttaattttttggttttgttggctttacccaaatcagcagatcatttaaaatcatgcttttagttattgcttataataacttttgccgtagaatgctttataatattagtttcttaagcaaagaaaacaggaatcaaatatctctctctttttctttcatctctttgataatatcatctaatgaatattttgtgtcataaacagttgaatttgtataaatgcaacactttttcttcaatttgtgtgaatgtaacagttcctttttcttcttcacgtgcagcattgttgactgtta

SEQ ID NO: 51877 - DNA, 719 bp, Ricinus communis
  Intron number 2 from transcript 29981.m000595 (locus 29981 .t000024) derived from phytozome v7.0 (chr-ID 29981; pos 1 89054 to 189772 reverse strand)
gttcaccaaagagacagttgagaggttggcctcttcatttcatgttcctcccttattgtgtggtttgttaattattgttggtggttttgcattgtattatttagtgaatttggttaagctaatatggaaatcagccgtgaccaatcttacgatttgtggcaaaagagttaataagaagtttggaataacagagattattaaagaatgagggatgcttaaaataagtaattaattgctataacaaaatggaagtgatccctttatttgtcatttctagactagaaaggttacttagtagaagtcttctaatctattgtggaataggcacttgagcatagaaagattatatgaacttaattatactggatgctgtaataatttattaggatggtaggttttcaataggttcagtgtacagtctttctcctaatttgatagttgatgatcagtttttcaataggttttcaataggttcagtttacagtcttctcctaatttgatagttgatgatcagttttttttttttcttcttttggtcatgactgttgattctaatcttcatttttaaatctttgcataataatagaaatattttcatgtatcctatataattattaatgaacatgtattgatgtagtattcccctgacattggtgttgaaaacttatacatttggatatctaggtttgttcgttttgtgagcactccagagatcttgg

SEQ ID NO: 51878 - DNA, 458 bp, Ricinus communis
  Intron number 1 from transcript 29908.m006140 (locus 29908 .t000191) derived from phytozome v7.0 (chr-ID 29908; pos 1 54725 to 155182)
actccttttcttctgtctctgcttctattagacatgttagctacaggtttttatcaccctctctgtcttagtgaagatgattttgatccatttttatgatagttagttatactgtttttttttttttttttgttgggttcattgggagtaattatgttgaagaagaagagattaattttctatcttagatttgatcatatatacttgattttagaatgcttagtttgctcaaagatgggttctttgatcagtatgttgaattgaattgattttaatatatgccaattgaaaattttttctttttattagtgacatagtgataaggttaatttttatgctcaatttttctcatttttgtaatcaattttttctaaacttgacaattagaagtattatccaagtctatgtcaagtactgctttttttcaaaaaaattattttcttttttaaagatttgtg

SEQ ID NO: 51879 - DNA, 731 bp, Ricinus communis
  Intron number 2 from transcript 29908.m006140 (locus 29908 .t000191) derived from phytozome v7.0 (chr-ID 29908; pos 1 55252 to 155982)
aattacttgtccctgtcttgtacatgtggcactgatccacactttcagttctgttattcataaaaagttgtatatcctgaaggccaactgtggtatcaatgtctttctattctgatgtttatgattgagatgtgagaataacttggttggtgtataaagggtaacttgtttagattttgtgtttgttctatattagttcttttcttggttagcatgtcttttttctccaattggtgattaggtaatatcgaaatagttgccttgatagttttagtttttctgtcttcttttagtgtctattgcaatggctgaaatgaagtgtttgtaaaataatacctaattatttgagtgggtgactgatgcttgtagttttgattattgaagaaaataaggaagagtcagttcaattgtttctccatttaaaagttgggtgttctttttaccccaataattcatagacaaaactatcaagtcccagaccaatttccaacctgtatttgaatttttttgggtgacaaatagggtggtgaagaaatgccacgagagaccaaataaaatcacccattttagtaacattaaccagtaaggtgatgttattttacatttcctatggttttcgaactctcttaactgagatcttatggttttggttgcttcagcatgggttatgtgcttagtttctagaccctgaaaattgaaatatatttgatgcagctgtggcacttgtggat

SEQ ID NO: 51880 - DNA, 575 bp, Ricinus communis
  Intron number 1 from transcript 29883.m001978 (locus 29883 .t000033) derived from phytozome v7.0 (chr-ID 29883; pos 2 32901 to 233475 reverse strand)
gagaaggtaatatatagttttccttgtgctttagtgtactcttgacatgctcttgtttttcgatatataattggtccaagaaaaggatcttgctatgtattttctttctattggcaagtgctagttatgaactttgtatatgtaatttgattactggcactgcaacccaataattcgctctctagatcttcttgacttgtttagaaacctttctaacagttatttctctttgccacttcatgcgatctgtgcctgtaatccagtatgtgtctcatcaggatatatgtgaacatgcatgttccgattttatggactcaaatctttttcttttgggtattgcagtatcttttgtttcattttcatccatgtgctactttcttctttcattatcacatcaattatgattcctatagcaaaagtttctgcaaattgtatagtagacttttaatattttcatcatgcttacgtactataatgactcttccattttgggtggttggtgttccagcatctctgatatctgtgtaggtctcactgcaggttgctcaaaataaagaacctacaaaagagtcaac

SEQ ID NO: 51881 - DNA, 768 bp, Ricinus communis
  Intron number 1 from transcript 29883.m002013 (locus 29883 .t000068) derived from phytozome v7.0 (chr-ID 29883; pos 5 00666 to 501433 reverse strand)
gagcagttatccacttctccacctcacaaggttttctttcttctcttttttttttttttttcccatcattctttcaggttctgcttcttttttaagcatttgctggttaatactgcaaaattgatttatttaatgcttttgagagttgagccatctcatataagaatttaaaaaaaaaaaattatgttgaagaaagatgaataacatcaatgaactgggaactgggaattcttaaagcatgcacgacaaaatagttaaatttcttttttctttttgaattagatttcatgttataaccaccatttcatcctctttattggcattataactatcttataattaaatgtaattgttgtagaaagtagtatcctttttacacataagaatagtaattatatgatatgtaaatgagtttgttccattaatgctttaaaaaagatacgctgatagtatattgtctttattctcattacgattgtgccaatcatgctactctgagaaacacattggattttacagatagtgaaccatgcataaagtttatgttttaagtaataagatcaaatttaatctcataaattatcttctcttctcttgaggttttagattttacttctttggatattcttggttctttattttctttctctcatttttcaagcaagagtttaatgattttaatggatcatttctatcagctgtttacctctttggttgtgtatgtgttttttcacatagcaatactgggaagctggtggtaactgtaat

SEQ ID NO: 51882 - DNA, 701 bp, Ricinus communis
  Intron number 3 from transcript 30131.m007195 (locus 30131 .t000346) derived from phytozome v7.0 (chr-ID 30131; pos 2 141531 to 2142231)
caggtagttaataaacagtccaaatggaccctgtcagtacataaataatacaagtagctgaaatttggcgacgaattcctacgaatttggtaaagaagaaaatagcatcagtaatgttactgcgacccgataatgtcacaatatttcttttagttaattcaatcaatgaaatacgtagaattgattgatttcattattcttagattgcataatctttcaatccaaccgaagtttaaaaatataattgttataagattttacgagtgtaaacttcattattattaaatcgtcactaaaggttcatacctcatagagtgcaaattttacttcgtcactaaaatatcacatctatgatttaaatttcttgcagtggatttactttaaaagaaaagtatataaaatgttccttggagagataatgatataaatagtccttaaactttacatttagtttcattttgattataaaatttaaatttattttatttcaatcattcaattttatttatatttcgatttaatcactttacaaacaaaaaattaatatgtaaaataaatagccaataaaaaagagtaactaaaatagaaaaaaatggcatgtcaatttttttaaaagaaattttgaaagaaatgctatgtaaactaagaagaaagtagcatgtttctttgagaattatttcaaacttcttgtgtgttaaagg

SEQ ID NO: 51883 - DNA, 489 bp, Ricinus communis
  Intron number 1 from transcript 30068.m002593 (locus 30068 .t000083) derived from phytozome v7.0 (chr-ID 30068; pos 5 33123 to 533611 reverse strand)
gaagcgccgctcgaagggtaatttttctcttttttttttttttttttctgaagaaattatgtttaatattatttctttttctttttaacaatggaattttgagcactgtattagtgttgtttgggattttaggacttcactaggacctagtatttggccaaatttcaaaactttatattgcaaggtttatctttgtttagatgatatttttggaaggatagaagagcaaggaaagattaaacagcgaatatggaatttgaatcttttagtttgtgataattatattcatcaaagcttgtaaagctaacagaaaactttttgttttcacaaaaaatatatcaaatcatgaaaatttcaagttcgaatgtcaacggacgtttttacataatccctttgagtattgagaagtgcatttgccaggaagttatttaatgtgtgtgtttgctgcttttagaagaagaactataatcaagggaaacggaggttgaa

SEQ ID NO: 51884 - DNA, 980 bp, Ricinus communis
  Intron number 1 from transcript 29844.m003284 (locus 29844 .t000130) derived from phytozome v7.0 (chr-ID 29844; pos 7 76733 to 777712 reverse strand)
cttcagagctccatttccgtttctgaatcaattgggtattcttttattccttccttttctctctgttatgtcacacttctgtgtgtgtgtgtgtgtattttttttttttcttttgttaactttcctttagttttaaatcatctttgtttgatgtggccgtagaaaatataatcgctagtaaagcgttggctcttcgacggctaggaatagtcattaaggttgtgaaattatcataatcaatccaatattttgatcttagaaaccctaattgtgccaaaacactcaacttaatttagctgatctgtagttgattttcagctactatgatgcgattcttcaagagtacgaatcaaaattttagctgcagttgctggtgtgacctgttctgggaatgagaaaactattagaaacactatatccgatttgatgcggtcttttcttttcctttttttttttaaggcaaaaaaaggattaaacagtgccgaactagggttccattatcaaagaagttttttcttcttcacagtagagggatatggaagcttaattaattagtattggtagcaatgagaaatatgccaagttaatgcatttgttaagcatttctataaggatttccgaagtctctcagtagaatcatatggatcagagatggtaatctaagagtttgagagaagtttatgtatttgtttctaatctatattttggcttggaaatcatttatgaaaatgatggaagcaattcaatgaagcatgatacttggagctaaaattaaattgtaagtagagatttgttgatgactccataattgcaattcaaactaactacatttctccaaattatttgggacctgagtcttccttgtatttatctcacacatttagtagaagcaatctgacatttgatgaccaaactgcagtggaattaggtgggatgatttgatttcgttagtaatcactctctttaatatgcagagaatc

SEQ ID NO: 51885 - DNA, 501 bp, Ricinus communis
  Intron number 4 from transcript 29889.m003299 (locus 29889 .t000065) derived from phytozome v7.0 (chr-ID 29889; pos 2 77496 to 277996)
aagatcttcactttcgcaaagcaggtaaactattccttttttctttttatcttttttttatttttttgaagttcataattcgaatcgaattcttctaaatgtaatttgattttgtagccgatgataaagaacttctcttggttgtcaaataggaaattatcagaaaaagtgaacctcgggccgtactaataatatctaaaattttgtgtcaaattgcatattgtaattatagtttggccttcgatgagctcaatggcaattttaggatttaagttgggaagccaagaggctattttaggatcatgattttatcactagacaaactctactctagccctatatttgtttaggaatgcataagagtatttttttttttgtttttttttttaatatttcggtgaagggattaaataagaccatgtctaagaattgtatgaaagctgattttggtattttcccttaacagaatttgatccagaggattgcccattagactgtttg

SEQ ID NO: 51886 - DNA, 958 bp, Ricinus communis
  Intron number 1 from transcript 29836.m000568 (locus 29836 .t000015) derived from phytozome v7.0 (chr-ID 29836; pos 1 93273 to 194230)
ctattcaaagtcgtggctttaatcaggtaatgagaattttctctagtaaatttatcaaacttttaacttctctgttatttgtccaaatacgcatttgtctggtgttctgtgaaattgatttaattaacctttgataaaattaaagttctgtatgtcaccattgtctgaagaaaatatgtaagatactggtgcaatctctgtcactgaaagtaacaaatgaacacttacactaactaatacattctcatcattcataagcattctgtgcagttccttagcatcgaaaaagaagtgcatttaagaataaaaagaaaaaagaagtatatgtatattttgaaatctgacttaatccactagaaagagtctaacttttatcccactagtggtttgttgcatgagtcatctcctattcagctcagctcatttatgcctaattatcttgggccacattatcatcaaaatcccaaaaggtgatgttctatggtcatctacatgatcataaatcagtcaggggcggttagtgattttcctttatgttgattactagaaaaagaacattttgtttatttattttggaaaagagaactgggatacttcttttataatgataagagaaaggtagattaataattgttacttaacttttgcttttgaaatttaattatttgatgcatattgtatatacatcacgatagataacttgtttaattggtctttctttgtgtaattgtttgtgttatctgcatttattgaattatggttaacttcttgtatgatttatcattactaacatatccaattccatgacacatgaatattgatatagaaaaaataaatgtgcccttgatgatcaataggcttggtgtttagcccctcatgaccatgggatgatttagttgagttctttccctgtgtctgtccttaataacatatgaacaggtctatatcattggtggag

SEQ ID NO: 51887 - DNA, 567 bp, Ricinus communis
  Intron number 1 from transcript 30099.m001687 (locus 30099 .t000066) derived from phytozome v7.0 (chr-ID 30099; pos 3 24597 to 325163)
gagctccttcctctcttaaagctgaggtattcaatttgaactctaccaagtttttgcttttctcttttttttgagctaggggactctacattgtcattaattactacaattggattcttcttaacaattaattttgtttagtagttgttgattgatgaaaaacatatgagttgagtggctgaaaccaatacttgctctgtattaattatggatataatggtagatggtctgtcttttgaaattctaattttgctgaaacaaccttgcagtttttttgcgaggctttctgccctttgtagcatatgcagttaatgagtaaaacccagtatctgatttgctttaattagggaaacgcatggatgtggacttactttaaatgcttggagaaaatatattttacttcatttcaggcttatagatagataagtggaacaagtaattgattttgtttgctcatgttgaattccataatccttttctttttcaattaagtacaatatctgatgctttgctgttctccttttggcatcaggaaggttcagtttgggtatttacagctcaaaaatt

SEQ ID NO: 51888 - DNA, 631 bp, Ricinus communis
  Intron number 5 from transcript 29863.m001104 (locus 29863 .t000064) derived from phytozome v7.0 (chr-ID 29863; pos 4 21100 to 421730)
agcctggggaagaagagcctgaacctgcatttaaggtgatttataaaccctacatagtcatttacaagtgtgcaatttcattttgtaccttctaatttttgttctttttaaactgtcaagattttgcaactttcattgttaaatgttaagagtgtttatctgaacttaaagctccggcattttgagtttaaaattccgctatacttctgagcaccttaacttgaactggtgcaaacacggatattcttagtgacaactgcaagtaatatccttctacttttatatatatattcaagtcccagttgaaaacccatattagacaacttcataaaggatcagatgcttgattattcaaaactaatgttgagtcctttaagtaaagagttattaagaatccaaattaataatctctctcttatctatctctcttctgctataactctcttatttaatcaggatttttatttatttattcagttattctcttaatttttgtagatatagagattcaaattcttttgttgggaaatacattccctttggattattttgatggaaaaaactattttctacgtagtattcattttgagcagcttgatatctgattagtttattttgcagtatattggta

SEQ ID NO: 51889 - DNA, 316 bp, Ricinus communis
  Intron number 2 from transcript 29912.m005282 (locus 29912 .t000008) derived from phytozome v7.0 (chr-ID 29912; pos 8 5808 to 86123 reverse strand)
ctgagattaagaaaagtgctaagcaaggccaagtaagcttaattaccgagtctaattcattgccttttctgctttttgattcttgaattcttcatgctattgttctgcagattaaatagataaaatgttttttggttttaggataaataatacgtaaaatataaaattgtactttttgtcgatataactgtcagtaaaagctttcaattttatatgttttcagttactgaaaagtttaaaaagaagaaataatcaattcataatgtatatatgacatggtggtgtgatattttattctcagggagctgtaaaagta

SEQ ID NO: 51890 - DNA, 947 bp, Ricinus communis
  Intron number 1 from transcript 30027.m000844 (locus 30027 .t000037) derived from phytozome v7.0 (chr-ID 30027; pos 3 14251 to 315197)
ttgcattctttcttgctgaagtaagttgttctttctgctgggtttcttactgggaaaagaaaaaaagaagaagaataaagaaatgtattgtgaatagtttaatatgtttctttatttcagattcttgttttagttgagaaatcttttatcttggaatttttagaatgttattatcttgtgctggattcttgagaaatcttttgagtttcagggcttctttttctggctgtatgtgggttggttgttacagttgaaaaagaaatcttggattctcgatttgtttctcaaagtaaaagaaaggatgcttctcttattttaggtttgagaaatacttaagtttgtgtttttggttggttcttgtaattatcttgcattggaatattcttgtgtccctgtgaaagagaaaaggaaaatattggttcttgaatgtattgatctcttgaagctgatttcctgtaatttgctttccttttcctcaaaattctatttaactaatttgctcttatatgtttcctcattccattaactttctgatactaaaaaatattgcagtttacgaacatacactacctcgatctcttcgttccctatattgctatgaactacttcgatcgattcatttcaggaaataataaactgccggtactgagaattttgcagtctgtactaattattctgtatgcttgaattaattgatcgattcttttgtatgacttgacttgagtttcttggcttagactttcaagaataaagattttaactatcgttggcgtatcctggcactctgttgcctgtgtcttgcctggaaaatgaggagacaatccttcagagtcaaaaaacttttggtaattatcttctgtttacagtaacaaacatttttcaatttgcgtttcttgtactgatgcactactttcttaaacagcaagtgagaacggatcttggtatct

SEQ ID NO: 51891 - DNA, 549 bp, Ricinus communis
  Intron number 1 from transcript 29844.m003212 (locus 29844 .t000058) derived from phytozome v7.0 (chr-ID 29844; pos 3 79046 to 379594)
atgtaagtttccttctttgatggggtttagtcgttttctttttctttctttttattttccccatcaaacgttgctgtaaatgtacagaaggcaaaaccttgttctttgttttttttgttcttaggatttttggtattgccaataggggcccttaatctgacattgaacatgtaatgctttttattgctctctttctatctctctctttgaacatcaaaaacagctgttaatattcttgctgatgcagaatcttaaagttgtttttttaattctttttttttttcgttgaagaaaattcatgtccttgcaaatttatggcccttaatctgacaaggacacgttaatgctgttcttattttttttgttgcacattgcagatggtattgaataggtttctttttttacccttttactttttcttctaatggcattaatgagacttgaatcaggtcattaattttgttcttattgcttgtttgcctcttttcttgtctgctacttctgattcttgcaggttacgataactcctgaagtggcatcaagaactac

SEQ ID NO: 51892 - DNA, 965 bp, Ricinus communis
  Intron number 1 from transcript 29822.m003515 (locus 29822 .t000190) derived from phytozome v7.0 (chr-ID 29822; pos 1 132737 to 1133701)
gcttgcaggtatgacttataagctctattagcttctttcttgtagccaatttatgttctttacattaatcctgaacgggaattttgcgtgaagtgtgaagcaggtgggttcttttctttctgtgattcaagcagtgttgtagtgtagtgtccattcttgtattttaatgatcataaaatgctaggactaggattactcaaaaactggtttagaacttaatttacagaacctatgaaatgttaggcaaattagtgttgaaatccaattttaacatgataaaataacctcctgctgtgactacattatatgtgttaatgatctcataatgttaataaattttttttctcagtgacgagataattccatttgtgtgggcttcattcttgagttccactggtaacaaagtgtgaaacagagcgaagaaatttagattttggagttcattgtgtataaatttttctagattgtattggttagtgttagcagggaaaagaggcaaggaattcgagtacgagatacatggagatttaactattgacctgagtttgagttcagaaaccatgtgagatagttatgatatctgtcaatttgctgcagttcttttactctccacctttctttaaccaggtttactgtgttaattgtattagttaccatagtctgtgactgctattcctgtattgaatgtgaagtttgctgagaacttgcttccactataaggcaaagggaatgcctttttattttccttcattttctgcgctttgactccttaatatcttctactttatcttgaagtacttttgatgatacatgcgttacttcatggaacttaaaatgaactttggccttttctagctcttagttgctttaagttctattttgtatatgtttgttcttcactcggatgaacagttttcctttttagctaatatctgttgcttgcggtgtcatcagggtcataaaca

SEQ ID NO: 51893 - DNA, 719 bp, Ricinus communis
  Intron number 3 from transcript 30066.m000735 (locus 30066 .t000031) derived from phytozome v7.0 (chr-ID 30066; pos 2 19304 to 220022)
ctccaaccataatagcactacttccaaactgggctgtgagtataattttgttgcttatttctccatgagctagtgcttgaaatgcatttaggctgctttttatgttattacttgggctaaatatgcgagacactctatgatctaggactaaaaggttttggcttggctccatttgattcaccttcaacaataagcatgacttgtggttctttatactggaagaggcatgccgattttgttttccaaataattgcatagacatatcaagattcttctaatatgtcaatagaaagccttagcttttccatcttacttgcaaaaaattttatgatacttcctccaatgaaatctctttattttattcttgatttataaggggttatagtggaagaaacttgccaatttgatttcgatctgtaaaatcttgggattaaagcagctctacctcctattaagaaaaaggggtagccttagaaattgtcagcttttctttttcctttactttttcaaagtctattggattaaaattccaaaccattgggttaataaaaaattcattccgaatccaggtgtattttctttggatttgataagggaaactttctgaagtcatgttccatttttctctcattaaacacatgcaaaataccagcttctcttcttcaattacttttgatgacaactgtgctcattttatttgtaggtgtatttcacagttt

SEQ ID NO: 51894 - DNA, 481 bp, Ricinus communis
  Intron number 1 from transcript 30138.m003863 (locus 30138 .t000037) derived from phytozome v7.0 (chr-ID 30138; pos 2 83688 to 284168)
cttcactatctatcaaattctgttactccatcgtggtccaatacttaaatttactctctccatttcaggatcaaagagcttctgtgcaattgatccaattgtatggttgctttcgaggaatggcatccagaatttactcttagcattaaaaggaatgaaaaatataaaatgccatcgtgtcttttttcgtgcaagaactaagacatttgcaactgtcttcttgttttttcaaccctcctgctactttcgaaggatttaataggctaaccagtattaactttaagaatttcacctttggtgatgatgttcaaaactttatcttgaaatgcccattggtggaaaatgtaattatgcaaaacaataggaacattgaccatcttgacatatatgctcctaatctcaaggtcctacacattaaggtgtttcaattctatctatttcagaaatactccacttcttatgacagctcaaatcagagggc

SEQ ID NO: 51895 - DNA, 325 bp, Ricinus communis
  Intron number 1 from transcript 29908.m006133 (locus 29908 .t000184) derived from phytozome v7.0 (chr-ID 29908; pos 1 02871 to 103195)
tgttttcctcctcctcctgctgcttgtggccactggtaaactccctaggatctttacctacttctactttcttgcttcattatgatcttccttaataattagtaagaaacaaccaacgactgacgaatattagttacggtatgcatttaaagactattttcttgaatcactaataaaacttggcttagtggtactgcaaatccctgagcaagcagcctcgaaccagaatcaggcctaactaatttaaataattataagtttaaaagaaaacaaaagatataaaggaaacatgtaattgaacgtttttgagtttggctgatcagag

SEQ ID NO: 51896 - DNA, 915 bp, Ricinus communis
  Intron number 1 from transcript 29992.m001413 (locus 29992 .t000008) derived from phytozome v7.0 (chr-ID 29992; pos 1 66377 to 167291)
aagccgatagctacagtagctttagcaacaacaaggtataaactttagtatttccttacctattgggttctgtaatacagaatgttcctttatctttttatgaactaagagtgctttcactttttcaattattttggacgatcattaagctagaaaagtagtggagcgatattaagatttttaattttatcggttagttctttaatctgtatgcctgttttattttttgtctgaacaaagtatcatatgtaggagaacgaattgaagagatggattgatggacgacttattaggttagctgggtccgtatttagcagccaatatgtaaaaattcatggccctggggaaaaatataagatgttctgctagttatataaaaatttcctgacaccattatcgcataatttggtcattttgtaatatcttttaggcatattcttgtttacttaacgagttttacgacaagataaattatcctgctttactttcatgtataatctataatgtatgcatgtgattatttcttgaagcaacttatcaacatcagtccctgcctcagcttgaattccaaccaaagataaaagaaagcgtaaaaactggttttctactgaagcataccagaagttgtacttgcctagtgtagttggaccagaaatttgtattggtttctctgtattgaggaactttaatgtagatttcatatgatggataattaaaggttcaagcatgtttacattttacgtgtaggtatacaacagacagcaacactttagccttccagataattttactactttgatttgcttcaaaaagtggaccttagaatgtttgtgtgagccaaaaatgtattcatgccatctaatctcccttgcaatggcagattttggatttcccagtaggaaagattgcattcac

SEQ ID NO: 51897 - DNA, 897 bp, Ricinus communis
  Intron number 2 from transcript 29822.m003412 (locus 29822 .t000087) derived from phytozome v7.0 (chr-ID 29822; pos 4 51231 to 452127 reverse strand)
gatttgggaggtgcacccttcgggtaaaggtttttatttatttatttattttgtttatttgagtttcatacttgattttatttgcatgagctaaagtgctttatttcttggcaaatattcaaagttaaagtgctttatttcatactgttgttgttgtacatcataaagacgtgattgattaacttcttcaagcttacttgtatttagaatagaaggatttctttgagttatcacctgatcttttccttaccaatgctgcattaaaatggtttagatttgtgctttatgacatggttccgaactgagcagctgcattttctttttcaaggttgcctgaactagtcatcttaaggtctcaaatgccagattggtaactgttgtttaagttcttactcttatactcccttaacatttgttgagacctgttttaattcctgtcaaatttatgatggtttcaactgatatctgagaagattctacataagcttgtaattgtcaattgttttgccttcccaactcattttgtcgtatcttgttccctagaaaattattgaaattctgctctttcatatacctctatgaacctatgaacgagatgtaaattcattcttcccttctcttcttaggaacatccatagatacataacaaacagagaaacattcaaatgaaccatttttctgttttccttaacattcttcaaatagattctcaactgtgtcaatagctttcattcatagcaaattgaaacaactgttatgtctactcactatggcctgattcctgaggcataaaagagaaaagttgtgcctctatttcttatattcatgttaacaaccagattatctagatttgtcatgctattcccatatccatttctattattttgcactgcagga

SEQ ID NO: 51898 - DNA, 430 bp, Ricinus communis
  Intron number 1 from transcript 29822.m003412 (locus 29822 .t000087) derived from phytozome v7.0 (chr-ID 29822; pos 4 52131 to 452560 reverse strand)
tggcttgtttcccagaattcttggggtgtcttgaagtatgtcctatgccttttcttgttatgttctgcttcggttcttttatttacttttggcatctgttggtttagggtctttttgattctttcttggttggattgctgaaacctgaagaagaagctgttttaaggcttagttgagttattgtatttgtttataattaatgatacaaaggaacgattggatcaatcaggaaatttctatttattttattttctcaatttaccatgaaatagtctttagattctttaatcttgaagtctgtggttgatatatgttcttttgtctctgacgagtcattaactaagcttaatactgtttttggtatttgtgaaatttagacttttcctgaattgaagattaatttcatttctaattttgcagtaccatatca

SEQ ID NO: 51899 - DNA, 236 bp, Ricinus communis
  Intron number 2 from transcript 29910.m000944 (locus 29910 .t000035) derived from phytozome v7.0 (chr-ID 29910; pos 4 12171 to 412406)
ttatcattttgagagtgaaatcatcgagcaactcagtcattttttatttcacttcccaaaatccttgaagagaatgattacagcctctacatattgacacttctatttcgtgttctaagacaacatggatacaaaatgccatgtggtaaattttgttaatgccagaaaacaaagagcacgtgatcttaattcaaactcttagaaactaaaacaaatttactgttattatgaatcag

SEQ ID NO: 51900 - DNA, 599 bp, Ricinus communis
  Intron number 1 from transcript 29907.m000629 (locus 29907 .t000008) derived from phytozome v7.0 (chr-ID 29907; pos 1 09920 to 110518 reverse strand)
aggtcagctttttgtctgttgcttctccaaatcaggtatcttttcttagcttgattactgcttcttttacttttatgttgatcatcaagatatatgatgtcagttttcagagtttgttgatccatttctagtgatagggactagatgatgatcaagatttagtctttttttttggttttgttttggctctgttctcttcttcttgcttgctttattttatctttttgctgcttttgcttttataagttctttagatctttacctttcttttcttttcttttctttttctttaacttttctttttctctttttattgtgttctttttctattctgggtcccgatttatgttcttaattgcttagtctatctaaattttgaaattttcagagacggtttgacttgggtattgtccttttttcttgttccaaatagtataactgattgatttttaggatttaatattgtttgtatttatgtgggtgtacaccaagattcatatttttttgggtcaggattcacatccttggatgtgaagctgttctataattaatatacttttgtgggttgtgtttgagctgtccttttacagcagggaacg

SEQ ID NO: 51901 - DNA, 224 bp, Ricinus communis
  Intron number 1 from transcript 29915.m000483 (locus 29915 .t000019) derived from phytozome v7.0 (chr-ID 29915; pos 1 86067 to 186290 reverse strand)
gttttgtatctcaaatttgggtggacattgcttctgtaagttgcttcaaatcaatgaaaaatcctttttcttttcttgttcataattttttgagaagggaagttcttatgtatgaagaatgtgttcactcaaattgggaaacttcgaaaactgactcttataaatgatttggagttacctgtgaaatttgtgacttaatttggtttttgtttaatgttcagtgg

SEQ ID NO: 51902 - DNA, 492 bp, Ricinus communis
  Intron number 1 from transcript 29933.m001408 (locus 29933 .t000030) derived from phytozome v7.0 (chr-ID 29933; pos 1 74163 to 174654 reverse strand)
ttggaggggaattagaagctggtcacagtaagtttttattcctcttctaatactcgttttctttttgagtttttgaggatttagctgaagcttagtttacttgggagcttttcttggcctaattgcttgtgaggaagaatgcaggggaatttagaggaagcctaatttgattgttctagttgatttagtgtcttgatattgtaaataaaggtaattatgctcaattgcatggaaaatttacgctttgggtattatttaatagacatttttaatcgaaagctcaatctttgttccttcgtaatttgaaaagttttctcggaagatgaacaggtctttagtatattgacacccacttttcattcttattctatttgctgttctcgggtatggtgtcatattcatctgcttgtggaatttcaatcatataatcggttcttttttgtttcgtgagtttcagcaatttctggtttaggagttgcaattgccgtagtt

SEQ ID NO: 51903 - DNA, 953 bp, Ricinus communis
  Intron number 3 from transcript 29895.m000308 (locus 29895 .t000002) derived from phytozome v7.0 (chr-ID 29895; pos 1 9383 to 20335 reverse strand)
ggcttttctcgttgtcgtcagttacctcaccaacggtatgtattacgtttctgccttcatcagcagcatcttcttccactttttcccactctgttcttagtgattgaccactcagtggcactatttgattaactgaaaggctgcgtgatctaaataattcatcaatttttagtgattggcgcttgatcgattttaaggagcagtacttttagttgaattgagatgatataaattgtgccgctaaacaaatcaaaggtcttcagtctgattagtagctcaggagacttatcaaggatatggattaaacctgcagaattttaacattgaaatagctagtatctttctgggattcagtgtttaagctattcgttccttggcaatgttcaatggagcttgccaaccgctgacctcagcactggctgagacgatgggcccaaagttaaagcaaaattgccaatcgatgtcgagtatattagcactagaatgcaccaaagcttttattttatgtgaattgattctgtccaattatgataatcgctgtttataattgcagaaatagcatataatttcggggctaaaaactagtagacagctcgtgtcagcagcgactgtggttatttcttgttatgtttgtggcgtgaaatgcttctcgtcgattatgcttaatatgattagattagaagaagaaaagatagttctccattgaagcgctgatatcagccgtttgtggctttttttttttccttttcctgccatgtcattttgtttatgctgttttattatcttctaccactagtaaatctaaatctaaatggccatgataatgctgactgtgatatgcacaagttgttgagatatctgttcagatcttcagacttaagaagacttctttattcactctgctttcttaatcttcaggcggaagaacttggacttgtacgtgacggtaagcc

SEQ ID NO: 51904 - DNA, 669 bp, Ricinus communis
  Intron number 1 from transcript 29929.m004574 (locus 29929 .t000077) derived from phytozome v7.0 (chr-ID 29929; pos 4 76250 to 476918 reverse strand)
aggtataatctctctttctctttgtttatctacacagatcaattattgcgttttcgattttctccttttttttatcttctaatcttttgatatgtttctttgaaacgcgatttttcttttttctccttttatctacacagatctgtttctttgaaatgcgattttcttccatagatcccgttttctttttttatttgtggttttggtcgatgatttattcttttttcgatcttctaactttagctatatgtttatcctcgtgtttttattactcttcttttttattttgtagttaatgattttcttttaattttgatttgcttgtcggtttttgttttgtttgttggttagggtgttttgagcatagtgaacaaatcttgaaattttttattcttgattgaatcttgctgaagtgattatggatttagtgttgtgggtttattctttgagttaatctagttaattgtgtaggagatatatgtatattgcttcatgcgatggtaatcttgtattttgtgtttgatcatctcgtaatcaatacatttataacgattgttgttttgttgttagattgaaattatgtaaaaaaaaaatgatattattattgattggttttcttttatttcatttgcagctcaaaggagagacccactctcgggtaggtgttgc

SEQ ID NO: 51905 - DNA, 708 bp, Ricinus communis
  Intron number 1 from transcript 30138.m004028 (locus 30138 .t000202) derived from phytozome v7.0 (chr-ID 30138; pos 1 393932 to 1394639 reverse strand)
tgttgtgttgttcatattcttaatcttgattgcaggtacttacctaactttgttcgagattagctttagttgttttcttcaaagtactcttcaagtttaatgattaccatatccattttgaacttggtttttgcattcaggtttaggtctgcttttcctttgtatttatttatgttgtaacatgaaatacacatgcatacatatagactgttgtttttagagattctggattttataattaatgtcttttgcagctttcaagaatagattctttttatacaaagttttcattttaaaatctcatattcccaaactgggtcttcttacattgggatatggaagaatcttattctcgtgtttttggaagaagaagaagaaaataaaagagaataacaccactcccatatatattaattgctttgtttgctggagctgttcacttgttttcatgttttttttttaatacttccgtttcattaataccactttctttgtttttctctgtcttcttgctactgctgtttgcaaattccaaggacacattcagtttacaagaatttcattttagaatctcaaattcccagaaagctcatggcaattttatttgcttactgctccttatccaacatacattctattaactagaatctttatttttgttaatccattgcaggtgtagtagttgctggagattctctagatacggac

SEQ ID NO: 51906 - DNA, 662 bp, Ricinus communis
  Intron number 1 from transcript 29841.m002876 (locus 29841 .t000140) derived from phytozome v7.0 (chr-ID 29841; pos 8 59068 to 859729 reverse strand)
ttagaaaaattatcaggtgacttcttaggtgcctttttttaatttgtgggctgtgtagttgttcttgtatctgacttacatctgtgtctgtggtttagtttctagtggtggtttttatctcaatttcttggttcatctttttgcattttcttaaatctactttttggtgtattgagtccttttgttttttctttgaataattaattataggtattgaaggtcaattgatgaatttctggtctaggtcttagacttttcgtgtttgttctaggatttctttcaaaaagcttctaatagggttggttctatctcattttttatcaggagtatttatttctatcaactagtgaaattgggttttgtaaggcaatatttttatgctttttttaaaagcatgtttatcgtgttaactccatatggtatctgctgaagaagttggtatttttagatgaaattattttgaagtgtgatatatgcggtgactatgcttgtgaagtaaatgtagacatagcttttctattctttcccccttttttgggtaggatctatttgaaaaatcaaattgctttagttttttagaagtccataaagatgaagaaattatgattttattttactgaactggttgtggtatgattttttattttgttttaacagagacc

SEQ ID NO: 51907 - DNA, 753 bp, Ricinus communis
  Intron number 2 from transcript 29989.m000412 (locus 29989 .t000005) derived from phytozome v7.0 (chr-ID 29989; pos 2 9930 to 30682 reverse strand)
cataaaccctgacaaattcaagcttattgtaagtacatagttttagccctttttttatttttggcttttttaactctcttttttctgaaaaaaaaaagaagaagaagatgtttatttgatgttaaggataacaaaatattatggaggttacacatatgtccatcaatttttttgcagatcttttatgttattttacaattaaacttgaaaaaacaaaacatgtaaactgctttcaggcaaatcatgtgaaggtatgactcaaaagtttagttgaacttaaaaaaaagcagtttcttttttatattaaatggaagatgtattctttaaatggacagatgaatatttcctattatagagttattcttaattagatgtggatcttagcaaggaattaacttaacaaatagaagaattgtatctattattagagctcaaggttgaggggctatttctaattacggtattaataataatgtaatatttgagattgatagataatctaatcgtacggaagagattaaaagattatattattttatatattatatatgcacgttaattgcgaaaaagatctccagaatgtaatgggttagtactatatatgtgtgcacgaattgccagaaagattttgaggataatgtaaattgatcaacggatttatttatgagtatttgaattattaagaatatattgatttaatacaaacggaattaggcaggaagaaaggggctatcagcagaagagacccttagg

SEQ ID NO: 51908 - DNA, 991 bp, Ricinus communis
  Intron number 2 from transcript 30099.m001626 (locus 30099 .t000005) derived from phytozome v7.0 (chr-ID 30099; pos 1 8478 to 19468)
aacagtctggaaatcctagtggccatgtgagtgatcatatttaaagttctctctttcttgaatttctcttttttgaaaattttgcattttggtttccttttacttttttttttgttggtttttcctagagggcgtgttactgatcatagtccaaagttgcctctttgttattcttaatcaaattttgcatgtttggtgcttaggagtgggttttgttcaattgcttagactttggtttggtgtagtgaaattgttagacagcagcttttcaaactaaagttaactgaaagtggaagagcgaggcactagcttttatgataaaggcctctatttccttcgttctaattcttgtttctaagctgaattctgtttttcctgatgtcgctctgtgatgatggtcattgagaaggtttgctcttttgcatgtttttgctgttggtatttgaaagcaatagaatgaatgaatccatttgtattcttttagaagctgtaggggaactggccctgtcaaattgaatgaagaagtcttctttcaattagaaagtgtctactaataatacgttaccatctcactggtggtgatacagaagacttggacaatagttgccatgccatgcgttgtcaggctgagttaagtgtggaatctgcactgatcagtggaattctgtactgaccagaaagtcctaatatttttcaacgagtttaaaagtctaggtacctgttaagttacaactgagcctatgactacatgcctagttgttatcacatgtagaaggtgatgtcaaatgaaaattagtttaatatatgataatctaacttatttggaaataattggatcatgcaatttcttccttgcaaacaactcttttatatctccatgcattttcttgctacctctataattgttttttaatgattgaaagataatttactatgacttgtactaggttatcatgttattaactcatattgcagccagttgtctttcttc

SEQ ID NO: 51909 - DNA, 534 bp, Ricinus communis
  Intron number 3 from transcript 29908.m006218 (locus 29908 .t000269) derived from phytozome v7.0 (chr-ID 29908; pos 6 53081 to 653614)
tggaggtatgtataagttttaagttgttctaagtgacgtactgctgtttcatgtttgcttttgactgcaattacatctgattccctagcattgaaggtgtggattccgtcttataaaggtttttaagtaacggtatcatgaaccgcatcttatcataactgtatcagactgaaacagccaccactactatggatttttatgtacaattccgattaaatgagtaaatcggaatgtatcaacgtaatgagttctattatgctctcaacctcaagaagcataagaggcatgattttgatatactattatgatcttttcatgtgcatgtacttatgcaaaagttcaaatatgataataaaatggatcatactagattttcctacatgaaatctgagattgagacgagcttcaggcaataaaaagaaaagtcgcaaattgaaatgctttggttgtcttcaactatgtacaacctcaagaagctaagttcgatgtatcaaatatcataatatcaagctattttaaaaaattcgcagggcc

SEQ ID NO: 51910 - DNA, 841 bp, Ricinus communis
  Intron number 1 from transcript 29990.m000509 (locus 29990 .t000013) derived from phytozome v7.0 (chr-ID 29990; pos 1 58416 to 159256)
tcacaagagaaatcaagctcaaggtcgagatcgtgtgtgtatcttatcctttctacaaacgctccattaaaacctatgttggtgctaccagtaatttctctcgccggtgcgttctatctttcatctttttttgctttttttgtcattttattaaactcgatgcaattgctgaactgggtagttatttaaatgatctgattgctcttagaaatgggtgaataataatcatgtcttgaatgttggaattggaaatatgagtacttcactttttaactttatcttttattgatggatgcttgaaaccgctaattgaaattgtatgttacttctgttgtataagtttagatataattgtttgctaatctcctgctaatttactgatgtagaggtaatttaatttgtgtacaaaaaatgggggatcagtaattttgtggcatcaaaaacttactacttgaggagttaatgaagaagtgtctaaaattaatggtaagatttaaagtattatcacagcaatttttgcacattacgatgctaattagagtccttttggggtctgcaagcttaacagacatgggtattattgataaatatattggtattcttaggcctaagacttgaaagtactttattttgtgaaattaccgaagagtaggactgtcacaattcacatttccctgaatcatgaaattgtaactggtgatgactaaggtaaccagaatttagtgggactgctggagttgtagtttgggatctcgaggctgcaagtccaagacctaagaatgcaatctgaaagtaattattttttaactgaattggcacttctgcagcttgaaacaacata

SEQ ID NO: 51911 - DNA, 602 bp, Ricinus communis
  Intron number 1 from transcript 30068.m002665 (locus 30068 .t000155) derived from phytozome v7.0 (chr-ID 30068; pos 1 008717 to 1009318 reverse strand)
gtagagctggccatagacgttcccaaagtgcactcgtaagactctttaatttgtctcttctccttgtattttcaagaaagtcaataagtttctaatcttttgctctctctttttttttctgttttattcaactgattctcttttttttttttttttatctccaatagtgtctaattttagaaggagtagttttcttgagcggttttatttgtctttgtagaccgttaatatattttgtctagctggatttgatttgatcttgaattatgatgactttctaaagttttgatcttgcttattctgaaacttatttgattctgtactgaaacatttctattctgttccaagggctttctctggattgcctggtcttaaacaccacttattttttccaaataacttttattgatatcaaggattagaagttcattacctgtcgttttctttgactcccattaatcttggcctgcaataatcatagccttgcatggactccaaatcatgtggactgatttgtagctaatttctcttttcaattcattgaatttttgttgttattatgtggaagtgtttgcttaatgagtggctttacacggtacagg

SEQ ID NO: 51912 - DNA, 596 bp, Ricinus communis
  Intron number 1 from transcript 29929.m004553 (locus 29929 .t000056) derived from phytozome v7.0 (chr-ID 29929; pos 3 23078 to 323673)
gatagaagaaggttagtatatttctaaatttatttttaaaagttcatgtttcttcctaatgaatttcattcactcttttagttttatatttgctatctattcgatttttacactatcaacagtctgttattgtatgagttttatttatagatttaatatctttcgtatataataaattacgagaaatgttattgcctaaaattattgacttctcgttagggataaaatacttttaggtgtggtaatatcaatcccttaagttaattttttttcttttctgttaatgtcttgtttgatataatttgaattttgcttatcgtttatttattaattttaaaaaatagttattctcaaaaaagaaaaataaaaagaagaagaaggaatagtttcttttttttttttttaatttacaaaatttcactttcattagtcattttttaattatagacagtggagacttcattttgaattatcttgtagcatgaaacagttccatggcaaatgttagcatagtaaggactgtgaaatgaagtttttgtaattgttgccaatatgattcacaaatgacaggataagagcaggcattgatattcctg

SEQ ID NO: 51913 - DNA, 661 bp, Ricinus communis
  Intron number 1 from transcript 30068.m002603 (locus 30068 .t000093) derived from phytozome v7.0 (chr-ID 30068; pos 5 98546 to 599206)
attcaggtcacgttgacattgccaggagactgctggtatggattctgttccatttgttattgtgaagtatgtcgttgtctatacacctaaccttccatagacaattaagctaagtgtctgatcattgcccaatcttcaatatactgcgggtacgtgttaattaacacttgtttgttgggtgtatacaccctgtgcacccgttactgtgatcatgtcgcattatttactattgttgccaagtaaatcaaattattggcatattggagttgtagttaacttggaactttcctaatacccttttcttgtatgttatttagttttgtgtttcttagcactgggtcttattacgaatgaattcaattgcaatggactgatttttttttttttgttgtttagccattcaacatatgacactttgcttgtttttttgtttctgttgcattatgatttagcctctcatagctgttatctaccagcttcctcatccaattaattgtacaaatttcaattactaaatgcatgactttgtatatctagcttaatgtcataatttgccagcctgcactatcactaaatagtttaggttgcctctaatgagatatatgatcaattactaatgtcagtcactgtattcttccaagtttacagtctgccggagctg

SEQ ID NO: 51914 - DNA, 498 bp, Ricinus communis
  Intron number 1 from transcript 29933.m001419 (locus 29933 .t000041) derived from phytozome v7.0 (chr-ID 29933; pos 2 48813 to 249310)
tcaagcgatctggcaaggtacttttttttttcctgatgaatatattaattatccgtttctaaatattttcttcattttggttgattattgatgtgctgtatagtgtgtccagaatctgtttgtaattggtttaaatttcaaccagtgtatatgatttggagctggatttaaagtcaaaacatattttctaaaagtgtgaacttgatttgttgattttatgactattgctttgagggttattacggattttaaaagagtagacattgttgtgactatgagaaggcggtagcaaagtggaatatgaataaatattgtacattttatctaccatgtaactttttttttgaggtttggagcaggaatgaactgatagatagagaagcaaatgagtatcttttagagtttgagagaaaaattgtaattcttgaatgctcctcaaaagtattttgtaaaatttcatatctatgatggcctttctatagtacaactcaattgctg

SEQ ID NO: 51915 - DNA, 815 bp, Ricinus communis
  Intron number 2 from transcript 30068.m002660 (locus 30068 .t000150) derived from phytozome v7.0 (chr-ID 30068; pos 9 64266 to 965080 reverse strand)
cagtaaattattatacttgaaattcatccttcttgtgcatatgttcatgtgtgttttgagtaatattaaatttcttaaactgcatggtaaaatgtgatagattgcactatgttggatattttaacttatgttttgactctatcaactggctttgtcttttccccttatctgcctttacgaaattacagatacatgtcttcttttagtcatcaattgtttgttttttaaggtgtttgttatctagtcattagaacaataaaaaataatatcaacatctgatgcagatgacaaagaaactcaagaaaaaacaaagtttatagaatcaatagaattatggtctagatttcatatagagcttatctgggatatgttttctagagttttatttatagcggcagtttcagtgttttacaattttaagattaaggtgtaattttataatttttaaattttctggaaaagtgatccacatatctttaggagttctaatttttattttaaagtcttatttgcatctagctttttttggagtccgttaggcctagtatcgggttccaatatgttaggggtttaggatcagtttggctatatagaatccattatgctaacaaccttttctaatagcaggccccttatttacttaaatattctttttagatatcgtcctcgaaggactagatttttgttcatctagaatattggcttaggacctagtgttaggtctttcatttttaaatctttctgggaattttcttatcatgaagtttataatattcacagggttgcttttcaggttttgcaaagtggaattccaa

SEQ ID NO: 51916 - DNA, 464 bp, Ricinus communis
  Intron number 1 from transcript 30073.m002232 (locus 30073 .t000042) derived from phytozome v7.0 (chr-ID 30073; pos 2 87011 to 287474 reverse strand)
ttggacgaggagaaattcaaagaaactgttcataagtaagtttatcttgccttctgttgtttctatcaattccatggttctccttggatgctgagaaaactaggcgagactaaaagaaattaaatgctgacatttttgagattaatgcaagagtttgtgacgttggttaattttgtattatacttaattggcatagggtttgctttcttgattatacttaaatgaaaaattacttaattttgaaagctgaaattggatttttgctatttaaagttggataagaagtcacatcatatcaattcatggaactatagttttggttctagcttccaagttctctcagcttccatatggagcataaagaattgactcagatagatagctgattctttgattttgatattctctctgttaccatttactgtactttaaggttagagcaagagtctggctttttcttcaat

SEQ ID NO: 51917 - DNA, 352 bp, Ricinus communis
  Intron number 2 from transcript 30098.m001747 (locus 30098 .t000042) derived from phytozome v7.0 (chr-ID 30098; pos 1 431584 to 1431935)
taaagggattttatcatccctcttttctgctccaggtaccttcagttttctttttgtttttcttagatgctaatttataatatgtgagggagtagtttacaatgtgcatggcatgccaatttcgatatataatcgtttactaagtgaaaaacttagtgagctcctcaatttgtgtttattttcaataatagtatgttatacaattcgtttacttgattatattatttcacgttggccgttaaacagtcatttcttgatggctatatggtgtataagcttgtatgtgcaattgttcttttgattaattgttccccctcttttctgtcttcttcttaataccgttaataggtat

SEQ ID NO: 51918 - DNA, 769 bp, Ricinus communis
  Intron number 1 from transcript 29904.m002933 (locus 29904 .t000047) derived from phytozome v7.0 (chr-ID 29904; pos 3 20003 to 320771)
actctgtttggatttcttggattacaggttctcttcatatttttttatcttttatcttttcattgttgttgttttcggttgatttgataattaagatttccttttctttcctgtggaagataaggtaagtgtatcagttgatttagctttcctttctttggtgtttgcttatgcaatagaaagtgccaagattagtaaatatattcaagagtttctgtcaataagttggtgacatagttgttgttgtcatttcagaagattatgcttccttgctttttcttgcaccaaattagaacatgttgaaggatggtgcaaatgagtgaatttttcagtaaaatccaacctcagttgacaagttttgattttcgagattttgaaactggattgatattgcacttgtgaatttcaaatagctcccaaaaggtcattatccagttatagtcctcaggcattgatgtgcattatttgcaattatttttgtgcacttcttgtcgatgaatattaatggaggagttatctagtggcatgaaatgaattatgggtttcaccaactttaaaaaactaattctttataacgttgaattagtattttctaagagcttaactcgttgaattcatttactatatttgcatttgaatgaatgagaaaattgattgttgcaaattcatgaagaacaggtagttattcgtctggattggactgttaatgaatgtcgcttgggttcaatttacaggtgattatcaaattggggacaatataaaaccttta

SEQ ID NO: 51919 - DNA, 574 bp, Ricinus communis
  Intron number 1 from transcript 29942.m000751 (locus 29942 .t000024) derived from phytozome v7.0 (chr-ID 29942; pos 3 92174 to 392747 reverse strand)
tttgaacaactctaataatcaaaataatagcaacagtgacacaacacacgaatagacaattagtatatttaattttataaataaattaaattatatacatcaatttattaagagaaatatatacttaaaaatagtcaaatcacaaacacatttctttataatttctcttttttttttcttggatctcttttgtcacacttattaacacatataaaaaaaataaaaactttttatttagtttttttatttttcagtttgaattcttaacttttattttatttgataaaattttattttgattattatatatatcacaaatttattacacatattttataaaaattttatttgttatgttgagttcatattgaaataaaataataaaataaaagttgaagggtttaataaaataaaactgaagggttgaaggccttaaaagtatatttgcccaaaagagaaaacagtacaaacatacgatacgatacactactcatcttcatgtcatttttgccctctttcttttatttcttcttttctagggtttcaccaaaatctccttcaactcaaatctcca

SEQ ID NO: 51920 - DNA, 675 bp, Ricinus communis
  Intron number 3 from transcript 29933.m001438 (locus 29933 .t000060) derived from phytozome v7.0 (chr-ID 29933; pos 3 24345 to 325019)
tgctgattttggagttcaggcacttgtcagcttaggttttttttttttgttgtattgtttattttttaatcttatgttaatttaaatttcattcttgcttgaaattttgctgaatgttaatgcattttctgctgccgatgtttaaaaagtgccaaattgtgtataaggcattgtttgattcttttggactaaatcatttgatatcttgcaaaatgaagtcatttgctgcaaaatgccttatttgatatctagaaactgtgagaattgactaaatagaatttaattcaatgaaattatggcattcttagtatagcagtgtttggaaaaagatcatgtacaagagttcaattgaattgaattcttgcaaaatcatgtcagttttggcatgatttaatatctttcaagatgccttactttcttttccagttgaaagaattaaattctaccaactgtgagtaatggactttcaaaacataaaaatgacatcatagaattggattaaattgaatagaattcttgcttcttttagatttataaacaaggggcatgtgaatttttcaggatgcctttggattgttaattttcttgccatttctgggaccaaaagttcttggtttttctctctttattttttggacagaactgggtaaggtgttcccttctattcccttggtg

SEQ ID NO: 51921 - DNA, 692 bp, Ricinus communis
  Intron number 1 from transcript 30128.m008645 (locus 30128 .t000106) derived from phytozome v7.0 (chr-ID 30128; pos 2 83819 to 284510)
ccattttaaaggttagagttcgaattctcactcatccgtatgttattaagtgtacaatgagctaatttcggatttttgttgcttattgttttccttttgtttgtttgattaaaaaaaaagcggtaatattagtatatgtttgtggatattcgtatgattgaatttgttgaatttgaaaggaactagtgataagaactaactaagctgaccttaaaatagtgattatagtatctatctgaaactatggaagttaacatgtttacgtccagaaatggaaagtagaagagtgaaaaacttggagtatcgttgttagtctgttcttctaaaaatcgactctggtttatttaaataggtctgtaagactgctgcgtggggtgtttttttttcttctcttttttcttcttttcattagtgtgcatcaaaagttatacaatttagattctgatacatttgctatttccttaaattctccaaggtcaaatggagcttcaattaagttttactttctggaagaatccaagttgatactatattcagtatcgctattgttttaggcagtccaaaattgcggtgcatcatgatcttttttaaaagacaatgtccattattgatggctgttgatatggcagctgaaattgggattttctatttctgggcttgttttttgcagcttcgttcactatcaagtccta

SEQ ID NO: 51922 - DNA, 932 bp, Ricinus communis
  Intron number 2 from transcript 30128.m008645 (locus 30128 .t000106) derived from phytozome v7.0 (chr-ID 30128; pos 2 84640 to 285571)
cagctttgaaggagatactctccacattaaaagatgtaagttattatttttacttggcatgtgagattatgcacttgtactccgtattgaatttagtaaatggaaatgaaacttgtgttgcactcagtgcattgacaaaaaatgatcctgataaacaaacaccggcagttgtgcatttcattatgagaatgattaactagaaatttctcgtattaccaatactgataattaaagacaaaagtattgtagaaaaggtgtcaagacttgtaattttgttttgaaatgctccacttatttccagtaagtttggtaacatatagcttcttccatagctcgtcctatacatcccacttacaacaatttaattagttgttttggttggaaataaaataatgtgatgcattgttttctaaaatcaatactttttatgagttgacctttccttctcccagttcctacatgatgtgtgctttcagatttttttttggtactcagttatccggctttattacagatccatcacaggaccttttagtcctatatgcaatcagttttgattttccccttatgcgcatcccaattctttctaccatcaacagttatgtgtggtcaaacatatttttcttttaaatattatgtttgcgatttgcatgatctcttatccctttcaaatatccagtgggataaaattttcatgttactacatgctaactacatatggagacaaatttatactgcaatttctccttagtttgaatagtgctgggaagcactaattattataagttagattggacatttttggtgatttagtgggattcttctttttctgcggaaaaaatcgcacccaattatggttgctttgttcgttttatgatgagcaattagatactttaaaagattcttatgcatcattctctcttccatgcagc

SEQ ID NO: 51923 - DNA, 897 bp, Ricinus communis
  Intron number 2 from transcript 29848.m004630 (locus 29848 .t000186) derived from phytozome v7.0 (chr-ID 29848; pos 1 050365 to 1051261 reverse strand)
gggtgagcttttctcttgtactgtttccatgtttatgttcttacttttagtagatatagatgcgctttctgtttggttgccaagaaaaaacactttgtttttgcctctgatgttctgctttgcttgcttgaggtttccggatgaccaaaatagaggggtttattgtatagtccaagtttacttttttatttggtctggaatcttatttatttgtgtttgcttattctgtaagcgagcttgagtggtgtgactagagaaacaagctgtggcttttatgctgtatttgtcattctttccttgaactgtaggtcaatctggtaggcaacagatagggttattccttggcatagattctgtaagaactacgtattcttggtgttgtttttctccacaaacagagagatgctttgaagagaaactctgctgttcattggtttttttttctggtgcttgttttcgggctctcatgtttgctgccatggaatcattgaagggcaagtgcaaagctttcttcagtgtgaggattttctttttcttttttttttttcttttaacattggcttgttttctgagtataagttgaaataggagtgatgttttggtttttgtttgagattaaaacaccatttaccaacaacactgtggcctgattttaattgaactttctctcccgggtggattttgagaaattagtctatagatatggtttatgagattgaggcatggtggatgagaataacaattttattcttgcacatattttcattatagctgatttgacatttttgtatttattttctgaaacttaaatcgaggttaatttaattagttggtgctttgatgctaatcattttttgtggtgaaacctcatttgtaacagagcagaggttgttttgg

SEQ ID NO: 51924 - DNA, 435 bp, Ricinus communis
  Intron number 1 from transcript 30138.m004048 (locus 30138 .t000222) derived from phytozome v7.0 (chr-ID 30138; pos 1 514088 to 1514522)
catctctggtgctctcacaggattttttgctcttggtaatttgtttcccattttggcttcctttttattgcatcattcttaattatcaatatttcaaggtttaatcttgaaaggttgagtttcttttaatgtatttctacatttgggtagttgtaaaaagaaaaaaagaaagatttaatctgttgaagtattttacttatatttgcgtttgagtttttgaaagaaaaaaagaagaaagaagaaagattgaatctttttatcagtatttaggtaattcttgcatatgcatagctgaaaaaaggctggtttttggagaagaaactcaatatctataaccctttatgggttggaactgattgcctgatatacgatgttttgtatgcatgtatgcctgttgcagctggagcttttacaggagctattgctggtgcttta

SEQ ID NO: 51925 - DNA, 955 bp, Ricinus communis
  Intron number 3 from transcript 30138.m004048 (locus 30138 .t000222) derived from phytozome v7.0 (chr-ID 30138; pos 1 514799 to 1515753)
tttcaccagcagtgctaactacttatcattggcaggtattcattttattttatgttaccattgtaattagtggggattttcttttttctcaatggcgtcagcatgttttcttgaatatgtactgctttttggtcaagagagtatatatgaatggaaacctcactcctattgtctcagagtatttaaacctagtattgtaagatcaatgaaaaattcaaaaatcccgagtcatttaacatactgttaaaatgacttttaggtgtactaattttgctctttattttcctcaagttccttgcactatttcatctaatttctgcttttggtattaggataaactaggtacaagaagcttttatgatttattctgttataagctaaaagtgcaatctagtatctttatcagtgaaagtatagttctttgttgatagatgaagacggttcgttttcatttactatcctttatttcttatttgggttatgggagtagtcatcacaccttattgatctcagtatacatattggcatgaatagagtaagatgtttagacatccctgataatcaattcgtgtaatgtaattttcaagatcttactaaaaatttaaacttttatcgtccttctgtattgtcaaatctttgattcagaattatgaacatcttattctctaagttgaagtagttatgctgccatgcccatctagggtttcttattggtgcaggacttagttttcatcttgtatatttatctaacataatgatgttttttaaaaatatattctctgaaaattcttttgatacttattcatcacaaagcacataaaggttgggctgtgcaatttatcttgttcatttctttttggagaactgaattgtaactaattgaagcttagcctttatatcggaatcacaagtcaacttacactggatgagcaggtaagcattgctaatttaagtt

SEQ ID NO: 51926 - DNA, 332 bp, Ricinus communis
  Intron number 1 from transcript 29842.m003704 (locus 29842 .t000201) derived from phytozome v7.0 (chr-ID 29842; pos 1 018384 to 1018715)
tcaccatcctcagattggagctgccaaaccttactgtaagtactcttttttcgttttttaatcaagattcaagattaagctcttatattcaatactttttttttctaaaaaggtattttcttttcccaattatagtttaaataaaagcttcaacttcaagttagaagaaagaataactaattaatgactttgcttatggttttctttagaaaaggaactcaatatgatcattttttttttcctttctttgcatcaagtggcaaaagttcttttcttatcttttttcttttttcatattaaacagatttgattttctttttgcagccgaggaa

SEQ ID NO: 51927 - DNA, 402 bp, Ricinus communis
  Intron number 1 from transcript 30128.m008621 (locus 30128 .t000082) derived from phytozome v7.0 (chr-ID 30128; pos 1 43112 to 143513)
tcactcctgctcaatcctccttcaaatctcattttgtaatgtttcctctcccactctttctttatggatgtttcttattgctttttctttttctgtattcttgattttcttgcaagtagttcttttatttctcctttgaatcgttttctttaccaaacatgtgtgatttttcatattcgttgcactggaaatgaagaattagtacccagatgatgttgtctttaataataaaagatttaaaaggaaaatgaagattgccgaatcacttgatccaactgatcataaaattttaactgagcaggataacttcaaatctatggatcagaagctgaatttaattagactgcttaactgatatgtagtggctggcatttgcagaactatagaggatttggaattccg

SEQ ID NO: 51928 - DNA, 797 bp, Ricinus communis
  Intron number 1 from transcript 30147.m013883 (locus 30147 .t000154) derived from phytozome v7.0 (chr-ID 30147; pos 3 098163 to 3098959)
tccagaaccttctactactaactccaccaataaaggttttctatctcttctcacatccgttttttgaaaatactatgatcttggagttcttttaagtgtttgtttatgttgtaaaaagttattattcaagaaactgaaaaaaggatcattatgtcgtcgattaattatgtctctaaactgctaattgtagtgttatttctttgtcttttgtgaagcttattgagttgccggttttactatataatataatgagaattatcatgtggtttatagttgtctaaggttctataaaataatcatcgagatttgagtttgtagagtcggtgggtcttttcgtacttgaactacttaccactaactcactcaagtttgtattcatgatgtgatataaccctaaatgatgaccttataatgcttcattagaaataagaacttagagattgtctttactcctgttttatggtttttttttttgtttctgctttactctattttcttgtttctttttatggaaaatttgatgtcaacctaactgcattcaatttattattatcaagagaagatatttatttgcttgtgtctttgtaactttatagtccaaatttgaggtcaaacgaagtaacatttttaattttcttgcaatgtaatctgagaaaatatccatccttcatttcatttgaaagtttgacaaacatatgcagctaactccatccgccgcggagttaaaagagttaaattgcaatgcttttcactctgattgatcctctttgttgcgttaatcagcaggcatcccagtc

SEQ ID NO: 51929 - DNA, 664 bp, Ricinus communis
  Intron number 1 from transcript 30022.m000382 (locus 30022 .t000004) derived from phytozome v7.0 (chr-ID 30022; pos 2 10133 to 210796 reverse strand)
attttctcctcagcaatctacacaactttatcaaggttcatacattttcatctttccctctcaagctatttgagtgtgtattttttgccttttgaggttattgcgagccctttctttcggaaaagaaaaatttaaggtgttgaagaaacagcttaaaatcagacctcaacttaacatgacatattatatttataatttttttacttttaagtttaaattagatagtcaagattttattaaagtttatattaattttttaaaaaaaatttagataataaaatcttaatcaataattttaaatttagtcgtcacaaatatatatttatatataacctataatattaacaacatgaaaaaatattaagcctaaaataatcatcatactctgaaactgtaatatgtttatttcagatatcttgaattatttaataagtgataactatctttttacatttttgtataaaagattactcacttgaatttaaaagttctatttgtgaagagtaaatattctcagcactttaaaagtgctcttaatatagaatgtaaaattgtttttagcaaatctgtgaggaaaaagaaaactctaaaatgcattccttacatgtttcttattctttttttggctaatgttcctgaaaattaaaattatttcacaggaatt

SEQ ID NO: 51930 - DNA, 609 bp, Ricinus communis
  Intron number 1 from transcript 29901.m000413 (locus 29901 .t000009) derived from phytozome v7.0 (chr-ID 29901; pos 1 46997 to 147605 reverse strand)
gatcggtaaagatcaaatttttatttatttatttgttttttatttcgtttgaagatgggctaattttagatttgtatgtaggagattggtttacattttgaaatgtgttttgggtttctttagttaataaattggtaaagcttggatctttctgagacctattatggtagctttgaagggctgtttttgtttaccaattttgctagtaaaaagatgatttcttttactctatattaggtcagaattgattttttatgctgattttctttatcattatagctttatgctttgtggtggactgggaatttaatgagaagttgccctatagtatgtttgcgagttttgtgtggtagtttcagcttttctttgttctctatttcattttaccatttcagggaagctcttgtgtaatgtcgatgtttcttttgtttaatgctttttgtataaaggatgtcaatttgctgtttcattttgtaatcctgtgaccggatttttgtttcccttctttcagcataaacttgaatagattttgagactcttcaacaacacatttttgataaatttaacatcctgtttcataggagcttgtgacaccttcggcagaagcaa

SEQ ID NO: 51931 - DNA, 481 bp, Ricinus communis
  Intron number 1 from transcript 29841.m002771 (locus 29841 .t000035) derived from phytozome v7.0 (chr-ID 29841; pos 2 71504 to 271984)
aggtattaagaaaaaacaaagaaaaattgcataactcttctggaaatttatattcggtttaagaaaaaatgagatatgggactttggtttcagtttttgttgtttgaatatgcggatcatgcgagaaattagctcgattgagttaaattgttggcttaaaagatattgggtgggattttaactctgttgttgatataaataagaagtaattatagtagaaacagagagaatgaggaagtgttttttgataaattttattctgctcgctctggttctttatgctttagcaacttttatttgtgaaatcagtaagaactatataattcaagttgatagatttcgaagtcagaaatatgctaattattgccttaaaattaaagttaaattatcggcgttgcatgaaatttctgggcagattatgacataagttggtatttgcatgacataaagttggtttttcttataatttgatttgcagatt

SEQ ID NO: 51932 - DNA, 432 bp, Ricinus communis
  Intron number 2 from transcript 29999.m000205 (locus 29999 .t000002) derived from phytozome v7.0 (chr-ID 29999; pos 3 3165 to 33596)
tgtcttctgagggacccatacagcctgcagtgctggtaatctttttattatatttaagtcacctggtattacttcaaatttaaatgaggcaaaggcttatatagtatgtgcttgtttgaatcttaaggccaacagaagacgccctttacagacaaatatagaaaatggtctaatgtaaattaacgctcatttggcattgatctgggaatcctgcaccattcatttgaactctaatggtgtgctccaactgatatcttgttatgtcattagtctttgcgaagaagtgagaataagatagttttttgtttgattatcctgccatggtgacaactaataataaagtaatatcagtagagtcagtttagttttcttagaccttgctgtttttgaactttaacctggtctgttttctctttgaagcttgtgtctgcc

SEQ ID NO: 51933 - DNA, 407 bp, Ricinus communis
  Intron number 2 from transcript 30128.m008581 (locus 30128 .t000042) derived from phytozome v7.0 (chr-ID 30128; pos 2 590622 to 2591028 reverse strand)
tgccatcttcacagcatatgtgagttctttctcctttacccactgcaaaaatacagtttgtgtcctctctccacgcatgttactgtcacttctctgcccttacctatgtgtttgcatcaaaaactaaagctatattgcagtagtaattgtaaacaatctgagagatccatatatagatttccagttaaatcaaagacataacatgaaaagaagaaccttagagattcattctattggattttctgaatatggtgatagtagaatttttatcacttaattgatgcccaggattattggtctcaagtaaatgctgtacagaaatgggatttgaaatcattttatagtttaagaatattggaaaggggaattgttcatttttgttgttggcttgtcaactggttcaggtt

SEQ ID NO: 51934 - DNA, 874 bp, Ricinus communis
  Intron number 1 from transcript 30146.m003425 (locus 30146 .t000002) derived from phytozome v7.0 (chr-ID 30146; pos 1 3576 to 14449)
ctgcaactttggttacttctgtgtcattgtttaaggtacttgatttttcattttgttgtcttcttctattttggagttctgggttttgtttaaaatttgatattaacatgtgggtttgttacaagaattgaaatttctgattgaatctcttctgggtatgtgaatttagtgctaaaaaaactcgtattgtcagcaatttggggtttttgttctttaattgttctacggtgatttattcaggagggaaggttgttcaattttggtttttgactgtatcatttggaacctttattgaactttttctctccgagggaaatgtttggtggataaggaaacttaatttgggtctatccaatctctgatttgttctgtcttagaaaatgagtagaaggtttctgaatgcacctaattgttttattaagcttagatcaatttgtctttgtgtacctttggtgctattattattacttttttctttaatcgtaaatgtgctagtaaaacaatggtttagtgatgaattgtaaatgagagcagaattctgctgccataatttaccaggagtcttcaagggttttgcataattatgacagaccacacagtgaactatggaattaatttttctcctgtcataattacaatgttgcttacattggatttaatcatgagcttgtcatgtgtttgtatttagaaaattgggaatgatatgattgtttaattttcaacaagcaaataaaatgcgcaaaattcaaaattcctgtttttttttttctgcctttttctctctcattatttaatcatttcctcgaatcaatttggttgtttgatggcaattgtctcattggaagtatgctgcttgtgtgataacagacagtgg

SEQ ID NO: 51935 - DNA, 420 bp, Ricinus communis
  Intron number 1 from transcript 30131.m007002 (locus 30131 .t000153) derived from phytozome v7.0 (chr-ID 30131; pos 9 22629 to 923048)
gctcataatatctggcacaaccgtaagtttccacatatgttgctttatatttatgcaacttgctattgtcttggtttcttttggtcaactatcctaaaacgcagctcaaattgttaactaatttctctttgcatctttcttattacccaaaagaaaaaaaataaaagaaaaagcttcttctcattttgctcagtaatccacatattctgagatctaaacattgggaagtatattttcttaacaagtgaatccttcctaaaaggtagatgataattctgaattttttttttgatttgacattttaaaaattcttaaaagtaatggaattacaaaagctttaactacgcaactactaaatcattattaacacgaatgtttgtttttaacagtcaggactaactcatcagtctcggaagctgc

SEQ ID NO: 51936 - DNA, 992 bp, Ricinus communis
  Intron number 1 from transcript 29830.m001394 (locus 29830 .t000011) derived from phytozome v7.0 (chr-ID 29830; pos 1 19844 to 120835 reverse strand)
acctttgcaatatcggtgatcgcgtaagcctttgtctttctttatatcgacatagtcattcttgaatctgctacttctctatctattaacaaatattttttctatttattggtcgggttgcagtgttcgttcgttgatgctattattgatacttgaaatctgaaaattagcatctttatgtcaatacccttacagtaaaagagttctcttttgcattttctgtgaaaattgtgtttgcttttttctttttgacaaatgagtaaatttgaatgatacccaatttgccaagctgttgattcttttcaaagaaagaaaaaaagggaaataaaattggaaatctactgaaagtgttgatcctggctaccattcaacagctagtgtgcaaatatcaatttggtagtgcattgtcttactggagttcttgaagaggtagtgagtccttctcagggaggaggatgaacggagtagatgctcatgccatagtccatcatgttttgcttctggtagagagaatttttaaagaacactgacaactagatatataacagcctaatacgagaattgaggagcttagatgaactgcttatcattcttttgccaagataaattgcatttggtttcattttttctggtcctcttcaacttataaatagtgagagaattacacttgataccttgagggtctcgtctgccttgcgggagttctattcgttcggaaatggatgtccttacatggtgcatcctcctttctgccctttgaacttgagggattcggtgataatgcttcatttggttttaaagtaagtcggaaaagcagcaatgaggaacatgtttgtctttgcccccacctctttcttcccacttttttcttctccagtatgagtgaatgaacatataatatgattctctatgataaaatttcttcctgtttaatgaaatatatttgttatgtttcaggttcgattggatccttctaggccactgagcaagcg

SEQ ID NO: 51937 - DNA, 939 bp, Ricinus communis
  Intron number 1 from transcript 29989.m000421 (locus 29989 .t000014) derived from phytozome v7.0 (chr-ID 29989; pos 1 35177 to 136115)
ccaacactgcatttcccgcttcaattattaatcaggtctctaatactccttgcccttgttgttattcttttttggtcattctgtttttgctaattcaaccagaatatattttttcgttttcgtttcacttggagcgattttgctaataaatctgtggtaaagttgttatcttttttatctttcaattgttgtatcaataaactaactttgtctcacttatatacggggatacaaatgtatgtctgtaatataataaccaattgcaatttccaagtttagttcagctcctgggcttaattgttactaattgcagggactctttgttttgatttgcaatgcattattttgataaagatgggtctatgttactcaaatgtcagaaaagcttgttgcttgggtgtttttgtatggtctaagtcatggaaaatggcaaaactttttagtgtttactggtgaaaggactttgaatatgttttttacgtgttattcaatgatccattggcaagaatacttgtaactgaatttccaagtatattattattatgacatttttaatagtcatttgtccctaaatgtaatcactttttccctgaacccacttcttgttaaagctgacccatgtattccttgtttaatgctgaattataagctattgatgaatgaatattggattaagagaatatcgtcttgtttattggttggaaaactaaggaattatcaacatctatctcagtatgctttttttatgtggatcttcaatagatgggtgattattatctatttcaccaccaataacctttgatgcaaatgtcatgatgcaatgtgcatgtttcttttcattttgttctatttcttttccttccttcaacatcaatagctgcactaaatggtctgtgctttgcaggtttactcagatatcaccagtaattctccttttct

SEQ ID NO: 51938 - DNA, 758 bp, Ricinus communis
  Intron number 1 from transcript 30128.m008595 (locus 30128 .t000056) derived from phytozome v7.0 (chr-ID 30128; pos 2 658414 to 2659171 reverse strand)
tttttcgcggactcactgtcgcggtattcttactcttttccgctgatctgatgttccccttctttttcttgttgcattttaattctttctgttcaatgttattattactcttaccgcatgaattcaagacttgccattaattcactcctcctatggtttctatcttctcttctttcaccactgctatcaatgacgttgtcactatccttccttcgtcaacctctctttctatctaaagctttgatttcttctttctttctttctaattttacctttcgtttcttttctcgtgtcctatgacgcctaaacaacaaaaccaccgccattacaatttatgataattaaagaaaacaaaagaaaaaaacaaaaagaaaagaaaaagaaaaacagtagttttgttttaactccagcttctgtttctagcaagaacaagaagctctcaattctcaactctttacttaccaaacttgttttcgatctgaataaaatattattgattactaatgaccctcaaatttcttttagggttgggggacccatcccccatccatcaaattatgcagtgactgttttcactaatcactactagggatggtgccatctttgattataagctatagcctaatgcaccgccctgcacccctctccaaccactcacctcacactttcactttgctcttttccccccctctaacaatccccttcaatacaacactatatcactctgaaaatgctctctgttttttgttctgcagctg

SEQ ID NO: 51939 - DNA, 974 bp, Ricinus communis
  Intron number 2 from transcript 30099.m001656 (locus 30099 .t000035) derived from phytozome v7.0 (chr-ID 30099; pos 1 76156 to 177129 reverse strand)
gaggcggaagacaaattacctccttgtagactcgagtatgcttttgaaacttgaatgcttccttacttttaaacaatgttaagtaaacatggtttgtactgctattttggaccaagaaatgtgaacatggttcatactagtaccccataaattctgtgatgaaatacatttattatccttaattcttccttaaatcacatcaggcatccatttataaagctacataggaagtcatggacaaatatctaggtcctgtttcttgtaagggtttgactaaagactggatacaaaactacctaggattccattactttgtatggagaagtagtagaccaagcaaaagtgactgtttctatatcttttttagatgagtacaaatttttggcccaatacttgttctgaacgagtataaatttttttacggaaccatgtttgtgaccatcagctaaataattacatgctcatcccagattttagagtcaatgaatgttttgaaattcttgccaatattataacgctgatatcaagagtcatacgtctgttggctggtttgtagatctactaattttcccttcaggttcttgttgttatgaaattaatttgatttccatatcaaattgcaaacttggcgagagtgtttatcacaatcagtagaaaacagtgaatcttataaaaaaaagacttatgtatgatggattatcactagcatggatgtttcaattcaaaactataattttttttgtcaatttaaggaacaaaagtgttttttatggagtgagtagcctttggtaggatggaataatgttattgctaagaaaagggtggataagaaataataggtgaagaggattttttatttctccgtctttcttctagtatttatttcttttaaacttgatttgctaatgctattattttgtgtccatggaaaatttttggttgtcttgtagaaacaactgtcaaacaaattgaag

SEQ ID NO: 51940 - DNA, 998 bp, Ricinus communis
  Intron number 2 from transcript 29830.m001442 (locus 29830 .t000059) derived from phytozome v7.0 (chr-ID 29830; pos 4 45556 to 446553)
cgtagttttgaggtcaaaaataggtaaactatatgcacttgcatatattgtgaactttatttgttttatattcttttttctcgcttcttgttgtagagtaaattatacaatgggtgcatcatgtaactatatacatgtgtatttgtgtgttctagtgctatgctaaagaaaatgctctccatctttgtaatgtaagaattaaggtacccgtgtattacattctttaatagcaattatcaatgcatagtgcttccctgcagctgatctgatgtttatctgggtttatggcaaagatttgcctcattgtagggagaaaacaaaaacttaaaggggttcctaggctcacaatggttcttttaagttcatttatgcagcaatcttttttccagtgtttgaacagtagcacttgtaaataaagtgccctaagtttgttccaaaattatagatgatcaaacactgattatttgctgttgagtatatggtcaagcaaaatctctccatctctgattgtagtttaactgacatgtgtcaactttagttgcaagttgcaactttttgttatatgagtcggggaaagcagggcggccattgaaaacctatttacctttcatatgttaataagaatttgatatttgcatctaatagctgaaaatttgaataatctggatgatttactggaaagatttcaaattggatgtttgagtctcaagactggtggaaacttggtagtatattttgatcaagtgaaagacaattaagtttggcatgctttatcatgatttctgtgttttaataattagtatgaccaagtcatgcttgttcaatttgcatctggtttgcttgaagtagaacttctgaaagcatacgcgtggagttttgagcacaaacgcttgctaaaaatttgcatgcttggattaagaattgatgccacagacaatttatctgctcttctaatggttgtaggacatcatcagaggatataaaatctcttagattga

SEQ ID NO: 51941 - DNA, 765 bp, Ricinus communis
  Intron number 2 from transcript 29841.m002791 (locus 29841 .t000055) derived from phytozome v7.0 (chr-ID 29841; pos 3 82822 to 383586)
ctgatctagctgaggctgccattttgaatcaggtattcattttttttttcttttacttcttttctttttaggctttgtttgttttggataaatcacgtgcaatttgaattcttgcgaatatttttgcttaattattttatatttaagttgaaagatctgaaattctagcaactatggacttcccaaatgtgaatttggtggaatggaatctaatgaattgataaattcttgcattttcagactttccaacaatgccttggattatactcccgttacttttttgtggttgaaaatcattaatttaattttgactgacaacaatataaattgtactagtcccgctttttccttttttataaatattctgaataaaaagctcaactttaagctgttaacattagcatcaatattagtttcaccctgtgatcattttgattctttttcgtgaaagaagaaaggattgagaaaggacaagtatgggattggttgttttgcatttgctacttttggtttatagtcagggagaactgaaacttaatttactgtcagttaacacttcctggaaagaaactagatacaaaactgaagctggtggaatttcctgcacatgtgcacagtttcttttttactggttttagagttccgttctagcttttatatgactacaagggcttcattgaatcctatatccgaatgccttcagtacaattgccacaaaaagttcataacttggaacttttttcttgatacaggtcaggatagtac

SEQ ID NO: 51942 - DNA, 372 bp, Ricinus communis
  Intron number 1 from transcript 29842.m003681 (locus 29842 .t000178) derived from phytozome v7.0 (chr-ID 29842; pos 8 89900 to 890271 reverse strand)
tctcttgacccactttggtcttctccttctctcaggtaaaggtggctaacatacttttccgctaagtaatattattattgggctaaaagagcttttgataagattgaattatattacttaggacacgttcattttcgatgttataatggtaaactagaaacactttcatcagagtctctgccaaacttcacatacaaatggtaagctgattggaggtttagagcctctgtcttatttgcacactctccactctgtgttgcgtaaattttgagttttcgttctcattttcgttttatttttgatgtagatgaatcaactttgtttgactgacatgcttctttgttttaatttttcttttcagtgtggaatttg

SEQ ID NO: 51943 - DNA, 710 bp, Ricinus communis
  Intron number 1 from transcript 30146.m003539 (locus 30146 .t000116) derived from phytozome v7.0 (chr-ID 30146; pos 8 76808 to 877517 reverse strand)
ggcttgaacataaaagccctgttgttaaacaaaaggtaatgttaaagttataattttcttttctatgttttacagttaccgtattagatttgtcaaaatgtctgatttaagtttggtttagctatattttaatttttttttttggtgaagtattttctttattgctgattaagggtagaaagaagaagatattggatccttttgatttgttgttgattttcttttaggaatgctgcatagaaatttggttttagtaatttgatagaggtgtagtgattaaccttttggtgctggaaaatgtaggggaataaataaatctggacattgattgttattaatattatttttcatatatattttttttggtgggtttacagaggttattggcttagttgagtgagactctcgtctttaataaaaaaatttaagtttttcaatctgtctgttttttgagaatgtattttgatgacagtcaaatggtcaaatggtgcatgaataagagttaaatttttatttcaattgcgattacaggggtatttactattcatgaaattacaagataattttttgctactgaaatgagggtgaataacatgtcatattttttgtggattattaccaataaaataagtcagacagatttgttgatgcctaccatgcttgaatcatatgcaggctctgaggttgataaagtacactgtgggcaagtc

SEQ ID NO: 51944 - DNA, 505 bp, Ricinus communis
  Intron number 1 from transcript 29838.m001735 (locus 29838 .t000105) derived from phytozome v7.0 (chr-ID 29838; pos 5 60751 to 561255)
aaggctataatcatattagactttagtatgttttgtagttctgatatacaaaaaccagatatgtaatatttttgacacatcaatgagaatattcagttgtatttttgacacatggcattgatcttcttgtagtgcttgttgttgcaaggtttattaaattgttagctgtacaattgactaatactattcgaattaagcatttataaaattgaatgtttgatattgcagtgacgattgatcagtatcattaatgttgcaagattctttttgttgtcagattttatgtactcaatatatagtttacagtatacttcgtaaagaatattaaaaaaaattttcctgatctctagtcttcactccatggaacataagatattgtagtactgctacagatgagaattctaagatgatccccttaagatctctaagttgtaatgccttatttgagttttttaagatgtctgaagaagtatttggatttccaagtcaagagcctactcagtgc

SEQ ID NO: 51945 - DNA, 886 bp, Ricinus communis
  Intron number 3 from transcript 29848.m004692 (locus 29848 .t000248) derived from phytozome v7.0 (chr-ID 29848; pos 1 405084 to 1405969 reverse strand)
attgaggtcttatatgtgtgcttttaatcatatcatcttccccctaaacttgtgcatcatgatggttcaagttcaaattaatcaactaccttgccatattaactttaatgcctatattgcaaattttttaagcattgaatattagtttatcatattacctaccttgccatagtacctttaatgcctatattgtaaaatttatgcattcaatgttagtttgtcatattaactaccttgccatattacctttgatgtctatattgtaaaactttatgtataagttcttagtttatcatatacagaaccttcttcctcctaatcctcttgatgtgaaatgtacctatttattgtattcacatgttgttttcttgggatgtcaggcagcatttaacctattagttttacttcttcaagcttcaactggatgatgctatatgcattatttggattggatcacaattctcactaaagtgtctacacatcattggctaataaggagccttcttggaacttgatttaaatgcttactattgctcaaaacaattggaagtttctattaaattttcactaaaggtcaaagtaaaatgcagaatatctaaactgtttgagctataatatataagatgaaatagctatattactttaactaattgacataaatgtctggagaacagtctattttaacacctttattttggcttctgtgaattaaattaacatttcaaactctgcatgttcactgttctttttttttttttttcttttggctccttatttaagttgagttgccttctgaagattgtgcattcgattttgttctgttccctgggttaatatgttctatttggattgtatgtcaggttttcactgctgaatattctctaat

SEQ ID NO: 51946 - DNA, 805 bp, Ricinus communis
  Intron number 2 from transcript 30026.m001492 (locus 30026 .t000056) derived from phytozome v7.0 (chr-ID 30026; pos 4 43789 to 444593)
aacgatttcagcaacagctgtcatattaccgacttgtaactctctctctttctaacatcttttatggtgggagtgattaatcaatggttatttatttttctggtttctctatttggataatcaactacccaaggattacagaaactataaatttccttttagtataccatgagaattttacactagatctatatgacgtggcaatgaaaattctggcaaaatttaacaaatatcgtatttgtagtgaagagatcttttctttattgcaaagagtcaatacatatatagtaggtacagttcaggttgaggcttcggccaaggaagcagaacctcagacagaaaaacttgtagctagattttgttttcttctatcattaagattatggaagtatccttccccttatatgatttcatatctgtctctatatatataaaataagcaattgaaaaattaaaaattagttaatataagaacattgtctagttatttcaaagtttgatgtggtctctaaacctggcaaaaaatttaaggatatcttctttatatcatgtcatataatccttctggtgatgctaagattaaagcttagtaatacaaaagatacaaattaagtttatttaaccaaattattacaagctgcaaagtttttggtggcctatggtgtaattagccttaggaatcatcctattactttttttttttgttttgacaagacaataaggactaattgcttatatgtaataaagttttctgtttgcccatatgacagtgttctcaaaagtttcagtcttcctggcagtcttc

SEQ ID NO: 51947 - DNA, 743 bp, Ricinus communis
  Intron number 1 from transcript 30026.m001465 (locus 30026 .t000029) derived from phytozome v7.0 (chr-ID 30026; pos 2 04721 to 205463 reverse strand)
catcaccatatccctcttttatcctaaatcttcaggtatgttaatatatttgcatgcatgtatgcatgcgtctcttttctgccacttcatattctattgatgatgttgttttactccactgtttaatttttcatcacttcttgttggcatgccttttgaaggtatatacagaagagtaactactcttagtaaactgcttgtgatacattctttttcaagttgggatttattgtttgaagctgttagcaatttgggtttctgattttttattttattttgggattaaatattttgtctttgcatgggtcatcaatggttattgcatattcaataatccagcagaagcactgagactgaacttaattgacagacgtgctcttgaaatggcaataccgatctaatttatactgccaatttttgagcttatgatgtctgcggcacagtaaggtttttaaacaccaaacagttattaattagtttggttattactgaaatgtattccactgttcattctcttgctgaattagttaatgcttgaagtcattttccatattgttaatgtgaaattggtattcaatttgaaagcctgtaactttatattagacatctatttcataactattgaactggaacttgatgcataagaaacgatacaatttcctggtttaattagtatgatctttgtaagtgaatcaactaccaatgcaggtttcttcatcccctgttggcagtagattattcag

SEQ ID NO: 51948 - DNA, 836 bp, Ricinus communis
  Intron number 3 from transcript 30086.m000214 (locus 30086 .t000011) derived from phytozome v7.0 (chr-ID 30086; pos 1 73253 to 174088)
ttggtaaaggccctagtcctcctattggtttccaggtgcgtaaatttccctggcttttatgaaataaaattacaaatacacatatatgataatgtatcaactcagggtaaccctttaggagctgagctgacttgtagcaaatcaaaattaataggtaagttatttagctatagctatcttggcctacataagctttggaagatttccacattttctttaaactctattaattcatatagacttattaacaagtattttttacaatctgctgtcaagcttatgagttatgatgtatttcacgctccaaaaattttattattgcctccatgaattggagatatatttcattacacctacagctaactgtatgtggggagttcgacaactagtcccttccccaaaaaccctttattttcagtgatgccaaaaatgaaatggttcactgccttatcactttcaaacttcctagttcgaccagaatttggcttgtctgcagagagtagcacaatttcttttgggttaggagcacagtccagaaaatcaatggactttatacataatttcaccatttatacacgtggcttgttttgtcaaaagacgaacaaaagttgattgaattatgttttctgagatgtttcttaacttaggtagaccaaacaatgattcatgatagcaccttgattaatttaggcatgactagttggcccaacattttgtcctgccaatacttgaatattaattttactctttctcatttttgattgccttatgtcagtatgtgatgcctgactgtatctcatgcaagtactgttcgtaatcccaggtggctgctaatt

SEQ ID NO: 51949 - DNA, 309 bp, Ricinus communis
  Intron number 1 from transcript 29950.m001176 (locus 29950 .t000060) derived from phytozome v7.0 (chr-ID 29950; pos 3 37679 to 337987 reverse strand)
ttcctattggtaaagatctcgagctttttgttcaggtatttcactgtttctagatctcttcttttttattttttattttattttagtttattttgtgtgcttgtgttatgtaattattaagagtttccatattgaattaaattcttggaaactcgcgtgtttttaacatgactgatcgcgttgacctctagcctggttcctcagaatcaacgaaattgaagtactctttcacttcccagaaaaaggtgttatatatctgattagagtttttgatacttgctttacagattaaaccaggattgagtgcat

SEQ ID NO: 51950 - DNA, 957 bp, Ricinus communis
  Intron number 1 from transcript 29842.m003597 (locus 29842 .t000094) derived from phytozome v7.0 (chr-ID 29842; pos 4 72114 to 473070 reverse strand)
cactgattttggactgtctgtattcattgaggaaggtcaatttcttaattttctttctgtttacattaggtaatacgacatatgctacttctgttgctgagatggattgatttctacccgtgagctgtgatgttgcatagggctgtgctttgttcagtctttagaattggtgcattatttgcataattttgatgttattagattattgtttttgattggttcagaaagggcaaacagttcgccttggtgtaaattggtgaattatttactttctggtctaagcttttgcatactcttgcttttcctgttagtactgtttagctagtttgcaggtcagatatgcaagttgatttatttccggaaggtataatcgctgctcattctgtttattttaactgtgaagtggtcctacttctcacattgtaggctcaagtatccttaatgaatcaggtctgcttctggggctacacaccgtatcctggatgtttgtctattcctgtatacaggaactgatgaaggatgataataaccaagatcctaaagattcttctattcaatattctatttgatgtgattggaataaattggctaatattcagtgcttgtagcaaactgtttatgcatgtacaacttgctctggactttattttgctgttttgatgagcaagacattattatagaagggaacactgagaagtaagaagaatgtcttgtatcatacagttataaagcaggatggaaagaattagagaaatattaggagttattatgtataaaataatgatgggaactattgtatagatgctgcttctcttaatctctctaaattcatcatttgagtttgcttctagaaatcttgtattgtgtgttaatgtaaccataaatacagatgttgactgagcttctccaaaatatgttgcagggaaaacataccgtgataaagtaggtagtgcttac

SEQ ID NO: 51951 - DNA, 719 bp, Ricinus communis
  Intron number 1 from transcript 29908.m006181 (locus 29908 .t000232) derived from phytozome v7.0 (chr-ID 29908; pos 4 03800 to 404518)
gcccaaacaaagacttccttgtcaaatctcttcgagtacgatatatttttcgtattgtatcagtataacgataatgtttgactaaacagtagtatcgaaccactttaagtttttctgtggacactgttttcctttttttttttctcccccaattattctaaaaatttccaatgcttgtagccatgtaatataattctgaaagaaaatgataatcttcaaattgagtttcacatttggttcaaaatgttggacttgcgaatgtgaatggtggtttgttgaatctgtgacgcggaaaagtctcatttgtgtttaatttcttgttattggctaattagcttagaagcttttaaaaagaatacgcaagtaatgcacgaatcggtacacctaaatcacgcataaaggtttaagttcctgtattgacatgctgttttcttaaacttcatggtagcatttgcttttgcttttcactttttatttttatttttaattttaatcccttgatgccaacaatgtcagtatatattaatagtattcctgtgtcagaagttcataaagatgctggaggagtttgtagattagaggtttaaatttcttgtgattcttattttttcttgttatgtagtgaagttattcagttaggtactatctatttgctgataattttatttgttattactgtataatttgcttttttttttcttgggtgcagcaagctgcga

SEQ ID NO: 51952 - DNA, 419 bp, Ricinus communis
  Intron number 1 from transcript 30128.m008837 (locus 30128 .t000298) derived from phytozome v7.0 (chr-ID 30128; pos 1 292679 to 1293097 reverse strand)
gagagaagtaaaagatttgttttacaaggtttttctttcccttctttatattattttaactgtttcttgaacttgtaactcaactgaattgaattgaattgttaatgctgttactttcttggtactttggcctagtggggcggaatttcaaacttgatcctccacttcctctcccatgatcagaaaagaaaaaaaaaaaaaaaaagaagctatgtatagtttgaaacccttatcaaactgaaattaactaaataacaatatggtcttaaaagaaacacataaagaaacgcttaaatgatgtgctatattagtttgtttcggctgatatattttttatgaatgacattctattaattttttattaagcagcttatgagttatgaatcaaatattgatgccttattttatatatttgcagt

SEQ ID NO: 51953 - DNA, 491 bp, Ricinus communis
  Intron number 2 from transcript 30066.m000729 (locus 30066 .t000025) derived from phytozome v7.0 (chr-ID 30066; pos 1 74179 to 174669)
cagattcaccaagtatgtttacatcaaggatgttggttatcggttaatttttggaattattttatttttcttgactagttacttaaaaatataagcagtcactgttgcattggaattcagtcagtctcactgcggcagatgatcgctctttctttagtctttagttagaactgccaccggaaagaacttcaatcaaaggaagctcgatatgactgggaggctagtttaggctcgcacacttttgtttctttatggaattactcagaaagctttcgagttacttgtcattaaacaacaatgcgatatcatatttgggaatcaggggagttcaatttgtgatgataatacaacttagataggaagagtttttgttttttttgatacatatgcttgaaatcactttataaatgttctcatttcactatttcttcaatgttcagcaaaaaagtttgactaatctgtaaacaaacacaatctctgtttgcagaatt

SEQ ID NO: 51954 - DNA, 932 bp, Ricinus communis
  Intron number 1 from transcript 29841.m002812 (locus 29841 .t000076) derived from phytozome v7.0 (chr-ID 29841; pos 4 77424 to 478355)
gcctgacaagccaacttcttccaaattcagctgaggtaaggacctcactgttagttgtctgagcattaagtcctgactgcctttagtttcctattttcactgttatacattgtgctacctgtagagctcttaagtttgttgtctatatgataaatttggttaatcaggcttcattgttttcattttattcgaattaatttgctatatgtgatactattggcatcgcttttctgctgcttttcaattttaatgagcatatataccaactacagcttatggtttttctcatgagattgttgttgaaacttcaaatgaggcagctagcaagttatttggaaacttctatccaatcttcaagatatgtttccaaatagtctgattctcaggatgatgaccaatttttggccgtgctgatttttaacagcatggcaccgcccttgttttagtttattttctgcctcatctttgttgagttgtttgtgaaaagaagtatgcatatttgactcagcaaaagccatcttgtatttcttttccttattctgagttctgagaaagtctttctgtacgagcacctcttcaagctccttagcagatacacaagaacttctcacttacataattcacatgggtgcacatattaaagctgtgagaagtggatatcaaatacaattttttaacttcttcatgagattatgttttattccgttcatcgtatcggaggttatgttcctctttgcttttttttgggcttcttttcattcttctttggcaccgacagactacgtagatcctgtagagtgctttagccctcaacaattcccaaaacgttctctctatccttcaatgaaatgaaaatactgttttacccaaacttactttcattgttggcttctatattatgttacacccacccacttaacttctacatttag

SEQ ID NO: 51955 - DNA, 700 bp, Ricinus communis
  Intron number 2 from transcript 29912.m005383 (locus 29912 .t000109) derived from phytozome v7.0 (chr-ID 29912; pos 5 55831 to 556530 reverse strand)
agcagaatgtgactctttaatttctgtgttttctaatcgttagtcaattctttccctgtacactttacattactttgaagaacttaggtggtgattaacttgcaccttacacgaagttgctggaataggacaggactatattatggcaatgtataatgtagtcgaaagcagcagggcccatttttacttgaagaatttagtagggcccttatgggtttattattattgttgaatttagcaaagggacttttttgatctttcaaatctttaatgataatcaccatcagcatgatttgataacacatcagaaagaaattaacagaggcatgccatgctgtgtggcacattcttgatgctctaataatagcaaaaatatggttctttgaaaataattgcaggaaagtttgtgccaattagaatgcttaccaattagattattatgagtgctctagcaatttagacccactaaaagtagaccttctcgcattattaaggtcatagattttgtcgttatggcagaagattaaagaaatgcatagttatggagcttatatggttgccagctgttttttgtattagaatttagtgacataggttggtggtgggatagctttttcttttattgtttcctttctgttcttttaatttatttgctgtaaaactatatgcaacagtcagggtgttgtaagcctccaacagt

SEQ ID NO: 51956 - DNA, 474 bp, Ricinus communis
  Intron number 3 from transcript 30051.m000528 (locus 30051 .t000011) derived from phytozome v7.0 (chr-ID 30051; pos 4 73289 to 473762 reverse strand)
ttgcacttggaggtggagcttttggacattgcctggtattgtttttctcttctaatcatatcctttattgaatccatttatcatttcacatgttatggtactctagtttcatggaactcctcaatgttctggcacccttttttggatatgttcttttttttgaggtttcatcttttatccattatcttgttaagtggttttcgagtttcttgattttatcaatttagctttcctttcagggaagactattatctgatcataaatagtcataaggtgcaaagcaaatgcagtcacaagcaaacttaacccccttttttcggacattagcaaattaaaactttgccaaatggatcctgttgcatgcccactttcactgctattcaatttagcttttgattgaaatggaaagacattcctgactcaattcttctaaatttaggctattaaagcagattccgtgtcagaattgaggag

SEQ ID NO: 51957 - DNA, 824 bp, Ricinus communis
  Intron number 1 from transcript 29908.m006039 (locus 29908 .t000090) derived from phytozome v7.0 (chr-ID 29908; pos 1 259749 to 1260572)
tcaaagatctcgtccttcctccactaatcaccaaagtacatcacttttttgtcctctttcttttaatttcatgatcacccaactgctcttttagtaattttcttttgtagaaaaaaaagatcacgtgtttttggggatttgggttctctctaagggattgcttgtgaatttgaagtttattatagtgtgtatgatctgaaatatctacgaagtgggatattctcctattgactacagagcgtgcaaattaatcacttcctatctttagtttgaaagggtcacattctttgcaggataagaatttttgcactgattaatgtagcaaaggaattgtccggagactgattttggattgaatttcttagcgtgaaatatgccgctattgtaagtaaactaatgatggaagcatgtagaattggatcaaattgacaacaggatcatgacttggtcatctttttttatttttgttacttttgctattatttgctcaagtcccttatgattaacgggcttcttcaactgcaattccactgagattaactctcaatccatgcaccaagcttaatatttgtcactagtaacttgcaaaatatagtttctgagtctaatttattggaccattagacgtcaggataagttacttagattcatcgagtcgagctcatatattgttaagagaaagtagattggatctagtagtgcatggacatgtaagttctcttccaatgtgtaatagttggtgcctggtgccagataatgttttgctcttcttcttttgttggttaagttttggctctaatatgatgcatcacttgcaggtacta

SEQ ID NO: 51958 - DNA, 494 bp, Ricinus communis
  Intron number 3 from transcript 29830.m001453 (locus 29830 .t000070) derived from phytozome v7.0 (chr-ID 29830; pos 5 39248 to 539741 reverse strand)
gattggtattattgggacaaagatacggtaatttctaagaattctgcaagagatgcgtattgttttctctagtatatctttgatttttattttattttatttaacaagaattaacccgagtctcggttgaaactgtcaagtgaatgttggtccctttcatgaaaagcgtgtaacataaagaagaatgatataattgatccatctagtaggctctatccaattaaagaaaagggatatggaaagactgaagcaatccttttgatgtaaaaataaagtggaatgatgaaaccttgtctctcaagtaaatgaaattaggtgctgattttaatttctttaaaaggtaaacatgaaaggcacatgcttactgtaagaaacatagagtaataacctttttgctatttctgtgaaccttattctattagttagccatgtgataatgctagggtatctgtaatacgtgaacagtgacatcgaagcttcatcatttcgctgat

SEQ ID NO: 51959 - DNA, 947 bp, Ricinus communis
  Intron number 2 from transcript 30136.m001010 (locus 30136 .t000006) derived from phytozome v7.0 (chr-ID 30136; pos 1 41376 to 142322 reverse strand)
gacccgactggtccatcgcggttgctttctaccatgtaagtgaaaattgtacttgtattctatattttatcattgatatcgaattttctttttgatctctctagaacttttcattgatactgattacatgctatgagacaattgatattaatgattatctcaacttcattttatgcattcaccttctgcttatgttgagtttgcttgatatgttgatttgtgcttatcaatttgtgaagaatatgatgttatgctattaatgttatgttaagtcacttgcatctttttttttttcttttcttttgctttcaagtttaagcttattttcacacatgggggagcgtgctcagtataatatttggttgctccaatataacctgaaggtcatggttcagactattgcaaacccctccttatagtgaaaggggaaggctgcttatatttgattctttggagctgcagttccagaagccttgggcattgggacattctatgcgttattgattccatatatgtgtaataaccttattggaaagccttaggttggcttgtttgaaatgttttttcaacatatgactttccttacgtaaagacattaattaaaatatggtactattatcaaaaacatgtggatgatagctaaagtaaattaattaaatatggagcaaaggaagagggaacatgaaatatccgcttcaccttgagtaatctttatgagattttgaaaagtaccaatttgaaaaatctagaacttgcttttattgatgggttatctgaaatccatgcaattgtcaagaaagtcatcttacgtgctttctggatttataatctgttgaaagaacttacttatttggagagtgttaagaccttctgctctgaagtgctggaaaagtttgatcttggtaactttagtgcagaacaagaagggataaaactgaatcctattg

SEQ ID NO: 51960 - DNA, 537 bp, Ricinus communis
  Intron number 1 from transcript 29939.m000540 (locus 29939 .t000018) derived from phytozome v7.0 (chr-ID 29939; pos 3 92879 to 393415 reverse strand)
aagaagaaactaaacgcttgactcagatttgggaagtaagttcaagaaaagtaaaaatttgaatttttttatatttcttgaataaattttgtcaatattcaagttgcaatattttttcgaatgttattattgattgttgtttcacgtcattttttttttctaaatatgtttttctcatgagtttaaaattgatgatttaattttttattaaaattttcaaaatttgttaaactacatgtactataattttggatggattttttttatatttgaaaaataatttttaaaattaatactctcgattttttacgaattaagaactagatcgaggattatttatatacattttaatgtgaaggattttaaggtggttaatggtaaaagaaaagaaaattataattgcaacttctctatagaaattcaatatatgaaaaaatgaaataaaatttactaggcatgtggttgagcattttatgtcattaaaatttaagtaatatttcaggagcttgaatcattggctgatcctacaagaaaaga

SEQ ID NO: 51961 - DNA, 668 bp, Ricinus communis
  Intron number 1 from transcript 29908.m005957 (locus 29908 .t000008) derived from phytozome v7.0 (chr-ID 29908; pos 7 16761 to 717428 reverse strand)
tctgagaaccctcttctcggtccctctgcatccacgtcagcatctcgtctttctcttctcttgtttatgctctttctaactgctattatatttctgctttttgactttttctttttatccgtgtatcttttatttaatgtgacattttgagaaatataaaatgtccgaattatgttttgctatttttgcttcttcagaaaatgcaaaattgaactgaatcttattatttagtgaattccagtaattgctagagttcatgactttctaacttaaaaataacaaggcatttcgaaagaaatgaaattacactaaaattgacatgattttgcaagaatttatgcatgtagttgtatcggtgcgcacagcttgttgccaatgttccattgcagaaaggtttattaatgataatgatattcaatgcctagttttgccatgcttattgtattccagaacttgtatatgtatatttcaaaattccagaatcaatggctgaattgttaccatgttattgaaagactatacaactcataggttttgtttgtgtagtaccatttatcgaactgaagttgtttgagacggtcttgtacctattgctttatagtgtttcctcaatttatttttcttttatacattgttcagaattcttcttgcactgcaggctagataag

SEQ ID NO: 51962 - DNA, 535 bp, Ricinus communis
  Intron number 1 from transcript 30101.m000384 (locus 30101 .t000016) derived from phytozome v7.0 (chr-ID 30101; pos 1 49517 to 150051 reverse strand)
aaggttggtgtccttgttgaatcgatgtcaattgaaacactttgatttagtttctacatttatcttctttagaattgcaagtcagttcttaggccctatctttagttgtatgattcagctcttatcctcaaattattggagcattctggattcagggctttgcccctataaatagtttctttcagattaatgctcgggttgagctctaagagactctttataatactttttccttaatcaaaaataaaatgcatggtatctaggttatttatcattgaatgagaaggccatgcataatcgacttcacattacctacacagtaaacaaaaaaggaaaatcaatcaaattatgtgcaacaattcttctgggttgctgagatctgttatattagtttaggctgacctttaattgctaggaataactggcactgcaatggggattctgttctataaattttaagtttggtttgtttttatcatccttgcagtgttttataggtttgttgttctctgttttgcaatttcagaatatctag

SEQ ID NO: 51963 - DNA, 749 bp, Ricinus communis
  Intron number 1 from transcript 30098.m001748 (locus 30098 .t000043) derived from phytozome v7.0 (chr-ID 30098; pos 1 446271 to 1447019)
gctagatcatcagaaccttgcaactgcccaacaaggtcaactaactttttctttttctaatctttttgtaatactctttttctttttgtttaattttgatgtgttgctaatcgaaccagaactgttttatatgattcgttgagttcccagttcatgtttgccttgaatttctcctttctttttcgctctttttctcgttgatgtggagaatgtatatcaaaagacaacttcttgttttccggaaattctgatgagatctcagtagggtaacttgaattggatttagttttgcgtctctcttttgaattttatgaatttcatgtatgctgttatcaattacctgtttaggctatagctacaaaagggttaattttcatttcattatgtcttaaaatcatggcagaatacattatgaaggatctaaacatggttaacagttggggaaaaaagaattatatgataaatctgttatccgagagttatattaataaccaagaatgcagtagacccataggaaacatatagactttttggaccaataactttatgatatgggtgataacattctttgctatttgaatacaggcaattcagatgtaatatatgttgaaatttgttgccgtttttcttgttattctccattttttctttttcctttgtctagattaattgttattagcataatgttattgacatggcatttgttatgtaaagtttgcaagaagtggaaggcgttggcgtcacaggat

SEQ ID NO: 51964 - DNA, 720 bp, Ricinus communis
  Intron number 1 from transcript 29904.m003042 (locus 29904 .t000156) derived from phytozome v7.0 (chr-ID 29904; pos 1 026946 to 1027665 reverse strand)
gtacgttgattgttttattttttaatgttgtttttggcatttctgtgctgttcttgattatttcttcaacgtaattgaaattaaggcaagttaagaggatttcttaacaaaaatgaacacatatagcggtaattgagtttttgataaagggaaatgcaaacgtacaatggaatagtatacaatgatttgattttgtttaatttattggactctgcttgtgcatttcatgtgatgcctgtcaagttttgctgtttcatgacaataatgaattagaatagtaagagcaaagaagcatttagatgatgactaatgaatttttagcaattatagtgctttttataattctagcgtttcttcttgaatttgcagcattttccttttataaaagtgcatttgcgcttttattacctttaaaaggacattttaagagaaaatgctctcttttgagctaaatgctgaatagtattgactgtacgacttgaatatgctctaaatttttaatgtctaatgatgttttgttgttctgttgtccccagtggttactggttactagctcacttatcgcagcgagcctcatgtgtggcttggatagatggaatgctacttatttgtttgattactttgatttaattttttaataatgctcatgtttggatggatgtaccaataattccattggtcacaggttgcttcagaaaatttagaggttggatccttagt

SEQ ID NO: 51965 - DNA, 352 bp, Ricinus communis
  Intron number 1 from transcript 29854.m001132 (locus 29854 .t000043) derived from phytozome v7.0 (chr-ID 29854; pos 1 145168 to 1145519)
accagcgactctattttgttccttacaggtctttctttgcaaatctttaacccatcaattatttaagtatatatgtaactacttttttttttcctgttcttatatatatgaaggataggttttattgctagaaatatgagatcaaacattatggaaatgatataatttgactcagaaattaaatcttaattatttatatgaaacgggcatattttgaattatttcaaagattttaaatttgtacaaccttcaataaagatttttgtttttggatgattttgtgatatgggtgcaccagcattttgtaatttgattgaatctgtgaattgggtttcttttaggtggtggaagg

SEQ ID NO: 51966 - DNA, 384 bp, Ricinus communis
  Intron number 1 from transcript 29848.m004529 (locus 29848 .t000085) derived from phytozome v7.0 (chr-ID 29848; pos 4 52060 to 452443 reverse strand)
aaaccctacttcaggattactttatattgcaaaaggttagtcttttcttttttgtttattctattgtttgaaatttgcatattctcattgacatgtgtttgttgattatctttctgtttctgtgttgtgaagtatgttaaatgaacacactaattttgatgctttttaaaaataatagatagtgagtattgtgtgtagtcaggcaaaattcaccacaagtaacaacttgaattcatacttcaattaattgaagaatgttttccacttctaggtacttgggtcggattgcctataattggtttgtcttggtccaactattgactctttctgctgttttctttctgtttaggaatttgtttcaattaagaaaaacttgcagacaac

SEQ ID NO: 51967 - DNA, 492 bp, Ricinus communis
  Intron number 5 from transcript 29912.m005318 (locus 29912 .t000044) derived from phytozome v7.0 (chr-ID 29912; pos 2 84078 to 284569 reverse strand)
tcagtgaagaagatcgccagcgtattcgcatcgtactctttctgtcccttgttttgttaattttaattctactctgcccttttgatatatggattttctaaaacttttgttacggaattgtggtaaattgaatcatggaacagaagatctaacaggaattcaagcgttttgaatgccaaaatgctagaactaacctcgccaatgtttttctagtaaccttataaagcagttaccaggaatgtaaatttgtaatgcattgttttcggtgcattttcaccatcccaaatttatcctagtaatttttttctgaaagatgtacattacttgactgaagtagatagcctgtctgtttgttcaggagttcatttttggggtcataagatctaggatttagtttcttcttcttcttcttcttcttcttattcttctaatatagttttttagttacgtcaaatgtttatttgcagagagaatcagcattaagaaaaaagc

SEQ ID NO: 51968 - DNA, 584 bp, Ricinus communis
  Intron number 4 from transcript 29912.m005416 (locus 29912 .t000142) derived from phytozome v7.0 (chr-ID 29912; pos 7 20752 to 721335 reverse strand)
gttatatctgcaggttttgtcactcttccttttctttcccctaattaatatgcattattttcttttttaacactagtttttgatattttattttctatttgtcttccataatttccgtcttctaccgccgcaatatgtaattttaggtcactaatatgctttagtaaggaatcattcgaagcttctttctcagtttcctttgtcagtcattctcttgagatgttttagattatagtgttttgacctgagtggcagttaaatgaatgagaaaaatgaataatttagatttgctttgactgattgcaatgaagatgcttgttcaatcgttctaaatattcgaaatctgtttctattttttttttttataaatgccgaattactgataaaattgcatctgacttgtcattatgtcgattacttgtatatgtgttgctccttgtttaaaattgtgaattccatattgattactgtgcaaatggagatattttccacctcgtgtttaatggattgggttgctaaaatttaagatgcaattctgttactaattcttaaggttttttaatagattgggtagctgttttagc

SEQ ID NO: 51969 - DNA, 960 bp, Ricinus communis
  Intron number 1 from transcript 30128.m008901 (locus 30128 .t000362) derived from phytozome v7.0 (chr-ID 30128; pos 1 602651 to 1603610 reverse strand)
tgctgaaatccagactgcaatttctgttggtaatctctcactgctattattcatgtgtttgtactgcaattatcaattgtatttatcttacgtactacgaaatctattatttaatttaggatgatgagcacttccagttccattaagccaggccaaaagttaaaagattattaaagtgatatgtggttttcttgtgcttattaaatatcaaatgatttcttgtcggtttattttgctgatgcattggtccattaaagtacttattctttgtcttcttccttgtaatctctgctagatttgagtttgcagcatctgtttctgcaaaggaagtcattcacctatcagcaatccttttcctttttgcgattttcagatcaggcttccattttttttctgcaattctctttgtttgttccatcttgctcaaacactcagctcccaaactccccttctgaatgaacctgttatgtgatagttttatatcttagaaagtagtctcttttactagatctaaataaaagtctttattattcttgtgatacttatgcacaaccaggacgtttccatcaatggaaaattttgttttcctgaggtaataatggaaatcagaattcttaatctttcagtagcaaaagaaagtcagattattgattctaagaactggttttcactagcatttaaactggtactggaaagattattttgacagcttcttcatgtcacttctctttctgttttcgatatgtcaatttaagagcagaatatatattagcatagtttttttatcatattcaacaagcaatattactcttatgcagttcttttatatcttacaagcaaatatactcgcatcatattagcctatggtttatttatttatttttgtctagtgcataagattgaatatatgttgtcattttctcaggggcaacctcattcttgttcactgagtacaagtac

SEQ ID NO: 51970 - DNA, 482 bp, Ricinus communis
  Intron number 1 from transcript 29844.m003259 (locus 29844 .t000105) derived from phytozome v7.0 (chr-ID 29844; pos 6 73374 to 673855)
tcctctccctctgtttctctccaaccattctttgagtaagtctattttttttttatctctttcaatttgtctcagttgaaatttcttttaaaaaaatttttagaaaaagatttgaatttattgtttattttgccataattttgagctttttaggaatcattttattccattgatgaataaagtagtataatttttagtcttttgtcattactaagagatatcacagtgcactctttatttatttgcaaagttacttaaaggttgtattttacttatttattatttttcttcaataaggtggtccatgggtgtatattagtgtgtggttggattctgtcctcttttgtacagagcaactcgataaaatgttcatttgaacattgtatccgtgatgtagttattgttttgatttatctttttaacaaatattcttctttatacatgtttcagctatactttgttccccttgctgcttctattgg

SEQ ID NO: 51971 - DNA, 224 bp, Ricinus communis
  Intron number 2 from transcript 29933.m001439 (locus 29933 .t000061) derived from phytozome v7.0 (chr-ID 29933; pos 3 34096 to 334319)
acaataattcagctgcacagtatattaggaaacaagtaaggtttttccacattttatattatatcttctttgattaaaaaactgttaattgatgttttgtctaataagcttttgttttggtttggtattacagatggtcggccatagctgcccgcttgcctggaagaacagataatgaaatcaagaactactggaatacacacattagaaaaaggcttctccga

SEQ ID NO: 51972 - DNA, 313 bp, Ricinus communis
  Intron number 1 from transcript 29852.m001998 (locus 29852 .t000017) derived from phytozome v7.0 (chr-ID 29852; pos 6 53990 to 654302)
actcctccaccattagatgtaataatctccataaaacccttcgtctctgattacacactcgctgaccacttcttctttctctctctcgatctctctctcgcgtacttcaattcaatttcgattacgaaatgaaaaatgaatagcttcaagtattcttaatgtttgattaattaagttaaccttataatagtaatgaattcgttaaatttgtggttagctcttagggtttcgatcagcagatccaagctctcgcattgactgtgtttttgtttttctgttgttgatttgaaataattatagcagcaagaggacg

SEQ ID NO: 51973 - DNA, 397 bp, Ricinus communis
  Intron number 1 from transcript 30068.m002619 (locus 30068 .t000109) derived from phytozome v7.0 (chr-ID 30068; pos 6 80464 to 680860 reverse strand)
ggagccctgggatttacctggttcagtttcctacaaaataaaaaactcctttcttttttcttttcttttgatatttgccgaatattaaaataaaagtaataaatttaattaggaaggaacaattcttatgaatcttggatcaatttcttttccgttacagcactatgaataattcttcttttgcatatctgtcggttccttaatctttaagatttccctctctattaaaaactcttcctaattctcaatttgaggtttctctactagaatttccaatatctctacagtagtagcttttttctttctttctttttttttttttaaagaaaattacaaatgctttgctttgaacttctagtattcttatcggtgtcaggtctatcagtaataaagacag

SEQ ID NO: 51974 - DNA, 393 bp, Ricinus communis
  Intron number 1 from transcript 29923.m000806 (locus 29923 .t000021) derived from phytozome v7.0 (chr-ID 29923; pos 1 80476 to 180868)
tggagtaattatttctcaactttgaacaaaacccttttctttagtcatcatgtaatgatcatttttcatgctcttctttcttcttttgaaaatctaactagtattggctggttgtcttggaaattaatgcaggtggagttctggatagatttgttgctgacaattttgggatatattcctgggattatatatgcaatttatgtattggttggatagttaaagatttgatgttttctctttttctgtttatgtacatgttttgaggtcatttgtgtatctatcttttcagattattatctgtttagtacggttttatgattaatggaggactttcttgttatttaatttataattacagcatttcattgtctcaaattttcaccttgtagaaaa

SEQ ID NO: 51975 - DNA, 413 bp, Ricinus communis
  Intron number 1 from transcript 30045.m000483 (locus 30045 .t000015) derived from phytozome v7.0 (chr-ID 30045; pos 4 17198 to 417610 reverse strand)
tttagcgggtgttagaaaagttttctcagtttcaagtaagtttaaagagatggggtgttgagaagttgcaaggtttagagggagagtttagtttgtgagaagaagactagttttttaaagaaaattaataattttgaggaatatattgattagattgctactcttgagaggaaacttatttcttttggttattttgagaaaaaacattagaaagatagatttacatgtgagtggttaaattatgggaccaaaatacatagtggtttcacttcaaggtagctcaatgtcggaaggctaatacctttttctcaccttgtgaatgataatggccaagtatttgagaattcgatgggtatgagtttggtggttggaaactgttttgattctatttttttcttctttgagtccttcct

SEQ ID NO: 51976 - DNA, 662 bp, Ricinus communis
  Intron number 1 from transcript 29830.m001467 (locus 29830 .t000084) derived from phytozome v7.0 (chr-ID 29830; pos 6 21965 to 622626 reverse strand)
tctcgagctggagcccgctctctcaaatcactctcgtaatacatgatttgtcttatatttatttcataaggtctttagttttctagtggattttcgtttacccacttcctgatttttcttttaaaataattcccctctaaatttctcatatttagctgagttgcgaacttgtcattttctgtttattgtggaagcgtgggcctagattaatctcattacatgttgattatttcaattctctttccagaactttatattcatgcaatagtatattattgttaaccgccttggtggtattctgatggcgttatatgaagaatatttgccatgagactatccaagttgttgcttaccttgagaacgcgatctctccttctccttaattggttttccaatttttttggatatatttaacttctttggctgttttattaaatgtatttaaaaggtctaaaaactcaagaactcaattcaaattctatttagagcacatagttgctagaatcaattcctttcaacttaaagatacggcattttgaaagaaattaaataatataaaaagaaatggcaaggcctatatgctaatccaactatttaatgctatcacttttatccttctttgtgcagacaccttgaagattctactgaattagttgctctcc

SEQ ID NO: 51977 - DNA, 690 bp, Ricinus communis
  Intron number 1 from transcript 29908.m005995 (locus 29908 .t000046) derived from phytozome v7.0 (chr-ID 29908; pos 9 34569 to 935258)
tggttttgagacctccaaaaccacttacgtcgctggtatttacccatttcagcagttcttttgtttttttttttttgtttgcagattgctagatctgttgtaaagttttgatctttatacttaaatttgtaagttatttaacaaaaatgtgggttctttaacgtgagtggccaagcgttttactggtttttctttagatctggtagagtacacactcacccttttgaagaaattgaatattaccttatttagtgactttttttttttgggtgctaaagatcaaatctttaaaggtttacataaagttttagagctatttcatgtgggtgaaggtcatttcttggccattttctcttatagtgttataattgtctcttttttatggttttattattttcatcgacagatctatcaaaattaaataggactgtaagagtgcgcctgtgtagagtttgtgtcaccataataagtgccactaattctttacaagctttcagttattctgtttcataaacaatggcctaagtttaacacaattgaagagcaatcatttctttcactcgaaaattgaatcactagtgaatgcttaactacacatttctaagaagcataaagtttgtacagtgattgttctttgatcgccttatatattatttttctcctttatttaggtgccaaggttagagttga

SEQ ID NO: 51978 - DNA, 164 bp, Ricinus communis
  Intron number 2 from transcript 29912.m005581 (locus 29912 .t000307) derived from phytozome v7.0 (chr-ID 29912; pos 1 898183 to 1898346)
gcagtattcaaaaacggcaccgcgtcctaattcaggtgattgcttttattattatcttttttcttttcttctgatattaagtttgtacattttatccgtgtttgagtttgttgttggtgtggtctgcagagaactttattgtactttcgtataatatattggct

SEQ ID NO: 51979 - DNA, 271 bp, Ricinus communis
  Intron number 1 from transcript 29836.m000572 (locus 29836 .t000019) derived from phytozome v7.0 (chr-ID 29836; pos 2 40725 to 240995 reverse strand)
gaactgccagcaggtaataaatttgtttgcactttgttgctactactgatagaaagaatatctaaataaataagcgaagagaatcgtttcttattatgtcgattagaggaaaataaaaatgaaaagagaataaaaagaaaaacagcttaaatttgacctgtttcaagaaaactccgggatttgcatcattaccggttacaatgtagtaataatggtttttgatatttgatttgaaggttgtcgctgctgctatttcattggacagattcca

SEQ ID NO: 51980 - DNA, 931 bp, Ricinus communis
  Intron number 2 from transcript 30108.m000240 (locus 30108 .t000007) derived from phytozome v7.0 (chr-ID 30108; pos 9 6743 to 97673 reverse strand)
tattcacagttacgttggtgagtgtaaaaatcatattacttttacttctatctttttctttttaacttaacttaatttctcaccaagttacgaagtttctcgctttcttaatgttatcataaattttagtgcattagggggtgtatttagcgtgttagttagaaggttaatatataaagctttattgttcgagttactaaacaatcttttattgtgaatggcttttagctcaaggatgttagatgaagttagatcgttattctaatgaaattcacgagttcttccacaatgatcttgatttagcaatccggttacttgagtaccttcaaagtttgtcttttaatagagtcttaaatgattctagttttgaaagataagctgaaggaggatacgttagggatgtggcgtcaactctctcttgagtgacggcctttttgcggaggaccaaatcccgtttgacgtcccctaactccctagtgagttttgcaacctcatccataaggttcgcatatgtttagttgaattccaggttgtactattatctttgaacttgaattgtgattatgcatgtgtctatgacattgacttgtagcgaatttactatgtttactctgctatccatgataactgatattgagaaattgttggtttgctcctttatgagaaagctttgagtcatgcaaatagatgcaaagactggggaaaggtggcctcttctgtttggggcaccatttttcttgctggttttggaatgcatgagagaaattcttatgagttcaatttgtagcctaggcctcatcaatgcagatataaatattatctcttgttcgggaattgattagttggtacgcgggcctagcaggctgggcactaagcttaaatgttaattatttcagatattgccttacagttggaagctctggttggggat

SEQ ID NO: 51981 - DNA, 740 bp, Ricinus communis
  Intron number 2 from transcript 29883.m002000 (locus 29883 .t000055) derived from phytozome v7.0 (chr-ID 29883; pos 4 08171 to 408910 reverse strand)
gtgcgtctacatatacggtatagtggaatcacaacatgtctttctcttctctgtgtttcttttacgttttgggcctttcaattgtagtgagtgctaagtctactttttaatgcaatattcattatttttctttcctagactgtaggataggagttaccagaatacataagggatatttgacccttacaatcaatggaaaatttgacatcactacgagaacttagctcatcggtatagaaaagaagtgatgtggcaaatagagtcttgataagttactcgtgatgtctcaaagagaggtgacattttgaaatcattggatatattggtgctagagctaagagggtgagacctttgtccagtttagatgtttctaggtagtttgtttattcttcttcttcttcttcttcttcttcttcttcttattattattattattattattattatgattactattattattactactacttctattatcatacagtttaattcagaggggagtaggctctcaaatttgattatgtatcaactaactttgttttattgcttgttttggtgataattacatagcattctatcatgttatgttgaacgggtagatatgatgcattaaattgatccttttttttggctagtattgcctgaacgatccacagttctttcataaaatgtgttgtttcacttgatttgtaattctggcaggtgagatttagaatagtcgtgtttcgtccatttgt

SEQ ID NO: 51982 - DNA, 363 bp, Ricinus communis
  Intron number 1 from transcript 30131.m006858 (locus 30131 .t000009) derived from phytozome v7.0 (chr-ID 30131; pos 8 67285 to 867647)
tggtaaatgccggtcttcatttcagtgaaagcatttttgcttttattttgtatgctcacttgggagaaccagagacccactccatagcacataatgtcctaaattatggtaattagcatagtttttagcactagtggttggtaggcaattggaactccgtggacagtctcctcattggtgccagccaatggataccggagacgtctacatgctgtgtcgatcggcctcatgatgatgcagctgtttgttcaaaaaaaataattaagaaaacctcatttagctgtgtcgatcacatacaatcaagcccagtttgtatatcaaattaaagcctttgcttctaaacccaatcccaatcctgctgat

SEQ ID NO: 51983 - DNA, 657 bp, Ricinus communis
  Intron number 3 from transcript 29943.m000276 (locus 29943 .t000002) derived from phytozome v7.0 (chr-ID 29943; pos 1 1121 to 11777)
gtgttgctgttggaaacactcctgtaagttcaataccttttggactgttttgcactttttttttggttataaaagcttcatcacatgcaaggcaatgttctaaattgaactcgactactacttaaaagggttatttaataatgttacttttagagcaatatttgatcccttgagagctttggatgacaaaattagtaatgttacttcactcttggtttggatctttgtgtccaattgcatatttggatagtagaaaccaattgattaatagcagcatgcaaaagtacgagcaattttctagttctctacttggacttcaacataagaactttagtttggttcagttaattaatagccacggcgatcagttttctagttcccttataagacttcattataagaaattcagtttggttttgcacatctcagttgtctgacaacatgaccataactgattaggcataattcaaagcaatggacatctaattcagtattatgaagcacttagctatctgtataaaataattgcacagatacctatatatgctttgtgcaagtttactgtttcttttcttggaagaatataaatatattgagatttctgcattgctactttgattagggagttcttacggagacaactgcagagttggcagc

SEQ ID NO: 51984 - DNA, 433 bp, Ricinus communis
  Intron number 3 from transcript 29912.m005304 (locus 29912 .t000030) derived from phytozome v7.0 (chr-ID 29912; pos 1 92374 to 192806)
gttgggttatctgatcgccctccttggttttgtaggtcagttcaacttgtttattttcatcaaatttgaaagcaccaaaaataaaaaaccatggatacttgaggaaaattcaagtagttgagggacattaatgagatacacatcaagactgattagcttctagttttgggcattggcgtgtctaggctcttgtgaatagattgagagttcattttctgtgtagtttttaatatatcgaatgctaattcaccatttttcaaattataaatataatggtagtcgctggtggtgaagagttcaaatctttgtcacataatgacctcccaattttaaacataagattaacgcatatgggttgaatggggtttgattttgtcaaatttcctgtggatttatagtctctgcaataccagtgctactagtaagcaaacgt

SEQ ID NO: 51985 - DNA, 758 bp, Ricinus communis
  Intron number 2 from transcript 29908.m006115 (locus 29908 .t000166) derived from phytozome v7.0 (chr-ID 29908; pos 1 676870 to 1677627 reverse strand)
ccggcctccgtggccaagttaagcttttacgaaatgtcagttctttcttttttctttttgtttattcaaataattcatgtgtttttgtttttaataacagagcggattgatttggatttttttattaataagtttcttataaagttggattaaagagatttggctgcgattttattcggctgctatttattcatatcgtgattttttacatgagaagaattctttatttattgtaaatttagataacctgaaccatagcaaaataaagtcttactaagccaaagtctaaatcaattgaattatatttaggtaattctcttctttggaaaacttgtagctgctagaattcagctccttcagtttagaaaaggaaaaaagaaaaaacgaatttgttaaaacaaatgaaatcttggccaaaattaacatgattttgattgttccaaatagtaggctgaatatcattaacttctcctgtattaaagactaaattggccaagggaatgggttctaattattatggagaaccgaatggccgaattgtctttatatatttttccagtggctaataaacattctgttatcttataagatgttatggctgttttttcatttatattacagattttcttatttcttccttgatggtttcaccttgtatttaacagtaaagtttgttttcattttattatgttcttgtagctcttacatgagaatatcctgcaggtagctcaggagatagggtcagaagcaaagttcca

SEQ ID NO: 51986 - DNA, 782 bp, Ricinus communis
  Intron number 1 from transcript 29851.m002364 (locus 29851 .t000006) derived from phytozome v7.0 (chr-ID 29851; pos 4 4218 to 44999)
tgcttttcgctcaccgcaagctttcaagatttgaggtatgactttttccttttaatctcttatcatctccatgtgtatctcataaagcatcggaacatatgctttgatccgcaaatatacaataactttatgaattttagagaagtaaggaatcctgttaccttcatgttcatcgtgttccgacatcttgacatttctgtgaacttgccaaatgagatttctgttcttctgattctgatacagctatttgtagtcctccccaaccgttcttatcaattttttaccgttttaagaattctttctgtttcattttcttcatgatctcctgaatttcctgcactcgtaagtcaaataacgttagcaatgaatcaagacatgaaagaaaaaagaaattgacatgtagcttttgagaagcctagaatagcccttttgatcatattttgagaacaattacagcaaattaatgaaagaataaattccaagcagagttcctcatttcaaggattatgaacacatggaaagttccaactcagaaattgaattatgtagcatcctgaaatacaaaagcttgcactttctcaaatggtaatttcttgaggttatgtaaacttgaatttgatgaattttcatgaaacagaaagtggtacaatatatacatatgctttgacattttaaaaaataaaaattcatggataagttagatggtgttggctctttcagactgacaaaatagaaatatttctgcagatagtgaaaagcgctcacctattcaagagtcagaa

SEQ ID NO: 51987 - DNA, 727 bp, Ricinus communis
  Intron number 1 from transcript 29904.m002994 (locus 29904 .t000108) derived from phytozome v7.0 (chr-ID 29904; pos 7 50831 to 751557)
actgcacggaacgacggcttctctggtttcttaaggttcttcattaaatgcctttccttttcttctctttcgagaattattggagatgtttctttgtctctttgttttgttggtcatttcagtgtactctgttctatagagaaacagagtttcttctgtttttactttctttttttttttaaaaaattattttcttttgtgcttatttaatttcttttggtattaaaaatcaagattttgagctgcattatttcttttcaagctggtttctggcgttattttatagattcttgcttttacacagaaaataagcgtcaaaatgcggcttttatgttactttccctgcttcagtctatagctgcattatgaagtatttagctaaaatggagctgctaacaaaattataaaatgtttagcttgaaatgttagtttcgttttccttttattctctttttttttggggggaggatgggtgggtattggtttgttagctccattaaataaccttacgtactaagccttacaaagtttcattttctctttcatttatttttctctctctgaatctccaccaaaatgacagagaaagctgactttagtttttaatggaagagcacaaaatttatttcactagttagtcctaatccactattacattctctaattatgtctgttgtcattattctttgcaggaatattgtagaaacagagcatttggagagctcaa

SEQ ID NO: 51988 - DNA, 762 bp, Ricinus communis
  Intron number 1 from transcript 29889.m003358 (locus 29889 .t000124) derived from phytozome v7.0 (chr-ID 29889; pos 6 10861 to 611622 reverse strand)
ttggttgcatcccttctaaggtacaaaaacatctcgttttttctcttaaaataattctcgtaggttttctttgatgtattttctttctttctttttctgtaaattattgatttagggctattttatatgattgtctgtttattttacttaatctcagatcccgtagtggtaatcagactatgatactttgttttgatatttcctaatttatgtctgttttgtttggtttattatttttattaatctcatactgataattagtagtatgtcttgtgtgttaagtagctgtttatttttattttttttctatgggaattctatactattttctgataaatttttcttactaccttgttggagaatccaaaaggaggcaacatttcaacccatttgaattctgctctcatgtttggagacctcatcgttgctagaattatattcttttagcttaggaaaaacaaatctttttgaagaaatgaaaggaaaagatgacatgattttactaaaattcaatataattgagctcttgcacttgatttcttccaaacaatgctgaaatatttggtaatttgtgattcaagcttgtttgctttttatgaagtttatgaaggtaatgactagcagtctgtccctatttatttacttgagcactcttttttgtttttaattttcttttatttcttatatttgcttgcttttagttgtttcacctttgaaaattttttccaactcttttttcaggcactacttcattcctcccac

SEQ ID NO: 51989 - DNA, 1006 bp, Ricinus communis
  Intron number 2 from transcript 30128.m008691 (locus 30128 .t000152) derived from phytozome v7.0 (chr-ID 30128; pos 5 47411 to 548416 reverse strand)
atttcttttgtgatcgccctaaccctatcttacaggtatgtctttttcccctctttctttagggtttatattttttatgtgattatattaaagtaaagaataagactataagtatagacttgtgttcacttttcttaattgatattgatgaattaggagatttttcttttcctgttttgttgttgctgctactgtgatttttagcttttggaatttctggaatggatttttcttttgttatgcttttaatcgaatttaatgctaattattattaattcaataattaaaatccttcattgacttactttatgatggtttaggtttacttaaaggcctaaaactttgcttgtggtttttcttgaaatttagaaatgagtttccaattttaggaatagaaagaaattccttttgtaacataatataggaagagcgatttctgttcattaagaagcacaaaactgtataaattcaatcccacgtgtgaggtatatgatattaaagtgaaaaacaagaaggcaaacctaggcatggaactttaaaaatacttttcaaggtctatgagaatccatcagagttttatacgacgaaagtttataggatgtcagatttaaacgtctaaaaagtgagataaaatgaaagtaagatattgaaataacagccaaaatcttatctattatctatacatataaaagaagagtaaagatcactgagttatactcagttccaattatacaagctagaaacgttcagatcattaccaacagtttatctaagttaaaattaccattttgaatcttgagggttatagacttggttatagttgtcaaatgaaaaaatgattctttatctttctcatctattagcttttgagaaaaaactgagctatatcctgcaattccaatacatgcaagatgttgctcttctttttgtggcaaagggtccatcctaaaactattacacttttccttcagattatatatttggcaatcattggagctacttatta

SEQ ID NO: 51990 - DNA, 185 bp, Ricinus communis
  Intron number 1 from transcript 29912.m005376 (locus 29912 .t000102) derived from phytozome v7.0 (chr-ID 29912; pos 5 33149 to 533333 reverse strand)
ccttcttattctctcgctccaacatcgatcttaaggttctctccttctcataagttttttttttttttttttaatatttattcaaaagtcgataatcaaatctttcttctttttttattgtgtttaaaagtaatagatttggtgaagtatgattaatagaggtgtttgttgttttaacaggataa

SEQ ID NO: 51991 - DNA, 367 bp, Ricinus communis
  Intron number 1 from transcript 30068.m002578 (locus 30068 .t000068) derived from phytozome v7.0 (chr-ID 30068; pos 3 77639 to 378005 reverse strand)
gttgctgttctttgggtaagcaataaactattttcaacatcatcatcactatgataattattattattaggatatttaaaattggtgaacttttaagtctgtggcttacataatggtttttaagtaactaattaaacttgtcagtatacaactaactattttagtatgcatgttaatgatttgattatgtttgcataatgtctgttttctaagaaatgacaaggaaaggaaagaaaaaaagaaaaacagaaacatatataggtggaatctttttgatggtgtggaaagtggaataaatttcctttgcattttttagcaaatcttaatgaagaacttatttctacttttgtttatggcgctgcaggag

SEQ ID NO: 51992 - DNA, 704 bp, Ricinus communis
  Intron number 3 from transcript 30073.m002196 (locus 30073 .t000006) derived from phytozome v7.0 (chr-ID 30073; pos 3 0075 to 30778 reverse strand)
ctcaagggtctatctctattccctataattttccattagttattctttcatcatttgatttttgcgtcggtaaaatgctaaagtgatttactgtggaccttgtggtcttatgcccaactgtttcactgtaccattgagcaatggcttccttgatcgaatctaatgcatattaaatacatgtgtctctctataagaagtatgattgttaaacttaaaccaagaatgcctaatgctttatttgttaattgctttgtatttctggggctaaataatgtactttaataatattttttgaagtttggacttcaacttagaaaataagcgttctacgtgataaattttgcaatttcattcttcttgcgcaaaaaatgaaggcttcactgtttttttttctcttaggtcactaatgcctaatctagtcatgctttctctctttttatcttcttaatttttgaagtgtctcaggagcactagtttagtccttccaatgatagaatccttatctgtttgtatatggcagtcattagttccttatatagctggttgttcttaagattttatgaattataaactgcatgagtgggcttctaggtgtttatttactgataaacactgtctttgttaaattagcttcaagtttgggaagtttatatgtacttttaaatgcagtgcaaagcttgttgatcttgctcttgcctctggaa

SEQ ID NO: 51993 - DNA, 620 bp, Ricinus communis
  Intron number 1 from transcript 29923.m000799 (locus 29923 .t000014) derived from phytozome v7.0 (chr-ID 29923; pos 1 11285 to 111904)
tggatttctacaatttggaattgaacaataccaatgtgagcttaatttttcattttcatttttctgtctcaggttgttgattttcttctcttgcattcagttttagtgtagcctcattatttcatcattttgactagatacaaccatcactagataatagctgtagttttgttgaattggatcacctgttgaaagcctttctcctcctaagtttaatgaggttagctacttataggaaaggagggtctcccatattcgaactagtattaggtttgtgtcatggtgcgcccacattgatgcaaaaaatgtataagaggtaggattgtctccgaattccatttcggcaggatcattacagggtaatgacctttacttgggaagtaggagaatttggcagcaccttcggtttgaatctgatgattcaaaactcaagattgcaggacaggtaaactcctagctgtcatcagtctaaaacacgacaacattttctaaagttgttctagtctgtggaagtaaacatcatgtgttaagaacttaccggcatggctgcttcttcttcttctacttcttgggttaaggatattgctacttctctatgcaggtagtggaccacacaaaac

SEQ ID NO: 51994 - DNA, 687 bp, Ricinus communis
  Intron number 2 from transcript 30147.m013903 (locus 30147 .t000174) derived from phytozome v7.0 (chr-ID 30147; pos 3 231964 to 3232650 reverse strand)
agtttgttaaagtgctagcaggttttttctctgattatcttttttttttttttaaaaaaaattagttagtaacgaagattacttattgaacctgtcgtggcacattttgttgcttgtgcatccgcatttaatttggaaatatatgtattaggagatcatagtttcaaaaatctattttcatgttttaatatctcaaaagaaacttctatggaattacttactcattgtaattgatcatttagatttttcttctacttgtcttttcacattagttcaaatctttaagcttttcagaaggcattgcacttctcaaaacaaaaagtaacccaaatattacaagaagaatgagtttgaaatttcaattcgaatgatacaagttaaatgggatggatcaatgattactataactcccttattttgccatgaaaatctacttttactaccttttcctaatttgcatttgcacatgaatctttgtatatacatctgatgcacttctttaagtacttcagccttactgttcttgtttaaactttttatcaatgttcttttgaactaaatggtcccaaagctgatgtcactttgctttaaatttagatgcatcagtttttaatatatgtgcgtttttctttaattctcttttattttttcctttgtacagtgaagactcgtaaggaagctaagcag

SEQ ID NO: 51995 - DNA, 681 bp, Ricinus communis
  Intron number 2 from transcript 29908.m006233 (locus 29908 .t000284) derived from phytozome v7.0 (chr-ID 29908; pos 1 799410 to 1800090)
caggttagttatttatttattttttctttatgtaaactgattcaagttctttactttattttctttcgttttatttatgtgggtttaagaaggaaggaaattagtttaatgcttaaattggaggtttgtttagtaatatatattcttttaaaacccctttttgtaatattgtcttcattacttagtattccaatcataattcactctctacttggttgaattgcaatcgtaattgctacttattggccaattgggtcctgattgagaactaaataggtctttgtttaccactggggtttggttgttggaaaagaatatcccaagtgatagaatttgtttcagaaatgcctaactatgttgtgcgcattatactgatgaatatttagtagtgctaagaaagttgttttttgatttgaggatataagattgataggttgttgttgttgatatagtgaatcactcaaatatttgtttatcaagttcatgcaagctaatcatttacttgaagttgcttatatctttaaaatgtgtcacttattcttcagttgtatttcagtaatttattggacagtaattatctaaatgaaattgcatttaacgttttctttctttaattcattcttggaaattataatcatgtttgcaggaaagaaattggctcaaagcatagtcaaagaaaaa

SEQ ID NO: 51996 - DNA, 688 bp, Ricinus communis
  Intron number 1 from transcript 30113.m001426 (locus 30113 .t000002) derived from phytozome v7.0 (chr-ID 30113; pos 1 15645 to 116332)
gcccagaagaagttgagaaggtgaatctatttatatatttatgtggaatatatcattgaactgtatattgttgtatattgttttgttgatatcaaaattttgttttttatattcaaatggtataaacttttaattttattttttaataccacacttattatttctgtttcaatcgatgatgcctattggatttcactgtttctttcctggcatggaaaccaaaaatttatgtaagcatgacactaattaatacatcactcactaacgagagtctttaagcataattagtaaagtggatcctactagaggatccaatcaacaagtgatatgttaataatagtagacttccagttgctacgtcaacaaaaatcactagaatctagttaatattattaattgaaataaaaataacagatatagtactaaaatgaaataaatttaaaaacttaataccatttaaatataagtggtataattttagtaccaacaagtaatttacctttacattgaatgatttggtgcactcagaatagtgcatcctcttcaaatatgcatgtgagacgataggagagaaacactaaagaggaatactgaagttgtaaactctgataatttacaatcatcaatgaattcttgtaaactgtcctaacttataataatcaataaattgttgtagtcttgcagatta

SEQ ID NO: 51997 - DNA, 1010 bp, Ricinus communis
  Intron number 1 from transcript 29917.m002018 (locus 29917 .t000087) derived from phytozome v7.0 (chr-ID 29917; pos 6 14167 to 615176 reverse strand)
tgaagaagtttgtggccaggtaaagttttgattttatttgataattaataatcgatattggtttggtttttgttttcgtttttggaatgatgggtgtttactgctttttcttcttttttttttttttttttcttaaaccagaactgtgtattttggtctctcattagtttaaagaattgatttttgaagttgaagttggctgattttgattcaatagttgaattgatcagagaaattttcccctttgtttgccttttctcctattaattccttttatgggatttttagttctcactcgattttcaagtaataaactgacaatgtatatgtttatgtggtttgagctcggggttgcagggtttggctgtgaattcataatggcttggaatttgtggttatgtgtagttattttagtttgcagatgttggaaataaattgtttaagccttgaaatatttggatttgtgtggttaattcgaacagggaataatgtgaatgtgtatgaaaattgattatctggattcatggcatgtggttagattgcttgttagtggttatttgtgctatgtatgtattttctcttttaatattgtattaacactggaatgtactagtttcagattctatatgtcaataaactatattgatcttttcttccaaggattttagttttattcttttcattttacaagtatagttgttgtgaagctttatcttgaactggaatgtaatttaagatttaacagacatgattattggatttgtgtgtgcatcctaaacatttactttttctagctttcgttatgttccgagtctatggattattttgtctgtgaaaggattactttttcacaagttgaaccagtagttgggtttaatgcatataggttttattgtttaattttttccgagtgataatgtgtacatatgatatagtgccttgatttaaattcagacttttaataaatttataatttttaatggcagcagtcctctcgtgcagctttgagc

SEQ ID NO: 51998 - DNA, 734 bp, Ricinus communis
  Intron number 2 from transcript 30026.m001441 (locus 30026 .t000005) derived from phytozome v7.0 (chr-ID 30026; pos 3 7938 to 38671)
aggagcttcaaactgctagtggtacgcatcacttgtactgcttctgttattttacatattcctattgtaataatgtatgaaaaggaattttgagtagtcatggttgcttgctgaatctagaaccaataaaaatgttttacttaggttatccttttgcgggttgattgatattttcaaaaacccgtgtatgaaaaatctgagtgtgagtttttctttttcttttttctttgggtaatagtatgcatgtataacaatgtagagaaactatagatcatctcatgcattttcctttcttttctgtgtttggacatgtttatatctgcaatggttattactatatgggaaagggaatcaaaagataagggtttatttacattggatgcccaggggaatgctacctatgcagaaatgtgtgttgaaaggtgtagtaggaaatgagagagcttttaaattttgacagtgtgggagtcaataactgatgttaatcacggaggtttggatgcttgagacaggatatctcggtcaattcatagaatatcctcataacaatcttcatttgatcaccattatcatgcagttttgctagtaataatttcttggtagattataaattcaggtgacaacatttagggctcagcatttattgtttcttacacgtttgtgataatactgtaacttcttttaatttttatttagcaggcgaagaaaaaacacctccaggaactgttcagatc

SEQ ID NO: 51999 - DNA, 813 bp, Ricinus communis
  Intron number 3 from transcript 29822.m003343 (locus 29822 .t000018) derived from phytozome v7.0 (chr-ID 29822; pos 8 4996 to 85808)
tctgtactacaggcttcgtgagctcaaacaactaggtgagtttgttgtactttctttaaaatattaaaacaaaataaatatttccgtaatagttgaagatggtgtttaggtatatgctgtgaatctaatttagcataatttcgcgttattaataaaaaaagaatagtggttaattatttgtttgatgcttttcattacgacatttagactaaggtgtgctttacttgagtagttactaatagatatttagaaagtatctttacgtgattcacattagttgtacttcaccaatttcttcgtggaaaccaggtagcggtgtgtaacatgtggtctgccatggtgtttttggctgtagtaacacatatcctgttttctttatggccacctctgaaacaaatctatgtgctagagttcaactgaattgaattcttgcaaagtcatataattgttggcatgatttcttttctatcaaaatgccatgtttttcctttcagttgaaataattgaactctagcaactatgaggtttctaaacgtaaactttatagaatagaatagaacagaattaaattcttgcatattacactttgcaaattaggtgcatgtgcgggccttaatattgataatcttatgtctttagcatcaaggattcactcaaaagcacgcaaattttgtcttagacagcttgatatgtcatagctcatgaacttacccctataaggaagctactgtatgtttgtgaatgatcttaccctataaagaagctacagtatgtaagtaaatatagttttcatgtgttttaggtgcaacccat

SEQ ID NO: 52000 - DNA, 956 bp, Ricinus communis
  Intron number 1 from transcript 29968.m000655 (locus 29968 .t000024) derived from phytozome v7.0 (chr-ID 29968; pos 2 07611 to 208566)
gtggtaacaagttcgttcttttctctgtgctgggtttcctcgaaatttgaccgtgttatattttcttttttaaaaaaattgaccttgctatatttttgtaggtgattcagagttctgatcatgtttgttacttgcgtgaatactgttgtttatgataatgttattgacattgaagattctgatcattaggcatgtgagcttgtatatgctcgagttataagtaggatttgggaagatatgcattgttttttggtttgatgtagatgaacaataaagaatatgtgtataacaaaacatttggaaagcaatactgctgtatccacgagcagatcaatttaataaaatcctatatgattcaaaatggtaatatgctcagagcgaagcaacatgacttgttgaaacttaacactgaatctgtccaactgaagaatgttaattaaagtctagttcaaatggcaccttgcagttttcttttatgaatatgctgcctagaattatttttacatgccaaaattgatgttctacttctcggccatttgatcttgaacggagctggttttcttttttgtgagtattgctgtactttctttgattgccatacggtaaacaatcatatgcaacatggaaagattactagcagatattatatatacctgtcaattttatgatttttggttgtggcgagattaaattactgcctagtttcattctacatgaagcagtaaatgaaaatgttgaatgctgcgtggaatatgtttatggagtcttaagggctgaattatatgcctaccatgcatgcttggctaagtaataagtattcttgcttggactgtttcagtgttacaaatttttattttctgctacaaatttagagggaagagtagtttatgaagcttaagtgcatcttatgtgttggtgaatggttgatgataggactaggaggacttggaagccaa

SEQ ID NO: 52001 - DNA, 653 bp, Ricinus communis
  Intron number 1 from transcript 29976.m000487 (locus 29976 .t000002) derived from phytozome v7.0 (chr-ID 29976; pos 1 2349 to 13001)
tgcaaaattttaaagttctgggtttgcttgtttaagtgagttcaagttactacattttcattttcttgttcattcctgtttctgttatgagcatgataagtacaaactgtaatgctattttgtatgcctctgtttctcttgtttttgatacttaagtcattaagatatgggattgagttgtggctttaactcacttcctgcaactctctttttagcataatgttactttttaactggtacattttggtttaagttggctaaaggttaccgcagctcagaatgtgttggttgaatctgactctctagtccttgttaatgcacttcatagctcattatcagattcttccagttttggtttgatagttgatgattgtaaattccttctcaaggaattagtttgtatttctgtttcttttgtctcgaggtcagcgaatagtgttgctcatgttcttgctagagcttctgattctgtgtctgatccaaaggtctggaatggcactccgtctccattcctttgtgatgttattagttgggatttgatttaatgaagttatccttttatttcaaacaaaaaaaaagaaactggtacattttgagctttttcgcttacaagatgctttatttccagatttgccaagtgaatagataaaaga

SEQ ID NO: 52002 - DNA, 987 bp, Ricinus communis
  Intron number 1 from transcript 29939.m000547 (locus 29939 .t000025) derived from phytozome v7.0 (chr-ID 29939; pos 5 35500 to 536486 reverse strand)
caactgaggtgagaaattcccaccctcttttctttgtacatcttttttgaggggcaatgttatattcaatatagttcctttttctttcctttgatgtagtttctctcatttaacatgatatgattagccctagaaaaatttcttttcctccattaaatatttgtatgttctggatctttcttcttagtatatttctatatgttttgataaagttttcttacaatggaagtctgtttccatattttccttttaatttagcaaatatagtggtttaaaaatacggattcctcattaagaaggtctcatcttttgaggtgttggtactgtaaggatttgaactgctatagttgatctatggacagttatttaatttataggatgactaataggtcggtctgtgtttttctactgagaggtcagttagatcatagatcagtgaacctcatgcattgattttcacatctccttattttatctagtacttgcatatttccagctcctcataacatggccgattccatcatccatgccgtgtatgtggtgggaaactcatcttttcacctacaagaatggatattagtaattagcttctctagtttagggggacttggtgagaacttaacctacatgtatcatcatgtgcatgctgttatagcctgatcctaaaaatgttgagccagaagaatttaagacgtacaatccttttctctattaacttattaaattcacattacgtggaattttggcgttttgttatgtgaagtcattcagatctgttcacctatgccaattagttgaacacttttgggatctgaggggccctcttgacttttaactgcatttgagcattaatgctttgccaagggagatcaatgaacaattaattcaatttattcacgtagtattatacagaccttaaactaacatgaagtctttgtattttcatgtacaggtctttccatttggttctgtaccactgaaaacata

SEQ ID NO: 52003 - DNA, 837 bp, Ricinus communis
  Intron number 1 from transcript 29912.m005483 (locus 29912 .t000209) derived from phytozome v7.0 (chr-ID 29912; pos 1 354366 to 1355202 reverse strand)
caggagaagaagaatcaagttgctcctgcttccaagtaacttactacttacttccttactctcttcctctcttttcttttgaggagtttttattttgggttaaatttatgcattctgttgcagtttcaggttctctgatagaattagaaaaagaagagataaaattttgactttgtattctgttgtttcagttctatttgtgaaaaaatgagcagctggcgtgaaactttaagtttcagggactacatctgcataataaggaaaaatgaaaagatggaattttttgcttgctaatgctaaatcactgaaatgctttctggactattgatttagaaaaaattaaagtagtagaagaagaaaattagtaaatgcattccattattttatctgcaaagaaattaacattgaaaagttgttgttgcttcatctgttactggaataagaacgctgttctgttctgcatgatcattctgtttcatccctgtcgtttttgtggagcatcaaagtatcaaactggactttctcaatctgtgctgctttactttacattcttggcgtcttcatgcatacatgtgatgcagtatgtgtacaagttccaaatgatttccatctccaccttgtatatgttttgcagatttgagatgaacgaaccaggtttctggacatactttagatgaactttcaagttattaggttttattatttttcatggactcctactttatgatacaattttataaggggatcatttgcattaactagacttgatctagtttcgttcttgctaaagagatgggctattgttgtgtttgtttctgaaagggcacaagttgtggg

SEQ ID NO: 52004 - DNA, 538 bp, Ricinus communis
  Intron number 3 from transcript 29929.m004630 (locus 29929 .t000133) derived from phytozome v7.0 (chr-ID 29929; pos 7 79720 to 780257)
tgaggttggagtctgtaagtgctcttcgcctaaaggtacactctactaaatttgaagaatatgtctacccttctcaactagtacgtttgcacaaagttaaatgaggttaaaaaaaaaaaaaagacctagacatgattgtacattatagcatcattttgcatctaattttggcatgctgcatactagttaacttaagaagtatgcttctcacttcagctctctttaatctgaatacataaatggagctgcgatgcaaagaccctgattgaatcatgaactttagaaagattaatttttagtacaatctataatagacaagatgaaacttaaggtgttgtttgtattggccattttccaatttttatgagactactctgcggtaaacattttgttttgattatcgacagcttagtactgagattttctgaattaacgaatagtagagaaataacgaaatggaacattttggcctatctgtgtttgatttttctattaatgctcttaaaatcttatcaggaaacatttctgaaagaggaaa

SEQ ID NO: 52005 - DNA, 824 bp, Ricinus communis
  Intron number 1 from transcript 29887.m000237 (locus 29887 .t000009) derived from phytozome v7.0 (chr-ID 29887; pos 4 3384 to 44207 reverse strand)
tagttcttcctcaaacaattcgtgaaaggaaacttgtaagttcttgtaattcttgctatgttactaccatcattcataaatggcgagttctagacttgtataagcagaagtagatggtctaaaactagaacttcgctgtgttatgttcttattctggataatttcttgtatataggacttcttttgaagatacttttttttctttatgtatattagggtattccagcaaagtttgccaataggtacggcaatgatctgccaagttcaataatcttgaaggtccccagtggtgcaaaatggcaagtagagattttcaaatgtgatggtgatttgtggttacaaaagggttggcaggaattttcaaagtactactttatagaatatgggtccttcctagtttttgaatttgatcagaaaaattgtggcttcaatgtgtttatatttgacaagagtgcttcagagatagactatccacttggtaaagataatatagagcataatcttgaaaaagagtcccaagaaccaaatattcaagaaactgaaaacgatgatcactctgttgaaatcttgggccactactcaccctgccgaaaaacaagacagaaatcaccattgttgattccttcccctcgcaagaagataaagctagaaaattccacaagaacaataaatccaacttttcccacagggcaagttgaaggtgtgcaatttccactttagacattctattttcgtcctatgaagagagctctagttgtatgtcctgatacttgttactgatctttcatcatgtgtaataggagggactgattgtgaagcgcata

SEQ ID NO: 52006 - DNA, 701 bp, Ricinus communis
  Intron number 1 from transcript 29908.m006178 (locus 29908 .t000229) derived from phytozome v7.0 (chr-ID 29908; pos 3 97298 to 397998)
ctcttggctctctttgcaaggcttgtaaacctgaggtattttctttttatgattctttatgtcaactttagttaatttatcactcttggttctattttgagtcttgggttctatagatcaagaaatagagaattagaagtaatagatcttgagcactctcctacattagtggtgtttgtttctttaatgtgtttcagtccttctttctaaaatgcattgtggatcccttgtctgttacagagtacttctttcatggtgtttgatagatcctgcacggccttattctctttttctatctatcaaatgctttcagttaaaagatggtattttcattctctggtcttcacttgtcctcttttaactgtttcttcttcatgctgggtaatcttcaatcctatattttctattttacccttgttttcttctaattttaatacatttctaaagtgaaggagaatgggaacaattttttagcttgtcttttcattttttcactttttctttccataatggaggtatgggatgagggacttttcagacgcatttatctttttttgtctctctatgtttgtttattattgttattttctgaaaactgtgttgtacattgcttactcaatttttgtatgaatctaaatctaatggttcagttggggtgctgttcaggtggaagtggaagcactggtaatccaagggccaaa

SEQ ID NO: 52007 - DNA, 652 bp, Ricinus communis
  Intron number 2 from transcript 29929.m004730 (locus 29929 .t000233) derived from phytozome v7.0 (chr-ID 29929; pos 1 341354 to 1342005)
gatcgtcgtagactctggtttgttttgcaccctattggataagaaatattgaaaacttaatcagctaataaactttttttatggacctttggttcaaagtcaggaatgggaatgagaaccgagaggaatgggaatggaaatgattgtcttttatatggtatttggttcaatatggaatggaagtcgatttccgattattatggatgccaataatgatgtttaattattgtaaaataaattaatgtttgatttgttattattgtatgcaatatgtataaataatgtaaatataaataacaagtcattatttatttgtttgacaatttattattagtttaacttgattccattggcaaaaaaaagttcaatcccaaggggaagagaggaatgggtgattcctattgatggggaattccattcagattccagagtgattttacgaaccaaagacttgtttataggaattactctttccattctcattcccattctcattcatactccattttcacgatctaaataactaattatgatgaagttaagttgactgagattcacaatgatggtttaataattttgcaattatttagctttgttgttttttgcttttatcttcttgtgtcaattttttctccaggcaaggtgatagttc

SEQ ID NO: 52008 - DNA, 588 bp, Ricinus communis
  Intron number 1 from transcript 30128.m009020 (locus 30128 .t000481) derived from phytozome v7.0 (chr-ID 30128; pos 2 188088 to 2188675)
ctttgccactaggcattggctggtgagtactcgcttgtttatttgactttttaagtatatatcatgctagtcatttagttatatggtaaattttgtgtgcatttaggttatttatagttaagtgaggcgttgtttatttgtatgattagaatggctgaatcttggaatttattggatattgtggatatgaattatgcatggctaatttgactttcttgcttttcttgttttaattttctatttgctgctgtcaatttcttccttccacagttagttattaccttacttattatgtcagaaactcagttatttgttacctctatatcaaaataagtttccctctctctctctcatgcctgataccctaaattgatttcttctttgtggattagaaatgctagcaagatgttttgggacaatttgcacttatattattaccgtttctctttatctaagctccatatgtatttgttttctaatttgtcttgtttcttaatgttataactgtaacatgtaactggttttaactgtttccttttatcttttttggtaggacgatcagcaggtggttgtgaagcgaaaaacaga

SEQ ID NO: 52009 - DNA, 831 bp, Ricinus communis
  Intron number 2 from transcript 29822.m003394 (locus 29822 .t000069) derived from phytozome v7.0 (chr-ID 29822; pos 3 70853 to 371683)
aaactgctattcctactgtgaccaaggccttggaggttcgaaacttgcaccctcttcttttatttcttttgctcgagttaggatgcaaaccagatttctcttaaagttcattttgattcatgcttccccttataagatattgtttctataacaagaacatcagtaaaagtgaattatgcaatgaggtgatgtgatgatgattgtaggttgatggaaggagggaagaaacttttggatgcaaaagaattagttaaactccttgatgaattttatatcgaaatctaataaggtggagttatgattgatttgaagctcttatagttatcctaaataatcattcaagacatttagtgagacacaccacctattttctagttgctacaaaatatgtctgctttgaccaaatagtaattataaaaagcttttcttgtattggatatttctacaaattgtaaaggaaggaggatcaaatatgatatatctgcagagtaaaaaagttggtatattcatcatttcacctgaatttctcatgagaatgaacgagcgtttctttttctttctacgggcattatactgggggtgattagaagctagaatttctaaaacttgtgaattttaaaggatcaagttgaaaaactatggccatatctgcagtctaattatgtgggtattcatggtaccaagttgagatacgaattatgttaggttgaaagcatactttttatcttgtttgttgattagttgttttctttaaaaaatttaccttgcaattgatgttgggatgtttattacatagggatctgagggcattacagatttgaaggttcaagt

SEQ ID NO: 52010 - DNA, 712 bp, Ricinus communis
  Intron number 2 from transcript 29820.m000989 (locus 29820 .t000010) derived from phytozome v7.0 (chr-ID 29820; pos 5 6225 to 56936)
tggataatcattccaaaatctcaggccgtatccttgtttttcaatccgttatgtgtcctttttcttgtaactattttctttatttctgaacaccttttttctggtttgagagagtttgttgtatatggattgtccttaatatcaatctcagacattgtggatagagaaaagaagatggttgagaaatttgaatttgatccaacaaacacgcctgcctttgttacatgccagagtatttggaagatgataaatctacgatagatgctcatattgttcctttcagatggcacacagtagtgtataatgaccatgtgttaattgtttgctgtttgtggcagtctttttgtaatatacttaagttataattattatttatgtgggaagtgctgccaatggtgcttaggtcttgtttgctcatttgagctgcatttgtgaaatatagttcaaattcctttttcctccattgtattaatagattttgcttaacgtcagaaactgctgcatcagtctgaataatactaatagttaagatatgcctcattctaaggtgccattcaaaatcatctagctcttatccactgggtaaaacttgtttcattggtgtttgatttttgatattgcaattgtggctgtctaacacattgagaagtttgaaaggctgatatgttaaagttcaggtagctgtcattgctccaggctgccagcagagtca

SEQ ID NO: 52011 - DNA, 421 bp, Ricinus communis
  Intron number 1 from transcript 30024.m001703 (locus 30024 .t000020) derived from phytozome v7.0 (chr-ID 30024; pos 4 43540 to 443960 reverse strand)
ttctaccactctactgagttttcttcttttttcaggtacttgagtattcttttgattttactttgtgttcattgcctctttattttgatgggtttccaccaattctattttctttgattgatttcattgaagacagtagccatggtttatgcgtctcatattagattcaaaagagcttttttttaaaaaattcttataatttaattccggctatcttagcacataagatgccttttcatttttatatctttggccgaattgcattatatttttagatgcaagaaaatttggtttgttgactgtaaatttcttatgttgtcgttttggtcatttttggctgtctttcttttcttgcgtctatatcctaatcaaccgaaggatgacagactgcaaatcagtgcccattttgtcaagaactacc

SEQ ID NO: 52012 - DNA, 818 bp, Ricinus communis
  Intron number 1 from transcript 29917.m001950 (locus 29917 .t000019) derived from phytozome v7.0 (chr-ID 29917; pos 1 26129 to 126946)
aagaagaagttaatcccttttctgtgagtttctctctttcatgcccccgttgttatttctgggttttgttttctttgatgcatagttgaagtttaagttgacttcttggttgtttggttttgtgagttatgggttttagaactgatgatacaaaaacttgggaattttgataattctagcgaattgggatggttttatgcattgatatagcttattgatgtggatttatggttcacttttgatgctttggcttatgaagttgcaaaaatctttctttttctgtgtattccaagctaatggcttcattttgccacaattcttttatgatgttgggttggtgttgaactgttgttgcaaaattgtgattggtctaagaagatacggatggttgtttgatgtagtatcttgtttctggataagcttactggggaacgtttcatagagaatccgctttttcattttttatcagcggctctattacttatcctgtgtgaattatctctggtgatagcaaagatattctgacttagtgacttctgttgtttcgtataccagtatacttgatatatgcttaaagcaagattttcgagactcgggcagcgtgctgcttcatgcaagcctgcttttcttttttttgactttatagatttcttttgaagtgtgatcaatagagagaaacttgattgtttattttctgcttgatatgattttgttcctctagtgctttatcattttggaaagttctgcaacttatttttagtaataatctaattttgtaactaggatcccgttgtaagggggaaagcaagtagtcagca

SEQ ID NO: 52013 - DNA, 680 bp, Ricinus communis
  Intron number 2 from transcript 30110.m000732 (locus 30110 .t000022) derived from phytozome v7.0 (chr-ID 30110; pos 7 07988 to 708667)
accttgaagttgggtcatattcccagcaggcagttggtctttatgcataccaagttctttaaatttcttgaattgttgtaattagtgcttaacacttccattctctgtttttatggagtataagttattccattgcttagttcagtgaaaagaattaatataatggggtttcttttaaaataattgtcgaccaggaattctgaagtattctttttttcgaatgaataactacttgaaactagtcaacaagttgttgtcttttggaagtagatgatgaacaatacttgtagttttagtctttgagatagagaaaaaaatgactaattttcttgtgtttatttctgaattcttatgactcgatgtgctatttttgtccaacttttaggtgattgagagagctttagtaaaatgtaaaaaaaccaagtcttgattattcttcctatgctcagtatgaaagaatttaagtcatttttcttagagcattagcctaaaattcttaccatctgatagtgacagtacactgtgattgaggatgctagttctgtgccaatcatactgtggtattctgttgtaaacatttttgtacctgaaagatatagaacactcatggatgcttctgcgcttttgctttgattggtttgtcagagtggttccacccttgataacattgaagattggag

SEQ ID NO: 52014 - DNA, 686 bp, Ricinus communis
  Intron number 1 from transcript 30128.m008583 (locus 30128 .t000044) derived from phytozome v7.0 (chr-ID 30128; pos 2 597274 to 2597959)
ccttgtcctcgtctccctcgtctggttcatttctggtttgcttcttttctctcaacttgctttatcactgcagatccccttttcctcattcgattttctttttccttttcaattacgtatattacccaagaagttagcatctcgcgaaaacacttgtgaatctgctacagtttctaattgaacaatgttaatgaacaatcattcttattgttaaagcactttagaatcacacatttcgtctgtttaatagatttctttgagctaacttccttctgtctaacttgtttcttttcatcccagatcccaccacaaaatctacttgtactgctctcgtttgctgcacttgaataaatacacatttataatactcaacattttatttttgaaaaaacaaaagggaggctacgactgtcaatctttattctctgattcgagttgaccatgtcaactggaatctggttcttataaatacatcaagcaaatccccctccgattgtgcttttgaagcttttcatctctttcagaatgctaaatttctccttcaacactgttcttgctgtcattcaaccacttattaaaatttgactaatcttattacctggcttactgtaattcttttatttaaaattaatttcacatgtttttcttgtaccaggaagttcgcgtaaagcagctaaaattgatag

SEQ ID NO: 52015 - DNA, 379 bp, Ricinus communis; identical to SEQ ID NO: 51257
  Intron number 1 from transcript 30146.m003436 (locus 30146 .t000013) derived from phytozome v7.0 (chr-ID 30146; pos 8 5232 to 85610)

SEQ ID NO: 52016 - DNA, 360 bp, Ricinus communis
  Intron number 3 from transcript 30055.m001550 (locus 30055 .t000020) derived from phytozome v7.0 (chr-ID 30055; pos 1 68129 to 168488 reverse strand)
agattccaacacacaccaagagtagtagtttcttaacttgctttctcaagctttgactatgtgttttgtcttctgatgttgagtactagataaattaagaaacgagcttgaaaaaaatttaagatgatcttcacttttcagttttcatgaaaattttctttattactttgattggaaagtgactttttttttaaatttttttttcttttggtggttcttgagtgcccgtttgcaaactttgattaattctttgaaacatttgttgaaatactcaaattgaataattatggtggggtttgccttttgttttgcataattaatccagggaagttcaaagtcaggaggggagagtactgattc

SEQ ID NO: 52017 - DNA, 475 bp, Ricinus communis
  Intron number 2 from transcript 29945.m000090 (locus 29945 .t000005) derived from phytozome v7.0 (chr-ID 29945; pos 6 4122 to 64596 reverse strand)
ttagagaattgtatgttttcagtttttccttttcttttatgtggatgcctaaatattaaatgtttttcagatcatattgactctgtttaatttttgctaggatcaacccttccttttttagttcatttactaatcagtaaatgcggattgaagttgtcctttaggatacaggctagatgctcaaattcatcaattcttcagaatagatcactaaaatatttgaaagcatttcagaacctatcattatattttctcctgtataaatcttatggctgctctcttcttgcttacaaatggattgctgctttatatcatcatactctagtcacaagctcaaaaattatacaatgtgtggttaaggaaactttcttacaaaccaaatgtaggtttccaggacccattgtctccttttaagaagaaagtcataacaatatgtttgttgtttttcttttttctttgcaggcaattacttaat

SEQ ID NO: 52018 - DNA, 968 bp, Ricinus communis
  Intron number 1 from transcript 29848.m004670 (locus 29848 .t000226) derived from phytozome v7.0 (chr-ID 29848; pos 1 215843 to 1216810 reverse strand)
ggccacctgccaattctccttatccatcaggggtaagctctcgaactgttaacatattgtcttgcaaagttcgatgtttctgttagctaacaattcaattcatagtttagtactttgctccttatctcggatcaagaacttgttgttagatggaagaggcaactggttagttaaattctgaaggtgcaaaatttttaggttaagtaaccttaataaccaactcattggcgtatgattctatctttgatgcacaggtctttcttggtcaactagttatgctacttcttttttttgctttatttgtatattcttatcttcttcgccttaacctcttctgtcagttaggtgtgtagtgttattacctggcaaatttgatgggattttttcttatcttcctgagtggtctattcatatgagaaagacataaatttacattaaagaaaaaggaagtagaggtagatggatatcggtatatcattatgtagactctaatgtcatttttgtctgattttatgtgaatttacaattacttgtttctggtgcccaaaaattccaaatcctcccaagtaaaatgggtttttagcccatctgctgtacgtgtaaattgggtccacttcattgttggctttgcagtttcaggttcagccagcagcagtgattcacatgtcttcttgacattagagagaaatgatttcatcaaaattattactaccgtagactataaaaagcaccatgtcagactcagcatatgaagggagccatttagcttacccaaagttctgttataaaattgtcagatagatgaagtcattttccttttctgctttggtctatttgttctgtttctttaaatatgcaaggacacctctgtttcttgatcaaacatttttttactactgcattttaattataaatctaaatacatgtcgatttgaaacttgattttcttaatgcaggattagtgaaaa

SEQ ID NO: 52019 - DNA, 606 bp, Ricinus communis
  Intron number 1 from transcript 30128.m008853 (locus 30128 .t000314) derived from phytozome v7.0 (chr-ID 30128; pos 1 350315 to 1350920 reverse strand)
gagggtaagtacccagtggttataagattgttatgaactttttagtgattttgagatggtttttaactttgtcattgaaattcttgctggaactttttagtgattttgagatggtttttaactttttagtgcttccttgttttgttttttctttttctttcttctttatcttattttctttgaatttttttccctgtgggtactgaagtcgcagtatttgagttcaattgaagattatacaatcatacttaatatgctgctgtaaaatctaagttcattatttgctgtctctagcagaaaaatctgtaaaatgtaactggtaatgtgtcattataattcataaaagatgcaccagtgtataatttatggattcattaataactatgcacatatgtttatatgctattattatatattaattttatttttttatactcttaaataaattaaaaatgtattatacttaattgaataattcctctttaacttttatattttgttatcaaattcatcctatcattaaattagatcattattcgttttatcttctcttatttagtcttctcttgtctttttcttgtatgtggcaaatgcagcctaaacacc

SEQ ID NO: 52020 - DNA, 934 bp, Ricinus communis
  Intron number 1 from transcript 30128.m008728 (locus 30128 .t000189) derived from phytozome v7.0 (chr-ID 30128; pos 7 04136 to 705069)
ctgatcctgagactgagatagatcgtcaactgcaggtactcttatgatttatatcattattataagtagtagtagtactactagtctgtagtatggagtttaatttacttaaagtaacagtctttttggataaatttttaagaattggcattggttttgattggtttgattttatatcatacaaagcgagacatagagtttttttttagagagatagagtttttgttttaggctttctagtacaaaattgtaaaattcgcagagagtagtatctttaatgggctcaatttgtgtgtctgtgtataatcagttgtacagtttatataggggaatggtttgattttgttacgcgtggagatcatttattaagttatttacctgaagtgaaaagctgagattccctgctggattttgacatatcaaagcctttatgtagtttatacctgtgattgacaattcactttcagaataggatagtttgttagttatttcattgagctagaggttcggcatagctgtactagcaaaattaaagatagggaaaagagcttattctttcctgcattaatcagataaaggagttaagagatcgcatttgccttttttgttcattagccatttaataaataaacaaattaatgtcatacttctctttgtttgttaatgagcaagggatgagcaagcctttggttaagttatggtttattcggatcacaagttactgagtggagtgctgctggagagaattctaaagacctaacatgagattgactgctgagaagaacttttctttgttaatctcctacctattgaaatggatcccttttattgtaacactaacctctttttctaactactagagtttttctatgttgaccttatcttcagtaccactttttaatgttgactatggtgtacttgtggtttcaggttg

SEQ ID NO: 52021 - DNA, 597 bp, Ricinus communis
  Intron number 2 from transcript 29851.m002449 (locus 29851 .t000091) derived from phytozome v7.0 (chr-ID 29851; pos 5 71147 to 571743)
aggacattgtctcatcctctattgattggtgagctcatttttcatgtgctgttttctaattcgaatatccttattccaattagtcagcttattagttacatatgaaagtgggaagtttaggtagtaaattattcagtaagaatcaatgcacctgtatatgcatatcaagttttgaaaattaaattaaggtattccacaatctttaattgttctttcttttcaaatgaatatgggtttggcagtagaaacttttgaatatggcaaattgaaatatgacttctaatgcattttagacttcagatttaatagtttgtttgtcctggaacatgcaacacgggaaaaattgatctgcacataatatccctggcctgaaaaaattcaattgctctttcaaattgtctgtaaaagtaaattccttgtttagatgcatttctctacttaaaatttgccaatgtagaaaccaattgtattatggtttagataaatatgtttttcttgtttgaaattttactattctgctgctttcatgtaatgttttttgtttctttcgttgcttctgaagtactttgagacggtggaggaaggatcgaggtgttg

SEQ ID NO: 52022 - DNA, 940 bp, Ricinus communis
  Intron number 1 from transcript 30075.m001169 (locus 30075 .t000036) derived from phytozome v7.0 (chr-ID 30075; pos 2 69914 to 270853 reverse strand)
ttcaggttattgggtttcttttctttttctttgattgctttgggctcttcttttttctcgatcttcgtttctcttggtgtgtttaggggttggttttatttttaaagttctggttctagattagtattatattgatttatgggttctaagtctattgcttctcagtagttttaagatagtataatgtgatttttcttacgaagattgatgctgttttagatggattacatgctatagtttaatcggttgttcttggtttgtcaatctgatcccacactttgatgatcgggctccttaggactttcaggttcttgaattctattaattagtatctgttttaatttctagatatttgatgatatttgcaagggtttggtttcactatatttcctggtcagttaatgtctcaaatatccttctgggttgttcaagataatctgatctcttacagactccatggcctattaggttcttggcctttaaagctgattttatttgattaattaggcacttgacgtgtattaaaccttacatggagaggaaaaattagtttatataagaattgcacccaatcaagttaagggaggaattgaatgaaaacaaaaagaaaaagagagatggactctagagtttatgatttgaacattgggatttggcaaataactgaaaacattgaagataaaatgcaactaacttaggtctctgatagccctcatactaagtccacagtaattttcttgggaaacaaaaattcatagttaacttgctattctggtttctaatggttaaagatctttttagttaacagaatttcttgaaattaactaggactatcatttttctgcttattttggattgggactttactgtttctgttatttagatgtttgaatctttaatcacagttaatagacaaggatccaagcaaggcaatttcctt

SEQ ID NO: 52023 - DNA, 643 bp, Ricinus communis
  Intron number 4 from transcript 29851.m002439 (locus 29851 .t000081) derived from phytozome v7.0 (chr-ID 29851; pos 5 22665 to 523307 reverse strand)
aaggtgagatctttgcgcatttggtgcatcatttctagtcgatggttgtgtgggcagttagccttgaaagatggacttggcatggaaactacactttacaattactgtattttctctatgttatccattactatcaaagatttatctagtttgaagttacctgcaaagatctagactttctaccccgtcatgttcctctggtagaagatttgatgtgaatggaagccgttttagctcaaactaaaatccaaaaagttaactaatcatatttccatattcaagttttgttgaaatttattgtaatattaattgttcttatggttcctttacaaaagaaacaaaaattatatcaatgaccatgcttgcctcagaaaaaccttctatctcgggttggtaaacttaagtgagcattctcttaatttgcttagatatttccataggagatcagcaaaaagtgccacattgtccatgtctgtatttttgtgatcagaagttgtcattgtttaaaaatttgacatgcagctgactgacgatatattaatataatacatatgccactccacattgaattcaggtccttagctgacctctatatgttgttctgacaggaagagcgtgaacctgaaagggggaggaggaaaca

SEQ ID NO: 52024 - DNA, 527 bp, Ricinus communis
  Intron number 1 from transcript 29927.m000615 (locus 29927 .t000025) derived from phytozome v7.0 (chr-ID 29927; pos 2 13773 to 214299 reverse strand)
taacaacaggacatttcagataggcgattctcttggtaagctttctagctcaatttctttattacaagcctcattatgccctcatttgatattattcaccatatttatttatggatctcattttagtaattagtatcatttctcaagaagaatatcttttatatagcttttgcagaagtattctgaaacctctatttttacaagtttttgtcattgaattatgtcaattaaaaagtattttctctctttttcagttctcttattaaaatatatacacttggaacttaattcaagtgaccatagtatttggttttgagagtaagatattctgggtttgaattcctccgtccttatttaataagtttttgtctttcactaccttccatgatcccttggccctcccgtactattaatcttatttcatcttttatatatattgtaactaatgctcctatctaacgattaatatcacatatatatccatttgatcagtgttcaactggactgggacacatacagcaactgaa

SEQ ID NO: 52025 - DNA, 507 bp, Ricinus communis
  Intron number 2 from transcript 30128.m008808 (locus 30128 .t000269) derived from phytozome v7.0 (chr-ID 30128; pos 1 138934 to 1139440)
gaaaaggtccgtttgctcatgcttaatgagtcacagttcatgcgtgcattcccaatgaattctgcatacatatctatgattggcaactacttcaatgagagatctgcaactcttcgtagcccattagattttgtaaatatgtatgttatggacttaggagcaatatactgaggaaaatggaaacaaacttggtaggataaaatgatctgcacaaaatataaaataaatgttttttagcagaaatttgggcaatccattggagtatggaaaatagcaattgtaacagtgtacaattaagaaactcaaacggattgttgtgtatgttcttataactgcccaactttataattttcttatataaagttaacgcgctaaaagcattttacaagtctgatatgcaacatgtttgtatctcagttatttttttaaagtagagtattctttgtctacactgttgaaagttgttctgaaagtgttagtgcatgcagctggcaagggcttggcaac

SEQ ID NO: 52026 - DNA, 845 bp, Ricinus communis
  Intron number 2 from transcript 30076.m004600 (locus 30076 .t000164) derived from phytozome v7.0 (chr-ID 30076; pos 1 073321 to 1074165 reverse strand)
ctaagaaggtataaatcttatggtttcaaattcattttaaagttgcaaccatgggagtacatcatttgagaacttacaagaattaaaatgcacaaaagctcttataattactgttaatttgagatttgaattacacacatcttctggacatttcattctctgcattaatatagaccattagctctatgtgaagatatttattcttaatttactgctgctgccacttgagccatatcagtaatttggttttttgcttttttctaatgaaggcagtaaatggataaacttttctatcaaaactttaatcatatttctatgccttaaactcatgctttggacaccttataattctcttcttgtgtactaggagtttgctatatataattaccaaagtgtttcttccttgatgcttgaaagagaaaggaatatattgttgaatctgaaatatacgtgtgtttataactacgaatacgtttaatggtgtaagtagcgaatttttccttgaagcctacttccagacataccaaagaactcttgcacggtgtgagctatttgcaacttgaaggtgctgactgaaatggtagtgaaatctggtttttgctgaatgcatggagggattttgtgcaaaacttactgttgtcttctaagtcatacttgcatattttactgctgatcaatgtacattttccattagttaatataattatggagtgccgaactagtaaaaagtcaccttgttggggtttggagttcataccttgatcaatccctgaagtatcattattggagttccctgctgaaacatgagctccattttaactgtgcttctatcttgcagcttggag

SEQ ID NO: 52027 - DNA, 625 bp, Ricinus communis
  Intron number 1 from transcript 30076.m004600 (locus 30076 .t000164) derived from phytozome v7.0 (chr-ID 30076; pos 1 074198 to 1074822 reverse strand)
cttccggcttcatccacctcagcaagctcgatcaggtccctatctatttctctgttcttggcttgcacttcaatttgttcaataactcaaataagaaatacattatgcttatactttttaattttaggatttcgcttcaattacgataatactgtgctaaattggattggaaagatggggttatagtgatgaaagcgaagtgtagttattgtgcttgttaaaattctagactgtgtgcaggtgtcccttctccatatgggcatttttatttaaagatatcgacgttgtccctaaactcgtacttcctaacaaatgggttgaactaagatcaatccttggaatgggattccaagtttctttttggcactcgaggaatctaaacttttcatggtatcattatgtttgaaatgtttggatttcttagtgaaaatgatatctatttttatgtacaatttattctaatacctgcaaaatttaatttgtcatctcaaaataactttcgaataggattcctggtattagacatccttttttattcccattccaaggtaaaatggcctaagagcaattattggcattttgttttgcaggtgaggtcaacactgcagaacttcttcttgaacac

SEQ ID NO: 52028 - DNA, 555 bp, Ricinus communis
  Intron number 1 from transcript 29864.m001452 (locus 29864 .t000028) derived from phytozome v7.0 (chr-ID 29864; pos 4 53117 to 453671)
cggctatacagttagagccactgttcgtgatcccagtagaatctcttttctgctcgatgtctatttatatatagattaaatcgatcgatgattgatatattttagtttttttaaaataataatatatattaactctaaattataaaatatgtttaatattaaaatataaaatacttatatgtgccatttttttatttactgtgttgtatatataccggtataggtaagaattttgggttgtgtgtttgtttcgtctttcatcttgcatgcatggttaagtaaatttcattttactgcttttctttttaaacttaaatttctggtgtagaatgctgtttttcttttcattattttgatgattaatttccatctctatgtaatcaatccagtgagaggtgttgaactttcagattctgggtctaaatctgttttctttactctcttaataatatttctttagtttgagcttaatatgctaaaacctcaggaaatattattttttagattaaaaacattttggtgttatttttaacctatagtttgtaaatgtgacag

SEQ ID NO: 52029 - DNA, 415 bp, Ricinus communis
  Intron number 1 from transcript 29992.m001418 (locus 29992 .t000013) derived from phytozome v7.0 (chr-ID 29992; pos 4 04011 to 404425)
tcctctgctgagataaaaggtaaaaagtcttttcttttcctttttctataacaattgcttgtctggtaaagttacgtaatatgtccctttttttatgaaataaaaaatcactttttttcattgacacaagtagctgtagcattattagttttagaccaaagtactgaaaccagctgccaagtttcggttaattcagttcagttggcttttaaaatcaaaagtacatatttcggtgaatttggtttggttcagtttttcactttgaaaactatagcagaaactgaatcatgttgcatgcttaatttttttgaattttcgaaaatgtactttcacaaatttttgtaaatgtacatgtcgaaatgcttgcatacgtattctcaaagaagaatatttgtcatgtttgcagcctgcaact

SEQ ID NO: 52030 - DNA, 967 bp, Ricinus communis
  Intron number 1 from transcript 30001.m000076 (locus 30001 .t000001) derived from phytozome v7.0 (chr-ID 30001; pos 1 473 to 2439)
ctttaaatcagtaagttttattttgtttcttttgaatcttcctgttgcttttcttgatactgggttattgaatgttgatcattcgactgttttttttgcttgtattgaactgggttctttgagttctgctggctttgacttattatcaagttttacattatatttattgtcaacttacttctcccatatctttattatagctatacgggggagttaacaaagattagtaatagcagtcagcttcccttattacttggatttttaccaaacaagttccctaatttttcataccgcagactttgctatctcttgtgtaatcctgattttagattttaggtatttttcctttgttcttcaatttataatcatataaagggcagtctggatattgttgtatgttatgtttgtatttgaacatggttgtttggatcttgaattgtaaagctgaaacaagattgtcttctttaccatttttaaggactgcaaaatataaactgatgctatttcttggtctctttggcccataaaagagaaaattcttgcccaatattttttagctaaccaactataactgggattcttcgtacttggttttaatatccaagaaatgtagccaaaaagcaaatgcaagtttgatatattctgttacatcatgtcctttattctttttccttcttctgcaaatcctatgagctgaccaacatcacccttccattccactaagatctttagccaagtatttaagctctttggtttttattaatcttcctcattattagaagttggaaggaattacctaagacgtcaaatattgctatttacacgttagttaactattctagtgagttgcactacccgtgttggttgttggtaaaaaataaaaaggatttctgtccaaccagtgatgacatgctaattcatatatatagtgtggatatatgatttttcttttttattccttgcagat

SEQ ID NO: 52031 - DNA, 1000 bp, Ricinus communis
  Intron number 1 from transcript 30073.m002249 (locus 30073 .t000059) derived from phytozome v7.0 (chr-ID 30073; pos 4 29293 to 430292)
aaattgcaggtctgttaatttttcttgcttctctttttaaagggttcgttctgaaagtacgaaaatttgctaaaatttagtagaaattaactttttttggttaatttttatgtttgaaaagtatataaattgctaataatttgattcttcctaagtttaacattgagttattctgaaaaagaaaatgagatcatgcataatgcaaaaattcattattccaaataggctcttttcaagcagatacgtgcgtttgagttggaaagtgtatagatacatgaggctaatgttttgaccggatatgttctatgttttttgttatgtttagatgacttttatctttccatgctttaactttggacggaattcatggtaagggcgtgtaaatataatttggtgaatttcatgcggtaactggattttggttgcttgtttggatggaactgtagctggcgtggtatttgcttgcaatgcttgtttcagtttttggtttgagtgactagtttcttgggttggttttgatggatgctcattgctccctgtgcttctttggtgttttattttattaatactccaaaaggcttaagctgaaccataatgctatttctttgtcttgttatttggtatttctgatcgtcagtgactgataaagacatttagccaagtataggaaagtctttatggaactgccatttttttccccagaaaattacttgaaggtagcttatgcgttgctctgatagatatgacatttggttagaattcatactctactctagctccttcatcattgttggtttcttgaaattctggtggtttatttctattatatttttggacagtgttttgcaatgccagcaaatattattagatttccgttttgtttccaaatggctaagcctgagttggctttttatactttgtgattttttttcttttgttttcctgaaaaaagatgcaaaaaattaatctcatgtagtgacagacttgtgctctaacagat

SEQ ID NO: 52032 - DNA, 463 bp, Ricinus communis
  Intron number 1 from transcript 29929.m004780 (locus 29929 .t000283) derived from phytozome v7.0 (chr-ID 29929; pos 1 617640 to 1618102 reverse strand)
ttagtcaggctcttattcttttaattaatagaaaggtacgctttttatgagaattcggttatctatattttagaggcttttttttctagtgaattttctttggagatgtaaatgggaattttgggttttaatttttggaagattagagcttaggtatcatgtttaattaatagaaagctgccatttttatgagtaagtggtctaaaacgaagtgttttggtttcatttggttcttcgcagttctgtttggagctgccaaaagggagtcgtgggttctggttttggagttactgctgtattattttaatcaaaagaagtagcctttttttttttttaaactatcaacttatgatgcaaatattttctatgagtgattttatttagcaatgcaaatgggaatttttggttttagtttttgtagtgtgtgtagttaatatgtttttttttctatccaaactgctag

SEQ ID NO: 52033 - DNA, 629 bp, Ricinus communis
  Intron number 1 from transcript 29929.m004516 (locus 29929 .t000019) derived from phytozome v7.0 (chr-ID 29929; pos 1 39231 to 139859 reverse strand)
aggatcagactcccgattctctctggtgttgggaggtactggtttggatcttggtttgtattgctgtcttgattaacaataacttgagcatggttaactttttcaaatccttaaggctatgtttgaaatggatcttgtgcaagaattcagtttaattcttgcaaaatcgtgctgattctgtcactgtttcgtttcttaatgccttgttctttttctatattaaaagaattgaattctagcaactataaacttaacaaacatgattattcactaaatagaatttgattgaattgaatgcttgaattttatacttcccaaaaaagaggtatggctttgtgttcagcatagtattgatctactccctatgttttctagttttcttaggttatatatatctgctttgcttcaatgagtttgcttgattgtcttccaatcaatagtggtatgaaaacatgcttgatttgatatgggaaggccattcttgttatgctgacagttttgcaaataatatttgtccttcagcaacttgctctgtatatttgttgtattttcatctccataatcgccaactgattttctcaattgtcattgcagactagagatctaaagctgttgcctaaatctgtgcg

SEQ ID NO: 52034 - DNA, 948 bp, Ricinus communis
  Intron number 1 from transcript 29915.m000468 (locus 29915 .t000004) derived from phytozome v7.0 (chr-ID 29915; pos 5 8771 to 59718)
agccagtcttttccttttccaggtatgattatgttaatatttattagtattgttgctagtgttttaatttctttttatcatgggaagattgtgactttgaagctggatgatgggttcactttagaattttgagaattgtgggattttgttcttaaactttgtcttgttgacttgatttgcctttatatgcttcaaagtttccatttttttcattaatgggtttgtctgtttctaggaaatatatgatgaggtaaattcaactggcttattgggtgatgcgagtatagaaattgggcctttttggggttttgaaactttgtgtgattttggatctgagtttggtttgcttttaagctaattggtgttgatttatgggttctcttgtgttattctgaaagtgcattactgctacaatttcttattagttggcatttcagattagtcaagaaatctgtagcacaaaattgtctcgatgtttgagcacataggttacttaatttttgtagaatttgaccctaattataatcagttggcgtgctaaaacttaattgtgggtgtaatttgagctgttcttcctatgaaaagattgattttttatcgaaaattgttatgggaggactattgaattcatgatggcaatttaatctggataacagaagatctattaagtattatctttgtttgcctgctgtttaattgggctactcagtgttactggtaaatggagtttcctgcaacttaagttgttaatcagtttctttattcttcaattaaggtttgcctctctagtgtgagtaattaaaaatgcaaacacaccctgtttcccacctgaagccttggcgtttatgaagttcataaactctgattatttaagcatgtgttgctaattatgcttttaattttctttcgacagaagctttgaagaccccttatagctttaaggcattg

SEQ ID NO: 52035 - DNA, 555 bp, Ricinus communis
  Intron number 2 from transcript 29915.m000468 (locus 29915 .t000004) derived from phytozome v7.0 (chr-ID 29915; pos 6 0319 to 60873)
aagccactgttacacgtcttcattcctcccctcaggtaaagtatgacggaccattttttttccttatatgaagtttatgatcacactttaggaagatctcctacaattactctccaccatatttgaacagatttgcaaacttttgatacctttttgccatgcatggaagagatgttttggtaacttttagaatagatattatggtaacttttgcaatagattaccataaatggaagaaatattttgaccattggctatgcttttctgttggaagttgactgcatatgccttgaccacaatcttccattaaatagctaccaacaaatgattacgggcatgacttttgcttgaaaatgtctactcaatacaactaatcaataattaccattatctggccacgactttggttttttctagtggagtctttgtgatatgcatttacaaaatagtgtgggtgtgcggatcatcttttttcaactgttttgtgatgtatcaagtctggcaatgaaataacaatttgtcttgtgatcttccagggtttcaaggaatttataa

SEQ ID NO: 52036 - DNA, 641 bp, Ricinus communis
  Intron number 1 from transcript 30024.m001719 (locus 30024 .t000036) derived from phytozome v7.0 (chr-ID 30024; pos 7 32562 to 733202 reverse strand)
agattcgaagggtgattcagaatgttgagcgtggttatgataaggatgacatttgactatggactgctgctactgatggatgtatctcggtgaagaggtattataattatatcagagattctcagaatcgggttccttggcattctttcatttggaagagttttcttccgccatcgcgatcttttgtgtgctggcgtgctcttctaggccatctgccaactgatgatgttttatgtaaaaagagttatgttttggtttctcattgttgtttgtgcacggtgaaatgcgagtctgttgatcattatttatgaggtgcaggtttgctaatgtagtttggatagctactttttctatgtttggcaggcattttccctcctttcatcgtaccattgatttaattgagcatgctagattgcatcattttagttctcaaattacaactctttggtgtgctgatgtattacattcagtttggataatttggagaactcgaaatcttatgatctttgagcagcaacaattttctatttcttataccgtgagatcgatttgtgaagcaattagagaatgtgatattttctgttttgcttgcatgaataacactgtggaggtgttctccattttgcagtgtcttggcatca

SEQ ID NO: 52037 - DNA, 600 bp, Ricinus communis
  Intron number 2 from transcript 30005.m001254 (locus 30005 .t000020) derived from phytozome v7.0 (chr-ID 30005; pos 1 01172 to 101771 reverse strand)
tagggtattataggcgggcacgttttctgttggaggtgagacctgattagtagcttatgcttttaaaagtatttgctttgatttcttactgatggtttcgcttctttatgcaagaataattctttgtaatataaaaataagaattttaatttaaatgtgaacagaatgtttgattgctttatgttaagcttgttctcaatttctttagatgcacaagattgaatattttcttttctttcattttttgcatggtaatctacagttttttcttctttttttttttcttaaagttctgattctgattgtttaattatggaaactttatactcaattattaagttattgcggaatttaaaggcaaatcaggaaaagtaaactgaaaagggcacatgtgctgtctcaaattcaggaattaaaagagaggggaggtgttttgggtggagagtagaagctccagtcttggtgcactcttcttgtgttagaaaaagtgggcaaaagaaaaaagaaaacctcaaaaagtcttgtgttttacacttaaaattatttatttaagatgactaatttctagctgatttttgttcatacaattagggagctaaa

SEQ ID NO: 52038 - DNA, 797 bp, Ricinus communis
  Intron number 1 from transcript 30005.m001285 (locus 30005 .t000051) derived from phytozome v7.0 (chr-ID 30005; pos 3 60086 to 360882)
caaatttgtggacaactgaagtcaaggtaattttgcacagatgtgatattgatagtgtctgaaaagtatagaaatgtcaattcaagaagcatcagttatattctgaaagccaataactttatttaagaaataaggctctccatgaagtgatattttcaggttcatggagatctgataattgtagatacggaatcattatcataataaaagtattgatggtgccgagtagattgttaaatataaggactgtcaagagcagtaaattctctttgttctattggtgctgccttttatcctttttctcctttgacaaactacataatcaatttattttttgaattctgtgcatcatatggctcttccattattttcttttctcttatgaatgatttactctctctatttttctcccttttctctcttagacacaatatattggggaacggatgatgccttttcagtgattattgctgtcattgtggaagattggtttactgtttgcatggttgttgagttctcattgattgatcttaggtccatgaatgatttgtctcacataagagaaaacagtgtacaacagaattattgatatttaatttttctctttaaggggattaatggatcaggaattgctcttctcaatagcataagtattagggatatagtcttgccttttctatatgtttctagtatgagatactttatcaactctcaaatatgtcttcactgtaaatcatcataagcatttgttctgctctgcagataccttcaggtgtcaacttaaagtataatttttt

SEQ ID NO: 52039 - DNA, 931 bp, Ricinus communis
  Intron number 1 from transcript 29990.m000504 (locus 29990 .t000008) derived from phytozome v7.0 (chr-ID 29990; pos 1 11309 to 112239)
atagaagtaagtaaagttctaatttgcttgtatttcccataaatgtcatgttgctatttcatggaattgtatttgtttgcattcatgttcagatcactatacaaaggtaagaaattaaagacacaagtcatctaataaaaagcattccttgtctaattaattgcaatctctaacttccacacgtttatattcttaaatcatagagctagacattactgtaatacataatgccataataagatgggttctgatcacaaaacaagcatgcgggaaaagcagggagatcaaactttgaagattttcagattatattcacatggagatcatttaaaaccctagaaaattgacccattactactataacttatatcttgacagacaagttttcccataaaagaaatgacattcagaacttgaatttcttaccctttttcctaaaatttcacatgcacctgtagaattgaatgcttaaaagaaaactaataaagggtacgttgatgctgttcttccactaacaagccacgatagttactcttaccataacctatcaccttacaagtgtaacagaaagccctaagatcctttacacgtgctgtatataaacattaccactagtacaacccttacacaagggcctttgatgaagttctatacagctttaatgcaatttcaaaagcattgcttacttttccattatattcaacaggctatttatatatatatttataggtgtcttagttattatatgtacattagcacaagtaccctttctttctttttcttttccctcctgattcttgcaaattcttcgaaatttgagtgtagagctgttagaatactagagaacagggatatgaggaatatatgtgaagttttgcatgggttgaaaccagtgatgttaatggttttggctcagtttatttatgcaggg

SEQ ID NO: 52040 - DNA, 512 bp, Ricinus communis
  Intron number 1 from transcript 29864.m001444 (locus 29864 .t000020) derived from phytozome v7.0 (chr-ID 29864; pos 2 87570 to 288081 reverse strand)
tctcaaggtacatgtgtttcttaattaacaaaaacaattctttacagtaattgattaattgatgcccaagtacctggtgtttttatattctacgaaattaatggatgcttagtaacacaggatagtttagagcaataaattggaagaaacataaatagaaatgtttgaaatattacggattctgaaaagaatttacgctagcgccatatttacttataaattgtttacctgaacatgctctgaccctcccgaatatgcttatctcgtattctgtgaaaatgctctatgttatagctactgtaactgaatatttcagtttctttagctagttttacttctattgttatatgcaaatgtcaggtacttgtttgtaaatttgattaatagcctagttctctatcacagacttcaagtgccgaaaacagtaatcttaattctcattagcccgaaacctgtacctcattctgaattcattcacctgagatgctgaagttcttgcaattaacaggatc

SEQ ID NO: 52041 - DNA, 760 bp, Ricinus communis
  Intron number 2 from transcript 30078.m002332 (locus 30078 .t000125) derived from phytozome v7.0 (chr-ID 30078; pos 8 13383 to 814142)
gaactcgaccaccaaagcgacggaaactatcttctgtaagttgccttaactagacatcctctatgtagtgtgtatgccttcatcatttatatgcttgatgggcaagtatacgaactgagacaaaatggtggtatcataactatatcgctaaacatactttcttgttacagacgattttagatctgaattcttactttcctttcctcctccctctaatcattaaagagataatgacaaaggaatgcaagacaagctgcagtttctgcaaaacagagatgaaatctcgcccttctaaacttatagcatgaaacaagtttaatctagcgttaattgcatctcttagtatcttcaaaatatcaagtccaagtctcctccagcaaaaactctagtttaagtctgttccgcccaaacaagaccaaattagcctggatttagttcgactggcttttgggaatttgaaagagtggcaataaaagagcgttgctcttgaaacaactgagctcagacaaaaataatatgtggtgcctctgcaattagttaaggaaatctattttggtaaggattccatttttggttttggcttttcagaagaaagggtgtggaaattcaaggaaaaaaaattaaaaataaaagagggtgtctgtcatttgattaacttgttaaagttgtttttctttgctaaaaaaattattatcaataataataatgcaactttttttgccatattttcattgggttccattttatgctttttatagag

SEQ ID NO: 52042 - DNA, 531 bp, Ricinus communis
  Intron number 1 from transcript 29841.m002819 (locus 29841 .t000083) derived from phytozome v7.0 (chr-ID 29841; pos 5 05388 to 505918)
actcggaagtgcttttcttctcgctttcaaagcctgtctgtactgtattgcatgtgaggagtgatgggtggcaagagacgctaattctcttccattctgatgtatttgattcccgtagcatagacccaatacttctttaatctcagatgattgatttcatttatgttcttgttaccatctagtcatgttgtagtttatttgaagcatcccttaacgactggtctatccttgtctgcaattcaataccatctgcatctagtgtttgtttctgtgttcaactccaatagtttgatatatatgttcgttgactaaacgtcagtaaattgcttccattgctgtaactgatttccgactgttttttcaattgccatagtatggccaggaaatgaattatgatgttttggtatatacctcatttggattgaccgagtcaagttacattaagttgttcaataaactttctggaaactgggatgaagagtattataatctaacatgcatagaatggattttttggcagaattccactgc

SEQ ID NO: 52043 - DNA, 846 bp, Ricinus communis
  Intron number 1 from transcript 29854.m001103 (locus 29854 .t000014) derived from phytozome v7.0 (chr-ID 29854; pos 3 62471 to 363316)
acaccctccttgtttatctaccaggtgacattttgttatttcattttttttcttaagcatctcaaaatagataatgaattgcatgctaaataagatagccctatcaatcattgacagagaaatacgagatgttctacataggcagggcaaaaaatattaggaaaaaataaatatttttatatttatagaaaaatataatacaaaatattgttttcttttctgagagcagcattggtaaatccaataatataaatcatgataatatactttgataaaaaaaaactaagattaacaaaagatcatccatttaattaaaagaaaaaaataaaagacttatgtttctatattcatgaaaaataaaaataaaatttaacctaagaattatgtttctaaatccgcttttcctttggaagtaaagaacttttgcaattatagttgaaactcattttaaaattcttaatctgcaaattaaccattcaaattttcaaaaaaagtttcaatatatagtatttctgaaaaaagaaaaaaattaatataatattctaaaaatattttccaaatatctacaaaagtttaagaacagttttggtgtgggaaatgtatttgaggatccgagaataatgtcttctagagtttgagtgcttccttttaggggagaggtgattaaaatccatatgctagtgcataaataaaactcgaaaccctcttccgcccttaggatagtaacatcatttgataaggtatttcatattttatttgtcatagatgttttacagaatacacgtaaagtagatattcattggttctataggtttcaagaaggagcaactaaaggttcaagtaaca

SEQ ID NO: 52044 - DNA, 636 bp, Ricinus communis
  Intron number 5 from transcript 30128.m008605 (locus 30128 .t000066) derived from phytozome v7.0 (chr-ID 30128; pos 5 5996 to 56631)
agcttgaggagaaagcattggtgtctttggccaaggtatgatttttctttcttatgcaatttcggctattaggataaagcctttgattaaatcaagtcttcttaaatcacgtcatctaatttgatttggacctttttttcattttttaaaaaatataaagcattatagatttttcatgaactataagtgagtgcatgtaacaattttaataattttagttgtggatgtatatcaagcaatgcacatatagacaaatgcttttgaaaaatcaatggctgtagcctgtacttctgttgttagagttaaaaatcttgccaaacctttatgcatagtgcctagtaaccattatggtactctgtgatgctgactattatttttgcttttattaaagattgtaattcaaccaaactccttttcatttttccatcttgggaaaaataaaccttttctttctttataaacttcgcattaattgtttaattacaagggctgctgtgtacgtgagatcaagctagtttgaagctttatgaatcatgacacagtgagaaccctttttgctaatacggcatgataactgtttattctgataaaaatgtgctaggaggggaactttaaaccgtcaaaaagtgaacaaga

SEQ ID NO: 52045 - DNA, 584 bp, Ricinus communis
  Intron number 1 from transcript 30076.m004621 (locus 30076 .t000185) derived from phytozome v7.0 (chr-ID 30076; pos 1 227648 to 1228231 reverse strand)
gcaaaatttgtggtgaatcaggtcattttactcaggtattgcttgctttcttggttaataatgttaaacgtttcatcagccatcttaggttatgcacacaggcattcattttttattcgcaattcagtaccttttatctctaattgatggactgtttgtgtcagacaagaggaaactatgattccatttactaattgtaatgttgtttttaggctcttactttttctagcctgctttagattaaggcccatgttagcatgccaaatactaatttgagcctgaatttaatactcagagtattgcctgactcgtttatttctgatgaacaatccagtggtctttacattgctcaggttttgttatgtactttttccttaaattttagtattattgttgcttcctgctgtaccaatttgatttaggacttcatatattcagttcattttctgttttattaaattttttactgggcagcaccaactcacacacataagcagaggatgccttctttcttcttctttccctacctcctttttttctttggggttaaatgctttgccatgccatctggcatatatacaggg

SEQ ID NO: 52046 - DNA, 872 bp, Ricinus communis
  Intron number 1 from transcript 29827.m002622 (locus 29827 .t000095) derived from phytozome v7.0 (chr-ID 29827; pos 5 14860 to 515731)
agactaaggtaagattcactgccttcttttatatatttatttactataagattttagatttagttgctgtttctttttcatttcagtgatgccttttctcatttggaacttgttaattagctatcatattatcaaataggggtccaatactaataactttcttctatagaaaaacattgtatcttaaatggagatcatggagccaacccaaccatgaaaagccttgaccgagcagcagcatagatttgtctatattctttttctcttgaagtaatgccttgataggaaccaatatcaatttttcaattgtcagtacaattttacactacttactaggactgcatatacaatgtttttcacaaataattggaaagacggacgccggtccgccccattccaaactttatagatttattaattgggtgtaggtgatatgcacggactccgccaggccttgagcatgctttattctttatttaataattcgattttagtgcaaagcataacttccttaaaataaaataaatcattgcttcagtcgtcttaaccatgtagcatacaattattgatttgctttgttctagaagtagtcgacttgccaagaatacaaatttatattggttatatatatatatattgcttgtagttttaatattgacaatgatgtgaataaacattgacaatttccctgcaactcatcatcacaacaatacattctaataagtcaaacaaactaaaagtccaggcatcaatctatggattcaccagattctgatgataaatagaaaagaaaaatggagtacttctgatatacaaatttggtttgatctgtgaaaggtgcaagaagcaaactgggaactgtataagaaaca

SEQ ID NO: 52047 - DNA, 642 bp, Ricinus communis
  Intron number 2 from transcript 29983.m003293 (locus 29983 .t000192) derived from phytozome v7.0 (chr-ID 29983; pos 1 011947 to 1012588 reverse strand)
tgttcaaagatctaaaccttcaaccccacaacgtactccctttttcctttattctctctttgctttctttcttttcttaattatctttttcttctttttagaacgttttctattccattttctttttccttaattttgattattgtgctttaatattaactcttttctttttcagcataaacattctaaacagaagatgataaatacttgttaacatatctatgtctacatctacaaatgaagttaatttaattaattaacatgtgtatttctctacgaacaagcaagtatattaatatatgatgatcaacagatcctattaattctatatcgagtgatttcataagcggaacttaatcttcactgtcaataacgaagaaactattctcagcaataaattaagtataaattaatgctgctgtgttgtatatttatttgctgaagccggaatccaaattatgatttcaaacagcagtcaggaatttaacagtaaaagaactttctttataatgtcagaatgtagtaaatgagaaatgaggtgttggactgaaattagcttatatttcatgtggagttttgatttatgtttcgtaaatttgttttggtgaaattaaaataggaggcagcaggaactttagagta

SEQ ID NO: 52048 - DNA, 585 bp, Ricinus communis
  Intron number 1 from transcript 30131.m007206 (locus 30131 .t000357) derived from phytozome v7.0 (chr-ID 30131; pos 2 248091 to 2248675)
agaacggtttgattcggtgcatagattgctgtttgtaatctcacttttgcttatgcatgatttggtgcgtgtatttagatgtttcttgatgtatgtatgaatgtggataatgtattaaggtttgagttcaaaatgctctttggattcatgggcatggctttttctctttctcattttcttgttgtaggatcatcggtttggggatcgatgattgttgttctccgaagagtctcatgagaaataatagtctatgatatcaaaacaccaaattgggttcggtgttttgctgatattttatacaaaggagagtgtttctcctttatggcaatgtaaatatttagtactaatgtaatggaaaatcaaaaagattgtcaatgtgcaaatgattggattgctgatgagtaggggttgtgttttctctatgcttcttcagttggtggttttgaattttctttgttcatatatccagcattgatcttcttcaatatgccatagtgaacatcatggattgtgtgtccctagagtgttctttacctttatgatgccataggtgaagctaattctgaaggactgtttgtgatttct

SEQ ID NO: 52049 - DNA, 980 bp, Ricinus communis
  Intron number 3 from transcript 29907.m000632 (locus 29907 .t000011) derived from phytozome v7.0 (chr-ID 29907; pos 1 47233 to 148212)
agaagggtcttctaccacaagactgtaagtgggtctataaatttagctagatctagttcacctagggatggtttgagtactcatggcatttcctggttttgctgtgctctgaattgtgttcattctcttatattgcaatcattttgttgcagttttaatttgcatttcctttaaaattgtcatttaagcttgtgttttgattcagatattccaaataaatctttcaatatatgaatttgaaattcttttgcaacccttggcttgtcctttgcagactgcagactgactgttaactcctaagccatgtcttgaaaagtattacatggttcggtaattaggtattgtgtctggtcagtatgtagatttattttctgtttctgatgatgatagcacttgacttattagcaaccatgctcgaatggaatgccaatccagtactcttactcatttgcaacttttagagttagcagcataaactggggcagtatttctctgtcattatcaccacttagcggaaagcttttggaataggaaatgtggcttcatgtactgcaatttcttaattttattcaaaaactttgaaagtagcatttcaaaggattttagatatcaaaccccgtcttgatacagtgttttctgataaagctcttatcgtctttgattgagtttgatatcatgtatcttccttttactaactgagtttcagttgtactacagttgccttagtaggcagttggattcattgcatctgaatccctttattcagtcattgaattgtagtgattggtaggcttccactattcatctgcttaaagatgtattatcaaagaagttaggagtgtttgacaattggaatgcacttataagttattattcagttttttaatttgaatatcaagtctttatgtgacattttgagaatttgctgatcaatctctatcgcagtgcctgcttggttaacaaagattacacaaagaata

SEQ ID NO: 52050 - DNA, 881 bp, Ricinus communis
  Intron number 3 from transcript 30032.m000460 (locus 30032 .t000010) derived from phytozome v7.0 (chr-ID 30032; pos 3 7535 to 38415)
actttagggtatttctttctttctttctctattaattattccaaatttcaatttcgtttttagttttacagtcatgtccatactagaagacatgttagagctagggatcgtcgaaatggtttctgagataagtcactatcccataaagcaaactagttgggaattgaaacttctctctctctcttatattatattgaagattcaacattaaatgattttgatatataagaaatatatagatcaagactaaattagtattttccttttcttttggtaaaagattaaaaatgtaggagaaactattgtagtaaacagaattcttttttaatgaggaaaacatagacgaaaaacttctaaaatcccttattttttagacttttattaaatctcggaatactaatataaatatttattagattttatacttaattttattttagttacaagtctttagtttttttttttcaatcattcaattttttttattttaattatagtttaattacatggctcataaaagaataacatgttatacttttatttgataattatttttttattagttatttttgtcatgttttaaaacaagtgtaaaactaaatagttaaaataaattaaattaaaattttataattaaaataaaattaaacataaaacattatggtgttgaatttcattctattattattagctatatgattcattgataatgatgtgaggcattatcataatgatattaggagttcataattcaatttttcttaggtcaaagaacacttatagaagcaaagaaagcaaaagatatttgaagaatgacaaattctacttttgtgaaactgaaaatagagtgaaagtgagaactgctacaaagtgataaaagg

SEQ ID NO: 52051 - DNA, 658 bp, Ricinus communis
  Intron number 3 from transcript 55678.m000031 (locus 55678 .t000002) derived from phytozome v7.0 (chr-ID 55678; pos 3 762 to 4419 reverse strand)
gggcattaaactacaaatatttccttcttttcttggtatgttaattatcatcgagaccttgatttttttaatccatatgctagaatgatcgcttaatgattttgagctagatactctttattatgtcttttgattatttgaggtttagcactgttcaaagtaaactcaaggcttgggttttagctacatagatcctttttctcgatttagctgaaaatacttatctgcatgcatataaagtgaatagattccgtagacacgtaacacatttcagagttaataatgaggtttcaattagttaagtgccttaattttaccattctcattcttttacctgtgtatgtaaaggattttccttaatattgcacaatgatatgttgcttgtactgcttacgagctccttaggccaattaatttacttttagggataaataatttagattttggagaatggtctatcttttgatttagacaaccactattttgcttggtttcttggcatgtgtatcgtattagtttatgtgcaattcttccctgcaagcattcttttattgaaagtaactgctaataaatataaatgcaaaggagaaactgagagggtcttattttattttatcttgcagttttatacatttcttgagacaactcttgtcacctt

SEQ ID NO: 52052 - DNA, 953 bp, Ricinus communis
  Intron number 1 from transcript 30169.m006431 (locus 30169 .t000208) derived from phytozome v7.0 (chr-ID 30169; pos 1 149743 to 1150695 reverse strand)
gttggcccacttgactcttatcgagtatctcagaggtaattgtgttcaagtttttaatagggttatgcttaattcttggaaagaaagcacttctctcaatgttcttgttttgtctgtcgtatagtttgagtcaaatcaataaattggttaattgatcaatcaatgcttctttcccctgcttgtgatttgagtcttgacttgcttaaataaagttcatcttttgttggtgatggacaattttatgatttggctctgctttaggatttgtttgattgaggtgaaagaataataatttgttatgtaatggaaagaggagaaatttatgaatgttaagtaacctaactgagttaacatttattcgactttatgtggcacacagcaaaataattgttctataggctagtgagaaatgtttgatttacaaaacttactgggaaacatggcataggtgcgtttaggcttggtcaatcagtcgttgaactgaatgtcagttgaatccaagtcaccttagcctgcttgcattatttcaaaattgcatagtttctgggttcttagtcttttcctatgggctgagcagctgagcaatggtctgagctacttttgaccttcatctggtgttcctgaaaggttcatagtataagtttatgattgaacattgagctgatgagagactttaatggacctaatgtcattgaatcatggttccttttggtgaaaatctctctattacaatttaagtatttgtctctcctattttgtttcatttgaaagttttgggttgaagttagatgtcgaatgtcgtgttctatagatcaatttctcttgtattcttcaaattcctattttcttaaatttacagaacctaatttgtcatttatctttctttggtgggtgtgcgggtgggatgggtttatatagacattggcttgacagggacaaaactaggctgtggt

SEQ ID NO: 52053 - DNA, 697 bp, Ricinus communis
  Intron number 1 from transcript 30170.m014373 (locus 30170 .t000785) derived from phytozome v7.0 (chr-ID 30170; pos 4 208822 to 4209518 reverse strand)
aaaggcgcaagatcacccccggatctgatcaattggtgataatttttagattctctgcttccaaccatttcaatttttatcttaaatccagtgcattaacccgcgtttcgtttcacctttttttttttatcaagaataagtttgttttatttaacttaaatgagatttgaatactttttttagattttcgtgcgttctttaaagagtttttttttttttgaagtgttagatcgaatttgacgcggtcaagttatttcctttgttggatgttaattatatgaacttattgttttggggaaatctaggaacgggtggggttttgttttgtggtttcagcttttttcttttcttaattagatttttcattaataaataaatattttattatatttgattctttgtattaaatctggtcttgatgtgcccagaataatagaagcacagacatcttgtctgaaaaagttttgttttgtcttttctttaaaaaattctcgtacttctcaaaaacttttactgtaactttctcttcaataatcactcaagatacttgtaaccaaaaaaataattagataccaacaatttgttttcttttttcttttctttttatttttgttttgtatgggtaattttgtatcatttatgttggactaattcatttgcagggtgaaaaggctttgaaagcgacagacactcttca

SEQ ID NO: 52054 - DNA, 972 bp, Ricinus communis
  Intron number 1 from transcript 30169.m006416 (locus 30169 .t000193) derived from phytozome v7.0 (chr-ID 30169; pos 1 069378 to 1070349)
tctttctcttgttggtggattaagcacttctataggtctgttacaaacccttacttcttttctttttattgaagttaaaagttggtcgttgaattagattaaaactaaaagctaaatttggttggctcctcatgtagtttccttgttctttaactgcactccgcactcaccactggtattatgcttcatttatatattcatttcaatatgcttctctgtctttctcgtttgtggactggatttttgtttgagaggattcatagattgcatttttgactctgtattatgagttcataccaaaaagaaaaagcaagtggtacatatcacttccttattgtagtctataacgttcttaacgtataagcctataaagttcatcaatctcaaaagttccctgctgtatcctgcaaaacttatctgtttatgtctctcacttttgggtggttttagtacttcagttggtagtttagtttaccgtattttttacttcagcaatcagctttatggtcgaggaaaatatctctatattttaggttcgaaatatgttattaacttttgttttgggcattgctgagtacttttctattttgagtttgcttcatggtgcactgatgctgattgtatttctgcattcgggcatttgctaacttaaattgccccaggttcatttgagcctatttctttttcatttctgcactgctattgtcgatttaatttcgttaagaagtaatttggtcaattttgatacgtgtctgttagcaagtgtccaggcaagaaatatcatgattactattagtttctatgatggtacaaacatagtaaaattcttttggtgcttacgacatatttctggttgcttgatactctacaaatgagtgtaggtcaaagattagattttgttctgtaatctaatagtaatgtttgggtcatgaaacaggtgcactttttgtaattcttaatcaggctcccaac

SEQ ID NO: 52055 - DNA, 925 bp, Ricinus communis
  Intron number 1 from transcript 30226.m002012 (locus 30226 .t000036) derived from phytozome v7.0 (chr-ID 30226; pos 1 120262 to 1121186)
attcagttctccacttcccaggaagagtacaaagggtcagtttcagcaggctgctgaactgatccaaacgagtacacatatctccctatgcctctatgacatcagcactgacttgatgcctaatgagcttctggggtgtgatctgcagagagaaactctcatttgatttggagtgctgctgagttgtgggtagtgtttgggtagggtacagaatgaaacgtctcttaataggtcacacatggctgtttaggaagcagaagagcaattttgtcttaggtttgtagaatcatatttgtctctggtaccatgaataaacagtatatgctgttgtattctgcttcttaaattttctgtacatttaaatttctacagaatgtatgagagaatagggagatagaaggaaactacctgaaatagaaatatctctacaggtctgaatcttaaataggaaatctctagttgtactactaattccaactaatatttttgtgatacagctaatatttacttgatgcttccctaaaataattcaacaaaaatatatagaatacgggaaccttagataattgaaatgtggttgttggggtttggaagttcagactagattgcagaatagaacttctaaagtgaatttaccatgtgattacttttatggaactctggtatatgatgcagggatgattttatatatctggtttagtaactttccagggcatggtagtgttcatccttgtttacttctttaaggtgttggacagtcctctcttcatctgcatgtgtgactattcgtaggcttacatgcttcagagagcaagaaagggagagatgtgggcatgaactttctgtttgtagtattttctttttatgttcctatctctttttctcaactatcttatggaaggtcctctttcatcctagatcctgt

SEQ ID NO: 52056 - DNA, 767 bp, Ricinus communis
  Intron number 2 from transcript 30148.m001404 (locus 30148 .t000003) derived from phytozome v7.0 (chr-ID 30148; pos 3 7021 to 37787)
ggttactgtgctaagaaggtagaaacagttaaaaacctgccacttctgttactgttattttttttttttctatgcatgactttgtgatatcctctgcagttgctgcagggtaatgtcatggttaattatattagtgatagttttcaatggtataagaataatgtcttagagaaacattgagtcatgcatttattaattatgctgtgcaagtttggcaaaatgggttcccatttcctaatcttatctttcagtccattgcatatttgcttcatctggtgatagtagttgttacagtagtgtcctttattattatcttttttgttgatatgagtcaggccatgagagtttaatggagtgtaccctaaacagatatgaaatcaaaacaacaagctattcattcatcaatgtgtcttattagattcctatttagtgtaccctaatttggatacattaaaacatgtgagcttggctttgagaaacatttggccaaattgaaaattcccctcttctccttttcgtataatttaattaaacaagatgaagaatacgaggaggggaaaaaagaaacatgactaactactttgtgccagattgtgctgcaacataggtgatatatatgtgttactctgtactttatactggtttgaagtttatggttgtgtgatttctgtagctgcaactatcttagaacaatgtactcatcctttttctgctttgcccatctttattcagggtaaagtgccattgctttctatagaaggactgca

SEQ ID NO: 52057 - DNA, 705 bp, Ricinus communis
  Intron number 1 from transcript 30170.m013742 (locus 30170 .t000154) derived from phytozome v7.0 (chr-ID 30170; pos 7 46579 to 747283)
tgtcacagtccggcaccaatcgcgccaaacaaaaggtaaatgccacgtctaatttccggtcataaaaagggtctaaaagttgctgatgtggaacgggtatctaggggaaaaaaatttaccttatattttataattactgtgcttttccggtctttttttttttaatattgaaaatttccttaatttatatctgcttttaaggaaggagacatcttctcatctcgaaatcaatgttttcttgtttgcctttttctatttatgtttttgtggttttagagcggcaagaatgcattgattggccactctttaactttcctttttagtgagaaagcaaataaatgttccatttaacttggactttccctttttcatctgaaatgggcaagtgcagtccttttcagttttctcacatcgtatagtaattattatgttataccaggtcttaacagatgaaggattttgagtaagagcgttcttattctttttttaatttattaaatgatgtattgtaccaagtcttaaccaatgaagggtcttggggatttttttgtttttcttggttttacttttgccaatggagttgttatggttggttaatttgtttactttgtctaatgaattatatctgatggaagagtgggcatgttttggtgtcgttttatgcggacaggcggaaacactgatagatcttctacggcaaccaag

SEQ ID NO: 52058 - DNA, 256 bp, Ricinus communis
  Intron number 1 from transcript 30170.m014389 (locus 30170 .t000801) derived from phytozome v7.0 (chr-ID 30170; pos 4 246834 to 4247089)
atttttctggtttctctctctctctctcttttgatgttttttctttgtgcatttaattacaattcattgaatcagtgagggtaattcatcttctttattgctgaaatttacttccttttttcgcattaccgagtactaccgccccactaatcactagcccaatagctatactcagtttgattgtgtttattgctagttgaatttcctccctattattgcctgtaaaagtgatcgctatgctgtatttgttttaggg

SEQ ID NO: 52059 - DNA, 432 bp, Ricinus communis
  Intron number 3 from transcript 30217.m000264 (locus 30217 .t000015) derived from phytozome v7.0 (chr-ID 30217; pos 8 2296 to 82727 reverse strand)
taaatttggaaagcagtagcagctctgtaatgcctgaaaccctttattctacattcgtgttttctatgcctatctgcctattattatttttattgtcttccctgtggtgtttgacatcaattatctgttgctatagatgtaaaattatgcttaatgctgctaggtttgttgatcggtttcagtgactctaattggtttgtaatctatgtattttgtgttgccacctctgtattcataaaagctattgcacatattttttgtttggaaaacttaaacatgctgaaatcaaatatgaggtaatatgtgattaattggtttatgattgttttcatgcaacctgagacttacttttgcattcgtggaaggcatgaagcttactgttattggttattggcagagagataatatccaaccacgaccacctccaccacc

SEQ ID NO: 52060 - DNA, 915 bp, Ricinus communis
  Intron number 1 from transcript 30174.m008939 (locus 30174 .t000336) derived from phytozome v7.0 (chr-ID 30174; pos 1 130408 to 1131322 reverse strand)
tcaaaggcataaaactaagaagcaaattaaccttggtatgcgatttacttcctttctttttctttttgggattatttataacagtgttagggtttaaaggtttgcaattggtaatcgtgcaaatttttttatacttagctgtatgaaattgtttgttttattaattgatgaaatttttgaatgtatgaaatttggttttagatattacttggataaagttaagatatgttagttagggaaaaataaattctaactgtatcagatttattattgggctattaatgaatgagaaatggttttaatatctaaaatttttatgaaagacactttctttttctctttgtttacatgtcaaagtcactttttatacaactcattaaaattcctgattttaattactctgttcagacattatgtagtattctgagaaagaagagtttttaaacaggtaaaacttctctcaagtgaattggtatgaaaagttctctacgagcttgttatttgctgagagctggaaatttcttgaaatttatcttctttggttagagcagaatgtgctattcccagtttcctgcatatagaaactagcaactgagcgaggagcaatgaagaatccgttcttcaagggttaaatgttgtcaaacttgttcatcgaccttatttaagaactttgtctcacctaggtacctcaaaagtctctccccaaaacacaatactataagagcttaatggttcttgaatgagtgtcattccaatgatgttgacttctggcaacttcccaagtacaatatctgttatgttgtctgcttgcactaaactcctacaaaatttaaaataaatttgctgaaaattttctcttattttaattgctttccatttattataaattccttttatgttcacttgtagggagag

SEQ ID NO: 52061 - DNA, 762 bp, Ricinus communis
  Intron number 1 from transcript 30174.m008812 (locus 30174 .t000209) derived from phytozome v7.0 (chr-ID 30174; pos 4 37889 to 438650 reverse strand)
ttgaccgccgattttaatttcttcactcagttcaggtgatttctccaattctgttttcgctttttaaaatttttatccaacatccaaacgtatgcaaatgatgacgatctttgtacagatctaggtttagatctcaatagatctgcctttttcttattttaaaaaaataattaatcgaattacctgatcgttgagatctaactttcaaacgatttcgggttttgcaatttgatgatttgactatgttcgatctccctgtggattgaacctgactctttttccatgaattagacctttttttttcttatctttctttaatttgctccgatgcctcttctggattaaagttattctggcttttgatttcgttggttctgccgtgtatgtttaatttatttacatgatcttgcttttgtttttgtttttgattatttgtttaaataaaaagaaatatagttgaaattttaaaaaaatgtgaacatgtgattgcattcgattttaccattgatgctttcctagaatttggtatctcaaagctctgttaatatggtttccattgtttactagaatttgataaatttgtgattttcatgactcctgatggttgtgctctttatttcatttaaggtgcaaaagctgttacttcatgtggtggctatgtattgaagaaatgaatactactatttgtagcgagtaatttatatatgcttatagttgtggatctgaactattttgagtttttttttgttggtgaatgcagaa

SEQ ID NO: 52062 - DNA, 692 bp, Ricinus communis
  Intron number 2 from transcript 30174.m009075 (locus 30174 .t000472) derived from phytozome v7.0 (chr-ID 30174; pos 2 879887 to 2880578)
gcctagcgtcacgattcaaacgtgcaattagccgggtaaccgtaaacagcatggaaattttcttacaaatgaacgtgaatacttttatcctttgacgaaagggaaagcaacattacagtaagagaccgcgataagttgggagtcttggcacaacactttatttctttactgagatttgtctaagtggcagaacatgctactggaattttaatggacaccgacaagaagtaaaagagaaggccagtatgcaatttgcttcctgaatataactattagatttgtagaactgcttgctgaattgcagagaacaaagaactaatttgttcaaccagtatatagactgggaagacggaccttttcagtgaaagatcaaatcgattattatcagggtgaatagatttctgtttgttccttctcttcgggcaatggcatccatgctaagataccatagaggaccgagcttgtggcttttgattgcctcttccttccttgcatcaattaccttacgtttaccaaaaataagaaaaatcaatcacctgacgtacctgatgaccagatcctcctcagttgtggttcctcatttgatatagaaaaggcacctgatggtcgaacatggtttactgatcgagattatagttttgcatcaccaaatactgtgatgtgaagacaacaaacattcttttggataagag

SEQ ID NO: 52063 - DNA, 986 bp, Ricinus communis
  Intron number 1 from transcript 30204.m001829 (locus 30204 .t000098) derived from phytozome v7.0 (chr-ID 30204; pos 6 80190 to 681175 reverse strand)
gctgctaataagccctcccctcctactgatatcaggtgggttctttcttttcttctctctttgttttggttaatcgtcttttttctttaagtttcattttatcttatattgggaaaatcagactccgaaatgaaattgttttgttaattgtataatcagttaattgcatgttttcgtgaagtagagtattaagtggctgatgagcactattgcctcaaaatcttcatttagtggaattgaggctgtaaaatgtattctgtggaattatggtttatgaataatggaggtgagatctcgcattgagtttcagcagagttttggtgattggtgacttctgataggtctgtacatggaaaaagttgccaacaaaactaattacaggattggacacttccctttctgttgaaactaaatgtgtaacccccaaacttcgtactgatttgttctgcaattctgtttctcaactggagtgtgttttcttttggtacatcaagtacatgaagcaatcccattctgggttcaagcaatttcagctggcattatttataaccatgcatttctgacttgactgttcgaggatgatcccattttacactcaaaatgatgtgaatggcctattttgtaaaatacttcacagttaatgcttcatcccatagagaatgtgcaggaatttctagttacttttttttccctccaattcttatataatgatagtgctatatggtttggcatcacaaaaggcaagtatttttttgcaaatttgtgcaatgcttcaatttattgtgtttttctttgtccactgtagtcaattctgttaacagaaattatacaagttgtatttttatgtctttcagtttcctctctgacttggttttttcattgaatgcttttgctatcaggttcttttacaagtgaggcctccttgtaatcattcttttatttgttctccagttctacagccaagataagaagtgaagttctctccc

SEQ ID NO: 52064 - DNA, 879 bp, Ricinus communis
  Intron number 1 from transcript 30172.m000202 (locus 30172 .t000001) derived from phytozome v7.0 (chr-ID 30172; pos 6 2892 to 63770)
gtgtccttggttttttaaccagtttgggagtggcagtaagcttccagagcataatccctatcaacatttctgattcatgatatatagcaatgaaagcatggcactgtttttcttttatttcagggaatttggtggggcattattattggagttcttttccagacagtggctttaattataataacttcagaacaaattgggatgctgaggtgaagtattattttaattcatcaattattatgttggaacatataaatatacacaatatgggcgagtgtatttgtgcacttttacaactattgtttaagtattttactgagtaaaagtagttattccataattagagtccgatggaatggaactgaattgaaatactattaaattcgaatttgatttaacttcaaaatttaaaattcaatttaaattcaatcaacttttattttttaaactcgagcttaatatcatatgacatattcgatattatcgatctcgagccagcttaacttaattatctaaaatagtaatataaatatattagtatgtaaaataataaaatttttattaggcttacaaatttaacagattaagtattaagaacccgacttcaatctggatactttaaatttgagttcaactcgattaacaacaaatcatatttaaattttattagatttaatttcaaataacaatgaatttttttttggaagaaaaacagagcatgagctcagacactaataggagcccgcataataaaggatgtccctgtgatgctttgaaagtgcatattctatctgattaaatatagacgataggcactgtgactggcattgttttctttttacaggttgaaaaaactgctgaacgtttaaaggagtctat

SEQ ID NO: 52065 - DNA, 749 bp, Ricinus communis
  Intron number 1 from transcript 30189.m001643 (locus 30189 .t000011) derived from phytozome v7.0 (chr-ID 30189; pos 2 77443 to 278191)
gcagctgggcaagctgctaaacagattcaatcagtgtaagtatatagggggcatcgacagaagttgctattgcaagtcaactagaattcagagtgccaagcccagaactaccatttcataaaattagggtttttttgagttacaatcttaaatattaggattgagaacctagaatttacatatgccttcaatttattaatagatcttatgactgtttcagttttccctaatatctagtggtattaagaaccaagattattgtcccaattaaactactcatgatttcttgactcctgattctcattttatcttgacattatttcgtttttctatgtttcaatttgacaaagatggtcttctgccagataacctgtcgatatttatatgacttgaaaaattttaatgtcacttgcaattagggttaacatattcatttgatcaattttgattgatttctccccaacagaaatgacgtgcaaagagggaccattccggtggatgcaagtatttggttaaaagaaacctggacacgcggagaggtgatgatttcttgcatgcacttgttttaacagaacttgcaacttgattattctgtcttcagtttcaacagtttatgcaatctgaaattcattatcgtcagaagcccataaaatttgacaaacagaagtttgcaagccatgcaatagcaagtgcatatggagaaatcttttccttgatattcttttccttattttttagcctttcaaact

SEQ ID NO: 52066 - DNA, 659 bp, Ricinus communis
  Intron number 1 from transcript 30185.m000949 (locus 30185 .t000034) derived from phytozome v7.0 (chr-ID 30185; pos 6 37203 to 637861 reverse strand)
accaccctcttctgtttctgtccctgaaattgaaggtaacgtggattttgtttctttcttgtcatatttttgcctttttttatttttcaaaattcagtttttagtttagctctggtggaaatatttcacatgtctactagaaatgtcaatatctgttttgatgattgcatcgtattgtatcatgtcattttttgagctttgttttgtctaatatgcatttctgactgtttatttaatcaacttaaaatatcaattcttgaattcttgttcccaaaattctgttatttgaatcacaactcacaaaagaagtattcatgatatctggttaaagttaagccaaatgatgtaacctgatgttggatgcttagactgttactagaagacaaaagatctgtatattagtataattgacaaaggaggttgaagaacataatgcaccttgaattgcaagcattgaattttgataatctattttaatgatattataattttggtatcagcagtggcagcatttgaggaatcaacacctaaaattgacctttgttttgtgtttaactgtatctattgtgtaataagtgccaagatttgtataagactgactctttgtaattggaattttatatttcaatccctaggtgacagaagcagctttaaagatt

SEQ ID NO: 52067 - DNA, 713 bp, Ricinus communis
  Intron number 1 from transcript 30174.m008658 (locus 30174 .t000055) derived from phytozome v7.0 (chr-ID 30174; pos 1 996226 to 1996938 reverse strand)
gtgacgcttctcttcgtctacgcaaagttcaggtaaattctttcttttgttgtgtaaatttgaatctttagaatgacttatagtatttttgagttatgcatgatgagatgattgtgtcattttaaactgtggtttctataatatggggctgagattgatgtgaattgaatttgttcatcttagttgaattgtaaaaagaattggtaactttacccacttcttagggtaatgccggaggaagttagctactttagtattccatgagatagtatctttaatgagtaacagtcaagggtgccggtgattcaatagaataaatgaaagatctcattgtacgcaagtgttttaactctatattcttacagaaagttaaagatggcaatgtcaatctgatttggtttgatcctttcctgtgattaaggactgttgtttcacgtaaatcaataaggagagattctgcttttcagttcaaccacttgatattagttggtttggggaagcaatgaacaaaagtgtggttttaactcctaatgtgtgacctctcctgtggtggacaacatggaaaatctcgttacccttcttgcagagagtagatataattgctattctccaatatattgatggaaataacattcttcactagctgtttctgtttgctggctggctggcttatcctcattgggtgcttatgcagattattgaatcagaaggtg

SEQ ID NO: 52068 - DNA, 861 bp, Ricinus communis
  Intron number 1 from transcript 30190.m011352 (locus 30190 .t000588) derived from phytozome v7.0 (chr-ID 30190; pos 2 148460 to 2149320 reverse strand)
aaagagaaccctttgttcggtccatcttcttccacgtgagtttttgtgcttttgttatgttcaaagttttgatttttattgtttctctgatgtgttttttttttttttttttttttgaattagcttattaattatttccattctactaggtttatttcattgtgattaatgggcttgtgaaaatttaaaaaggttttatgtgtatgatacatcatctatttgaagtgtatgttgtaaagttctgatttttattgcctgtgttctattaattctgcgaaatcttctgcttctttttttaatactttctgtgtaattccataattgaatattgatggttttcttgaattgttaattaatgatttctttgtatagaccgcgatttgtttattgattttaaagtatcattcaaaggcaaagttaacaaagaattggtcttgctctattttgaaactttggggtatcttgtagttcatttcaatttgttatactttattttacttccgagcacaatgtagatccttgttatgttgcataagatagcttctgttgcacattgcagataattctgaagtattgttggagtattgtgatataagtaataggctagctgcgttctaatcttgttcttttacttttccatgtgtataactatagcagttttctttcagtcataatactgacattaccagaagatttttaccattattcctctgcttgttatgctgcaattcacttgtggtgacagttattcatctagtacacagaatcatgcttctttattctggcgccttttatattcagtacttctgcaatagaaagacttgtgacttcagagctttaatattttgcagattggaaaat

SEQ ID NO: 52069 - DNA, 380 bp, Ricinus communis
  Intron number 1 from transcript 30169.m006419 (locus 30169 .t000196) derived from phytozome v7.0 (chr-ID 30169; pos 1 096394 to 1096773)
ctgctatctcttacgtaccagacctcgttactgtaagtttttctgctcgaacaacttattcaacttttcattcatgtttattgcgcatacaaattggagactttgtatgagttcttactcgccccattggttcttatatgtttttgtttctttctagaattttgttaatgtttgtaatctagataaagtgctgtttgagctggattttgattttggattgtagctcagcttctttacttgcttacttttgtgttgaaaatcggagtttggaattttcttcttttaatttgtgtggattctttttatcctcgagcataaaagcaatgatgaagtaaactgtatcaggctcaaaatatcaaggaaagcatagaagctgcagg

SEQ ID NO: 52070 - DNA, 796 bp, Ricinus communis
  Intron number 1 from transcript 30147.m014280 (locus 30147 .t000551) derived from phytozome v7.0 (chr-ID 30147; pos 1 89258 to 190053)
ctacttcaggtataaaacaaaaattgacgacggtgacgttttgatctctattattgtatactgtcgtttcttttctttttaattaaactcgaaatctcacgatctagactcaacataacgtttgatttaaaaaaaagaaattgaaaaatatcccataaaagcggattatatatacaagtacatatgtatacacggtgcgttttagcagtcaagacatccattttgtagattttcaagatagctatttggtgtaatgtaactggtcaatctttaattaatttgctagctatagctttcttgtcaggctggtgaatggcttgtttggagttgttgtggcatgtttggccgctttcgttttcttttttgataaaaatgggttccataggtccgtcattaatccatcttcctgcaatgcttaattactaggttaaatgtaactcgagactataataaggcatgcgagaacaatgttattgaataaaatgttttttacatccaagactttaactttgtacctaaagatttatacttaacgtgaaaaatggggttttgaccagccaccaaacataccgcaaaagaaaccagtattaaatatgctgaatatgcccttttatttttttggtggaagatattttcccttgtcatattggtgggctatggttaggttcactttatgttctttttaaaacgcactttattattatcatcatcatcattttaatattatggtctccctttttgggcatttgggtatttcgcagtagatcattacaatattagtggttcaaggtcaaga

SEQ ID NO: 52071 - DNA, 769 bp, Ricinus communis
  Intron number 1 from transcript 30147.m014069 (locus 30147 .t000340) derived from phytozome v7.0 (chr-ID 30147; pos 4 330383 to 4331151 reverse strand)
ttttttcctttctgggtcttctccttctttcctaggtactctcttttccatctctctagttattagcctttgtacttgattctgtttcctgttgctttttgtgctagcagaaatctggtataggtaacttgttgattatgggttttgttgttcttgatcatgttaaaagtgcaactgttgatcgcagctttgtagctgtttttatgtaaagtcaatgtttgttaatcctccattaagctattgacgctttatgacaaaaaggtccgattttttacgtaattgctattagggtggatgaataagggaagaaaaaggttatcattttatttccacaactgaattcaatatcttgttgggacctttgattgaactttgatatgcctctactttattggtattaagttcttttctttcctttgatagtgttttttttttttcaaaaaaaacaaaaggaggtttttgattgagactctgctgtccttaccctgttacttgatgctgggaattgagtttcgaacttgtgaaatgagatcttgctagtttagatgtgtatgatattcataaatccaaaaagaattaggactgaactgtgcaatagatggctttccgtaagcaatggatgtaaacagatgaaaagtaaacagattgggcatgttagaatgactcatgtaaatgttatggaagtggaatttaatttgcatatttgttcttgtgatggtcaatatggtccttttaatcatgacatgcctcttctttaggctcaagatct

SEQ ID NO: 52072 - DNA, 596 bp, Ricinus communis
  Intron number 1 from transcript 30190.m011039 (locus 30190 .t000275) derived from phytozome v7.0 (chr-ID 30190; pos 1 418544 to 1419139 reverse strand)
gtcctttgcaattggtttcttatccttctattaaggtatgaattttttggtggtcttttgttatatggatttattgaggtcttttttttttttttttctttttcatttgggtactctaaaggttttgatttggagttacattcttttgtgcaatgggttccttggaatgagatttgtgagttattcttgcatttgtttatacatctaatgggatttttctttttccttgaattggaaactgaattttttttaggagggggttaacgatttctcattttctgtgagcaagaagagttattggggtttctggaattatagtagaatgtgttttattattgttgtttattgcactattctttatttctagcgcaatcaggttaatggagatgtgaaatcttttgtgaattgtgctttctttttttaccttcaagcatctgttggttgttggatggtcatttgttaagttcgattctctaggatggtgactgggttattctgaaaatttgggaattttcgtatttattgccgatcctctttgctaattaagtgatagttgtatacttctaatatggttgatttaattcttgcatgcacag

SEQ ID NO: 52073 - DNA, 525 bp, Ricinus communis
  Intron number 1 from transcript 30147.m014520 (locus 30147 .t000791) derived from phytozome v7.0 (chr-ID 30147; pos 2 404115 to 2404639 reverse strand)
tcctaattacaggttctctacgatacctattcgttaattctggattctgataccttcaatatactgtacgtttgatttttttctttaatttttaaattgagttattatgttaagttttagcgtctcgtatcaaattcaaccattttattttgagattaccgtatcataatatctgatgacaactgtagcggaacccgagaatgaatcttaattttgaatgctagaagaaacttataacacctaatgcacaagaaaaggatcgcgtccagttgatgcagggcattctttcactgaaaggaattttaattattctatacaggataacttttcactgagaggaaagttaaactctagctttctccaagccaaaaattattacctagaacacttgttcttttggcctggatgtttattgtcgttttgataatttatctactttatgatttctgtattgtactaaatgaacttgacaatgctataattgaaactaaaatatgttttctataagatacacaattgcagaaa

SEQ ID NO: 52074 - DNA, 585 bp, Ricinus communis
  Intron number 2 from transcript 30185.m000956 (locus 30185 .t000041) derived from phytozome v7.0 (chr-ID 30185; pos 8 88436 to 889020 reverse strand)
ttgtctatttccctcaaggccatagtgaacaggtatgatatgtttatttctgtcttccctgctattctcaacatttcctttttgttctgttttttttttccatttatttatttttattttgttgagtactttttttttttctttacctaaatgttgttgggcatatattcaaaagatttgaacagttttcagtttatgttggttgaattatgtggttatcttgtgcagtttgagtaacaagtcaccaaacactttgttgttttattaagtcaacttagagttacagggtagtcctttttagcaagcaattataattattgtattatcaatatcattagttggtttaccataattcaatgttgactaaatgaattttgaaaatttacttaaaatggttacgataattctcatatttcataatgctaatcttatgcttgtctattcattatgcttctaataatatactgttgtattgtcttccatgattttttttttcttgatgaatgaatcttgttcttatttatgagatgttgtttgtttttggatacttgaaagtgaatttgctggtttcaggttgcagcatca

SEQ ID NO: 52075 - DNA, 614 bp, Ricinus communis
  Intron number 1 from transcript 30169.m006472 (locus 30169 .t000249) derived from phytozome v7.0 (chr-ID 30169; pos 1 389508 to 1390121)
aattttctgttgcaacaagaaagtgactcccagaggtatattggagattaccattttctggcttttgggggttttgattaatatgttacctttctaatctgatgaagaatcgcttttctgtattaacgctctgtaatgtgctattatatatctcacattttggtttaggcatagctcacatgcatttgtttctttcaacttgtgaatatattttttcttttggtcttttgacagtagaacaacttttgttatggtcttagtaaaccactttagagtgcacgtttacatatactttaccttcttacttgatatacaatctacaaattcccccctctttatctcccccattctcaagagcagcttgttttgagttagctggtgatatgcgttgcgtgatcttagattgattatcctatttaattgaggttttatattgggctgggtgataatgttatttggacggcattatacaggataagaagcagtgtgctgcttctataaataatagttgaaggcctttctttgagttttggcttttaatttgaattttgcttttagattggttaatgtatctgggggatttgatgtatttcagaatagggccagcgtcagtg

SEQ ID NO: 52076 - DNA, 857 bp, Ricinus communis
  Intron number 2 from transcript 30174.m008719 (locus 30174 .t000116) derived from phytozome v7.0 (chr-ID 30174; pos 2 430819 to 2431675 reverse strand)
gcatttgaaataatcatactaattgacaatttcaggtattttccttagtgtttatcagtacttcatagaaataatttactgtactgaaaatcatatctactgtttgaattttttttttatgctgatgctatcaaagagatctttttattcaacatgtcttgctcacattcattatcaaagttaagcaagagactactctttagtgttgctagaaaaaattagagttcctattttattgatatattgactctgttggactcaatattaacataaccgtcccctgttttatattgttattgtttgatcctcatgtttggaatccatatttgctagaatttagttctttcaattcaaaaagaacaagatattaaaaaaaatggaaactctatcaaaagtgcaatgatttttctggaatttagttcatttgagttcttgcacatgatttatcccaaacaagggcaggcctatagttattttatatcttgttgcttcaaatgatataaacattgtaaaccataaaaaagcttagactttctttgctaatagaaaaaatttctcccctttctccctcaaataatggaaacttacaaagttaaactttgagcaaaccaaaatttttacttgatgtaaaggcacaagacttcatgatcaatatactatacccagtgtccataaaatatgaatttctgctatgtatgggatgccgttattaatgcttcgctacttagcacggagaacctcagtttatcttcttatgttctgtaccattgcttctccaatgcctatatattttttttcctgagacggcagtcaattgttttcttaatgctgtaactgattctgatttactgtgcaga

SEQ ID NO: 52077 - DNA, 533 bp, Ricinus communis
  Intron number 1 from transcript 30171.m000404 (locus 30171 .t000001) derived from phytozome v7.0 (chr-ID 30171; pos 1 850 to 2382)
tgctcctgccaaacggaattcacggaaacccaaatgttatttccttctctttctctcattttctttgcgatccttctttttcttttttcttttttctgtgtgttttgggttatcaatgcccttcccgttgaatgctttttagaatgtatgttttgatttgcattttaatacctctactgtcatttctcttggggtttgatttccaagggtttatttttattctttgatgtatgcattttgtaaatgttctgtttcgttatttattagtgaaactgggcttttaaatcagaatttcttgtcattttctcacatcttcttgcatgcattgcttgtttggatgttgattatatggaacactggttgatcttagtattggtttacagataaaaaaactaaaaaactcatttctttaatattttagtatattttattcaaattaatatttttttaatgaattaagaatttgaacagtgtctgttgtgcttgccttggttgcagattctagattcacacagcaagaacttcctgcttgc

SEQ ID NO: 52078 - DNA, 257 bp, Ricinus communis
  Intron number 2 from transcript 30190.m011066 (locus 30190 .t000302) derived from phytozome v7.0 (chr-ID 30190; pos 1 658616 to 1658872 reverse strand)
tctcaattcaaccttgtatcaactttaccctagttgtaagtccttcatgaatttcaagttacatatatattatgtttttttctcctcttgacctcattacatttttgggttgtggactttgaatttgtagcctcacggcctgcctgaaccatcattagaattcttggagactagtctattactctgttattaaataatactaagctaaattgattttcttttctcttttgttttggtggggtgtgtgtattttagtt

SEQ ID NO: 52079 - DNA, 583 bp, Ricinus communis
  Intron number 1 from transcript 30169.m006270 (locus 30169 .t000047) derived from phytozome v7.0 (chr-ID 30169; pos 2 51039 to 251621 reverse strand)
ccgacctctctccttccccctccgatcctcttcaggtcctcgccacctttttctttctttatctcatttctacgacttcctttcatttctttttctttttcctttttggagactctgcttattcgtgttggattacgaggaactataatatgcaaatatctgtttcttcgttattttttgtttttcttttatttggatttttatttcctgcttactatttggatttgttttcttctcgtcgacattcattcatttatataatctctctggccctctgtttggttggtgagagaacagaggaaggttactatacaatatttctccttgactacttatttgtttcagctacacttagaattctgcagtttctgggtatttctttctgtgttagtcatttacacttagctgttgatgtattattcgtagaggattttgctgtaacatttgtcatagtactactttaatgtgcatatatattttctatgactacattctttggacatttgattttacgactacactctctcaaactctgtcaaattactcaggcttcaagcgttaacttcaatcgtgacttgaaagc

SEQ ID NO: 52080 - DNA, 737 bp, Ricinus communis
  Intron number 2 from transcript 30170.m013632 (locus 30170 .t000044) derived from phytozome v7.0 (chr-ID 30170; pos 1 86692 to 187428 reverse strand)
aaggtaccattgatgaattccccttgtgttcttttacttttatttttaattattttgaggttctagagatatatatttatcaaaagaagaagaatagataagtaattctctatttttttggtcttcttaaggttaaaatcaaaatttacatgacattaaggtgcagtgaattgatattagtaaatatctttggagatataattagaagaatcttgtgggttatagaattcaggacttgataagggcacactatgttccttagaacaaagatgcctactgccatttttctgaagacaacatttgtcaaagaacaagaaggaaaaggagaaggaaaaaatgctttttcttttgggagagtgtgattcatagaagaaactattagtgttttgagcactcattagaacggcctttgacctttgcactacattgatggggtagctctttccattccataaatgccctaacccaacctaatgaggttaaacctaggatttggagatatctcttggagactaatcattttaagttataaacatccagattctcaggttctggatttaccctaagagctaattaagatgtctatgctacattcacttgtttctattattctatgtaattaccttttcttagttcttactattcctatttagaaaaacaatatgcgttttttaaatcattaagtgattaatttcatgcttgatgtttatggtcatatactgtgtgtactccagcta

SEQ ID NO: 52081 - DNA, 548 bp, Ricinus communis
  Intron number 1 from transcript 30169.m006295 (locus 30169 .t000072) derived from phytozome v7.0 (chr-ID 30169; pos 3 49723 to 350270 reverse strand)
atcaaatcaattggttgacatttgtatgcatactcaattattatatttttcctttttattttgttgttgattaatagatcaagtctaaaagacaaacatatttgtttcaggaactgtttgctgcaggctcagacactactaccacaacagtagaatgggcaatggctgagctgctcaagaacaaacaatttatgaagaaagcttgcgaagagctagatagagaaatcaaaagaaattcaataaaggaatctgatattcctcagcttcattttctaaatgcatgcgtaaaggaaactatgagattccaccctcctgttccattcctggttcatcgtgctctagagacttgtgaggttatgaattatacaattcccaaagatgctcaagttttagtcaatatttgggcgattgggcgtgatccctcagcttgggaggatccactgtcgttcgatcccaacaggtttcttggctcaaatatagacttcaaaggacatgattttgagcttataccttttggatcaggaagaagaaattgtgttggacaacca

SEQ ID NO: 52082 - DNA, 601 bp, Ricinus communis
  Intron number 1 from transcript 30190.m010980 (locus 30190 .t000216) derived from phytozome v7.0 (chr-ID 30190; pos 1 103824 to 1104424)
ggaaggttttatgtaagtggagttgctgaaaatgttatacctaaatgggtttgggtttcttggatgattgttgtgatgatggctatttctgttagtttattgtggattagtaatttgtgggttgagttgtatagggagaagaagggtagatttggaaagaaattgacataatgaggtttattagaattgtaatcttctttcctttttctattttctgctgggtgggttagagaattcaggttatagaattatgtcgtgtaacactcaaaaagatgtgttttgggggctgaaattatttctgataatggatgccaaatttttgacatgtcacttgtgttccatttactaaatgaaatttgtttctattatcccattccatggatgcacatgtttaatcctttaaattggattcatatgactatttttcttcataattgtgttgcttgcaaatcctgaatgtaaaatgaaagaagaaaagaaaaaactttcgcttatttatgatttgttttgctgtcagcctagacttgtggttgttgggttgttttaatctgctaggaaaagaactgtgattctatgaataggatagtactattactgggtt

SEQ ID NO: 52083 - DNA, 619 bp, Ricinus communis
  Intron number 1 from transcript 30147.m014407 (locus 30147 .t000678) derived from phytozome v7.0 (chr-ID 30147; pos 1 732284 to 1732902 reverse strand)
atctcaaaagacgtatctcctattatcaatctcaggttcttcttttcttcttcttcttcttcttttttttttttttaatttttattttcttaacacatttattccttaataaaacgttcttccagtttcgtcattttctggttctacaattacatttgagggtttctttctttcttctcctgtttatttaattgttacatttctgtgttgctaagttagtagtaactttgttttaaggtgaactatctttaaatttcttaacattcccagtctcaatttcatgattaaatggtaattagtgacttaattcttttaagaagttggtgttgttttaggactgtttgaatgtgtgcatttctttagtaaatttccattatgatgaagtaacacgaattttatgtaaattgaaaattgtctgcttgcaaaacctaaagttaaaattgaagatgatagtacagatgatatatcattcaatcacagtttgtaccaaaagtactatgatgtgattggtttggtttaatatattaacatagcgaatctacatttttcttttagggaagtatgagctaattatttctttcaaactgtttgcagctccaggaaacagaaaataagttgc

SEQ ID NO: 52084 - DNA, 446 bp, Ricinus communis
  Intron number 1 from transcript 30162.m001261 (locus 30162 .t000006) derived from phytozome v7.0 (chr-ID 30162; pos 6 25849 to 626294)
ctcctcttgagactcttaggcgttggagggttcgtatacaatttgcattttcttttatttacattcaatttatcgcccatttaaattacatttacaattcaagccctcaatcttgtaactaataatgtcagatacgcagagttctgttagcttttggtttggaagacaaatgcaaccccaatctcgaaaatgttttactaatcaaaattggcaatgacatttactaattatcatttaaggaatgccgggtattattctatatgtgtatatgcatatatgtatttattgctaagttgttgttgcttcttatacatgttaaaactagagtgaaattagatgctgatgtcccaagtagtgtttgttgtattagtattatattgcattcttctttcgggggattgaaggtgtatattggtccccttcacagcaagcagcccttgtgctca

SEQ ID NO: 52085 - DNA, 711 bp, Ricinus communis
  Intron number 2 from transcript 30162.m001261 (locus 30162 .t000006) derived from phytozome v7.0 (chr-ID 30162; pos 6 26379 to 627089)
ctcaagtcataagagtattatttctattcttaactagctattccaatacacatttatgcttttctactcttcaagtaatacatgtttattttcacaggctgcattgcttttcaaattggctggggagcgacaaattggtatctctctctcgctctcgctctctctctctctctctctctctctctctctctctctctctctctctctctctctctcacattgactatatcatttcctattatgctcagtatggtgtatcagcaagtcacctgttaccttgaagtttctggatctgaaattcaaatactcaaatatctaacttagaaactgaattgatgtttttttttttcctcaaactgattttagaaagtcaatttgtttggcataatatttttgcctttctggagtatcttcaatgcaattttctcccacacttttgctcttgcggtctaatgtatcttatgttccattattctttctgcttgtcaagtgatagatcccacggttgcaactccaactccctatggtgattatgcaattggactagaacaacttgcttcaatgaccagggatcaaaatctttctgcgctacaacagtatggaggtgtaagtcaattgttaacatagtttctccttcttagaaaccaccttactacttaaatctaatgttcctaatgctggtcgctctattaggctaaagggttatctagt

SEQ ID NO: 52086 - DNA, 976 bp, Ricinus communis
  Intron number 1 from transcript 30147.m014267 (locus 30147 .t000538) derived from phytozome v7.0 (chr-ID 30147; pos 1 287265 to 1288240)
tcttaggcgtggcaatctggctcagttcattaaaggtaagtcgttgagtttatgattattttggtttcctgtttgtttgcctgctgagaaagtttgaggaagcctttcctgtgtatgttttccgtataattttcaaaatggtaagagcataaagttaattactttactaagttcacttgaggagaaaaatggaaacatggcttttctctttttctttttggaaagaaacttctttgttctttctctgttttgttgatttttctttttccgattagttttgagattaatgtgattttatttattttctaatttaatttcatgcattttccactgcgtttatttctagttttcgtttagaacatacatggattaatcggtagtttgctcaatttgaattctgaaaaatattgattttcatctttcagattttttgctgatttttcaccatcaaaatttctatttgactatgatatctaaccgatgaattcagttggtagatcttaaacagtcagatcagctatagatttctgagcattaacatttaagaggtgctttacatttttagctttttactttatcttcaaattttgttcattaatttcatctattcttttattggggttgagtggttggaatgtgactgtcatggatgattacttgcctggattgagactcaaaatcttgttttgcctgcattattttagatatcttattgggcacatagtcaaccttttctggtttcctcactgcttaatttaaatctgtcggtaccaaccttttgtcattttcccttcccatatctctttgtagaagaatgataatgttggtttaacctcgcgaatgtttgatgttaatgatgttcagtatttcaacttgcacactaaatttcttgctgttttaagtaaattcctattctagaagtactctttgaagttgcagcaagtctttatggaccaactttgttcttttctggcag

SEQ ID NO: 52087 - DNA, 700 bp, Ricinus communis
  Intron number 1 from transcript 30206.m000761 (locus 30206 .t000009) derived from phytozome v7.0 (chr-ID 30206; pos 1 46385 to 147084)
cgatccttttctactttcttttgtgcttttctaaggtaagtgacacccatcgatctgatttctttttctgttattcctttttagtttttttttgtttcggatctatgaatttcgtgtttgttttgtgtattgatgttgagatctggtatagctagtgaatcactatttatgatcgtcacatttcattgtctgatctgcttttctcttatctagatctgtgttattttaatttgatccgcttctccgtttgtttttagggttttttcgtacattttttgcctttcgatctagttagaactttgaaattcttaacctaatagaatctgagggaattagaaggattataaattattatattagcagatttagattcaccgtataagtaaatggtaaaattttgactctaaaaaaattggaaaagtttttttttatagaaagtttactatgttattctattgcatacacatataattcaaaattgtgagtagcttgtatagatactgtttgtaaatggagcgaaacaattataagatttgatatgaacggagtgtgtgaagattttgaagatacataaaaatcattacctaatgcattacttcatgtagtaaaagtcaagcttgcaaatgtccttggtgggtgtctgtctatatatcgatttgtttgtaatcagttctttctatgttattgcaggtattagaaa

SEQ ID NO: 52088 - DNA, 563 bp, Ricinus communis
  Intron number 1 from transcript 30169.m006332 (locus 30169 .t000109) derived from phytozome v7.0 (chr-ID 30169; pos 5 67160 to 567722)
tgtattattccattcctcaggtttgataatttgctttattcttgtttttcaattttcaatttatgatactttgtttggttagaaagtatgcaaattttatgaaattggatgttagtatggatttgaattagggataaaagttcttgctctgtagcgaactgtaattaagaagccattagaaaatctaatgcatatgatgaaatggccattaacaaagttgaatacttggttaataataaatctaaccaatgctctcaatcattttgggacatatccgaaagaggaaaagcaagtttctttttcttcttttttgggtcctatttactctatggttattaaaatgatacacttatgtttgtggcctggtcttcagccattatagtcgagctgtttctaatcttggtgagaaaattaacagaaagatactgtaatttaaaacagcaataagtattcttgtgtgacaggatttatgcgaattgatgctctaaaccttttccatgttaagaattaattccatgtttgctgcaggtggagcttgctaagcatctagtagcttgctcttt

SEQ ID NO: 52089 - DNA, 652 bp, Ricinus communis
  Intron number 2 from transcript 30174.m009086 (locus 30174 .t000483) derived from phytozome v7.0 (chr-ID 30174; pos 2 972346 to 2972997 reverse strand)
taagatcggccattacagaccagttcaggcttctggtaataattctatttggtgttgttaattcttgatcggtgcagttacaattgcatttgaatatctaatcagaatcaggattggctgcctgccactgtatgagacggctactatatagtgaccacccattactatgatagaatatgaaatgtcaaaattattttttctctctttgtttttgtttccttttctataaaatcttggaaggatatctcatgtttaaatctctattgctgtttttcatcacttcaaaatgaaatttttgaaatttcatactgttttaattgaattaattctttttattaaactaatccatcttgcatgagaactgaaatgaaaaatgggacatgataataatataatataagaatatgaaatctttttaagtagtacaaaagaatgttggaaaaatattataatgaaatataatatatatatgtttaatttgtaaacatcaaatttataatcaaatgtcattctaatatttcttggctatttattgattataccaatttttccttttctaactgtttagggttgaggttgatagtcctataacacaaattatatacttattttgtggaatgacaacagaacaattctctacctttcaacaaat

SEQ ID NO: 52090 - DNA, 906 bp, Ricinus communis
  Intron number 1 from transcript 30170.m013688 (locus 30170 .t000100) derived from phytozome v7.0 (chr-ID 30170; pos 5 72856 to 573761 reverse strand)
agattttcctcttgaagaagaagacgatttaggtgcgtcaagtttcttttcttttgttttttctatctgcattttacttatatacttgtgtatgtgtgttttaattagaactgtatcgttatatttgctaatagaggtgaatcggcttggttttagtctcactgcattctgaattagtaatgaacatgtgtcatagcaattggcaaatgcaaagctacacttaatgcattgagttagcactagtataagtttgcttacctatgtattgaatcttagattttatccactgtctagtgactttctggagtttgtttcaggaattatatacagctgtttgcttttagctgcaatgcctaacatttcctcgctaaactttttaactatgaaaaaaaacactacatggattagtcaatctcaatcaaagtttgagaataataaaccagcaaggcagatggcatgttgtgtattctgcacctacactcgcaagtaataaaatgtagtctaaaggttatttggtatttggtttgttggagatttgttggatgtattacctaattttatgtgagtagctatatttgcatgattaatttatactgggtaattgagtactcagtttcagtggttcagaactataaacctagcgcttgaatggttttctgtttttgtttcaggtactttaacattaacctaacataattttttacaagtttcataaatatcatgttgtttttctaggtttcagtttgtcatctaggagcttttctctaagtgcttgcctgttactttgttttgtttatttttgttgagtgatgaacccttgcctttctgccctttgattctgccacatttatgcaattttcctttttaaattttctcactcgtgttgtttagatttcaacttgtctg

SEQ ID NO: 52091 - DNA, 842 bp, Ricinus communis
  Intron number 1 from transcript 30154.m001137 (locus 30154 .t000021) derived from phytozome v7.0 (chr-ID 30154; pos 6 21002 to 621843 reverse strand)
agtcctcctgtctgtaggaacaatatatttcttatcataatgttatgtagctcttactttagcatagcatgactttggtaggaacattgaacaggctccatttgcttttgtaacttgaactcaacttagtttgattctagcatattactcaattctgaactttaattacaacagggtgttttcaggtcttctgtaagacatgaatgctgtgcagttatagtatttatattttgggcctgctacttctttcctttagatgttttctttttctagttcactgtggtttgctagacatgcttctataatgcagattttgtttatcagtaaatggtcctgtcggtatatttttggtgtacttactggcattctgttccttgcttactaatgtatttaactttatcactctgcattcatgtgtttgcctttatacattaattctctgtgctttttcaacattcttttaattcgatggctggttatggcattgatgactatttggcacaggattttgaagttgttcaaattgggggggaccttttccattgttatctggtagaaactgagcttctttctttgctttgtgatgtccagtttgttgcaggttgaagattaacaatgtggctattcattgcttttatttggttgttgtttgctcttcttctttttttctgtgtctactctcctgaaatgagttttatttttgcagggttgaagtgtatgtgattaaagagggtttagatatgctttgtgcaatgatgaactaatatttatgttttaatgtatctgaaatggagtttgtctatccttctcatgttggttattcttttttcttgcagtggaga

SEQ ID NO: 52092 - DNA, 917 bp, Ricinus communis
  Intron number 2 from transcript 30174.m008963 (locus 30174 .t000360) derived from phytozome v7.0 (chr-ID 30174; pos 1 244515 to 1245431)
tttctgtatcttttcttcccgaggaattggagtaggtgattaatccaacttctaattgggttttccaagttttaattttgcttcttaactcattatgttttaatcttgaagtaccagttttttcttactcatggttgttattggatatgatgttttcctgcatgattacttaattcctgattttcttcatggtattaaggtgaaattgattgtgtcatctatataagctcagctaggtggtgagaaactggtagcttatcatgccaaatgattttcaatctcttttgagtttgcctcttattcttatctttgcagcacaataccaataaaggaaaacttctttttttctttttttctttatgctttttctgtttgtgctggttctcgttgtagttcagcggattttggctgagaaacaatatcaggaacttatggtaactctttgatactggtatcagtgtcaaggattatatgtggatcctggtttcaatgcttcacaaaagaaaaggatagagaaagaatagtttcagtttttgtggggattggttttagttgcttgcaaatgaacttaatccggtaattcagttttaagaattgtggctgaatctgccaagtgacaagcatgttaacttatacattttcatgctatatgtcataaaaattttatgattccctttttagttgagatcagcacgtattttcagagcataaacttcatcgtcttaaaaaatgagaaacagatgtctccaccgtttcttgcttaaagctggtattatggggtttgataataatgcattctcgtatctttgcgtcagaatattcatatttccttctgttgttcttattatctgatacttcttgacccctgatgagcaactattgttttgactttgcagttgtcttcactacaaaacaaa

SEQ ID NO: 52093 - DNA, 309 bp, Ricinus communis
  Intron number 3 from transcript 30204.m001739 (locus 30204 .t000008) derived from phytozome v7.0 (chr-ID 30204; pos 4 6337 to 46645)
aagccaactcaggtaaggcctacgtgatttgcccttcatactgcgacttagaatgttagagttcgtgtgcattaactaagttaatcatctcaatgctagcaggcagcaggtgttctttgtaaattgcctttgcatattttcgtttgttctgcaaagatttttcatcttcctgatgtaaagataattcttcaaaagtctttccatagctctgttgaaaaagaaataattaaataagtttttgcttagcttagcattcagaataacacatttttttgagttatttttttccagaatttggaggaggaggca

SEQ ID NO: 52094 - DNA, 549 bp, Ricinus communis
  Intron number 1 from transcript 30174.m009015 (locus 30174 .t000412) derived from phytozome v7.0 (chr-ID 30174; pos 1 553612 to 1554160 reverse strand)
ctgttctcaaagatattcgtccccatttactcgaggtagtaatctttacattccatttccacattttcttactttttaattgattggcaacatttcttgatacagttcaaaattatcttgcttttcctttttttcttttctacatgatttaatttcatcaactatacatttcaactatatagtacatttggactataatttggttctgggacattctgatattgtaaatatatgatgtttcgtacccaacaaatcaaaaaactgcaagtcctcaagcccctaaagaaaagaaagaaataataaaaaaagaaaattcccatcgataacttaaagatttctttaagatctcacaagtacctaattatctattttgcataatcaaatttgggactaattgcgtacaattgtcttagtttatatccctctcttattttttagtgcactttgtatatcatacgtaccctgttgtacttatattaagtctcaagggcttaatttgtttgtgttcctgaaggtgcttcgaacagtggacttccgcaattgcaaagg

SEQ ID NO: 52095 - DNA, 675 bp, Ricinus communis
  Intron number 1 from transcript 30147.m014108 (locus 30147 .t000379) derived from phytozome v7.0 (chr-ID 30147; pos 4 554567 to 4555241 reverse strand)
gtgcacgtctccttctatcgcaactgtaacctttctatcttcctctctatttatgtatatgtatgtttatgtaattagttatagctattgtcgtattgactcctgttattttagtgaagaatttagcgtggaattgttgtatgtttatccatttgttataaagtattggtttttaatgtttgatccacaagtatttgcttgtagcttgatggctcctttttttccttttttttttttttcctcttttgttcttttgctgacgggtatgctgtccgtttggtgagaaaaatgtggaaaataaatggaatggatgtgtcatctttagatttggtgtatcttgactgcttttgatttaatactaggttaacattggttatgatctttgatcttctgtgtcaaggtcagtgaaagacaataacagtgaaatgggttttctcagtcatataaatatcggggtttggggtctggggtttttgtgctaatgtgatcaaatttcgttagacaattcaagaagcctaattaagcaattttggtgatttctagccttttattttcagcttaacagtgcactacgccccttgtagggtggcaaaaataatctacgtattatatctgctaatgcttgtttaatttggtaattgattttgtgtttatgcaatttctgtataaatttag

SEQ ID NO: 52096 - DNA, 828 bp, Ricinus communis
  Intron number 1 from transcript 30169.m006580 (locus 30169 .t000357) derived from phytozome v7.0 (chr-ID 30169; pos 1 994781 to 1995608 reverse strand)
atcggtccgtatatttcttatgcttttatttcaagtattatcaattaattcactttatggtcaaatgcttttatgtttagctcgtattcctggcaattacttttgtcttcaatttgataattaagttgacatttctgttttcaaaacgatattcaatcttgaattgatcctaaaataccagaatttgaaggtaatataactagtgcttagcttgggataatttgagattgtctgtaggcatttggttgaaagaacaggtctatgtttagagaaacccgaatcagttagtgatatttctattaacgttttcttgttatatcttcttgcacacggtgagctatctttatgaaaaatacttgttccagaaaacttctgctgtttttattttcatcttagtattagtatttagagttaacttagtgtccattggagtttgattatgaagaacaatgcattagtaacaccaagttgtatttttaactgattttagatgctttcttgagacttttaattgaaagttttaaagtacaatggtgttagatatcataatccacaaaatacttctttaatttcatggcatgtttcggtgttcttcacttttggatgcaatatttatgaacttgttttcagcaccttcattagatgtggtaagggaacttacatgttgtttctctcagtcctcagatctcggatcatgtagaatgttttagattttcaagcaagtgcgatacacttgctggatccatattgtaacttcataatgtattaagcttaatacgattttgttattatgctatgtcgcagagtgggatccttggggtgttcctg

SEQ ID NO: 52097 - DNA, 796 bp, Ricinus communis
  Intron number 2 from transcript 30204.m001763 (locus 30204 .t000032) derived from phytozome v7.0 (chr-ID 30204; pos 2 00190 to 200985 reverse strand)
tagaagtgagtggagggacttttgcgttacataaggtaagttcttgcaacatttgatgtcttaatgtgtacgcttcttactgatttgtcacgtgattttattttagatgaagattatttttcactttgcactgattaatcggtgtagtgccagaatatatacaaaaagcataatcttccctggaaaactttcaggagtagacttgtaagaaaacgataaaaggagcatgctttttggaattgtggagtgtgcttcctgcaaacttcacagaaccttgcatgttttctgggatatttccgaattatcacaagtcaaaacatatagaaactggttacctacacgtagcgacaaaaaataattatggatgaagattggtggccggagtgattctcgagttacatatagaaactggttatcacaatattctacatcaattatcaataagaaaatgaaagcctatgttactattgattttcatgttaattagaatcccaaacctttgatcttggatttatgagtaccaattttgtccagcttcaggtctcagcataggatgtacaattttctttcagtaactttacacatcttttttcttataaattatgaggtcagaatcatataaactttcttcagtttagtttgtaactgccactgaaaacttattatctgctaactttagttagctgctctaactgaggcatctctttggtaatatatttgatgctttcgagaggcttctgatgatttaattcaaaatgcagttccctctagtctctcgcagcggaagaatacgaaa

SEQ ID NO: 52098 - DNA, 819 bp, Ricinus communis
  Intron number 1 from transcript 30204.m001763 (locus 30204 .t000032) derived from phytozome v7.0 (chr-ID 30204; pos 2 01007 to 201825 reverse strand)
agtttgtttgtttttttcttttcttttttcctttttgtgcaagttacatgctttgatgttgtgtgttgctttctcattgttgcctagcaatattttggtctggtttgattccatcttctgttctgctatttcatctccaatcaaaagattcttttctttctttggctttgcttagagtgcttctgctagttgtttcgtatattactttgtttctgtttttctttagagttcttaattacttttaacttcaaatttttttcctcatctcttcaatagctttcatgtgttataataactctttctgttgtttttccaagctataaacacattctctgtccagcgtttcagcatcaaaatttctgattctttgcgtttttggatccaattgtttgtcatgtgcataatatcctgcactctggtaacctttttatgacatatgcactttggtttcttgttctttaacaggattttatattctcttccagatgatttgaaatattctgaactgattgattaattgaagtcatgaaggtgggagtgaagtaaatgggtgaaatgtagaacccaatagtagaactagtcttgagttcaatcgataccaaaacgaccaaactagtctttccattgtttgaaccttagcattaataaattatttatttttcttgctctatggcaacgtggcatctctaacagagtagtgtactttgatttaacataaggattttgtattgtccatctgctgatgtctggtgtctacatgcagttgtaagtgtttcttttgtattaattggcaatcatgttgtcgtaggatttttcgag

SEQ ID NO: 52099 - DNA, 473 bp, Ricinus communis
  Intron number 1 from transcript 30147.m014459 (locus 30147 .t000730) derived from phytozome v7.0 (chr-ID 30147; pos 2 121513 to 2121985 reverse strand)
aattctcccaggtatctcattgcctctaaagtttgcattatttgtaagttcttagaaacttttacttctgtgtgcaagtatgtgttgtctcttctttgattatattgttctggtgtttttttttttttagatcttggattctactcttgtaagaatttgattgtagaattcatcttgtttagtaattcctactttattttagtagttaatgggaaacctctaaaaattttaatgttttcaccaagtttcagtgactaccgttggtaatgattttgctcactacctacctttattaattatttctggatattggtcatttaagatgctatggtctaattaatactcaacaaattattagctcaaactgtatgctagaagttctctgtgaagttttatttttttccatggtagctgtgctttgatttttcatcaagtgaaatatacttctgttgattgcagagttgtgattgata

SEQ ID NO: 52100 - DNA, 579 bp, Ricinus communis
  Intron number 2 from transcript 30174.m008823 (locus 30174 .t000220) derived from phytozome v7.0 (chr-ID 30174; pos 5 22298 to 522876)
acaggagtttctcatagagcggcctccttaatttggtatgttgagagtttcaatattcgattcttgcttttgattgtcatcatttgatagttaaggattagagttttgcggtgctcatcatgtatacatgtactgtatgatagtgaaaaagcgtgataaataattttatttggcttttaaaatgatgtctatcgaggttcaagtactgtactccattggccaaaagagtgaagagtctaagcatatgctatcctatgttcaacctgtaattgttaactaaaaacccatagttaattgttgtgcattggtttattaaattgttgtcagctatatggagaacttaaaaacaactttattttgtaacagactactccaaattctagaatactttgtgtgttagattgaagaatctattatgacctgcagagggaattctttaaacaaagtgtacaacctctgtctctgaaagttcagctgttaattcgtctgctttttatagcaggtttcttcttgctgctgatttatttatgcacatttctgattcttgtgtttcagaggttgaatagcaatatcttttga

SEQ ID NO: 52101 - DNA, 911 bp, Ricinus communis
  Intron number 1 from transcript 30190.m010996 (locus 30190 .t000232) derived from phytozome v7.0 (chr-ID 30190; pos 1 176076 to 1176986 reverse strand)
gctgctgacggtctctctttctctttcaatttgcttcctttgttgctttggtgacttttttaattccattttgatgtacctttctgtttaaactgttgaacttctcccatttcttgagttgaatatttggttgttttctctgttttgtgtgtttatgtgttgcgtatttggtttcaggttcattcaactctagcaggcattttgagaagtatagatttttggggtgtaccttttgtttaaataatcgaatttgggttatttgttagttgattatacttttgatgatggcatttgagttgggtttggttgttttatttattttatgttttatattttgttttaagttcactaaacactagcagaaaatttaaaattaatttttttttttttatccttttagctcaccggatagagtaatcgaaggtgtatatatccatagtcaggctgctcatggtacatgtgctattttgtgtgcaattgatttgcgcttgaaatatgaggtttggtgtattagtgtgttaatatgagagtgccaatattatttcccctgcttattatgtgttcttagaaagcagtccagtaatggccatgtatctgtagaagaagttgcaaaattttcgtactcacaaaaattatatagactgccaagaatccctgctctaaaacctttataacttcgcttcaattacaggatgcctagcagcatactgttggcaagagccaattttactcttatgcagtattgattaggcaagctctgtcatgcacacagaatagcttggttgctaacatttacattactgtaattcttgttgctatttgttccattttttttcacattttagttaacatgttttctttcttctgttttgccagaggcaaagcgtgcgataccattgaaagattaccgc

SEQ ID NO: 52102 - DNA, 576 bp, Ricinus communis
  Intron number 1 from transcript 30170.m014093 (locus 30170 .t000505) derived from phytozome v7.0 (chr-ID 30170; pos 2 808368 to 2808943 reverse strand)
ccaacacaaagaattggagtccagagttcgaactggttaatcaattaattcttcgatctaattttagctttggtttttccatttatagctattgctttacttttccggtaaaacgaagtagctttaggtttattcgatgtccatttcccttaaactagattgagttgtttgctttagtcaatttaatggattttttgaaaagaggttcaagttttgttgtgtgcagtattagtatctaaagaacttaaggtagttttaatagctgcaattctggatagacaaattcttttagctttactctgttcataaattctttaaatgtttctcatactacataattgttatctaataaaagaatttcatgaaaatgatgtagctaaaagtcttcttcttcttcttctgcttgattgtattgttttgcattcaaaatctgtcatggaaccctatatatgcattaaaacttgatttctttttaatattgctttggcatttggtaatcatgatggtatgcagcattgagacaataattatgttgttgcagtgagggagaatttgagatctgcaaagaaagatttc

SEQ ID NO: 52103 - DNA, 778 bp, Ricinus communis
  Intron number 1 from transcript 30152.m002405 (locus 30152 .t000026) derived from phytozome v7.0 (chr-ID 30152; pos 9 24784 to 925561 reverse strand)
tggatttttctccaacctaggcgttgacaatagtatttttctttttttctttctcttacttgaatttgtttataaattaagttttttttttttttttttaatggttgtcttgtttgttttccaagaaaattgggaatataatagatacaggatttgtaggagaaatcttgtgcttttgatatttgtttaggattcccttgaaaaatttgagtggatggtagagtggcatttaatttgtcaagttgtataaataattgagaaaaaaaagggttcaatttagaataaagaaaaatgctaaattgagaataaggaaactctttttcacttcctctgcaaccaaacatgcatatttgattcttgtgcctgtactagatggaagcacctaaatcttttgttagacacttcttagcctcaaaatttgaaggtgtctctaaaagattctttttttctcctttatgcaaagaaagttgacttttgaaatttcccctttttttcttctttttccattgaaaaatggagtctagtccagaatcatggaataaaatttgtcaatgcagttaaatatgaagacttctgaaatcttagtcttggtggcaaatttcagttctactacttgaaattaagatcctaattaattgtgttgccttggattctttagttcaatgcttacaactaattggttctatcctgcttattgctgtaaggttgagtcactgataaaaagaattcctaatggctagcaggattcactataactaaagaagtaggcggttttcaa

SEQ ID NO: 52104 - DNA, 858 bp, Ricinus communis
  Intron number 2 from transcript 30147.m014087 (locus 30147 .t000358) derived from phytozome v7.0 (chr-ID 30147; pos 4 428672 to 4429529)
cagaacctaataaagatttaagctggaataagcaggtaatagatatatatgcatacacatgtatagtcctatattcttcgttattattttctttttaagctcttaaaggcattaatttttcaaaagatgtctgtaatactgattggatttgaaaccaccgaatgagtccttttacacaaccgtttcttatctttggaattacatgattgtttaattttcatcttgacttgaatagatgtagaaagctaatgtatgtatatgtcttccaatgaattctcaagcgttattagtgaatatctaccccactgcaatataattctaatcagacatgctcatcaccatctctatatagatttgtcttcatttagacatgaaaatgactggttgaagtaggaccaccgccgaatttaacagtgaaaattgccaagagactcgcactgtaaaaatcatgattgttcaggtccaaaagtcatactaattgacttagctggtctaagtttttttgttcttcttttctttttgggtatctagacctttgattagtagggtttttctttgatcatgtgctaatgttatgtgaaaatgtgtctattatgtatagacgactttaagacagaattcgattgaagtttagtgttattattatttgttaaaattctttgtttgtttgcaacatttcttgaaagttcccattttccattttaccagtttatacaagaaaaggagttgacgaaccctagttacttaagacctgcatcacatagttctttactgaattttctctcttcttcttttccttaatcaatatttgatgcttaaacaggtaggtatagcgacgaacaaggaaagacccaccat

SEQ ID NO: 52105 - DNA, 688 bp, Ricinus communis
  Intron number 2 from transcript 30147.m014227 (locus 30147 .t000498) derived from phytozome v7.0 (chr-ID 30147; pos 1 072244 to 1072931)
tggaatttttggctgtactgaagatactgaaagttgtaagtttattttaagggatccgttttaatgatgtagattttgtcattttttctgaggtaaccgtgtaattttggaccactggatttttttgatataaataaaaattgcttaagaacaaacaatgttgctaactccctattctggtcaccatcttgtttctcatcctaaaatttgtgcctatggagatgtatgtgcgtgtagtagtagtttgaggagatttaagaaattggagaatcttatttcaaagctaagcaatatgctattctttaacattttgagggtgtttggtttatggtaacttttgtgtctatcaatgctttagcaacaactgtgtggctttatcaagattttgctaattatgtttttatatgttttattttttaaattaggatggataagataactagaatctgcaccttatttgcttgatgaggtgtggagggacttcttctataaaatggatggagttcctctattgttctcttctataatactggctctcctttatatctttgttgttttaataagcgcttctccagatccagttttctaaaatattatttttaatctgccaaattgtgattaatctacaatgtttttattacactgctatgcaggttggacaggactattttgcccttgcgttctattt

SEQ ID NO: 52106 - DNA, 449 bp, Ricinus communis
  Intron number 1 from transcript 58083.m000080 (locus 58083 .t000007) derived from phytozome v7.0 (chr-ID 58083; pos 9 024 to 9472 reverse strand)
ttgtcaggtaagtgtccttagtgttagtggaaagctaggtttttaaattccctcggcagggtcattgaataaaatcttaaagaaaaaggggtacttagtgcggtgcccttataggagtctgaacatctttttttgagctattaatatgctatttaggatgagatcttcaagtcttcactggattcacctgagtagatgttcaaagtattttttccaaaaactgatgtaattattggctcggcaacccttattcaaatgttcgatttgccccgctaagcctcagatattctaattgaagcaaaacttctacgttacgcccagcggcaaagagtagattctctaagagcaagggcttatccacgatatccttacctgaatgtaaacccaaggctgacttaatttcatgctttgaaggcttacagcggacaacctcgattggaattaggctt

SEQ ID NO: 52107 - DNA, 1010 bp, Ricinus communis
  Intron number 1 from transcript 30147.m014198 (locus 30147 .t000469) derived from phytozome v7.0 (chr-ID 30147; pos 9 14825 to 915834 reverse strand)
gagtattttggtggcagtgatatagcaactaagtagtagctggttaagtgatgggtaggcaaccttgttgtgacaagcttggagtgaagaaagggccttggacagctgaggaagacaagaaattagtcaattttattctcacacacggccaatgttgctggcgtgctgtccccaagctcgccggactccgccgctgcggcaagagctgccgtctccgctggactaattacctccgccctgacttgaagagaggtcttcttaatgaagctgaagagcaactagtaatcgatcttcatgctcgtctaggcaataggtaacgtgtgattaattaactttgataattacagtgatttcattacctttatatgattttcttttgttaacaacagtgaattaccctttattctctgccataaaatcctctatataggcaataggtagttcttgtgcttttcctcagtttacaatgtttgtttggtgttccttctcgacagaaggcagaaatactataaaataacacgtggaatacatttgatttaagttggcgtatatttcatgtcaaatactataatatactagacgttggatcataactttcatttcattggtttacttgaaaacaaagccaaatttcgaagtcactaaggagcatcatctctgtcatataaaggccttgcttcaaaggatattccccagcagttctttatgatgatgatgcaatagaatattattcaaccttttcgttcttggtagtgggtgctaatgattattatattgaaattctgatgatattccttggacggagcatattagttattagctttcaagcatatgatgatacaaaaggaagagcaagtgacgcagtggtggcattacacttcacctaccaaagaagagctggggattaaatatattgataattttacatccgtttttcatttttcctgataatgctttggttgttgctttaatcaggtggtccaagattgctgcaagattgcctggaagaa

SEQ ID NO: 52108 - DNA, 304 bp, Ricinus communis
  Intron number 3 from transcript 30205.m001590 (locus 30205 .t000020) derived from phytozome v7.0 (chr-ID 30205; pos 4 66439 to 466742 reverse strand)
ggatcttggggtagctgaaaacactgtcttacaaggcatgttgaagttgccttctgatgcatttgctcttttaggccttgtttagaataaatcatctctgagaattttgacttcttgcaaaattatgttaattttatatgattttatttctttgaaaaagcttaggtgtttctaaagttgaaagaattgaattctggcaagcaactacttacatgatcagatatcatggttttctttttcttttcctggttcaatcatcagtactacatagcttatggttttccatattgtaacattaagcagg

SEQ ID NO: 52109 - DNA, 253 bp, Ricinus communis
  Intron number 1 from transcript 30147.m014014 (locus 30147 .t000285) derived from phytozome v7.0 (chr-ID 30147; pos 3 991204 to 3991456)
gttggtggacccactaaaggtaatttgttttcttcatctttttatgttttaatgtgctatgattagtttgatttctgttcaggattcctcaatttttctgttctgatgagtttttttttttctcttttctatcttccaaagaatgtatttttatgaagcgatttgtcagaagttgtttctttcgtttgagaatttcaacactataccattcttttttcgaattcaggaactagattcaggccattgtcattga

SEQ ID NO: 52110 - DNA, 616 bp, Ricinus communis
  Intron number 3 from transcript 30174.m009124 (locus 30174 .t000521) derived from phytozome v7.0 (chr-ID 30174; pos 3 165533 to 3166148 reverse strand)
tggaatcaactgtcaagcttgattctatagtcactgtaagtcctgttattgcttgttttgatttttcttttccagctttccagttacgcaaattgttgagcagaagtaatttttattgtattttaatctaaaactaagacttgataagatggaatacaagatatgaaagcttgagattatagtgtgcagtctacaaattactactacatcatgtctttcactttgcttttattcttcttccatctttggtggcaatctgttaattggaatttcaataacaagtatatggtgaacattttcagttaatctggatgcttatgttgtgtttgtttctttgaaagaacattgagaaaaaatgcgactgcgaaaatgggagagaagtaaattaaaatgctaaagttttcctctcattctctccacaaaccaacagcagcactattgttatgttgggtcttacaggataccttgtatcaggatgaggtgtcaacatccatcttaatgtcttctttgcccataaactatgaaacttggagttgttttgtattataataagttactattattttttccccattcatgcctatctttagcaagtttctgctcacacaggttgtag

SEQ ID NO: 52111 - DNA, 433 bp, Ricinus communis
  Intron number 1 from transcript 30180.m001038 (locus 30180 .t000028) derived from phytozome v7.0 (chr-ID 30180; pos 6 49674 to 650106 reverse strand)
acattgtacgccacatggttaattttttttcaaagaatgatatatcattctaacatgctgcatcacaattacacaaattcaataatataataatatgtgttttgatttttattatttttcaaaaataaaaatgctaaaattaacagtaaaatcaaacgttttaaaaaaataatactctcacagttgagaaaccaccgttttaatttccacccagttccactagaaaactctcggccacatacatttcttctttgggatttttttcaatattttcattggtgttttcgattttagttttaaaatcggttctttttttttcttttgttgttgatatgttttttaaaattatttttttggttcacttttacctatttttaatgctatttactcaaagatagacccatcatctcagtttcttggagaagtggagaga

SEQ ID NO: 52112 - DNA, 795 bp, Ricinus communis
  Intron number 4 from transcript 30169.m006604 (locus 30169 .t000381) derived from phytozome v7.0 (chr-ID 30169; pos 7 7374 to 78168)
ataccatatcagcttcctcctaacacagctcatttgtaagtcaacggtgattcacctttctgtctatgaacaatattttttggcactctacaaatttcctcctaaaaatggatatgttcttccgctatagttttattaactaaattcatccccttccgttttcatgacttgtttcatttttatctgctttattcagtcctgaccagccaactttagcagaaatgttaagctaacttttgcaagactaggtgaactttgtattccgtttatatataattggttgtgaagttgtgattaaacttgagttcaacttactagattagtcagactgaatgaaaatgatttatgcagcaaatctcaactagttttggatcaatcattcgttgcgttgagctaagtttggagtctaacttgtcttgccaagacgtatgcaatcagccttagaaaagtggaacccaaaatagtcggtatgattatgtgccagcgtatctaaatcttgaagagaaaatcatggtttcctctatactctatattgactgttataatacatctgccaaagaacctctgcattagagagtgtttgtttaaatagtaatactcagctattgtcaatagtgtcttgccttctcaatggtaaggattagctccttacagggaaggcgtaaacaagttagtgatcaagaagaacttggcttttcattgaattacttcactctttttgctgacttgtttgactacttaaaatgtgtttgattttaaatctcataagctacacatgcagagacctttctaata

SEQ ID NO: 52113 - DNA, 726 bp, Ricinus communis
  Intron number 1 from transcript 30169.m006343 (locus 30169 .t000120) derived from phytozome v7.0 (chr-ID 30169; pos 6 43038 to 643763)
atccttgggatcttccaagtatgctttcgtttcttgctctttcatgcatgtcaatctttttcttgttaatttctggatacatattaagaatttcttggctattttctttgttctatctttgaaaagtaagaagaagatttcatacagagggtttggatgcagtcacatagcttataatattattatagtattttgtttctcttgacccatctagggctccttcaaattggcatagataggcaactctttgattgagttaacatagcttttctagttatgtaattaagcagttcagtttcagtgcaattctttggtcgctgtctagtattctttgctttaatgtgccaattgtttgttcccatattatgtgtgtttatagtcatgtcttattgatttctatctaacaaaaccaattttcacacttaatatatatgcaccttctcccgccttctgtgtaagtaggatgagcaggataatagcacaaacttagaacggaaaattaagctctcaagagttgacaatgtaataatgaagagctgagatctcaatcaattcaaaatcacctagcatgtgaccatgtcactcatttagtactccattatgaaaagaatcatttcactgtaattggtattctgcatctaactgaaacatctctatcgtatctttttgttgatcttaattatgtacatagagcctagcagtgttggagacaaagaagggtacttt

SEQ ID NO: 52114 - DNA, 541 bp, Ricinus communis
  Intron number 2 from transcript 30170.m014363 (locus 30170 .t000775) derived from phytozome v7.0 (chr-ID 30170; pos 4 136261 to 4136801)
aggtgaaagaacaggtatgtcatttcataatcattatcgttatcgagttttcttcaatctggtattttcccttgcattagatggtgacaacttcatttttcaactgaacgaatttggtagtcagttgctttgctttctaatttctttttctttgtcctctttacttgaataaatgttaccatcaagaaaaaaaaaattataaccatttatgtgttcttaacattggagctgttgtttcattacccttgctgctttctgcctgacgttaatcctatccccaagaatttgattacttgctctttctagttttcattcagatattttttcatatttctctcattcaaatactattagcatctctggattttaagtttggtcggatattggagccaaaaataacgattagagggactcaaaatgcagagtttctgtttaagatttctgccaaatattggaaaaacgagtctgttttggacactgtcagcagattcacttcatatctttgcatgtttctctaagacaaattcgcattgttcatcag

SEQ ID NO: 52115 - DNA, 1008 bp, Ricinus communis
  Intron number 1 from transcript 30174.m008713 (locus 30174 .t000110) derived from phytozome v7.0 (chr-ID 30174; pos 2 364394 to 2365401)
cgatttgttgacaccgttcttgccgttaccaaagagtgagtcccttccttgaactacaacaactgtgtacacatttatctaaatttatgctaattgtgattatatggggatttgatgattttgtttttgggaaaggaatggttttgtgagttgttgaaggttaaagattcatttacttttgtgttttgttcttttttaattttcttttcagtggttagggttttggtattttgttttccgctttctgtattttggacgtctgattaaatcatgtagattttgattctctgatcaacctgtgtttaggtgttaggcattcgttcccttttgttttgttttgttttttttttttttataatttggttttagggggggttcattctgattagttttggctttttggggtcattctgattagtttgggtttttgaagaaatagtagaggagcttgttgattggtgagttcatttgaaccaagtggattgtttggaacatattagatgcaagaatctaatttaattcttgaaaaaccatgtgaatgttggtatgatgatgcaaattccttgtttttattaagctgaaaaaatggttgcatctatgagctttccaaccacaagaactaaatattattaaagtgaattattttgttgtacttttaggttttccaaacacactcagaaggagctggaacacattgaaatgaaagcttttagctgttggtgaaatgagatgcatgctattataatttgaggatcttgtatttgttttagaatgttatgagggattgatgaataattagccgaaaaatgggcctcctgtcagtttttttaatcaagatagttatttagctgccatcattatttcccctataaatacctccttcatggggcgttgtccatctgctgttgaacttcttttacccatatgaatgcttttgcatgctggttctttttcatcataaaagtttttgttttcttttctagtgcaggtcggtgaagacattcactt

SEQ ID NO: 52116 - DNA, 433 bp, Ricinus communis
  Intron number 1 from transcript 30190.m011129 (locus 30190 .t000365) derived from phytozome v7.0 (chr-ID 30190; pos 2 038212 to 2038644 reverse strand)
gtggtaccaaggtatggactctttgatcttttggatgtttctttgtttgaatggcgagaaagtgagggataatagaattagttgcttcttttttttgtttcagaaatatgaagaaaatactattttgttaagtctttgcagaggtaatcatgaaagtatgtgaagtgatattggaattttaaggcttttgacggtttttgcttgattgatgagaaaatacacagaaaacatttttaacttcatttggttgtagaagcatcgagagatgtgaccatttggcttaaatttgagtctctagtcacttagaaatgaatacttaatagagaaaaaagagtctaattcttgtcattacagattttagttattaaatttgtttactatggcttttctgctaactagtgtataacttgtgaatttggattatgcagaaagt

SEQ ID NO: 52117 - DNA, 463 bp, Ricinus communis
  Intron number 1 from transcript 30209.m001532 (locus 30209 .t000031) derived from phytozome v7.0 (chr-ID 30209; pos 7 02759 to 703221 reverse strand)
aaccggttcaagtatttggtatgattttgatgctaaaattattttctggtgacatttatattgatgggcttttttttatcctttggcaattgcttgagcatgtcatttaatttaactctagagattaatgtcttgacaaatgtttgtaaattaaaactatatgactatagtcctgtgcaatagtttttaattttagatgtcaactttgtatttgcagcttaatctttctttgctctgttattatgcttgacccgtgaacttgcaattgacaaagtaagatagaggaccataaatggattagttccatgcttttcctttttggtatcatatattttcttggaatagttcacttagtttctaagaaattcttttgatttcttgagattgtaaaatgtgctttgtataattttgcatatgtattacatgtactaacccttatactttaccacaattttaggtttca

SEQ ID NO: 52118 - DNA, 531 bp, Ricinus communis
  Intron number 2 from transcript 30186.m001299 (locus 30186 .t000004) derived from phytozome v7.0 (chr-ID 30186; pos 4 12770 to 413300 reverse strand)
atagccttgagtttcttgctactctcaaggtcataatatctgttccttactcaatgtttaaattaatgaaccgtaattgctatttctgaatacacaaaaagaaaaaaaaatgggattgaagaatcccatttaactcaaatatcaaaagttaatgagccaattttcggttagttcgatatgagcttgttaatagtgcatcccatttaacttttcatgctaaggtacttgatcatggctaaaatatggcttttttaaatttattttttttcttattctgatccgctgctttgaatggaagtaatgagaccccgtgattgcctatgaccaaactaaatgtaattgatcccggtaatttatcttgcctcctcaatctgtggtggtttggtgcatattagctatttatttctttctaaagcttaccttgatctgacaccatttttgaactttttgtttttgttttgttttgtttttttctttttcactttctgggttatagactttgcgtcatcaaattcaaagggatagagaagc

SEQ ID NO: 52119 - DNA, 934 bp, Ricinus communis
  Intron number 1 from transcript 30221.m002222 (locus 30221 .t000012) derived from phytozome v7.0 (chr-ID 30221; pos 5 19712 to 520645)
cttctctttttgaggccattggaaaggtgccatctcttctaaccatttcccttgttttctgctttaatatcgaattgagcatttggatagtagcataactggaataaaattagttgttaagtaagttaaatgcattgctgggtttctttaattgatcttccagattttattttttcttccgatcaattgtgaatttgtcatgttttatccaagcagaaagagcatcaccaaatagtactaaacaaggtttaagatctttaattgcgggtgtaagtgttaaagtaggctaaaaaccaatatttggttgtgggcataatttcttgtcattcaactgaagtaggtactgattaagtcttgtggttgttgcgttggatactgatttttttggtgctaaaatcattggggtgattaatatatataatttgttgaagcaaggtaggtatagttatgattgtgaattttgcaacaataatatattcagggtacaggattacagcttgctttctctctctatctatatagaggaaagagaaagactgtcttaactttacttaaagtcaataattgatgtacctgttctagttaaaaagccactaaattttgagtcatgagtttgcagctgaaatgtgtagcagaattttggatatatttaaagatgggattgtaactctttgaatgaaaaatataggaaatacttgaaaaagaattaaaatatttctgtatccattacagctctgtatttcttttggatagatgcagttgttttttggtgcctgtgaaacttattcttatgtgtttctttttgcaaataagcacttgtgactagtgtccacctctgataagtatttcatatgatatgcctttggatggaaatatgactaaacgaagatgatacctatgtttgtgcaaggtggtttccactgaagctagagca

SEQ ID NO: 52120 - DNA, 537 bp, Ricinus communis
  Intron number 1 from transcript 30190.m010896 (locus 30190 .t000132) derived from phytozome v7.0 (chr-ID 30190; pos 5 03973 to 504509 reverse strand)
cccctttccggattcctttacaggtattgctcaattcaacgctggaattgcaggaaaaatgaactgtttttcataatgaaaatgctatattgatctgcttctttatacactgattttatctctaacccctattctgcaatccaacttgtaatagttaagattcattatagttgtcaaacagaagaccaggattatcttcaccaacagaatgatatatttttttatacagaactatcactgttgcagttttgtttacataattgttgcatttgacagagctgcatgacattgacgttttggagaacaatttttacaaattctttagttttttctgttttagtcctcatcccccacattatgttactgttagcatgtaatgttttcacatattatgcttcatatggccttaagtaactgcaagaggtgatgtatcattagactttaattcaaacttgcaacataaattgtcaccagtattctgcttgaatcttgttttaatgatgcagttccaagattactcaaacctgaagccagaaa

SEQ ID NO: 52121 - DNA, 925 bp, Ricinus communis
  Intron number 1 from transcript 30170.m013871 (locus 30170 .t000283) derived from phytozome v7.0 (chr-ID 30170; pos 1 481671 to 1482595)
gtagtggcgagtcatcggccgagtctgcacaacaggtatgatatagatattgattatatatgctggtatatgaattctagatatttttgaatgaatttttgttttttgttttatcatgatatgagagattgcttataattataacatgaaactttcatttaagaaattctaattgatttttagttgaatttcctttttttccttttgaatatatacatagtaggtgcttgaattgattttgttttgcttgctgatatatggcgttaatttgtttgtcctccttttctgttttgtctcatccaacgccgtcgttttgctcccctaggaccgcctggtaataatataatgcgaccttttttttctttcactggcctaggaattaggaccgcctaattactctgccaattacttgaattcaattacgtaattaaattagaaattgcaatatcatttgtgtgtctaaattgagacctgctatataatgaaaatgaaaaagaagtagttttcaagatcatatacattagatttctgctcctagcttctttttgctcttattctcatattattattattatttttttttatttttttttatttttttatttttttctattcttacacaagaagaagttgattgattagtgcaagtaataatctgcagactaaaggcagattgcaagaattttgcttaatgcaatattagtagtgtagtatgagcttatacatgaaaggaaaaagtttgggacgctggactgattgtggctgttggtccttgagccatatcatatttactttctatctgttttcctttggccatgatatattatataaacctcctttgacatttctcgaagaaaagaagaggccttttagaggattctgaccatgattgtgataatatatatatatataccaggaattgcag

SEQ ID NO: 52122 - DNA, 713 bp, Ricinus communis
  Intron number 1 from transcript 30174.m009019 (locus 30174 .t000416) derived from phytozome v7.0 (chr-ID 30174; pos 1 568304 to 1569016)
gtcggatcctgggcccgccggagactccaatttaggttagttctttcctttcttttttttttctttccatttctagggttttgaactctattttctgatgaaagatgaaattacggttttgtagtgttttaggtctccaaaattatgaattttttgtcaattgtgctgattcgtgcatcgatttgatacaaaagtagttctttttcttttcttgcatttacaagatgaaattattgtatgctgcaacttacaatagaattatgaatactcaaggtatttgctatgcgtatgtattttactgatgtatctaataattttttaaatgttacactcgttaaggctaaatacaagttttgattttaagttggagtgggccgatgaagagcttagtcttgttgtatttatgttgtttgtatttagtgacttgggaatcaccttacttttgggcacaatatgattgctttcctgaaagctttgcctaatggttcttttgtttcttgctttttgctccatagttgaaaggaaggagattttaaatgtttccggggcaacttaaagctagaacactcgtctaatgaagtgctcaaaacagctgatatgcaccactagtcatttctgtttgctagattttatacctgcaatagagtggttgagatgtttgttttagattgccattgcagtgttgaccttgtcttctgttatacaggtgtagg

SEQ ID NO: 52123 - DNA, 605 bp, Ricinus communis
  Intron number 2 from transcript 30169.m006369 (locus 30169 .t000146) derived from phytozome v7.0 (chr-ID 30169; pos 8 13076 to 813680 reverse strand)
tacaccatcctctagtaaaggtatgtaatgacattaagaataattaagattcacaagtttgattgttttctttgaaatacatttaggttctggtactacatgctatgtcattgtgcattgcatttgttttggtgataatcattaatacgttagttctttcttgctttaccttttgaaaagtagttaataatttaatggaatgcttagttcttttatatttggccttcaattacttggcctccattgctatcaactttgccaatctggtgctcttgaagggctggatgaaaagtaattgatatgatttttgcagcttctgttttactttcacaagaagggtaatgaacagttacataatgctttattgttataagatcatgtaaattttgttatgctatgaatggtaggaacaaatagtataatgtttgtaaaggtggtaatatttttatccgtcctgaactgactcacaacctgaaaattgaggatcaggtaaaagatgacgcttttagatttaactcaactcaactgacatgcatggataaaaaatttctgttaattcttttttctttttttttctgtttgtcttcaatcttcaggactcaata

SEQ ID NO: 52124 - DNA, 441 bp, Ricinus communis
  Intron number 3 from transcript 30198.m000865 (locus 30198 .t000023) derived from phytozome v7.0 (chr-ID 30198; pos 5 26673 to 527113)
ctcatagggagtcgtcgaaagatctcattgaattggttagtttgctcagttatcctatgcttccaaggttcactaatgataaatgttagtttactgggtttgatatctcacattttggattatgcattacatttttctcattagtcaggcagctttgaattattatgttataatcctttgctaccaggttttgttgtttatataaagtggcaagtctattctgatccaacattgtagacattttttgcttcttgttgttagatatgcaatttaatttttatttttcttttgatgttgttggtgattagaaactggccatgcactctctaatgcatgcacatcaatgtaaaatctgatgaaaatcctcatgtttgtactatccactgccttaatatattttaaccgtattttttcatatggagttcttcaatttctggtagg

SEQ ID NO: 52125 - DNA, 367 bp, Ricinus communis
  Intron number 1 from transcript 30152.m002383 (locus 30152 .t000004) derived from phytozome v7.0 (chr-ID 30152; pos 5 7252 to 57618 reverse strand)
atttgctcctcttttgccttgtatctgcttgctttcttgaggcattgaatggatttaaatctttctacacttgattgggttttcttcctcttatgcttttcagaactgagctaatgagctggccttgttctttatttgattggttaaatatatcattgttgttcatagttaagaccataaacaaaagaaataaattgggttcattgttttattgatgtgaataattttttggacttttatttatttatttattcaagtacatgtacatgtgatcagggtccaatcctgtttaagtaataaaagaggtgtttcttatttatattcataattagtattaatacaaatattttctatttgtttcttatag

SEQ ID NO: 52126 - DNA, 694 bp, Ricinus communis
  Intron number 4 from transcript 30189.m001637 (locus 30189 .t000005) derived from phytozome v7.0 (chr-ID 30189; pos 6 0448 to 61141 reverse strand)
agtgttcaactgccttgatacttgtacagctagaggtatgttttaatttttactgaggcagacttataagcaagtattttaggtttgaatttgtccttgttggctttaattgcacaacttcaaaacaatggctggcctagatattaaaatggtttaataacttaatttacaaaaataaatgcttttggagcattcatcagaaacagttgccttgctaatcgttattagcatgatttgtttgttcattaagctaggtggatatcttatctttcacatcctagtctcattcttaaacatacaaattcttctgtacatgcaaggaaaaagagcaaaaacgtagcacacatcatttaatatatttcattgtctttttagctacggtaagtcttccctgtgcatgaagcaagcactattaggatgcttgaaaatttgttatactcgtgcatgtcttctatttttctcctatgcactcaattgtggtcgttcacatgtaacttgccattagaatttgaaaccacttggtcatcattctttatcgttttacgttacaatttttattttaaaaatcttcctttacctgaatgttaatttattttttaaaattttttgtgtgcgtaagtttccttaattcttctcaattgtcttcaattcttcttttacatgtttgaagttcacatttcagaaataattgagt

SEQ ID NO: 52127 - DNA, 711 bp, Ricinus communis
  Intron number 3 from transcript 30147.m014036 (locus 30147 .t000307) derived from phytozome v7.0 (chr-ID 30147; pos 4 135965 to 4136675)
gtcttggaaataaacgggaaggttagtgtggtagacaagactctcaattggttatttatatgcatttaactctttcaattttattttttatttggaattgtgttagagagatttggatttgattattatggttcatttattggcatgagatgcgggaagagtttagtgtatattgttaggtggctaatcattaaacatatctttttttattgtgaggcttaatgagaaccttatgttacgcagcaatgttttatgcctaccaactggtttcctctgtccctctttatgaaggagtttgagtagttgaaagaaatggcaggctattttgttactggcactaaaaaatataaggctgaagatgtatcttagaattttgcatcctgttgtgataattgacatagacatagtaatgcatggaaactgctcaaggttaagaaaattatcgtctgcagaacctcactatacgatgtccctgatctctttttcctagacctgtctcagattcgtgttgtgcatctctgcacactcaagcttatttttccatattcattttacacatttcaatgaacaatgccagagtaattgtcatatatttcatgtttgcaatcctctctagaaattaggatgctgacactcctaaaatttgtttattcttttttgtaaaatattactagattttaaagatctatagtggtgcagttttgcaggcaa

SEQ ID NO: 52128 - DNA, 549 bp, Ricinus communis
  Intron number 3 from transcript 30204.m001741 (locus 30204 .t000010) derived from phytozome v7.0 (chr-ID 30204; pos 5 2040 to 52588 reverse strand)
aattacaagatcctttggaaccaacatcagattgtgtaagaacaatcctttgatctcatcgccttattactgtatttactgatttacagaagagacatgagaattattttatatatatatatatatatatattttatatatatatatatatactgttttctgtgtactcaaagtagaaaaagaagaaattatgaatttttttattcatttcaagtgaagctatatgattgaattctatcttgaaggcatgcctccttgaaaaaaaaaccaagattataattaatcctttgagtacactcaatattttgcataatttattcatcaccatctgcttttcttaattaataatatcaaaatagattgaattttctatatcatcttacatgaaatgataattcgatgaaatatcaaaatattaaaaaatgaatagtaatttttatttatttattatgttagttttttttagtagattacattttatatcgattccatattataattttttttcttaataatgattgatgattgttggtatcagattttttgtgg

SEQ ID NO: 52129 - DNA, 938 bp, Ricinus communis
  Intron number 1 from transcript 30170.m013831 (locus 30170 .t000243) derived from phytozome v7.0 (chr-ID 30170; pos 1 213167 to 1214104 reverse strand)
tgctgttgctgaagtcaaagatcaaggaagctgtggtgagttttccttacaaataaaatacgtttttatttaaatttaaatttttttaattcatttaattgttttgtttgattatctgtcactattcatatattttacaaataactttatttggacaagccaaacaaagaaattgctgaagaatattaattcacatcagctgaattaattttgttttatcctttttgacatccgatgctgtattagttttggataactagtatttgtattagggatttctgaaaataattaaaaatattaattctttttcgggaagacaattatataaaaatatcgtcagaggttaactatagtttttttataaatccatggctgccctcgttacaattaaaagaaaaagaaaaggcttatcgtgtagctcttaaagaaaaatcaagtaactttgtaaattatgcaattcaagaaaatttcttttatgaagtattctgattaaagaattaatagtttattattgaatttagtagctacaagtgaaatgattgcatgatctttatgaattggtttcctttcggttgaggggtcatgaggaatctaaaatttcggtgggtggaccccaccccactagcgacattagctatttggacccggcaccttcgcactcatgcccaacaagtttggatctttcataactcaccaaaaagatatgcagccttgaaataataaaggaaaaaagaaaaagaaatactcttctgtgcgccaatttaaaacctcagttagtgattaattttatagcgagaaatcagttgctagatcatctggaaactctttgggtactcgaatctttgtgtgtaaagatgtctgtgtacactgagaccagttactgattattgatttgatatgaagggagttgctgggcattctcaacaattgctgctgtg

SEQ ID NO: 52130 - DNA, 285 bp, Ricinus communis
  Intron number 1 from transcript 30170.m014176 (locus 30170 .t000588) derived from phytozome v7.0 (chr-ID 30170; pos 3 364906 to 3365190)
tagatcacttgcctagcgggtacttcttaaattattatttcagatttcaaaaacttttatatcagtaaccactatgaaagttacagccttgtatttttcttcgcatgtatatgtaagcaaagatcaaacagaaacaaccacatttctacatgcgttatttgtatagactatagttgctcgttaggtagctcaaaatttttgtgagcattaatttgaacaaagtcatgctttctgtaatttaattattagagcttttatttacttatttatttacttttgaaagga

SEQ ID NO: 52131 - DNA, 830 bp, Ricinus communis
  Intron number 1 from transcript 30174.m008900 (locus 30174 .t000297) derived from phytozome v7.0 (chr-ID 30174; pos 8 72625 to 873454 reverse strand)
gagcatcctctttatcttgaggtatgtttttcctattaaatcaaagccattgttgatttaatgcacgcctatattgagtactgggcatgaatgaaactttgctgtatagcaaattttttgatgtactgtaatgggtattttaattttacttattgcctttagggtaaatcagttagttggggatataattttttgtcacttgtctgatttaattgctggctagttaatttcttatcaaatttttgacaaatctgaatgaacagaaaaaaaatgcgcatgccaatgtcacaaattcaatagtgactctttgttttgtatattgtattccatggccggccttgtctttaaatggatcagagggtctaaatgaccttttgtggtcaatgcatcagtacttcttttattatcttcagtatcttttatctttccagaaatgccttcatactatgattgttaatgctgcaagggcggcatgtaatgaaaatgagttctcttattgctgatgtccaatctgtgctttactaatagactacatttatccaaaaaaaaaaaaaaaaaaaagaaattggagcagaagaccatataatcttaacttgtttgtcttcctttcttcctttctgcttgcttttatgctggacataagccgagggatgccaatagaattattattaaaactagaagtttccaacacatcaagcatttttttaatgtccgacattgacatagtttgggagtagtaggagaaaaactatttcttgttctatgtgcaggcagatctaataatggtgactgaactcaaaatttcttgcgtgtttgttaggtggccaaac

SEQ ID NO: 52132 - DNA, 928 bp, Ricinus communis
  Intron number 1 from transcript 30174.m008616 (locus 30174 .t000013) derived from phytozome v7.0 (chr-ID 30174; pos 1 760852 to 1761779)
ttctaaccggaacctcggttcttttatcggctcaggtatcgtttattattagtagcattttgtatctgcattcgtgtttgtggtttattgatttagcttcatttgtagttttgtttggaactggaattcactgtttcaaaattatttgaccaaagagataagacttcatctggttgcataaaagttatattttatctatttgactgaagagataaaaggccatacagaattacatctattttttaatgaaccaaacttttttgaattatctatttactttgcttaaaaactagctctattatatctctttaaaaaattaatcgccagatgcaaccttttcttttatggtttaatttattaattgactaatcaaccgtttcgccaaacaaacgaaagattcttttttccttttcttttttctttttcttttgttaaattgttttggtgtttgtttagttttttggctttatttagctgttttttttttttttttttcaattatattattttatatatataataacctcaggtaaagctcctaaaaaagaaataacctctattattaactaattcagttcaggctgcacagttgatggctgatgcattcaaggactcattgctttctattttctttacaaaaaaaaaaaaaaaggttctgattcagaaggttatttacttatctgaagctttggaaaatccgctcggtcaagagttggtcaaacactacctgtgtgctcgtgtggcccactgtttttcaaaaccacagttacatttgattgtgctaagtgctatacctgaagtgaaatcatgtaaagacagattttatttttaatgttgctataaataaataaaaatcttgtaacaaacatcttctaaacttgtcttattggcaggaaaagttcgtgaacaagctattttacagcataag

SEQ ID NO: 52133 - DNA, 684 bp, Ricinus communis
  Intron number 2 from transcript 30170.m013910 (locus 30170 .t000322) derived from phytozome v7.0 (chr-ID 30170; pos 1 681693 to 1682376 reverse strand)
ctcaaacagactggaaggtattcttcaacgatgtcgccctgattttcagataattttattatagtttggctgtcctttgtcacttggtcaaaccagcattttatttgctttcttgcatggtattgttttggtaggggattatggttccatatacagtggtctaaaagtgtttctgttactgattggggcttaaacacagaagagatgtcaattgagaatatgttaatgataaatctcttacttggataagtatcagaggtgtaaaaggtgagaaatatgatggatgtgagggtcgaaggcttgttcttccgattgagatttgttcaagcataattattggtcctcttagatgctttatacaattagaacagatgggattgattattgatgccgtaatactctgcaatacattgtgtattggtttgtagctgctgttttgtagctctgagaattttgatgtgacatgttgatgttaaaaggagcaccatttaaaattttctataattgtatgcgttcacttaatgaaaattttttggctagttactaaagcatttgaggtttatacatcttctggaaaatatgttgatagtcaatctttctttctcttgagttcttttcctcactatgtttgcaagctcccttggaaagtagcttatttcatttctttggttttgcaggccagag

SEQ ID NO: 52134 - DNA, 588 bp, Ricinus communis
  Intron number 1 from transcript 30170.m014328 (locus 30170 .t000740) derived from phytozome v7.0 (chr-ID 30170; pos 3 972519 to 3973106)
tggtgagttctaacagtcatctttctaaatttctcaacccttaatggttaattcgtgctttgttcttgtatctgatctattgttttttgccttattgagtttcgtgcgagtcagatcgtcaaattagttgcagaaagattaaattaatttacaccttaaatggagaattatagaaattgtcgaggttaatcgtgtatttattttggtgttggcaaattgctctgtagtgaaattgatcggcagagtttcatatttagggtttcacctattcaccttgctattgagatccattttaactcgttatttgagcttatgctgtattgaagaaaagagagcatccagaactagaagacggacacatttaagcaacttacctagcagttcttgatgctaaatgaatgtgttgaaattcaatctgctttgagttatctcaacttcgtcttgtaattatgtttcagtgttgttcaatttttacttgcttaatatttttcatggttccagcaatgcaatgtctgaattcttactgtaccagtggacttattaaaatttattgtttcaggttttggatcctatacagggctaagcaag

SEQ ID NO: 52135 - DNA, 697 bp, Ricinus communis
  Intron number 4 from transcript 30174.m009079 (locus 30174 .t000476) derived from phytozome v7.0 (chr-ID 30174; pos 2 894150 to 2894846 reverse strand)
tttgagtccatctctgagcttcagaaaaaggtaatgcattatctcgactgatcaaaatgcatcttatacttctaggctactgacttagagttagttgaattgctgtgatcacattccacttcagctgaggactttgattatgacttagaagcaatagaggaaattgcagagagaactttatgcatagaagaacaacctagggcgtgtgattgtcctaccattactatttacaagaaagagtctagggaaaggctaaacgtagtggctgacaaaagatcaaaaaggcctagccattagcctgcagcaaaatgtagttgatctctactagggttctgtatactaattttttgtgttctaaaactgttcaaggtctaaatataatgtattcgttggcagtagagaatgcagcttttttttttttttttctcttacctcaataataggctcatgttttattctctcgagctggtttctattttattttgttcaggtatagaagtaaggatttcactcttctatgactatgagtactcaataagataaaaaagaaaaaaaaaaaaaggaaaacgtgaaatgagcttgttctttgtttcctctttataactaatcttgacccgaattagctctatatatagtgtcatcattttctttttggggtgatttatgacaggagaaggcaatacaagagcaaaataac

SEQ ID NO: 52136 - DNA, 961 bp, Ricinus communis
  Intron number 2 from transcript 30170.m014091 (locus 30170 .t000503) derived from phytozome v7.0 (chr-ID 30170; pos 2 798740 to 2799700)
ttgttggtttaggagccggccttgtgtatcataaggtactttttgccttgaaatttttaattcattcatatttttgtttcttaaaattcttgagttatatcagaatttgctagtttctgttttcttttcttttaatttatgggctgtggactacagaattgtgttgtcattctgtgcttgcgatgaacttactttgtaaagctgttaaagagtttctgttataacagaatgtatccatcacagattgatcaaatggctggaagcttcaggtcaccgttcttcagttgcgcagtagcaattctgccgcaactaactaaatcatttgcccctttttttgcttgtacaggtggcatttgttgactggattagttaagagtgtttgactagattagttttgatgtataaatacagtgcagctatctgttgctaattaatgagattccatgagagattttgacatccattttctgttatgttctgccataatgacatacaaatttctggatactctttgagaaaatcataaatttgacttccctttatcattgaatatgcagcaaaagttgggtgacccactcttctactgttggcaagccaactgtattttggcttatataccaactagtgatttatggccttaaatttgaatagcataccagctgtctcttttgctttttccattgacattatttgatagaagaatttgaaaaagaaaaacaagatttgaattttgaaattatatttatgtatatcttgctttacattctaatgttggtcattatggcttaaatcatcaatgaaaccaataagaagaaacactaagctaatgaactttattttgatcgatagttaatgtatgcacctctgattcaagtttaaatgtcccaaattattgattttgtaaaatggttgtttggttggtgtagagcggaacagaattggtggcagcactgtggataac

SEQ ID NO: 52137 - DNA, 381 bp, Ricinus communis
  Intron number 1 from transcript 30170.m014228 (locus 30170 .t000640) derived from phytozome v7.0 (chr-ID 30170; pos 4 264340 to 4264720)
aaggagcgaatttaccaaaacaagtccttgctcaggtcgatctcttcattttcatcttttttaaataaaaaaaatgtattcgagttttgattccaagtatttctaaatgcctaactgaactattcaattcaagtgattagtgggtgtacttcttttaatgctaagctcattgaacgatacgataatcttgtggtggcttttgatgcttattgccattttagagaattaattaggtctttggatgcttagtgagattgcaatcgtaaccttgatgttcttgatgaaggaggatactgtgaatgtaattcctcatggattacggatattatgctaatcagtgtgtttctttctcatttttctatttgctaaatgattacagat

SEQ ID NO: 52138 - DNA, 974 bp, Ricinus communis
  Intron number 4 from transcript 30174.m009146 (locus 30174 .t000543) derived from phytozome v7.0 (chr-ID 30174; pos 3 281478 to 3282451)
actgctgttatttgtgataacaaagaggtgattttggttggagttacttgcggattagatacttgttttctagttgagtctttatttggcaattccccatgtgactttgagtctctgtctgaacttctcttatgatatctttttggcttctcaatttagaataggccttgctgggaatatttttaccactactgttgttcatgtctttattttatgactgattgatttcttattaggttttaggagatctctagatttgggaatgagaaactatagcaaaggattaatctatgtagaagaaatttcaactgttcatattagttgcagcctttctgagcttcaacttaaaatttccttcctagagatccaaagggttcagcatcctagttcaattattttttatttaggaattctgggataggctcagtggtagacctagataatttgaagtcttatccattggtttgattcctgccctttgcccaagagaaagatcgggaaaaaaaaaaaaaggaaaagaaaaggaaagagagaaagatttcacaaaaatggctgggagaagccttcgggtctctcctaatggtgcaattttagcagggttgagcttgacctggcaattgatttgtagagtttattctgttaattcaatgctatcgcgatcatttgcttatatacaatgatgtcaatcaactgcatttaccacttggaatgtggcccagtggtcgtggtgctttgatccgaatctagggtggcatattcaagctctctctgtagcactgttgattagaagtccctctctctactaatctgatctgacatactaactactaatgctcctttgtttaaaaataaaaattaatccaagaaagattatgtgtgcaataacacctgtaatgacttgctagaaaattggttatcccattgaccatattgggttgtgtttcattggtaggttgctctccttcttataagac

SEQ ID NO: 52139 - DNA, 642 bp, Ricinus communis
  Intron number 1 from transcript 30190.m010898 (locus 30190 .t000134) derived from phytozome v7.0 (chr-ID 30190; pos 5 16453 to 517094)
gcaagtctctcgctgcactcactgctcgtcagcttgttagaactcttttgccctaacttttatctcttctcaaataaaattatatatctttttttatttgctatttccaagaaaatgttggaaatggtggaacctctgtagctttgatttcaaagcttgttaccatctgcaactctaagctatttttttcattttttcatgcttagttttaattttcgcatttctatgatgatgtgatttgtgattgtttgttatatttaagtcctttgcgatgtgcaataaattaatctaaatctcaatctctcagcacttctagagataattttaataaattatatattgttatatatagcttttaagttttgaacctttctcatgttctactgtttttattaacctaaaactgttaatttaatctttgtatattgcaattgcggaaagtggtctgattatttattctctgttgtaatttcgttataaaaaatgatgttcaatattgctcatatacgtaatcctctaatatactattaacatgttttcaaattgatttctacatgaaatcttttttacataatgtaatgttgtttcccttgcttgatgtgtttaggctgtgtctggacaactgttgcagggttccaacca

SEQ ID NO: 52140 - DNA, 470 bp, Ricinus communis
  Intron number 2 from transcript 30190.m010898 (locus 30190 .t000134) derived from phytozome v7.0 (chr-ID 30190; pos 5 17104 to 517573)
acgttctagtgcacatttgtattccaccagaaaaggtatgctttgctctatttagtttgtacattttcagctgcgaatctcttttgcttgggggggtgtgacttgggatggccgcatgggcattccatagaacttataagaaaagtaaatgagaggaagtgatgctcagaataaataatgtctaatggttgggcatataatttatctctgacaaaccacctaagatgaaattgataacagaaccctgtttttatatcctctgcgtataaagctctatctcatgatatgcccacattatcaaagatgagagttttttgggtttaggagttcagaaaaaaataataggtaaacaccattgaaactgttaccttgtatgaaataaatttgcttgttcctggactttaatattattctttatttcagttatttatggctcatgtatttttcttatcatttgccaactgtagagg

SEQ ID NO: 52141 - DNA, 384 bp, Ricinus communis
  Intron number 2 from transcript 30154.m001152 (locus 30154 .t000036) derived from phytozome v7.0 (chr-ID 30154; pos 8 82300 to 882683 reverse strand)
aatctcagaaagagcttgtaaacatcctaaggaatgtaagctcattcttcttcttcattcattcattgtgattctctatctaaatttgtttctttttctttgtctttgtgaatttagtgaaatatatcaaaattaagagtttgggtcccaattttttttccctttgacatttatctcaatttagtgaagctttagttatagtggactttatcttactatgtgtttgtgtttgtgtgtgtgtgtgttttttttttcaattatttatttattttttaagaagtaaattaatgctgatgaataataaagttgtttgatgttcagttaactttaatttgattggaatgaatagattcgaggaaataagtgcttggtgattgatccgaa

SEQ ID NO: 52142 - DNA, 609 bp, Ricinus communis
  Intron number 3 from transcript 36771.m000012 (locus 36771 .t000001) derived from phytozome v7.0 (chr-ID 36771; pos 2 214 to 2822 reverse strand)
atatactatccattctgggtcctttggagtacaaggtctgtaaatgttgatgcatatgctacatcaattattgatattcctaattgcatgttccatctgttttctatggaatataactagttatcagcatatcttagacaatttttaaataaatatttaagtgtttaaataaaaaagcaactgtaataatcaatattctgactagggaaattggtggatgttagttggtgaagcctgatgtcctataaattgcttttaatatacgcataggagtggccgccctttttgatccatactataaggatctcatctcccaaaccacctctgctcccctctggaacagccaatgcatgtgcaaatttgcttatgattaaaggtttgcaattttgcttctctgattccacatttgatctggaggatgaagattgaatttagactttatactaagatttgtcagtttagagtaaggatctctatggaaatctgtttctcctttcagtataagatttatttgtctgttttgtttgctggtttgttaatttttttcttttatcaggtattttggaacttatcaaattgtttattgattcatttctctcggttgcagtt

SEQ ID NO: 52143 - DNA, 706 bp, Ricinus communis
  Intron number 3 from transcript 30204.m001784 (locus 30204 .t000053) derived from phytozome v7.0 (chr-ID 30204; pos 3 51432 to 352137 reverse strand)
aacctgagaagagaggcaagttcttgggaagaaaggtaaaatttttaaatttacaatttcattgaagaaagaaaataatgttattaatgcatgaggtttctattttgcaagtgtagaagaaaggttgttatcgcaggcagcctttccctatcaaattaaaataataaataagcaatatgtacaggtagagccataaatcttctctcgatgatattttgtttctcaggccatttgagccatttgtttctccaattaaaagtttctatttaatctactagtttgtgatcagtcaagtgtctatatcatatattaaattatgctttctccgttccaaaaagaaaatagttcatttttattttacataccaataaaacaatgtagggatttttctaattattaatttttatcactatttttaaaaatactcttgttaatttttttgataaaattataattttaaaatattaaaaggaattaaatgtgataatatctatgttaattaataaaaaatatatttgacattttatttactaaactaattattgaaaaagaaaaatagactataatttgaagaaaaaaaaaacgatctttctggaattaaaaattatcatcttttttttagagagttctcatctccttttttaagacaatgtttgtggtgagttactcaggttctgcactttcgaaataaagcaacctttaaagc

SEQ ID NO: 52144 - DNA, 897 bp, Ricinus communis
  Intron number 2 from transcript 30174.m008725 (locus 30174 .t000122) derived from phytozome v7.0 (chr-ID 30174; pos 2 536382 to 2537278 reverse strand)
agcaggtttgttttcagggtttttgttactttttctgtaaattagttataaaagtgaaactcgtctttttcacttaatttcatataatttgttattacatttgtttttaaatgtcacggaatgggttcttacactgccattgtttaaattttataaattgtgctttattataaagtatttcttcaatgacctaattctcaaaaaatgcagtctttttatgttggtgatgatggaaatacttatcatagtttttggaaaatgggaagtgtaaaaatgcaagagtcaattgaattctatttaagtctattctcatgttctgcaaagcacattgtcgatataatgcaattcttcagctaaaagaaaacaaggcattttgaaagaaagagagtcatgccataagtgacataattttgcacgaattcaagtgaatttaaatcttgcacgtgatatattccaaaataaggccaataatagctttttctatgtcttgaatttgagttcttgcatgacttctgatatgactgttctgtgttgtttactcagaagagggaaatgggaaaataagcttttgctaattcatgacttttgttgcacctctatgttctccatcggcattatctaactttatttgagcccttttatgttagctggaatttcttctttttcttctgcactaggctctaggcacaaagtttcccttgtgttttagaccttttacaatgagatgcatgttatagtctaggtcatggttgatttaaaagcctcaacgaatgtaggtgtgacaaggttacatgttatatattgtatccattttggcaactttaaagcactcttcttctcttgcgcttctttcaagtacaatataagtttccttgaaatttgcagattgtgctagaa

SEQ ID NO: 52145 - DNA, 822 bp, Ricinus communis
  Intron number 2 from transcript 30190.m010832 (locus 30190 .t000068) derived from phytozome v7.0 (chr-ID 30190; pos 3 636559 to 3637380 reverse strand)
tgataaatcaactcaaagctacttcaaaactcactgtatgtgctttacttgttgctgcttttttcctcagttcactcatcttgtgtttttacatgtttgaatatttttttagctataattaatacctttatacctgtatattgcccatggggaaggaagcttgctacttctagcttactaatctgactgcctaggccgcattctgttgttttttttttttctttttattttttaccaatatgattctggaaacatgtcggatatttcacatttttcaactttcaagcggtctaactgacaacaaagatgttgcagaatattttttgttaagttacgatgcttccttgatcacctatttgataagtttataggtgtttttacctgacacccttttcacaatttctgattcgttttagaacttattgatagattttatgccactttgattattattccactattgctcaacacattggaatttggaattctagcttgatgtatgggctcgccacctttttgttctttcttttaaatttatacgtcatgatctaaagtgtctcaatgtcgatgggtagcatgtgatttattatgtttttctagtttttgtcttcatttgctgattgtgttgctttcggtggaaggggtgatgtgcaattgactgtgcttggattttttttataagcacaatatgtgctacactcgcagattgtgtactcatattagcatctttacaccatacaaccttcattggttgatgaaatttattttatacctccatataatcatatttcttctttttgacttgtgggtgctctgcagctt

SEQ ID NO: 52146 - DNA, 727 bp, Ricinus communis
  Intron number 4 from transcript 30170.m013956 (locus 30170 .t000368) derived from phytozome v7.0 (chr-ID 30170; pos 1 966965 to 1967691 reverse strand)
aggtataacttatttctttttccgtgtggaaattcctgtattaggtatgtacaaatgttacatgatggtatcggtctgtatgtttacgtgagatttgacttctcaacaggcaactaattagaagttcaagacttacaatattctccacaagagattgttgtgaaaggggaagacagtccccttgttatatgtcttaacttttgcactgacatgaattcttaattgaagaatttctaagaatttgaactcctgatctcatcattcttctcaacttttgattctcttctatcaaacatctcaatcacttcattctcttttggactgctggtgtttcttttcgtagtctgctatagtaattggaaggatctcagttttggttttgtattgacaatagtgattcagttttggactgctggtgtttcttaggcttcttttatgtgtgtattgggtgagcctttcggcttgggtagcatgtgtatcaatttcatgttttcccccatttagttaaataaaaagtagcactgatttcatttaatatttaatattattatatatgccattgactctgaagcaaaattaacagaggccaagatgtatttgcctatttcatctatgctttcaatagttaatagttatctgtcaaaaagttcatttttcttcttgttgcagtaacattattattttctgtgcagtggaagaattgatcgccgctttattccaattggca

SEQ ID NO: 52147 - DNA, 459 bp, Ricinus communis
  Intron number 1 from transcript 30147.m014473 (locus 30147 .t000744) derived from phytozome v7.0 (chr-ID 30147; pos 2 193142 to 2193600)
attgctttgtaagcgattctcttcttctttctcggtttcaatgattcttatttttatttcttttacgtctccaaatcaaaggtcaaacactttcgtattactactacttttactagtttgggcaagaataatagaatattctgttagaataaatctccgatgatggacatttttcttaatcggtctgtttgatgcgggacccacatgtctgacttggacaaactctatgttttgatttttgattggtttaaatgtcaattagccccctgcatttttggctgatagacaattaggtgtctgattagctccggatttctgacgctagataaaggcagtgtgttttacgctgaaattactcctaattagccaacattgtaaaagttgggggatgattttccattgctaactttctagaaaatttattataggtggcgaaggatccaagtgggaaggagataa

SEQ ID NO: 52148 - DNA, 709 bp, Ricinus communis
  Intron number 1 from transcript 30190.m011228 (locus 30190 .t000464) derived from phytozome v7.0 (chr-ID 30190; pos 2 665993 to 2666701)
attttgtattggtagagctctaatgcttcttttaaacttctacccttctcttgtttttctgttttcttaactgggtcttgcatattttctctgttaggtgattgaatttcttttcttttctttttggtatttggtattggtattgtctagtttctatgcgttagtagtaagtgcaaatagttcgttttttttaacttaatgatgtgatttattcttcttcttttaataatattttctttttgctggtgtattgggaactagcaatgtgatctctcaaaattggagctttccgagtgtctcttaattaactaggtctcttaattttatgaaaatttgtatcagcatgtcaagtgattagcttctttggtttattcatctttgggttgctcaaaagataaaatttcaagaatctatgataaatttctttcccaattattctgtgtgtcaatgtaaatttctatcatcttggttctcttttgtgcttttaattctcactagccgtgctctgtgagctatattagaaaagttatttgatgatgctacttcattcctttattatgatcatgttcaagccaatgcttcgtacttgtgattaagcttcttctgcatgatagtttaactttacttatctctagcttcacttagtcagtataattatccatcaatcttgcgtcttcctttcacaaggttaaagttcaaacttgggtcg

SEQ ID NO: 52149 - DNA, 718 bp, Ricinus communis
  Intron number 1 from transcript 30174.m008883 (locus 30174 .t000280) derived from phytozome v7.0 (chr-ID 30174; pos 7 84400 to 785117)
ttactctgtaagagccactgttagatccgaccaaggtaatttcttttccctttgttatgtcgcagagaatttgattcagtttatatggttgttagatagactattattcttattattatttaaacttttggataagataatgcctctcccttggtatgaaagaagattgatatgggtaattacaataaatattttgatgttgaactctttctttttttagtttgtatttaagcagaacaaagtctttgcttggcatttggatttgagatgtgttattttgcggtagattttgtgtgtttcttgctaagaatttgatacgtgtttcgatgacttaaacaagttgagtttcaaatatttctttgaatcattatatgcacaaaaacaaaggaaaaagatgcataattcgcatattattaccccatatgcattaaggaatttttagtataaataaagatgcacttatataatgacattagtttatacattaaatttatgagccaagtcttaaatgattatgtattattctgatgtgcataaatttcatggacagttgactcttaacaaatttatgcttaatgaattttctcatgttgctgttaaaagaaaacaaaagaatgcgagtctcatccaagaaaaactgtcttctcaatcctaacttattcggcactgagctgccattgcagaaaagaagagagacctcagttatataacaaacctg

SEQ ID NO: 52150 - DNA, 418 bp, Ricinus communis
  Intron number 1 from transcript 58361.m000013 (locus 58361 .t000001) derived from phytozome v7.0 (chr-ID 58361; pos 1 928 to 2345 reverse strand)
aaatattcattttcacaccgggtaatttatatcttatgacctttccttgttttctcctactgctgattacagtgaaaagaacttccataataatttagcactgctaccattgtctccctttccctcttactgtcctttgaagaaagccaggtgtttattgccgcatatcgaaaaagaagcaatgaaatgaaccctattgagcacaggtctcactctacaagttcagttcaatgagctcctattggacctgtgaaagttttgtttttgactaaattaagaaagacggactttgctttgactaactccttctagggtgtaattcaaagctctcgtatggctactactatatatataactttctttctcatgttcaaatgctgtaatattttatttatttcaggagaggagaagcactcaa

SEQ ID NO: 52151 - DNA, 816 bp, Ricinus communis
  Intron number 1 from transcript 30204.m001777 (locus 30204 .t000046) derived from phytozome v7.0 (chr-ID 30204; pos 3 08265 to 309080 reverse strand)
taatagcaccactggacctggtggccctggttccggtactattctttcttttcttttcttctgttttgagagaatctgtaattttgtttagtttgatgctgtttacctcatatagcagtatgagtaatcaaggtagctcaaatgattcatgatgcacatatattattgcagtttggataatttagtacctttttctttaatgagtataggactggttttgttttgtttgatggagatgcttggagtcattttttatgttcctttttttctattgacaattttgtgtttagagtggcttttcaaggtctggacattttgagatcttttacctaattgataacgatggagaaagctcagggtaaaatatttatttctgagaaattaatgagaaagagtattagaaatgttcttatgagttagtgaatgcaagggcttatgaaatgtaacccatggaatgcacttggtccattacaaatttatgcaacaataggaacctatgttcaggatttgagtttatgggagctaactgcagggttattgtttttaccctaatttcctttcaaattaatatgttattgttaatatggtaggtcacaattatataatcttcatcgtcaaattcacaatcaatggttgtgatctgttatccaaaaaataactatccattttttgagatttaaatttaattttctaaaaagatctcaactattcaatttaaaataaaatgtggagataggtcattttctagttgaccatgagaggatctcaatactttccatttatcaaggactgacatatgcaattatgcaggtgata

SEQ ID NO: 52152 - DNA, 971 bp, Ricinus communis
  Intron number 2 from transcript 30170.m014254 (locus 30170 .t000666) derived from phytozome v7.0 (chr-ID 30170; pos 4 659001 to 4659971)
tcctcagcctctacaggttacttttgaactatagcaccacattgtgattgccaagttttttccttttttttttctttcaatcattttttgagatttaatacctgatccgcagaataagctatttaaattcacattaagaatgttctttcttctgtatgctgcactttgatataggtgttagctgtatgtataacttatcagtcagttagaggtaaaagtttggatatatttctttctcttcctctctagatagtgacgtgatttgaatggttgaaaatgataaataaaaatttggtttaaacattagagatgtgttaagggcattgacaacttatgaataagtctttgcatgatgaagaacccattgatgttttgaaaagtataaattaaaaatactaggaatattggtatttgctagtaaacttttgtaatttgcattttgttatcaaaagtcttcagggattgtcttcttctccttttcatttcgttctttgacatggtatttgtattctggttctcattttaggtgaaattttgctaaaactttttatggagcagaaaaaattttctacgtgctgcagctttatggccctttagttctttttgcttgtagttgttgttcttggtgattatcgatattctcgagtagaaagaggtttctgatctctatgactcctgcaatttgaatgctgggctattggcaaatctaactatttcgaacttatcaacttagttaatcttgcaattagaaaagggttacttctaaactcaacagatactgtcttatgatttaagttggagacagttttttgattggataggagatctctaaaatgagtgcccacctagtttgtatgattagctaacgtattagcgtgtttaaacttaatctcattactgttaacacagaacaattcacaatcagttctttcacaggaaattctcactctttgcaagaaccggctcgtgct

SEQ ID NO: 52153 - DNA, 747 bp, Ricinus communis
  Intron number 1 from transcript 30174.m009038 (locus 30174 .t000435) derived from phytozome v7.0 (chr-ID 30174; pos 2 691055 to 2691801)
ctggggtctgccagactcttagccagaatgctacccagaaggaatctgatttttacatcatgaaattgactccacttcaggcatgtacgcaataaacattctactcattttctttaataatcagtcctctgttcctttaattttgccattcattgattttatattctgccttcacatccgcatataaaattaaagaaaaacaattcatttatacatttgtccattgtgtgcttgctttgaattcaatgttttttaactaaatttgacatgtgtgaatctttgcctcttgatgggtaaaaataaaaaaggaaagaagatgaagttgagatcataataagaacattagttctctaaaattttccattttattgtgtagattatatacttcaataattgacatgtttttatctagattggtagagatgaaactagttttgtgcatatagattacctaaataaaagaagttcatttagagatttcattttattttttaattttgtgaatgagatttctaattttttttcttttcagaaccctaattttgatttgaatactccacctctaattagataagaaaaatgtagatttgctagggttaatggtctaattagttcaataactgtctcttaatataacatcactaaaatagaagcacaaaatcaaatagctggtatggattcttttcagtttcttatactgttggtatgtacgtttcttcagtcgggttgctgcaagccaccaacatc

SEQ ID NO: 52154 - DNA, 473 bp, Ricinus communis
  Intron number 4 from transcript 30169.m006516 (locus 30169 .t000293) derived from phytozome v7.0 (chr-ID 30169; pos 1 638010 to 1638482)
tggcctggtaagcattcttctcatatatttacatattttaggatttccatttgctgtgattgaggattcatttatctcgccctttcccttttgaaatatattttatgaaatagtaatttctaatcccaagtgctaattctctttcattttgtaactatacttcctgttgaaattaagtaaaaagtactgcatataagaagaaaactgcaggtaaatgtgtaacctaattaagtgttgactaaggaactttggaggtcacgtgttctgcttccttcttgttgttcactttgtagtgtccccgctttcttctgtttcttaaaaataaaacacatactactgactagtactttatttggggatttgtttttttccattctttcttataaaatgaaacagcattataattatgattgttgttgtttgagtgtttgtttgcaggagaagcacattcattggaggtgaagaacattttg

SEQ ID NO: 52155 - DNA, 838 bp, Ricinus communis
  Intron number 2 from transcript 30170.m014378 (locus 30170 .t000790) derived from phytozome v7.0 (chr-ID 30170; pos 3 540026 to 3540863 reverse strand)
tgaaggtcagttgtctcttttcatttctccttttgttctctttaacattaagtcttctgattaagtcttgccttttagatttccatgttgggactataatgagcgtttctaagtctgttatgtactggatgagaataaagatagtttttgggcaagacaagaatctggatgtagaaacactaacaaaaaaaaagttggaaaaattttagtctatttcaagctcttgtggttttctatagcttcagaacacttcatattcttgactgtactatgttttggtcaattatacttcacttctatggggccaatttgagttttacctgttctatacgagcttgtctgtgcgttcctggttcatttttctcattctcctagctaaagatagctaatcttataattttccatgctttaactcgaaagatgataagtcgtagtgtgcttcttttgcaattgccatatgaactggttttggcattttctggattttttatcaatagggcatgaatatagtgtggagtaggatttgattggcctaggagattacaatacttgagagtctaaacagatatatagcagcaatttccgtagcattcatatggcaagtggacttaatcatgcataagtttgggaagacaggagtaagagtggcttcttgatttcttttaaatgtttagatcagaattatggatttttcaattcgtttacactttattatcgcaagctgaatgctttaatatatgcagtgcaaactgttttatccttaatggtatcttctgattttttctgcttgctgaattcttcaggatcctgtaattcgtcctttggtagaacaagactc

SEQ ID NO: 52156 - DNA, 565 bp, Ricinus communis
  Intron number 2 from transcript 30170.m013712 (locus 30170 .t000124) derived from phytozome v7.0 (chr-ID 30170; pos 4 314319 to 4314883 reverse strand)
acctccagaaggtcgctcactgttagagctgcaaggtattttctactttatgatatcgggttatactatgatgttttttgattggttggtaaggtacttggaaaaaggaaatgggacttagtggaagggcatgaaggtagaaaaacattttaagaacaggaagtggaaaatagtcggttatggttgtcgtgaaccacaaattttagattgttttgttgttctttgtgcaaatctacaaatcaacgtcaaattcttgagtattatctgcttaatccttccaacacccatatgacgtccttatgacttgtacggtaatcagtgtaacatattggtagaattatttacaacattctcactcctgatctaaaagagataattaaaaataagtaagattttagttaaaatagagattatatagattttcctgtaattagctgagatgctattagtcgttaggttcttcaatttattcactttgactgtgtcaatgtgtgcatgctaaagtgctggcgattgttgaggacactctactcatttattaatttgttttaatttcttgacagtg

SEQ ID NO: 52157 - DNA, 421 bp, Ricinus communis
  Intron number 2 from transcript 30178.m000850 (locus 30178 .t000012) derived from phytozome v7.0 (chr-ID 30178; pos 8 6013 to 86433)
aggttgattttgagttctttttgaaggtgaatcagctttcattttctttttcattttgatccattgtccccttttcagaatcttgattttgtgtgggtgagagagagatagatagatcgcagataatttcctgcttgataggtgaatcacaggaatcttgaatttaaaattttgacagaaatgacaggaagaacagaaaaattgaatcttggaatcttttaattaattaatattacacaaacagaaatcaacttagcggttagttattcaatcaaaatacagaataatcttacttttaataattttgtttttggaaagaatctgtgaaaatagtggggtcaattggactaagtgtagcttacttcttttagctggagattaaagtgggagttgtaatgtctgcaggtatatttgaaactac

SEQ ID NO: 52158 - DNA, 866 bp, Ricinus communis
  Intron number 1 from transcript 30174.m008629 (locus 30174 .t000026) derived from phytozome v7.0 (chr-ID 30174; pos 1 828163 to 1829028 reverse strand)
ctcttgctgttctcactggtattcttatttctgattcttttatactattcgcttcactgaagttttcatatctagcttcgtttcgttcttttttttttaaaaaaaaaaaaacaaaaagaaaatgttttagctgttttgtgttcactgtatagctatctggatttatggggtgttttggcagtgagtaataactatcacaatttatttgttaaaatgattattagtgtttgtttgtcttgtacgcgtgattgttatttaagcgcgtcattgcttcttattatttataacttttggtgtgtataaatcatgatgctattgaaaaagaagaaaattgaaattccagccacagtaatttgtcctaacatgagattggctgaatagagttgaattcttgcatttctagactttctaaacactacgatagatgtagttattgcaatcctaaaatagagagggaagtgctttgtattgattaaggcttcttaatttgaattcagttgactacttgttttccttgctcatttgtttgggatgcctgtcattttctttctataactggaactggcagttatgatcattattgataagatttagttcattgattaatcaaacttatggttgttctcaatgttgtttgcatgtttgtgctcgtgttttggctattttacttgcttatttacaccttttagctagtattttgttttttttattttatttttcatataatgtctattaggcatgcttgttatctttgtccattctagattttgactttagcattttgactgtcttttagtaccatgcagcataaagtgatgcacataaagctggtagcattgactgaataacacaaacaattgcagggg

SEQ ID NO: 52159 - DNA, 470 bp, Ricinus communis
  Intron number 1 from transcript 30148.m001421 (locus 30148 .t000020) derived from phytozome v7.0 (chr-ID 30148; pos 1 19844 to 120313)
gtaatcctgtgcttatactacagagaaactgcaaggtccttgggcggtatttctgaatctgaagttcctaaaaactgtcagcctgtgtcttccttaactgtttcttctaactttgaggtaggatctcagttcttttgatgttcttctcttttatcacccagaaacttgtctctggattgatgtgtagagcaatggtgttcatcctttttgactatttgaaaggtgcccatagcgaatgactgaatgattcttttagtattaatatagtcaaatgttggatgagcatttccttctaattgttcgtgttttttcttgatgtgtgttcttgaagtatctttctcattggataaccttgtcttaaattcatctcgtagcctgggttgtagtccttttatttctaaatggtaccgagtgacctcctttttctgtgtgcagccaagaagatcacgaagtacatctccaacttccag

SEQ ID NO: 52160 - DNA, 294 bp, Ricinus communis
  Intron number 4 from transcript 30170.m013678 (locus 30170 .t000090) derived from phytozome v7.0 (chr-ID 30170; pos 5 23332 to 523625 reverse strand)
aaagtttggaggttggattttgatagaaacttttgcactcttccattatttgttttataatgttaataggctatgtttggaatcatgtgttagaattcaattcttcaaatatcgttttcttttttagttggaagtgaattctagtaacttaaatgggatttccaaacatgagagttaaccaaatagaattcaattgatttgaattcttgcatttttttagactttctgaacaaagtgtttaatgtttcttgtattccagcgtggtatatttgttgcaggactcagggaggaaat

SEQ ID NO: 52161 - DNA, 545 bp, Ricinus communis
  Intron number 1 from transcript 30170.m014124 (locus 30170 .t000536) derived from phytozome v7.0 (chr-ID 30170; pos 2 980035 to 2980579 reverse strand)
tcttgcttgcactcgtttagcaactaccacgtcaggtaaagttgtagtttacaatacaaacaaaagtataatacaaagatttttgatgttcttcttttcacgagtgaagaacccaacaaagtaataaataaatactaaaaatgaaatctttgaaaggaattttcaagaaactgtattgccaggttaaaaagtttgtatttttgcatattcaaaatgatgagatcttgaagaatttcaatctttcccagtaccccatctgcgaaggccgtatcatttgcgtgttttagcatcaagtccacctctccctccatagtcagccacccaccacatgctctcttttcttttctctttccctcttttttttgttccattactgtttcttagtaaaaatgacgaaaaaaaaatgtcatcctcatcaagtagtaggaataattcttttcttttctaatttttacatgctataattgattcttcaaaactaactctcgtcaatttttgagacaaacttagggttggaagtgagtcattttccaccagaagtgaat

SEQ ID NO: 52162 - DNA, 807 bp, Ricinus communis
  Intron number 2 from transcript 30225.m001712 (locus 30225 .t000036) derived from phytozome v7.0 (chr-ID 30225; pos 1 350706 to 1351512 reverse strand)
gagcagtaagtgattaagttattgtgataggttataatccaacagtttgagcaatagcaaatgggttgtgcagagattatggctagatgccccgtcactataatagtatctaaccataaacagatcagtgttttttttttttttttttttataatttcaatcaatagactatggtcaacttgcaacaccttcacttgaagcaatgcattagtatgtagagtgagaactcattacagtatgatggaatgttagttgtttaaggggaacataaagaaaaaaataaaagacaacaagaccaaatggagaaatcattcggaatggctgtaaaatcactgacattgattaacatataaatttctgggtttcagtttcttgatgcataaatgatgaagaagcttgagataatgtggcattttgaatctctgatcttttctcctaggaatatatactgagtgaaaaatagcttcagataaacaaaacccttgattggttttgattatgaaataattgaggaaagcacacttgaaaacgttgcacttataattgaaatttgaaagtgatgtaaaacaaacttttctttattatcattagttttcctatttcgttcgataacttcttcacattttacataatattagaattaagttgcaaaatctggcatatttctttagtgctctgaaaaaatttatgtagatggacaatattatcatagcagctttttttttttcttatttagcgaggtagtgtgagacatttatttcattgtattttattatttttgtgttctaaacagactcaaacaagaat

SEQ ID NO: 52163 - DNA, 180 bp, Ricinus communis
  Intron number 1 from transcript 30225.m001712 (locus 30225 .t000036) derived from phytozome v7.0 (chr-ID 30225; pos 1 351557 to 1351736 reverse strand)
ctagctttcgtcaaatcgacgacgttttcttgcaggtacatagattaatttatcaagttatacttcttacttttgttttttatttttcttttctgcagtcttttgaatttaagatagtgttatatgtgtgattttacaaatttagagcgagaatttcacattcaaattcttgagcttgaa

SEQ ID NO: 52164 - DNA, 649 bp, Ricinus communis
  Intron number 3 from transcript 30147.m014483 (locus 30147 .t000754) derived from phytozome v7.0 (chr-ID 30147; pos 2 243675 to 2244323 reverse strand)
taaaggtaggagttgaacgcatccgctctaagaaggtaatcatttttaaccaaccatatgcattgctctattgcaaatgaaattcagttatgctgctacttaaaattctaaaaagataatttatattaaacttaattgtaagatcaccattagattttaataaacaggctcttaacgtactgttagtatcattattgtttatatattatctttattttggtaataaaatacatgttcttctattagtactgttatgttgtgttgacccattaattgtcgttgtgataaacagagacgcatcatttcggagcacattaactcgctgaaaagaaaggtaaatagatgtacaagtgtaaatttatacactcaagattctaaaggcttgcaattattttgctaatgttcttgttattctacccaaaagaaatagggaatatttttcttaaccctagataagattatcaatagaaatttaatgaactcaaagcaattgatttgtatatttaaaaaaaaaaaagaattcacttttcacataaccaaagccattaataatttcacaacgaaaagtagttttgggttattgttattgaatttctctctttgttaaaatgcagcataaagtactccaagaggagaataatcgtctcca

SEQ ID NO: 52165 - DNA, 444 bp, Ricinus communis
  Intron number 3 from transcript 30147.m014336 (locus 30147 .t000607) derived from phytozome v7.0 (chr-ID 30147; pos 1 426994 to 1427437 reverse strand)
ttgaactacaaaatacaggcaaagcacaaaaggaggtaaaattttgtttcgctacaacttttatttatttatatttaggaagttatttaataatgtaaaggagactttatttatttatttatttgtttttggtttgctttgcattagaagtactttgagcttaaaataccaaggaaaattgatttgttaagtttcaatgggacattggtgcttcataacaaggcctactcactgtttctttgttattgaattactatgcttttggtctatttgattatgatcattctattgcctacgaatttgatgatatcagctgattttagttgctttaagtgccttttcagttgaagtttaagcacaattgagattttaagtactaactatattttcttttctttgaatgatatagaatacaagtaacgatttctctctttggggctctga

SEQ ID NO: 52166 - DNA, 633 bp, Ricinus communis
  Intron number 3 from transcript 30170.m014026 (locus 30170 .t000438) derived from phytozome v7.0 (chr-ID 30170; pos 2 392917 to 2393549 reverse strand)
tccggtctataatcatctggggatcaatatcttcggtgagtagtgtcatttatggcttcttatgaatctctaattcttaaatctcgataactatcaacctttgagtctgtcccatatcattccctgagatatattaaggcactgttagacagtcttgatgctgttgattccgctatctctcttcttctttttgcctttctttttggtcctattcttggaacaagtcaagtaaggctcaatcttccactcctttagggaaatgattgatttattttcagcatttagttggactttgtgctctggatggcctcaagatcaatgaagtgaagattgactacttagtattaatcatatagttctttgcacgaaatatggtatttgactaagttttattcaacttgattttcatgcaggcaacttttgatttcccctcaatagaatatcatcattgacgaaccttgaagaaaccaaattattaatcaatttaggctattattaagcatttctcgtctacactgctgttttaagttttcaagcgtttatggatcttaattatcatgttagcttttggtatgagactgatgcagcaatcatgcaggtcttgggtttgccacctctatcacttttatattc

SEQ ID NO: 52167 - DNA, 860 bp, Ricinus communis
  Intron number 1 from transcript 30174.m009097 (locus 30174 .t000494) derived from phytozome v7.0 (chr-ID 30174; pos 3 043061 to 3043920)
attgaattggcgagattttgtttacgcttgcaaaggttagtacttgggtgtatattattttgtttggtttgatgtagatttgttgtttgaatctgtaaggtattggtttgttgtcgtattttcttatttgggttttgcattgattatgtaattgttgttcctgttattatttcttgtttttcttttcctattattttgctatttagatctgtttcccttttctgtattttaagcttttgtcgatgaagtttgaattttttttagtgaagattttgtctgtctgttaacttttgtagacaagtccttttggctttgaataaactgtttattcttttccttggcctttgactttaattttgtgatgaaattagcattagcgttaggttttattttgaaaatactcaatgtatttaaaatcctgcttttttttaagcagtgatcaacaattttctcttactaagctcttgttttaaacagataatagtttgattttttgagctaataatttgactttttttaatgataatacctattgattttgctacaacatatgtttgtttcctttatgttcatcatatggatcatgtttaattaccatcattgtgaagagaaaagccatagggtttaaggctggaataacgtgggaacaatctatggactggggtctcaaattatttattagagatgtactctttatttgcatcgaccttgtgttcttctattggtattactgaattgtatatttatttttatttatgttcagcttgttatactttcattattgctttttgtttgtgttgtttttcagttgaagttctctttagcatctaacaatgtaatataaacgtgttttggcagag

SEQ ID NO: 52168 - DNA, 722 bp, Ricinus communis
  Intron number 1 from transcript 30147.m014089 (locus 30147 .t000360) derived from phytozome v7.0 (chr-ID 30147; pos 4 438732 to 4439453)
tggcagctatactcacgtccatacaggtaactacaaatgctcatttcacaactgaatatcgtacacagatgcacatgcacttgtatagagagagagagagagagagagagagagagtttggtttggtagttccctgtacaattcaaggtgtctttgcttgtttatagtgacatgtagtgccactggattattatgtggtgtattgccttggaattttgaggcatagccagttcctactcatattacatcagaaaatggatctgtaactgtcattctgttcttttagcttcatcatcttcataagatgcttgagccttgacaatagtattactaagaggtgatgaataattctgtttgttcgactgttataacatggcaaacctgattactacattggattccaattgctctgaagtgcatatgcgaggttagatatttgattacatggaagaagctcgaggatcaattagcttcatgactcctatatattattctgccataattaatcacttgtaaccttgactgcaatcgaatttgcacaaatgtaatgggactttatgtacaaaagacatcccaggttataggggaaacattatggtattggccaccaacaatattatagtattctgttatgatttttactgctcatgctttgcatgattgctaatgctgtattgcttattgcagtcgttgctctgtgaccccaaccccaattctcctgc

SEQ ID NO: 52169 - DNA, 592 bp, Ricinus communis
  Intron number 2 from transcript 30170.m013849 (locus 30170 .t000261) derived from phytozome v7.0 (chr-ID 30170; pos 1 315385 to 1315976)
cttttcccgactcaaataagctagtaagttatatcaattctctcttctctcacttggtcttttcactatttttgtgtttcatttatcaaagttatgccattgcattgcttgctactaatccacttttatttgatcattttgttgcatctctcacattcacaattattggcagagggacattaatgaagacctaacgttgtttcattttgcatttaagcatgtctttttgtctgatttgtatactactgttgaaaccatctctgttttgtccgtatttgtttctgttgctcttataatcctaccgctgacccttgtgtgataattctccttacatttctcatatatttttatcttaaatgacctgttctactgcatatcttacattatgaagtggatgaggttcacatataagtgactagcctttgacttctttctaaagtaatgttggcatattttagtggctcaacacatgttagattatctattttccacatccctgcaatatgctcaatttaattgacctttcaaataactcatacttctttttttgggctgcctgttatgaaggttaggacacctgaacttcctggtg

SEQ ID NO: 52170 - DNA, 314 bp, Ricinus communis
  Intron number 1 from transcript 30174.m008656 (locus 30174 .t000053) derived from phytozome v7.0 (chr-ID 30174; pos 1 966834 to 1967147 reverse strand)
gaagaattctcctactcaaacattcaccaggtaaccattgtacttttagtttttttaattaatttactatgtaaaatctttggtttacaatgcctctacgggaactttgaggtttgaattggatgtttaagagattacttgtatcggataagtttgttggcttgtttcaaggagtgagaagagtgtttttctttttagcctgtatgtatataagttgtaagttcaattatcttattatgtttattattgtttgcaattttttaacattgaattggttaggtaccaaaaattgagaaggtcgtggtgaactgtgg

SEQ ID NO: 52171 - DNA, 905 bp, Ricinus communis
  Intron number 1 from transcript 30167.m000879 (locus 30167 .t000028) derived from phytozome v7.0 (chr-ID 30167; pos 5 34393 to 535297 reverse strand)
cgtcttgcttttgcccttctcacatccacctcaaggtatgatccttttgtacttttaatctctgtttactcattcttttctgtttttaatgagttttagtcactattcttcgtaatattataaagattagattgttaatgtttttacttctaatgttccttttgagatttttattcagatttctgaactgggaattcctcttttgacagaagaaattggcttttattgttgttggttttgaatgaatttctttcggatttgaaatggggaacccatatgcttctttgaaacaaaaattcagttgtattttgcaaatccaatatcacgccatttctataattcttagtttgcgattattgttggcttattaatcaactgttattggataccaactttgaaaattccaatcaaggttgaggtcatttctaccaacttaacaaaaattgtacggtgattttagtaatgtagtatgtgcatctcccttatgttgtgctgacttatcttggtattctacaatatttgccaatttttctgtttcctgatttttccctttctaagagcatagttcttatttgtttctttttggtctttctcgcatcctaacgtaaaatttgtgtatgtatcctcttgctctgtcttcttgctgcaaatatgtttccttatggatagtatgcatctcatctagatgctaaatagcaaaaagataagtggaattcgttgtttctttcctctaaaagttgtcctactgtgcttgctggatttactttttgacttagatgccacactggtttggaccataaaagtgaataactcagtttgtatgcatgagcttgagaacattccttaaggtttaaatctcatttcttatagactggctacccaaggcgggttataagacccgggcg

SEQ ID NO: 52172 - DNA, 917 bp, Ricinus communis
  Intron number 1 from transcript 30169.m006241 (locus 30169 .t000018) derived from phytozome v7.0 (chr-ID 30169; pos 2 258988 to 2259904 reverse strand)
gctctggtcttactgccattgttacaggttcgaagtttcaacttttatcttgttttacgtttccttctgcacacaagatctctttcgtttcttgcttattatgtgtttttgcacgttcaaacaagattgtattttgggtgtgttccaattatccctttttgtttttctgggcgttggtttatttttagtcatgtctgttgtggtaagggtagagcttttgtaattttagataagaatgggtattgaaaggagatattagctgctttggtgttttaaaggcagcaatccaattttctgatgttatctttggcatttattcttttagaacgtttttacgttcacaagaatttcacgatagcaactttaggaggcggtctgcttcatttaattgcatttgatacatgaaaatgagagttaaccaactactttctatacgtttggttttctacatgaaatagaaatgtgatttatcttttttctcagaatgttacttctgtcctatgatttctcatgcatgtttttggttctaccaagttcaattttcatttgttgtcgcagttgtctgttaattggtgaaacttttattgcccaattaccaagtggatttacaatccaaggaatttacccactggatttagagacctagtttatctaaaatctattaggagctgcaactttgaactcatttgttaatttgattgaatgtcaataatatttcgatgtgaacgatatccatatacttcatgatttattggtcattagtctccgagttttgcttttgatttgggtacatagaacataaacataaacatatagatatttgtttttacctacaatagtatgttgctgactgtcaattttctctctgtcacccattattaggagcttctagtggtattggaactgaaactacccgc

SEQ ID NO: 52173 - DNA, 492 bp, Ricinus communis
  Intron number 1 from transcript 30190.m011214 (locus 30190 .t000450) derived from phytozome v7.0 (chr-ID 30190; pos 2 545120 to 2545611)
gaggtacatgcatgttctgataaaagtttgtattattatttcattagcgagatcaacatatctctttgtttattagtttctttcttataaaatattgctttcaatatctaattgtcggctgatttcatctgttcccttttatatgtttatggatttattctgtcctctgtgaatatattacaatgttcctaagtagtaaccgcaacgtaagtaaagtcaaactttgatggttgatttgtttgcttacaagtgcctcaagtacaaggaagccaatattgcagcccatgtgttttattgtcagtattgtatcagtaccttctatagaggaagagtttctatctgcactttagtcggactgaagttgaacatgtcgtgcttcaacttatttagactgtatttttaaacattgagaaatgctgtctttgaactgagatttttctcaaaatagttaataacttaagtatgttgttcttcacagaataggtacagaac

SEQ ID NO: 52174 - DNA, 571 bp, Ricinus communis
  Intron number 1 from transcript 30208.m001098 (locus 30208 .t000001) derived from phytozome v7.0 (chr-ID 30208; pos 1 5204 to 15774)
ctgctcctctcctttacagtcgagtccaaacaaaagtaagtagctcatatggtgcattccctatagggggcctggggaagcttcactcatcatcgattaacctgagaggaggcttcaccgaaagaagaagaaagaaaaaaaacttgagtttctagaaatgttttaagggcgagggaagcgctctctcaaacgtgtccactcctgcccctgcaagcaaaaaggtttcaagatatcaggccactaagtgaaagtgaacagccccgagcaaatcttttagagagcgtaccctttgtttctactctttctctcttctaagaaaaagaatataaataaagaaaaataagaagatttctttctatggacctcttggaccttcgacacttcaaacgagggcttcactccgcccgtatttttttcttttttgaattagaaagaacgggggccttacttattctattcaaggggggatgaaaaataaagaaagagatcaggggactttatgatcggagaaaggaaagaagcatggttggtgtatcactaggtcagtgggggaacctgtaggaaggggggg

SEQ ID NO: 52175 - DNA, 697 bp, Ricinus communis
  Intron number 2 from transcript 30208.m001098 (locus 30208 .t000001) derived from phytozome v7.0 (chr-ID 30208; pos 1 5795 to 16491)
gctaaggcttctttggccattagggagtcatcaaagtatgagtccatacatttgctagctaatactgggtcgtcaaagacctgattctatttcttaatattgtatgtctctctcctaagggatctaatccaaactccttccctcacttcgttcatgatagttggtcgagtggccactcttcccctttatagtggagtttcgcctctttccttggccttatcttttgagcttcttgtaatcaagcgcaaatcaaatgaatctccatcctatctgtgggcccgtactaaactctgaaagcaagaacctctattgtcgtcccatattacgaaaagaaagaaagcggtaactctagttcactataacaatttcaaaaataggtatctctttggtaaagagggcctgccttttctattttttatttggataggatatatgttggcttcgttagaaggctcacgtagtttgttacgtcagctttaaaaggataagttgggttggcatcgagaaagttctatggcaataattgcttccaaatggatgagaagaggaattagcggcgattacagtctctttccccaagtaagactactctagaagatcagcagtctaacctagttgcttccctgctagtcactttctctgattatggatccctctcttaggtttatcgatcctgacttgactgcctttaagtatt

SEQ ID NO: 52176 - DNA, 575 bp, Ricinus communis
  Intron number 2 from transcript 30190.m010918 (locus 30190 .t000154) derived from phytozome v7.0 (chr-ID 30190; pos 6 85449 to 686023)
ataggtatgcgttggttttgattaaatttctcattttcaatttttcctgtttagtatgtatgtatattgactattcagctggtatctgatattgttaatatacttgttgaatcatgaagggctagtgtatgtatatgtacttaattccttattatgaatcatttgaagaggaagtgcaattatggctttgcttggaacacatcatgtgcaagagttcaattgcattgagtaatcatgtcattattttggtatgatttaacttctttctgaatgccttgttttttaatagttggaaaaatttgaattctagcaactatggtgtctttaaacatgagaatgctcttatttgtttggccaaaatacatggttttgacaacttggcgacttgattctgcttgagagaaaagatcagcatttcaagttttgtacttctggaaatgagaataagcaatttcagggttttacaattaatggttcatatacctacttgtagatttattcctcattttctactaatcatgcttgacctcaaaaaaccattgtttgagcagggaggtttcctgtcccattgttgg

SEQ ID NO: 52177 - DNA, 711 bp, Ricinus communis
  Intron number 1 from transcript 30174.m009090 (locus 30174 .t000487) derived from phytozome v7.0 (chr-ID 30174; pos 2 988696 to 2989406 reverse strand)
ctctctgccaaactttcttcttcttcttcttctttgtaagtgtattctttctttatctcgttctcttctttgagcttcttgtctgtattcttctatttctcacacacgcacatatatatatttattctttagattgcatgtactctttctttgtatatttcttatttaaagttcctgttcttgtacttttcacaaagtataaatctttataggtgattgtggttctttgatttggtgttccaatgggcatggtttcttcggtagtttatgtgatctggccatgttaccttttttttttggttgaattcatctctttttatttgtttactttaattttggtattcatcgttttaattatgatgatcgccgccagttgcttttttttttttttttggagaagtgagacgatcttcagttactgaatgctattattggactcatgtgcacagtgatttatttgctgcctatcccccaagaagaaatttatatctttaccttttgcttttctatttatcatatctgatagaattgaattattaaaattttgagtcatgaatgttgcaaggggataataatctcagttcttgatgtatctttgcttaaatcaatgcccttaaaatttgatgcttggtggttgtttgatgttctctctcttctgttttttctttcttgtactttactaatggagatgttgaacctttcaatggaagg

SEQ ID NO: 52178 - DNA, 938 bp, Ricinus communis
  Intron number 1 from transcript 30147.m014535 (locus 30147 .t000806) derived from phytozome v7.0 (chr-ID 30147; pos 2 481988 to 2482925)
ctcctctaaaccagacaagcgcctcattctcatcggtatttctctatatactttaattgcaatgtcagttctttcaaataatcctgtctaactattccggcttctcagatccgaaacttcgctgtcgttctcttgtagactcttatttgtttccctgttgtgtttctttgctggtcttaaatagaccaaatgggaaaacaggattgggtttgtttattacaactaatactctactgctattattattaaaattattggtgagtggaattttaaggttttaagtagttggaatttgaataattatgctttttaatccataataatgaaaggaaaaatagagaaaggctttatttgtggcatgttatttggttgcgagaacacaatagctgctctttagaatatttcaatataacagttcaatttccagtggaatgtttatgggcaaaaagtatcaactttatttttttggggttaagtatctctactaaatgccttgtatttagactaacattgtgtttggttgaaatctataaaatttatgataattcatttgtaaatctaaagtttatatggtttgaacgaaatgaaacttaatttagaattttacataattaaatttgtgtggaattagttatagttaaactaaattctaacataataggtataattttcaaatgaattccacattagtaagtcaatatatttcataacatcaaaatatttctttcaactttatcatttttattttactttctttttcatgttttcttctcaaatgaaatgaattccttaatgaatttcaaccaaacatagtgtaagtgtaattttctcatttgcatattattgctgatattgcagcatacaaacatttctataccgtaacttaaattatgtgattggcaggtcctcctggttcaggtaaaggtactcaatcaccc

SEQ ID NO: 52179 - DNA, 914 bp, Ricinus communis
  Intron number 1 from transcript 30147.m013969 (locus 30147 .t000240) derived from phytozome v7.0 (chr-ID 30147; pos 3 726104 to 3727017)
ttgctggtcagtttcccatttctagaattttgtttttattggatttagtttgtaattatagcatattatacgttacaaaattcccctgcttttaactacttgattacgcatctgtctaaatagtattttcatgtttgtgccattggacttgatcattacacagtttgtttcttgaatttgtattctgtgccggtgaagaacatgtgttcctcttgcaattcaagtgctttagttttcttcagtgaaggaaagataggtttttccttttttctttaatggtaatgtttgctttaatttggtcggtctagtattggatcaggtggaccactttgaggttcagttttgttgtttcaagagctgtgataatacttcatttatccaggtgatataatgtcctaattcttttgcctatattaggcatttttagttctgaaatttacaataatgaaagggttttctgggaaagttctgttttctttttttaattttattattgcaattaactatttttgggatgttgcctgttgtgtgtactaaatgtattctgatggaatccgtgactcttacacgggttagggttgaattgctggtttcaccaataacctggatgatgctgttactttcatgtgattccagctgtttattatcttcaagtcaacaaagaagggaaaattatgaaaaaaaatagatcttgtagcaggaagttatgatccccatctataattattttaaaaatttaatcccaatctttttcctgtaatattattcacttttaattgtttcatttcaaagagtgagaagtagattgcttctgatacaactgatgcttatatgacttggttctggttttacttactatattcctacatttatcctcagttaagctgctcgattggggtgaagagggccacagg

SEQ ID NO: 52180 - DNA, 287 bp, Ricinus communis
  Intron number 2 from transcript 30170.m013620 (locus 30170 .t000032) derived from phytozome v7.0 (chr-ID 30170; pos 6 2469 to 62755)
gcattccaggtgtctttttctttctctttggaatcacactaaatgtttgcactgttttggtattagtttctaatttgaattacttttgatttttatgtgggtttgctttgttaaatgttctgtcattatgatctagcttaattttagtcattttgattggttcttatcttcttttcccttacattttgttaatggtaaatgatgcacgttttttctcaattgttttgtatcttattattcctatattctggaaatttgtagttccaacggtgtggtaaggtggaacg

SEQ ID NO: 52181 - DNA, 862 bp, Ricinus communis
  Intron number 1 from transcript 30169.m006525 (locus 30169 .t000302) derived from phytozome v7.0 (chr-ID 30169; pos 1 699089 to 1699950)
ctcttgttaaacacatcaaagctcctgttcatctcgtaattctctctctctctctctctctctctctctctctctagtctctatcgattctttgtctaggttttgatagtgattaacctaaatatattaaaattgatcttgtttacgaatttgttgttttctttaatttcttttgacctaaatctcaaattgagaatgtttgatctcgatctatgattttgactttttctttatcccttgtccagtattaggtgatccttttgttttagattgattactcccttttggtttatttgacaatttggactctttctctggttgcatgcagagtaaaacaaggaaaggaaaatatttcaagtaatattcgcaattacgtaattacaatttggcattagctgatatgtttatgtactcagcaaattccactttgatatgaggaatttacttgcatgcatttcagatttcttgaggttcttgtgaggagcagttatcgttttgatagcattgagttctactattgtagagacttttgaataattatggaactgaagagtcaaatttgttaggtttgagaccagtcataattatgatttagttgatatttgcattcttgttttcctttcatcaatttttttacgccaactggctgattaatattacaaaaccttggttgaaaaggatatgcatgcaaaagaatgtcatccattacatgctgttgtggaaattatttatctctcaagaatcatattcatcttaaattcaagtttcttacgatatggacagttacctaatgattaatttgatgtcttctttgttatcaataataggtttggtctttggtgaggagatttgatcaaccaca

SEQ ID NO: 52182 - DNA, 651 bp, Ricinus communis
  Intron number 1 from transcript 30170.m013993 (locus 30170 .t000405) derived from phytozome v7.0 (chr-ID 30170; pos 2 202808 to 2203458 reverse strand)
ttttggggaatatcgtgtttctccgacccgagcaggtattagagaaaaataattatttctagttttgcttttgttatgtttttttagtgatttgacgtaactaacttgtctttagtgaacagattctggtatgtatgatcccgtaattcagaaaaacaaggagcacgtgttttagccttagggcgtcaataatgaaactgtttgaaacgctctaattcaagaacagtctatgcttgaataacccccaaagataatagggagaaagcattgcctgtgaaaaatggaaatttctttgacggttgatgaacgagagttaagcgaaatgaaacggaatcacgcagggcggttttgaaaccgaagataatacgtttatattttgaaattttgccattgattgatatgttgttatgtggacccttaatagacctttatccccgttaagagaaggctatatttagatggagaaatctgattcttcgtaggaaatgggttgcaagtggcatgcatgcaattgttttaggtccacttgctttccctctggcttcttggctagcaatagattatacttttctggatggataatagtgattttctgatataaaatctattcaaatctgagagttttcttttgattaacaggtggccaaatca

SEQ ID NO: 52183 - DNA, 408 bp, Ricinus communis
  Intron number 1 from transcript 30148.m001441 (locus 30148 .t000040) derived from phytozome v7.0 (chr-ID 30148; pos 2 32978 to 233385)
ggccagctccttggcaaatttcagggtatcttcttcttgaccacttctcaatttctctctgaatttttttattcttttttcttggatttgtttctataattggtataattggttcctgggtgggtttctctatttttgtttgtttaataatatataacccttttcatgtttctttctttccccctttttgaattggtttcctttccaacttttcgttacccttttggattaattcgattactgatgatctttgcatgttcttcatcacccaacccagatagaacctctgactttttctttttgggttaacttggttaggttgtgacttgtgagggataatttgaattccatttgtttgtgtataattcttcagcaacagatttgtttaatgtcttttgcaggaaagca

SEQ ID NO: 52184 - DNA, 268 bp, Ricinus communis
  Intron number 1 from transcript 30174.m008954 (locus 30174 .t000351) derived from phytozome v7.0 (chr-ID 30174; pos 1 201136 to 1201403 reverse strand)
gcatctgtgaggtatatttacttcctctctgttttctctttactctgtttccccttttctcccttcattgattactttctgtttggtttatgggaaagtaaatggaattggcagaaaagaaaagaaaaaattcaaacttgattattttaggattcttctgtttccttttcttgactttgcatgtttgattttcagttgataagcatatctaattttaattatttgaatttcaggaatacgtatataacaggcttcagtttaggtaagt

SEQ ID NO: 52185 - DNA, 651 bp, Ricinus communis
  Intron number 3 from transcript 30170.m014284 (locus 30170 .t000696) derived from phytozome v7.0 (chr-ID 30170; pos 3 729260 to 3729910 reverse strand)
gcgagaaagctgttgtccaggttttgcataaattttttgtcgtattatgtttttctttcagaattcgattgatcaaagcataatcttgcacctaaatcatgggcttctctcaagtttaatttgagtcctgcctgagcaaggtgcgtaaataaaaacattggaaagatgggatccaccaatcaacagcatcagcatagtgatgcttttcttccgctgattccatcttacatttctattcttttaaccggtttcttcttctcttttttttttttttttttttttttttgcattacaatattttgtatgaacttgtattaaaggctgctggcaagtcttcttctgccgctgcagacttgagcgtggatgcatagatcaatagttctttaaatagcagcagtttagcagagtgaatggctgttacatcttacagtttttcttgagagataattatgtcttgcactaaccttgcttataatttgaaaagggaaggcatttctatcttcatcatgtgactgtttttgacaaacttatcatctatagtttctagacaattgaagttaatgcctacctttgatataacattataaacctggtttctatttttctcttattgcaggtgtttgaaggaacatctggaattgacaacaaata

SEQ ID NO: 52186 - DNA, 762 bp, Ricinus communis
  Intron number 1 from transcript 30201.m000401 (locus 30201 .t000005) derived from phytozome v7.0 (chr-ID 30201; pos 3 22432 to 323193 reverse strand)
tcttgaatcacttccgcttctcttggccagtgaatgtgagttctccttagtacctaaggcaactaacttgatgttttattatgtatttttctaattaaagaagcatctaaattttcatagtcaaggaacaatctgaaagtagggtttgctgactgggagatttgagctttcaacttgccatcatatacttgacaaggttgaaggcaaccatgcaaaaaaagtgcttgaaaaatgtggtggcggtggtgatggggaccaataacatattaacatgcatcaaaagtccatccataaccatttcattaattataatttttacatggaataaactgtgtttttgagaattacagttcaaattcatctgcatttggttcagttgcttggaagaagttagtagataagatatattaaacagattttatacatccactagatgtgaaaaagggaaaaatgaaatttaaataatgataacacctctgaagtcgatttatattttaactcataatatgtaatttaataaaaatcgatagaatgagattcaaaaagaaaagttttaattacaaattgggatcataagacacagcaaataaagtgagaatataatttgtagtggaaacttgggataaactaataatgcgtctttataactgtcggtgcatcttttgctgctaagactttggtgcgacttccagcttcatcactaaactattctttttttctgacgcagcatacgtcattgagtcctgaccgtagattaatagg

SEQ ID NO: 52187 - DNA, 584 bp, Ricinus communis
  Intron number 2 from transcript 32640.m000015 (locus 32640 .t000001) derived from phytozome v7.0 (chr-ID 32640; pos 4 67 to 1050 reverse strand)
gttagccatctcgtaagttctcaatcattatattggtgttcgtttgttcccatccttgcagaattattaagtctttaaagcaattgactatttctgaaaactgccttaatcttatataagatccatgattggttaaaagtatcaaaatcaagaatgtaatattaccaattgactgtttttgaggttttgctatgatgaaatattacctaatggaaacattttacaagttaatctgctcaagtttcttgcctttacatcttctgaattggaagaatgtggtcactggaattggctccatacatgctacgacatggttgcttataaatgaatactgtttgttgagcattggattctcatgtgtgaaatcttttttttcttttcctacacttttaagtgaactgactcacttgaaaaaatttgatctgaccacaccaattaattgatgcaatatcaaatgttgttttcttagtcctccctgacttgtggtgctcttgtttgaaactattttacatgtgctgaaagcacaatttgccaaacagatgttattttcatattttaattaattatgtaatgcttataacaga

SEQ ID NO: 52188 - DNA, 992 bp, Ricinus communis
  Intron number 1 from transcript 30221.m002257 (locus 30221 .t000047) derived from phytozome v7.0 (chr-ID 30221; pos 2 063331 to 2064322 reverse strand)
gattgattttgcttacacttctcctaataggtcagttttgaattggggtttatcttggcttctttctattatctttattatatcttttcttattttgtgttgtattttgtgttgtagttatgtcggtttctgtgtttggattttctctgtttttggtgctatgttttcttttcctatgctgaaatcttttggttttgttttgaatatctggcaacctttattctgatgcacagaatgtgaggtacaaaccaaattgagatatgtaagcttgtgtgaatgtttggatgctgaactttccataattgttgctattttcaagcacccacaatattcaattgttttcattttttaggatgttgtcaattcagctgttgattaactgtatacaaaagcattaatgatgcccattttaagctaattcatattaacaaagagcaaagacggcgtgtttcttggttgattatacttggctattaattattgcatataaatgaaaacccatttcatctacaatgatgactaaacaatacaaattccatcttttacacccaaaatgagaatggttaaagttatgaacttataatctgtaatttgataattgagtcgattctatgattaaatcatctctaatttgataatagagtcgattccatgattataagtgttggagttagtcgtggagttattgcctacatgatatttaactaaacgtctaaatcgcataaattcttacagttttcatggttttctgcctgttggtttgtaatttaaattagagacattagttaagcttagaaaatattcaatcttatctgatgcctgaattttctctgatcaactaatagattgctatatttcactatgttaatgagctctgcttccattttttagcttatccattattgcagctgctattgtagttactgattaattatttttgggaaatgtgctttgatgagtctttttttttttcttggattcagatcagaaat

SEQ ID NO: 52189 - DNA, 536 bp, Ricinus communis
  Intron number 1 from transcript 30170.m013928 (locus 30170 .t000340) derived from phytozome v7.0 (chr-ID 30170; pos 1 810151 to 1810686)
gttgcccgaggtattttagttatctctcaattttattcacataaaattattggccagtttgaaattttgtgtcgttgattaagttggactaaaatgaatatgaagagtctgagtgcgtaattttaagttatgtttcatgttattcttttggttcttggtatgtaaaagatagttgcacttaagtaaatattttgatgttatcatgaaataatgtttattcattacaatatggtattgaatgagctttttctttgtaaataatttgtgaagaactgaatatcacatcttactacaattgagttttgcaacatggataaatcaaagtgtatgcttatagaatcattcaagagacttgtaactagggatgcaagggctgcttctgtaagcacactaataattcgtgttgaatcgaccatgccatccatattctgaaaatttcatccctggatggataatctgaagacatgaaatagattagtgttctgtgatggcataattgactattgatattgttgattgtctgcagctcctccatt

SEQ ID NO: 52190 - DNA, 1053 bp, Ricinus communis
  Intron number 1 from transcript 30174.m009024 (locus 30174 .t000421) derived from phytozome v7.0 (chr-ID 30174; pos 1 611268 to 1612320 reverse strand)
tcaccaaaaaggaggacacggaatcaacttggaaggtattttgttttgtagtattttttactaactggttttgttgttttgctactctcttctcgtcttgaaaatttaggagaattatgcttttctcaggaatttttttttcttaaaataatccacatattgataataatcctgcatgcatcgaattctttagactaattcaaatggtgtaacttttcataggttttaagactttgtttctttccaaacactgaaataaaaaggcatttgtattttgactgcatcattgtgtccacacctgcttaacattagtcaagattatggatctattaggcatgtttatatctaatgggtaacgcgtcctgtagaagtgtttttaccatcttggctctttttggggtcttaaaaaattgcttagatagaatctgtttgcttttttgttctttgaagccttggagtctggccatttcgcaaatattttaagtgattgataatgtcagttttccttgctccttttgtctttctttaaaatttggtatggacttgagtcgagcgatctctctgagatatactgtttatgccttgcaatccttcggattgattggcttgattggaatccttataatcataggtggggttgtaattgtgggatatgcgctccattttcataccattttattttactttttttgtctatgttatccatctggtagctcatccatgagtctagtatttttttaatttttgcatgtgaatttgtcttggaatgaaatgcatgccatcgtcatgagggtgataatttatgtgactaaaactgggcttagatgatatttagattatataattctgctttagtcccatttggtctttgagttgttcgcacatttttgttttcacaagaatctccattatgattgttttgcatgattagcttttatcctactggttttttttttttcccctgttcttctagactgtttgttctaagttatgccagttcttgcatttcatattttaggtactcattacggacaacgttacactaaagatcat

SEQ ID NO: 52191 - DNA, 706 bp, Ricinus communis
  Intron number 2 from transcript 30147.m014186 (locus 30147 .t000457) derived from phytozome v7.0 (chr-ID 30147; pos 8 45286 to 845991 reverse strand)
gaaaatttgcaaggtaattaattgcttcttcctctgaaaaacttaagttgagtttattggcatttttgtgatctttgaaaagttatattatatgctactatgcttagatgacattgcttctatgttatgttcacttccctttgttctattttatggcctttcttttcctttcatttgaaatttcacaactatgcatgcagctttcttccaatcaatagaaaataacgtatagttcaaaagaacatttagtttttttattttattttatgaatgtgtgttttttttttttctgtggaaatcagaataaatttgtgaagttaaaagattgaatcttttccctcttcttgctgtgggtttgaatgtagaactgattgaatgagcaaactccatacggctgtatttatccgtgatttgccagcttagtagctatactcgtatgattatctacaaagcgcttgaaacttttgctacatcttttgatgcttctgggactttcctacgggtttctaccaaaacgcttaaaaaacatttttcagttatatcttggcttttgcaactttgttcatttgggttttaccaaaaagctcaaaacttgctgaactttcattcttatcctcgcgatcgtttttggactggtggtatgctaatataggttttctatgtgtttgtagttctgcagctctgctataatcagttcacaggaagc

SEQ ID NO: 52192 - DNA, 825 bp, Ricinus communis
  Intron number 2 from transcript 30174.m008967 (locus 30174 .t000364) derived from phytozome v7.0 (chr-ID 30174; pos 1 269379 to 1270203)
tggaggctagaaagtataagcttgctgctcgcaaggtctgtcagattccgtattttttgattctctaccatgtctgttgctgattttaaaatgttactttgtagccacaacttagccagcctgcattattctttttatcatgaattctaaagcacaaaacagataactagtgtgactgtaataggtattctgtaggctttcgtttatctactctcattttctgtttttgtaacaagcattattatctctcattgacaatagactggtgttttttcttggatgccatccttttctctatttttttttggtaacaacaaattttaaatgggaggggagatgtgagagactgaacctatatcttcttcttacactttaagatgagtatttgaccattaagctgctagcccaatggctgtcaatggtgattcataataagttgtttaaaattttaaacaaatagaaatctgatggtatggcatcagtttgacatattctcttataggatcataaaatatcagaacactactgaaagtttctgtgactataaagaaccatcctcttagagatccctgcatttgattttgtgtctaacattttttggtcttttgtttaacttatgatggttaactttcttaccaatattgaaaggcaactagatctttatatacccaaactcgaggctgtctcatcaccattttgtgattctctatttggaaatctcaaatttatgttcgttgttcgtggcaagtaatcttctttctttacattttttctcgtggtatgtgtacagttccttgaagtagctcctgaactgggaaattctta

SEQ ID NO: 52193 - DNA, 630 bp, Ricinus communis
  Intron number 2 from transcript 30147.m014238 (locus 30147 .t000509) derived from phytozome v7.0 (chr-ID 30147; pos 1 126267 to 1126896)
atcctgtttcagctctcaagcaaactctaaagtaagcatgtgccttgtagtaatatatccatgcttaaattattctatcttgctacctggatgcaagctttagctttagagccttggagtttgggttcttgttgacagatacagtttcgtacgcggaggagaaaaagacaaaacaaaattccctgaattcatattccagtaaaatgaattattgggataaacccaaatctttttcatgaatgaattatcttataagttaatataattttagacacattacggagaaatgatggaaaattgttgacaggccatttattttatttatttttctttaaatttcagttcagagttttttgatggaaaattagatccttacaatttgaattcactttcatcaattcagtccaatgatttaaatttccacaactgaaaactcctaatatattctgtatgtaaaaagtatgcgtgtatatactaaaggatacggtactccccaagactggcctagggaacagaagagtatcttgaaaatattccaacgcaatctctattggttgtagaaacaaacatctatatatatatctgagatcgatgtttctttctttctttctttgtcgtaggaacttgggc

SEQ ID NO: 52194 - DNA, 580 bp, Ricinus communis
  Intron number 1 from transcript 30157.m000809 (locus 30157 .t000018) derived from phytozome v7.0 (chr-ID 30157; pos 3 48676 to 349255 reverse strand)
ctggtaagtgttttgcgttttttttgttctctgaaacatatcctaagcttgttatgcaacagaaatatagagatgtaccattgctgtttgtggcaagatttcagcagttcggaatgcgaggaaagcctggaaattctaggattctatgctggaatacataattaactttgtggtaacaatagtaatgtcatataggcttctagtaacactacaaaatggttataggtttattggtaccattttcatctcatttcctttatttctcccgttttcttattcttcatgggcattatgtctcttgcatgaatcattatactctttgatcgtggtttggggttatgcgtatgcgtaacttcttatgagcagcattacagttgatgcatctccacatgttcttgtggattacagtctctgcaatgtttaattaattctcaatgaatttattttgacatattcgtagtgtttatgataagttggaacatggattttgttaacttcaaattttggatgtgaagctggtttctttattctgatttattttgtttattgccagctactggcagggtgaccaccaaggtag

SEQ ID NO: 52195 - DNA, 573 bp, Ricinus communis
  Intron number 2 from transcript 30174.m008826 (locus 30174 .t000223) derived from phytozome v7.0 (chr-ID 30174; pos 5 31982 to 532554)
cctttacttaccttgtaagtaagatcagcaatgtgccttacttgtttgattatgtcaatatatccatcttaaagtgatgaacttacgtgtattattctgaagacatttccctgtttaccatttctttttttcattaattgtttctctttgtaatggctattgatcattcacgagtgatagtttttaactcataacagccatctcttgtatttttgcaggtctaactgtttggcttttttactcaatatgtgaaaataagttctgatacttgtatatgctcatgaatttcaaaattcttttcttttattatcgtttgtgatgttttatgcaaagttttgggttcaattttagatatgattttgaagaatcttgttgatatgaggcctgctagttcaataaagctgcaaaaggttttttttttttctttctttctatgtttttttttttctcttttagaactagttttctctactttctcacagtacagaaaatttgcaatggcaacaaatgcatgcattggtaggtttcagtgagtgtctgatctagttgctgattgcggtgtggtcaggtata

SEQ ID NO: 52196 - DNA, 640 bp, Ricinus communis
  Intron number 1 from transcript 30190.m011204 (locus 30190 .t000440) derived from phytozome v7.0 (chr-ID 30190; pos 2 501110 to 2501749)
acttcactgttaaggtagttcatttgttcttctgttgttttcttctttttctttctttcttagtttcagttttgttatggaatattcatttttaggaatggaggcttgcccatcatggttttgctttttttctttttttttcccttccctttttgggaaatgggttttgcttgctttagtttttcttgtggattatggcttaattggacaaagaaaagttatttatttttagggttaatgaggtgtcaacaacagtagttcaatctatagttataaaataatggaggattgagttaaaaaaaaagggtgctttaacaaagtaaagtggcacctttctaatgtttaatttgcaggaggaaattcgatgtccgcacctttgattttttgaatttttcgatttgcttccaaagttgaatacatcaagcgtatgttatatttgtagtttcctgttaaccagaggaaacataggtttctatcgagagatcaattttcgctattcttttgtgattactttatatgtagatataccgagttcctattttttcttttctctagtgttctgtgttgagctaatcattctttacttgtatatgctgtttcttcatgcttctttttttccctatgtaggacgctaggggaa

SEQ ID NO: 52197 - DNA, 549 bp, Ricinus communis
  Intron number 4 from transcript 30148.m001451 (locus 30148 .t000050) derived from phytozome v7.0 (chr-ID 30148; pos 3 07047 to 307595 reverse strand)
aagtatgaatttatatgttattcctgctcatctgaaagatgttaccttgcgtagttatgggaaaatgactaacaatctttcccttgttgactcatataacatgagtttcttaattggagcattttcaccattcaacataccataaaatgtagcctcaatccttatgtatgtggtgaatatacgttagctcttcattttgcagcattcagacagcatgaatagggagatggccatattggttccctctatgcatgctatatgaaactaaaagtttatttgattagtgcttacttttaagattttgcataccaactgctatttattaaggcattaatcaatatttattatatcaatctgcccattgaggtctttgatatctaccttgagggtgtttatgctgcatgatggattttttttttttttggacctactctgtgttgttcttaagtcattacttgttactaatacatgtctactaattgcttattgagcctttatcatctgtacaaaggtttgattacttattatgaatttcaaattctcagaagc

SEQ ID NO: 52198 - DNA, 510 bp, Ricinus communis
  Intron number 2 from transcript 30148.m001451 (locus 30148 .t000050) derived from phytozome v7.0 (chr-ID 30148; pos 3 07844 to 308353 reverse strand)
ggtgagcagtatccttctgtgattccttgctttggtcttcatccccggtgagtgtaattactcattcttttttcttgtctttgcagaaattgatctagtgtttgtaaatatgatgtatttcgtcttgaaaattgatgcttttaattattggtgatctgggttctctttgtttgcaggtttattacagaaaggactccgaattggtttaacaagctcaaagaattctttgagtccactccctctgctgctgttggagaggttaacttcccttttttctgctttttttgtagtttcctcaattatgtttatttatatatatagtctttttaatgatgaaaagatgggtgcgcatatgtgtttttgtattttgtatgctattgtatggattttttcaacataatgtaagatgttagatcttgtaaatataatttgtgaaattcttgtatgcctaagggctcatataactaacattccatgacctttttcagattggattggacaaaggttctc

SEQ ID NO: 52199 - DNA, 605 bp, Ricinus communis
  Intron number 2 from transcript 30147.m014019 (locus 30147 .t000290) derived from phytozome v7.0 (chr-ID 30147; pos 4 018676 to 4019280 reverse strand)
cttgtccgcaacatctgcatcaaccctgaagtcaggtcactccctttagatctctcgctatatccttatcttcatgtgctatttgttgatttttcatttattttactatcctgacctactcttctgatgataaaaattacatctttaatttagattttaggtttgactttgattttttattattattcatgtttctttaatatgattgtatgaaaacaaagctctgtagagcgtgttgtatctttaatgcaaggatgtgaaacattgagaccttattctttttaagttttttaatgacttaaaaaaaaaagttttgagtgttgagactagattcttatgtcattcaagctaacataggaaaggaaattatttgaatgagtctggtctcaacatttcttttatttaattctacaaaaaagagcggagtaggatgcaaagaatcaattttcagttcttatgtctgtctgggatttatatttggaagaagtaagtgtttttaatggatttggtggttaaatgcctggttgagtcatcaatttttgtttatggggttctgtggccttggaacagggttaacaagcagaacagggctgccggagttctcg

SEQ ID NO: 52200 - DNA, 530 bp, Ricinus communis
  Intron number 2 from transcript 30147.m014091 (locus 30147 .t000362) derived from phytozome v7.0 (chr-ID 30147; pos 4 460141 to 4460670)
atagatttggagcttttaacagttacattattcaagtaagttacagatctggtctgttttatatttttaatagcttgctcattctatttattctaaaattaattaagcattcttagatctttgtcttatggatcttcaattaattatttttctttttttttgagtttttgttaattgttactcctgtcttacttcgaatgaatttttttttttttttaagtgaaatatttgggtatgaattcagtaactgattaattaaacaatatgtgcaaaatgtatttaagtttgggattcattttctgatcaattggccttacaaatttgaattaacgttgttaattagaattgggtttatgaaaatcatattgtatttgattgagtaccaaaaactttgaattcaagtggagcactttacgtgtttttacattctgaattgtgttattacgttcattttgtttaaaatgtttgagttgttaaaaatgtggaagaatgcaggaatttgggtttggatttgtgtggtgattattgat

SEQ ID NO: 52201 - DNA, 716 bp, Ricinus communis
  Intron number 2 from transcript 30190.m010824 (locus 30190 .t000060) derived from phytozome v7.0 (chr-ID 30190; pos 3 569377 to 3570092 reverse strand)
actattgttggtggtgatcatcgtctcaaggtatattagctctttatagtgttccagttttttgcctgcttatttgctctttatacttaattcgtgtaatgagaaccatttgtaatgtaccattaggtctattggaggatttgtttgctatttaaagatggatggatttttgttgtttggaaatgatattctgatttatatatagctctaaatagtgggaggaagtgttgtttttcttagaaattgaagttatttagtttttatggttttcttgaatgtggattagcatgcttgtcttcataattaattctgactgtctttttcaacataaccgtgtttactggaaacacttaacagttcttgtagtaattagctagagagttctgtggtttgaacatttttcagatgaatgtttactgaatcttcatggcttgagaacttatacatcaggttcattttttgctctgtatttgaaaataatcataagttcatgagtctcttcttttgaattttttttctcttccgctatgaataagttgctccccaatgctgtatttagtagttatgcagggtatggtcaggcggagtttctcttttattattgtcttatcaataagtgctgtataatacatacatcaatgaaggctcttattcttatgctttacttcctcaaatttgcagaactactcatccatcattactgtccatccagaagt

SEQ ID NO: 52202 - DNA, 683 bp, Ricinus communis
  Intron number 2 from transcript 30190.m011351 (locus 30190 .t000587) derived from phytozome v7.0 (chr-ID 30190; pos 3 237566 to 3238248 reverse strand)
tactaaggcagccacgtgttatcgcagagattattgtatgttcctttcttccttttatgattctatggtgattttatatgtcttatgccctagagcatatagtgcttatctagaatgctactttgatgggttgatttcacttctattgcaaattgtggggcgagttactgtaattgtcagttacaatgaaaaagatcagtccttagtggtctgggtggggaagttattggtcatgtctatattcattcaagtaccaagcagctggttcaaattctattctcagtccactagacatctgctagtttaatcttttctttttatttgctattatataatttctcctatgggtttgaaatgtatattataacaataaattgattcttcaagcatggccaaagagttcgtgacttgatggtgcttgttgttcttaattgtacttggttttgatttgaattctgactgttccaacccctattttgtatatttattcacaaatatatccttccgttaaaaaaatttcagcaagttgcttgagagagagagagagagagagagagagagatagagaaagtttatagctatacaaactcaatttattggatatgaagttacgttgagcctaacattgagattttcaccatgttgcagggaggaattttactagggccatctgctctaggtcg

SEQ ID NO: 52203 - DNA, 302 bp, Ricinus communis
  Intron number 4 from transcript 30169.m006524 (locus 30169 .t000301) derived from phytozome v7.0 (chr-ID 30169; pos 1 685352 to 1685653)
ggaagtacaataccatcacccttaataaaaaggtaaacatgatcatttcttttttgcttctttctttttttccttttaatcttttgagttatgccactgccacaagatcatcctggtccatctaatttataaaaaaggcagttacttctgagtgacaattaagagaaactaagcaaactttttaaaggaatttagtttgtaataccaagaaagccaaggagaatttttgtatcgtacattgattttttggaagaaaggacttgtttctaactaataacatgccttgtttggtttgcagggaa

SEQ ID NO: 52204 - DNA, 649 bp, Ricinus communis
  Intron number 4 from transcript 30174.m008732 (locus 30174 .t000129) derived from phytozome v7.0 (chr-ID 30174; pos 2 566691 to 2567339)
ctttgctgctgtggtgagattaagtactcttacttctgtatatgtattaatgtttttggaagatttccctctatgttttgttatatatctcaaatctaggaggttctagttattttccatcaactttgaaataattggactctctcagtttcttttgtatatttcaaatgtaggaggttctaattcttttccatcaactttgaaataattgaactttctgtccaagatgcatgcatttctgaactttcattgctttagtttattaagatgtgtatgtttgaacaaccatgaagtggaagagttggcctagagttcagtttgttgaccgtctattatgtcaagcttagttctcctacgtctggatgcatatactaaaacttcccaagggcagccttaatgccatagttttaaggaaaattatagtaaccaagttggtagtaaacaaataaaagaagaagagaaaaggtaaatgctcatttcagaaaaagccatgggaatacaaggggtatatatgtatgtacacatattgtaaagtcatatacacatgctttacaacatttgcatattctgaaaaagctgtctggatgatatttggatttgatgcttttgagtattatagaattttatggtcttaactctctgctgcaga

SEQ ID NO: 52205 - DNA, 615 bp, Ricinus communis
  Intron number 1 from transcript 30174.m008635 (locus 30174 .t000032) derived from phytozome v7.0 (chr-ID 30174; pos 1 862573 to 1863187)
agcactgtcgttgccgataccccttgtatttctctttttctcattccctctctttctccctttctttctttctaattaatttatttatttatttttatgtatatgtttggttgcttagattatacatctttttctccattcacgatcagcgtttctgaattgattttttttttttttttgtgtttgtagtttcggtcacgtttaattccttttgttttttctttcagattatattcttcttctagttattaaaaaagtattttttttaaaaacatccgtttggcgtcctggaaaatgtacaagaactgataaataaacaccatcaaactcatcataattcaacttgtttgactccgaaactttgcttcgatgtaacgtaactctgattcttatttggtttttatgattttgtttcttttaattggttcttatttgtcattagatgttgaatataattgatattgacttatttgttttctcagtggccaaacagaaagttcagttactagctgctgtcttatatattacctttctgcagtatctctaattgattttctttttcttttgaatttatatgcagtttgctgtttcgcactactgtggtaagttctctca

SEQ ID NO: 52206 - DNA, 948 bp, Ricinus communis
  Intron number 2 from transcript 59505.m000055 (locus 59505 .t000003) derived from phytozome v7.0 (chr-ID 59505; pos 9 156 to 10103 reverse strand)
attcaattgaagaagttgtaggaatctgcactgaggtgcttaatcttcccctttcggtgtccttttcaaagttttgttgtttttttacaaaagaaaagcacaaatgcatatttatagaattcgcttgtcactcatttttgggaatgagttcataatttagcttcagtaaagtggtaaagcctatatcttgttagactgcaggctattcttctagtttgtaaattttgttactccgtttgctggcacaattttttggactttccaaacaaggtggcatatattccacgtaacagccgacatttaggatcaatattgaacaattagatgggtggtgaaataaggaatgttgagagaacaagatcacatggacattattagtctgagacctattaagctaacaagatcacagagacattgctagtcttactgcgatcttgattcagaaacactcggcttatgtattgtgatgctctcaagatttttcccgacacacaggttttgtcttctgtttgcatattttgtaaatggattattcaaaaaaatgagacagcttaacagcaacaagttgcaaacttgttgagatcgggaaactgatctagctatgctatttttaccattcttgatgtttatactaaggggtgctagaagaaaatgtagaaaagtggtaggtgatcccagtatgttatgcatgtctgaaaaccaaaagaaaactgtgtgacttaaaaacaaacctgaaagatatgaggcgggttcttacttgcattcggttgtcgaaatattgttttcttcttttgagcttaaatgctgtttagttgcttacttaactggggttttgaggtgttttatttgctggaaacagttgctcttggaagtatttatgtaaaggcactaaactttttgccacttataatgctttccagatattcagtacattcttgcactcggaat

SEQ ID NO: 52207 - DNA, 1015 bp, Ricinus communis
  Intron number 2 from transcript 30182.m000134 (locus 30182 .t000004) derived from phytozome v7.0 (chr-ID 30182; pos 4 4751 to 45765)
tattaagttgaatcgggcaccaaggaaatttgcaggtaactccaatgttattgcatattctttttttttttttttttctaattattgtttggtctagtttgaattaaccaagatggttccgattgtgcaataatctgcgttgtgctctatttgaaattgtcactgttgtttgtttcatggaaactttgtcagaaattctggtcaagtatgaatgtcaattgatttttgtaatatattagaactgtaatgtggtatccgtccagactgaattccataactgtgttctttgcttttattttgttcatttgtatcatctaaactgaagccagtttgaatgttttattgaatttttatttattttcaagaaggtattgaaatgaaaaccttaaatcaccaagtgaagatgtgcgttttagatgataaaattatcagaaagacagcccattgtctcattatttcctcaactttctcatgcggcaaattacaataaaatggcattccccagggcatgaggctctcttcttttcaagcactggggagcatttttcatcttatgcagacttccagttgctgttctgacatagaggttgtttccataaatcaaccatggccttctagtcacaaaaaaacacctggtcattgtgcctattagggctatcctaaatactaaggtgttgaggttagaggagctaataggttatatgaaggtcccagaagctataagcagcctccacaaaatgcataggattaggctctgattctgcattagaaactcgtgtccaacctcaaattccagatgttaattaataggctgaaggtcccagaagctctaagcagatgatgtgggatctatgattgggctaacagtttgtttaatagtgccattgctctacttcgtgtttaataaaatccagagtttgttgaaatttaatgcaaaagaaaaggattgggattatgatgctatgtggtttgatttgaaggtcttgtggtttcaccaagctgtgtcctaccatta

SEQ ID NO: 52208 - DNA, 942 bp, Ricinus communis
  Intron number 1 from transcript 30190.m011314 (locus 30190 .t000550) derived from phytozome v7.0 (chr-ID 30190; pos 1 39259 to 140200)
gcaacagaggtaacagtcattcttctttctcggcttgtgttcgtttcgtgccaatgcaaattcattaatacgttagtgaaaattttgtttctgggttttgttagttacattcttaagcattgttctgtatgatttttttatttttttttgtaatctttcttttcttgggttggaataggaattgatacctcgtttgagtctgttgttaaattttgttaaaattcgattgttctgtaagataaaaggtgtttcagtctatgggtgaaggagagaaatgttcctgatatggaaactgataattaatttccttcactttggataaggttgttagcaagttagtaactcctgaatttgtggttcagaaaggatttgacagaaacaactatgcgatatgatcaagtgatgatgttttcttttaggaaattgattgtatgatcgagtgtttgataaaaattaaaaaagtaggttgcttcgttttttggtttgctagccttacgtgatctcttttttcttctatgccactacgaattttatgcatagatacttttagttggaaaaaaaattgagagaattatacagcagaaatgaccaattttttaatgaatataacttatttgatatccagatgccaaaagacgcattatgtattaaggatttaggtgagattaatgaaactgagatgcaaagttataggctacataatcagccccttttgcttgcattgctttgtaagttggaacttcttgggagggaagtatttccagaattatgcgcataatatcaaccttcctgttcatcagattaatagcagatagtggcacttagagttgaactcccctgtactggcaacttccaaatgtctaatattggctacatactgaaggctttttgaagttgatataaacgcctatcatgcgtgaattaatgtctattcccaggaaa

SEQ ID NO: 52209 - DNA, 628 bp, Ricinus communis
  Intron number 2 from transcript 30225.m001691 (locus 30225 .t000015) derived from phytozome v7.0 (chr-ID 30225; pos 5 11195 to 511822 reverse strand)
tacataaggtaaaaaccttcttttatttatgtttcttttccaattgcgatgctattaaagttggaatctgaaaaatgagatcttatgaccctagaggctttttgagcatcacacacgtgcatatatattgtttttaattctaatttgtgagatagaagtcgttaaatcttgttttaaaatttttttttatctaagtttactattcgtttccatctatacattaaatatatttttaaattttaaacaaaatatatatatatatatatcaattagttaatactaaaatataaaatacttaaaatatatatccacaaaatttaaataagaatttttttattccttaactataaattctcaccatggatttatactccaactcacaatctctctaatttcttaaaataaatacttctggaggaatattaaatttgtttgctttgatttatgtaaaaatccaaattttcaatgtaatgttctgtctacaagtcattacgtatacataatcttccactgatctgaaaatctatcaattcttgttcatcctggatactacatttttttcttctggtaaaagttgtaatatgtcatatggttatcgtattacatggtaatatcactgcaggaggac

SEQ ID NO: 52210 - DNA, 748 bp, Ricinus communis
  Intron number 1 from transcript 30150.m000474 (locus 30150 .t000007) derived from phytozome v7.0 (chr-ID 30150; pos 1 66635 to 167382)
caaattgccaaggtaaatttttttctttttttatgttttacccttggatttcttttgctcattttgtgttagtagaatgcagaaactccaacacaaaccaggtattaacaggccaatctagtcttagacattaaagtgattgatggaactgtcatcaaacaacctgctaacagactagtagataattttttgattgaaatatgcatcacatcttaagttaactagatggttaaaaaactcagattcaaaattttttagatttttataagtgaaaataccaataatatcactttttgattaatacctaatcttatagtttactatctattgtcttataatgtaataataaatgcatacacttgtaagtaatctctctttgcctaaaaagatagagtagaaattttaacctaaatctgacggatacacaccataacaaatagtaaatgagtatttggtgattcatacatattccattatttaatattaatgaatatatatcaaatctgtctgtttggtatatagacgaggatatacactagaattggataagaatttttttcatttctaaattagacaataaaaccaatgttgcaataaaaaaaaacccatatgatcacgtttaattaaaattgccttcactagtttttttttatttgaataaaaagaacagatattaatttttaaaattacttgaacgtatgatctccttgcagatttgatccactgaagctactagacattttgaggg

SEQ ID NO: 52211 - DNA, 684 bp, Ricinus communis
  Intron number 1 from transcript 30190.m011026 (locus 30190 .t000262) derived from phytozome v7.0 (chr-ID 30190; pos 1 328760 to 1329443 reverse strand)
agctattgcacacttttcaaaggtgggttattggtttctctgaacagtttaaaaagagtgggtaatttatttgttttttttttatcattattattattatttttataattataataataataattagtttttttttttatcaatctttgtgtccgatgggctcttgtgttttttgctcaagttctttgccttttttttttgttttaaatatttgagcgagttaatagtgtatcaatattaaataggaaaatggcttcgatgagttgatatggtattcttggttttggcaggttaacattgagtagattaatttttatgaaaggtgttcaatatgcgtagtcatattgcatttgcagactgcttctatttgtaaatagtaggtcattcaatgttgagtcaaaagtatgtctgtaggacatgttcttatgttaagcgggaaagtatgccaacaaattatgctcccttactcttgtgaaattcaaagttgtcatctaactatatgatatttggagttccataatgttcctatcaagtagaacttgtttctgatagacctgatgctgggcaatgctagaatggtgccaactgccaaagagtatgagctgttctaattaggaatagtattttttaagtggaggtatttctgacgcagatatcgtttaaggtcaaaggttgaaattgaga

SEQ ID NO: 52212 - DNA, 790 bp, Ricinus communis
  Intron number 1 from transcript 30170.m013637 (locus 30170 .t000049) derived from phytozome v7.0 (chr-ID 30170; pos 2 20197 to 220986)
agcttcttgcagcctaaattccagggcttagctaggtaaaacacacacaccactcgcacccagaaataaaaaattatattaatcattaataacctaatctctacaagtttggaccgattaatttgattatatatatatatatatagattctactttctatgaggtatatgtggccatggatttgttttgttttggaggagttttgcacgtttctctgtttgtttgaattttttttctagattcttctttttttttttccttaagaaaaagtttttgggattggaatattctgcttttgcaaattgcatgtctttttcgtttggttgtttagaaaatgatataaatcaaaaattaatgtttagaaagtgaaattaaaatcaaattaaatctttggaaattgactgaatggctgctccaattcctctgaagtcaaaatatctttatttcattttctaactgtatttcgtctgtcattttattttaatttttcactgaccagtttcggattcctatgtgctgctattagataccagtaatttttttatttttacttatcagtaatttttcacacattttgaatcaaatttttctttgcatgtaaagaatatgttcatttgttgcaatgcaagtgaattcttatttatgcatatctggatatccctctgcctaactggaaatagtgattctcattttgcgagttcagttacatagttgcgttctggttactaatacgtacaacgttcgtcttcatacaggaataaagggatcttatttgttgcaattgatccaa

SEQ ID NO: 52213 - DNA, 275 bp, Ricinus communis
  Intron number 1 from transcript 30190.m011051 (locus 30190 .t000287) derived from phytozome v7.0 (chr-ID 30190; pos 1 507356 to 1507630)
ggactccaaagttatcaggtaatttaaagcttttctacctctcttttttttttttttcttttcatctctttgatttaggaacatgttaattgttggaagtggttgtctcatgtgtcctagaactaaggtggattaaatgtcattgagaaatccaagggtatataataaacagaaactgaagattgaaaaccacgattaactattaactcctttgaaaaagtctaaccgatgattctttgtagttcattcttattgatcattcttaatttggcagg

SEQ ID NO: 52214 - DNA, 364 bp, Ricinus communis
  Intron number 1 from transcript 30189.m001676 (locus 30189 .t000044) derived from phytozome v7.0 (chr-ID 30189; pos 1 130962 to 1131325)
gcactacggtatttttcgcttttgtatatatttttgtttcccttgtatttagattctgtttattaaacagttcaaaaaatttattcttgttttgtagatattcaatttatgaaatcatttgaattcacaattttaaaaaagtataaaatgttaggatgtaaagagtagctttttttttttttttctttttgtttttttgagaagaaagaaatgaagataataggcaccaaaatagaggatttttcttttacatgtctgaaaaaaatttcattttaccaaaagtagggcattctataacccttatcaaaatgctgtttttgttgaagtaggtgggcggagtaacaccaaagaagggaggaacaga

SEQ ID NO: 52215 - DNA, 454 bp, Ricinus communis
  Intron number 3 from transcript 30170.m014177 (locus 30170 .t000589) derived from phytozome v7.0 (chr-ID 30170; pos 3 368965 to 3369418)
tcaacagagatcccaagttcactaatttcgttgaggtttgtgattttcgttttccaaccttgttcaatgttgacaaaatgtatggtttttagaggtaaaattgttgatttttttcttacttgattaagtggattttgataaattacttggccatttgtttatgttatttctctagacacttgatgcaatttagtacatatgcttggattttggttttaaattaccgaatttcttgaattttgatcattcgcattctttgccctacctattattgcatctcattcttgaagtttactttagattgcaaataaaggttcaagttttaccccaattgcataattgactagacaatcggtggtatcattgttattttgagttgtttctttggcttgaactatattatgtcattgttttaacatgcagttccgaacacacaaggtcatctacaggcggt

SEQ ID NO: 52216 - DNA, 806 bp, Ricinus communis
  Intron number 2 from transcript 30204.m001734 (locus 30204 .t000003) derived from phytozome v7.0 (chr-ID 30204; pos 1 5413 to 16218)
tgataagtaagttttttaattaacatattgtttctgacggttattttaagttaggtttgaaaggaaacattataagaacagactaatgtgactaaataatcagcaagtaagtaatagacgattattatgagtacaattttgtagtacatgtacttactcatggcaattctatacaagtgatgcggatttgacagttagcagatgatttcaaataattctgaaaagtatttctgtttttcatttgtgatcacttttcttagatgatcaagcaatgggtgaatatatttaattgatcattagtttgttttgtaagtagaaaaggcatattagaatctcagttgggacctttgaaagtgttaagcttcctgaaaattctgtattgcattcgccatcctcaactaaagaagtgatgctttagctgcaatctgaagatatgcataagcagcggacttaggcaaaaccttagactgcagtgagttgaatttggatctgaaaacaacaaatcttaagctaacttaaggaccatatagcatctatgacaggggaaattttgtgttttggctattatttgcactaacctttaccttccaacaaaatggggactagccaaatcctgatatcttactatgtctgttggcaaacttggcttttcatacctgtggacttctttgtattttgaacattaatgcctgtcctgatcttaaaattttcaactttttttttgcgctgtagcataaagatcacatgcaattgcaattggccgcttcacttcctattttacatggatttcttgtttattagatatc

SEQ ID NO: 52217 - DNA, 1005 bp, Ricinus communis
  Intron number 1 from transcript 30174.m008774 (locus 30174 .t000171) derived from phytozome v7.0 (chr-ID 30174; pos 2 13986 to 214990)
aagttagtttcttttcttttttattatataagctcttccggttctgattctggttgttcaaattagggcttacattatgtgataaatcaattgaggacttggtaaatttttaatcttgtacttgattcctctgattttattggccaatatttaatcttgcgtgatctttaaaatgttgccaacaactaattcaaaaccattgctgtcttaggtggatttttgtttcatttagagcaatagtttcatttagaataatacctggagttattaatccctgcaccattatgtcatttgctattgttgtcacttttagctattaagtgaaagggtaaagagaaggggacgaaacagatttgtccctcatttcgcgggatatgatcatttgatcattcttttagaacttgtttatggagcggtcttcactgcacatcagttgatgtattcagttattccccttgtccatgattacttaatagcatcaatggatcaatcacctcgtgtatcccctccttaactactcttgttgcccttgacggctaatctaggaggacacatatatcaaaagagtagatgctattagtaacgagttcaataggaaaatcaaagctgaggcttgtctgcttttgcttgttttgactttggctgaattttcagatttaaatgtatgcataattgtccttgattatcctaacctttctagttctgtcactacgttattctgcactatctttcaaaactttgatcggatattaaggattataacctttcctgcaaaagagaatgacaagggtagatgagcatcaactttaactaatttgtgtgccttctgattgttctcttcttcagtgatttgcaactttaatcagctctttcatgtgtaaaatatcatgctccaaaattgtagttgccccttacttatataacgttttgcaaatttattcagctatttatatgtccccatgatctacaggtacctctacaggggtttgtctactggtgatcggc

SEQ ID NO: 52218 - DNA, 612 bp, Ricinus communis
  Intron number 1 from transcript 30170.m013935 (locus 30170 .t000347) derived from phytozome v7.0 (chr-ID 30170; pos 1 851923 to 1852534 reverse strand)
tggatttccaaactaaggtatttatttatattctgtaactctccatttatagttttagaattaatagattgttcttctaatttggcacttctatctccatttatgactaggtatagggtaaagcatgtgttttattattaattttatttctagtttctttaggcttatgtgagcatcatcaatgccctctgtttctcatagctttagattttgttagaacctcagtagttcactaattttaagtgcttgatatcttttttgatcttccgttcctgttgagacttttaaaattcatacatttcagcatcaaaatcgtatttaattctctttactacttatgttctataggaactgtttcgaacaaatcatgttcatgaatgcattgttgcaaaatcatgtaatctttgtcatgatttcatttattttctaatcgctttcggttttctttttttaagttgaaattctatagattttggacttaccaaacatgagagctgaaaaaatagaattcaattttaattgaattcttgcaattttagactctccagacaaggggatagtgatgctaattgccttaatttcatctatttttgaaggctgttgaagtggcta

SEQ ID NO: 52219 - DNA, 574 bp, Ricinus communis
  Intron number 1 from transcript 30180.m001021 (locus 30180 .t000011) derived from phytozome v7.0 (chr-ID 30180; pos 3 23132 to 323705 reverse strand)
ggcttcaagacccatagttccacaacaacccaggggtatgtattgttttttccctttttccttaagaaaaataatttctgttttgattggttcttttgatgatgtatatatgtccttgattttcttcataatgggttttatttaatgttcttgatattgaggtttttcgtttgacgcccaccaaattttgttgattattgaactatcgcatatgtggtttgctgtttgtttgaataaatatacgttctgatgtgggtttcgagtcctttatttattgattgatgtggtgctttcttgattgttttttgtttggtttgccgataaaataaaataccccttaggggaaacagcaaatgtttgtcatgtttttggtttcaaatcatcagaaactatttagtcgtcaggtccaataaaaagaaaaagatttctctaattaaccttcttgaatttttccttggccttacaaatatatgggttctttgtttcttttattgaagtacaaattgtcttaaaggataatttgtaattgaataattatctgaaaacaggtgaagcagttgcagggggcaataat

SEQ ID NO: 52220 - DNA, 548 bp, Ricinus communis
  Intron number 1 from transcript 30170.m013890 (locus 30170 .t000302) derived from phytozome v7.0 (chr-ID 30170; pos 1 580941 to 1581488 reverse strand)
aatcctgggaaaaatcgccaccaaacgttgaacgggtacatggccttgaaactctttgctctttattattctaattttctttgtttcataatgaaaataattctcatatgtgatcttcaggtaaatgggattgaaactagagactagctaaaatatgtagttttttaaatgattatatccatatttctattttaatgattaaaagaataatcaaaatgactttttgatgtaggtttggttaagaataatttggacaatctactgaaacgggcacttataaacagcgtattgcattttgttttttgtcaagaaattctattaaaaacttcttaaatttttaggaatgaaaaggggtctaaatatatgttctaaatccagcatatcagatcatttaggtgcactaaagcacagaagggttcatttttgacagatattgagttcgaagttgaattctataggagtcattttataccctaatggacaatttgtcttgtgcttgtggaataactgtaggcgagcccggaggacagtagtacaaacgctaaaac

SEQ ID NO: 52221 - DNA, 288 bp, Ricinus communis
  Intron number 1 from transcript 30190.m011160 (locus 30190 .t000396) derived from phytozome v7.0 (chr-ID 30190; pos 2 271947 to 2272234 reverse strand)
cagctttgccacggtcagtttatctttttaagcctgatcttctcacctacagtccttcctaaatataaaattatacagagacgccaaattgatcatttaggaataagaatatggacaagggtccatctttttgttttttaacatctggtttataatgtataggcatttcgtacagttaatgtgagtttttgacttctccttttaaaggtctggataaattgttcaagaactgtttgtttcaatgtttgtatagaagggaagctggaccggctcgacaatcaactaaag

SEQ ID NO: 52222 - DNA, 968 bp, Ricinus communis
  Intron number 3 from transcript 30178.m000842 (locus 30178 .t000004) derived from phytozome v7.0 (chr-ID 30178; pos 2 2493 to 23460)
gtttttggagctgaagaaggtttaaaagaaattcggtaatggtttctctgtgtcccaccttatgtttctcaatctcagttttacccctcgtgtttctcttggaccttaccactacaattgataggcaaagcgttgttaaccaagccagtttggttatttgaagttgttttcatgttggaaatatgttggttatatatatacataaatgtaatcttggtttctggtcttagtataattatcttcctgtaggttgtgtagcaaatgagggatggccaaagatgcagttatagttgctctgtgagattatgggtgccttttgatttaaattccatggcatttctacagcatgttaaatgcatgtttgatgaattttatcacttgaatatggatctcaagggagagaaatacatgataattgctacagaacttgtctttgattggaattcctcagcattcagaagatgctaaggaataagttaagctgaaatgtttaatttatatacttgtatctggaattggtttcattgaattgttattatgtgtcagattctgcttatgggatttacaggagaaaacttgttaatgtaagaggtgatgttactaattttgaaatttgtggaaagagaattgatagcttgcaacatggtccctttgttttgaacatgcattttggatctgtttctaaaattatttgtttgagatgaatatctagttgctagccacatggaataatgttaatgagaagtttattatgccaaatttctcttttagtttctatattcttatggtggatttagaatctcaaaatgggggatttgaagccacttcctggttgttgcttatataatcaatttacatgactaaggatctcaaagtagtctgtcagtaaataacttttcccttcaagcttgatgacttcttgtggaaatttgctttaaatactgatggatttatatccatcttcaggg

SEQ ID NO: 52223 - DNA, 629 bp, Ricinus communis
  Intron number 1 from transcript 30170.m013934 (locus 30170 .t000346) derived from phytozome v7.0 (chr-ID 30170; pos 1 847737 to 1848365 reverse strand)
gcttcagtactgcatccattccaatccttcttggcgttagtctttctctgtcactgtctttttgatttcttgatgatacccttcctgcggtttacttaattaatatataaatataagtttatttatctaactatttaatcctgacataaagaagaaaaaaaagctggtgaaagttgaggctgtaaggaggatattttttaaaatctagtatagcataaaaaagatatctaatttatccaaagttatagtctttttgataggattgagggttggagttgataatatgctctacttatctgttttttctaatgattattatatactggattctgattctattttaaattttgaaactttctcccattggttgaagtagatcctttagctttagctgattcaacactatttgtatactagaccaaatatgttatcttggccgtatagatgaaccatctcaaacgtgcatttactgacatttccaggttgaatcattgcctttcaagtgggttttccaaatctctgaaagagatttttaaagaatttgaacttggttctttgcaatcttttactgattcctgatttaaaaattttcagctgagactactttactagcttttcaacactatatt

SEQ ID NO: 52224 - DNA, 703 bp, Ricinus communis
  Intron number 1 from transcript 30205.m001581 (locus 30205 .t000011) derived from phytozome v7.0 (chr-ID 30205; pos 2 53127 to 253829)
ctaactttgagatcgacgttaaacctgaagacacggtaatgatttcttttagtaattttattatatatttttatattcttggttctttgtcttatgatagttaagtagattatatagagattgaaagtcctttttcttttttgtgtttagggatttataagggttttagtcgtttacatattgaactcaatcaagtttatgtctttctctatctccatttgattgtaattttaaggttgagttgagaaattagcaaaaataggagcttcgaagttggtttatctaagttaatatcttatgattaaaaaggaagagaaatggaaattgttatagggaatatttttgattatttgggaaaacaaaggaagaggtgggaaatgatgatttataggatgagaaagaaggatagagggtgaaaaaaaaattgcctttgagattgatggcatgctggcagcgctgtcactctgtgtactcacttttgggttgtaaacttgtaatttatgtcgttttaatgtttgttatattgttataactttagctttatactttcttttcattgaatttccgatactgctcattctatcaaactattggcacagctgcttgctagtggactgaatgtttgcttttgtggctttccctggcattttgttttgggctcgctgagaataataaagttgattttgataaattcaggtggagg

SEQ ID NO: 52225 - DNA, 816 bp, Ricinus communis
  Intron number 1 from transcript 30152.m002425 (locus 30152 .t000046) derived from phytozome v7.0 (chr-ID 30152; pos 1 525756 to 1526571)
agaagcttcaagaaagacctcacttgcattatcaggtttattaattatttcttttattttcttaaaattcttttataaatgtttattttttagttagttttttttttttttaatgtcttgtttagtgaaagtatgattttgattggattgaactgaatcgaattctgcaagacttcaattgaattgaattcttgcgcgtgatatattccaaacaatgtctttaaagaaatttgaacatgtccatgtatcttaagtgtatcagagtatttctgatgatctgtttattttccaattgttgtaataaatttggatctcagtctatataacgccattgatgatttaaaattattggtagagagagttgattcaatgtctctcttttgtctgtgtgatgatctatgtgtctggataagctcttaggagcactttattctagttagaattgggaacagtgagaccttctggaaacactgcgtcccaaaggggaaaagaggaagcgactggaagcctgtgaatcatagtagttccttagcttttggtttcttcaatttttgcagtgtaatgataacgtcaaccatgctcaagaacctttttccttgctctcattaagttttaaggaaagcgatgtcattgagttgagcaatttaaggaatgcaattttagatgattgcattattgcccaagtttatcaaacatttgttttgtttgttttaaggctggaaaaaaggaacagaaaagagaaataaaagaatttcttttctggtgccaatggagataacaggttggagtgacccctgaaggagtagaagttccaag

SEQ ID NO: 52226 - DNA, 353 bp, Ricinus communis
  Intron number 1 from transcript 30225.m001706 (locus 30225 .t000030) derived from phytozome v7.0 (chr-ID 30225; pos 9 57444 to 957796 reverse strand)
aggagatattccgggattatcagtatccttttgttcttgaaagctataatgtgaattattattatagaattacaacatatattgtttttcattgtaatatcttttctatcaatagtaaaaggagaaaaagaatggaagcatttttatccgatagaagaaaaaatacatgagggtggaggttgttgggttggtgaatatcaaaatctggatactatttcttctcctgttatcttatactttctctatcacccaacatttgtttgttctcctttatttttgtttagggcatatttgaatagattaaatttatatcggcagagaatttggagttgcaaaattagcggaaagcctta

SEQ ID NO: 52227 - DNA, 976 bp, Ricinus communis
  Intron number 2 from transcript 30174.m008839 (locus 30174 .t000236) derived from phytozome v7.0 (chr-ID 30174; pos 6 03563 to 604538 reverse strand)
tgaggatctccctaagccacctgtcgttaacagacgtatgattctttatttttctttttctcatttctggaatattacactggtcttcttttatttttattttttatttggtgattttttctttttacttgtccgagcggacattactctaacgttttttaggtcaatgatcgacttcatatctcttcctttgttttcttggagacgtgaaacttagtcaacagatgcacttgacctatagtccttgcaatacacttagaagtctcttaactaagtgtgaattttttttgtaagaagctggctagtctatgtcaatgtagggcgtctataatcaacagtgcctcagatttcttggtttatgtcaaagagcgagaatcttttggactcttttgtcatggccatagccttctgattcatgtttctccatatttatatacctgctgccagaaagcctatttcagattttgccggtatagcttatcaggttacgatatttttgaaaccccatagctatcctatatgcaccacttaccactactttctttctttctttttctcgtgctcagtaagtcccaaatttacaaagaggaagctcgaaaaggtcgttctaatccttactcaaatgggttcttgaatgcttgtcatgcatgtctcattttaagactaaaatgcgaagtgttgcttgcctttcaatgtttttgtctacttgtatctgaataagagagtacactgtgtatgttattttcttccctccttcggagatgtagataagggatccatgaattgatagatagaaagttaaatcattacagatgatgatgaagtaatgatgaagaaagagaaaatataataaaatcagaaatatttataaagtcagcgaagtgattttaatgtttctgtccgtttgtttgtttttgttatgtctttgtgctccattccagctccggagaagagacagagagtcccatctgcctac

SEQ ID NO: 52228 - DNA, 482 bp, Ricinus communis
  Intron number 2 from transcript 30226.m001991 (locus 30226 .t000015) derived from phytozome v7.0 (chr-ID 30226; pos 5 01396 to 501877 reverse strand)
aagagagagaagaaccaatctcgatacaaccaaaggttatcatcaagtatataactgcataaaccttctaattagttggtagttgatacatactttagaatgtaaaagtctagtcttagatgacttcgtttgataatccttaaatattctttctatcatgctttgtagaaatatttttatattttcttgtttgacatcttatgttaacttgatttaataaagactttctgcatgtatgtttctctctctctcgcgcgcgcgcgcgcgcgctctattatatgtgtatatatatatatatatatatatatagttttattttatagctacactaggatgtgaattggtgacttgcagattctttttttgttactagtaattaattttcgtttcttcatttgggctgttattttgcatcttgatactaacaagagttttgatttgtttcaggaagaaatttatagcttggacagttgagtggcgat

SEQ ID NO: 52229 - DNA, 723 bp, Ricinus communis
  Intron number 2 from transcript 30170.m014367 (locus 30170 .t000779) derived from phytozome v7.0 (chr-ID 30170; pos 4 172646 to 4173368 reverse strand)
cacagttcgccacattgcggtcacaagtgcagcaagtaagaattgttatgagctttgaaagtaatatttagtctcttgaataaaatgattcctgtggagttaataacatttgatgccaccaaattcaattttaagacgttgatcttcttgcttcttttatgaagaatgcttgcggcatttgtcctttgactgtagtttgtaacttagcaatatctgcattgaggattttcaagtttcaattttccatttcagcaactagtcaagatgtttgtgtttattcatctactccaaggatgaggattcattatttggggttgatattgtacagaacgtttaccctgaaactgtgaaactttaggcccaaggctgcagatttaatgttttttaagcattttcatgtcttacattaaagtctcgcttttcttgtgccttttattaactcaagggtcaagacttcctttcatctattattgttctctttttctggttaagttgttattttaatgtgtcaaggaatttaccaattgttttaatctaaatattatagacttggctgagaataagcttatatttcatcctgctaagagtcttgatgttgctatttttctctgctttcttccctctgcagaattacgttgtacatatactcaatcaaataaataagtatttttattaatcaatttttgatttgcaggcaattccttttcttgttggctgtccagc

SEQ ID NO: 52230 - DNA, 641 bp, Ricinus communis
  Intron number 1 from transcript 30174.m009049 (locus 30174 .t000446) derived from phytozome v7.0 (chr-ID 30174; pos 2 749011 to 2749651 reverse strand)
cagttaggctttttcttgacacttacgtttttgaggtatttttcactatatttatttcttcactgcttctaagtttgatacagttattgggtttgctttggtttttcatttaactctacttagaaacaaagatggatatatcatttatttgcatgatacttttgtttttctattgtttttatttgcttacgttattgggttcttgttggtttcttcttcttctttgtggttatgattattctggacttgagtatcgataccttatattgtataagttggctttgttatcattatttaactgttagttggttgctgcttctattgaattgttattatagagtagccaattaataatactacagtttaactacgaccactggacattggatactggatagaactatactagtgcttgagaatttctctagcaattattttgtctagatttttttttttctttatttttttatttgggtcggtcttacttgttttatatgaatttatagatagtttggtaaaagctaaaatcaaatgatggttaattgtcatttgggaatcagtatagctaccggcttgatatgccatagctgtttgtttttgttgcagaaattagcaagaagattgatttttgggaaggcaag

SEQ ID NO: 52231 - DNA, 593 bp, Ricinus communis
  Intron number 1 from transcript 30226.m001984 (locus 30226 .t000008) derived from phytozome v7.0 (chr-ID 30226; pos 2 71941 to 272533 reverse strand)
gtttcatctttggagctggttctgctgcttaccaggtatctacgttcctatgtttattttagcattttgatttcactacaaatcttcagttctttggcaagaacttagaagagatgaagagttgattatattagtttatttaaagtcaaaaagaaaaggctgggcattgttttctaatgtcagtacctctttagttgagtatttattttaacactatatacagtatatatgtgagaattgcctaattttatttcatccaacgctttgtacagctttttgttgcaaaagtgatgatttttgaataacttttataagaaattgaagattctagtaattcccaaaagtttattttcttaaaaaatactctaaaaaatgaagagaataaaaaagaagacctaaaaactagtttgattatgtataagattgtgcattatcatagaatgcggataatattattaggcataatattcaccagcttagtgatttcttgactatatttttatgtttgcctatttaaataactgtgctgactttatttttgtttctcttgtctttttattttttcataaagtctgaaggagctggccacatag

SEQ ID NO: 52232 - DNA, 464 bp, Ricinus communis
  Intron number 2 from transcript 30190.m011097 (locus 30190 .t000333) derived from phytozome v7.0 (chr-ID 30190; pos 1 788777 to 1789240 reverse strand)
ctttagccatctcacaaacaataaataattctcaggtaagatttaatctgatatcactagatgttagatcttgattttgtttataatgtaaaagatcctttgcttgttcagttttgttattgtatttctatttctccttttaaaggtggaatcttgaaatcatggctggagttagaagatagagaaaacagggaaccttgaaagtttttgattttattatgttactaaataaacaaataagaattggttaacttaagaatctttctgagtaatatttaaacttttgagtcaagggacatagaagctgaaatttatgaaacataaaaacaggtgattttgcatagatattgtggaatataattttgttgcttgcttaatgataatttcttaatcaagaactttttgaatcatgaaagaaagaaaagagtgtaacttgaattgtggattgtcctgcagttgcaggg

SEQ ID NO: 52233 - DNA, 683 bp, Ricinus communis
  Intron number 3 from transcript 30170.m013818 (locus 30170 .t000230) derived from phytozome v7.0 (chr-ID 30170; pos 4 665172 to 4665854 reverse strand)
ccctcacttttccaatactccagcactgccttgtccttaatttctttctgttcctctccttaccctcaactgatagtccagtaaagcccaaaagtacaccctgctttctgctagggtttctccattttagtgtcagcaactcatcaccaattggatttcataggagatatgtttcattttcaatgctcttttgagctgcaggatgcatgttttgactttcatcatgtacttgttcttgttgtttttttttttcttcacttcttttttttttttgttgaatagattactatttcatattataatcgtttatctcttcttcttcttcttcttcttctttttaatataaaaagggtatttttggtgttccctttttctttttctttttctaccaaagtcaagaaaaacatgacatagaaaagggtgaactcatcatcatgacaatatgcactgtaatcatttttttaatctacaaattagagagggtaaccactaaccaagtacttagacataagcttttatttagtttattaaacttgcaatttgtatatataaatcatgagtccccaaaagaaagaattttcacaagttatttataaattgtataatttaaaatctaatattgcaatttaattatatttcggattgcagtataaaatcaacaattgagagatacaagaaggcct

SEQ ID NO: 52234 - DNA, 253 bp, Ricinus communis
  Intron number 3 from transcript 30190.m011135 (locus 30190 .t000371) derived from phytozome v7.0 (chr-ID 30190; pos 2 083224 to 2083476)
tttacaggtaaaccatagtaaggtccataattatcgtgtaaaaactatctcttgctctatctcaaatctcgaacattcgggtagtggaatgttaggccaaccagaaactaagttggtcaaaatcactaagtagcacaatttcacggaggcaatgaatcgatagaaagctacattacctcaaaactcagtccaggttttggtcttcattctttgatttttcttttcttttctttctcagggtaggaaaagagca

SEQ ID NO: 52235 - DNA, 338 bp, Ricinus communis
  Intron number 4 from transcript 30170.m014149 (locus 30170 .t000561) derived from phytozome v7.0 (chr-ID 30170; pos 3 145957 to 3146294)
gacagctcggttctggttctgcaaaatctggtaagttcagtttcttatacttcatacggaatgaaactccaataaatctgggttgtattataattgtgaataaaaatcaatctttttcgtttgtgccataaaaggatgccttttgatttttttccccctaaaagggatacgcaatcaagatttctccttgattgttgtactgttgcattcttttctttcattctgtttttagacattaattgatctaggttcttgttgtatttcaccatgaatgtgtttatctctatgtttattcctttatgtcaaaactttacagaagttgaatcatctcctgttcg

SEQ ID NO: 52236 - DNA, 801 bp, Ricinus communis
  Intron number 1 from transcript 30190.m011283 (locus 30190 .t000519) derived from phytozome v7.0 (chr-ID 30190; pos 3 071377 to 3072177)
ggtggagctttgtaattccttgcttagtgagaaaggtgatttctttgtcttaatttctatttttattttaaagcatataagataatttgttctttctgttcatttttttcttaaaaaaataactgttttgttaattaaattataagttatttaggttctctttagataattttctagtaagtagtagtagctctttctgtattaagggtctctttaaagttagggaaaagcttcagaatccagatctatagttatactattgcaagactaatggctcacacatatcaaaagatgacaactgatagagcctgagaagtttctcgattgagtcattgacttgttttcatcattgggtagtttttatccttaaatgttctggatacagctagcgattcttgcttttcttgattctttgatagtttgaattaggtttcaggtaaatctgtagtgtattagggctttgtggaattatgtggtaatgaaataactgcttttacgaatatgaccagaagaaaaattccaccctttgttagttagcaattaatgtatgcttaataatttctcgtgcacaaaaatctgaattggattataacaattcaatgaaattacttgtgggggctacaattggaaggacttttctactttagtaactaagttggaacttattgcttgtgagccattaagttattgttgtaatttatatagctataaaatttatgagttttccttttgtcatttgtgggagtatgctattttacattatatgatttaaactaatgctcttgcgattctgaatatcag

SEQ ID NO: 52237 - DNA, 770 bp, Ricinus communis
  Intron number 2 from transcript 30170.m014063 (locus 30170 .t000475) derived from phytozome v7.0 (chr-ID 30170; pos 2 585754 to 2586523)
ttaaggttgtactctctatctctctcagttccttacattggttctttttttttcttctcttattgggtgtcattctctcgtttccataatgaacaagtcatccatactatctccctgtgttgattaatttaattaattttatttaaaactgcaacaggattgaaggtttactcaacagcccaccaatttggttaattaaaaagagttcttttctccagttggaaatttggattcatttgccaataattaaatgaatgatgtactagttactttagaatattaggttaacataaagtatctgttgctgaagtataaaacattcggggtgagcatctatgtatttaatcctagtgcctgatacatctcagtattgtctaagccaaaacatatagaaggaagaaaaaaaattaaaagaaatatgggtgaaagtaactaagatgtttctgtttctttaattaaaagtaagggttttagactattagctccatcaacctcccggttggtgctatatttgattgcttcccacttgctattgcattcataggcccacttcaattcccactttctttgtacctttgactttgagcttcatgatatcagctggcacatttactgcaatgttttatggatttatctatcaacaaaagaatatagcttaatgtaagatttaaactgctaatacatatctctctctctctttgatgtgatgcttaattctaaataagtcgttggtattgttcagagattctttccttcagagtttgggacag

SEQ ID NO: 52238 - DNA, 399 bp, Ricinus communis
  Intron number 1 from transcript 41127.m000009 (locus 41127 .t000001) derived from phytozome v7.0 (chr-ID 41127; pos 3 84 to 782)
caattttactcaaggtacattaaataactacaatttatatatctctttcttcttttttctaatttaaataaggatgcatgtcattcagtttataataattaaaaaaattatacgaatttcaatttataaaattagacaaatttaatagttttgatatgttaacttttatgaataaagaatttgaaagtgaccttttactttaattactaaattaatatcatctatcttaaataaagaaaaattcataggtcaaatgggctaaacgagaactctactcttaaaattattaatgagctgtgactttatattattgtagtacttcttttcaattagtgggctgtaagtttaaactccaattaacatactttgatttttatcattgatggaaagtagtggatt

SEQ ID NO: 52239 - DNA, 896 bp, Ricinus communis
  Intron number 1 from transcript 55649.m000015 (locus 55649 .t000001) derived from phytozome v7.0 (chr-ID 55649; pos 5 40 to 1435)
ttatagagaatatacctacagcccaaaaaaagcaagtcagaacttttatgcttatatttattagtgtcctaggttctcataccaaagaacttttatgcttatattcttagtctcctaggttctcataccaagaatactacaataatcactaacaattctggcttcatgcaggcaagttggagcctgcaatacaaactgaggacaggatttttgagttacctcagtcgcccaagtcaaccaaaaatccctaatttgcctgtaaagattacatcctcatgtggagaaacaaaatagaaaattgcttaacagtcctacaaaatatgaaattacttttcctttttaagttccctactactagaattgctaatataagaattaaaattgtgaataatcctgctgaagatgggcttgggtcatgatcacgtctggtttacctgtcgaagagaagctttggtcatggttaagatttgatttatgcctatacagagtaactacatactacatcacccttccccattcccattgttggatctttgttgtaaaggagaactttaaaccactttgatttctactgaaatgacctttaagttacacacatggagaaaagagccctgaaaacataaatttgattcatatggtatttgactctagctagtatttcaagtgattacagagttttatggtaaattgtcacacatagtattactgtttactgtatgtgagcctgttacccatattacacatgggaaaaacctccacccaacaagcttcctttgtgcataaaatcctgtcccctcgatagacatgccttgttgcttgttatggtgtaatgatcaagttctatatctctttattgtgtaggatcttgcaaattccattcagaggggaagtttgga

SEQ ID NO: 52240 - DNA, 473 bp, Ricinus communis
  Intron number 1 from transcript 30190.m010821 (locus 30190 .t000057) derived from phytozome v7.0 (chr-ID 30190; pos 3 552540 to 3553012 reverse strand)
ggaagtctggctgacttgctttctggtgagttcaaaccatgactaattattctgttcctcttttctctcaattttatgtatttgtattggattttgactggtcttgaattcctattggtctttttttgttttaattaaatcttgtgtcgattattcatgaatcagtgcatatcgaagtgatagtatggcaaatagaagtactttgtttttgatacttgtacatgagataaagattgaacattcaaactagaacaattatataaatgatttaaaaggaccaaatgttgtaccataaacttaggccgatagtggatgtatgtctcatttcgagtaaatcgtcaaatttaagttttatgccatgccctcatttgtagtaaaggaaaaaagaaaagaaccaacttgcggaactaattgtattccttttttgaacaaatgaagcgggaaggcaatttggtcacactgccttggattgg

SEQ ID NO: 52241 - DNA, 997 bp, Ricinus communis
  Intron number 1 from transcript 30170.m014000 (locus 30170 .t000412) derived from phytozome v7.0 (chr-ID 30170; pos 2 249115 to 2250111 reverse strand)
tgtgaagaggtgcgattggatcacttccaactctggtaagtcattatttgaattcagtttgtcgtttttcttctcttttcttttcttttcttgtttctgttgtcatcttgctttatgtaaagtttaggtctttaaatgcttcagccaagttattattggagtttgtatgtttctttaatgctataacatggttatgagttttacaatgcttgaagttcagcaataacctcaactaggcgaattatatctggtctatgatgcttttctgatatgctcaattagggaactttactttcatcctttaaattgttagatataggaaaaatggaacatcttggctggcttccagaaaaggtgttgcctttattgttaaatgttaatttggtattttcttttatatgctaatctcagtggtttcttggcctacatggtattagaactagctgatggagttggtgagatttgtgtgcttgttaaggaagttatttagccatcatacttgatctgttggattatatttaattgacattgctatatatttcgggatctcggtccgatacttacatagcagtctcccaaccaatatgaattaaatcatttaaattttggtagattatgcatttattttgatgtgaaccttgtttgaacccaataagtgattctatttcaatttctttttagacatattggagcaccattccaaaaccttcctctgatagtatctgatactaatataatctgttattatcttgaaattaagcaagctacctctctaggattttaagtgttcatgtcatctataaaatctctacagatgaacttggtctcctgtgttattttgcagttgtttccttgttttcaccaagttgcccctcattaattttagccaatcttctatggctcgtggtgtttcagtacttatcttaatcagatctacgttatatgttccatctcacttgttgagtctttggtgcttatcattgcagattcactttat

SEQ ID NO: 52242 - DNA, 831 bp, Ricinus communis
  Intron number 1 from transcript 30147.m014289 (locus 30147 .t000560) derived from phytozome v7.0 (chr-ID 30147; pos 2 54661 to 255491)
agggacaatcctctgtttggtccatcttctgctacgtaatttctattgctctttgattcctctgcttttttttttttttttttttctttttttaaatttttttggcgtcgtgttttagttttttctgctatggctttaccaatctctctctctctcaattttttccttttcttgattgctggtaaggactgtggacaattttcttttacttggtgtgcgttggtttgcttggattatgattgatcaattatgcttgggaaggaattttaatcctgccatatggtaattgagaatttgaaactctactattgggttctctccttttgattgattatttgtttgggatgacaatttagcgtcggggaagtatataattaaacaattgtgtacctcagttgtatgttttcctatgtggttttcaatgaactttcatagttttgcagacgcaggtctcttctctattctgattgtaggaactgaattatgactatatattttactggctcttatttaatattccatgaggtgaattttctctggcataaagttgcgattattgtgtatctgatattatatttctaatgaaaattttatggatcagatcagcttttatgacatcttttaaaataaatttctgtttagcttttgtgcaaaattttatttggatccgaaataatcaacttgtcttaagctgtcacggtaccacctgttttttttttttctttcctttttctgcaacgctaaatctaaatacatatagaaaggagcagtctgatggaatttgttttgctttgtttttctttttctttttttaatcaaagattgacgaag

SEQ ID NO: 52243 - DNA, 450 bp, Ricinus communis
  Intron number 2 from transcript 30170.m014144 (locus 30170 .t000556) derived from phytozome v7.0 (chr-ID 30170; pos 3 118908 to 3119357)
ttcaacgaaacattatcagctcaggtaaattagttaataataccagtagaaatatttggaaattttcgtatctgaaagtgctaatattgatttggctttgtctagcatgtcattaagttttcattgaatgacagaaggaaactccttttaatgggtgtgatttttcctctggcattgtttgtttatgagcattaattggacactttagtactggcaagatctctggtttgtgctagtgtttgcttgatattttgccttttcttctgatgattatctaaatttcacgattactttttattaaagatagaagattgtgattttggatgtttcaaaggcaaagaactaatggttttggtttctgaattttaataataacatatgtaacgtacctttgatgattcaacttgtcttgcagtggtttgcaggtgctttgctcattgtagttggtgt

SEQ ID NO: 52244 - DNA, 470 bp, Ricinus communis
  Intron number 1 from transcript 30147.m014382 (locus 30147 .t000653) derived from phytozome v7.0 (chr-ID 30147; pos 1 613502 to 1613971)
tctctctctcttgacaattcaattgagagatccaggtaatcaccattctcgtgcttcatagatctctctctgttttcatgatttttcaaattttacgattttcattgcgattattagttttaaaaatcgttgacctgatcgagcattagatcgagctttttgatttgttttaatatgcattgtgttgtgtttcgatgaattcgatgcttccgatctaaagtttttgtttttgttttttttttgttttgttttgcagttctgaattttcaatgttatgtctgttttcatgcattgctgtgtttgatcattgaatctattgattgttagtgcgtaatgcttttggatcgacaaaaaagatttacactttgtgttcaatttaaggtgttttatgtttgttttcttatttcttaaggacttgaattggtttcttctgttatatctgggtagatcgttaaaggtgttggagaaaa

SEQ ID NO: 52245 - DNA, 500 bp, Ricinus communis
  Intron number 1 from transcript 30174.m009048 (locus 30174 .t000445) derived from phytozome v7.0 (chr-ID 30174; pos 2 738409 to 2738908)
ctgctttcaccaacagtacttcaagcggtcacaaagtaagattctacatcaaattccccctttcatgaatttgcttcagtaggtattttttaaaattggtcatctccacaattatatgataagtactagttcccctagatgcctagatggtagtttctggtttttctgcttgcttttctcaaagtcatgagatcattctttctgttttggaaatctttttaggactaacatgttttgcgtgtaattatcaatggcatgtgactgacacatgtacttttcatcagactatagttaaagggagcaaagctgccagagattacatttgttgtggattctgatattgaatcatttagcttggtctttcagtcatataataagtctatattcttctatatgtgcaagctagctttgaaatatccttttctaattttactgatgcaagactaacattttttcttacgtttctgctatacttttcaagccaggtccctgcgtcttac

SEQ ID NO: 52246 - DNA, 968 bp, Ricinus communis
  Intron number 2 from transcript 30170.m014131 (locus 30170 .t000543) derived from phytozome v7.0 (chr-ID 30170; pos 3 038886 to 3039853 reverse strand)
gctccttataggagagagacacgtcgtggtttcaggttatttggttttattgagctcttattgtcttttggtttgtttttctctgaatgtttgcagcttccatacatcatcagaaattcatctggatgctcaatgagcattttttgagaatttttttattgggaagacttgttggggtttggttgtgcttactgatgcagtctacctgctgatgtctcggttgcctatactatcatttctatgacgtggttgtgaaaacgcccttgtcagttaatctactccattagaatattcacaccctaccataacattgaaggattatatatgatttcttttgttgatatgggcaagtatttagctgaagtgtttggaaattgactctttgtgagagaattcttgtggtaccgtgtaaaattgacccgagactttttcttagttatcacagacacttttcaatccgctgatctccttgatcaatagtagatgacatgaggtgatatctaagatgtcagcttgggagctattatcatcttggagaaaggttctaagctaccacacagcaataatcttgtttatatgaatgccaaagcctagactatgatctctgcttcttgtcctggctgtgaatctgctttctttgcatttggctagggttgtgtgctcctttctaaacagcagggaataacttgattgcattattttctgaaatgtgtgcctgataaaacttcattcctggtggatatttgctgatatgattggaagcgtatgaactctttctagtttaaataatcaacttcgtggaaaatgaagcaatggttatagaaatatcaagtaaagcagtgttttagattacattttggataatctaaagatactctgttatttttaggtttttgaggtttgctgctttctgactcttatgattgttgacagccaaagcagtttgtgcaataactgcaagcgtcctg

SEQ ID NO: 52247 - DNA, 180 bp, Ricinus communis
  Intron number 2 from transcript 30147.m014138 (locus 30147 .t000409) derived from phytozome v7.0 (chr-ID 30147; pos 5 31935 to 532114)
caagaaaattacctagcaaattggatccaggtatattatttttttgttcttttacatggtttctatctgagcagctttgaatttattaatttatcagtttcttagtatttatagttttttttcttttctggtgaattatgtttaggcattatttaattcattaccgccagaggattacaa

SEQ ID NO: 52248 - DNA, 335 bp, Ricinus communis
  Intron number 2 from transcript 30174.m008611 (locus 30174 .t000008) derived from phytozome v7.0 (chr-ID 30174; pos 1 724863 to 1725197)
attacctttctttgtgtcaccaagtagaagtatgtttgttcttctgctactctctcatgccttattttagcttcaatgtgcattaaatttcaatgcctttctatatatgtttatgttgcgcagcagaacaagttattgccagtgttttttactgattaattgttgaaagacataaaaccacattttttatccattaaaaacagctcaagctcaaaacttttcacaaaatttaaatccttttgtggttcatgttaaaaatcctagcatgtactgtcatcaagatacaaaatgttgcattatacctgatgtatttcggcattttaatttgaaggtcc

SEQ ID NO: 52249 - DNA, 702 bp, Ricinus communis
  Intron number 1 from transcript 30190.m010920 (locus 30190 .t000156) derived from phytozome v7.0 (chr-ID 30190; pos 6 90265 to 690966 reverse strand)
ccggcgctattatcgtccgccagcgtggcaccaaggtaaaatcaacaattttgcaattttaaatttataggtgtgatttcagtagtaaaaggagtttttgatcaatgtgattgtgagatttaactgtctgccaactgaaaggccaattgaatgatgtcgaagttcgttgtttgttgggtctgaaagttcaaaagaggtagctaatctttgagtagccgaatattgaatgaggacatggtgttcgcatacctaattggtataaggttttcttctgttgttgaatttgatatcaaaacactgctcctcaacatcatatatacactgcttctattctcattccactttaacttcatccatatgcattatgctacatctggacatcaagatttgaatcattcatttggatttgttaacaattactttgtttgggaaccacatggaactgtattaacgatcatttgagacaaatccatagtaaggttgaacgcctagttaatgacgatttgaaaccacacatatctatatgtaatttgaaattctaatattcaaaagttagtatttcatattcaaatgcatggatgcaaaatgcaaggttattgcatgtttatgtcgcttcatgaaaactctgcatgttttcttaaatgaaaagaattgtatgaccttggttgtcttgacaatattctcagtttcatcccgggaaaa

SEQ ID NO: 52250 - DNA, 570 bp, Ricinus communis
  Intron number 1 from transcript 30174.m008932 (locus 30174 .t000329) derived from phytozome v7.0 (chr-ID 30174; pos 1 083499 to 1084068 reverse strand)
tatcctggcaccgttgattttctttttcggtcgaggtctgtatgccatcgattcaattggtccgttctttactctttctgtactgcttaatttcaacatcttaatctgcattttcgatagatcttctgctgtttgcttgtccagtttttgtaatgaagtaaataatattgctgattgttcgtctgaatgttcacacgtgggccaatttttgctgttcatgtttgttgtgatttcacactccggttagtttttggattttaattctgcattactgtgtaaaccaacacattttctgtattatgctaaatcaattcaaaaacatcattaaattctctgtatagtgccttattatttggtatgggagcctaagccgagacctgagattgataatcttctgctttgcgttgtgttgtgatctctgtagactattcaaattaagtttcaccttattggctcaatgtttgtggttgtccttttaatcataattgtctgttttctattgctgggttctggttatatccctgtgccctttgtattaagtgattgctgtcgcttttgcagatcaaaata

SEQ ID NO: 52251 - DNA, 581 bp, Ricinus communis
  Intron number 1 from transcript 30170.m014103 (locus 30170 .t000515) derived from phytozome v7.0 (chr-ID 30170; pos 2 855780 to 2856360 reverse strand)
aattagtaacgttcacgaacttgacgttgttacaggtttacttcactttcttgcatggctttttcattttttctccatcattgcttaatagttattcttgtctcttttctccttccattatttagttcttgggctgcgctagattttcttggtgcttttatttctttctttttgtatcatatacatgttttcttatttgggttttgttgtaagttgttacatttttaactagatgctgtatcccgttggcatttttttttttttttttttttttgtcttgagcatttagctactaggcgttatgggtattatttgcctttaagccttctaaggttattgaacaattctggtatcaatttaatttcgaatatgtttgtacttgtcatacctatattcagtttttccttttttttttgcttggttcagttgtagataagcatcttaaggaattgtttgtttgattgataaatcttggtgtagcttactataataatagtattcgagtttctggcggagtgtaaccaactacctacttgttgatgtcaggcaagggcgagatattgacgtgctcagatcaacaa

SEQ ID NO: 52252 - DNA, 304 bp, Ricinus communis
  Intron number 3 from transcript 30147.m014119 (locus 30147 .t000390) derived from phytozome v7.0 (chr-ID 30147; pos 4 609528 to 4609831 reverse strand)
ctattttaagtgaggaggatcaaaaggtttgggttttgtttctaataaactgagtattactctatgcacttaaattcatactttgacctccagtttttccccttagtttctgtggttctgtgacacaaccccctccttattctttgtttaactttttggataaactttaaaactgatttacccactgtcatcactcaattcaaattgtttaagttggatgcttaagtttgtaataattccttctccgttttgctttcttttcttaatagatattcaaatatttaagctccctggaggtggagga

SEQ ID NO: 52253 - DNA, 326 bp, Ricinus communis
  Intron number 3 from transcript 30204.m001817 (locus 30204 .t000086) derived from phytozome v7.0 (chr-ID 30204; pos 5 73634 to 573959 reverse strand)
ggccctaaagtgagtagctcgcacattgattgattagttttcctctgctgtattttctgttgataatgatactgctaaatattgtttctgtctttgagtttcatgatccttattattgagagctcatgttgcggtgagcttaattgtttttcttctcttttactcttcattttttagtagcatttacaatttctaccatcattatgtattttcctttttttgaggagaagaaagttttggatagtgttttgaataaatattgggcagtttaaatgtttgaccaactttctttttgtgtttaatgcttgactttttgcaggggcgga

SEQ ID NO: 52254 - DNA, 864 bp, Ricinus communis
  Intron number 1 from transcript 30183.m001290 (locus 30183 .t000020) derived from phytozome v7.0 (chr-ID 30183; pos 2 89178 to 290041)
tgccagagaacgccgttccagattctggcgttcaggttgtttatttatttgattcagtgttttctttttcctaatttaatgtttttaggtttcttgattagttggtgagatagtaggaaaaaagtttatttttgataatttggaattgttgatgctttgtatgtgtttaaattcgaatgtgaggatgaggacttaaatgtcactgtagataatgaagagtctttgttataaattataatgcttatgtcttgaaatcgaattgttggttttgtattcttctttcataggttaacattgcagttaatgttctattttcagattaatttctcttacttttatgtgtgttctgacatttgacaagtatgaagtcatgctacattattttgattaaagccagagactgaactggagtttaaaaaaaaaagggggctaatcgtctctctatctcctatgcaaatttggtgtttgggatgactgcattgagtattccttttttcttttgaaatttaattctgactttgacatgaatggatttagtttcttagaatttaaagtcttgttgattatctgtctttgcattttcacaaaatcttaggtaattgtgagaatgcgaccagtgaaaaaggaagaagaggaaggggaaatgatagttcagaaactatctactgattctttgtcaatcaatggacagacctttacatttgactcagttgctgatacacaatccacacaggcaagatctttttcaatataatgtggttttttgattaatgattttgtagtaaaatactcaaatcttctcttttctttcccatcacgttttccacagctagacattttccatcttgtaggagccccccttgt

SEQ ID NO: 52255 - DNA, 568 bp, Ricinus communis
  Intron number 2 from transcript 30174.m008626 (locus 30174 .t000023) derived from phytozome v7.0 (chr-ID 30174; pos 1 810300 to 1810867 reverse strand)
acagtaatctttattttccatatccgtttcttttttgtttctttttacttccttgaggtttaatcaaggggattgattttctgggtctttcttttatttgaattttcttgatttagctatgttaaatatctaaagttgttggagagggaagatacagtattgagatttatttaataagattttagttgttataacaatcttcaggtcttaaatcatatgattagttattcagtaacaatttttttctagctagtttgatttatggattgctttttagtttttgttacatttgtttatgcagattgtagattctaaattgttacatagtggcccttttgatcttggaaagaagtttatttgaagctgcttgtttttcatttttgcattttaagctgctcttgtttttcattttgcatttactgttattctttttagaacttattgttggcagtggcttctttttaacaacttgaatagtaaattgcaattggatgcatttaattctcggagaaataagcattgtaatactctttatcttccatgtgatggcttatggcaggtccttatc

SEQ ID NO: 52256 - DNA, 1028 bp, Ricinus communis
  Intron number 1 from transcript 30170.m013675 (locus 30170 .t000087) derived from phytozome v7.0 (chr-ID 30170; pos 5 02009 to 503036)
ctgctaggtctggcttgcgaaagggttatatatttaacttttcatgtaaaaattcttgtagtgttcttgatgataatttagttagggtttctcagttatgagattgataaagagagatatgaaaaatgacaccatttgtcaacttaacgggtgcttcaacattaagccttttagcatttgatagagtaatgattgataggtgcaataattcattatataaattaagttgacaaatgctaatatttgaatgttttattttttttaatatttgatgtctacgcgagaataggtaaaagaaggtctaaaatataatgcttggatagcaatgttggttgtgatatttattgattcccaaaaaatcataataaattattcattctaatttggtattgtttttagacccaactgcaaataaaaatttgataaattacatttttttatagatttaatataaatttttaattcttttataatattaattatgaaattttaaattttttataaattataaatatgataataattaaatgatattgcagttaaatttattttaaaacgtttacaaaaaatgattatattagcaataaaagatacaacacactaatttagtgacctctttagatcaagcaacaagttgttttacttatatcacttatagtattctaaagattcaaatcaacaatttacatgtcaactatttgatcctcttcaaagagtaaatgccaactattttatctctattccatttataaaaaaaaaaaatcatcatcggttggaaattaatgacctaaatgggtccctattacaatatcaaatttttttttcaagcaagcataatacaaaatcattctctgaaaagaagatataatacaataaaaaaattgcaattaactttattgaaagacatttactagcattaattaataatcggtctttacctaaaacgaagccgttgtagactcgtgtcagccgtctttttatcgaaacgttaatcgttttgccgtttctgctttttagcagggcaagag

SEQ ID NO: 52257 - DNA, 955 bp, Ricinus communis
  Intron number 1 from transcript 30178.m000863 (locus 30178 .t000025) derived from phytozome v7.0 (chr-ID 30178; pos 1 78906 to 179860 reverse strand)
gattcagtacggtggttagtatcttcacccctacatttttgttttctttgttctggtaaagtatgtcaacccttgtagagtatcatgtgcataatcattatcccttttgttcaattttaatggtatgttccgcactgcgaatttgatctttgattgatttaattacttcctcatatgcatgcctttagcgccgtggaaggcacggcctgcttttactttattaagcagaattttagatggataatgtacaagatcagccaggtcaaatttcagcagtttcctgaacagtgtgtgcagaattgtataatgatttaggaagcctgaaaaacatgttggtacttatgcatgctctaaaagatacattaaatatgatttagtgcatttgacaaattggattgactcattgagtaaaggttggttgggagggttatgtcgtcaccttaggcttgccatgatttcagttcactatattaagatcacactcacagaacctataagatctcctattaactaaagctttaaatttctctccattttgcatgcactgttcttttttattgtatgttgatttctttggataaatgtagttccctgtttgtgcaattcaatgactatttcctcagtggcaatagtatgttgttagtctgattcatattttcttgaaacattgcatcaaacgaattaaaaatgttatacatacttccaaggaatttaatcaggattaacattgtataacttctctttgctgtgatgtctctgtttggtgtccctactgtaatgtgggtgggtagtttatggttctttatctgtttgctgcctaggacagataaccagagactatattggcagcttattgattttagggtgatgtttatagctacatgtgtctgagcaaactggtttggtcttggtacttgtagggagacaaagataagaaaattgaagaactaagtag

SEQ ID NO: 52258 - DNA, 443 bp, Ricinus communis
  Intron number 2 from transcript 30162.m001272 (locus 30162 .t000017) derived from phytozome v7.0 (chr-ID 30162; pos 1 065668 to 1066110 reverse strand)
agggtgtaaataatgtaggtgattcttccgatggtggaaatggtaaagatatatgagaaggtagtgatggtggtgataaaagaaatatcgatgataaattttttgataatgttaatgatgatggagttgtgagagtcggagtaatgatcaaaatattgatgatgatgagaatgtactttaattttactattttttattttttttagtcatttttatattcttttaaggagatgataatattgctatttttgaaaagttcaataaggaagaagtagttggccgagttacttcttcatatattttgaccatttttgagcttgaaagtagttactgaatttgactcaattgaaatatgttgtatttttgtttatgtatttacttttggtatctgtttagtatatgccttctatattttgatttatttattttttaggctttgaaaa

SEQ ID NO: 52259 - DNA, 442 bp, Ricinus communis
  Intron number 1 from transcript 30170.m013722 (locus 30170 .t000134) derived from phytozome v7.0 (chr-ID 30170; pos 4 475008 to 4475449 reverse strand)
ctttctagggatcctcacgtcgtcaggtactattttctttaaatttgagcaaatttggtgttaatcgtgatttcaatttgtcattttagggttcctagtttgttttggggaatttttttcagtatgcgtttccagattcttccatctaggatttgaggttaaatcttgtatcatttacttcaatctgtctgcgaaccagataattgttctgtgagtgccgacacaataggaagtctgttgattattaaatacatagttgtaacagcattttatgctctttggacgcttatgattgtcgccgatcctatttactagttctccccctttaaactgagttcgtatgaggtctttattgatggtaaactgctaggtctagttttcgtccatcattgattcatatacgagttttcttgttttgtgtttgttcataatcgacagattg

SEQ ID NO: 52260 - DNA, 888 bp, Ricinus communis
  Intron number 2 from transcript 30217.m000257 (locus 30217 .t000008) derived from phytozome v7.0 (chr-ID 30217; pos 4 9189 to 50076)
tatctggatcttcttcaggccgattactccgaagggtgagattgctatgcgtatttctctttttttgcttatttgcttactgttctagccatttattcaatcgcttctctctttcttttctaggaaaagaacatatattctttgttaattttctttactggtagtgtttttctcttcttcttttttttttttcctgtaatttggtttttaattttaatcactggaatcggaaaacaggagaccttttttttcttggtactgttacttgtacttgaattaggaacatcttttcaattgctctgctattcttttgtttgggtgaactagtaaaagatgagtcatctttaattgttatgattgctacaactaattatatgaaagaaaaatggaacttgtgacagataaataaatgatttataaagttgcagttaaattctatagaattgagagtataatagggtatcccagcaattgaagggaatcagctttagccttactgaaattagtttgataagatttccatggtcttgcattattttctcctgaagaagttgtttttatgtcctccatttctattgctgtttctttcttcttcattttgattttaaaagcttgcttgagggagaagaagagggatatgtgtatatgtgtgtctgtatgagctgcatgttgcaagtactggtcttaatttgatactgtcatttaccatggtctttctacatttttccatttctgagttgacttgcaaaaggactatccaacagcgaggcaacatagttcgtaactgactgttaatatttttattacttatatgagtttgggtaacaattattagcagaacttgtggacataatgaaggccattaacatctcattttctgctgcagag

SEQ ID NO: 52261 - DNA, 1001 bp, Ricinus communis
  Intron number 1 from transcript 30147.m014164 (locus 30147 .t000435) derived from phytozome v7.0 (chr-ID 30147; pos 7 15771 to 716771)
acgcggtatgctcataaaatatactttcttgcacttcttcttttctatccataccttttcttgtagatttgccgaaattgtttgtcagcttttcaataattgagcaagattaatagaattcgccaatcttccatgttcaactaggttaaacagtgatgattccttaggcttccttttctttttcccctattgtagaattcgccaagttactgtttgaaacggttggcatgaactgctagcttaactggagcaaaaagattaattaactgcgtttgtttcaataataaatttcagtctatgcgataactgcaaaattgacaaagtaggtaaaccatacacttaatgactgataggttactctttaataattgagatgatttgaattttgcaataaaaccatccattcctttaattgctttcaagcagtaaagattggttcaattattcaaattttacagagaaatcattattaaagatacttgtctctcttctataattaattggtggctgcctggtcacaatgcacttcgttcttcttgcattattgagaatttgtcaaaggacttctagctggcgacattatgttattaatatctgtgatatgtaactttgataaatacttgaatgcccaaaagcttaggcttacagcactcattctgaaagagtatatgtacctattgttgagtggtttataatttgaggtatgctatatatattatacattatctagtcattgtgaacattctacaattcttggctgttctgtgataatgttttgtatatttccctcctatcgtattatttatcattccatgtatatcaatgagccattagttgcaatgctgatttctgtattatttatttttataaagaaatattgatatatcatgtttcatggattatgctaattgacttttttgccttgcatggttggtctgtgtatcactgcatgtgtacgaatctcagggtgtaagtccaaatctttttcctgattcattttg

SEQ ID NO: 52262 - DNA, 968 bp, Ricinus communis
  Intron number 2 from transcript 30170.m014383 (locus 30170 .t000795) derived from phytozome v7.0 (chr-ID 30170; pos 3 558540 to 3559507)
tcgatatctttttatttaaacaggtatcttacaaggtacctatgggtatcttattctattagattgattaataattattttttatcattttattctccatgtatattaaaccttagattttttataaaaaaaaagtcattcaccattacgctatttaatatttctttataaaaaagacacacatatatatagtactattatattaagatataaaataatattatactaaatcacgttaaaaaattattataatactcaacctaacatattagcattattaacttataattatgtagtgctagtatgacattaattatgtttattaaataatcttgattagttttatgtgtcttgactaattaatatgatataaaaaatcttataccatattgttatacagtagaatttaaattttaaactttaagtttttaatagatctcacttttattattaaaatcttatattaataatatatatattgtgttattacatccaaaaaatataagacaatattttaaaatttgaatatattatatagtttaatttttatttttattatatgcaaaaaaaatcatatatatgaattcaataaatttttattaataaattaaagaaatatattacatatagttaaaaataaaattatgtagttttaactaaaactatctagtttcaaagtatcctatataattttaaataaaatacatagttttgatgtaccaaattaaaaaaaaaaactaaataaaactatataatttagtaaaactatatagctttgatgtaccaaactaaaaaaacctaaataaaattacataatttaaaatagaactatgtattttttatatactaaacttaagaaaatccaagacaaagtaaactctaattcaattatcttcttctcctctcaaactcgcgtcaactcaaccttctcagagcctccaccacccaccccctgcttcacgccgccg

SEQ ID NO: 52263 - DNA, 761 bp, Ricinus communis
  Intron number 1 from transcript 30147.m014218 (locus 30147 .t000489) derived from phytozome v7.0 (chr-ID 30147; pos 1 027450 to 1028210 reverse strand)
cattcattctactcaatctctctcttaaggtatgttttatttttgctgcttctagttgctagaaactcataatattgttttattggggataaatacattcaagtactggtctctttgctttaggataagcaattctaaatgaaaaaccataagttatttctgcacattcaaacattacaagtctccaccatagcccccgaaatgtaccccatttaattctgacacggacaaacttttattattttgctaattgcagacagacctagttctgatattctgttctcaaaattgttttgaatttttcacatacatgcgggcactaaaattctcacaaatatttactttttctgaggtaaaatgactttttgtgttgctgtcaaaattgatttaagattaggatgcctatttgtttcctttaagattgcttccaaatgggattggagataattgaggtttagactagtaattggaggcttccagaagtagcaaaatttatattttgaatatataagctgaagaattttgcattttacatcattgctatcttggaaaaggtcgcagtagccagacttatttcgtttggtagagagacttttacgatttttaattcgtgtttataatgcggattctcttctctgtataatttgatggttatagttgtcatatggccgatttgctttatgtttattatgatcttgatgattacggtttctttgttacatgcagactattttctttgcggaattatacccttctgaaac

SEQ ID NO: 52264 - DNA, 600 bp, Ricinus communis
  Intron number 2 from transcript 36228.m000014 (locus 36228 .t000001) derived from phytozome v7.0 (chr-ID 36228; pos 1 184 to 1783 reverse strand)
ctacaggtacgtttgcatggaatttcgtttactttatctggatatcaaacgaatgtgatttcagatttggtttcttgtgatgctaatttggcatgttgagtgcaaataatccagtagatatgcccagcagttttaactaattcttctggagctatgctcagctctactgttctatgcattacatgaaaaagttgaaataaaagtcttgaactggttgtgcatttaatcattgtcctagagtactcttttttgataaatggatgcataatctctgctgatctctggagtttttttaatgttttattttgtaataacaattgctttctttatcaattttgccacttcaagctatagcacgttggcatgtgcctgttgcttgaggcatttgcttcatatatgatgcctcaattctgaacacatctgtcaggtctatgatgagatgtggatatcagccactttaatatttgaaaacatgtatactcgtcactttagttatcaatctataaagtgttaattttaaaggtgataaacatggctcattaattagattacgtgattcttttaggccaattgtgccttcctatcaactctggaggcaga

SEQ ID NO: 52265 - DNA, 270 bp, Ricinus communis
  Intron number 1 from transcript 30190.m011063 (locus 30190 .t000299) derived from phytozome v7.0 (chr-ID 30190; pos 1 643921 to 1644190 reverse strand)
ctgctcttagaggacctgagctagacgaagtcaaggtattaatagtgtgtttttttacagtgttacttcagtttccaagctcattagtcaaattcttttatcttcaatgttgttcttaggcagaactgtttgatcaagttacgttctgatgttttttgatctctcatataatcattatgcatgcgcatacgaattatctattgccacacatggcatagaattatcagagttgacatctttctttttctctgtatgtttttctgcaggact

SEQ ID NO: 52266 - DNA, 730 bp, Ricinus communis
  Intron number 1 from transcript 30147.m014102 (locus 30147 .t000373) derived from phytozome v7.0 (chr-ID 30147; pos 4 518383 to 4519112 reverse strand)
ttcttcctgagattcgtaataggcgttctgacaaggttataatactgaacttttgtacttgtcactacttactctatgtcttccaatcttcctcttcttttaggtctttgtttctaatttcttgcttaacctaaattattgaacttttttatgttaagcttttctttttagatacttctcttgttaacttgtggaaagaaacaagaaaagaaaacgaagatttggaacctctagtaattaatatgtacttccttttagtagtactcattagtgtgatcaagaaaagaaagtctaggtttactcgtgaagtatgttcagtttatacctagttaacttcccactcaatcttgctggaatctttctgtatttatccatcaaggaccaaaagaaaaattgaactgagaaagggaaaagtggacatgtcccatgtatgtagaaagcacgaggggtgcaattttgttacactcaagtttcaagaagttgttttaggaatttatcctttttcagcttggcttttgcatcagtagttaagatctatgcataattcatgacgctaaaatatttgcaattttaatgtttcacttaattcaatttcatggggcagggcatagaccaaaagaattaaaaaaaaaacttagttaattaagtacccaagtcaaattttaaaacttgttttgaattgattgtttatacaggtttcagctgcgaaggtgttgcaggagacttgcaa

SEQ ID NO: 52267 - DNA, 539 bp, Ricinus communis
  Intron number 2 from transcript 30174.m008784 (locus 30174 .t000181) derived from phytozome v7.0 (chr-ID 30174; pos 2 62592 to 263130)
atacttcggtctttcttgatcttcctgcccttgaggtatatactcatgttgcacctttttggttagttatcacttccttccaaaggaaattttggattttttcgaagtataaaaattttgagtgtttgttgagtgaattttacatccttttcactttgtaaagagaatttggaatttgtggaaggctaccagagatttagcagtatttagaaatatattagcaatttatggttatattatacatacaaaatttcttcttctcttctatagttgatcagatcactgctagcattggaacaatttactcaataaatgtgaaccagaaataggaatttgaaaggaagacctgttgtactttagttgcatgcaatcgataaggaaagttatggtgcttgcgatgattgtcatagttgcatccttattatgcatgcacaatgaatcaccttaatctaaatttctgtactcgttgaattgacttttcttttttttttttaaaaaaaaattctgtctgttttaaggccccaatattcagttattca

SEQ ID NO: 52268 - DNA, 945 bp, Ricinus communis
  Intron number 2 from transcript 30148.m001419 (locus 30148 .t000018) derived from phytozome v7.0 (chr-ID 30148; pos 1 13150 to 114094 reverse strand)
tcgaagctgcaatagctgatcttaaaggaactttggtatgatttcaaatgcaattatcttgctgttgatatcccctcctacaagttttgaaacaaagtgttctgaaatcttctggattttgatgtctataaaattccagtaactcctaataatgagctgaactgcataacttggtcttagttgcttataaattcaagatgtaaaagtgaaatttcttatcatcttccgtggtttatgtatttgagctagatttcgcaatgaggttggatgatgtggtgtatccaactatccaaaagggggtggtgaatatttgccactcataccagtttagactgttggctgctgatgtttcagatttctgagatatttaacaatttctttactggtccactgagaattatccatttttcaattgtacttggttatgagttcccttcttgtacctgcgcatatatattgagggtaccaatgagcaagtcttagcaccagcagggtggactcaaactactgaacataattgagctaagttttcataatctggataggattttcaaggagatatagacccatgattcagataggcttagcaccttcctgtctgagtccttcaatggtcatgtgccattggctagttttacgcagactgggcataagtagaatcgaagaggaaataatgaaaattccatgtgtataatgcattagcacaagaatgttgccaaagttttcagtaaattaaggcataagatggaaaaggagtttttcttaattgatctatcatttatgtttatacaaatgtgcttggggaaaagtgacttttctttctcataatgcctctctctgtctgccatatgtaattttttgatatatatggttttgtgtgttacattgtcacaagaagttcaattttcaggttgagttggaggagtcggataataaggacggacc

SEQ ID NO: 52269 - DNA, 707 bp, Ricinus communis
  Intron number 2 from transcript 30169.m006482 (locus 30169 .t000259) derived from phytozome v7.0 (chr-ID 30169; pos 1 450765 to 1451471 reverse strand)
ttattgattctgtatgttctctctctctctctctctctctctctctctctctctctctctctctctctctgctttcttagaaaacggtgttctttacttttgtacttgctgataaacactgttttcttgcctcaacactcgttatcaaactatagtagtttgcttggagttttgaatccttttgctttgattcgatttaggttttgagtggaattgtaataaggaaaaatattaagagctctaagtagtttaattatatgcattagaggaagactataccacggaaaatggatgaaatataaaatttggtctaagtagcataactctgacgatgaattggaaaccggtaaagtatggttgcatggatgataattatttgtccaaaatattttccaattttaaaaattatgatgattctgggtggttggtttctatgccaagtatacagctaccatttagactctgactttgagattcgttcataagtcatctcagtttaccttgtaatttcatatacaaaataaatggaaattaagttattgcctttcatctaaaaatcacctctttttgtgcattcacaagctttatgccttttgtacactgtgtttggtttttcataaaagcagtttcaaagtagcgaatgctccattttcaggacatgcactggatatttagctgctgatgtttcagttttctcttgcagtttt

SEQ ID NO: 52270 - DNA, 900 bp, Ricinus communis
  Intron number 1 from transcript 30179.m000564 (locus 30179 .t000013) derived from phytozome v7.0 (chr-ID 30179; pos 1 37261 to 138160)
cataataaggtccgttttctttttagtttcttaaataattcttaattagttctgtctttagatgtaattttgagagtttggtggttttttggggtttttttcctagggtttttagatgattcaggtaaagatctaaagttttaagtgactgagcttatattagggtttgaatgaaaattgtagttctaaattcctaattcttttttcatgcgttaacttctcgattgggttggttgttgcatatgatttatgttgtccagaatttagattgagcattgtattggtaaaaataaaactcttactttacatttgaagaattcttttatacattaattcaactgattctaaagtgagatgttttgtgagtcagtattatggttcatttagacccgaactaaacaatgttctacaaataaagttaatatggtgtgtgtgtgttatgtattcttttttctggattagcttgtgatataatgcatgaggcatagagagaattatttataagttcatgtagtgtacctttttgttttcactcacaaaatgtttagcacatattgtgttatttaacacaaagaaagtttaatcatgcccaattttaattttatttcattccattttatctgaacctttttatgtgcataatacatggagaatacagtgttgtgctgcctttttcgtgattgaattcatctaccaataagggtgttatgtatgttcagttcaaataatgatgaggttgcatattgtattctaagcttctgtataaaatgtgtgttctgcaaagtagctgaatgtttatcttctaatttttatagtagatttgtattctctaatgagaatttgattgctgttttgttgttatgcttgagcaggtcctttctgttgttgggcttcttcagg

SEQ ID NO: 52271 - DNA, 662 bp, Ricinus communis
  Intron number 1 from transcript 30174.m008801 (locus 30174 .t000198) derived from phytozome v7.0 (chr-ID 30174; pos 3 44448 to 345109)
agacccagttagagttttggtcactggcgctgctggtactcttacaatttcttatttctttaactttatatatgccgatatgttttctttttaatttaatttttaaacagaaggtaaacccgtttctaagatgggttcttttcttcactatgtggacaccttttatatcttttcaatctgtgtgttcggtttgtattggtatctttttggcttgtcgtggaggtgctcctttatatgctgtctttcatggggtattatatatttaagtacgtacaagatatgatcatgttatttgattgtaacagtaacactgcattggattataatacttgtgcagcttcaaaaattcttctgagagatggaattggattataatactgcattgcttcaaaagattttggttgttttgtttgttatcattctgtcttggaagttaataagatacatgtgcagcttattaaatttagaaaaggagcctgtgagagtattaataactggtgctgcaggcaagctcaatccacagttgcctaatgtagtttaagatttaattcaactaatttttatcattgttaatgttttctaatctgttctctgcatttttcattagcaaaggagatatacatgtaatttttatttttcttaattcacagggcaaataggct

SEQ ID NO: 52272 - DNA, 345 bp, Ricinus communis
  Intron number 1 from transcript 30178.m000853 (locus 30178 .t000015) derived from phytozome v7.0 (chr-ID 30178; pos 1 19024 to 119368 reverse strand)
ctgtttctaaggtttagtttaatttcttgaatccttagtttacgtttttctttagaaacaaaagttttatatataagtttgtttacttgaatcaaattgaattattaatagggaattttaattcttgatgaagtttcaagagatgaaacttttgtcttcataaagattcaagaatttgaactttggtatgatactatacaggttcaatctgtagaatgatcattggcagttgaaatgtgtgttaaggagaaacaaatgttttttgaagtggctagttttcttgaattatgtcagtcttttaatgtctaatagcggatttcttttctttttatgtgcagagtcaga

SEQ ID NO: 52273 - DNA, 625 bp, Ricinus communis
  Intron number 2 from transcript 30174.m008992 (locus 30174 .t000389) derived from phytozome v7.0 (chr-ID 30174; pos 1 415558 to 1416182)
tcatcagaactaagtttggaaaacttgatattctggtaaattaattcttacagtctaatttcttattcaggttacttatgtatgattctcctgagaatatatatttgagtagagttgaaaatctagtctgcattcggtgcttttatatttgagagatgaaggtaatttttatttcaaagaaatatgttatgtttttaatatttcagaacttttgttatttctatgtagttttaaatgcctttaatataaactatcattaagacatagttatatcttttagtaatataccatgaagatcatgtttatattaaaaatatttatttaaaaagatcatcttttaaatctaattaaaaaaattaaaaaactgttattttaatagtctattgcgattataacatgtttattccaatactaaattacttaagagatactcatagaaaaagaaaattatatatccctaaaaagtgttaagaaaaaagaaaagctataaaagtactctttttaatatagaaaaatgcctaatctctcaagtgtcaaaagtgcctcactacagtagttttttgagctttgccatatatattttcttaccttcactcgttcaatggaaaccttgtgcaggtaaaca

SEQ ID NO: 52274 - DNA, 198 bp, Ricinus communis
  Intron number 2 from transcript 30169.m006336 (locus 30169 .t000113) derived from phytozome v7.0 (chr-ID 30169; pos 5 82118 to 582315 reverse strand)
gctggtactggagctggtggtgattctatttacaagtaagatatgcatttgttttcttttgtctttcttgtcagtgttcagtttctattgataggtatatagcttttagataacttggcgctaattataattctgtttactctttgattgctaatatgtcttaatatttattttacttttcttatgtcagatttctct

SEQ ID NO: 52275 - DNA, 733 bp, Ricinus communis
  Intron number 1 from transcript 30170.m014238 (locus 30170 .t000650) derived from phytozome v7.0 (chr-ID 30170; pos 4 403730 to 4404462)
tcaactcaccagccgtggagttcactgcattcgaggtctctttccttcatttcactctcaccgcttctcttctacttgctcttcgctaattagtttacttttgtttttttcttgcaatcaaatttaagtagaaagctttgattttggatctgtatagctgatccgttcatcttctaattcttttccctattagctcgagtttttcaatgtgtatatatatatatgtatgcacatacacagtttggacctgttataactgtattgtatttttccgttcattatccaattctggcaacaccttttatagctgtattgtacttatccttttattatttctggcaagttctacactggctcatgtgaatgagggataattcatttcttaagcattttggacaagagacaaaatttcggacgagattatcaattcaaggcaccaactcgttgcttgtccgattccatgcttatcattccattcttcttgtaaaccaagtcattagacaagacctgtctgcggattcgattcctacccgtattactataattgattcggaccatttagcattagtcagtaatcaccaattctttttgtttttcctcataattggtagatctgttgctagtattagttgaatgattgcttaactgatatatatagctatttgagtgtgtgctgcaactctctcacccatgataatgtaataatttataggagatctcacccgcaaaagtg

SEQ ID NO: 52276 - DNA, 753 bp, Ricinus communis
  Intron number 1 from transcript 30174.m008730 (locus 30174 .t000127) derived from phytozome v7.0 (chr-ID 30174; pos 2 551361 to 2552113)
atcttctcctccaagtttgttcgcaacagggtaatgtatgacaattgtttttttagactatacagctccatcaatttcctttcaagtgtcactttcctctgttgaaattcttttactaccttccataaaggatcgatttctctagtattcttcaacttcctatcacctaccagagattcactcttttcatacacttcactctcaatcaaagtctcctcctttttctgcatttcctcagcctgcaataggtttgattaatttctggttaatattttttgagttcctaagaaaggcacaaagacaagcacaaacacagagagagtgtctgtactgataagctatctgtatatttctcttccttttcaatctgttggagaccagggccatctttatctgaacagtttgatcaaactaaaaagattagcaattgctggcataacagtagagtattacatatcacaatataaaaggatagggtcaccatggtacctgaggagtgcttggttgaagggttttcctttttctgagaaattgaaacagctgcagctgcagtcaacaccagaaaacttaccctgaatatcatgtagttatcacaggccaaagcaaaaatatgtcggttatgtcttcaccaacaccatcgctatatatgtctttatcatttttagtgtatgtgtatatacatgcatgtcatacggagtagcatactggatgataaatctcatcactaacctgtggttgattttctttgcagac

SEQ ID NO: 52277 - DNA, 1037 bp, Ricinus communis
  Intron number 1 from transcript 44904.m000026 (locus 44904 .t000002) derived from phytozome v7.0 (chr-ID 44904; pos 1 231 to 2267 reverse strand)
ttaagcatcttgaggactgctcagttgccaagtcagtttttccatcttttctttttctatatagtttctatctatttctttctatatgttttctggtttctaaatgattctcttgttagtggtactaacttctgatatgcagcattttttagtaattttagattaaaagaaatgccaaatttagtgatactgcttacttatagattagtttaaagcattagcatttctgaccagtccatcctttagtggctattgttattgatggacaatcaaagccattctgtgatattatgtgtggttaataattcttatttctaaatccttactagatcaagcttaagtagaaagtttgtctggtttttatatgcacattgtctgtgttgacagtgttgcttctgattagcatgtcatgattcaatttcaccttttctgggtatacgttgcttctagtattcagtcatacggaagagtatgctaaaaggttgcaagttgctttacaaccgtgacctgttatcacaaggtttctggtgttgttgattgtaagtaatcacattaactgcatcgcgtgctatttgatatctgcacccctttgatcctataaactgaatctagaatttattcaccttttgaaaagtggcaagcgcaaattaagatcaagcagtatttttgctttagctattatgatatgctgtgtataatttgtcggaaatgagcactacagttgcattaagaagtgggaaaaagttgatccttatggaggcaaaagggaaaatgataagaaaacaattcattggacctttgtggcaatgctgttagtgtttaaaccatgtttaaatagatattgatcttgcatctaattatgtggagtcttgaacatgttttggtacacttgtcttcatttcagaaagctgcatctccgaagtcatacttaggcatggaactattttgcatataaattccttgttgtttgactttgaaatgaaaaagttgcttgagctaatctatgagtatgttcatatctatagtgcattaggcac

SEQ ID NO: 52278 - DNA, 547 bp, Ricinus communis
  Intron number 1 from transcript 30170.m013594 (locus 30170 .t000006) derived from phytozome v7.0 (chr-ID 30170; pos 6 01966 to 602512 reverse strand)
acaaaatcacttttgtgccttgaccctaacctcaagtaagtgtttcttttctgctctgctatgtctttggttctttacgtttttatatagttttgtttgctttatgaaagcaattatagttgctctgtgtattaatttaagatgttttagtgatgaaaattgcttgagaatgtagtacaaaaatgctgatagaggattggaagaagctttaggaacttccttgttaagatgggcagggacaatgctattgtatttgataccttcaagatttgcaattttaggcagcccactacagaaacatatttgttaaattcaaaactaaaaaatagagtggtcctgctatgtcatttgacgagtagtgtgtgattaaatctcgtgccatgtgatatagaaaaacaagagttcgacacatgaacttctgacaattccattcggttttaaatttttagaagatgatgcatggttatcatatataatttagcatatccagtccttggatagtgctttttatcttgctgttgatgaacgatgccttgaattcacaggc

SEQ ID NO: 52279 - DNA, 797 bp, Ricinus communis
  Intron number 1 from transcript 30170.m014086 (locus 30170 .t000498) derived from phytozome v7.0 (chr-ID 30170; pos 2 738115 to 2738911 reverse strand)
ttgtttattcaagaccttggcaagaagcttaaaatgtaagcttaggataatattcaaattactcgtgtactttgctttagtagcatttcttagccgctattcctagatattctaaaatcatattactgatagttggcttatgcattttgcatttgcgtattttgttacacctgtctttccacaatctcattcaatgttggaatttttttgactcagtttcatcatggcacactgttcttatattcctttttttctgcttcacttgttctgtattgcttgctgcctactggcagttaagttttacttgcttgtttgttactaaaccattcttctttatgttaataatgttactcgtgacttgacactagggttctttctttatggttggttagattcctggtgccttactgtttttatttgatcaaacttgcaggcatgactgttacatgtaaaccactaagtttcagattggttgcaaatctcttaccaactctcagtttctggagtcatcttttagcagatactgaaactatgggtccactgtcctagtctcctagagagaatttacatacctttaaaacaactgatatgcacatcctctactatgttcattgaaccctcagaaaggccttaagaatattgctctataatgttttctaactacgatattatccttatcgtgttgtgatttccatgggatagaaactattttcctttttccttgtacctgttggcatccatattcacctagatggtgatcaatgatgtctacctttcagacctcaggtgacaatagc

SEQ ID NO: 52280 - DNA, 729 bp, Ricinus communis
  Intron number 1 from transcript 30169.m006434 (locus 30169 .t000211) derived from phytozome v7.0 (chr-ID 30169; pos 1 161919 to 1162647)
actacctcagttcttgcttcgctcacactggagaggtcattctctttgtcgctctctctgtataatatacgtgtatatatatcactcttgagaatttcaatttcagctttctttgtttgtttgtcaagttgtttgcttttctaaagattacttgccttttgcaacatttaccgggttcttgcgtaatttatgtttttgaagaagaactataataaaatgacttgacttctaattgttatctttagtgagacttgagcttgattttcttcatagtacttttaacagactgcaaatcagttttcatttgggcgcgtttgctacgccttgaaaatttaatgggaatggaaatggacgtctaagtccaaggaatcatgttctattatatttgttttttgaaataatcaaacaaaatttagcttattcaaagatatttacataaaaattgatgttattatcactcaaattcaacattcaaagtaaccatattttaaataattatgattcgttgtgctgcggataatggaatgccattccagtaataggatttcatcttagttcggttagtatcaaagcaaccttgcctattcagaaaagaaatgtgcacttatctttaggtaaattaaaatgccatgatttgcaagttcttagtttgcactgtgcattacacttctaaagtcattttgctaaatcacaggtactttctattaaaataatacgaaacaagatcac

SEQ ID NO: 52281 - DNA, 795 bp, Ricinus communis
  Intron number 1 from transcript 30156.m001735 (locus 30156 .t000038) derived from phytozome v7.0 (chr-ID 30156; pos 1 104434 to 1105228 reverse strand)
aacccggttttcatcaggtatatatgtctattgagtttttgctgattatgcatttcctaaatttgattctttttcgttaaagaacgtgtcatttgaaaagcttaatctcatagatgaggccctaatagttgttctaaccaataagatggtctcaattgtaaaaactctgataccatttcgaataatcaatgaattcaaacatttacgctgttagtagttttataatttatgttttagttttggttgaaaagaagaatgtggtctatgactaaatagtatggtcaggtcatatagcatattcttagattcaagaattttcagattttaatattaggtattttccagtattaattcattgaaggcttttataatatttgagcattttggtgatcaatcacatttttagcttccacttaattgaccatttaatggggaaattccacaaaaagtgagaaagtcaggcagtttaaatctgagggaaggtaatctcttaacaatgttagtttgttgccctcttttctattctatgtaaacatatcataattcaggttcttgtgactgatggtgacttcatgtttcattaaattcattacttggctgatgttgtcagcttgaatagctgacttttcttttgttttttcctttaaagattttaattgagctgaatgacatgatggaatgtcattatattgggatagcttttgttttatatcggtttaattttgttttgaatttgggagatggaatgatgagtcatgatagttttctcatttatttgaattctatcaggttgat

SEQ ID NO: 52282 - DNA, 280 bp, Ricinus communis
  Intron number 1 from transcript 30170.m014158 (locus 30170 .t000570) derived from phytozome v7.0 (chr-ID 30170; pos 3 206961 to 3207240 reverse strand)
ctcaaaccaatactgtttctctccaatctcttcaggttatttctaaatcttaggcactctatactctgaagtcttctcttttgtttttttaagcataaaactttttgcctttaaaataagttattggagcagatattttgattcaattggtaaaagcggtagccttttttgtataccaagtaatcattttcatgtattgggattgtatttattcctaatccatttacattttttcatttgatcagcaatatttctatttaaattataagaatacagattg

SEQ ID NO: 52283 - DNA, 464 bp, Ricinus communis
  Intron number 3 from transcript 30170.m014061 (locus 30170 .t000473) derived from phytozome v7.0 (chr-ID 30170; pos 2 574678 to 2575141 reverse strand)
ttcgacttatctgttgtatcttggtctcagccctggtaaatatattttctttggttctattccagcttaatcgattcattatgtatttatcatgaagaaaagcttgaacattttattttgtttttatcatttttattttcttaatcactttgcaaagctgactttagtgagtataaatggtggttgcttgaactaagtgatactttgtttattactatacatatatcatacacaaaagattgttataaatttaatactttctgcaatcggattcaaatgttaaactggtgctatttgtaacactaattgcaggttgatgaacctaatattggtatgccatgttttcatcctgtgcatatcagatttttctcatctcctttattgttagatccttgggcgtcaaaaaaacctatgtgatacagctactgatatttttatattaatttgcagctctatctggtgat

SEQ ID NO: 52284 - DNA, 937 bp, Ricinus communis
  Intron number 1 from transcript 30170.m014061 (locus 30170 .t000473) derived from phytozome v7.0 (chr-ID 30170; pos 2 575641 to 2576577 reverse strand)
ctcctggatctggagttcttcaaaaaaatttcaaggtatacagtctcttcgttctcttctatttttctagactgttaactatgatcattgcttttcttttttttttttttttaaaaaaaaccactttcctttatgattgacttattctgttaatacgtcgtagttggaaacgatgcaatcgtcatttatctatgatcagttaccagtcgtttacgaggtcttcatagaagacgattacttttagaatatctgctctgtcatctgtttttctttttttaaataatcagacgacagattgtgtgatgtcgtcattgtcgtctaagacatagtctaagtttgatcaatgactaccgtttgtgtctgcctttacaaggcagctcattaatgtcaaacgacatcagactatgggtcctgatgggaggccaggccactcatttttagataaagagtccattaaatttgctagggcatcgatgtttaagcgacatttatgatcaagctattacggtctatgtatgaccgttggtttgtcgtttacaggtcgtcctccgtttttaattttacagacagacagcggggttctatgagcaaccgacctgtcgtttaagtcagtcctgcggcagttcgtttacctgcgatccgctgttggaagtttcacagaatcatgttaatttattttaatctttgaaaattaagataaaattttgattgactaaaatacgctccaaattcaatttcttatctccaagttattttggtaggacactaacaaaagaggaaaagaaataaataataaatttattatttatatcatatttctttaccatgagggtattttgagacatataaacccattgtttaaacattttgctgtctatgatttaatctaataaattcacctttctctgtatcagcagccaatataatttaatttgag

SEQ ID NO: 52285 - DNA, 742 bp, Ricinus communis
  Intron number 2 from transcript 30190.m011268 (locus 30190 .t000504) derived from phytozome v7.0 (chr-ID 30190; pos 2 926617 to 2927358 reverse strand)
gagttgttggcaacaggttcatatcttatatcttattatataacgtatctcaaatttctactagccaaagttgcaaattaacgcatctctagttgtctgctcttgtgtactggatttaaacttcctagggttcttcatctgagactacttgcaagaatcatgacatggggaatattgttttctaaattggggatttatttttgttttttctgaagggagtgaaaaggtacttgcaatcagactttagtgaagaagttgatatctccgcctgaacttctttttctaaaaaaaaaataaaaaaattcataggaaaacttcaaaaacaagtttgtcgtgcttttctgcattttctttaaaatattcacttgaagcaatcacacattgttgaaaattaatgtttcttaagtagctatcaaactactaactgcatatcttagtagacgttaagtaggcaatatcagaaggtgtaatacgtgttttcattaattgttaaattcatgcttaggtacagatatttcaaccccatcatcttccttctccttctttaatacaattaaactttttctttttgttcacttctagatcactacatctctatattagacattttaataagctagtttttagctgaattgattaattagactcttggatattttaagatattttatgttctagcaagtttatatatgtttatggatttgtaggtgggctcatatagcaagtcacttgcctggaagaa

SEQ ID NO: 52286 - DNA, 579 bp, Ricinus communis
  Intron number 1 from transcript 30204.m001823 (locus 30204 .t000092) derived from phytozome v7.0 (chr-ID 30204; pos 6 40176 to 640754)
cttgatttaaattctttcaagcttccagctccgtcagcctctttttttttttttttttattttttaaataaaacatattgaatttaattacgtaaaaatataagaaaaagttcttgaagttttaattttttaatttatttaattgcatttgataatggtcttttatttacatttttggctagatacttcataattggtaataaatttatgagctttgcaattaatgcttcaagattcttactttaataatgatttgattatttttgttgtaagtctatcgtgcctttagcacgtgattggataacaggtgatcatttattagttatgaagattgaagggtccacatgagttatgcattaattattgcaattcaattgtttttttatgcaaattagggtatcattttgcaattcaattgtttcttttcttttgggaattaggatttcagttttctgttgaatgtttgggatgttatgctttggggtttttgtggctaaaagtgtggagttagagagatccatatgatataaatgttttataggctgctttctccttggatgcaggttcatctattctttt

SEQ ID NO: 52287 - DNA, 934 bp, Ricinus communis
  Intron number 4 from transcript 54899.m000013 (locus 54899 .t000001) derived from phytozome v7.0 (chr-ID 54899; pos 2 42 to 1175 reverse strand)
aggcattgtacaagtccgttcagcaattgagagcagtaagttatctaattcttggagattataaagcagtattcctatggggtttatagattgaatctctgaacctaagaatggaatgggtttaaccgtattcccctctttctttccattcttttttttataggaggggtgttgggtttggggtaaatgggacctttgtagtaagaggagaattaaaaattaaactgctcttgcagatttctttttagtctacaaaacttctttgttcatggtgtaacataatttagttattgtggatggttcttgttcataacaatgatttaggtttaaaaataacaggtatattcaggttccttatttgccctttggatgttttgcatggtgattgaatcttttagctggtccaagtctcatatatatctaagactcccagtttattcatgcatatttcattttaacatctcacctgtttctgatgtttataagtgaactttaaatttccgtttggtattacacattagataatgggtttatgttttgctttaagattttgtatttgactgatggaaaggatttattttaagcattaaaagctccttcaaatattcctactcaggtcctgtttcggattgttgttggatattaagaaaataggttttgattttttattttgatttaataaattgatttttttaaagaaaaaaatttatgagctgtttttgtcaaatctgcttttggaaaaagaaacattgatttacctacttttcttcaaagccagttccagaactcaaagaaagtatttcttcttttttaaaaatacttggccctcaatcctaaacgggattttattactattagtgagggagtttctaatgctttatatatggcttttgatgcagattggaggcagtggggttctagtttctcctttaac

SEQ ID NO: 52288 - DNA, 393 bp, Ricinus communis
  Intron number 1 from transcript 30174.m008649 (locus 30174 .t000046) derived from phytozome v7.0 (chr-ID 30174; pos 1 938776 to 1939168 reverse strand)
actagagttgctgttaagaatttgttgaataacaggtacaagtttcattctcttaaaacatataattcagttagagcattaaattttggatctttttatttcaatctgaagttttgcaagaaaaaatggcattgaaattttgatttttcttttccccttttatgtgtctgtgttctttattcttgtcttccatgtggtagaatatattgtgctgtaaagaaacatgctttgtgggttatgggatttcttgtcgaacttatattattttatgctaatgactaaaataacattatatagaggctctttatcttctctgtcatcagctcatgagtttttagatgacataattattcatcaggggtcaagctgagaaggaattcaaagtagaagtgg

SEQ ID NO: 52289 - DNA, 254 bp, Ricinus communis
  Intron number 1 from transcript 30147.m014026 (locus 30147 .t000297) derived from phytozome v7.0 (chr-ID 30147; pos 4 069666 to 4069919 reverse strand)
gccgattccgaggtgaaattacttcattacccttccatcaatctactctattctcactgtaaccaccacaaccacctccgcttctaactacttttctagaagaggtggaaattttgatggtttcatgtggaatgggggttgatgatggtgatttttgtgtttgtctgttttttttcttttggattcttactgttatttctcttttattcgcttgggcagaaattaacggcgttaaagaaggcttacgcggatat

SEQ ID NO: 52290 - DNA, 271 bp, Ricinus communis
  Intron number 1 from transcript 30147.m014113 (locus 30147 .t000384) derived from phytozome v7.0 (chr-ID 30147; pos 4 583381 to 4583651 reverse strand)
ttcgccttcccagaattacccttcttcttcttcaggtataattaatttcctatacattctttgttattattgttttcttaaattagagatcattgctttattatcttctattgatcaatcaaaactcgataaataagtacatagataaaattaccatcttttttgttttttgcttaacctgaatttgattgttattaaatctatggtcagcaaggacagtggaagagtactaacaagttggcaaatacttgtatcagattctctttcaaat

SEQ ID NO: 52291 - DNA, 136 bp, Ricinus communis
  Intron number 1 from transcript 30174.m008743 (locus 30174 .t000140) derived from phytozome v7.0 (chr-ID 30174; pos 2 624777 to 2624912)
gtcatctccgaaccctagttccttggaagcaagaggtgattaattaactgattttgttttttatttttcttttcataattttgagttattaattatatcttttactgaattttatttgattaattttaggttagag

SEQ ID NO: 52292 - DNA, 600 bp, Ricinus communis
  Intron number 1 from transcript 30170.m014170 (locus 30170 .t000582) derived from phytozome v7.0 (chr-ID 30170; pos 3 332978 to 3333577)
gagtgtgatttcagatgcttgtgtttttctgaagattgttcacattttttgcttgtgtgtttaattatttcgtgtatggagtgatttattaggaattatcttggacctgtttatggaatcaggaaagtatagcggtttcaattgtcgttttatgacatgttgtgtgattttttgctttctagaaaacatataactttaagctgaatctgtattttttgctgattatatgaggaggcattaactgttgttggtattgattactatcattgttgttgttattttttattacagaggaagatttttgagtttcattgtctgtgtgctttgagattacaaagttataaacaagcatttgataatatccttgaacactattttctgcattttacaatttgctaatctattatgctttggatctaatagtgtcattatccttgtttcagctgggtgagtttttgagagtcaggcatacaagatgattggatcatttcttacaagaggacttgtgtatgataatgttatcctgattcttcctctcatttgcatttaagagaactatattttttgtcaaaattgaacatatgtttttattttggcagg

SEQ ID NO: 52293 - DNA, 739 bp, Ricinus communis
  Intron number 1 from transcript 55680.m000015 (locus 55680 .t000002) derived from phytozome v7.0 (chr-ID 55680; pos 4 368 to 5106)
ttcagagcctgagagaagaactcggtgagcagcatgtatggtatgggtacctcctccgtgacttattcccttattgtttatttcttatttctttctctccctccacacagttgttattttcctttgtctttctcgacagggtgcaaaatgtaatgcaagagaaggataggacgtgaaagatttagttgcatttgcacaggaaaacctcaaatacactgatacatgtgcatttaacctggatggttcttcacttcatttccagctactctgtgctttctaattgtgttgtcatatacagcatttccattcaccaatgaggatagcctataaaattaatctaactttcaaatgatattttttcctttttgaaataatgatttaatctggttatccgaccagtcttagtttggttgttactctctctgctcatgttgagattgatgcagatcaataatgtaggatcaaatgcatacacagcttgaagcctttggcagaagctttagatgaagatggtatgtaagcattaataagttttcttttctctgttttgctgtttgactttctttcttgcattaattcgaaattatttattctttgcattctaatgcagtgaagttgtcactgcaacaaatacccagaaattagtgtgtatagaatagggtttagtgacatgttgtcgagcggtaaaagggttttctttgttgtcaagtggcatttcctggcctatttctcgtgcaca

SEQ ID NO: 52294 - DNA, 475 bp, Ricinus communis
  Intron number 2 from transcript 30178.m000856 (locus 30178 .t000018) derived from phytozome v7.0 (chr-ID 30178; pos 1 37275 to 137749)
agcgtatcaatctgattaacttttcttcttcaatatttcctagtctattactccttacattaggtagaaagttcattggctgaagtgtgcttgttgtttgattgttattcttacagcttatctgaatttatctgtctgtttattccatttttacctttttaacaaggcctatttcattgttcaaaaatcatccaagatcaaagataacttattcaactgaacaatgaatatccatcaatcataggcaaccatttcattttaatcagaaaggcattggatttatgttttctaccaaattatgatttcccataatgattcttccatctgttggttgtagcttatttttatttatttattttaaaagacttagctctaatttctcttaccaaatgggttttgttttgataaatcttgatcaatttaaaatgattcctttcaatgtattatgcaggtcctttcaattttgaagcagcaa

SEQ ID NO: 52295 - DNA, 696 bp, Ricinus communis
  Intron number 2 from transcript 30208.m001102 (locus 30208 .t000005) derived from phytozome v7.0 (chr-ID 30208; pos 1 05005 to 105700 reverse strand)
gtctcgaccccaaaaacaaaaggtgcattttttatttcatatgcatgttttttttttaaaagtgttgttggaattttttggtttctggttcaaatttccttgttttcttttcccatttgtggctcacgcccttactctttttgtcattttcattcagttactctagccttatgctcaaattactagctaacagtagtatcttttgaagcaaatcaatgtacgttttatgcgtttccatatgagctggacaaaaggcttgcatgccttgtattcagccaaaatatgttaactaggaatccaggatcgttcagattttctccccttaccgtaataaccattcttgaaggttacagtatcgtgttttatctttaccttaggcccatagctatgacatttggtttcctgttaaacattgttcacaataaatcttttatatggttgaatcatgttccagacaatgttaaacatgatatttgcagtttttttggcccaggtttgaagaagcaggtgtacaagtaacttttttccatttctataaaagttccttcaacaatgaaaggtgatatttgttattttgaagcattatccatattcttatatcatgtgttttttcccattttactttcaatttcttgatactgttacttatgattttgatacacaagactgatatggtttactgactcttcaaagaga

SEQ ID NO: 52296 - DNA, 645 bp, Ricinus communis
  Intron number 1 from transcript 30147.m014002 (locus 30147 .t000273) derived from phytozome v7.0 (chr-ID 30147; pos 3 909191 to 3909835 reverse strand)
cctgaggagaagaggaggaggtttaatttgaaaaagtgagtttttttattcaaaaaaattattatatcttggttcttcattttgtttggctagactggattgtatgtgaattgggttttcttcaattattaaacttgattaggattataggagttgagtggaaagttgctgataactgtgttgtacccatgatgagaatgattgaaatttgatgagacaaaagtgaagaatacgaagaaaaagaaaaaagctgaattcgaatgcatttgatttattgagaattgctgatgatatccatgcatgtcagacttccttaagaatgttattttgttgacggttctgttaaatggggcatcaggatttttccgggaaaatagtgcttgtcaatgtggttgtagatttcatgatggtatatttactacattacattatatttgaagtgtgatttctttgtggaagatgaatacctttgccatgatagttgttagcaaatgacacgccacattttctttttcctgatagattcttcttatgatttactttcctttttgaccataatgagtttcttctcattgttatgctattctctttttgggcctaatgtgttcgttaatgatctctagtgtggttcaggaggtaattaag

SEQ ID NO: 52297 - DNA, 905 bp, Ricinus communis
  Intron number 1 from transcript 30148.m001462 (locus 30148 .t000061) derived from phytozome v7.0 (chr-ID 30148; pos 3 68269 to 369173 reverse strand)
ctgctgtgctaaactcccctttgttgcttattcaggtacttaattattcacttcttctcatttagctagattttcttatttctctctcttcctttctcgatcagactctagccatatcaaaaattttgaattacaccatatgccatcaattgcatgtttattttattatgacagtatttatcatgtgtaacatttacattaattgaattatatattaccattagctagcatgattaaaatataatcaatataaatactataccaactaaatttttttatatttcaatatataattaattttatatataaacgacgtaacaaaggactaaaaatatcaatataagacacagctctaaactaattacttcaattaaatatattataaaagatgaaaaataatataatatatattctattttaatattaaataattaatatataattatttaaaattaatatattatttattatcaatttttcaataagttcatacgtaaactaaataaaagttttcgtacattgctttcacgctcacctaattaatacacagtgaccttttatttatatgttaaaaactagtggaatagtgatgttaaatgatatcatgttccttctccactggaaacagacaataactttaaaaaaccaaataatggtcgttgtgtctgtccaaattttataataaattcaatgctatcttaaaaagcctcttttgctttagtacaagtcttatataggcatactcatcagaataactccagtcgtctttatgcttttattacataaaattgcgaaaaattaaaattctagcatttaagtagtaatattatatttgagaatcccaaataaaaataagctttaaattggcaggtgacacgcctcaattgtggtggctttattttcgc

SEQ ID NO: 52298 - DNA, 750 bp, Ricinus communis
  Intron number 2 from transcript 30193.m000701 (locus 30193 .t000002) derived from phytozome v7.0 (chr-ID 30193; pos 8 616 to 9365 reverse strand)
caaagcaagagcaggcgataggacattgcttacaggtaatttggttattaatattcaaaattacttttaaatatataagattatatgacattatcttattcttatttatagatatttttggaaaaataatctctattgaaggcattgaagaaacaaatatcacaggcaaaatcgtgaaaaggcgtcggatccagataaaaaatttaacgtaaatacttttaatataaatttctttatttatttactaacatgctacatttaatctattacttattgactcataaattttacagcaatgaaaaattagatattactctttgggataagtgagcaatcaacttttctgaatatgaagttcttgcaaaagaatcaaacgatcatgtggttgttgctttcttaccgatgataataaagaaatttaatgatgaacttttttaatatttttacagttattatattattattttacatctccactaaccgatcacaaattgatttatatatacagtgcagatataatttcggtcaatagttcttctgccataaatttttttattaattttgacattcatgaagttaatgatttcaaaataaggtgagtgcaaatttgttatacgttatcgattttgaataaatggtaatattcttctcatacaaactggttgcattggatgaaaagattataaaacaaggtttcttattttcggacatacaggtaccgagcttattggattaccggcagcaaatctt

SEQ ID NO: 52299 - DNA, 702 bp, Ricinus communis
  Intron number 2 from transcript 30157.m000794 (locus 30157 .t000003) derived from phytozome v7.0 (chr-ID 30157; pos 3 7695 to 38396 reverse strand)
acgagtcgaccaagagaaagacagaacgaagcaaggtcagtaatatacggttgaaagtagtgatgcagtaacgttgccggttatccaaatctgtttaaaatatatatatttgaatttgtttcaaactcatttaaattttttttttattatctgaatccatctcaaatctaaataataatatttatatactagttgaaccgataaaaactcatttaatatttataattcttaaataaattttatgaatattcaaatgggcaaggggtaccctgcgcgttaaacactaaattacataaatattctaataattaaaagaatatccatttacaaatcaatttattacaaaccaatttataataattaattccaaaatatattagtaaaattaataaaaattataaacttcaaattctaaaccatgttttaaataaaaatttaaaattttaattttttcttattttatttcatacacataatatggatatatatatatatatatatatatatatatatattatttaaatggatattctgatatcttatacccatatcgtttaaataatcgggtttagacaatagatatccgaagattcaaattcgaatctgaatcaaatattaaaatttaattttaacttcattttaaatatataagtatttgtcttatcagagagttagatagaatcggatttccaaaaatacaag

SEQ ID NO: 52300 - DNA, 769 bp, Ricinus communis
  Intron number 1 from transcript 34425.m000015 (locus 34425 .t000001) derived from phytozome v7.0 (chr-ID 34425; pos 2 54 to 1022 reverse strand)
gagttgaccaaaataccctctttgatctcattctggtttgtttttaatctctctctctccctctctgttttctgttttaccaatttttcttcctttgttttaatatcacacacacacacacacacacacacacacacacacacacacacacacacacatattaattgttttctttgattatttttctgtgtgacgaattatgtattgctaagacatggaattgttgatgatgatatatgataagaaagtacgggactggtggttctgttgtcgagtttggatggattactcgattagttttgtgttctctttgttgtttatttgtgtcggtagattgtgttttagcattagttaatgttgtattattgaaactgtgcagattattatagttactaacccactaaaaaaggttatataatgggtattataagttgctctgatagattatttaggattaagatggtttactttgatattttatttttccaattgtggttggtggttaggtttggcatcttaacaattagcgaatgatatcttatagactaattatggtgtagtgaatttctattttgattgtatctttctctgttattcctttccttgtgttaataacgaaaattaaacgtccttacaagattataaggatatgccaattcgtcttctgaatatgttttgactgattggtgtttggaattttgtaaaactgatttcctttgcaattgttatcatgtaaatgatgatgtttggcaggctgccaactatctaa

SEQ ID NO: 52301 - DNA, 676 bp, Ricinus communis
  Intron number 4 from transcript 30174.m008810 (locus 30174 .t000207) derived from phytozome v7.0 (chr-ID 30174; pos 4 08278 to 408953 reverse strand)
actacaataccttgcgtttatttgtcagtgaagaggtgagctaaattttctttctggtaattagtcgacaacgagcacaagtacacaataacgtgtggctattagttggcactgccactaaatgtagttcgccaaagtggatagctttgttttatggtacaaggagaaaaccctatgggtgtttaaataatactattagcttcttaaatgttggtcacagtatgtgtctcatatatgtccattaatcttctcaaattacaatatcaagtactttgttatacattgatgttcaaactagaagctggagaaaagaaacgggtaaaatgaaattcactgatcatatcctaggttatatttatatccatgaccagcaactaaagaaaaactcttccaagttccatatctaactgttaatctaaattggctatgtacaattgaaagtggatcatatttgaggactgacattatcagttgctttatggtgagagcccactcacagtcataggagacaaaatgaggctatggaatgtacttatagatatctttcaattcacagttgccgcgggcatcattgtatgcatatttgcatacttgtcatgctaaatactaagttaggtttttaatgttttgaactttagattctctttctgtttgcaggccttactttccaaagcag

SEQ ID NO: 52302 - DNA, 812 bp, Ricinus communis
  Intron number 2 from transcript 30193.m000707 (locus 30193 .t000008) derived from phytozome v7.0 (chr-ID 30193; pos 3 54681 to 355492)
aagagatctttgggccattgcttcctattatcactgtaagtataatgataaggtttaacatattgaccttaattcagtatcttaaattacatgcagtatttatatatattttgagattgctttttatttcagtctattgcactgacaagcatataataattataaaatgtaaaatatatattatatgtataaatatgaaacattattcaattgctgattataaaacactcagttagtcagacatttttttaaattttaatagttggggaacaaaatatataatactttaagtacaattagtacaagttttgcctattccaagaatgtatccctttctaacactaaaggtggtagatgactggttccaagttaatgattcaatatcaatagagtctaaaacagtgtagctactcaatttgaataaggtttcaattttgaactttattttcatcgacttgtgtagaaataaacaaacaaaaaatataatactcatattatattactattgatgtatttacttatagcaggcaaaaatcatatacaaagatctttcattgttgaaacaaaaaaagtttatatgtatgttttaaaaattaaaaattaaaaattcttagttccttccatttctctttattttgagaaaaatataagctaaattctattaattccctttcttttctgtttcttatttaaacatccaaaccaaagaaaaaaaaaagaaatttataaatttacgttcttttccctgctttgatatatacttgtgcaatgtgacaggttgacaatttgaaagacagttttgaggtgataaa

SEQ ID NO: 52303 - DNA, 590 bp, Ricinus communis
  Intron number 1 from transcript 30190.m011043 (locus 30190 .t000279) derived from phytozome v7.0 (chr-ID 30190; pos 1 448335 to 1448924)
tccttatagccctacttgtcatcatcgttttccaggtcagtccctaaaacccttctcttaccttttctctctttttcttaaaaaaaaaaaactttggcttcgagagttctctatttgttaattaatttcatggaattgtaaactatagaacttaataagtctttctttttgtgtgttatctgtcgtgtcaatttgttggttatttgcttttgacttttgaagctcaattttttgtgattcaattgatgaagaattgcacctattgcaatctatttggcatgaaaagttgatgcctcggctatgccctattgttttctagcttttattgtttattgaattcatattcgctacttaagcaattaggtctgaaatttatagcttcagaggcaaaattgcaaacattaactatagtaaagcttttctcctctatataattgcaaatactaacattgtgtgtgttagaatttcatctaaggattaagtttttggtcttagcttatgttttgcctgtgaaatttgatgtgtatgatcttaggtaatacgagtttaacatttttgaggaaattttattttttctgtttttgcagctt

SEQ ID NO: 52304 - DNA, 582 bp, Ricinus communis
  Intron number 2 from transcript 30155.m001596 (locus 30155 .t000002) derived from phytozome v7.0 (chr-ID 30155; pos 3 2377 to 32958 reverse strand)
ctgcaaagtccggcggtggcaagcagaagaagaaggtaaaatgacaataactttgtcccttttctgggtgttaatattttagtaattattgttttctgtagcaaagataggaatagtgtatctgtatttgaagttgatgtgataaattttggtggataagggaagtgaaaatgaactcattttgagtcatggtgtacttttcagatgattggtaccaatgttaactgtctaacagttgctaaagtagttctctgtgatcatattttagtgggttgttgaaatcaattgtgttttatcattatgatatctattctactctgggtttgatcagcactgcagatatagtaatatttgatttatgtgatgatctcagataggaccatattcatctatcaaacaacacttcgaattggctcctaaaagcttatcaaattctttctcgagtcaaattaattgttatgtttttctagtagaggcactgaagcatgttgtatgtttgtagttatgatgaatgctctattttcttccatggtttaggttatcctatgatttttcattattttgagggattattgtgcagaa

SEQ ID NO: 52305 - DNA, 709 bp, Ricinus communis
  Intron number 2 from transcript 30162.m001262 (locus 30162 .t000007) derived from phytozome v7.0 (chr-ID 30162; pos 6 61982 to 662690)
ttcaacttataaagaaggtacataatattcttgtctttttgtatcaccatatacaagtttgtattcaaggcatcgtttagtttctattcttctcacttttgatatgaaatcttagtttgtgagaatttttcaattgctaatacaaaataatcacgagttcagtaaatgtttgtgatcttatgtagcgattgccttacctaggaaatgtgattgtgcttttcataattctatctcacttgaatggaattttaaaatttgaaatagcaatatctctgtgtaagaaattcgtctcacttagtgtaacacgatatagctgattgcacaacctcaggcttagcttggtgtatatgcgcatatctcaagttggtcaaagacccagttttggctcagccatgttttagactgaaaagaaaattagatgattgctgtttggctttcgtatttgacttctgcaagctcaagattagttatatttctcattcaaactatgatgtggtcattgttgagtgctctgaatggtcctaaccccctagtttccctgaaattttaatgtatgattttcctaatgactatggaggtcagcaggcagttcatgttgaagaattttgacttctcaagaattctgtttgactgttcaacttgagttatagcttgttatgctgttacaagtgcttcatatactacttctcaatgcctgatgtaggagttc

SEQ ID NO: 52306 - DNA, 510 bp, Ricinus communis
  Intron number 1 from transcript 30147.m013989 (locus 30147 .t000260) derived from phytozome v7.0 (chr-ID 30147; pos 3 832509 to 3833018)
tgcttatttgctacactagtaacaagtttcctactgtatgttattttttccccttttcccatcaaatgaccaatcttttagttatggtttattttagagttctttttttttttttttctttcttttctggcgatttcctatgtggtttattgtctgcttgcttctgggttttgttctttttgacagtttttcatgttttctagagcactaaattttctttctttagattcaaaattttggttttgcttatctcctgataaaagctgtcttttttgggtttatttaagatgatcatccgggtttggctttttattttgtttttttgtttttattttagagttgattctcttatctatttatctaaatgcggttgctgctgttttgttgtttcatgcaaatagaccaagtgataaataaacggttaatcgttgattttcttttgaactgtaatttttttcctttttatgttcatcaggattatatacccactgtgtttgacaacttcagtgc

SEQ ID NO: 52307 - DNA, 725 bp, Ricinus communis
  Intron number 2 from transcript 30150.m000487 (locus 30150 .t000020) derived from phytozome v7.0 (chr-ID 30150; pos 3 25209 to 325933 reverse strand)
gaaggtttgttaaaaggtaaatattttcatgcttctaatgttatgaatgctcgtgtccatgggaactcctcttgggcttagagaagccttatagtggctagatccattctgtcttagagggtgtcggtggcaaatcaagaacgagtaaatctgtaaatgcatggaatgatgctagattacccatagagtttccttttaaggctaaaatgagaaacgactagaaaggtgatgaaatttttagtagctgacttgattgatgacatgttaaaggagtggaaagtttctaaggatcatggagcctttgttaaagaacatgccgattgtattttgaaaattcctttaagttgcactagtagaaacgactccttagtttagcattatcacaagtcaaagttgctacactgtgagttcaggttaccatgtttttatgagctatcttaagaatatgggtaataggagaggatcagagaaaaataatcaggtggatatgtaccagcgaaagtggaaacatctttggaaattatccatacctaacaaactcaaagcttttgtattatatggagattgttgctaaataatcttctcattggagaagtcattaaaaagaggattgggaaaggtaatgtgtgtttcaagtgtggggaagaagagtctacataacatgtgtttctggactgcctttttgctcagagaatctggagaaggtcacctctaagtttggtaac

SEQ ID NO: 52308 - DNA, 711 bp, Ricinus communis
  Intron number 2 from transcript 30190.m010843 (locus 30190 .t000079) derived from phytozome v7.0 (chr-ID 30190; pos 3 676219 to 3676929)
gatttcaggagcccttgcaattcctgctgcaggttttgattattctgctatcattttgattttcgtgcgcttcgttttgtggttgagatcacaatttaaaagcaatgtgcatatgtcattcattttgtgcatgtctggaatataaagagaggaagagggagaggaaaacttggttttatttgtaaaaaagctgagcagagatacaaacaactgattattttcaaaacggaaagtgaacaggagccttgtccctttgctctagtttttggcattgtggcttcctggacctcttctacaagaatcacactatgcttaagcatggcgatggagaagattttgttggcataggatggattctggacttgataacagttctcccatacattgtccctgaacccaaaaaattttggtgatcataatgcttctctggaatgagagaagcatgcattattccttgtgagatttatccatatggtattgattctataaacttatatttgtttataatgttgctgtaagcaacatagagatatatgatccttgtttgatttaaaactaaactgataacagaataggaaggatagactgtgtgtccatcaattcgtttggttctatgagatcatttctgattacttttttctcttcttctgccttttttttaaatttaaataaagtgtttctaattttgtattctttgtttttgtagtttac

SEQ ID NO: 52309 - DNA, 534 bp, Ricinus communis
  Intron number 2 from transcript 30174.m009119 (locus 30174 .t000516) derived from phytozome v7.0 (chr-ID 30174; pos 3 140331 to 3140864)
agctcttgaaatttatcctcctgttaaacttcgaggctggtcttttcatattcctctttttaattctcttatttactttggatgcataatattgttattattactgttgctgtttgaatttcatggcttaggttatttcaaggacaaagaaaacaagaattaactcttctaagtaagagtgatcaataattgtttcatactatcaattagtgcacctgaattattgattaattgcgatgtgagaggattgattttggtttatcagttgagatactaaggtagttgtctatatgtaaaatcaaaagtgctctatggtgtttctgttgagtgaatcaatgtggttaatgggtcaacatttagtcctgaggtctggtctaacaccttgtagctttcctttgctgtttctggatggtttggttcattcttatttctctagatttagttttctagaattattagatattgtttaaggtctgcttgatctgtctcttttgaaattcagataatcactcaacaaattctatccatgcaggc

SEQ ID NO: 52310 - DNA, 282 bp, Ricinus communis
  Intron number 1 from transcript 30170.m014369 (locus 30170 .t000781) derived from phytozome v7.0 (chr-ID 30170; pos 4 193431 to 4193712 reverse strand)
tcgatctgcctctctctattcttctgattcctcaggtttgttgttttgtaattgtttttctttagtttttttttttttttctgagtatcttttgctttaattttatgaatgcatattgaacttttcttctaaatgtgaaataatgtgttgaattgcaggtagcgggaagggaagatggaacttgaatggtaatttgaattttaattagaatgtttttttgttaaagttcaattctttcttctagtttgtgtaaaagaaaatcattttgtggcggtgcaggta

SEQ ID NO: 52311 - DNA, 439 bp, Ricinus communis
  Intron number 1 from transcript 30180.m001042 (locus 30180 .t000032) derived from phytozome v7.0 (chr-ID 30180; pos 6 76260 to 676698 reverse strand)
acattgtaagccacatggttaattttttttcaaagaatgatatatcattctaatatgttgcatcacaattacacaaattcaataatataataatatgtgttttgatttttattatttttcaaaaataaaaatactaaaattaacagcaaaatcaaactttttaaaaaaataatactctcacagttgagaaaccaccgttttaatttccacccagttccactagagaactctcggccacatacatttcttctttgggattttttttcaatattttcatttggtgttttcaattttagttttaaaatcagttctttttttttttttcttttgttgttgatatgttttttaaaattatttttttggttcacttttacctatttttaatactatttactcaaagatagacccatcatttctgattcttggagaagtggagaga

SEQ ID NO: 52312 - DNA, 649 bp, Ricinus communis
  Intron number 1 from transcript 30148.m001473 (locus 30148 .t000072) derived from phytozome v7.0 (chr-ID 30148; pos 4 33076 to 433724)
tggccagcatcgtattccttatattgcctttggcggtgagttcatttgtcaatctcaaagcctctctctctctttatccgctccttgtttaataaattcattattgtgactcttcttttctttttctttaataattgtatcttataacatatgtatgtatctttctaaactttttgtgaacaaatctgagtctccacagcttttattcacatctagaattttgcgttgcattttcttttttcttttcaagatcatactagtcggtgctgcctaaattctggcggctaattcctcttcttttatatgaattctgtaagttagtatagtgttttaaacagtcatgtgcaattttccaatacagaatatgattatcaaatccactggacaatctaattactctttcaaatctgtattgagatgcaaccatttgattaagggagtctgcaagttgagaaataatgggtcgaaactatttgtttgtgattgatggaaatcacaagcacgccaaaaagttgacagatttggttatatctgtgatattttgcgttctaattttcgcatttttatctaaatttctactcttaactgaacttatttctcttttgttgtttcagctttcttgcaagcagtctcgtggctagctcttgca

SEQ ID NO: 52313 - DNA, 439 bp, Ricinus communis
  Intron number 1 from transcript 30150.m000473 (locus 30150 .t000006) derived from phytozome v7.0 (chr-ID 30150; pos 1 53703 to 154141 reverse strand)
gtgaaattatcagcgccgattctgtccaggtccaaccccacttcatttctcttcttcctttttgtcttttttcttttaattttcgacttggatgattttgaaattcactgtatttattcattaactaagaaaacggaaagaaagggaggattctgaatgttaaataatttgccagtggtcaagtgtcttgccttttgggaatttcacatcctttccagggaaaaccataatggaggtgttaaaaattgtactgtaataagagaattttgattaatcttgggacattgatattagatggtgaacagaaatttgttttttttttttaccaggacttggaaaaggaatcagtgtgatggtttctttttaaatgtttctacatgctagtgaagtctctccttctgtatctctctctatcaattgcaggtttatcgtggtcttg

SEQ ID NO: 52314 - DNA, 418 bp, Ricinus communis
  Intron number 2 from transcript 30189.m001635 (locus 30189 .t000003) derived from phytozome v7.0 (chr-ID 30189; pos 5 2537 to 52954 reverse strand)
gttgcgaaatacattgaggacaattgtgaaatcaggtttatgtttatttgatgccagattaatagctgtaaagatatggctattagtattatggaagatctagtctttgtattgttacagttatgtccatcaactttggtagaataataaaaccgatgtagtggttaacttgtaaagttacaagtcgcaatgattactgaaaaacatctttctcgttcaaattctgccatttgaacttgcataatgatcttatctttctaaaagttcagaacatgccttgactaccttttcttttctttttttttttctctttcttttgacccaaggccaaggcagagagggggttggcatgagtgtaactttgtttctttaaccatcttgattttatgtttgaagtagtttgttttcttgaccaggc

SEQ ID NO: 52315 - DNA, 504 bp, Ricinus communis
  Intron number 1 from transcript 30190.m011142 (locus 30190 .t000378) derived from phytozome v7.0 (chr-ID 30190; pos 2 158296 to 2158799 reverse strand)
gttctcaagtacgcacctatctgtcccttcatctcttcgattcgattaagctttgttttatagattttagattgattgctgaatttgttgtgctcatttgtgcattagaagtaattgtcactgttgtttgtttaatttctggtccttatcgtgatgattttgactatttattaaaaaatgaatcaaactttactctctattggttagggtttagctcatcaaatatcaaactttatgttttctttttgaaattaatttttcataaaataatctggtaggttgcgttgttagttttgttgattattattactgctatttctttttaggaaaaaaaatccacttttttagtatggtttccttgattttgttggaaaggcttcattattgttacttcttctttttttttttttttgtagtttttatgttaaggtttcaatgtctaatgtactatgtggctatgtcctattaggactgagctttgccgattcagcggtgctaagattt

SEQ ID NO: 52316 - DNA, 626 bp, Ricinus communis
  Intron number 2 from transcript 30170.m013763 (locus 30170 .t000175) derived from phytozome v7.0 (chr-ID 30170; pos 9 10407 to 911032 reverse strand)
ttctttctcaacttggaacttgtaattcaattttatttcgaaagatatgtcagcttgcagatatgcattttgtgtatgtgaatttaggcaacattatatgtatttaatgggaagaaatgcatgcttaatcagttaatgtgcccgtggcatttgctgcaaaatcactacttcccgagattgtttacacaagtgctagtgctactaatcccatatttgagtatgggaaaaagaagttggcacattgttaaatttcactctctgttaaaacacatttaccttttggtcattttttatatagggatagtaacatgatgagcctttgaaattgtgcagtgcaagtggattcatttctggtgatgaattgagtttccaacttctggtgttatttttatcttcctaaccagcttcttagaattttttctcttggaatgcttggccctgaaatattgttgtaacgccttgactttccttattaaaataaaggcaacgagtttacaaatttaaattggcttttgcttttgtttcttgactgaaaaatgagtatgatctagtaaaatttattatctggcttgcctacttatgatccaaatagtggcaaattctttcaggtattttctttgacactt

SEQ ID NO: 52317 - DNA, 352 bp, Ricinus communis
  Intron number 1 from transcript 30169.m006617 (locus 30169 .t000394) derived from phytozome v7.0 (chr-ID 30169; pos 2 076342 to 2076693 reverse strand)
ccagaagatagtaaagctgaagaagaacttcacaagtaattttttttaaagcttattaagcctcaaaacggtgattaagttttaattagtttttgattatcaaaacaaggtttggtttctgagaaaatgaaagagaaaaagaaaagaagaggaaatgaactaatctctgctttttttttttgattgaactcagataatttattggtcttgtgttgttttgcatgttcttaggaaccgaacaagaaattatttgcttgtattgtatgtttcgtatggctgaatattgcttttcttttttactttctaaaactgtgcagggacatacaattttcatatacaagagcatttctat

SEQ ID NO: 52318 - DNA, 492 bp, Ricinus communis
  Intron number 3 from transcript 30170.m013807 (locus 30170 .t000219) derived from phytozome v7.0 (chr-ID 30170; pos 4 487918 to 4488409 reverse strand)
ccacaaccctaacagtactttacttggattcttaggtacataacaacagtatctctttcagtttttacaacatattcttggtgcacatacactcatcttttgaagaaagctttgatttttcttttacgtttgttttattctctttgatttttttattcttttttatttttacaacatattcttggtgcacatacactcagtttttacaaaatttgagacctataagaactgctcatggcatgtaaaagggtatattttaggtgctaggctaggtgtagtactttcatttacttcaagttgaaggtccttgattactattcttcttgaactcagggaacacatatgtagcatatatctatttttaatcatcataatgatcatcattagcatctgggtgaaacagtgacgcctgttaggttttctgattggtgttcgcattgattttgtgtgtcaacaggtggctctgaaggattatttgcccagaaaactctt

SEQ ID NO: 52319 - DNA, 433 bp, Ricinus communis
  Intron number 1 from transcript 30170.m013807 (locus 30170 .t000219) derived from phytozome v7.0 (chr-ID 30170; pos 4 488788 to 4489220 reverse strand)
ctctttaccagcctgagctccctccctgccttcaggttttttctcactcactttgatttcctttcttctattctattcaccaactccatgtttttattcatagggatttctattctatcaaactggttttctcttttactttttttttttttttctcatttcttgatgttgagattatatcgtccgtatatttcggttaatggatcatctccggcgcacttggaccattgcttaggtcctgctgctgcttagatctacttacttgcagattccgttgattgctttgtacagtagatcttgctaatactgttctggattatttttgtttgttgcttctgaaccatttgataagttttgatgaatgctaaattttgagattgttaattgaacaatggcattgtgcagggaactaccgtgagggtagaacttggtg

SEQ ID NO: 52320 - DNA, 546 bp, Ricinus communis
  Intron number 2 from transcript 30190.m010953 (locus 30190 .t000189) derived from phytozome v7.0 (chr-ID 30190; pos 8 88682 to 889227)
ggtatgtttgatgatttcatttttccgcacgtgccaaaattgaaaaattcttttccttgtccatatttttgaatattccctcatgttggtaaatgcaagattgtaatgttttttttgttaattgtgaaggagcatatgtttgcttctagcagcaattttcttaatagttaggcagtacagagaagtgaaaaatagaaagtttgggatggtgtccttataaagtttgatttagacaatttgtaccaaaattagaaataaagttttatttctgttaaggccaagattatctgttaggttacagtaggagttaaactttgtagaaaggaagtgagatgtgattctagcgaaaattatttatggtcgcaaaacatgtccctgacttgctcttgatgttaatgttgtcttgttatgtgcgtattaagatgcaacaaaatgtctgcctagtccatcaatgatgctatgtttctttctcctcagtggacgggttatattcttttccatttgcttacaggcactttgttccaaatctaaccattggtgctccag

SEQ ID NO: 52321 - DNA, 631 bp, Ricinus communis
  Intron number 1 from transcript 30204.m001736 (locus 30204 .t000005) derived from phytozome v7.0 (chr-ID 30204; pos 2 7539 to 28169 reverse strand)
gactcttctcgacgccgtcaattcaccggcaaaaggtttttttttttttcgattctcctcgaaatttctttatttttactgtgatttcgcttcatctggattctcattgttcacattgttaggtgattctactacagataaaaaatgctaattaagtttctaattttacctgaatattattagctaacgcatgttttacattctaatttatcctcagttttatttttctcattgttaggttctactgaattggtgaaacccttttgtaattcttatttgcgattttgaatttgttaagaggcttgaagagtagaagaacacattgggcttgcttggaataaaccctatgcaagaaatgaatttttgcaaaatcatgtcaatttattatatgatttcatttctttcaaaatgccctttttttattagttgaaataattgaattcttgcttgcttagacttatgtgaacaaggagaatcagagtgtggcttttttgtttcctatatatcatggcacccctctagcataactgccctctagattgcttgtttgatactgtttatgctcttgcttttattgtggttgaaactcaattaccaagatgattctgtatgttttgcaggcagaggcaag

SEQ ID NO: 52322 - DNA, 880 bp, Ricinus communis
  Intron number 4 from transcript 30147.m014184 (locus 30147 .t000455) derived from phytozome v7.0 (chr-ID 30147; pos 8 33670 to 834549 reverse strand)
caggtatctttcgtttctggaatctgactcttattatttcacctgaagtcctagaccttttgatttcaaatattggaaataaacttgctgatgattgaaaacaggaagtccataactataattcttggaaggatttctcttttgtttttgagaacaaatcatactagcctcaatttttatggactgacagtgtgtggttgttgccatccagttgtaatggcacatgagatgctaagcagccaaactgaaacttatggttgctatggaaatagagattccatcttcaaaatgctacttgagaaatgagttatagttcctttctgcacatacaaagttcagaatttatccaaatataatatgaaatagtagacaacagtaatcttagatgtctgttatattggccgtccatagctgttttctatgaaatccaaacaaaaagttcataaacattatttagagtcatttgtagatactttattagtcactctaagaacataacacttgattgcatatgcttgtgatatggctgtagcttttttgccttacaacttagactttacaaatttcaagtcactagcatgaaataggcatcaaactaactcctaagtaatggtttcagcagtaactagtttgtgatttgcttaaaacatcaatacacttgaagtgttattttgctctatgggattgatcttcagatttatgagctactggatcttcaattttcattatttctgaactaacaaagaatccagtgaccaatggcaaacttgctattgatggtttcctagtctcgctctttgattttagtttgactgtaagtattaaatatttattttgtaatgtagctcaaaggcttcagctggctagtgtatacaaaggg

SEQ ID NO: 52323 - DNA, 677 bp, Ricinus communis
  Intron number 2 from transcript 30226.m002009 (locus 30226 .t000033) derived from phytozome v7.0 (chr-ID 30226; pos 1 042408 to 1043084 reverse strand)
agaaggtaagctgagtttgaacgaaggtttctttatgtttcagaaatgtaattatttgattcatttcttatcccaatttatttgagaatttggggatttgcaatgtgaaaccaggattgtgtttgttaagataaaactaagaattggaaaacatgacaccacttggtctgaggagtgggtgagaggcatatatagtgcaaatatgttaagtactaactgttacgaatatctctgttattttaagatacaagctggttatctgcaaaactgtaatctataagtcttagaagtggaagaagattcttcatcaagtccttaataggaaacatatattatgagacatttagacagtcgcaccaaaagaataaataaaatcttccactggactttgaaagataacaatttcttgtaccagcaaaatggattcttttgttttgtcacacaaaatgtctgactttggttgggatgctaaacatatagaatctatagatcatttgttaagattttgagcaaggaaagcttgttctgttaaaataatcaattttaagatttatggtgtctgcttgatatgttcatgatcattatcagcttgggtttattctggggttgcacatttaactaaaaatgatgatttctttccaggcagtgggactacttgattgaacacccagactggc

SEQ ID NO: 52324 - DNA, 194 bp, Ricinus communis
  Intron number 2 from transcript 30174.m009164 (locus 30174 .t000561) derived from phytozome v7.0 (chr-ID 30174; pos 3 354220 to 3354413)
attccaacaatcttctcatttcttcttgggattctgtatgtattcaagttcttcttctttaatattattattattcacaattcctcttttcaagtatggttttatatcagacttgtttgtttgtttctttaatatttttatatgtatgatgattaattttctttttttgattgtatagagtcttagattgtacg

SEQ ID NO: 52325 - DNA, 323 bp, Ricinus communis
  Intron number 2 from transcript 30147.m014429 (locus 30147 .t000700) derived from phytozome v7.0 (chr-ID 30147; pos 1 907943 to 1908265)
tggaatccttgcagagcagtttccagaagtgcgtggtaattctttacttctcctttatcttttcttaaaaataaaaaattgtaatgtgtgaatttttctctgtttctaaactgtttttccttttatttattaatcatttttggttgttgtttgatatactagagactaactcaatttagcatatttctggatagtaattttgatcacgtttgatgcgctatttatgcattctcctcttctggattctatcatgtgtcaatatgcgcatacatatgtgttaaaagtgtttgatttgctgctttctgcaattatgcagcgtgcaa

SEQ ID NO: 52326 - DNA, 302 bp, Ricinus communis
  Intron number 4 from transcript 30147.m014368 (locus 30147 .t000639) derived from phytozome v7.0 (chr-ID 30147; pos 1 558191 to 1558492)
ctgcacaggtatgccatatgtgcaagattgcatttttattgtgctcttgacattgtttctgttttgtaatttgattagatacaaatatgtaacttagattttaaagtttcaataaattgtgatggcaatttggaaagcatctaaaattattaggtacaattatcactatactgttcaaataagcatctgtctcttaccagcgtagcttttctttacttcattttccaagttttctattcattcattcattctttttctttcttcttttgaaattttgtgaacctaatttcaggcctggaacc

SEQ ID NO: 52327 - DNA, 676 bp, Ricinus communis
  Intron number 1 from transcript 30190.m011336 (locus 30190 .t000572) derived from phytozome v7.0 (chr-ID 30190; pos 2 83043 to 283718 reverse strand)
ttactggggtaacaatgcctgctaatcatgccaagctagctgtgtgccttgctctcataggagaggggaatagaaaaaggggaatagaattagagttgatttagaggaaattagggaaattgggatttaatttggagatattgttgagtcagattcattaattgatgtggcatatgctgagggggcaaaacaaccggaatatacctactcagcatgccacgtcaccaccggttgtcggaaattagatatttggactaaattgatatacgtatgtttgatactaaattaattcaaattagaatttcgatatcaaattgatatatagtgccaatgattggtaccagcttggcaaattacccataaactgccgaaggggttgaaagattagatacagctacgcttcaatcaaagtgaaaagaattatacctatcaacatcaatgccagcagaaaaggtcgtcattaattaatatagcgatcatctacaaaagccacgctcatcaaatatagacggtcttctcaagcggtcatcaaggagagtttctggatctttgatgttgtttccccatatagcatattcatagtttgattatcctgttagtaatccgaacacattttacctccattatatttcttctgtgaggaattccatcaaacagactacgtgctgaacaatcc

SEQ ID NO: 52328 - DNA, 819 bp, Ricinus communis
  Intron number 1 from transcript 30190.m010770 (locus 30190 .t000006) derived from phytozome v7.0 (chr-ID 30190; pos 3 271689 to 3272507)
caatctcccaagtaattctccagcttttgcttcatttttgtaacgtcttgttttcgtttgatgaaatgtccgagagaatatagcacacggtaggagtcactaatcactgtttctaaaacatgcttttcgtggcacaattaaatttgttatcttttcttatattgggtctgattaaagtttgcatctttgaggtttttggtctactattagtattgcgatttcaggacattaatgaagtggtgtatgagcagtttccatttctggctatattcttcttcagtatatctttatgtttttattctttgaatagagaattgaagcaataggaaaccttgagacaggatcgtatggttaatatgaaatttatggggtgttgcgtgcatatatcaaattgtggaaactacaagaaggagctaacaccgagttgtacaacagtttgccaatatttgtcttatgagtagtttgctaaagtcagtaactttctttcctttgtgaactgggcctctcaggggtacaccatatctgttaaaaaaatatattgtcagttttttcttatccagcgcacatgattagtacgtggactttctttggtgttgacatactggaatatgcacttgtttaactctcaacatttaagggtttatacaaatttgttatgtttacggggttagttttagcacatggttgatcagctataaacttataatagaattactttcacctctcttattccacatttacacgtctgcgcacctccacttttgcgaaattctcacccatttttgcagtgatcacgttgtgcagaaagggtattcttct

SEQ ID NO: 52329 - DNA, 644 bp, Ricinus communis
  Intron number 1 from transcript 30162.m001292 (locus 30162 .t000037) derived from phytozome v7.0 (chr-ID 30162; pos 1 644134 to 1644777)
tcctccgccagaaccactgccttttggccctcaaggtttcattttcttcttcttcttctctttttttttttttttaaatctaatttatgatactcaattttatatttataattatatgcacgaactcaattctgttagtatattctcaaatttgcgttggtttatttaaaaatggattcctttattctgtgtgatattgaatgttaggttcaaattctgcaaataactcattttatttacaaatgaatttctaatagaattcatctgcaaataaattacgttgttttgttgtgacatcgagaactcattgaagagttattagagaggaaaatgtatttgaataacgcgaatttggtttatttatatcgaatttcaaggatttgatgaaatagaattctaaatgaattttcatttatacaaaagttataaaattcggatttgcaaatgaatttcataacaatttatgccagatacaatctaaaagttacaagaattcaattcttgcaaatgatgtattccaaacattgcctaattgatttgcatagcaacttctctttaatgtttcagtgacaagttgtaattgctcatgtttattgttacataccacaggttttcaaagatattaggaaggagtactggtataa

SEQ ID NO: 52330 - DNA, 1017 bp, Ricinus communis
  Intron number 1 from transcript 30169.m006346 (locus 30169 .t000123) derived from phytozome v7.0 (chr-ID 30169; pos 6 75390 to 676406)
ccgattcagtctacaggtatatattctttgtttcccttgctttttattttagaactggtgttttatcattttaggctttgctctagatcatttcccaagcttcacaattgtgaaatgtgctcaaggttttgcgttggtcttcctatgattcaccttatacatgtaaagtcatttactaggatattgacatttactagttcatactctattgatgttattgcacatgtgcttcagggttaatcctccttttgctgcttcaggggaatttgtgagactacaaattaatttttcatgttaactgaggatttaatcaaaatgatgcctggatccatctaaagctatttgattatagttttaatgtcgacataaactggttagatcccaagtttttcataaaaacacatgtacaaccacatacataaatgtgtttatgcagcactctcattttgtgtgtacttgaattacgtgacttgatattttgagacttcaccacttgcccattttgctcaattctcgctggaaatattaagatcagtgccctttttatgaaagatctgctagatgtgctccaatcattgctatgactagtcagcataatatctcattttccagacatgcatcttatgttttctccatcctgtcatacatattgagaaaatatgtgtgctttgtaaagcaacttgtctgtaatggtaaatgtgttatacatgcattacttgttattccatatcttagcccacttgtttcaacagccaagcaccaatccaaaatttacaatgtactttcagatagtatacttttcagtggctttactttttttggttttcttctgctggtgactgtattatgcatccctcatggtatctgttgaattcttttcttagcatttgttttggaattgattaatctgcttctatttatcatggttgggatcttctacgtgcattgaaaagggttcagtatgtggataggtgatatactttttatgttactggtatttagggcttgtgttggaca

SEQ ID NO: 52331 - DNA, 309 bp, Ricinus communis; identical to SEQ ID NO: 51949
  Intron number 1 from transcript 41488.m000014 (locus 41488 .t000001) derived from phytozome v7.0 (chr-ID 41488; pos 4 24 to 732 reverse strand)

SEQ ID NO: 52332 - DNA, 339 bp, Ricinus communis
  Intron number 1 from transcript 30226.m002050 (locus 30226 .t000074) derived from phytozome v7.0 (chr-ID 30226; pos 2 625794 to 2626132)
gacattcgagctctataacagaaaggtgaggctgttggtggtccttcataaacttttatggtatttggtcttatgaaatggttatttattctcttcctggttatgtggtccctggttgtgcttcatgcttcttgttgtggtccttttgtgtttgtactttttcttgaaaaattggggcacaagctttaaattagtaaaaatttgatgtttacatatctttgtttaatactgacatataagctttgattcattgaaaagaaatattaaacaagtattatatattttagtaatttgactaatttgttgtatgtattgtttttcttattgttttaggtacgg

SEQ ID NO: 52333 - DNA, 524 bp, Ricinus communis
  Intron number 3 from transcript 30209.m001516 (locus 30209 .t000015) derived from phytozome v7.0 (chr-ID 30209; pos 3 65177 to 365700 reverse strand)
attttaggtgattttctgtggcatgtcaatacgtcttattatttcatgaaagaagttgaatatatccttaaataacaaatttaatgagaagcatcatgtataattgatagaaataagtgaagaagcttttttcagccttactataactatttttacatttttatgaggtcattgtaatactgcacattctcattcaatattttcctaacttgctggaagctatttgtttttgacattttgttgaaaatgaaactaatagcttttaagtcttaacttctattgttgaaaggaggacagaaactgtgagacttatttgtttgttttccttttattatttattctttttcttaaaaaaaaaaaaaaaaaaaaactctagtggtgctattctaattatacacttaaaaccagcaaaccttttgtgttttattcattttcggattgagatgttacagtcaatcactgtattatccactgtttttctcgttttaaatgactccagctaatcaaatctcacagtttgacag

SEQ ID NO: 52334 - DNA, 430 bp, Ricinus communis
  Intron number 2 from transcript 30169.m006302 (locus 30169 .t000079) derived from phytozome v7.0 (chr-ID 30169; pos 3 81881 to 382310 reverse strand)
acccgaggatttgtcccctaacggatttcgaacaggttttagagcttctttttacggtcttctctagtctggaatgaaacaattaaagaccctggcaaaagaactttagagataacaataggattctctcttgttcttgagcatttatttatgtttgaagcattaatccttaaaagatagagatcaaagaacagataattatacgacaaaccatgaaatgcaatcaattaataacaaattagtcaaaatcttgaaacacggttgactaataatttttaagtgaatctagataaaattcttaattctttcgaaaaaaacatcagtttcattattcgattgtcttgtataaatactttttacctatttatcaccaacaggctgtgccaggttttgacctgaatgctattattttaattatccctttgcagtt

SEQ ID NO: 52335 - DNA, 343 bp, Ricinus communis
  Intron number 1 from transcript 30169.m006302 (locus 30169 .t000079) derived from phytozome v7.0 (chr-ID 30169; pos 3 82417 to 382759 reverse strand)
ctgccgtctcccatcttaactcccttcaaattcccgtaagattcgttctcttcttttttcattaatttcaatcaaactttgctcggacaagggtttgctcatgtgggtttattatttccatttcacttgtttcctttgactggatcaactgatttcaatttttttttttcaaatcttttggtgtgattaatatttgcttcttattttgactggtttaaccgttttatcatcaagccacgcgtataaatgattgtatctacttccatcaacttgtacttctatctcgtgcaatttattgcattccctttgctgctatatttgcagtctgtcggctttgtggggg

SEQ ID NO: 52336 - DNA, 761 bp, Ricinus communis
  Intron number 1 from transcript 30169.m006462 (locus 30169 .t000239) derived from phytozome v7.0 (chr-ID 30169; pos 1 327387 to 1328147 reverse strand)
gctcctagcaagttcaattccactgtaaatttcttcaatttcatgttctgtttatttttgaaatgctttttttttttcctccttttttcttttctagctctgtttgacctttaataggaatcatcaatcaatcagctgcttttatctgtttttgaattctgcactacctgagaattgttctcactgctgtcaatcgtgtttttttccttattcttattatttgattattatgaaattggatttgtgcaattgacttgttgaattgtgtttcctttatgtgattttatagattggagtgcaatggagatttttgtgtttgtgagttgtgacttcaaaagtttgttttcttagagcatttgcttgaattttttattttcattttgcgtgaattattcaaactagtcaaattggttgacttttttgagcttcaggttctgaatttgatatctctttgaaggtttaattttttgactttctttacaaattcccatgtatttaatgcatttaaataactaaatatagcttcgtaaatgattaatttgggcattgttttgttggcgtcattgaagttctttatttttttttggtttctcaatctagcgtgagcagtatgttttccatttccttttcttctggccacacttcatttggtattctgcttcctctatctgctggtggggagtgaaatcttgcatcgcattggttagatacctagtattttgttagtaatttgctttctgtctgataggatccttgtggaa

SEQ ID NO: 52337 - DNA, 878 bp, Ricinus communis
  Intron number 1 from transcript 41833.m000036 (locus 41833 .t000003) derived from phytozome v7.0 (chr-ID 41833; pos 8 949 to 9826 reverse strand)
ttggaggtaactttaattatcgattcagtgcatttgtttccatgtgcaatttttacttggttctgttctttcaatttttggcttccaagaacatattttccacgaatttcattttgctagaaaatgaaaagaataataataaagtttgccggataaatttctctccacaagagatcagaaaaagggaattataacaataagttggcctttttttctccatgatgtgtaatattattcttaaaactttctgatattgccttttcttttaaaaatcaaacttttttttttttttgcttccaaaaagtagtagtagtagaagaagaagaagaagaagaagaagaagaagtagcaaatagaaaaagaaaaaaataagaccagcctcctgttggttgtatatggtcaataggcaacggtgactgctgcctgaaagtggagcttaattaatttgcatcatcttcttcattctggaaggtcaactaaacctttcaggatacattagataggtaccatggcaattgtctgcctccaaatgttttctactaaaaaatgtgatgtcacataagatccaattcaagcaggcaccttgttgtgatgccatcctatactgttctagaactagaaatgacacagtaacctttctgcctctgtttttacagaagttctcattccatgcagtggtagctctaaaatgaagatgttgtgtgtgtttatttagatagcttcattgtctaacactgaagttcgaatctctgaatgctatgtttatgaatggtcgagtgtctctatcagagtgaaatcagtattccatatagttgtcaattcaattttacatttatatagctggtttttgtttctcttttcaggttttggatctgcta

SEQ ID NO: 52338 - DNA, 683 bp, Ricinus communis
  Intron number 3 from transcript 30209.m001523 (locus 30209 .t000022) derived from phytozome v7.0 (chr-ID 30209; pos 5 75262 to 575944 reverse strand)
tgctgtaattagtgtggcattgggaaattcctcaatgagttagaacactgttttggttagtagctcgtggaaagcttttgacagatgaagagataatgagacgccatttaacttaaggtctgagttgtggctattgtggagctaccttagaggacatcctccatgcaattagagattttcctctagtcatgcatgtatgaaacagactcctttctattgatattaggagatggttctttggtgttaacagttgagttggtttttaatttgcaatctaagattgccatgtctcaagatttgagttaaaaaccagtattttggagttgtatgttgaaggctttggaactagaaaaatgatgatgtggtgggtgatcaatcccttcaagttatgtccatggttaatgatatttacatgagagctgaggagttagaggtggcaaagcgcatgaatgggcaactatcttgttgattcaaaagatatgatgctcttattagttaaaatacacctcttattgattggtataaactcaattctgatagggtaattaagttgtatggcagatcgtatgttggcggtatcctttgcaatgcagagggaagatggtttttgaggattctttataaatattggtaaatgctcagtatttgctattaagttgtagtgcgtgttttaagggcttacc

SEQ ID NO: 52339 - DNA, 841 bp, Ricinus communis
  Intron number 3 from transcript 30169.m006522 (locus 30169 .t000299) derived from phytozome v7.0 (chr-ID 30169; pos 1 667476 to 1668316 reverse strand)
tcaggtaacttagtcctgtaagaggctactatcttcagtacaaagtgaagttaaaaatatattctggtctccagaacaattggaatgtggtcaacttactgtgatcagtgatctcattccagtattaggagatcctggagtcttatatttgtatagcactaagaaagtagaagtccttgcattttcctcatacgagatatcatttagctttgacttgtctgcaaggaggcacaacttttgaaccaggcctctgatgccatgctattgaggttctcatgtggtttgcatagggattgtctgaatgatatagattctcacgagatagcaaaagttttatgatgttgatcacatcactgaggtttttcaagggctagatatgttactccgtagtctgcagagagactataatggtactttgaggcacttattggacatgtgaggttgtccaaattttctctgcaatatataattactagcagattatatatgtaatttcagtgagactttagtgaattgatctggtcatctctttgctgctgcttctatgtgaccttcttgctacatggactcttgcctattcctggagcaaaccaaaaaaaaacactcttgcctattctattttgatatgttgcataattgtttccttgggatgggaagtgggaggggtgaatactttatattgccaaattttaagaaaatatctctgagtgctctttgtttcttgtattaatagtgttttctaatctattgggatccttggtccaagtttcttaagagtgtcttaccctgtgccatcatccctttttgatcaaggctgctttttcttgaagctcagtcaaca

SEQ ID NO: 52340 - DNA, 735 bp, Ricinus communis
  Intron number 1 from transcript 30169.m006527 (locus 30169 .t000304) derived from phytozome v7.0 (chr-ID 30169; pos 1 712936 to 1713670 reverse strand)
acctaataaacttttcagctctctgaatctctcaggtatttgaactctcatattgaattcaaaactcctaatcttaatttttgtatttgcatcttacacgtgattaagtggatacattgtctaatcttgatattcgtttcaattagaaatacacttgtagatgattgtcgttttagaaataatttaggtgtttaactcgtggattgccttttgattttgtttggctagctgattaggtctatggaaggtgaagctgaacgctaaacgttaatggattttgatatcttaattagtttatgttctattgcggtttcttttttcatattttttcttttcttttgcttgagctggaatggtttgtgatgctcttaaaaactaatttaagtctcactactttaatttatgaagataaccatgttttttttcagtgtttggaagccaagaaatgcaagaattctcttctcttcaatcgaattctatttaatcaattatcttgttactggaattcaattattttcaactcaaagaaacaaggcattttgtagatttcctatttaaaagaaatgaatcatgccacaagtgaattgaattgatttttttcatacgatttatttgaaaaatgcctgagatgtgaaggatagaactgtttttatgtattagtataagagtgtcttatattgaattgccatttgtgttgcagtagtctgaaggagactatagttttctgctttagat

SEQ ID NO: 52341 - DNA, 414 bp, Ricinus communis
  Intron number 1 from transcript 30170.m013915 (locus 30170 .t000327) derived from phytozome v7.0 (chr-ID 30170; pos 1 707125 to 1707538 reverse strand)
caacgatcttaagttttttagaatctgaacttcaggtaggttatacgcataactaatattaacttgaatcttcaaagtaagtcttcaattttcaatataaaaaagtggataaaagagagttctgtaatgaaaatttggagtttttgtttatcttctaaatgaacacgactatctattatatgcagtcattacttctctcttttttcttttttatttactctttttttttttttttttttttttttttttgcgaagaggttgcctaaacttgaattttgtgatccgtttggtcacaaatgaggcgttcttatatacaaagtccttctcattctataaaaaaggtggtgtttaaatatagaaaatgtcctttaatgtactaacttttgatatgggttgcaacaatgcagaagctag

SEQ ID NO: 52342 - DNA, 932 bp, Ricinus communis
  Intron number 3 from transcript 30147.m013991 (locus 30147 .t000262) derived from phytozome v7.0 (chr-ID 30147; pos 3 847380 to 3848311 reverse strand)
attcatttttcaaggtactgcttttgttttttgttttgcagttctacctttcctttttctgatttgtttttgttggtcgatgaagggatttttgaaggggtgaattaggttttttttttttttttttttttttttggggtggggatttaggtgattgaggtgaaacgggcttgattttggtttggttaatttgaagatggattggtgattttggttgtaataggtggaataccgtttggcttgtattgagttggtttggggaaaatttttgtgcggaagtgaatgtgattttgacgaattgtttgtggggggactcgttttatataggatttgaaggaaatgggctgaattttgaaactggaatagacaagtgatctcttgatcaatcgtcgttctgctgtggttagtgattgattcttatgctgtcgttgaataggttttgctgggtttagattgtaaccactatttttggaaggcattttgatggttactaaattgccattcactccaagggtacaggaatacaagtccatggatcttttttctatctttttatgtgcaattgtatatattgaagttcatcacatattattgcatctttaaagtttggtattatctttcagtagttcataattcatttagagctgcaccataaataaacatgacaatgagccctggcattggaattgcatgaacaagcattaaactcactgtactgatcataatgatccatctgttatcttgaaaccattacttattattcttaattcttgggttcaagaattcctagagcagtttattttgtgtactaatgcggacgtgaggtcattaattattggtttcttttcatataaatcaagcagtagttcattgaggttctctgttttatttaaataggacggacgcaggatcagtgttggagattgtgcact

SEQ ID NO: 52343 - DNA, 548 bp, Ricinus communis
  Intron number 2 from transcript 30174.m008641 (locus 30174 .t000038) derived from phytozome v7.0 (chr-ID 30174; pos 1 900635 to 1901182 reverse strand)
gcttaagttaaaattatgaatttggtggaactgtttcttgcggtggtgtttttaaatggatatggatgttagctgacactatcatcatcaagtatttacatttggctctattcaatcttttttacttgtgagtgttaatagatattaattttgtgtgaatttgtttttgtaggtacaaatcaaattcaagcacgacaagaacatagctttttatgattatgatttgaaaatagacctcaagttatttgtttagtattttccaagattggcttctatgtctatttttaggggtcagaaactactttgggtttataatatcttttcttgtgattatggtttggtggtgcttttgcagtgatggtggcgttgtgtttgtaacagagatggtgcttttgcagcgatggtgatagtgtttttaacagtggtggtttggttatagtgttagcaatgatgatggtggtggtacttgtgggaataatcaatggtctagtatgagaattgataagtaaattcatggatgagtcttttcttttttatgaaatttcagt

SEQ ID NO: 52344 - DNA, 881 bp, Ricinus communis
  Intron number 1 from transcript 30170.m014065 (locus 30170 .t000477) derived from phytozome v7.0 (chr-ID 30170; pos 2 594072 to 2594952)
ccggttccagggcagctactacttccaagagcaacgtaagctcttttgttctttttttcagcccagatcccatttttattaattttcctctttatagcttgtcttttattttcccaaattaggtcaattttgtggaatgccagtcagttttgcgatctatgttagcattagttctaacactttaagttagtcgagcttgttggtgttgtataagaggcttttggtacgttttttttttttcttaattgtgaagatttagctgtacgttttaatgcaactgctgatgaaatttgaactggtgaaatagtcagccatcttctgtcaattctcagattggcgaattgtcattggcgttcccattagtgccttgacgctctaattttttgatattattatcaagatatgattcttctgatgtatgtctaatatcctatatgtagggtaggctgtgaagtcatagggaattattgagtgggtggattatgatatttgattgttttgtgagattcctcaagtcccatagaggagggcagagctgtcttaaaagcgcaaactttcccagattgtattttagtgggaattgattagagaatacttcacatacttggttttgaagcagttctaagttctcttaatgctttaaagttcttatgttctacacttgcattacctagtccactccaatctgcttatcatatgccttgcattatgtaatcgattggaattcaagaagtggtagcatgcattactaatccatttgaagatcctgtattaaattttagacgttttatcacattttgcttcttatttttgatgttgagaaatataattcaggctatactaactctgtttatgttttagtgtctagacatcgtactctc

SEQ ID NO: 52345 - DNA, 665 bp, Ricinus communis
  Intron number 2 from transcript 59930.m000027 (locus 59930 .t000002) derived from phytozome v7.0 (chr-ID 59930; pos 4 274 to 4938 reverse strand)
gacagtcttccggcaaggtataaagtctctttttttaagaaaaaaaagtttataaaacattaactttatggctagagggtggtagtcaaaatgagttgacaagttgttgtttcttgttgtttaacttgatatgtagaggacaaaatctctgtggttgtttattcatacacatggacttacagagtcaaaggacagtggactttatgaaaaaaagaatctaggcctgtctaaatggtaatttggagtcaaatatccattttccatgttgttttgtttaccgggcttaatcacatttggcagactgacacaaagtagtgaagtttggggtaattcttaatgaagaggggtagttagggacgactttcttgaattataaacaaaagattaatcacagtgccaggcctgctcaatctatgtatcaagttaaagacatttgcattatagatatcaggagcttaggaacatacctagtgttttgacagttcatcatagctgcgtctgttcaattatattatatcctgcaagcaaattttataagcaaaattggtcaaatatatgaccagaataatgagccttgttttgtctattttttggcaatatgtgatataagatttctgatttactgtaatggactgataccaaatagccaagtgaacaagacacat

SEQ ID NO: 52346 - DNA, 309 bp, Ricinus communis
  Intron number 1 from transcript 30174.m008950 (locus 30174 .t000347) derived from phytozome v7.0 (chr-ID 30174; pos 1 191531 to 1191839 reverse strand)
ctagtaaagctcggggaacacgaacaggtgtgctttgtttcttttactttctaatcttctatttttgttttgatgctggccatttattgtgtctgcttttgttataagttttgtagacaaaattatgtgatcaatattctgatgctcagtaaaaatggctttgtccatcatatattcatgtatctgaataattgtctcctggttgaagtaaattctttttctatttaagttggatataaatgctcaatttcactaatagaattttgtatgccaggctgtctccgggattacacttcctccaaggtgtga

SEQ ID NO: 52347 - DNA, 782 bp, Ricinus communis
  Intron number 1 from transcript 30169.m006422 (locus 30169 .t000199) derived from phytozome v7.0 (chr-ID 30169; pos 1 107741 to 1108522)
cacagaaaaggttagtatgttttattgcgtattttctttgttcctgatattggaacttttaatccacgaatctaagtggttgttcttgtcgttatttctttgcatttaatgtttacattagcgttatgtcagggattgctctggatgacattgattccctcacgattgattatatacaatggagttgttaataatgttgatttcattctggagactcaatttttgctcataaagcacagttttttcttttcccctttttgaaatttataccgacattgctgttgtttaatgacttttgatataataattagtttatttatcgtatttcattttgaaatatttgttctccattcgtgacccaagacttcttttctttttttaattctgcaatttaggcgagacatttcttatatatttacattttgttcaaaatggaaggttatgagttgttcttttatcttctagcatatattccttctattttgtttgatggtgcctgcttctctaatctaataactgaagaatcatggtaagagccatactagtttgatcactttcttgggaggataaatagatgtcttttctatcattagaaagatatgaagtacaatttttttatcaatacttggaatgccgttcttgcagcatgattttactttttccgttgtatggagaaatgctattcaacaactttaacaattatttcatttactttaaattattctctctcagaataccaagtttgtttggcaatgcttgcagaattccataattgagaagaa

SEQ ID NO: 52348 - DNA, 509 bp, Ricinus communis
  Intron number 2 from transcript 30186.m001303 (locus 30186 .t000008) derived from phytozome v7.0 (chr-ID 30186; pos 4 84988 to 485496)
gacagatctattcgagagagtgctgtgtctgcaaggtatgaaatgcttaaggctttacatattacacgggtcattaaaaatacttgttaaatatagagttaagataagaatcaaaatctgggtttgtaggttacgttgtttggtttccaagattatgagaatcatcattttatcctttctcttctaaggactgttcagttcttgacttaaaacaggctttacttgttcgggatctgcgattagaaaatagaaggcagaatcatgttgctcctaagacatttagtataattgagagataattgaattctatatcttgggattgttcttttatgtttttgaaaatggaaatcttttttaccagttatttagttgcagaactactggttgaacttatattctgacatagaagtctcaattttttttttgttggtattttgtatttttctaatgttattattgaataaaattccacagaaggatatctgtaccccttaaaataggagcccttc

SEQ ID NO: 52349 - DNA, 1027 bp, Ricinus communis
  Intron number 5 from transcript 30186.m001303 (locus 30186 .t000008) derived from phytozome v7.0 (chr-ID 30186; pos 4 85878 to 486904)
gcttcaaaccactgtaagtggctccattagtccatttgaagtggcatgcttaattctttatttgagaagaggagttatatcaattgtttgcatgtgatttgttttgcaaattatatgggatgataagagatacttttttcgttttcaagggtaacaattccccaagaattttaattaagattaaattgtataaaagcttaattattttataagagcagctgcttttattaatcttggcataaaagattactttgtggacttcagattgagcatctaaagatgtatgtttgctggaaatactcactttatattcttcaaagtctcactttgagtttctaggaatattgaaaaggaaatttaagaaaagaaatggctattttctttgtcctattgcctagatatgaaaactgaaccaactatttctgaactggatgggaccacactattttctttctcgagctcttttctttacttatgaaatcataatctctccaagaattccatgttttagctacattttcttgacccatgttaagaattttatatagacaattaaggtaaaaagattgtatagacaataaaagatacttgttaagaggtaacacaaaaatttgaatatgggcttgcaggtaatgttgtttggcctttaagattataggaattataatttcatctttctataccaaggaattgtttaactctcgatttaaaagagtcttttgcttactcaggataggtaaatggaacatagaaggcaggaaccatgttcttttattttttgaaaatggaaatctatatcacctaattagagtcatgcagctattggttgtattgagtttatatcctgacataagatttccatctcaaatttgtcatctttttttatccttcaatttttgttcattaaactaccagaggattaggtcaaaaataattgtttccttttcgtattttatacttttctaatgttatcattgaataatattctatagaaggatattaggcccacataaaaaaggagctcctc

SEQ ID NO: 52350 - DNA, 561 bp, Ricinus communis
  Intron number 1 from transcript 30170.m013615 (locus 30170 .t000027) derived from phytozome v7.0 (chr-ID 30170; pos 3 0831 to 31391 reverse strand)
tgctctggagcagctcaaaacctctgctgctgatagtgagtcaactccacatttcagtctctgttcgtgtattctggtttgttgtcatttttaaatatttggtgttggtttttggttattaattctgccattgtattgcttgcttttttaaagctgtttcttaaagtatgtttatgatttgaatagtttttctgctctagccaaaaattgcataaactttcaagtttcatctatcttttgtttacgtgaggaaaatgcttgatttgttgatttggggttgttcaattcataattgggatgacttcttttgaatacattaagtaaggatttaattggaaaatggaagttaattcatccatgcttaaaacagttctacttcatttagttagatcaaacatttcaagatgtcacaatctgctttcattttctttttcctattttgcataaatggacattatatttgttgtctgacttttcgaacgtaggaaaacgcatgtttgatactgtttatttttatcttcatcagggtacacaaaagaaagggctagcattgtggttatt

SEQ ID NO: 52351 - DNA, 773 bp, Ricinus communis
  Intron number 1 from transcript 30174.m009044 (locus 30174 .t000441) derived from phytozome v7.0 (chr-ID 30174; pos 2 721465 to 2722237 reverse strand)
gcaactttggtaatttatcttcttttgattcatttaatgatttttttttttttatgaattacattggtgctgatgacttgcatcaaaaaaattccctttcaagtatttttgggtatactaaggaggtttgtttcttcatagattattttaagcctgtaattagaagatggattgtggttaatagcaaaagcttgttttaaagaaacattttaggtagatttgaagtctactttcatgtttagatgggattatagtagtgtggttccacgtctattagttagtcacaggatacaagagttgatatcagctatgattggagaaagcaagatatataagtgcaagaattactagcaaggaatgtggagcttctggaaatagggccattagatataaggtaaaaactaaaaactattgaactacggaccgtgtcccaagtacaagaagccaatttggatgctgatttgagcaatcttatcattttgataaagtaccttttatgtgccaaccatattgcgaaaggatatagtgggtaatctttgactagattattttgatatagcaattatgagctacattgaactcatgatgtttcttaatatcttgggtactcttatgagaacatcaattcattcatactttagctattttcttgttcttgggatttgttttgaattacgtattgatcattatgtttgattcaatatgaaagcggcaaacattgcagaactctaatggttgcaaattatttgaaacagacccacggttgacggatt

SEQ ID NO: 52352 - DNA, 764 bp, Ricinus communis
  Intron number 1 from transcript 30183.m001280 (locus 30183 .t000010) derived from phytozome v7.0 (chr-ID 30183; pos 5 9464 to 60227 reverse strand)
cgaccgggagtatattgaatggaaagaacgaaagcgatgtactggattgaccagcgtgtgccaactactctacttccctatttcttgctttttcacctcccctttttggtgcactctttcccccaattcaccgatagagaagaaagagataagcaatgatcggacagaaagaccggaaggcgatgtaacagactcccctgggtcatagatgaatcctgcgcaatcagagattaagccataagatcccatccttgaaacaggatgagtttgtacggtaattcaactttgagtatggaatttactttgttggttgattggagttacagtagtttaatctataaaggaaggacaatcgatcgcacttggcgcagagccacctttcctgctcttggattggccacccccccccccccctatcgtcctctgatagggaccggccggaaggagagagacccccctgcgcctgggggtgcttgtggggggggggtgtgccacgacaaaacaagggaatgaaaggtcgcttgcgattgaaaagcagtttgatatggagttcaagtactcctggagggggttaaactatcgatccgccaccccaaaagggagactggctttctagggtaaggaaataacttctcggcatgtaggagtacgttgaaatcttcgctaaattacccaaaaaatattaaataaaaaatatgcttttcttcttccagtcgcctccctaactagctaaactgccaagcttactgaaaccacctaaacta

SEQ ID NO: 52353 - DNA, 374 bp, Ricinus communis
  Intron number 3 from transcript 30170.m013947 (locus 30170 .t000359) derived from phytozome v7.0 (chr-ID 30170; pos 1 917810 to 1918183 reverse strand)
acacctttgatccatatcaggtaacttttttctaaaggccagagcttatagcttcttttctttatagctttaaatgtatgtttttctttcttttgtttgatcattgcaatttgattgtgactctattttgactgcaacatatatggcgtcgtattaaatttcagaaaaatacaataatgctgttgttgctttataaacaatgttccttaaaacaacaaattttaacattggttgttttataggtctctgaaatacacactgatggatctttacttcacttttgttatgcttttaactggtttctgtttctatttgctgatggaaacattctatctattttcaggaattgttgaaagctctaattggttttatag

SEQ ID NO: 52354 - DNA, 290 bp, Ricinus communis
  Intron number 2 from transcript 30169.m006386 (locus 30169 .t000163) derived from phytozome v7.0 (chr-ID 30169; pos 8 88291 to 888580)
aagcatttgggatacttttactcatacaaatccaggtacctgtagtcaaccatgcatgcactgattaattttctgaaccttctttcattaattaaatatgagtatattttgtttttacctagtgtattaaggacggcttcagaaataatcttattaattatataatcttcagaatacacgtttcttatgttgaagaaaaactacaaacaaagtgttaaagatgacctctttttctcttttcttttctttgtttttttcgaaaatgtcaggtaagattaaagacggcagca

SEQ ID NO: 52355 - DNA, 792 bp, Ricinus communis
  Intron number 1 from transcript 30169.m006544 (locus 30169 .t000321) derived from phytozome v7.0 (chr-ID 30169; pos 1 817231 to 1818022 reverse strand)
tttacagaaggatcctcccacatcgtgcagcgctggtatgcttttctctggtttctctgttataattttattcttcgactttaacttgatctctcctgttatcaccttattcgattttagagttataagtctgtgcttggcttttgggatttcttttattataattttaaattttatttgttttaaatttatttagctctcttgcaacatcatgctaaaagttgatctggagaagagtgcaaaatttgggttgtgtttatgttatgatgcttgttgctttgtagggaaattatgattgagaaattagtctggctttgatgggcttgttatgttattataacacggaaaagatattgaaagtaactataccaactgttctggtcaatcataagctgattgcttagcttcatgtttcacatattgggataatgttctagcaaggccccaaattagcaatccattatgaatcaagtaaaattcaaatctgtccttccgagtttacaatgccataggacatatggagtggatataggtatggttattaaaatataagtcagttatcggttttgattgttcaatttgatactcaatttcaattttttatttggattgagcataggtatggttatcaatatgcaagtcagtttactcttttattttttatatgtagtctttcttcttttggacctggcttcaatttttgaagtgtacatgcttaaaactttatatctagttgtgctattgattgacttggttgcttcttttaatgttttaggtcccgttgctgaagac

SEQ ID NO: 52356 - DNA, 401 bp, Ricinus communis
  Intron number 3 from transcript 30147.m014356 (locus 30147 .t000627) derived from phytozome v7.0 (chr-ID 30147; pos 1 512664 to 1513064 reverse strand)
aggaggtggattcgcgatctatatacgttggtaatgtgagggttaactatccttttctcaccttttttatttttatttttgagttatttctttgtaaaaatgattagttctgcaagtatatggtaatgcttgttctttgtgatggtttaaatgggggttttactagtgtatttgcaagaaccatttaaatgatgatttgatatatcatgatgagttcatcctcgtgcatttgaatactgtaacctaggtttatataatctggtgttggttgctctgcgtctggattggttccatacctggtttttatgttctgatgtttcaatgattctgctactttaaataagctgatctgaaaggaagaatcgttgctcttcatttatgtttttgacttcaggtagact

SEQ ID NO: 52357 - DNA, 776 bp, Ricinus communis
  Intron number 3 from transcript 30174.m008911 (locus 30174 .t000308) derived from phytozome v7.0 (chr-ID 30174; pos 9 52679 to 953454 reverse strand)
aggtgcactttctttattattcattttttaatctgccactttgttatatggatatttgttgtcttgatgatcatttgatttgtgggttttgatgaggcggctgctttatgttatgttatgttatgatgttgctttgtgtccgtattaagttgatggaactgaggttttagttcttgtcttttttgcaaactttattggccaaatttatcttgctttctcggagatctgaatttctgatgaatcaactgcaaatctgtgagttactgagtttaagatgagattagatgctgtctgccaacaccacaaaggggataattatcatttgatcttcagtaaatttggtcactgctttttgacatggatttagtccttttgttctctggttgtaagacctgacattacatttatgcccagtctaagaattgttaggattttgattttcctaatccttggaataggaattatgattgaagctggacagacaagtggttttgcctcctgattatgaagagaacaaaggacttcatcctttctacttacatactgaaaaacaaatatgaaatcagctgcaaatataactattatcccaattctcaactggcatttcattttttatattcttatagtaaaaacaaattctgcagacgcttttattttctctttttccccctcttatgctacacttgcacttgctttgtaaattgttttcaataattttaggaatgtttcaaatatttgtagggtcgactaaaaattgcagattttgggtggtccgt

SEQ ID NO: 52358 - DNA, 1017 bp, Ricinus communis
  Intron number 2 from transcript 30170.m014317 (locus 30170 .t000729) derived from phytozome v7.0 (chr-ID 30170; pos 3 910974 to 3911990 reverse strand)
agccttttcttctctcctggtaaaaatctccttcactctttctttcagaatctgttccatttttatttttttgtcttgttgtgaactttccttctccagaaacaatatgcgcaatgatttacgcgctcttcatccgaaagacaaatttgtccttcatatttatcttttatggcgtttgctcttcaggggtatataagtaaatatcacgatacatttcgtttaatttaattaaagtagtttcatttcataacgtgattaagagaagagaatgtctgattgcttcgtaaactttttctttttatgaaatctagatctagatcttattgtaaatgcactactacgtttctataatttcccgctattagcgccaacagtaagtgatttttcactttccataagtcaaaagaagcttctcacttcgcactagccactagaccctggactctgtaattcacttcactttgcttcttatcaaacacgtcattatcaatggattagagggtactcaaggaaaacaaacaagaagaagaaaaggttattacttttccatcattaaaggaaagcaactattcattaacaaaaatgaagacaacattgctgatgttagtttagttagaccagcaaacctaaatctctcttgtgtccatttcaatatagctgtcttccactttggaggaggagatttctagcgtaggcttagctaagctctgtagaaaaatttaattcattggcatctgcaaaatcaagcatctttgcattgttttggtgcaattttcttagagagtttaatgaactaacttgcttcttattagacattgcagcattaattacatatcttgtaacacctgcctcatcgaggcaagcaaatggacaagtaaattgtcagacccattacccatttatttagcaactgccttagatttattgttatgcaacttaaaattataaccctcaaagtcaacagtcaagatccaaaaagaaagtctctaattaatgattgggaatgtgaatgtagga

SEQ ID NO: 52359 - DNA, 612 bp, Ricinus communis
  Intron number 1 from transcript 30147.m014528 (locus 30147 .t000799) derived from phytozome v7.0 (chr-ID 30147; pos 2 451743 to 2452354 reverse strand)
catttcttgctctatcggctcttcttcaacaataggtgtttactgaaacaccttcacatatgagtttacttattttgttttatcatttactttatgagaactagtgctaaaatgaagaacttagtagaagaaaagagtatgcagttatggagctcatatttatcttcttttggtgtgtgaacaatcccatattgatatgttttctttttgttatttggaaaaattgtaaggttaaaactttctatcaattgaaaccttacatatgtcaacaatattcataatataacttaagtttgtatttatacagctgtaactaagtaacctcaaaaacctgaatgttgtgggatttttgttctttctttgatttccatttatgttttcttgccgcaccttacaatccataggaacaggatcatactataaatgttcaaattctcatttctttcagtgcattaataatttatttggattcattaggactttgggtttttacttttctggtcagtttttttccttgttctttttggttaagcattatcatccatatagtttctactattagggatttagtttttatgatcactgttctgtgttgtttcattctaggcagtc

SEQ ID NO: 52360 - DNA, 894 bp, Ricinus communis
  Intron number 1 from transcript 30155.m001604 (locus 30155 .t000010) derived from phytozome v7.0 (chr-ID 30155; pos 1 88570 to 189463 reverse strand)
cgtggtgtttcatcttcttgaattggctgatagaggtacggacttcgtgagctgcctatttacatgatccaaatgaaatttctttgttagccataatgactgttttgattgggttttattttggataatttgatcatatctaataaattttgagttaaacttcaactttttgttagtaactcatttgcatccatttttttgtgcaacttatttcatttataaataaactttgtttgatgatatcccttttgtaaaacaaattttaatttttgatataaataaatttattcgaaatttgatattaagttttaaaataatatttaattcttatatatctaaactcatttgaatttggtattggcttataaaataaattttaattttggtataaacaaatttatttcgaatttagtcatttacaaattttattaatttaggttgaatttggcgtgattctaaccaatttaacaaaatcaaaggtttaggtgtcaatataatttttattcatatctgtttgctgtgaattggctaattatagcccaacaatatcaaacgttatcaaacgtgtcaagtgtggattggtgaatggattttataaaatttactcaaaaacaaagagcccttaaaaatctatttctatatttttcttttatttggaaaaaaaaaaaaagagaagaggataaagcagagaagacttcatttccaaaaatatggttttgcaaactaattaaagaaaaggacccctttatgtttccttatccaaacagaaagctatatttatatatggttgacatgtgaaggatacttagttgggtatgtgtatgtgggtagcatgcaaatgcacatggtgaggaggataaattgtgagatgagaatatataatgatgtagggct

SEQ ID NO: 52361 - DNA, 900 bp, Ricinus communis
  Intron number 3 from transcript 30147.m014177 (locus 30147 .t000448) derived from phytozome v7.0 (chr-ID 30147; pos 7 91242 to 792141)
aggtgtggccctttatccctttataatgtaacttcatattggaaaccatatttattgaatgacaagcaaacttgttgtaagagcagttctagaaaattctctttttcttggcgctcttgttggtctaaacagttaagggtagttcttactgctctaccctcccttgttttttttttttcctcctcttatcaggcattgatgcaaccatgcacattctgacactccggaaaagccatgaaagcagagtggcaaagggaaaacaatttatgcacttctaagttgtataatattataccagtcaatttgtgagatgaatatctgggaatcttatattctgcttcataaatgttgcttagggtttggattttgaattctctcctgttacattgagtttgattttaatataaattagagaagaaaagctagtgctgtcctgctatgtgtttcagttgcctttgtgtgcattctctgagtgatcagtaatcaagccccaatatacttccctttgggcatttgcttctatctaaaagagttgtgtagccttacttttctgatatttttttgtgttttatgttataattttcttaccccatcttcttagcttgttgtattgtgcggattctttctgtatacctaatttcgctaggcatggtcatgtttcaagtatttaggcatggagaatttaatgttgaataagtttcatcttcactcacagtacaccagcattcattagacccttttcctagtatgcatagatggaatacacaatttctcaatattgtagcatgttgatgtgaaaaccacatgattacttcaaggcattgctgttcatgagaaaccctccatctttccttcttcttctcagggtcgttttgagatactttccttatctggatctta

SEQ ID NO: 52362 - DNA, 687 bp, Ricinus communis
  Intron number 1 from transcript 30169.m006501 (locus 30169 .t000278) derived from phytozome v7.0 (chr-ID 30169; pos 1 588166 to 1588852)
aaactttaagcaagttgattctatcacagcagaaagtaagcaatcaattaaaaagaaaaaggtagacacggactcacacacctgaaactgaagctgaggatttagcatgtcgttttgggaattggatgagtggaattctcttcataacctgccttcctcctcccatactttcttctctttccaactttacctctctgttgttccttcttctattttgcccgtgacttgactaataatgattcaatattcaatgggaaaaagctcatttttgcccctaatattagggtcgaggaacaaatatgcccctaaaagaagatgaaggacatttatccgtcaaattcatgttttcttggtatactggcccctcactaaacggaacttatttttgattgggagaaccgttaccaagatgtggcgttaatcttgggcccaaccaatgacatgacagtaattgagggttatgtttacttgatttttctgtcctacaatacaaacaaaaaatatcatattttcaaacacctttaatgctttcttttcttcatacccacttcgcttttttttccgttttcaatatttctaatccaattttttcactacttcttttcttgattttgagttttatccatcaagtatttcatttcttaacccaaaacaaacttacacatctacagctagggtttctctgca

SEQ ID NO: 52363 - DNA, 865 bp, Ricinus communis
  Intron number 1 from transcript 30170.m013797 (locus 30170 .t000209) derived from phytozome v7.0 (chr-ID 30170; pos 4 323522 to 4324386)
gcaactccctgttcacacttttcaggtactgtattgattttttttttcttttggtttctgcatctgttaccgttctttttatggttgaaaatcgggttttattgggatacttgagttataattataagggtttcttatctagctaggttagtgatatctgaagccactgcatatttattgtgtgtttttttttttttttttaattatggatatgcctggatttgctttacttttgaatttaatttggtgacttcttctgcagtgcttggcactgttccattgtgatttttatattatggcatttgtagatgggatatgctgcaattctcttttctgtttctgacagattattctagcccaagatagaaaggaaaaggacttgtattgtagaatgctttgtaaatgatgaaattttttattctagcagatactatttgacttcttgtttacaattgcttgatttctgtgacaaatgatcacatgaaaccctaattgctcaatgtcgctggggttgctttactgcatttcacatcattgtccttaaaacctaagaaaagaaagtcattttgcataaggaagtcctatttaagtttcttggtgagagatggaatgagttgccaaggcatagtgtagttcatagatatgatagaaacttaagcatggagacaatgaaaagatgatagtccaaactcattatcctctgacaatttctatgcctctgttttatgtttttggtcaatttctaaatagatgtgatgatctcctgcccttttattgtctcagtgataagcgatactaatattctttttctgttttgttatggtgcatagatcgtggctataacagttttcttcttgctatctgt

SEQ ID NO: 52364 - DNA, 872 bp, Ricinus communis
  Intron number 1 from transcript 30170.m013673 (locus 30170 .t000085) derived from phytozome v7.0 (chr-ID 30170; pos 4 87034 to 487905)
tctcacttcttctgctgcttataataggaatacaggtacaaaatagtagtcttgtaagtaatttgaggtgtacatcatcatttgagaaagtgaaagtgatgtatctttcttggttcccccttggggagtaagaaaatggatacttgggttaaaatttgcatgctctatcatgagttgagtaatttgttttcaaagaaaagattagacgtttgggtttaattaaataaaagatgggacttctcaaaatataaaagatgggatgttattggttctttgaggtgtttgattctcagcagtgatggaggtcttttcagggaaatctaggagtggtctttgtttttcaaatcacgtcaaaagcaaaaaatagagaagtggataatttccttttttttttctttttctttttctcccgtaaaatctgtgtcttgctgtttctggttcatgcggtttggtaattaatcaaaaacaggatatcagtgtgcacaaaagaagtaaaatttatgaaggtaaaatagaaaacccaagaacaggtcttttttttttttttttctctttcttttcctttttacctttttctttttaatttttttttcttcctcttttatggttttattttcttgttctatcagagacaagaaattgatgattgttgtagccccttaaatgttgcagacaaagctatgatttttggggttacctgccaggcttctttcttgatttcttttttctcctttttacccagagatcctttttccatttccagtttgctgttatatgcctttgagatttttggcttttgtctctctgcattttctcactatcttttacctaatcatttatatgtatttcttttaaaaaaaaattcagggtac

SEQ ID NO: 52365 - DNA, 769 bp, Ricinus communis
  Intron number 1 from transcript 30193.m000719 (locus 30193 .t000020) derived from phytozome v7.0 (chr-ID 30193; pos 5 03207 to 503975 reverse strand)
gtttccactcggaccaccaatcagtctttggtgctgatctctccttcttatgcttcaaattttaagaaacgtcctcgactagtagacgaggatgattattaaagtgggtgcccttcaatcttcttttcggtgtcttgatcctcgaccctttctggaaaagaaatataggacaaccctaactgttcaaatgcctccattggccgaagaactagcacatttaataaatctcaaagctgacctgtaggagctagagaatgtccatccttctaaactccatgctcagtaaatatctctcatcttacagataaacatctattagttgacctttagtctattcttattttctttcttttccttaattaacgcattattctttataggctgtgtggcaatgctcaaaagcattataagaggcagttgagcaaacaagcctttcatgatcatgtaaaggccgagaatgccgagcatattcttcagaaatagtttgaagactttgctgccaaggagcgaaaatggaaggcgagctccgagctgccaatacttaggctgtgagcgctacaacttagctaagttcaattatagcaagaagaagaatgtagacctacagatcatcaagctggagttggagtgtgcttccatcacctctctaagcttgttgatcaaattttgataagcgaaaaaataaaagctgagaatgagcgcttttattttgagatatcttttcttcttattagctataaggaggcagtaaaagaggttgtcaagaaca

SEQ ID NO: 52366 - DNA, 1056 bp, Ricinus communis
  Intron number 1 from transcript 30198.m000850 (locus 30198 .t000008) derived from phytozome v7.0 (chr-ID 30198; pos 1 68124 to 169179 reverse strand)
gatctgggattaatttccactggactttcttgcaggtatttgcttctctcatttcttgattttgatcaggctttcttgctgtttctcttactgggtttccaaaaacaagcaaggacaattaaaatgagtggttaaagtattgttcttgaattgctttgattttgatccattttctttttttttttctttttctgggtttcccagaaaaggatgtaaaaataattctatgcatgcatgatctgagtgagcgtaatggtcggtgtagaaagaagagttgaagtttccaaatgtgttggggggccaggaggcttgagtttcaataattgagtgttgcattttcgattttgaacaagtcattgcttttacgtttggtttgacttttcttacaaagaagtagttttggttgttggacaaactaaggactttgaatcaaagggttagattatttttgatctttttgggcttatttttaattctttttcttgattttcggtggcgcttacttttcagaaagtgggtgtgacctcttactgagaaaagaggcaaataaaaagaggaaacagaacttacctttgaattcttttagttgttttctgcaactggtaaatttatgaaatttgatcataaagattttttttctttcttttgcttgatttggtttcgtaagttcgatttcttttgttattgtttcttcataggattgcctgtggatctggttgtactattttttttttttctgtgagattatttgaagaagccaggcacttcgtctctagtttttttgtgggattaatgaaataagttggccaatctttctaactagataaactattttttagaaaaagaaattatttctaatatagatattgaatgcggatgtcttaactggaagttttagtaataatgtcatgaatgctgtttctgattattgggatataaaagcattattatgcctatctgttcttctgatggatttgtttgtctatttcatttccgggtttccctacataatcaattgaagagttttgggttggctgttaaattctaactgattgt

SEQ ID NO: 52367 - DNA, 579 bp, Ricinus communis
  Intron number 2 from transcript 30174.m008710 (locus 30174 .t000107) derived from phytozome v7.0 (chr-ID 30174; pos 2 348226 to 2348804 reverse strand)
tagctttccaaggagctatcctattgttctaactggtaaaaatctcattaatggaaacttatttagtctatgtattgcactctgtctccaagaatattgactttattaagcaatgtacttcactttcatagtgtttagaaagtctaaatgttcacttctcatgttttgcgaggttatatttgatagaaatttaatccttacaacttaaaagaaaacaaggcattttgtaagaaatgaaatcatgcgacaaatgtcatgattttttgaagaattcaattcacacgattcattctaaacaaggctattttgtctccatatatatttcactttttaagcaaggtgagtgtgcaatataggcattcttggttttcagtggcctgatttcatataaaatcaaatgcattttgaaagtgtattgagtggagaaaatttatggggagtagttcaggatttaggctttatttagttgaacagagctctgtttttgaagggtagttcattttctgtctttcatttagtctgattctactttattttactaagatattagtcaaatgtgaacttattctgcagagggcg

SEQ ID NO: 52368 - DNA, 632 bp, Ricinus communis
  Intron number 1 from transcript 32915.m000014 (locus 32915 .t000001) derived from phytozome v7.0 (chr-ID 32915; pos 4 33 to 1064)
gaggtagctatttttgctgccatctaaacttgattgctattgttagatgtaataataatctgctagttattatccaaaaagctagtagcttagtagtataattggaaatcccatattgtttgtatgaggatttgatggcatggtagtcgaatcacatgcaatagagtgtattatctcttcttttactgaattttgaggttttgctgctattcaattgccttcgtttgctttgttgagcaagttgcactgttccagctccagatttctggccttgaccattttcttgctgctcctgctccatcataatattattgtgttgagttttctttttttgataaattgtcctactaatggcaaagcaaaagtcctgaagaggctaaactcaactttgctggtcgtataaatttgttctatgtttttttaattgtattttgactgttcttgatgtgggagaaagaaggaaaatggggaaggggtgggatggttcaaatagacccataagtagcagcaccctacattcatcaaggagaggagatacgcccctttaaggactatattggccaacttgaatgataaaacttgcttgcttgaaattgacttctgtacctctttgctcgttgtaggttctgtaa

SEQ ID NO: 52369 - DNA, 876 bp, Ricinus communis
  Intron number 1 from transcript 30178.m000861 (locus 30178 .t000023) derived from phytozome v7.0 (chr-ID 30178; pos 1 70511 to 171386)
ttcttttccgattcacttacttacagaaccaccaggtacctctcttcttctttaattcgtatgctaagcttccttcccttggaaattcagttgcttttggttcctctttctgattctgatagttagcaatccagtctaaaataaaatgaaagaagttaatttcattaattctcgcttccgggaagctcatagtgggctagaattcaattctttctaacttgaaaaaaaattcaatgcatatggaagtcactttgaaagaaataaaatcattcgagttcttgcatatggtttattccaaaataatgttttcatcacctttctttgagatggtttgaaggtttaaacgcccaagtttctaattcttaaagaatctgttgtaattttggctttgttgtttggttggtgatcttgaacttcattactaaacttgctctttatgaaaggtcttttggtagttccgcctgtgtttctttcctgatgaagccttgttggatttgattcctcttactgctaagaacaatggaatattacttccagatgaattacttttttgcggatatgtactcataatggttgttcatctggtttctcaaatacccttttcactggtggtttgcagattatatattacagcgcttattgtgatctttgtgctaaatgtaaagctataatatcatatttaatatgaaatgagttcttaaatgatataattcccaaagaatatacaactgacagagaagttaattactttgagtgtggattacagaaccacttttactttcatatatgctcaaaatatacagtttagacaacatttatgtggacattaattttgttgaggatcaattgacactttattagtttgttccatatcat

SEQ ID NO: 52370 - DNA, 760 bp, Ricinus communis
  Intron number 3 from transcript 30169.m006272 (locus 30169 .t000049) derived from phytozome v7.0 (chr-ID 30169; pos 2 59398 to 260157 reverse strand)
aagtaagtatgctgtttctcatatatacattcctctgaacacttttcgagaatttacctagccgtagataataatacttgaaagatttttgttgccatgctgtacctctttgagacagtatattcttttgttaggtaaaagtttttggcaaagtatctcttttaggtagaagtctctagcatatgtatcacaagatctctaatgttcttgccctaacaggccatgctatatcaaacagaacttgtttgaactagggcttatcctcttctcaaaatatatcattccctttccatttcagtcagaaagaacttaatacccttatttaaaatgtctttgaacaccatatcggtactataaacatttattgttgctaccttgaattatcagccaaatgagtaagtgctgcctttattgtggaggtcaaagttcatttgcgaatcacttccattattgcaaaagatgaccctagagatcaaagtctttttgtgctctatttccaacagctaatagattgcagtctggaaacttttaaatcattttttttatagaaatttgatagtatctaataccaacttcaatactgaatgacaaagtgaaaaggaaattacaattttctaatatttgttaccctcgtgcgcaaggttgtgcttttaaatgaaaatattacataacgaagttgtttcagtttttcttagaggaaaataagctttttaatccctttgtcctatatgctttgtatttctcatgtctttgtttcaga

SEQ ID NO: 52371 - DNA, 415 bp, Ricinus communis
  Intron number 2 from transcript 30170.m013598 (locus 30170 .t000010) derived from phytozome v7.0 (chr-ID 30170; pos 6 27004 to 627418)
agattggtgagatcaagcaaccgtctacttatcatctaagacttctcatgattgagattattttcttttcctttcttagagaaagtaaacgatgaattatgtttattataaggtgcataaaaaaaagatggttggcaaagtacaattctggtgcaagagaaaggaatatggccaagtttcaacttttcttggccctttatactctatctgctacttaagacaatgcccatttaattaactattaatactagctggtcattgtcatgagagattgataaggcatcttcaacttgttcttgtaaaaatgaaatgggctgtaactaatcaatttccatctttctgaaaagagaaattgatgaaatccttgatctttgattatttataggtccattgacatttgaggtagtggagtaca

SEQ ID NO: 52372 - DNA, 646 bp, Ricinus communis
  Intron number 1 from transcript 30169.m006441 (locus 30169 .t000218) derived from phytozome v7.0 (chr-ID 30169; pos 1 207199 to 1207844 reverse strand)
cttctagaccttcgcttattcgagctgttgccactgtgagtttctctctgcttttctttccctttaatttttttttttaattgagctttctttttggtagtgaaaaatatttttggcgacgcgccatctactggcggcattccattagtttgatcccctgtcttttaccggatccgtcaattgaatgacatgtcgtctgtttgttgtcggccctctctttttttttttctctcttcttttgttggttccaatgatagtaatgttcaatggactcatccgtgtctatgttgtgtcacaaacaataaaatgaacagtaaatatatactccgtaaacttacatcttcctcgtaaatttgcattttgattgtaagttgtaacttgatgttaatggagagaaccagttcagtttctcttctgtgtctagagctgttcttcaaaaatctcatctagtcaaatgaagtcattttagagcgtgcttcaattcgcttttttttttcttattctttttttttgttgggctgtttggaaaccaaaaaaaaaaaaaaaagagtttgaacttttagttacatgttcatcgaatttcatcatttgcgcaacttttttgttggcagccagtgaagccagagacagagactaagcgcagtaa

SEQ ID NO: 52373 - DNA, 1011 bp, Ricinus communis
  Intron number 3 from transcript 30174.m008659 (locus 30174 .t000056) derived from phytozome v7.0 (chr-ID 30174; pos 2 020330 to 2021340 reverse strand)
ctttcctcgttccctctccttactacccagcgtatgtaccacactactcatgagtatttgtataggcttttgaatacattgattcttcatatcttccactgatatgtttggtggaataatattcaagggggtagatgtatattgaaatttgcccaagtgagaacaatcaaaagtgttagaaactaaattataagaaaagggaaaaaaattgcaatttgcaggggttgcaatttttccattatgaccaacatggtttcgacttttgaactttgaaaggaaaatttgattttgcttgcgcagcagtcaaccgtttcctcaccgacttaaaacaaatcaaaacagaaaacacagagagaggtcaatttgactaagctgccatatctggaattttcagtggtcttgttgtgggtcaaatacaaattcaaatcagggttttttacattattattattattattatatttttattatttaaaattttattattttttgatatataaatctatatatttagagttattttagagcatagacaatatattattttaaaaattttaacccagctctatatttaaaattattattatagtttagcacttatatctgccatttttcttttcttttacttaatcaactataagacaaatcatcttattttactcgagtggacttttgctgccaagcaattaatatatccccgactaagagaaattcaaagagtagacttctcccactaatttaggaatgcagctggctaatttctccacttaaaataaatactttccgaatttgtataaaactccaactatattcctagtcataaatgcttaaattatagtcattatctgcccaaaataactaaacaaccccttttcttgcctctttgcatcgatcaaattcaggaccaccaccatatatatttgtaatgtgaacatagaaaaatgtttttctttttttcttttccctgatacatttggatatttcatcatgcagattcgatcgtgacctgac

SEQ ID NO: 52374 - DNA, 552 bp, Ricinus communis
  Intron number 2 from transcript 30170.m014263 (locus 30170 .t000675) derived from phytozome v7.0 (chr-ID 30170; pos 3 632628 to 3633179)
gagattttggaatctctacaagttcctctaaccaggtaaattctcgttgttaatattgctggtgactttcaatttttcttcctatggccactgtattctgatattaatttattaaattaggataagacatctgtgcttatccttctgttcgtggaagagtgaaaagttatattttgaatatcgactttattcgattagattatcttaaaattaaacagatagcatattattgttgctgtcccttgttgagtgcgaaatcatttttagtttctgtctctatttgagtgccaagtgatgtttgaatttaaaacttcagaagctgtccttctttttttggggctcttgtatttcttcaataggacaggtccatttaattggctatacaatgagcatgtctcactttccgctatggcttgtgaattccatttttactcttacctcttaattgtatgtatttggttgtattactaatgaatcaacaattaatttaaactgatcatttctcttttactgacagagaaaaggcttgactgatctatcatctactggacc

SEQ ID NO: 52375 - DNA, 703 bp, Ricinus communis
  Intron number 2 from transcript 30169.m006599 (locus 30169 .t000376) derived from phytozome v7.0 (chr-ID 30169; pos 6 1922 to 62624)
gggcttagtttctgataaatttggaagaaggtgatactttctttcttcttgagatcggtgcatctcttcttttcctttttcctgtcttattttgtttatatttcgataagaaaaaaagaaaaacaaaaaactaacagatctcaagttacaacaagttagagacggtgtactcttgtgctttgtttcatacgatgtgggaactcagatcatttccaactaacttatgttctcttctgacttcgttataactcctttctttccatcatttagatttgactgcagtgccatcactaggttattgctgaggttcagagattctgttcagtgttttgtgttgtttgttgaataaactcaggtttatttaatttctcttcactgttcgtttggaatgaaaaagaaacaacggttcaaatatattggctgcgacctcaatctggtctatatagtttctcttttgtatgaattacatacaatgcaaatcttgcggctgagatataatctagttagtagctgtattttttcctcttaggtggtcttgagttcaaactctccctcattactatggaatggaagtgactcagctttttcttccactaatatatttggaatatcatcaatgtttttatttttctagtcaatgtgttttctttggtttttcatttgttcaggaggggatttctggttacagccataattacttctg

SEQ ID NO: 52376 - DNA, 894 bp, Ricinus communis
  Intron number 1 from transcript 30152.m002433 (locus 30152 .t000054) derived from phytozome v7.0 (chr-ID 30152; pos 1 610380 to 1611273)
gagagaattctccggattggctgcactgtttccaggttatttttattcctgattgtcgcctgtgtcttttttagttttggctaattattctttgtttaaacagccattcattgaatttgagcaaggaataagtacctaaaatcaagtaagaggttgggctcttgtatttaaggggccctgttgcaatattaggtagctgacagtagagttgaacttagaatgttgtcacttggtgtatccaggattatcagttgaaaacatggggcaatgactgaatgactgtaataagaaagagtagaatgtcattcaggtcattactgcatgtaaattcaatttttactcggtttttaattcatataattgtcaatattctcgcagatacctatcaggtacctttattcacaattacttttgaggaatatgcattaggaaaccacaacctttcagttttgcatataagaatttcttttagaagcatggtttttgcatcggacagtggccagcaatagtagttgttcaaaataaagtagatttgattggtgttagattcaatggctatcaagcaaaattcatttgatgctgttttcctttcctttctctttctctttcttggtactagtctttttttctttctggtacctggggatgtttcagatagtataaaaaatgttgtgtcacatttattagaatctttttaatgtggatacatttttgtacttgggaatgtttcagattgtatgaagaatattcatgatttatatggaatatggatatcatgcattatcgtcattttatgtggtatatgggttgcaatactctgtcgccactttgcctatatgctaatttgatcgttgaacaggctccaattcattcaactgtcacattgtcctcgga

SEQ ID NO: 52377 - DNA, 881 bp, Ricinus communis
  Intron number 1 from transcript 30147.m014452 (locus 30147 .t000723) derived from phytozome v7.0 (chr-ID 30147; pos 2 076615 to 2077495 reverse strand)
aggtgctccttgtggtgattgggatttatctactggtaagtttcttaactttgcatgctatacctttttaactttcttttggtagtctttaatatgtttccatttataattaaatgacttaagaagtatttgagcactggaggattttgattttccttttgtttagtagtctttaatgtaagtattaattaggaaatggtgctattatgctaataactattaattgagaatgttaaaattaattttaattgtatattagaattgcatatgtttttcgatgttttttttttgagttgggaatttatgggagaactggctacttctcaaaacttgccgtatgcctatgaccaatgttggttacattatgctatgactgattgattttcaatcttgtattgggagatttgacagctttatgcatatttttactgtcttaagtcttttctgctctgactttttattccatttctgtggttttggattatggctggcttttcttgtacagttgtacctctttattttgttaccctcatcttgtgatagggatcttgtcttatctttcctgtcaatctctttttctacggaagattttgtttccatcatgtgatgaacttctcaatgaactacatggtcaacaaactaaattttgtatttaaattacagaactccctgacctagttgggcaactgtgattacaatcctagtcgctcttgtggatgcttagcatgcagcttgtgtaaaaaaatcaattgttaatggataaattatgatgggaatgtaaccaactatgacacagctatagttggccaactatccctaagcattattctctgacatgtggcattaataactctcatgtttccttgttatctctaggtggg

SEQ ID NO: 52378 - DNA, 1018 bp, Ricinus communis
  Intron number 1 from transcript 30185.m000950 (locus 30185 .t000035) derived from phytozome v7.0 (chr-ID 30185; pos 7 34746 to 735763)
caggaccggaaaaactgaacgcctcaccccatcaggtttcttccctcattctcttcttaatgataaatcatttaaaaaaagggttttataactaaaatttcatgttatattataaaaatttaaaaatcttaggttggtgtcaaaaatgcaaagaaattagaactcaaggcctttaaatgttagagaaagttatatgagtccttaagtgcaaaaacctctaacttcatacttgcttcttcgcacaatcttcttatttatgttaatgtgtttcattaaggtgttgttagtaactagtagctaatagttaataggtaatagtcaattcatatttggtaaaagtattgtatattcaatcacaaatatatacattaatcaatttttcatatcataatctggttaattttattattttattagatgaaatgttttatgtttataaaatatttatagttatttcttatatatatatatatatatatataaaatgtaatgctttatgaataaattattagatatatagtatcatctaaaatcatagaataaattgttttagttttagatatttctagttctgatgaccaaaacaattaaagaaatacacatgcatcaaagttttaatggaagaaaattattaaacaaacgtttattttttattattcttttaaattctttattaaattacttttcattgatttttctagtcaatattttgaaaagaaataaagaaatgagtcaaattattttacaatgaaagtacaaaatgttggcgaaaagaactttaaaatagagatagtgtgcactagtttacagttaccagctatcaatttaaataatttaccaaactcatttttacagagttgttgaagaataaacagctataagctccctccaatgtctattccaaacaattccctaatgttatgtacttatatatcatctcaacatcattctcttggaaaaggaacctagcaaaatttgatttttttcctcattaatctggcatgatcaacaggggtaa

SEQ ID NO: 52379 - DNA, 1028 bp, Ricinus communis
  Intron number 1 from transcript 30200.m000351 (locus 30200 .t000013) derived from phytozome v7.0 (chr-ID 30200; pos 3 45081 to 346108 reverse strand)
ccagaaaatataattccttttgataaagaagaaaggtttgacactaaatgttacataaatggcaaatttttcatggatgatgtggttcttgtaatgctctccttgtattcaccaccttttacatttaactgttaaaagcagcaagtattgcttttaaaaagtagtcatgcattcagtccaatctttcttccaatgattaaacttcagaatcttttgcatattttatggtgaactgcaatattggatctttaacaagttgttattgcatcaaagcattgaacgtttgagcttagttggtatttggtagggaaatcaactagagttcaggaatggatggataactaacatgtaacattggtaaccatcactaaatggatgagttattatattttgaaagcatgttagcttgttcggctcttatatttaatcctactgctaaatttagggagcttggaaaataaataagtccggactcgttgactagaagtttaaatatttatcataatattgttggtggtaaataatcttcaagaactcgaaaagaatcttttatagaaaaggtgaataagagaaaaccggccatcttggttttggtattatgagtaaagatgatcattggaaaaattaaagtaaaattaaaatgataacttcatgttgataatttgaaagtgaaacttaggggttgttgcgtgggggtttgtgagtttgttagtaatatgtgggtctcatattctataattatgtaaatgtgtttctttattttgaccaagctcaattttacagtgataagttgcaaaatcaatcacaaaataattcaagctcagaagatgatgatgtagtttctcaaatgccttttaaagcatctaagatattaggcaagttcttaaaactaatttcagtcttcttatgtttggttcttttttgtgctaaaattctcagtttgtcactaaaactagtaaaatttcttatgctaacaatgaaagtttctatttccccatttaatcaaagtattcttgcagcacaaaaca

SEQ ID NO: 52380 - DNA, 698 bp, Ricinus communis
  Intron number 4 from transcript 30177.m000850 (locus 30177 .t000003) derived from phytozome v7.0 (chr-ID 30177; pos 5 50623 to 551320)
gctaaggcttctctagccactagggagtcatccaagtatgagtccatacatttgctagctaatactggatcatcaaagatctaattctatttcttaatattgtacgtctctttcctaagggatctaatccgaactccttccctcactttgttcatgatagtcggtcgagtggcctctttccttggccttatcttttgagcttcttgtaatcaagcgcgaatcaaatgaatctccatcctatctatgggcctgtacctaaactctgaaagcgagaacctctattgtcgtcccatattatgaaatgaaagaaacagataactctaggtcactacaataattttaaaaaaaggtatcccttcggtaaagggggcctgccttttctttttttattctgataggatttatgctggcttcgttaggacgctcgcatagtttgttatgtcagctctaaaaggataagttgcattggcatcgagaaagttctgtggtgataactacttccagacagaggatgaggggaattagcggcgattacagtctgtttccccaagtaagactactccagaagatcagcagtctaacctagttgcttccctgctagtcactttctcagattctggattcctctctcaagttcgtcgatcctgacttgactgcctttaagtacttgtatactggtaaaaaggcgagctacttca

SEQ ID NO: 52381 - DNA, 522 bp, Ricinus communis
  Intron number 1 from transcript 30190.m011319 (locus 30190 .t000555) derived from phytozome v7.0 (chr-ID 30190; pos 1 56303 to 156824)
gttctgtctcatcatctagcctttcgttctctcaggtacttgcttcttttctttccttttctcaaaggaaaaaaaaaattaaaacttttacctgcttttcttatctaatatttctgtgggttttgaagattaatccttcttctcattgatcattgataattcctattgatctgtgtcttttctttttctttttcttttttgaggttatagtttacgtctttgttcttctaataatatgcttttgattacatttggtttttcgtgatttgggtgcagttttctgggctatgttggatggtgaagttgaggatagttcttcaggcaaagtattgatggtagcttgcacctgccgtgctctatgtatataactttgttttttagcaaaataaaaaaatggtaagtgtaattgtacaagggcaagcacaagtgtaaaacccgaaataatggactactactctacatgagtttttgttctaaatgtagatttattttacagatttgtcttctttaatttaaagagaa

SEQ ID NO: 52382 - DNA, 944 bp, Ricinus communis
  Intron number 2 from transcript 30190.m011319 (locus 30190 .t000555) derived from phytozome v7.0 (chr-ID 30190; pos 1 56888 to 157831)
ctgatccgaaaaacagtaggttcgtctcgccgagaaaatggaaaaagcgtttgctttttcggtgggggattcaatcattcaaatgcctcgtcttttgcaatcagtttggttttggtccagaaatcttttcttggtaggtgcaattgcacaagatttgctgtgtagactggaagtaatttctacgtgtatttgaagcaaatttttaggaacatcttattacataaatgggttcgtgtcagcggatccataacatttgaaatgagaatgacgaatttgtaaggaggcaaagcaatgattaaatattttaccacagtatctctcttctcatttctgggtttgaatgattatttaagctgacatggttctgtaaattagctctatcagctatccgatggtaagctgttattggttggttagaccaaccgcgactcatttgaataagcgctcccgcaagaagatttctctcttctcatttgaatatttattttagcccttttgatgtgatttgaagagagcttgtgaaaggtgtgatacctttaatgaacctatttgactacgacgactaatcaaaatgattttgcgcagcatgaatggacttaattttaatttcagaactctaattaaatgctaaagttaaaggaaactcaaaactgaaaggtaaattagtattgccactcctagaacttattacctgtttgtcaaacctgaagacatcaactacccttaataaacagcccataacacagcccgctgctgcagatgaaccacgggacggtggcttgtaacaatttatcgtcatcatagcccaaagctcactgatgatcaaatggacaatgaattatctgcattccctccaaaaaccacttaatcaacagcattacttattttttaatccctttattctcaaagctcaaaccctctatttttctaaatttgttaacttt

SEQ ID NO: 52383 - DNA, 590 bp, Ricinus communis
  Intron number 1 from transcript 30174.m008913 (locus 30174 .t000310) derived from phytozome v7.0 (chr-ID 30174; pos 9 62925 to 963514)
gacgccaaaagcctgtttttccttcagagtttcctgtgagtagaaggaagatcttttatttgttttgtttttggagagtcggttagagttgttttaaactgactctagcatctctctccttatgatggttggttgcaaaaatggtttccataactcctgtggatactgatttatttagttggaatgatctgcaacgatttgctaacataattctgatatgttgagtccacatagcattcggacaaagatataggcattgtttgaaagaaactgagtttaaaaaaaggaaaggtgaaaacagtaatgaagcttaatccaacactatttttgagaaattttttaattactctcatgagtccatttctttgagaatgatgcatggattgcatgttcagcaagaggaatctttggcgtagagagaagtttggagaactttgaatgtaatcaaacaagaacagaatttggacataattaataagattttagggtgaaaacttttctccttttgatccctttcccttcctggtctttaatgaatgagcatgtcatatgtattaatgacttttgtgcaggtagtccctggctgtgac

SEQ ID NO: 52384 - DNA, 468 bp, Ricinus communis
  Intron number 1 from transcript 30190.m011015 (locus 30190 .t000251) derived from phytozome v7.0 (chr-ID 30190; pos 1 284468 to 1284935)
gccgccgccgcttatctccaccaccctcatcaccggtttctccgcttacagaaactcactttttattcctttcttttgttaacttagattaaagcagtggttttttaaagaaattttttattaatttattcttttacagtacttaggatggttcttttcttttaatttaatatttttatatttttttgtatgttttatttatttattttagtggctttgaagaaaataaacaaatttttttcattctgtctttttgattctttaattgaacttgctcatttctcttggccataatcattaacaccaatttcttttcctatgtatctcaaatttcctatccttttctactctgtacgatacacacagctaaacatcagaagccctgatctcagattgtttagatactgtcattttgattcaaaactggatttagattcttcaaacctaacaccaactgaaaacccacga

SEQ ID NO: 52385 - DNA, 554 bp, Ricinus communis
  Intron number 3 from transcript 30190.m010986 (locus 30190 .t000222) derived from phytozome v7.0 (chr-ID 30190; pos 1 136308 to 1136861 reverse strand)
ttactgacaaggacaaggctgctgctcacttgaaggtgtttttcttttaataagttttctaatttcttcatttgattttctggcctctattataattattgtttattcatacatgtcattcaagcggggttgttcttgctggttaataccttcttaggcaccgttgcaatccattgtttgcttttacttcacgaacagaactttatacctttttgcccttcaataatgagaaaagcaaaaaggtgcttttgagaatgtttttatcttgtctcatctttctgaagaagtgaaggtgtatatggtgttaaaagaagacttgtataagcgcgcatctgaatttatttgatgccagaaagtttttggactatttttcttcatgctagaagaaatctttctcatatttattttcaaatctgaatttttcttttcaataatatatacggtaatacttgcatttgataatcttttaggacaaaggttgggttatggtcttagttggttgttattacttgatgttagggtggtgcaaagaaggtaattatctctgccccgag

SEQ ID NO: 52386 - DNA, 298 bp, Ricinus communis
  Intron number 1 from transcript 30147.m014266 (locus 30147 .t000537) derived from phytozome v7.0 (chr-ID 30147; pos 1 280386 to 1280683)
ggtaaggactttgagttttgttgaattttgaaggaagaaaaaaattggaactttaattcgagcaatgcaaatttggggttgttgaatttcaagtattatcgttagaaaactgaaaattgcagactacaatgcatgaggttcttaataattttttattagtttattgccacctcagcaaccaatagagggcagaaatggagtatttcttttgttgattttgattcattgaaatgggcatctaattaattacaatgtacgcatgtttgtgttttatgttagattggaggtttttgatcca

SEQ ID NO: 52387 - DNA, 400 bp, Ricinus communis
  Intron number 3 from transcript 30178.m000872 (locus 30178 .t000034) derived from phytozome v7.0 (chr-ID 30178; pos 2 30236 to 230635 reverse strand)
gtttaaggaaggaaagatagtaagtttcaaatcttaaattaatcgtgtttctacttgtttaatgttgccttaattatttgtttaacaacttatgtttttacagtaagttttacatcttagtttttttcgttttcttagttaattggactcctattgaattttgaactactaaggccaagttcatcttttgtgttcgtacttgtataaggcttcaaccatcatggcttgaaggaccataagtagaagagggaatgatagatatttatttcttttaaaagcaaagaggaccggttaatagttatggtaatgtggagttttggttgtttggaaatagtttttgatgttaagatttttctttcttctaggtgaaagctcatcttgttggttctggtgagaaggc

SEQ ID NO: 52388 - DNA, 571 bp, Ricinus communis
  Intron number 1 from transcript 30160.m000429 (locus 30160 .t000002) derived from phytozome v7.0 (chr-ID 30160; pos 2 80338 to 280908)
tgaagtcttccgctggaatccgcagcctccagcaggtttctctatttcctttttgattattgctgaaaagaaaaaagaaaaatagtctgaagcatactattattactgttacgttttttatgttgttggtgataattataaattgtcgtcattgtagaaatttagaatatttgttattcatcagtcgatatatatatatatatatatatgacttgtattagggttttcagaacaggaatactcttagatttttattcatcagtcgatatataatcatacaggtgtttgtggctatgtgctgctagctaaatatggaatcaatatcaactgagacattaagttggaatttgtttttaaaatttctctaataatgccttaatttcttttaatcagtgttaaaagaatttaatctaaagggctgaagtgggtcattgagcacactgtagtggatactagcatttgctgctatgttctaataatttggcttcatctcttctgagtattttgcaagatctttttttctttttgagttgcaggaaccatacatccgtacccgagagaatccgtactt

SEQ ID NO: 52389 - DNA, 684 bp, Ricinus communis
  Intron number 1 from transcript 30167.m000859 (locus 30167 .t000008) derived from phytozome v7.0 (chr-ID 30167; pos 2 74357 to 275040 reverse strand)
caagtaaattagattgacactgaagcttctgtgaggttagaatttctacactatccagacattgatcgattccttttctttactaattaatttaattattcatgagtttttatgttcaatctctttctatctatgaattttatcagaattcatgcattttaggacatctcattaccattgatgtatcttttttctttaatagtttttgatgttttctttttgggtccttgtatgattgcctttattatttttgttgtttatcaatatgttctatctgtagtgagaaaaatccatttggattttctgaaaaaagattgcttattgtttttgctggcttttccactgtattttgttttttggaaaactgattgacattagctgagcattcacgatatctaatttgtgttaacacaattatttatcaaagttgctgattgtaccttctttaaatctggcacccattatctgctaattgaatttcccacttgttactatgaatggaaatctcttgatttaaaatcaattccttaatcaatgaagagtattattttgttgtctcatttttcttcctcttttctttttggaggggttgagttgtcacttcagtctgcagttaaacaccttccttgacatttcatttatatgttcattatggaaatacaggaacataaaatagattaaagc

SEQ ID NO: 52390 - DNA, 1031 bp, Ricinus communis
  Intron number 1 from transcript 30174.m008680 (locus 30174 .t000077) derived from phytozome v7.0 (chr-ID 30174; pos 2 147515 to 2148545)
ctctttcatacagagctcagttttgatatctacaggtttgaatttttcttgttttgttgctcagagattcttaaatatgaacgcataatcttcatttttatatgtgtttttggatcaaaatatttaattattgaattgaatgtgatccttctgttgttccgtttgggtttcgttacaagctaccatgataggggtatagaaaattacttgatgagcaaattattattattattatttttactgttaatttgttaaataagatacagtaatattactgagatgtttctttaaagttccggattggtgagcaaaatgcaaaaactaaagatgccaatttgattttgttattctgaattccctcatttgtttggtggaagcaacacactggtggtagtcatatcaataacgtcagtataacctaatcgattcggccgtagccggtggactctttaaggaaggcagagtgtaggctttatcatgctgaaactaattagcttatgttttcaggaattggtatagtgcctgtcatagtgatctctttgatgattttaaatgctgaggaagtaatttatttctgtggtctcatcaaatgacaaatgcacgctgggctagcagaagcttgcagtaaaaagattttttcactacattttttgttctcgccatatgcatgttggtgcaaattagttttgatatcatggattagaatgacattggggactgtgttccttgaaagttcatatgcatgtcggtcaagttacaagcaggcttttttttttttaggtttctcagtattctagcaaataattgaagttgcaagcttttcaggagaattttcatgggtgtaacaattctctgtggtttagacgtgtttgctcaatgtattgagttagcatgcaatggacactctagcaggcatatacatatgttatgcagtaggaatgaagtatctgatttctgtcaaacagatatgatttatggagatgctctggttgagtgaattatattatgatggctctttatattttgcaggg

SEQ ID NO: 52391 - DNA, 588 bp, Ricinus communis
  Intron number 3 from transcript 30170.m013617 (locus 30170 .t000029) derived from phytozome v7.0 (chr-ID 30170; pos 5 0309 to 50896)
gtttacccacgtcctctacaatctctctcctgctggtatttcttttacttctgagtttacccccaacccaacccaagcttttatttatttattttgggtatataaacaatcttaaaacagaactgatttctatcaagaaacaaacatattaatttatttgtttatgggttgtatattgccaagattcaaaagtgaagctccttaattcaagctaacaatctaaaagtatttgcagaaaataaaatcggatgatttaaataaataaataaacttaaagtgcaattttgtctatatagccttttggctgcctcaataaatagtgcaaagtctccatttatttaagaaaagcattaacttaataaaatcaaaatcttcacttatataaatatctagaaagccaaaatattaaattattaatttctcatgtatctgtactataaaatattacttgtaattagcaattttaattaattctatatgcgctgccaaacatttgtaggactaacagggtgtttttttcttcttttttcttttgaacttgaactctacaacctgataatgtttttctgaatggtgctgtagagctgt

SEQ ID NO: 52392 - DNA, 807 bp, Ricinus communis
  Intron number 1 from transcript 30147.m014380 (locus 30147 .t000651) derived from phytozome v7.0 (chr-ID 30147; pos 1 605630 to 1606436 reverse strand)
atctctcattgaactgaagattttccgataagctggtaggttatacttaaaatcctttgattttgggtgtctgcattttatcgatttagtatagctgccagtttttatccgttttcttttgttttctttatccagttttatcttctcgatgcagtatgtggctttctcccatatttattagtctctttcaaaggaataaaaaaaaaaaaaattgaaagattattgttattttatgtccatgagaatagaaaaatgtactttgattttattatttttgcttgttaagttcctctgactccagtgcttttatctggagtcttgattttcaagtttttgagcaaatattagatgaaacgtataatgctaatcgtgcatcaaaatcaggaatgatatattatacaatgagctgaactaggaaataacatacttcggcttttttggggactggacatgaaaaacttcctcggatttctggaaaactaagttttgaatttataataaccttgctttgtggatttgactcaaattaattggtcaaggtggacggcagggaagagtaactcagtaacatgccctttgaagatcgttatgttctttttatctattaaatctgttgttgcgtagtgattggtggcaaatgttctatttcattttcagaatacctctttttcaacattgaacattttgtaatttttttttgtttctaaatttcatgattgaataagcatagaagatttaatatttgtccctttcttttttctgattgtcacagatcgagtatccctccaaaacatataaagatcaagt

SEQ ID NO: 52393 - DNA, 619 bp, Ricinus communis
  Intron number 1 from transcript 30147.m014352 (locus 30147 .t000623) derived from phytozome v7.0 (chr-ID 30147; pos 1 495033 to 1495651 reverse strand)
gcaccttgcagcctggaaaaaacagcgtcaggcaagttgttagactcgattcttcttcttcttctttttcccctcttagttttaaccagtctgacttcatatttcatataaatttacaaatccttcttctcctctccctatgaagtacgttcacacttaaccatgttcatcatcaaaagtaaaagcgtatttatcttgtgttttgttttgtcaacacaaccaaacagatattggctttggtgttattcgttcattaatttcttttgtcaattagtattaatttcttagcttaattctggtcaaattgcagacattatgaagataagatataataatctgtacagtagattttcattgatttgactctgtcctgttgaccattctgggaacgctagctattgccgagtacgccattattgcgtcagaatatcactttggtctttgctgatgtgggaaaattagagagagcagcaattctagtcaaaattcaagaaacacttgaacatattcttcttttttttttttcttttaagaaaaagaaataaaaataaggatatataattagagtttcttgcaggtaatagagttgttacttggtgctgctactattcgctcaggc

SEQ ID NO: 52394 - DNA, 357 bp, Ricinus communis
  Intron number 1 from transcript 30190.m010807 (locus 30190 .t000043) derived from phytozome v7.0 (chr-ID 30190; pos 3 477050 to 3477406)
aattgcaaaagttgaaggagtttaaacccaacgttagtttcttttcctgttttttttttttttttcttttgttttattgatttgatgatgggttcagtttctttaaaatcttgtctttggtttccaagaaaatctaccgactttatgtggacaaagtttcgacttttaaagtcttgatcttccttaaacaactcatcatctttcttgttgtgatgggtttaggttcctgttttttagtcgctaagaaaactttaggctttgattattttttatttcttgatctactttagggttaatgttggtctaattgatcttgctgcagaatttccctctactccaatctttcaacgaggaaca

SEQ ID NO: 52395 - DNA, 854 bp, Ricinus communis
  Intron number 1 from transcript 30170.m013778 (locus 30170 .t000190) derived from phytozome v7.0 (chr-ID 30170; pos 7 12948 to 713801)
gctcgtgccaaagccgccgaagctgcacagaaaaggtggattttcctttctctgtacatcaactaatcatcggagcttatactttatacattcttttttcaaaatctaatcacgaaaggtggatactttgtgattttattgttttgactctaatcttcaattgaagtcaaaacaatgtcctctcttacttctcaattttctttggcagtccatctatagatggcagctttttgaattggatggaatttattacggggattatatagatatgagtttcaaagattggattctattgcccactggtattcgtaaagggcatcatttattagctattttttttctgaaacacaattttgattttgatccaattttctatttgcatcaaaatgtgctgttaatgccgaatgaagattattctggcgtttattcaagggattatatatgttcctagtatttttttgataccaaattaaatagttttttctaattatctagtaaaatctggtagtataaatctatctgttatgtatagaatcccatgtataatttttctgaatgttgttaactacaaaagttcaactatctttcagtttcatgttcttgtgaccagaacatgtactaaactttggcgtatgtgagtcccatactctattcaataacttcattcctgttcactttagggcattgcatgctgcagttcatcctagttggcataaacaagtttttataacactagatcttgctaaggattcaactatattaaaccaatttagatacctttggatgagtttctgtagtattctgtgtcgtatttttcaggcaagaggaatttgaaaaatctgctgctggcagag

SEQ ID NO: 52396 - DNA, 666 bp, Ricinus communis
  Intron number 1 from transcript 30174.m009039 (locus 30174 .t000436) derived from phytozome v7.0 (chr-ID 30174; pos 2 694777 to 2695442)
tcaggtgattgtcaatgttcattacttctatgcccttttagtcttgtgcttgcccctttctttttgctttgtagatgttaactgcaagattgattacatatgaaaggtaaagatagcgtctttattgttttgaaatcacatgtagaatcaaatttcttttttttttttttttttttggtaatttgggatttagtagcctaaggatggaatagtattggatgtcggggaagctaagctatattaaagtctgtattttactgttttgacttacaacaatattgaattctgagtttgtgctgtctttgtctcatgattgtgttgaacatccagactgctaagctcacttttcagatattcttgcttgcataatataaattaataattattgatttacagcatgaccctccacctttcaagttatggagctgtttctcgtaatagaatctgccatctaattagtgttaatgcgaacttggtcattcttgttgcatccccgtgatattaggttatttatttcgtggattttgttttatctcctattgagtcgagccctgaaatttgcagttgctctccttgtaaggttgatgatttttttttcttctttcgtttattggttatatagttaattatgtcagtgtcggtttatatgtttcactagaaaccaag

SEQ ID NO: 52397 - DNA, 497 bp, Ricinus communis
  Intron number 3 from transcript 30174.m009096 (locus 30174 .t000493) derived from phytozome v7.0 (chr-ID 30174; pos 3 039123 to 3039619 reverse strand)
gaagttgtatataatgcttggtagagcttttcttgtctttgttctcttgtttcgtatttgttgtttgctgggatggctaagaatattgtttgcgttatctggaatgaaattctcaattaccagagcaatcatcaggtctaagacattgtttggttgtattcaatttttgattacgtttctctatttctcttatttttataacattttttttttaataccttcattgcttcatttcttttgcatatgtaaatcactagattgcattgcactaagatgataagaattgcacttgaatatgtaatatgagttattcccatttcaaatctgggtgatggtctcaatgttttgatatttatgttagctacacgacttggaaaccttgggctatgcattatctgctataaatgtaaactacactattctggctacaatgttctaatagatgacttcaacttactgcagatctagaagttgaagagagcaccaaacccaatttc

SEQ ID NO: 52398 - DNA, 833 bp, Ricinus communis
  Intron number 2 from transcript 30179.m000555 (locus 30179 .t000004) derived from phytozome v7.0 (chr-ID 30179; pos 3 4276 to 35108 reverse strand)
ggaatcaactcgtgtatctctagaccaaaccctaggtaattatttttttcttaagaaaataaaaatgtgcttaattttgtgaaagctaaagcaaagaaatggaatctttgtattgaatattaataattagttggtaacatcaaattcataatcctgattaattttgtatgtttgaaaaattgaaccaagtagcattgaatttgcagtgattattttactgtttgagaacaacacaactgtttatctataggaaacttgtaattagttgctttgcttatactgaaaccaactagtggatgcttgctaagatgtatgaggcaaataacacagtttgagggctgcttgaagtagtttatagttacttgacttggcaaataggttttgttagttccaaaggtagtttagtaggccaatagttagttaagctgtcatgtaagtgttggatgttggactccattttctactatggtgcaccgaataccagctggcataagcagcttattagctgtaactttctaatagaagtgaatgaaaatttaatctcaaaattctttctcatactgttctctcagtcttgttctctcagtctctttcttgccccttacacctttaaattaggaatctgtattctatgaaagtaggcaaatgggggtgcatacttgcattttggttcagacggttaggtgtttatgtttcattaagcagcagcctaaatgtttatgaattaatttctttgtgattgagtttgacttaaaattcttattttggttgttgacttatagtcgattgcttctgatccattgttatgcagtagcatcctcaagtaaggttgc

SEQ ID NO: 52399 - DNA, 800 bp, Ricinus communis
  Intron number 1 from transcript 30169.m006246 (locus 30169 .t000023) derived from phytozome v7.0 (chr-ID 30169; pos 2 284193 to 2284992)
gtagtgagtgtgaagaggaggttgtcagtctggtatgtttgattttaccttctcaaaaagtctagctttaattgattatgcttgtattttttttcttttgcccattttgcacagatgagaatttttgaattcaactggaatctgaatgctttaaatacttgtgctaaaatcaaattgtggaagtgattatttatgaacattgaaatgtgcgttattgtggttcataaatggtctacaataccaacgtttcatttaaaaacacaagaccttggaagagaagcaattcaacataggctaatttgtttttagttgtttcccatgagaaatttttgcacattatgctgcaaagacacctcaattctatttatgcttctttatagtttttttaaaaaaacagacactgcatcttttacaactttctcactgcactagagcacaacagcaaaatcaaaattttggacacctacaaaagtggcactagtttttagtcattgatctccttatttgatgtataagtagatactctaatgattcagattggatagaaaagatgcagcttcatgcatttttgctgcatgttgtgtggaaactaatttgtaatgtctagtgaattcgcaaaaggcttttaagttttagtaaagtttttggcatgaagaaagattaaaaaaaaacttctgtggataacgcggtctttgtgccatctatgaacaattatttggagaacattcttcttgcatatggtcttttgttggtctaatatctactgtggtccttactaggcctcaactgtagagagaata

SEQ ID NO: 52400 - DNA, 477 bp, Ricinus communis
  Intron number 4 from transcript 30174.m008995 (locus 30174 .t000392) derived from phytozome v7.0 (chr-ID 30174; pos 1 438202 to 1438678)
ggttcttcattgttgggtcgaatatctcctatgtaatgttttcaatatcttgcttctctacaactgtgttgctactgcctttggatacatatgtgttaaatttatttttactttattctaaccattcaaatttttaattggtgcaaccccttaaacgtgtgtaactcaattcatcttttcctttgaatatttgtttgcttgtcttttagtttttttccgcatttttcctgttttaacctgtataattgacacaataattctagaatttgggttaatatttggacacgtctgacatacacaaaaatcgccttctttgattatgtgtaggaacttgatatctgcaaaattgaaactgcatttttcttctcaaggaacatacagtattgatattcttttttcattttgattttcttctttattttctcatgatatatgttgtgtgttccttaggttcttggtaggtgaaggtgcccgtgt

SEQ ID NO: 52401 - DNA, 870 bp, Ricinus communis
  Intron number 1 from transcript 30147.m013992 (locus 30147 .t000263) derived from phytozome v7.0 (chr-ID 30147; pos 3 854623 to 3855492 reverse strand)
aggctaaacctgttgtctgtacgatatctttctctttttaactgttactatttggtacaaacattcatgctttagattactgttaaaaggtttagctgttttatgcgtgcaagctaaaaacaatattattttgtgaaccaaagggcttaaggactaatgcctatgacttgagtatgggttggtaaattgtttgttacatgcttatgtgataataactataataactatttttactagtttgtttgagtctccattttgtctcaaactactattctcattaggattgcttggggtaagaatgtggcactttaatgcctggatcaaaattgaaaatggcaaaaataatgactccaatctttggatgcacctgagtttgatgcttattcgagttcaagcaaacatactttgaatcctgtaatgttgttcaagcatgtatccttatgttacttgagcatatactcacaccctgtgattcatattgcatgcatttttatccatggattatgacataaataaagacggtgcagattttggtgctattttttgtgatatcagttagtgtgtgttcggacagatgatgagcaccaaaatatggtgtttttctcaagcatgtgtgatatggaaatacttagtgtgaataatgtcatttcccctgtttgtctggtggaagtcatgttgcatattaggttaaatatttgcaatttaatgaactaatggctgtgctttccgtctaaaaagtcttccatgtcagaaagaatatatagaatacaaaatatgtgtcctttaaatgattgcattaaatatttatttcccttcatacactttactgtaccaggtcgaagttggaaagcttctgagttgcgcctgaag

SEQ ID NO: 52402 - DNA, 799 bp, Ricinus communis
  Intron number 3 from transcript 38399.m000017 (locus 38399 .t000001) derived from phytozome v7.0 (chr-ID 38399; pos 9 06 to 1704)
taatcgtggacctcagcttcaaccaactttgggtaataaccacaaaagttctaggctcatcttagacactagttgttatctaaaagtgttgaaactttatgaatctctgcacatagctaaacatataagtgaatgattagaaaaggaaaaggagttaaaagggccgtcatggtgggaatttaactgagatgtggatgcctgagaagtatgctgataaatgatggttttagaaaaaacaaatttagtttactttgctttttaaagagttaaaagtttgttatatctctacgtgaataagcaagatggagtgttggaagtttctttaaccggtaagacattaggagtatggttactgaggtttatataaattgctagtttgaaaaatgatcaatatactacctttacttgtatataaatcaaatgaggttctcagagttacacagctattctgatgctagatatgtgacatattcgtataacatagaaaaaaccttatatattaagaggatgccagaacaagtcacctttctgccattgataacaacctaaatggtttgagatacagtttgtactacaataacacttatcaagagtacatttaacagtagttatatcttctatgtataaatatcagtcacagttcatcagtttcagttggggagttttatcatttttagtttcgaaggaagtactctagcactgaactgcagaaattgtttcatatgtgtcctctttccttggtgtataaactacatatactgcaggaccaccccaaagaatattgtcaagcttcttgcac

SEQ ID NO: 52403 - DNA, 928 bp, Ricinus communis
  Intron number 1 from transcript 30174.m009085 (locus 30174 .t000482) derived from phytozome v7.0 (chr-ID 30174; pos 2 966712 to 2967639 reverse strand)
attgctttgtaagttctattcttttttatgtaatctttgtaggtgttttagcttttgggttttgatttgttgatttttatgtaatctttgaactgaatttttatttttgaaatcttcttgttgtgattgaccgattttgctagtttatgttcctctctgggtttttgcatgtttaaagctctggactttgattacttaactttgatttacttttttcacgagggacgagaaattttggatctttgaattctgggttttagtggcttgatttaaaaaagaattataatttgttcctgatggaacttttttcgatttgaaaaactggaccctgatgtgatgtttttgtcattttctgttcttgctgttagtggtactttcaggtttggtggtagtgttactcttgtgcttgataccactgcttctgctagtcgattatgattctacaattctattgcttctttgaaataatgcagcttcgatttctgaacccatagaatgtccaactgggatctatatatagaatatccactgtccaagttcttttcatagttaaaaatctggtacagaggtcctctatagacaaaactgctgagttcttatatccatgaatagaatctcggctagtgtctcctacacattgcatggtagaggatccgacaacaaagtggcatctcagaaagccagtgcttttgtctcctatgagctcttggctcgctatgatgcttacactagtatcaccacttgttagttgttacatgtctaagtcatcagaacagcatgctttgtccgatgagaatatttgaatgatgtaggccaatggcaacgatgtactggcgcgtttgttgctgtatttgagataatcttataattttgcttgtcttctatattaatttgcaggtggccaaagacccatcagggcaagagatta

SEQ ID NO: 52404 - DNA, 805 bp, Ricinus communis
  Intron number 1 from transcript 30206.m000762 (locus 30206 .t000010) derived from phytozome v7.0 (chr-ID 30206; pos 1 61866 to 162670 reverse strand)
ggggatttaagaacccgtttagcctcacttttcaggtatcatgatttttagttgtagatttcaatgtggctaataagtagtatacattatagaaaaattggaccataatttacaaaatcatggtttattatatttagctagaagaactcttttttgtttctgggtctgtgtgtctcctacttactagtttaggactaactattactctagtttacttgagtttgatatgcaactaagaaagaaaattgcactgttactctccgattttgaaggaattaactaagcataaaaaaaaaaaggggcccttgacatattcagaattctcaattggaaatgcgcgaattatgagcatgaattattgaagaggcatttcttcaaacacctgcaaaagggtccgtatagtttcccatgcttggaagcttcttttgagtttttaatctaaaaaagtgccaccacttttagtccgtcttcgaggactgtgagtgtgtatgggtgatctttgtaaaaggaaaagcaaagtatcatatgggaagcagtttctaacagcgagtttaacgttgatgttatgatgggtatgattgtataaaaataaaaattatttgtggccttagtaaaaggaaaaatgttattgctcacagcagaagtcttactgttgcatgttcccttccattgcgatatttgacaaacattatccattttaaccttttaatgggatactcttaatcattttgttgcttttgtttgcttcttgacctacttgtgtatggcagccagtagggttgggaaagattgcaaaacttataaa

SEQ ID NO: 52405 - DNA, 841 bp, Ricinus communis
  Intron number 1 from transcript 30190.m010995 (locus 30190 .t000231) derived from phytozome v7.0 (chr-ID 30190; pos 1 170813 to 1171653)
ggcaaggtaaggatttatgtacttgtgctatttattcttttttagtttttgcattgtttcaaacttaaagcatatagttatttcagatatttgcttttcagttgcaatatcaatcattgatattgatattaagattatgtttatgttagatagatttctattctctaacattatgcataactgatatacacaccctcatgtttaggatagtgaagtcatagcataattctgccaagttcctttgctaatatatatattcttccaaattatcagtaacccagtaaacaactttgtcaagtttcttgtactgacatttgtattaagttgaagtacccaattataacaacttaggtgctatatggtttgatatcatgcttgtaatacagagtgccagattttcaaatatggggtttgctgtattactcaagtaacttggtccccgcgatatttatatttttaatagtattttcaccaaaaccgaagtatgccaattttttctcaatcaaatacaaaactaaaatttagtttttttttttttttttttttttacggaagtttagtttgaactgcatcattcatactgctttgcaaataagtccaggtaacttctgtttataatattaatcaaaatttaatcattttattaattccagccctctatttcattgtgtgccgtataaattgagtacaagtagcctgaagtactaaacaagaggtcttacacttttactgttgtataataaattatgttctatgttgatttttgcttatgctttttgcaataagtgatagttattcttattatttcattaacctccaataattttactgcaattttagt

SEQ ID NO: 52406 - DNA, 883 bp, Ricinus communis
  Intron number 2 from transcript 30147.m014068 (locus 30147 .t000339) derived from phytozome v7.0 (chr-ID 30147; pos 4 323146 to 4324028)
tcctctttgccactccttcctcccctgctgcccaggtatcatccttgttctctttttatctgcattttctcttcataacttctctgcctaatggttaatggcgtttcccaaattttggtctatcattgtagcttaaagtcggtacacattcttaattcctaattttaattcgaggttctttaatttagggcacctatactggacattgttgattttgtatttgcataaatccctcccaacattgaacttgatcaagtagttttagtgcacaatgcccttttaacggaaatcatcctttgtttctatagcatagggtcgtctgtggaaatgaatccagtcagtatttatagtgccattgggttagtcattagtagctcaatatttgagtacttatctcgtagcacaggactgatggtgcgtggtctccaagttgggttcctttaggataaacggaaaatattagagcaatgccagaggggttctggcgatgccagtctgatgctatggtagcatagagagaatagaggttgaggaaaaaaaaaatatatataagaaaaaagaagttgttcgcacgagacaagttgatactaaaagctgttcccacgagacaagttggccttgtgcgtcgcttatagcaggctaattcttacctctatccatttaggctgagtccatttgcgaaatgacatttgatattggcatcaaatcgtggttcgattcttagaagccatattcttttttcagggaacttctagcaacatggaacagagaaaaagtaaaaataaaaattggttgttgcttgttaactgaattggtatttttgccctgatttcatgaaaatttccaagttacctactggcgtactacactgcagaagtacaac

SEQ ID NO: 52407 - DNA, 796 bp, Ricinus communis
  Intron number 1 from transcript 30190.m010939 (locus 30190 .t000175) derived from phytozome v7.0 (chr-ID 30190; pos 8 08541 to 809336 reverse strand)
tcagctcgccaatcactcattcctgattctgatcggtacatatatactgcataaatatctctaagtttattgttaaatttgatatctgtctctgttttttatataggttatggaatgtgaatctgcttgggtatacttgtaaacaaagcttggtttattagagttgttttaactattttgtatctaatatctaaaatttagttaagcctttgtaattcagttcaattgtattcttgcaaacatcatgtcattttttggcacgatttcatttctttgaaattgcttcttttttttttttttttaattttttttttttagttgaatgaatttgaatcctagctattagtacctttccaaatatgagaattgactaaatagtaataatttcaattgaattattgcatttttagactatctaaacactgaatttagtaatccaaacgtggtggtatcagtgaaaatttgtgcatgtagttgaaccatcaaagatgtctcatgtaagataagtggaacatgagctgttgctaaaatttggggccaaaagattgctagagatgcttgaagaagataagaggaaggattagtaagaaatttgtaattcagattcaacttcgttatactgtataaatttgaatgtctttacctgaaattgtgcgtttctgcaaggtggtgtaaatatatatctgtgacagttctgttttcatgttagataaagtgtctgaattcatagcgctgatagtttgtgtccatattatgtttaggcgagcatttgaacaggcaggtagggctcccggtt

SEQ ID NO: 52408 - DNA, 508 bp, Ricinus communis
  Intron number 1 from transcript 30169.m006239 (locus 30169 .t000016) derived from phytozome v7.0 (chr-ID 30169; pos 2 238626 to 2239133)
ttgtgtgtcttcgtcaaattgagatcgtaactgtttgtttggttcttaagtaaattgaagaaaaggagagaaattgaaaaatgtaaggttagtgaaagtcactttctcttagttttaagtattgcttcctaactttattttggtttttaagtgtaaaatccataacaaattatcatatgaaatgtttctggtgaaagtttgcgaattactctgtgtcctttgatgcttgctatgaatttattgattaagcagatgaattaaaaatatagatttttttttttttttttttataaaaattctgcaggttttatcaactgaatctcgcctgaggatattttgttgaatagcgctgctgtgaatttcttcaaacactttcagcattggacctcattactgaactcatatatgtgcctgaaagcttcataaagtggtgtcacttcattatttttaatattgggatgggattactttaggagaattgtgtatagcgacttcacatctaaattta

SEQ ID NO: 52409 - DNA, 422 bp, Ricinus communis
  Intron number 1 from transcript 30169.m006300 (locus 30169 .t000077) derived from phytozome v7.0 (chr-ID 30169; pos 1 80950 to 181371 reverse strand)
ctggtcgccataaaagtttggtcgacctgattcaggtatgaaactttcaattctcaccattcagaatcatattgtacggtactggtttagcttgatgacaagtcatgtaccccattaacagtgcttgtacggcctttcctgtgaaactgaccttggaatacatgctcacatctgcatgccaaggtacagaagtttgagcatgtatattgatggtatagcatggcagaaacagatgtaaagaaaaaactgaaagtacatctgcttcctctaagttgctcgtgcccgtgatattttgagttcataaagaaattattagtttttttcttacttgtactgctttgctttaataatcttcccctccttctgatattttgaatggatttgtaggaagacttccctcgcaccccttctcctgtttatag

SEQ ID NO: 52410 - DNA, 900 bp, Ricinus communis
  Intron number 1 from transcript 30169.m006439 (locus 30169 .t000216) derived from phytozome v7.0 (chr-ID 30169; pos 1 200646 to 1201545)
ggggttctactaagactcttggaaactttgtcaaggtttgttccttatttgcttctacatggttatttttgtattatattattggatggatttctgtagtttgttcttgttcacatgctatgactattgtacttgaaattgttaaaagatgaatgtgcgatactaatttcattttctgggtagtaaataaggggtccaaaacaagtgtcttgttagtgatggatctatttgctgcgggggatttgaccccttacttcaaaagtcttaaaacaagaatccaattatcacctttcggaagtttacaattactagaattgacaagagttttatttaattcttgcacatgatatgtctaaacaaggccaagtgttttgctttgattatgtacttgttcaggttcttaatcctgtaaaaaatttctggaaggtctgaaatcaatatgttctctctctcctttctaagagaatggatttattgaaaattctaatggtcatttgagaaatatctgggttttgcactgttttctggaattctgagcatgagactatggaagcatttaaggctctcttaatttgttcgcattggctttgccagtagaagagtgtagacatttcctactaggaggttgaatagctatgatgtccaatgctcaatagctttcatataaatagatagatgatattctttcagaaaagtttgttgttgctgatgtcaaagatgccctttctgttgtgaaattctgatggagtttggactaggcaatgtttttgcagagatgaatggtttaattagatgcttttattggttagttgctttgtgtatgctgctgttttttgttcttgagctcatgtgtattcccacatgcaatgcaggccacctttgactgtcttttgaagactt

SEQ ID NO: 52411 - DNA, 701 bp, Ricinus communis
  Intron number 1 from transcript 30174.m008859 (locus 30174 .t000256) derived from phytozome v7.0 (chr-ID 30174; pos 7 08628 to 709328)
ccaaccgaattctacttctcgctgctctctctgaggtctctttccttctcttgaattgtgctttttctaatttttatcatttttttagtcacttaaagtttttggatttttttattttctttttattggatcatttacttcaattttgtgatgtgtgcttgttagatttggaagtatcaatgttttatgggtggaattcttcttagttgatattttttaatcttctgtttgataaaattcttcttagatgttttctgtatgaagaacttatgatataaagtttgttatttatcttttgtcctgatgttatttaactaggggcaaaatgaacaagagagaaaagagcacttttaagttcctttttcaggtccttataaattttaacatggtttctagaaataatatgtgaggtgttaaagttgatgcaaaaaatttgaattctagaatttaactgggttttaaagtagttatcctttgcagttgcttgctgccatgcaatgcatagtatgataataaacatgacagcttttgtataagtaaaagtgttgttagtgttgtatgcttaaacttttgtactaatatagagcaatatgcaatacgttcttagtttatttttcttggcttactatcttggatggtcatttgctgttttcttctatatctcagggtacaactgttgttgacaacttgctgaatagtga

SEQ ID NO: 52412 - DNA, 911 bp, Ricinus communis
  Intron number 1 from transcript 30174.m009093 (locus 30174 .t000490) derived from phytozome v7.0 (chr-ID 30174; pos 3 017735 to 3018645 reverse strand)
gtcagaacactggaaactttctcacggtatgattcttaaaagttcttctttttcttttggaattctttaaaatgatttgcagttggcattacttccataagctgtttctgatgtcatgcatatttctcaggttcatgatctttcattgtttcttttagattaagcaacctgtgtttctgttcttttttttttttttggaatgatgggaactgcctggcttgaggattgtcaagcataaatacattcaaaagcagtgtctctgtaatttggttcatacaatattgttggtcttgaagggccttgttggttataggactttttttctgggataagtagagcattcagttttgtattgtcaagcataaatacattcaaaagcagtgtctctgtaatttggttcatacaatattgttggtcttgaagggccttgttggttataggactttttttctgggataagtagagcattcagttttgtacaggagagaacttctgcattaaatttccagacttatctaagtaaacatttgctttggtgcttgccattgcagcttccatacctattaatctgtgtttcagagttagaatcctcatatagcggttttatgatagcacttgcttagatgtagggtagtgttttggatgatgaccgtttttctctctctctctctaaaatggattccatttcagaaattgtagtttataaaggcataggcccgcagctggataaacctgtgacctcattataagatgagtcaaacgcatgtgctggaatttaatattttcgttcatcagtttcatgctcagttatatttcatcgaacacaaactaaattgtttttcctcaaagttgtcattaagttgcctaaaaactttcttgatgggttcaggatcgaccttcaaccaaggttc

SEQ ID NO: 52413 - DNA, 628 bp, Ricinus communis
  Intron number 4 from transcript 30172.m000208 (locus 30172 .t000007) derived from phytozome v7.0 (chr-ID 30172; pos 4 19058 to 419685 reverse strand)
tatactaccaaggtacctctttttcttatatatatatatatatataattacaaacacaaaataatttttatgtaacttatgatactgattataattattagaatttaagaataaaaattaacaaaaagcattatacttttaatgttaattacaactcatgttgagtaaccaattgtctatgatgtaaaattttataatttattacgtcatatagttggatgaatgataaacatagagtaattataaaattcaaaataaatgttaatttctaattgcctaaatctcttgtgagaattgaaaataaaatgttaatttctaattgcctaaatctctgttgggaattgaggttgagaaaagcactttctaaaaacaattatgaaaagaattaaaaaataattaatctattaaatgaaaaagtatttgaattattttttttttaacactcaacgaaaatctcaaacaagcacttagtgtaaaataaaagttcttgtcattcattcaatcaaagggtataatatactgggagtagccaaacacttttttagagggtgaattcttttattaagtttgtaatagtgttttggtgttggcagaatacataatcccaaaaggaagccctgtaatccca

SEQ ID NO: 52414 - DNA, 298 bp, Ricinus communis
  Intron number 1 from transcript 30190.m010847 (locus 30190 .t000083) derived from phytozome v7.0 (chr-ID 30190; pos 3 696700 to 3696997)
actctttgcctgctattgccgtcgtcggtggccaggtttacctctagatccgacgacttctgcttcttttttttcttatttatgtttgaattttaggtttatattctttgctttatgttctaattagtaaataacttcttaaagaagacttcgaagtcaagcgtgtttgaatcagctttgactaaacctgctaactttctacgtttaatttctgtttaataagtgaattagtaatcatttatgtttttgtaattgtgtggcagagttcagggaaatcatcagtgttagagagcatcgt

SEQ ID NO: 52415 - DNA, 870 bp, Ricinus communis
  Intron number 2 from transcript 30190.m011251 (locus 30190 .t000487) derived from phytozome v7.0 (chr-ID 30190; pos 2 822356 to 2823225)
cagattgttgcctttctttttggtggtgagtattccttgatctactgtttctttggttttgaaatgtagatctggctgttagattactggaaagtgtttgaaatattacggcttgttgacttgctgtgacatagggctgacttgattctgatagatgccgtgaatttgatcaatattaatcatttaggagggaggatgatatcatgatgcttagctatgttgttctgacttctcatgcctaagatttctgatttctgaacaaaatattattctgcagaatgcagttcacacttttgtttatacttttgtattagattgacaatcacttcatttttgccgatttgaatattgacagctttctgttactctgctctcttctgattaaatcaattagcattagaggcatgatagatagtttctaaaaccttaggtccgtcaaagcattaattggtatgacttccatttatctatgcttgcaattcaaatacattattattaatcttcttttcatttccgcaatgccctgttgaatttttcaattctccaaactttttattctggctttctttcacacaccagaccattctttcagctcattcttactatatgattcctacatttcatgaatgatatcttattctgttgtttctttttctgctaccttgcgtccttgaattatgcctaacattgcattaactgaattatcaactagatatttcagtagaatgttattataaaattgctatcacatgttgctctatgatattcatgagctgcaagatatatcattatatttgcttattagagaatttatcattaaattatggaattttcataatgcatctaattctcttccatttgtagtggccc

SEQ ID NO: 52416 - DNA, 933 bp, Ricinus communis
  Intron number 1 from transcript 30221.m002250 (locus 30221 .t000040) derived from phytozome v7.0 (chr-ID 30221; pos 1 276852 to 1277784 reverse strand)
gttagcgaagtcgagagagacaacgaagttgccaggtttctctctctgcactttaaaagaaccattctttttctttttaatcccaacttcgtatagtggtactgtactggtaagatatatcatttcttgaaatccatacgcttaggaacttttattgctctgtgattgatgggaattatttatggcattacatgttcaagtaattcctggaattttgttttaattatgctgcggctatatatgtgctgcaacctcatagtgattggatttttatgtatattgatgtgaggaatttattattttccctcccaacgaatttatatgtttttggccgatcccaattatggtacttaagttagggctatgaactatgaacaggatggagcaggaaggaggaaaaatttgtgcaagtgttttactagaaattaaggaacagaatatgaatgaaaaaggaaaaagaagaaaatgggagaaagagataatcaacttatttgatagactctgcgtctgattataagatgttttaaacatgggaaagctgattcattgctgagaaacaagcataccttaatgctaaaaaagaaaggggataaaatccttgtgcccaattttgcttgagattaaatgctttattattcttctagagcgacagtttctttggcattttttttattacttgctgatatatccgccctcattctttattttgatcaatttcactaccttagctttggttaggaccaaaatttcaatgaaaagtgcttgtttactttcctgtgctgcgcttgatcaattgttttttcttttctatgtttttcttttgtttttgagatttgttttaatacttaagattctttattacttagctcattgtggacaagtgttattctattctcttctaattgatcatatggaaagttataggattctttc

SEQ ID NO: 52417 - DNA, 611 bp, Ricinus communis
  Intron number 1 from transcript 30178.m000859 (locus 30178 .t000021) derived from phytozome v7.0 (chr-ID 30178; pos 1 58261 to 158871 reverse strand)
catacagatttatagcagcacagtcctggatccaagtaagttcagaataatggagtatatcatatctcagatgattatattttctatttataaatataatggtagaaagatggtattgaactttgtctagcagaaaaagaatatctaagcttctctgacccctttctaactaaataatcaattcacgttttaagatattaagctattatagtatagtttgtctagcttaatctttttgcaatctcaaaccaacatgatgcaatttgattccaggggaacatgaagaaatatgcttcctagttaaaagaaaattacatttaacacaaagttgttacagcatagcaactataaatcctttaagctccaagagatttgtctttttgccaccgtgcatttcatatcaatgcttatgaccctcaaacatacacaacttaaatattaagtagtaattaataatatgaggtcataaaattatggtgccacagcatcaattttaagataaaatatatctgtgaaagaacaataaacatagcatcaacctgttgctaatcttttacttcatatgtttcctgataggcacaggcagaggaaagttgagtaaaaaagcctac

SEQ ID NO: 52418 - DNA, 319 bp, Ricinus communis
  Intron number 1 from transcript 52526.m000045 (locus 52526 .t000003) derived from phytozome v7.0 (chr-ID 52526; pos 1 0287 to 10605 reverse strand)
ctttcgtgagtctgcctctttcgccgtcacccgtaccagttcatatttggttacccgaagtgcattttttgtatcggtggtactggacaagctcttagggaagaatctctttcttatttctgcctttctttcccatgacgactaggaacgggcaaatcaaaaacgaaaacatcgaaagataaaaaagagaaaagtgaaccagttgatctgcaagcggtacaccttagaagaaagagaaagaccctttcgtcccagccgtttctttttatttgattattatttagaatcctatactaaagaagaagctcctgaatcagcg

SEQ ID NO: 52419 - DNA, 544 bp, Ricinus communis
  Intron number 1 from transcript 30169.m006403 (locus 30169 .t000180) derived from phytozome v7.0 (chr-ID 30169; pos 9 92119 to 992662 reverse strand)
tcttttctccaacataaacattgaagtggaaagtatgtttctaatttttttctccaagttttcttctgcgttcttctacccttttgtttgacttcttaggaaaagagtgagattaagaaaaataaaggggcaaaagaaaggttcgattagttgatgaggccacatacgataggttttatggttttcttttgaggtttcccttatgcttttgacaaataagttaatctgagttaaccaaccaacaaagaaacaaaagaaaaagtgaaccaagattttgtttcctgaacagcttgttataaatttatacttgatatattagaactttggttaaattctttgtgttcttctgatataaccaatcatttgaacttgcaagtggagcttaaaaaagcattttattataaaatagaccaagttgtcatggactggactttctaattatttgcttggatgtcttatacagtttcctatttcagaaacttattaagtacagttataaaacttgcacttagaaacatcagttttggcaacctggctgcaggct

SEQ ID NO: 52420 - DNA, 690 bp, Ricinus communis
  Intron number 1 from transcript 30169.m006605 (locus 30169 .t000382) derived from phytozome v7.0 (chr-ID 30169; pos 9 5388 to 96077)
caggtaccctttgttcttcttacttacttacttacttattacattgctccctggcggactttccctcttgcaacattttcttttagagttaactatttattttatatttatgtattgtcttttcctttccatccttgttaatgtttattatttacttaccactcacaataagagatctgtcactgtatattatatatatatatatataaagaaaataacaggtttttgcttttcatatacaaaattactagaaatattttttaaaagaaaaataaaatatgattaattaggaggatgataatatcaaattaattgagaggaagaaaaggaatcaccgacagagtaataaaggtgggcatggtaaaagtagaaagtaaaaggtgatgttagggttcgaatgaaaatgtaattagtattgagaaaagggcaaagacgataatgacagtgataggcaatatacatatatccacatacctacacatatatatacattaaattttaatgtatttttattgattttaaaagatggaatgcctgtcaatcactccaaactcgcatatttgaaaaacataaaatcagttattcgtggtattttgttagattcttttaattataactttttgtttgcaataacgttatctgtttttttctttgaaaaaatgaaaaaaaaaaaaaaaaaaattgcagtat

SEQ ID NO: 52421 - DNA, 816 bp, Ricinus communis
  Intron number 3 from transcript 30206.m000765 (locus 30206 .t000013) derived from phytozome v7.0 (chr-ID 30206; pos 1 84759 to 185574)
agtgaaggcttgaaggtttgttcttccttcattaatttctgttataaataaattcaaatttccaatgctagtgttttaattattagaatgatggactcgcctattgggaggaattcacaacatagattcgtgattcgtgaacacaaggattgttcaacttcaaacattttcatttatttatttatttttttagtagtgtggtagaatctaagttgttgattgggatctacaaagaaaatgcttgtaaataaggaaattctatgccatatgcaattattggtcacacacactgatgctactttagccttgtgtgtcgtgtcaaggagtatgccaatttgttattgctgcctcctaaggcttgacgataactacctttgtagtttttattatttttgtcaaagtgctgggatattgtcaatacttagttcatgcttgttctcttggtcaatttggtgattgcttgaggtaacttaaatgtatatgagtagtagatatgggattgttatttagaataagtatgttaacatatcttgcccatatttgtcattggttgttcacattgaacgcaaaataggatgttcaaagggtcatgaaattacaatctttatcaatataattgactaggaaactcaaatttgagtttcatagtttcttcttttggtatgttctgatataccaataatagtactaggatgtgtttttttaattttttttttacgagttcaagctatgtgaagcttcacaggtatgaatggtaaatgattaatttttctttcttctttatgtggcagattcttgagaaggttaaagtagcat

SEQ ID NO: 52422 - DNA, 363 bp, Ricinus communis
  Intron number 1 from transcript 52298.m000043 (locus 52298 .t000002) derived from phytozome v7.0 (chr-ID 52298; pos 9 394 to 9756)
tgtgcgcccaaagattactgccgtccctacaccaagtaagcttcttctcttcacaatattttgcccaagagaaatagaaaactttgctttataacttgcctgattttattattttgcaaatgattgaggatttgaatactctggatggatactgtgtcctggaatcaaatggaagaaaaaattattagtgttatatttgagggttgattattatgggaatatttccaggagtgttcaaaattgagaaactgaaaggtgaaaagaatcttaattaaacttaattcgattatctctatatggccatttgattctctgttatttgtttgagtgggaaatttcattccagtatcacaaatacgagat

SEQ ID NO: 52423 - DNA, 433 bp, Ricinus communis
  Intron number 2 from transcript 30170.m014072 (locus 30170 .t000484) derived from phytozome v7.0 (chr-ID 30170; pos 2 628051 to 2628483 reverse strand)
gattttgaacccaaggatcctgaggtactttcacttgcatgttttacttctctatttttttcgaatgagtcatttcagagttgttaattcttttactagtcaattttaatttgattaacttaatttgaataaggagtttttacttgctgcttttagtaagtggatattttatattaaatttacacgatccgatcattaaattcaaaatgaataattgaaatttttctatttaactgttaaataaaattttgatctatgttttttaaattttaaatttgttataatttatgttgaagaaatttgacctcccttgcaaaatataatagagaaaatggatcagttgtattttattataataggacaggtatcataaatgaataagtcgtaaagattttcctcttgaattcttgactgattgcttaaaattggcaga

SEQ ID NO: 52424 - DNA, 494 bp, Ricinus communis
  Intron number 2 from transcript 30190.m010785 (locus 30190 .t000021) derived from phytozome v7.0 (chr-ID 30190; pos 3 349095 to 3349588 reverse strand)
ctgaggagtttgactatagttctggtcctaccttggtaagtttgtatgtgcaagtcaagggttacctccgccaatttagctgctagctgagcatgcccaaatgctatgacagtgttagaacagttttggtaactaaatgatgactaatgagcttagccactcaggaccataggttatttgaaattggctttaatttaactagggcttgagatggctcgctcaagctctatgtaaagaataatttaggaagctcaagctctatgtagagcacaattaggaagctcaagctcggtcatattatatggactggaaaaatcttattattttggcggaattcaccagtttttggctggtatagctcattgattctgtggtttcttcatttctttgattgaatctaattttgttgaatatggtgttccccctaatttctaactcgttgcaaacttctttctccaggaagtagctaagaaggttggtgaagtcattgccaa

SEQ ID NO: 52425 - DNA, 609 bp, Ricinus communis
  Intron number 1 from transcript 30190.m010785 (locus 30190 .t000021) derived from phytozome v7.0 (chr-ID 30190; pos 3 349681 to 3350289 reverse strand)
tccgtatcagaaagaaggtaattaacgtaccgtttttaaaaagaagctcaattgggcttttcattttcttttattcatagaaagtttgtacctttgcacttgggttataactcaaaaggtattctgatactgaagttagattagtttattttttaccattgtgaatgaattgtgtgcattgcattgtaatgtgttttggtacttcatgctcatgctccagtaaattggaaattgtgtatcagttttttcttttcttgaaagctgtgcattgttaacctggacatgtgagctagaggggaaatgttcaggtttttcaggtcatggcattgttttagccttttttggtcattgaatgatcactagaaaaaatttgaaattttttgcaagatcttgatgtgaaagtaatttagtatttgtactattaatttttctgttaagggttgttctggtatctgaggtttatccactctgttttgatgattggtgcggtgtgcatttgcgtgtgaatttctggtcttggctttatgtgatgcagaatctgcctgcactttttgcaaattcttttttctctcaggttgaaggaactccagagaggccaaggttaagtgt

SEQ ID NO: 52426 - DNA, 806 bp, Ricinus communis
  Intron number 1 from transcript 30147.m014035 (locus 30147 .t000306) derived from phytozome v7.0 (chr-ID 30147; pos 4 132688 to 4133493 reverse strand)
tcggttagttcttttaaactgaactcatttttctaatttgtagattaaaaagaacaaatttaaactaaactccttgttctaatttgtaggaaaaaaatcctcttcttcttttttctaaaaaagaaatgatttattttttgggtgtacaaattataaaggttaaagctttatctgtatcacgagatttggtttaatgggtattaaaattgttaagagtatagttaatgtagctcgtttttaagtaatgagaatgcgattaaggttgtgccaccaactggtgaggtggccatggctaagattagaagctatgtctttataatattggaaagatttagcgaatcagcatatagtttgcaagcactgtgctatatccattttggagtcttatctcacatgctttatgataaatgggaggaaatcaccttgggatcctaggagtatcttgtgatggtaccagaatgatgagaaaagagatgtaaaagtgttcagtgatagtagtgacaattctgtacccacttactttgacagttgtccagcagaattacccactttcaatagccttctaattttgacttctctaggtcagttgtatggaggtttataacttatttgctaatatgataatcatttacaagtggagtatctattatgctcctttcagcccttccagctaagattctcttccttagtttctaatcacattttcatcctgtgcatgaaaagaagttgctatacttgcaattatttttattttgccttattttttggcagatcgaggatattactcggtggaaactgtgactctt

SEQ ID NO: 52427 - DNA, 650 bp, Ricinus communis
  Intron number 1 from transcript 30147.m014530 (locus 30147 .t000801) derived from phytozome v7.0 (chr-ID 30147; pos 2 460401 to 2461050)
gtggcggggctatcttcacctggcccttgaacaaggtaattgtacttctctgggattttactctaatcatgatctttgtaaaaaaaaaatttactttttctttttgttagtcaattaggtaaattctgaggctctatgtccatgacaaatcagactggtctgggtttcggattaaagtggctctagatgatgctgttctcatgattattggtttgggtagttggtaaatttcaattgtgattcttgatttatgtattatatcaaagtgataggtgttttcatgattatcaagcaagattttttctcttgatgcttgatcaaggaaacttttgctgttggtggttgattttataatgaaattcctgcttagcctggtggccaggggatttgtgcccctgaacctcttccccctccccagttattcaggaaaaagaaaaaacgaaaattcctgcttttacttttgttttcatttttgctgatttgcctcatatttgtaaaatctgatcgaactaccaaagatgattcaatgaaaaatttataaaaaaccaatccacctattctgaaatctaaatttgttggcataagattctacttcatttcatgttcaattttcagcctcaatcaccacttcggagctacccacttgaagc

SEQ ID NO: 52428 - DNA, 185 bp, Ricinus communis
  Intron number 3 from transcript 30170.m014362 (locus 30170 .t000774) derived from phytozome v7.0 (chr-ID 30170; pos 4 130427 to 4130611 reverse strand)
aatccatctatcccagtgcatcgaccaatcactaggttagttccttgccctttcttttgattgtgaagatgatcaagctgaatgctgaattttttttttcttttaattttctgtttattttatattccccattttttttaatgttactaggaagtttgctgcccaacttgctaacaagcagcaac

SEQ ID NO: 52429 - DNA, 580 bp, Ricinus communis
  Intron number 1 from transcript 30170.m013756 (locus 30170 .t000168) derived from phytozome v7.0 (chr-ID 30170; pos 8 63921 to 864500 reverse strand)
catcctaagaactacggtcccggttctcgtacttggttcgttctttgattctcattgtttaattcgatgtatactgtttagacgtccaactttgattgtgccttctttaatattttaatattgtgttcttttacatcttaagcgcgctgattatgtgatattaggttttggttacatgcttgcagccctagttttaaaattaattcaatcgatttcgcatatttagtatcaaatcaatcagttatgcttcgctctcacggatatatacaactggtgtcttagattcaagatgggtttaaatattgcttaggtttatttataatgctttggaagaactgcatgatttttcttttacttgaggatatctatagttttttttgtggctctgacaagtattatttatgcataatgttgatcttgtgtgtaattttattattttccttttgtagcaatggttaatgatcagtcttgacagcatgtcaaatttcatctatttgtaattatatgccaattttgattttgggtttactgttcttattttgcagccgcgtttgtggaaaccctcacggattgattagga

SEQ ID NO: 52430 - DNA, 867 bp, Ricinus communis
  Intron number 1 from transcript 30174.m008742 (locus 30174 .t000139) derived from phytozome v7.0 (chr-ID 30174; pos 2 620506 to 2621372 reverse strand)
cttcgctccctaaaggtaaaaggataaaaatcattagttttgattttattttaattaaatatatttgcctatgatttttttggataatttctgtcttttctgtcagtatattggttttcttttgcttcaaacttgaacttaatggtttttcttttcttttgtattataatggttaaagctgttatgtcactttgtataaggttattgtaaacgtcctttgtgaattccgctttgtggttatgttagtttaattgttttatgaatgatgttacagctacttttgggtttaagatattttctacatctgatatattaactttggaagtttttgcactcatatgtttatggattgtgcaactgtgaagtgttattgctaactaccagtgcacgaccttgcttggctagacgattatttcttactcttcatatactatttcttttccctaattttaagcaaccactttgggagtatactgtttaatgctttttaactttactgcatgctaacacaagtttttgccttaactcaagttattattttggagcttattttgcttttggtgatgttagctgctattgtataactgaaattcatcatgtacttatgtctaaaaaaaaaaaaagaaaaaacatgcataagcttttatctagctcttgattattgtaggtggttgtcactgtttgtttcctcaaattatagcataaatgcatggatgtgacagaggaaatattttttgttggttggtgatggtttgcgataatgctcaattgtgaactgtgtttgatgtccaaacaatgcaatgaataatgcttttaatattttcatttgatccatcttttacttattaatttttggtttcagcaact

SEQ ID NO: 52431 - DNA, 700 bp, Ricinus communis
  Intron number 1 from transcript 30169.m006534 (locus 30169 .t000311) derived from phytozome v7.0 (chr-ID 30169; pos 1 758075 to 1758774 reverse strand)
tcaagagagtaagtgttttctacttctagttctgcttctttccatatatagtaactctttctttcggctttactaagactcctttgccatttttccctttttctcttctttttaactatctcttctttacaacatagactctttcttggctgatacgggatcagcaaacaaagaatttttctttatcaaaagaaatgaagaagtgcactacttattttcttgaatgaaactcggcaatttaaccaaaacaaaaaaaccctgcaatagctttcttaatatcatacatcattttagtttgttgcgtctgatatcctttattcttgattggctcttaactttgttaaatgtttctggctctaaactgattatatatatctcatgtttactcaatcaaataattaaattttgcctgaaaagcaagattcttttgaacacttcgccgtgttctctcttctcttaattttcttgtcctgttgtatgtgactgaagtactattattaagttaaagttcattagtttttatttattttatttgtactcgttcttattatatatgtttcttggaatagagaaaccaaacgtcaataaatattggcaattggcttcttatttaattatttatttattatggttagtacgccttcttattaactttcttggattagggagaccaagcatcaataattggaggtgtcgttaa

SEQ ID NO: 52432 - DNA, 562 bp, Ricinus communis
  Intron number 1 from transcript 30147.m014425 (locus 30147 .t000696) derived from phytozome v7.0 (chr-ID 30147; pos 1 865510 to 1866071 reverse strand)
aacccttgcttttccactccaacaagactagtctggtgatgcttctctctgttcccctgtttctttttgtttttttcttcaaatatttacatttactacttgtattttacctcatttcacaatgtggcacaactagctgccgttgtctgatattctttttttggtctttgataaagtagttcgaaaccaggagtttatgtcattaattctgaaaaagaaaccatgtattttaatgctttaaacaacttcacaagctagtgaataggactgaaagcaccaattttacctgttcaaatggctgacattgggaattgaagttggtagctagttgaacttcttacatatccaaggaggaagttcaatatttcagagaattacaacgacgacatgttttgtgaataattgtgtttgtaatttttttagttgttttggctctagttaaagtttgaacttatattatggcaagtccttccaatgtcactccagtactattaaaccaaaacttatcagtcgagtttgttattttgtatcggtgcaggtagcagggagaactagttcaaac

SEQ ID NO: 52433 - DNA, 421 bp, Ricinus communis
  Intron number 5 from transcript 30169.m006342 (locus 30169 .t000119) derived from phytozome v7.0 (chr-ID 30169; pos 6 26558 to 626978)
ggtaaaacttctggttgatgctgacaatgcatagcatttatttttaatcatctatctcatatttctgctagtggtatgttgtaactgagctgaatgaacaattttatgccacacacttgatgagagtttctttatatgaatgttttttgtgtgcttcctattccattcgaaactaaagtactaccatatacaatttctggaaattctccatttgtattttatgcagaagaatgaattaaattaaatgtatacacgtgggtagttggcctatttgttggatattataattttttattcttttataagcaaaaagggagattgacagattatattgcattaagtactgtttgcataatttttcacaacgtgtcggttaaatacaatcaaatttactttaccatgtcatttcattttgcaggtg

SEQ ID NO: 52434 - DNA, 473 bp, Ricinus communis
  Intron number 1 from transcript 30147.m014403 (locus 30147 .t000674) derived from phytozome v7.0 (chr-ID 30147; pos 1 705750 to 1706222 reverse strand)
atcaaccacaaccgattcaagatcaaggtgattcatcacatatatgctcatactcagaaacaatttattattttcttatctaacattttacatttgcatgaatggtctcaaactatatatttgagttgctgttatgttttttttataccttcagtttttatttcatatctattggttttaattacttgctctttcttctcttaatatctaataaagacttggggatatgatgcgagtgatatttgattgatgtgcttaattctcacttttccatgaattatacctaattaacctcaactcttttcttctacttggatcttgtcttttttataattaaaattcaatttacttattagaatattttttggccctaatctcagtatctaagttattaccaagtgcggtttgtagtgaatatcatgcatactaactctaagaagctagcacatacttgtttaatgcttgtgtaggga

SEQ ID NO: 52435 - DNA, 707 bp, Ricinus communis
  Intron number 1 from transcript 30169.m006634 (locus 30169 .t000411) derived from phytozome v7.0 (chr-ID 30169; pos 1 41768 to 142474)
aggttgctgttattatgtgttccttttggttccaaattccaatacaacaaaagaaaaaagaatgtctgtttattttcgtaaaatgctcaaccaaaacaaaacagtaacaagaatttgcgattaatcatatctcaatcaatgcaaaactgaaagtttattaatattaattacccacacaattttattctttaattaaaatttaaaattataacaaagtctaaatctcaacttatcaatcacttgaaagcattagctttaggtaaaatgggtattcaaaccggatcttttgatccgagtagaccgaccggacgaaataacaaaataaatgataaacaaccgaaccttatctctcaaattttttaatatgaacttgagaaaattgaatccaaaaagccaaaaaaaaaaaaaaaaaaaaaagagcaacaagaaatgtcaataacttcaatagcaatcgcaagtagcagtagcagtagaagtagcttcctcaggtttcttcgagttcagtgctctgattcttctaagcctaggcgtggttttggcgccaaaaacgacgacctcaacatcaaaaacaaggtacttccaatcaatcaatctttactttaccatctactcatcactcttttattctctctttttttttttttttttaatatatatattatatattattagaagcttagagcttgaattttatcagacaaagaaac

SEQ ID NO: 52436 - DNA, 522 bp, Ricinus communis
  Intron number 3 from transcript 30169.m006634 (locus 30169 .t000411) derived from phytozome v7.0 (chr-ID 30169; pos 1 42687 to 143208)
attgactttgagcaacggctcgaagcggttagaaggttccatttcataccattacgcgttcttgaaattcaaaagcaagaaacataattaacttaattaccagtcctcatcagctctcattttgatagcattctgattgtttaaagagctctctttttggtgttattgcacgccaaccttgtgatgcatgaattgaaatgcaccatcttatctcttctttgctttcctccatttgcagaatttttttatttaaatatcccagttagattattttattaatttcaatctcattaaaccgtatctcttgttgccttacttcaagttggggtctatattatttggcccttttttttttcatctaaatttcatttctttaacatcacctcaaaattactatattccattgaatgacaatagttgattagtaagattcgcttggttctcatcatttttgcagttcttttccctgaggatcattccttctgtaactactcaggtcagctctcgaacaaaaaaagacag

SEQ ID NO: 52437 - DNA, 423 bp, Ricinus communis
  Intron number 3 from transcript 30174.m008720 (locus 30174 .t000117) derived from phytozome v7.0 (chr-ID 30174; pos 2 445586 to 2446008 reverse strand)
aggacccaagagcagtgcgggtattcgataggcgggtcagttctattctaatgattttatgttgattggtgcattttctctaccaaatttagaagctattttgatttctgtgatatccctattgtgaaaatctttgttttcaaaaagttatacgtgtgtaattcttgcttaataccacttgatatgctgtgtccctaattcttgttagatttaaaagacttggcactactgacatttttcaatgatgataatacgtctacagattttttttccataattcgagtttatgctttcatggttttgataaaaattgttgtctttcttctctagtagatttttggtttatctcattttactttgtttcttattgctttcatttctcaagtactttttttataaatgtgtaggactattacacatcac

SEQ ID NO: 52438 - DNA, 566 bp, Ricinus communis
  Intron number 2 from transcript 30170.m014159 (locus 30170 .t000571) derived from phytozome v7.0 (chr-ID 30170; pos 3 207942 to 3208507)
aagctcaaaattctcaaggtattttcctttttttcgttattattaatattattattattattatctgcgatttccaatatcaagcgttagcaagatctaattctactttcgcttcatttcttggattataaatcagaattgaagaactaatttatcctgaatgatgcttaatatatgctttggagctattgaattaggttaagagggagtttgagtgtattgtaaatgtaattcagagcaatttattgcaggtagtctagtgttctacaatacctctgttgttgttgttgttacaatactacatttcattagaaaatagaggaaggatatcgatgaataacccaatagtcataagatgattcataatcgtaagttatgtgcatttttgtttttgagcttatattctgagtctttgttgtcccttggtgattttcatatctatgtgatctacgtgaggtgttctctttataaaagaaaaaggaattaaatctttggcatttatattgagagcatttggtattacagttatcaaatatttcatattattctcaaatttcatttaccag

SEQ ID NO: 52439 - DNA, 948 bp, Ricinus communis
  Intron number 1 from transcript 30209.m001509 (locus 30209 .t000008) derived from phytozome v7.0 (chr-ID 30209; pos 2 47051 to 247998 reverse strand)
ctcgcgctgtctctgtcaacccccttgacactagagtgagtttattattaatcttggttcctgttctttttgtttgttaactttgttttgtgtataaattatatggtggtcaataattattggttggtgtggaaaatgcgtgaaatgataaaaagaaatgttgatattgggcagtttgatgtttaatgaatatggggtttttgagtaaattataactgtaaatgattaaaatgttcatatatgtttaggataaagagacactgatcttcaatggaatattactttagtactggtaaaatgagtgtttgtttgtatgtattcttgtaggcattgtttgaaataaatcataagcaggaattaaatgcaattatattcttccaaaattatatcatttatggcatgattttgtttcttataagatgcctttttatttatttgtttatttatttatttaagtattttttaagttgaaataattgaattataacactgataacttttctgaacttgagaatttactaagatttgaattgacttttttgcatctttgaacttctcaaatactatgatagtaagatatacaatggaaaaagagatttgtgtgatttttcttagaaaaaaagagaaaataatgtgagagggtggctgttcttataggaatgttaaagtgctttctgatgcaatgagctgggaaacttgctgtattttgtactctaggaaaatactgagtcggtcagtattcacacttcttttttcttggatttttttattaaggagtgtgaatgaggatttcatttgtgtttgtggtctctcattcctagcaaaccaaaccgagttttaatgaattattctgaataacccaaataaatgaacaaataataccttaacatgcctgtcatgtacaatcatcatcaaactctgaatgtctgcaaatcttaatgctttcag

SEQ ID NO: 52440 - DNA, 737 bp, Ricinus communis
  Intron number 2 from transcript 30186.m001309 (locus 30186 .t000014) derived from phytozome v7.0 (chr-ID 30186; pos 6 50517 to 651253 reverse strand)
ctgagcttggcactttgcctggagctttgtctgaggtttatttcctttgcaactttttgtctgtatctattgtcatatttaataatttgaccatgtttaaatatgtacctaactttgacaaaaaaaaaaaaaatgtcttaggttggtttgagcattgctgatatagaatttattagtaagataaactatttttagatcttatctaataataatttgagattttaagtaaatgtaattagaagttgatataactttaaataataaaatatatatcaatcatgtagtaatttaaaataaatataaatatttattgtcattacatgcgacaacaaacaatgagtctatgaaattatttgagatttttttattaaatatctgaattttatatcattttctatttcgttcgaaaatatatacatataatttagataaaaatttcttaacataaaatcaacatatgttaatttacatttcaaaaatatgttagcgatataaactattttaaggtctagcctaatagttaatactaataataatagcattcaaatttgtaaattaaaatgtcacaatttagttggttttatttaatttataatttaatattcttcttgaaatataaaatagcatgttgtgtctgacatacttatgattgaaaataaagtaaattttccaatgtatctgcaactcacatggggatttcagagtgaaataaagcaagtggcaaggagtgagaaaat

SEQ ID NO: 52441 - DNA, 578 bp, Ricinus communis
  Intron number 1 from transcript 30152.m002413 (locus 30152 .t000034) derived from phytozome v7.0 (chr-ID 30152; pos 1 275074 to 1275651)
tcactatacctccaccgatatctcctccaccgtcggtctgtttttttttttttcaataaattttttcccttttttggtatgcaactgaagttttctttctcattaaagaaaaacttttttttttttggattagacctttttctattatttgatttatttcttctttattgtgtttcatttgtaaagattttttttttggttttttggttagaatgtgagttacttatttaatggtattatctcagtgagtgcccaattttactgtgcgacaaagatcaaatactttatttgtctcaagattttggattaaagttttgtaattagtccatttttaaaaaataaattctaataactttctgtagtttggagattctacttctatctgatttttatgttaattttaatcaaaggttttatggcaagcaatggttttgcttattaaataggtttttatttggttctcttcaatggggtgaatttatttagaggtacttgcttaaagaacagcatttgtgggaagtttactgacagtgatttgattttttttttttatatggattcgtattttagatcgcatt

SEQ ID NO: 52442 - DNA, 641 bp, Ricinus communis
  Intron number 2 from transcript 30226.m002042 (locus 30226 .t000066) derived from phytozome v7.0 (chr-ID 30226; pos 2 206352 to 2206992 reverse strand)
gatttgctaccatatttgctggtgaactggtatttgaaaaacaacacattaaagtttttgaaaaataataatagttggttaatgtttctttccaagtttgtttcagatctattttcatgcagtttcttatctgtctaactataatttgctcagtttttattttaaggaattgatattttatatgtgttttcaggattgtttttaagtaagttatgtggaaaagtactgatagaactgcccaacatatttatattttgttttgtgtgtttcaaatatgctggatgagggaaactctgggagactgttgcagtcgatgtataaaagagaacatgctcgctgaccgaaacttgggtctatataataacacaagttaagatagtattattgaaacaatattaaaagaaagagagttcagatatggtggtcaggattgggaagattcttaatgggcaagatggctgattaatgttaatgctcaaggcataaataggaatatattttttccttattctggaaattcttttgagtttttaacctagtgaatgcttttagttttatggtaactcttttccttgctttctgaaattaataatttttaatgcttttacttgatagatagacaggtttggacatttcaaagt

SEQ ID NO: 52443 - DNA, 548 bp, Ricinus communis
  Intron number 2 from transcript 30147.m014340 (locus 30147 .t000611) derived from phytozome v7.0 (chr-ID 30147; pos 1 439557 to 1440104 reverse strand)
gcccgaaaatccacctgattataggtaactattaattctcgttgacatgaaatagaaaaaaatagtaaagcaccaaaccaggataaaagggtcttccggtggctagatatgaaaaagtgtttgctgtccggtgtcatgaaatttatgggtcacgtcactggtgcaataaatgcatggaatagattaattataatttttataattaaggtgctgcgacttgtgcctctctttgatagcaaatcctgcaaagatgatgcatttggtgtgacacatgcatatatgacctaataattccacaaaatttatcacttgaagcactttatagttcagatagccgacttattgccagactatagctttccgacacagggaagctgtatgcaacgactttggacccttaaaaagaacacgagatttctttccgttccaaacacctgggtctcagatgtaggcccatgtccgacacccacttgggaaaaaaaaaaaaaacaaaagtgatttttaataaaacgataatatttcttctaattttttgttccagagaaaag

SEQ ID NO: 52444 - DNA, 485 bp, Ricinus communis
  Intron number 1 from transcript 30152.m002435 (locus 30152 .t000056) derived from phytozome v7.0 (chr-ID 30152; pos 1 615730 to 1616214)
tacttggatttgaaaggtatcttttgttttgttttgttgatttatatgttgactacacttttgtttctggtttaaataattatttctatatatctttcattgagccagaagatagttggccatattagtggctgactaattactcattgattttcatagatagtgtccttattatttttcaccctccgaaatcatggtggattgaagttgcaaacctcccaaaatttggcatatacattgtggaatactgtagtttttgactttaccaagtttcttctttgcttttctttcttttcctcccttttaccaattccactttgtatttggctcggatatcagttctgccatattatgaccttatgtgcacttggtctctatcagtaagttaattgttaagcatgtcttcataaattaggctgcatctgattggtttaactttggttgtttcaggaacaatatacagaacaaaaatagttccttccagg

SEQ ID NO: 52445 - DNA, 985 bp, Ricinus communis
  Intron number 3 from transcript 30171.m000424 (locus 30171 .t000021) derived from phytozome v7.0 (chr-ID 30171; pos 3 34426 to 335410 reverse strand)
gtttttccaaggtacgtgagtgactcctgtcttcataatcaatcagttcatcacgtggtcctactgataattagattttgtaaaataatcatacaacttgtgctcgtgcaaaatgggtttgattatagttgatatttcatatttgtggtactctaatttgatgaactgcgtgagtacattttctgggttaattgcgtaacatgaaatgtaattttagtattagggttaaaagtaaaattctaaataaaaaataaccaaaattattgagacccgtactttaaaatgagttgaatattaagtgattttcaagtagcttgctaatcaagacaaccacataaacaaaaaatcatctaaatttatgttgtgtttagttgaaatttataaaataaataaaatttatttacaaatttaaaatttatgtgcattgaataaagtgaaagttaatctaaaactttttataattaaatttttatgaaatttggttatagctaaactaaattctaaaagaatagataaaatttttaaatgaatttcacattaatttgttaatatatttcttaatactaaaatctttcttttaactttattattttcattttattttctcaattatatttttttcttaaatgaaatgaatttcttaatggatttaagtcaaatatagtgatatttcagtgatactatactcgaagtttggataccaaaatgatacaaatttgatagtaaaaataaaataaactaagaatttgattatcatccaaataattaactcacaatttcatgttaaaattagtagaaaactcattctgagccgtaggctagattaaaattctcggtagcccataaacttgatttgggaaggtcgacaatgaatatctgagattcaagtcattctcctacatccatttcaattatagactccataaacacttagtttaaatctttgataaccaccaaaaataatgacaggttacttggatagaac

SEQ ID NO: 52446 - DNA, 773 bp, Ricinus communis
  Intron number 1 from transcript 30147.m013968 (locus 30147 .t000239) derived from phytozome v7.0 (chr-ID 30147; pos 3 714124 to 3714896)
ctcttattccttctcatcacttaaagcattccaaggtaaattgcctatacagtgtgtatactgggaattcctttattcttcaatcattaagtttttaagcatctaataacatcatcagatcgatcaacaaatttgggtttattgctgttactagggtcgccccaaattcaatgaatttttatcatcaactccaattaatattaatcaaatgcctgacacaatataacaagtcaggaaattcttgcggcaagaattgaagcagtagggggtccagttttaagatagatgataattttgggattaaaaccaaccgcacatctgttacgcaggttttggtaacagtaatgggtttctttttcccttgcgtccagtatgcagttaattctgagtacgtactgcagtcatgacaagcaactcagtactatagtcgatgagttatccattcaaatttattgctgtactcctcattatattacgtaaaagaaataaacagattactattgaacagaattatgttcacaatgcgtaagcaatggtgccatttttatgttttgcttagtacagtgaagataccgaaatgagctctaatacagtttactagttactaagcttgtttatgtctttatagtattgtttcagtctcaacttataccgattgcttcacgtgacttgctaatattaattttctttaaaaaaaaataaaaataaaatcccagctatatattgattgtttgttgtataggacacgttatcgcagcaagatcaactagatc

SEQ ID NO: 52447 - DNA, 374 bp, Ricinus communis
  Intron number 1 from transcript 30170.m014351 (locus 30170 .t000763) derived from phytozome v7.0 (chr-ID 30170; pos 4 084403 to 4084776 reverse strand)
cttacccctatcaatcgagatctctaccattcaaggtaaatttaataaattattctgctccttcatcttgatgattcttttctcaagttttagttttggtttgcctactgcttcttttcttaatttttatggaattgttttattattttgaccacctcttttttgtggagtcttttccaatttcatggattttgagttttttttttaatcttagataatgattgtaaaggtggaatcttttgtttatgtatgtatctagttataatcatttttttattgctgttttgcttaaattcaactgttatgttaatgcgttttccttaaattttgattttgcagccttgatttgttggagcagataaaggcattggttc

SEQ ID NO: 52448 - DNA, 409 bp, Ricinus communis
  Intron number 1 from transcript 30174.m009070 (locus 30174 .t000467) derived from phytozome v7.0 (chr-ID 30174; pos 2 859924 to 2860332 reverse strand)
tcagcctcacatttatttttggatcaatctacgtaattgtctaattctgtgtattttttctttttctataagaagatcaaacaggccatggattgtaatagcttaaatttttgaattgaatggtaaattttgtgtgatcttagcgtctctagaatcataagattaagagctcaaatttagccgacggcctccaacattttcagcaaaattgtgcatgtcgatacttgaaaaaaatcgcgtacgtcgagaagtccttaactgttgtatataaaattgaaaacttccgatgacccttgatttaatccttgttgaaagctttgaattgtgatcagtaatctagctaattgtttgtttcttatatgatttggttgcagggaagaactacgttagttggcttgggcctcggcct

SEQ ID NO: 52449 - DNA, 572 bp, Ricinus communis
  Intron number 1 from transcript 30174.m009082 (locus 30174 .t000479) derived from phytozome v7.0 (chr-ID 30174; pos 2 939235 to 2939806)
ggtgttgagcaaagattttgtcagcagtgtagcaggttagcttctttcctttgtttttctggatcctttctttccttttcatttttgtttaaaccacgatgcttatctcggttcttagttgttcttagttgttcaatactatatttatccatacattgcgtgttggatggttggcttttaatggcgttagtaaactactaacctttaaagattctgtatgactatcagtctacagctgttcctgtttgaggaaaaaagaaaatgaaggaagaaaaatggaataacttgctttaaagattctgtgtgattatgcctgctgctgctctggtttgtattggagaagatattaaggaacaaaatagaataaaagtgaatgtaggatgagaatatttagaattagaattacagtggcctgaattttagttcattaggtagcttcaattctttaatgcgccatgcaattgtatggccattttaattgatattataatacttaagtctgtgaatcctttgcctatgccttgtctttcttttgatttgtgtaatcaggtttcatttgttggttgagttcg

SEQ ID NO: 52450 - DNA, 901 bp, Ricinus communis
  Intron number 1 from transcript 30147.m014170 (locus 30147 .t000441) derived from phytozome v7.0 (chr-ID 30147; pos 7 48444 to 749344)
tgatcttttggttaagcaaaatcctcttgtcaagggtaataaaatggataataggctttgatatagttaggatgaataggctttgatatagttaggatgaataggctttgatatagttaggatcaaggtttactttctgtttgtaatcttcagattgcacaaattagtaatttatttttggcagaattcgcaattagttatactcaactctttcactctgataatcatattctagagatatttcaatagactcgggcatttatttttctggttcacacgagtaatggaacttgaacagaatttactcataattttcccggtaaacacatagtttaaagtattctatgtgctgctgccaactcgtgtttggtttctgcctattgttctctttgccctttgttatccaatttgcttgctggtggcggtagcaagaagcatcccctagaatttccaatccaattccgttaattgattcgccgagtgggctaaccacatggacttgacattcataccctttatgggctcccagttccaatcccatggagtctttatcaggctaaggcatcggctctatacttttcagatcgaaaattgataaagtgccttagctagaatttattcaaatactatatcaaagccgaagcggaaatcaaattgaatggaataaaactcatgctcaaaaattaatttaaaaatagagaatgtaaattgaaatatatacgtcatagtagcacagtttctaacaaagataattactcaaatgtccacaaaattcatgtccgtaaataaaaaaaaacccagagtttttcactcaaaaggtcaaatatatgaacgtatgaagagcaaataagatatgatttctcctgcatacatgcctgtgatattgtagccaaaatttcac

SEQ ID NO: 52451 - DNA, 854 bp, Ricinus communis
  Intron number 1 from transcript 30206.m000776 (locus 30206 .t000024) derived from phytozome v7.0 (chr-ID 30206; pos 3 40767 to 341620 reverse strand)
tcctgaaaaccctccttcgtataggtatgttcacttctctttacttgtttgttaactagattagtgtccctaaaacaaatttctttcgatcataaccatgtaagtggactttagcatgatacatggcttgaacttgttcttttgtggttttagtaactcactatttcgtaacataaatattcttctaatttatttcatttcacaaagggaattagaatgaaatgtaactgattttttacattaatttagttcgtaacataagtgtggagtgtacttggaccctagttatatatatttaaacttaaaaggttactctctttttttctttttaaaacttgtttataaaagaaaggttaagtttgtgaatttttctgttttattttattaagttcttaaacttttaatttattttattaagcctttgacttttatttttagttttattaaaaaaagattatacatattttataagtttttaaatttttttcgtattgaaggtttatacttttatttttgtttaaccattaggtcctcaaaaaaaatataaggactcaatgaaataaaataaaaattaaaaaacataaaaaatttaaagatttaaaatgtattttgtctaaaagaaacacttttcgaacttcaatcttaatcatcggttgtgcgagataaacactaaattaggtttactcgaactaaaatatttgtattgaggacgataatgatgtgtttgcacttaatattcatattatcgagcttttcaatagtaattcaagtttcaatttcaaacgggataaactaatttgttttcatgtttaatgatgtaacacagggaagtgaccgaagagtacaagaaggaa

SEQ ID NO: 52452 - DNA, 1043 bp, Ricinus communis
  Intron number 4 from transcript 30170.m014303 (locus 30170 .t000715) derived from phytozome v7.0 (chr-ID 30170; pos 3 824122 to 3825164 reverse strand)
agtgataaagcatcgccctgaaccaccaagtgaaggtgagttatttggtaatccatctcaatttattaatgctttttatgaaatgtatgcgtcactagtcgcttggcgtagtggtggcgactatgtggagtcgtctcagagtactgaatccgttcccctggacaaggcggattacccccgacaggaacaatagaagagaaatgcatgtaatcggataaaaagggttccagccacacacacaaatgttgcattttatttcagccccataatattctttatcaggttagttaaatagtaggttgtgatatgtttggaattacagttataggcaagatatttgatagtgaaatgtctataatttgatgtgaaggtgggtactttggtgatttctgatactccctgtccctgttcttgtggtcccaccactacatttatcttctaattcatatatatatatagtccatggtgttttgaaacttttcttactcgctagttgttcctatctatgatatgatggttgttctatcgatagtataaacatttatcaaacacctcatgcatcatactaaaatcaatatcaatacgaatatttcgattccagtccacaggcacaacagttttgaagttttagttttatgttataggagtcatatcatccttcctgcagcagtttcagaccccattctaccatgattctcattcctttgtcattcgttttgatgggaactcatgtctgtttctggagaactgctacatataaggagtgaatcatgccttattaccgctatgagaagttacatgggagatcgcaacagttaatatgaaaattactggttatatttttgtcagttatcaattagtgttgccaagaagcaaaatacagatctctgcctgaggagagaatgtaattaaaggagtttttctttttaagcatattcatcagccacattataactataattttataattagttgtttactgaaaacgaaaatcattatcctatgcagggtcctcatctttctcagctcttggaactattgat

SEQ ID NO: 52453 - DNA, 527 bp, Ricinus communis
  Intron number 1 from transcript 30221.m002234 (locus 30221 .t000024) derived from phytozome v7.0 (chr-ID 30221; pos 8 59841 to 860367 reverse strand)
tcccctcatagttaggtttttaactcactctcttcttttacttcttctagtcttattttattactttttttttctttttatctaacagtggctaaaatctttgttctgttttggttttaaaatttgcagtaatgaggggattatgaggtggatttgccgagatctgagccttgagatcaacaagataatttgatttgaatgtctgaaagaagaaacaaccttgtcttgttttctattattagggttttatttctctcttagctgctattacatttttgccatgactaccaaacgcgcctacaagctccgtatccttcccgtttattagtgtttttttctttcttttttgtgttttgcttgatctgcgacttttatgcctcattcattttaattcagatctctttttcttttaaagaattttgttgtatttcttagtaactgctcaactgtcagtagttggtagccttaactgcaatttttaattttgaaaagaggaatttgtggcacattcttcaagtgttaattgt

SEQ ID NO: 52454 - DNA, 670 bp, Ricinus communis
  Intron number 1 from transcript 30147.m014084 (locus 30147 .t000355) derived from phytozome v7.0 (chr-ID 30147; pos 4 404969 to 4405638)
gatcacattgtctgttacttcttttctcttttgtttccattctttgtgtagttgatgtctactagaatttgaatttatctttggtttgtgaatttctgtcagtcgtcctttaagaagtgtttttttagcttaagaatttgattgattgattcttattagttatgctaaaaggaataggtctttttgcaatttactttaattcagcttactgaagttacgtagttcaatgctttcaagaaaagtgaatagcttttgtgtcgtgtttcgtctcacaattgtatgctgcaaatgagaagtgaattgatcatcttggaagcacttggagaagcaagttatgtatcgaaaatgtcaactagtgttgcatttgcctgttaaaagggaaaaaaggaaagcttttttattttcatgggaagcattacaagaatttcgtgaaatgtggctttttttttttttgtttcacttactttctcggttaatgctacatcttaaaagcacttaagaaattcggctcttcttttgctttttgttttcgattttcatgtctactatcactgctctgactcggacttgaatatcatcttgataaatgcttagcatactgaatattgctagactaccagttttaggatttatatttatacataactccaatttccagggaggactgccc

SEQ ID NO: 52455 - DNA, 778 bp, Ricinus communis
  Intron number 1 from transcript 30202.m000248 (locus 30202 .t000001) derived from phytozome v7.0 (chr-ID 30202; pos 7 601 to 8378 reverse strand)
atctgcatcttcacagagaccagacaacattcagggtaataaattctgtttctttttcttttttcccttttttaaatgaatatgatgtatataggcattatttggcaattaatacgaatttgttcttgtgtcagcgatcttagagatgaaatttggtttattgaaattctcaaaatcctaactctttgcagcgatatgtttgtgttgattctatgtgatggtgcgggtctcataaattctactggtttcagtttacagtattcaccttagtctaagtatgagctagtgtatcctgttgtaatctctcggtgggcatatttttcttataagaatgtttgttttcagtaattggatgtttgtatgtaggacagaacttgtcatgtcacaggtgttagcgatgcagaattgttgacacactattgaactcaaatgaaattttggcatccttgtgactgatttgcacaggtgatagccagttggctgggtatttgttcatggttcatgaaattcttgataacacagtagaattatgaaatacaagtcattaatctccaaaattatatagccagctctccaattagcatgatctcttcactgtttcagtatcctaaatgtcaaaattcattttcataattgataagctgttgttatttcttgattctacctgtgtgattgtttacaagagcagaagccttttaactgtgtacttgtgattgtttacaatagcaggagccttttaactgtttaatctcttttgtagaggcaggaaaggttaatt

SEQ ID NO: 52456 - DNA, 688 bp, Ricinus communis
  Intron number 2 from transcript 30190.m011112 (locus 30190 .t000348) derived from phytozome v7.0 (chr-ID 30190; pos 1 907810 to 1908497 reverse strand)
ctagatagtcaggtgcggaattgtgtatatttgtagagctggtttatgattcatgtattcaacttgtctatataattatacagtaattacgatgctatggttggaaggttttgttggtgcaataaaattaaagcataagccgaatgattctgttaactctatcgaagagttaccaaagctaatttaagttagaaaatttgtgagttttctgctaattctcccccttctctgacaagcaataaaatgggtgctgatgtataggaatctaagtacaatcttgaggtggagttcttagataattgttattttgatgattgattttgttttgtctttcatttgttgccgaaatagataagtggaattgcttaaactcttttgaggaaacatgttgagaagctggatagcatatgtataactatataactttggatatcttttacgcatatagataaaaccatattgtctgtataaagaaaaggtcttgtttatatgcaagtgatgtgcttgtgttttttcttgtttcttaaccatcatacctcaattgaatacaagtgcattttatgttaattttttcataaaaagtcaaggttcaagtgttacgattagtttgaatattgatgcatgttaaattatttccttaataacaatttcagatagagaagattgttctttttatactggaacaaca

SEQ ID NO: 52457 - DNA, 515 bp, Ricinus communis
  Intron number 1 from transcript 30147.m014095 (locus 30147 .t000366) derived from phytozome v7.0 (chr-ID 30147; pos 4 486332 to 4486846)
cagttgctttataccattgcgcaagttaccggtatgaatggggctattgacttttatttgtttattatagagtatgattaaggaccacacgtactaaccatagtgaaagggctatttctggtatttagaataatcagaagggcatttttgggacaataaataatatcgaaacccatcaagggcattacagacatttaaccgaggctagtttcggtattgaaaatctttaatattttcatttttttttctgaaagggtaaataagtaatttgaataggtatgtcgaggctacgacaggatgccgagagaagcgcataaaagtggtggaccttggcgatttatttgtttgatttccaatgtgctgctgctaacacaaaatggaaagagaagagtgaaaaggcgaatagccaaaataaacaaaaatagcaaaagaagaaagctttgcttcattgtaactgtaactgacacacacgttaaacagaaaagaaagctttgttccatttttggcggcaaaat

SEQ ID NO: 52458 - DNA, 369 bp, Ricinus communis
  Intron number 2 from transcript 30147.m014095 (locus 30147 .t000366) derived from phytozome v7.0 (chr-ID 30147; pos 4 486941 to 4487309)
ctttgcttaggaagaacttgacttttcaggttcttttcttgcaatttctctttctctacgtagttacatatcgcatttgctctttaattttttttttttgtttatttatttattacttgtgcagttggttctttgatttaaaaatgagataaattgctttcattctttatgttttttttgtttctgggttttgctagttttttatattactgttgggtttagaattgtggtggaggggcgagtgactcttcttttccttttctcccctttcttttcttattcgctctggttctaacctgattgaagtttgaaagcaatatgaagatattcattttgtcttgtcgtttttcttttccttccagaaacgaa

SEQ ID NO: 52459 - DNA, 794 bp, Ricinus communis
  Intron number 1 from transcript 30202.m000254 (locus 30202 .t000007) derived from phytozome v7.0 (chr-ID 30202; pos 8 6192 to 86985 reverse strand)
tcgctctctccagtggccagatcttctttaacaaggtcaaacttttcttttccttactttcttatttttctctgtaaaatttcagtttcttaacttatttggtaactgcattggaaaaaaaaaatgtagaaatacccacttttctttttgatttgatgcaacaatatttggtctgaaactgttatggtgtttgatacagtttctgggtttaattttggagatgctttaaactattaattattcaagtacagagcatatgaagatgatgcgatgagttgttacaaactcaatagaaaatgatcccagaagtaccacaatgaaagacccgcaatttatttttctttttgtttattcaaatttcaagaataaattgtcttagtttgataacttatgtcaggtttctttaaaatacataactttcagcatttatatatgaatgttcttatatatgatatcttatagggtcttcacatggatatgattaagtatggctatttatttattcgtaatctatgtatataggcttgtttgggataaatcatgtgcaaaaactcaattcagttaaatcctttcaatatcatgctgcggtcactttttatatgatctcatgaattctagcaactattagctctccagacatgagaattgactaaatggaattgaatcagattgaatatttcgtttttaataattttccaaagacactgataatctttctcagatttggctaatgagatctggttgacattttttttgcagtgggttttgtcatctaaggaaattaactttcctta

SEQ ID NO: 52460 - DNA, 527 bp, Ricinus communis
  Intron number 1 from transcript 30174.m008695 (locus 30174 .t000092) derived from phytozome v7.0 (chr-ID 30174; pos 2 233424 to 2233950 reverse strand)
caactccctccgcccttccatcaaacaagtctcaggtactgtgacttatttcttttctttttatttacattaatgtaagacaaactaagtaaatcccacttgtacatttttgtagaaattgaccttaataaatgttacagctcatatcaattaggaataaaaacattatcttaaaaaaaaataaaaaaaatttctgcaagatttgttggttggccaacaaaggaaaagcattaatcagttgcctgaagcacagaagtaccttatcaggatcaaaattgtggactttttctattgtactgttgagtttctctccttgttatttatgtggcattgctatcaatgagttcaatggtgtctagtaaaagttgggattatttactttatcatagatggcgaacacttgtttgtgataaagaaatgagcttgcatacaaagtttacttgaacattctcaaattgtataaatgcgagccccctttgttttttcaaccagcatcccgcagggtttctctccttcagattagagcc

SEQ ID NO: 52461 - DNA, 477 bp, Ricinus communis
  Intron number 3 from transcript 30148.m001415 (locus 30148 .t000014) derived from phytozome v7.0 (chr-ID 30148; pos 8 5056 to 85532)
gtggatatcggaagtggtaaatttttcttttttgaaccaaatgcttcctattatgtgtattttgcttgtgattgttgattactatttattagcatagccattatgcttttctgtttgatgtgagctggatggttacggatccttttgtacggaactattcttacttaaaatgaggagtaaacatgaaatgaagaagctaaaatgtagagggcagaaaataaaaataacataactggggcttagggccttgggagataatgctatagaattggtcacgaaaatggattttttcctggaattagtgctgacacacaatataaaaatgctatagtttgtggtttatcacccttttagttaatttctgatttcaattactacttatactactagtagagacaacagtgcaaaagatatctagttttaagtatttatttgcctcaaattaataaaattttcagggagtggcaggtttctcat

SEQ ID NO: 52462 - DNA, 473 bp, Ricinus communis
  Intron number 1 from transcript 30174.m008688 (locus 30174 .t000085) derived from phytozome v7.0 (chr-ID 30174; pos 2 188257 to 2188729)
gatagaagacggtatataacgttaatgcttgcttatatgggattctgattagaaacatttcatactgaatctgtttttcttctttctagcttatttgtgattttgattggaaacattgactgttttagatatgaatatgtttcatctctagtttcttgtgatttttactagactgaaatgtagtgaatccctatattacgaataattttaggaagttgatttaccattaatggcttacactcacagattttcattttgcggaacaacttctgttttacattattgaccgactatccaattaatatgggggatattgtttaagttgggctgacaaatatgagtatagaattgagtgttataactattttataatatcaattaaaatcaaatattaaattgcaatgtggattgatcttgtttgcttgggctctctctttaatccctctttcatttaccttctggtttcagttgga

SEQ ID NO: 52463 - DNA, 456 bp, Ricinus communis
  Intron number 2 from transcript 30174.m008638 (locus 30174 .t000035) derived from phytozome v7.0 (chr-ID 30174; pos 1 877079 to 1877534)
ccaaattgatcgctgttcttgtaagtcatttcttttgatttaattttgttgcgagttcttaatccttgtaggacgagttgttctcttttaacttataaactgcttataatgtgcatgcttcagcattgttaaaatttattgtaaattacaatgagcttgatgtccacacacatacttgaaactaggacttgcgccactaactgaattaaattattattacttttgttctcctttatatcctgtctgtagtgtagtattttttaggtgtaactattgagagaaaaacatgaaaagtgatctgtgataatgcattgcaaattcatttagtttcttgcgtttgattttatttcttctaagttttgtttttctgaaactatgagtcagtgcaataacattgttggttatgttttctattttgcagacctcatctctctttcttcacatcttcaaggtcca

SEQ ID NO: 52464 - DNA, 830 bp, Ricinus communis
  Intron number 2 from transcript 30170.m014173 (locus 30170 .t000585) derived from phytozome v7.0 (chr-ID 30170; pos 3 352575 to 3353404)
ccggtaaatgtttcttctttcttgtttctttttcttcttccattccaaccaatgattatgagctagccttattgttactaattttaccattgtatttcccgctgttttatcaacaatttatcaaacacacgagtttagctttttcatcagaaccactttgtggtaggggcaaagtggtttaaacacacgagtttaattttttataatatatcattagagtgattttagaagttagtacgagttaagaatctaattaactaaaaagattttcttttacgtgccaacaaaaagaaaaaaatcaaaccctcaggtgtaatttggtctgttcgagtgcatataaatatcatagtttagagtatgaaatttgaaatttaaactccaaaatgactctgcaataaatgccttacgtaactttatttcccattaagtttgcacagacaaaaatcactttatttttcgtgaattttgctttagaaaacagacctgaacatcagaaaaacttttacttttccctcctattgtatggataaatcaatcatacagaggagaacggcttatatcataacgccggatggaccattttggttcgggattacagctgtcgttcgatgaccaaaatttaatgccatgacgtggcattttattatagcaacacactgtcaccactcacagcctgttgttacctgtaactttaaaattgatacggtcagcgaccccaccgacaagtatataagtttatatttccataaatatacaatcgtttttctattgtaatttttctttttaatgttgcagtatcggagttgggcccggaggactcaggtagaaat

SEQ ID NO: 52465 - DNA, 277 bp, Ricinus communis
  Intron number 1 from transcript 30190.m011193 (locus 30190 .t000429) derived from phytozome v7.0 (chr-ID 30190; pos 2 440157 to 2440433 reverse strand)
gtacgttattgtttccttcttctacaatcttttgtgtatcgtaatgatatacacaagcattttttacatgatgttcttatttgcattttatgtcaatatttgccaagttaataatcatataagttttcttcatttcatttataaaccaaaaagagagaaaaaaagaaaaagaagtgtactggttcacaaaaaggatccaattatattaaagttataacaaattcttgtttctgttcttttgattttgtttatggaataggcgaattcttcatctgga

SEQ ID NO: 52466 - DNA, 839 bp, Ricinus communis
  Intron number 1 from transcript 30170.m014112 (locus 30170 .t000524) derived from phytozome v7.0 (chr-ID 30170; pos 2 900651 to 2901489 reverse strand)
ggctgtttctcaggtcaaagatcaagggaattgcggtgcgtgcatcttttatttggattctttatcttttttatgcttaattatttgatgagtttttgaactactctagtctttctttatattgatccatgagcatcgtgcatacttagttttgaacttcttgtgtgatctttattatcatttattagtagtaatctcttaactctgtttttccttctacttattaaacttgggaatcatgtaagaattgcagccatcttatttattagatttcgtaatatagtctagtacctcagcatgctgtataccggcatttgattttgattgttttgtcaatgaaatatacatctctctatatttcttaatcgtattccaaaaagggatttgccacctttataattttaaaatcctcatcaaagagatggtggcttgtgaaaaatgctttcatttatagatttgttttaccttgaaagttttctcctttttagttttgattgcagtgaagttcagttcttcacaattttttctcatgcactatatttttcttctgatattcttagttaagacttccatcttgactgaaatcatcaagttagtactatttcttgttgcgttcttagttatcaagactttcactttgactgaaatcatcaagttctacaattgactgtaatctggttaaatcattctactatgactaaatgatatatatatggccataattgttagctgtttttgactggtaaattgcagatacatctatttcatggtgcttaagaataaattgtttactgtattacgcaggtgcttgttggtcgttctcagccacaggagctatt

SEQ ID NO: 52467 - DNA, 287 bp, Ricinus communis
  Intron number 1 from transcript 30200.m000355 (locus 30200 .t000017) derived from phytozome v7.0 (chr-ID 30200; pos 3 83014 to 383300 reverse strand)
agttagcttttaaggtaaaaacacatcattagtaatttttatcttcatttcttttacttaattttcttttatcttcttttcttttactcattttttttgtttctaaattatttatgggttggattttttcttttactccaaatcaatcactgatactattcaaataagtaatcatcgaagctgctacctccttatttgtttagttagcttcattatctagctttatttttagtttatttgattttctaataggtggtgattgtgtggttgcaactcagtccatccct

SEQ ID NO: 52468 - DNA, 719 bp, Ricinus communis
  Intron number 1 from transcript 30170.m013945 (locus 30170 .t000357) derived from phytozome v7.0 (chr-ID 30170; pos 1 912126 to 1912844)
ctcagattctacatcctggttttgataggcggcttgtaagttttctcttctttaagtactagctattttctttttataaaaacaaaagagaaaaaagaaaaaagaaattactcttcaaatattaattatcattcattatatcttgaaccttaacctgacgcttttttttttcctcttcaaaatttttgatctggtgatttgggttttataacaaaatttgcaaaggctttgctgaaataatttcctattttaaacaaatgcttgaaacttgttttcgctgctttttccaattacattcaacttttgttgaatggaacctttattcttttattatggtctgattggacttatttctgtgaaacccacctggcaattttagaaaatggcctaatcttcctcttgtttttgtcaatgtgtgccatttgatctccactgtctctaatttggtgtgatctgactttatttttgcataaagccatgttcttctttatatgaaattccatggacaatagccaattcgttgttcagttttataaaacaaataaaattagaaatgagtggattgaaaatgaatattattatattagctgtcaaattaatgtgctcatatgtcagattaacaaatgtaataatttctacaaatttttgatttggtcattgcctcttactatctgtgaactgcaggcaattccagagcaatttactaaaaatttgagaag

SEQ ID NO: 52469 - DNA, 902 bp, Ricinus communis
  Intron number 1 from transcript 30170.m014166 (locus 30170 .t000578) derived from phytozome v7.0 (chr-ID 30170; pos 3 278996 to 3279897 reverse strand)
gtgaattaattgctactcttagaaggtgattacttataaatctatatttctttttattttatcaaagtaatgatattggtaatagaatattaacacattgtatcatcctgcaaaagtactaatataaaattgtctaattcgacatggaagggacattaggcaacctcattttgttaattaaatttttataaggagtcaaatgcaaatgtttagtcatacttacgggcggcatcggggaatagcatatgttcatttttttaaatgtgaaaagtttgagaccatgctaggtaagtacttggaagctaaaaggtgggtttctgaatgtgaagtgaaactaagtaatgcaagtggaagttgatgccgttatgaacattgaacactaacttgacttgggcattaacttagcagatgaatttgatttatgcattttagtaaaaactaggcagctggctactctccatttttggttctgagcaaataccttagttactcttggacatttaacaaacgtggatgcccttttacataagttggggaatatttgaaccattttcagccataaaggctatccagggtaaggaactgtcagcttgtgaagaaactgactttggttatgcagtacctagattaagtgtaaactgttgtaggatcctaacaaaaagtaatagtaatgttctagacatcactcttcacattcctacattctggcttgttttgccagaagttcattgtttttcttcgagtagttttctattatcacatgaactttttcagaattaaattggtataattattgtgctcagtatctgccatatgcgactcttttcttagccaaatgatatgccctaaatttgcattttactgcagtattgagatatacaagcataacaaagaggaaagaa

SEQ ID NO: 52470 - DNA, 767 bp, Ricinus communis
  Intron number 2 from transcript 30170.m013821 (locus 30170 .t000233) derived from phytozome v7.0 (chr-ID 30170; pos 1 159180 to 1159946 reverse strand)
ccttttctggcgcagaagaattcgccaagcaacaggtttgatccaactcctccatacacttcttttatttatttgaaagaaaatgatttcctattttgagtgtgtaatacatgagttacttggagtcatttttggcaagtgtaaaacactactaagcaaatcaactccattcttttcttattaagggtacaaaccactccattaccactatatctaaaattcacaaaccacttgaataccactaatttcaagttattgacatggttatcaactgctacagaaatatttttgcttccctattctccacgtgtcataatatagttactaacctgattaacacagataataattactccctccattttactaaattatacttttttaattattaatctgataaataattattaaaaatacatttcacaatagatattgtcataaacaaaaagaaaacagattttaacttcagatttgtcaaacttctataaaaagtttaattagaataagctggaaaataataataaaagtcgatgacattaattgtaaacaattacatttgttaaaccacatgtaaactagaagaggattatttttttattagggatagagtaataataatgaaaataaattacagactgttcttattaaaagacacgtgtcaaattttagcagtatgattttcacacaaaaagaaattacaaaaataataatgaaaatagactgttcacattactttcccgttgaacagggtgttgagttggtgacca

SEQ ID NO: 52471 - DNA, 736 bp, Ricinus communis
  Intron number 4 from transcript 30147.m014021 (locus 30147 .t000292) derived from phytozome v7.0 (chr-ID 30147; pos 4 028338 to 4029073)
tcatcggagaacattttgactcgaattgataggtaccctttttgccttgttcttgcttttgaattagggattttggtattctgtttaataaaagtattctgtgcataaaaatatatgttaatctgacctggatgcggatttagaaaatctgttgtctttttgagtgctagaaatagaattttaatgttcaaaattgaaaagaaaccgctggtgcaataaaaaataaaactgacaaattgatgttgggtaagagtctgaatcggttgaatctgataaaattaatccagaaaatcctgatgaatccattacaggatttgttttggaaatgaaaatatgcatgaattatggtttgaaatggccatgtctacctaaaatacgtgtgaatttggaagattcatttgacaataatgtttaaaccccatgttcgggcgatgaattattgtagcaaaatctgataaatatccttgttcaaagtaataaatgaaccttggcaattttttcttaacttgaatttagaatgaaacacggtttcagcacatggaccaaaatatcattagcatgtgaatacgttttgccttttatattttaatagtcatatatgattagtcagtctggcaaatggtatagatttagtcagctaattatcatgtctgatgagcaatgaactgaaaatctaatggcatattcttaatgatggacaggtgtttggaagaaggggcagaagaattcatagtga

SEQ ID NO: 52472 - DNA, 883 bp, Ricinus communis
  Intron number 3 from transcript 30167.m000881 (locus 30167 .t000030) derived from phytozome v7.0 (chr-ID 30167; pos 5 63003 to 563885 reverse strand)
gattgaaaataaaggaggtaactaaacttgacttactgttaagctttgtttttatgttgtatttgttttttcttttcaggaaaaataatttatttagttattataagtcatagtttcttttatttttactgaataatttgtgcacctgaacattgaaagagaagtggttaggtactttgattttatacaaagagcaattgagttgacaagctgaaaaatttaatacctcttgcaaattttggtttggtggcagtattaattttagctcatgtgtgtgggaatgtgtttgtgtgtgtgtagagaagtggagtggagtacttatttaggaacttcaactgccattatgaaggtggggtgccatttaagggttgcctgcccacccttccccacctatccaatatggaaatgagaaaagcagccttttttctaaatctcttactgttatgtactaaaatatgccattcaagatacaagtagtaatttgttccaattgaacactgtgaggagatattatggctcttctcttttctccaggttaggggaattttattttatttctttctttctttctttttttctgcagaaacatagttagtttgcatggtttcaattcctgaagcctatttttttgcccttccacttttattagcatagaaggaggcatctagattggcatagttttcggtttgagcttgtggtccaaatctagatatgtggaattgagcaatggatttttgtagaatagctgtcatgattatgctacccccagttattatctgatctgcaaccgttttgtgattctgcaaaagctgatagctactgctcggaatcatcactattctctgtttctgtttttcttttcttttcttttttaaacagtcgt

SEQ ID NO: 52473 - DNA, 820 bp, Ricinus communis
  Intron number 2 from transcript 30147.m014273 (locus 30147 .t000544) derived from phytozome v7.0 (chr-ID 30147; pos 1 309597 to 1310416 reverse strand)
ttttgcaccttactacttcacgaaaacagattcaagtaatctctctcttcaacttcttgtttggttattcataattatgtccgtttttatgtttttttttttttttttttgaattttcagttttatatcttttgttttttgtggcttttaagtaagtaatcaatcgaacacttctctaaacaactatggcctaaatcagaagttatcattgcttgattgcagaagtaataaactgagcttctttcttgtgcttttggtgggtttttgcttccggtgatgaaagattgaaagatttgttggtgctctggcttccagacctgtgttttctttgggttggcttatctgtgtctttgtatactataggcaggaaattctagggagaaggccatgatgctctttttctatttctcgtgaatgataatatagaaggtattaaatgtgaactgaaaacaaaagtcaatattttgtcttatagtggacttaagtggctaattggctatcaactaggttgtgcttgaccacaaagaagaataatgctaatatcagaaaaattgagaagtccaggcagtctctgctggcctaattttgggaaatttttttttctttctttctttctttcttcttcttcttcttcttcttcttcttcttcttctcttttaaatatttttggtatatatcttacttttcttttgctaggagtggtaattttctttttgcttatagcagcatcagttatttgtttttttaattttggatgctgcagaccttaaggattttgttgggaaataatcctagtaacaatacaggggaggtaaataca

SEQ ID NO: 52474 - DNA, 516 bp, Ricinus communis
  Intron number 2 from transcript 30147.m014317 (locus 30147 .t000588) derived from phytozome v7.0 (chr-ID 30147; pos 4 28566 to 429081 reverse strand)
cccctcactgaggcttactgcgcaacaggttttaggtaggttaaatacttgcatttcattttgctagaaaattcttacctatttctattcatagatgcaaatgaccattctgttatgtattctggcggacatatcggaagtataaatgatgattatttatactttctagttatttcatatagtatgcatgatattcatcaaaatagcaagactcatagtagaggcatctgaagatatgatgtgcagaactagactgcaaaatactaaatcaaacagataagctcaactgagttcttaatggtttttagcaaaaattggagcattcatgacatagatgtgctcatgaatggcagccaatatgcggtgctgtgaactggtgttgatgggattcaaagccaagatattgcaccattctgttttgctaattagccataaacattgagtataccactctcaacttctctgatgtgtttttgatttgatcgaaaacttattctttttgtagatcattcctgg

SEQ ID NO: 52475 - DNA, 921 bp, Ricinus communis
  Intron number 1 from transcript 30190.m011247 (locus 30190 .t000483) derived from phytozome v7.0 (chr-ID 30190; pos 2 792042 to 2792962 reverse strand)
aaaaggcggttggtcttggaggctggcattggctggtaccatactttagttaacttgcctattgtttcttattgctagtgtcattcaataatataacagaaccttttgttttctctgcaccattgaaggttaattttatatcttatagatcatatcatagaagactgctactaaaccaatacagatgggtgacatagttacttcagacatatttaggaagtcaatatctgttagatctcaatatactattcaggacaaagaagtattctatatggaaacaggattgctaatgatctgatttataggatctcagaatttgctttccctgatttgttttttgttttcctctttcactattttattttaagttggggaatttggtgggcgaaattcttttgtacggtttttcttttttaggtgatttttgtaactgtcaactgtaaaattttgcatgggcataattttgtgtttacttgtggcaacaatgcgtaaatttgacagaaacattctctatatagaacacaagcttgttttataaatgccattttttcgttaaaatcatgtgtgatgtgttttgggagttctagttcttcagtctcagctttggagcaatttcttgctttctcgcatctctaattaggtggccaaatcatgctagaagtattttgttgaggtctgaaagtacaaactaccataacataacgttaacggtaaatttgtgtactaaattagctaggttaattgtttgaggtctgaaacttgtgaactgtattatttatttgccctgattgggcctaaagattgtgatgttttgactctatgaatcataagagtacaaacagtatggtgcaattgtgtaatcaggttaattttgcttattactgctctatttgattttgcattactttcaggttttgaaaa

SEQ ID NO: 52476 - DNA, 753 bp, Ricinus communis
  Intron number 2 from transcript 30147.m014155 (locus 30147 .t000426) derived from phytozome v7.0 (chr-ID 30147; pos 6 60193 to 660945)
gaagtactgttgagtatgtatcttacacctaccaatcaaatttcctttttatccttctttaattcttataaaaaggaagtgccagtgccagtgccagtgctcttcctctaatcttttaccactctctcaaagctaagtgtgaaacaaaaggaatcaaactctaccttaatattttggtagaaagtgaaatggattcgtatcgcagcagatcagacgcagacactattagtgaattattgatttgctagctattagtaatcattgatgatacgactattttcagtctattaggctatttttccatttagtgtttgcttttagtaactaaaaacaatatattcccttaaaggtccccattcgatttacctaaaattgaaccattcaaaaggatattcttgccttcatttttgcaattttcagttacagcaattactataagccagccaaaagaacatcatcttctaaagaaaagagtgctgtccacctcatctttctttagttttttttactataaactctaaaatgtatattattctctacactgtttgtctagaattaaagcccatgctctcttttttcagatgtatgattaattttagttcttgaaaacaagaaaagaagacagaatattagctgtttataaaattaatggcgtggcatgtgacgcttgaacccctcggctaactatatgttttctttttttctttcaataatgcagttatctaaacacaggtgatccaaaagggacagatt

SEQ ID NO: 52477 - DNA, 598 bp, Ricinus communis
  Intron number 2 from transcript 30170.m013735 (locus 30170 .t000147) derived from phytozome v7.0 (chr-ID 30170; pos 4 686077 to 4686674 reverse strand)
agttcagagatccaaaccttctactcctaagcgtattacattattattattattttactttgttttagagattcaatttacatctccacctatttcgtgtttcagatcccaaaaattaaagtgttatagtatccatttttcattttatcttgtggtgtgggcggcatttctatttctttttctttttctttaattcatgggtcaagtcttagttcacatatatagagataatcattgctagctggctttaactaatcttttttattataatgtttgtgggtctaactgtaagaattttacggggttccaaaaaatattccatttagaacaaacgcattagacagtcaaaatcaaatcaaattgcaggagcagcatgaatattcttcccagtagagaaagttctattctacctcacaaacaaaaaccatttcatctctaatcgagagaagctattaatgctgttgacactgcatatgaatagattatgttagcatagctaaatttaatgtgtgaaaattgttttaaaaaataataataatggaaatttaaacggtgggatgcaggaggaggaggagggaggaacttaagggtgataagc

SEQ ID NO: 52478 - DNA, 527 bp, Ricinus communis
  Intron number 1 from transcript 30170.m014354 (locus 30170 .t000766) derived from phytozome v7.0 (chr-ID 30170; pos 4 094633 to 4095159 reverse strand)
tgccccagtagaggtaatcaagctagtcctattatttacttttcaaataccaagaaacgaagccaaagaattcattgattgattatatggttttcttctttgattgttagtttttactcttttgagtgtttaaattaagaagaaaggacatgtttttaggacttttcctagtggtctaaagctttttggcattctcgaccgaaagttggttcagcacctaaacaaagtacagaacctctcagggccaagcttaagcaataaagaacgaagtgctgcatagagaaatgtcaattttctgaaagaatcagtttaaatgcaccgagttataatactatattcagattcttcatgctgataatttagttcacatttggtccaatactttatttgcttgtttgcgcaaacagttgagcaatctgaatccttattgcagacagaaatttgaaatataaataatgaaagttcctttccttattttcttttttcttccaggtgtaccaactggattttgtgatcctttgcattgg

SEQ ID NO: 52479 - DNA, 459 bp, Ricinus communis
  Intron number 1 from transcript 30170.m014027 (locus 30170 .t000439) derived from phytozome v7.0 (chr-ID 30170; pos 2 398530 to 2398988 reverse strand)
ccttctttctatcttacaggctgtaagcatcgcaagtaagtttctgttttttctttctttaattaattatacaattaacttttgtgtaccatttcttgattcgactaacttcttttcttgtttacttcttctagtcaagaattttgtcatatcttcgctttacactaataatctttgttataattattaattttcttactcttgttttgaagagttgaaaaataatgtttttgttcgtgttcttgtttttcttttaatgggtgatattctccgtttttatctagaaaaaaactaacttttaaaaagtaacggctagcctgggtctgcgaaccatgtacaacaagaaaaaaaaggaaaaaaaaaaaaacatattttgtatctgtctggttaagtaattaataactagtaattcaaaattgttcctctgtacagactcggaatccttcatcggtgtaaact

SEQ ID NO: 52480 - DNA, 761 bp, Ricinus communis
  Intron number 2 from transcript 30169.m006359 (locus 30169 .t000136) derived from phytozome v7.0 (chr-ID 30169; pos 7 54259 to 755019 reverse strand)
cattggttcaggttttcaggtacttataaattttctatactttgtaattttgcatatagactaaagtatgaaagttttgccttattacacggacattagtatttctatattgattttgtaatatttgatgttcactatagaagttaacttcttattccatccctaccgtattaaagttttaattttgtttatttgtttcgaagaagcctttttcttttgcgatagactcatatgtaatcaaacctacattgcttttggtcaattggttgtctaactacgcacttccataaagtctatgaccaaggaacattgttttgtcatgaatgaaatggtaagaatcctgcttccaatcaagcaatgtagattggaggcgtgagagtgtccattccatgcaaaaataaagaaggataagcttcatgcttgcctctcaatttcctttatagaacctaacttctgtgagatcattagtgcttaatgacttttccaatctccatgtgctaaatagtaaatcaaagggaatacctgactgtaaattagcctttgcttataactttatttaataacaatgccaaatggaagaactttgtataatagatatataccgatactgcaatagttctttactaccaataataagaatacaatcattttctctcagcttggcgtgtattttcccttttgatcattataattcttatctcatataattaatgagaatcacatcaaagttgttgttatgcaggtggcaagccaggagacat

SEQ ID NO: 52481 - DNA, 411 bp, Ricinus communis
  Intron number 1 from transcript 30170.m014179 (locus 30170 .t000591) derived from phytozome v7.0 (chr-ID 30170; pos 3 375183 to 3375593 reverse strand)
agcgagtcggttcttgagacatattaagcaatctggtgaattttcattttacttcaactctcctcttcttcttttttttattttttcaatttttttctccttttaatttacttctggtccccgaaaattcaaaaatgtttttaagctaacaaaactaaaagaaacaaacaccccatctcgcttacttgtcgttttctatttattcttattcttttttcttttgttagtgataagagtatagcagataatgcgtgtctctcagttcacctccttttctctgtttttgtttcttctgttgtttttgtttattacttgtattatttttgtttattatttttatttttaaacggtgttaatgactttgtttcttcttcagagaaatccagtaaagagagaattaagaaattgagt

SEQ ID NO: 52482 - DNA, 634 bp, Ricinus communis
  Intron number 1 from transcript 30174.m008960 (locus 30174 .t000357) derived from phytozome v7.0 (chr-ID 30174; pos 1 224704 to 1225337)
cgtttgagcttgaatccaggattgaccttgaccaggtatctttgattccttgttctatgtttctcttctcagctaaactactttcttttttgctatttctgcatcaatggcatgcagatatcgattgaaagattttatctttgacttgtttgtgcttgctgattattcttaaaaaatctgttttccatagactaatttttcttgaaactagttttattgcacttcattagtgtcttacgcgaattaagtgttgcagcttgtgcgaggcttggttaactctaagctgtgatgtgcagctgcttccatttgttgggttagcttttgtctttggttgatatttgatcgggtgggagatagaatttggaaggtcttaataccgagttattgggtattaatttgtggttgatacatatggtatgaagaaaggagaccgatcactatatggctgttgaacacgcaaggaacctcttaatatttctggtctgcctatatgctgttgccattgggaaattcaatccgttcttctaattaagttgtatataacaaaaagaattattagagctttggattctctcttatctttgattcttatctggcagccagaacatcagattagtggtcttgaaccagtgat

SEQ ID NO: 52483 - DNA, 571 bp, Ricinus communis
  Intron number 2 from transcript 30174.m008960 (locus 30174 .t000357) derived from phytozome v7.0 (chr-ID 30174; pos 1 225397 to 1225967)
cacagtaagttctgccaccttttaaatggacaattaatgattttagctttatctattccccgttttgttggataagattttttattatttaagtagagatggctctatgtgggttcaattcctgttatgttctgtcaaagctctaaacttggtaaaacgtggtgtttcaatatgcatacaaatcctttgcacaaggatttccactttcagaattaatctcatatagtgacagatttgagccttcagcttccactttgagattctaacagaactctaaaattatttggtccctttacttgcccccattctcttccttccccctgcttgttattgttttgaggtctaatttattttgtattcatctttcttccatgtggactgaagttcaaaaagtatgtttcctgttggaattaatagttaatatgctagcttctccagtgcttctgttccaacagatgaagagagtaagccataagggaagtcataatgcttttggcttcaatatactggttgatattttcctttttgaacatagatgagactgaatgtttgcttttaacaggtgctcaat

SEQ ID NO: 52484 - DNA, 389 bp, Ricinus communis
  Intron number 2 from transcript 30169.m006366 (locus 30169 .t000143) derived from phytozome v7.0 (chr-ID 30169; pos 8 00563 to 800951)
aggaagtgtttctctttgataaacaagaggtttgcacttttatttccatttgtgaatctttattttttggttaattctagaacactatatttttcaaatttgaagttgatttattcaagtaagaacatttcaattttgcaactaatgttttttttttcttgttttgtttttagggtgaggttgtaagatctctatctgatattgatgatttgcgagtttagtttagtttactacttgctgataattatttaaatcaacagttttcttttatctccaatatgttattgactgctaataatgtttcagtatcagtatattagtataattgttttctttcttcttttttccttgcagttgaataaggttgacagtggagcaaggagcacaag

SEQ ID NO: 52485 - DNA, 782 bp, Ricinus communis
  Intron number 1 from transcript 30174.m008606 (locus 30174 .t000003) derived from phytozome v7.0 (chr-ID 30174; pos 1 697456 to 1698237 reverse strand)
ctcagctctatttctgcccttcctcctcaatcgaggtttgaatttcacttctgatttcttctgtttgtcttccgagaaattgcaccataactcacaatgtttaaatttctaaacattaaaatcttcaatcaaaacgcgattcttttgattcagttgagatcagcggtagtgctatcttctaacttcgcggttttttctgcagccaaacgtaggtcataagttgacgatttctttctcactctgaaacttcatatcgaaattactttattcgctgctaaataaataaaataaaaaaaatctcaaaagctgcttagcatataatatcttattgctaacatataatagctgcttagtttcgtttcaaactttttctttagcaaaaaaaaaaaataatctgagatagaaatcaaattttgcgagagatgaaactatctttccaatatggttcttctcatctacgtctttagattttgcaaggttttagggaatttcacgatttcatgaaactggtgcagatatttgttcaatggtatgtaactgtttgtctctgttgagatcaaacacttaaaaaatgtaggagagagagaaaacatattgaacttgaaaacttctataatttggaacctgtgaaactatgagactttgctagatttagagattgtgtacagagagcgcttgtcattttgtattatttcttctcatttattaataagtatgctatttgtttctccgaatgatatgtaggagattgagtactttaccaactggaccacaaacatcac

SEQ ID NO: 52486 - DNA, 885 bp, Ricinus communis
  Intron number 1 from transcript 30169.m006569 (locus 30169 .t000346) derived from phytozome v7.0 (chr-ID 30169; pos 1 935025 to 1935909)
aaggtcacctttgacgagtttccttactacctcaggtaatcatggttatctttttctgtttcttaaatgattaatttttggtctctattattattattattattatttatttttttatgttcataagatctcaacatatagacagttgtattttacggtgttattatttattaagaacaattatctggcaaatgctctggcttggcggtattctctgcacatgctcataatactcctgtcttttcttttttccaaaaaaagtttgccgtttgggttttaattattggggttttctcatactttcagctctttgtccctgtaaatattaaagtaaacactgcatgatctctgcttatttgttattgactttgaattcaactccctctttctgttcaaaatctataagataacttcattttccattgatttcaagttggaaagtgaagaattcctaataatgctaatattttattcttaatatttgataaaaaatttacgaccgcatgtccgtacttgctgataggcttgaatctgtttttcatttagtttgtcatttttcaaagtttctgtgtcttatgtgaatgtatttgggttattgattataattggacctgattcttgttaatatcattttgacttttaccctttaatggattgttggagataatagaatttgaggttggcgtgaagctaagagcctgcattttagtgtttgtatgaactacttccatgacatttttttgaataatccaactagtaacatatccatagcaattttaaaagttactttatgttttattggagtaatttcatttcgaggtttacattctgataaattggatatctgcagtgatataactcgagtctcattgacaagtgctgcat

SEQ ID NO: 52487 - DNA, 723 bp, Ricinus communis
  Intron number 2 from transcript 30180.m001052 (locus 30180 .t000042) derived from phytozome v7.0 (chr-ID 30180; pos 8 78210 to 878932 reverse strand)
ggtaccgcaggtagggaggacttattttaaaccgaaaataatcaaacttctcttgaagaattgtctaaaaataatgaaacttttcttgaagagttgtcttaattgtctataacgaatatctaagaggtttgatgaatctcttgcttcattgctatgcagattggtttgtcatgttgtgttaatctaatgctatatactcttttcttggagtattacatgcatgttttatttctcttcttttgtaaaaagttttttctagcctattcctacttttctattatttttctatttaacttaatatagacctggagtgattttgctcttcccaatttttccttcttttttcttgctgctacatcttcccaaaatagtattcgcactaacccaatagctgtctctctaatcagcagttatatatttcccataataaaaaaaatataaatcctccacatatttgaatcctttctccattattaacacttgttaaacaagcaacccagctttctgatgccttgaaaaactacataccctttcattctaggtcttctttgtgattaaattctaccctatcatctagccaactttaaatctaatgtatatcaactattcaagttttcttaccataagaacaatactagattgaatattcaacttttcctatgttagggctgccctctatttctctgcttttgaacatttctacggttggattacagctagccg

SEQ ID NO: 52488 - DNA, 412 bp, Ricinus communis
  Intron number 4 from transcript 30190.m010819 (locus 30190 .t000055) derived from phytozome v7.0 (chr-ID 30190; pos 3 538474 to 3538885 reverse strand)
cgtccgcaattatttgcttgggatacccacttaaggtttgttttcttttttcctgaatgccagtttcgttctgcattaatatacactctctgacgtgttttgtttgatttcataatgtgctttatttggagatgttgatgacaaattcgtgcacttttttcttgtttgctatggctttgtatttgaagattgatggaggctagctagttttatgcatttttcttttaccttcaatgctctactttttgtttattgtggtaaaagcttaattattcaaatccacgccattttatgtatttcaagtctgtaatttgggtttgttctattgaatgccatatattgttttattactgaaatgggaacttgtatcaaacaaatggaataagatccagttaatttatcttttcaggac

SEQ ID NO: 52489 - DNA, 107 bp, Ricinus communis
  Intron number 1 from transcript 30190.m010819 (locus 30190 .t000055) derived from phytozome v7.0 (chr-ID 30190; pos 3 539331 to 3539437 reverse strand)
atcaagtatcgatttaatttttctaatattattaaaaaagctacaaatagatttttcttctttgatttttttttttggctgtgttttttttttttggaattatgcag

SEQ ID NO: 52490 - DNA, 988 bp, Ricinus communis
  Intron number 1 from transcript 30174.m009153 (locus 30174 .t000550) derived from phytozome v7.0 (chr-ID 30174; pos 3 323932 to 3324919)
ctactcgttcatctaacatcaatccaggtatgccctccctcacaattctttcagtatttatatattatatatatatatggtaataatattctgatccggtgattgaaataaaattagtaacttccatatctgtggtgcatcaattctatgaagttccttatttcctgtcttacacaaaccaagggaagtgaaaatttgtctgctgtagcgtcgttgtttaacaaagctgtcaagtttttaaaattcatgatctcttgtctcatcaaattattaggccaattaaggtggatgctaattaatattaatatataaaagtcattgaggtcaaccaaccaatacatgaagttgctaaaaataataaaattgccaatgcatgatgaatgattgtatgcatgaaactgaatgcgacccaatgtggtgcttttgatgtacccaattattttattttaattctattgatattgtagttaacaataggtgtctcattctcattcattataaataaattgatgagacagctattcttgtatcattctatatatcttcatttttttttttgttaaaaaaggaaatttctatcttttttaagaaggaaagaatcatatcattaaagtactgatttcaaatttttgtaattgaatgttttttttttttaatttcaattttgtgctattgttattattattattgaaaagtagattattggtggtgagatacctattgcttttaaatcagcagttgattgaaatggtaaatatcgaataatccaagtttttgaaagtcataagtaacaatccatctcaatttttatttgttaccgagaacagatttacgatggaccacaatgacctaaatgcatttcatcatttacattgtgggatgcctgcatattctgcatgcctataagaacaatttcttttgatacattttatatcaatcaatcaatgttgcaggaagaaaacatctgaaattaaagacagtctggtta

SEQ ID NO: 52491 - DNA, 741 bp, Ricinus communis
  Intron number 1 from transcript 30167.m000876 (locus 30167 .t000025) derived from phytozome v7.0 (chr-ID 30167; pos 4 90704 to 491444)
aggcttacgctgcccatcttaagcgatccggcaaggtactctttttttattttttttttactgaatatactacttttctatttctaatgttgttctgtttttttttttttttgattaatttattgatgtgttgtgtaactattaggatttttgtcaatgagatctttttgttttcttaagtgtggaagttatgtgttattagtattggctatttaggatctgtttgtgatcgattcattttcaatatttttcgtatgcttatgatttggagctggcttttaagtcgacattttccggaaagcttgaacttgattagcggactggaacaatgtatagtgcatttgtatctaccgtgccatttgttgaggtctgaagcaagaatgaactgattaacagaaaagaatacgagtgtctttaagagaaaaaagaaaagattgtaattcttgaatgcttagtattgtgtaattgtcatgtttatgataacatgtctagtagtagaagtcagttgctgatgcggatgtactttgggtcacctttgaatactagtgtaccaatgtgcaagctagtgtctgttcaattactggtgaatttttattttgctgattggattttgagttaatgagtagtataattttcctatgtcagtagtactatctttttatttttttttatgctatgaagttctaatatatttgttggataacagatagagttgccactctggaccgatattgtgaagac

SEQ ID NO: 52492 - DNA, 416 bp, Ricinus communis
  Intron number 1 from transcript 30147.m014231 (locus 30147 .t000502) derived from phytozome v7.0 (chr-ID 30147; pos 1 084899 to 1085314)
gcttcaagtaagattatttcttctattttatgcttgatttttcatgtttcttccacatacattggtctcagtgattatttatgtatagccgacgcaccaagagtgaatgaaattcgggatctttttcagtttaattttgtttcaattcccatgggattgcattttagaaaacttgaggattttgtgatcaaatcgacggaacatgataattagtgtatctctatcgtttttcaatctttatatttgcaaaatgcacagtcaattgtgtatcaattacatatgatatcttccccgaagaaccaagtggtcttttcttttttcttttaaaacattgatgacagcgtgcgtgctttgtgcagagtaataagtagacaaataatttatgtttgatcttgtgctgtaatacagggaaattg

SEQ ID NO: 52493 - DNA, 763 bp, Ricinus communis
  Intron number 1 from transcript 30170.m014364 (locus 30170 .t000776) derived from phytozome v7.0 (chr-ID 30170; pos 4 142418 to 4143180)
gatccttacaaggtatacattcgtaccaaaataattctttttgtttcattttcttttttgtctattttctagtcccacttcttaaacaagttcgtgtatcatgtgcttttttaattgtcatactctcctcatggttttaaattatttttggaaatgttttagtttcataatcttttctaatttttgaggtggatcactccatcttttaattcttttaatagaagaactaagaatcatttgaagatattcttttaagaaaaaaacctgcatctagtgtctagtttcgtccatttgagttcactgattaattaattaaccaggttaaactcggatcaaacaggttgatcctagatcatgcatgccgagcaaatattatgccatatatgaccctatacatatttgtatggatcgactcagtgaacctagaaccaaccataaaacaaatgtgcccaaatctagccaagacagagctagatctaaaatagcacttcaaagaattgaaaaaagctgtgaaattggtttaataacgacagatctattacagggagaaggttccggagagagcaaacgacatagattagcagttgagatgttaatatttatcactccacatccattcacttacctatttaagttaccttcaggcttactaaagtaatttgtacttcagtatcttcttatattatcaaccatttagcactccatgcatacactttaagctgatctttaatattgatgctacagtttcgcccatcaagctcta

SEQ ID NO: 52494 - DNA, 464 bp, Ricinus communis
  Intron number 1 from transcript 30199.m000886 (locus 30199 .t000010) derived from phytozome v7.0 (chr-ID 30199; pos 6 57214 to 657677 reverse strand)
cctttggtcagccttctatcgtttctcagatccttgtaagatccctttacgtgttacttattcatgcaatatatttacgtgttattttgcaataaatatatttgtgttttggttattgtaatttcattttttaggcatgttagatgtgtcattctccgtaacaacgttaatgaattgtcatgagttgcagtcaacggtttgaaataacttatgtaggataggattctgacaaattcaaaaacactcatgtaacaagtttttttctttctaatgtttctaagatctattcaatgatcatttcttgtcaatttccggtcctgcaagcatggattctaaaaagggaaagattgttttcttcataaacatgtccaacattagatgttatatctgatgcttcatgtttgatgataattatttttttaaaatcagggtggtgtagttctgggtccttcagttcttgggca

SEQ ID NO: 52495 - DNA, 898 bp, Ricinus communis
  Intron number 1 from transcript 30186.m001315 (locus 30186 .t000020) derived from phytozome v7.0 (chr-ID 30186; pos 1 039478 to 1040375 reverse strand)
ggtactgttccttttcttctttttttttttttgttattttttccattttactttatttttattgcagaatttctaaatcagttttgaagttaatttattctaatttttgtgggcagttctttttgcttgtttagatgtctatcatacttcgtgatgtttctctatcctgtttaagaggagaggatgcttgccgtatttattttcatgatatcactagctgtgttgtgtgtgtgtgtgtgtgtgagttctatctcaaaccttttcaggacttgtttctttttgccttcttataattggcaattcaaaaatgttttgtccttttctgtgttctgtcgaacaattagctcttgtaactgagtttggaatgtcttaatcctgtatcacatacatagctttactcacctcaattcatcctcgataagaatgttactggggttggccttgcaggccgttttctttgttcagctatttgtggtgctacactttcaaaagatttgcccttgttgttcatagtatatttcttttcttcatctcttgtctatcttggatgtaactaatcttccacattaatatattcacggtttgtctttgagtctcgacacttcaaaaccatctgtctcccttccttcactttcctttcgatggggctttcctacaaatgcactcattccttgcatttattgttgataatatttctatatcatctctataatgccataaaagtatgagcaaaatatgttgaccactctaaacgtgtgtatatttacaaatatttaattggttagtcttttgcctagattttatctcttcaataatgtggatgatctaaggaagcttttgcaattgtctatttgcttgatgactaattgttacacattcttgttcgtacagggtccta

SEQ ID NO: 52496 - DNA, 540 bp, Ricinus communis
  Intron number 1 from transcript 30147.m014401 (locus 30147 .t000672) derived from phytozome v7.0 (chr-ID 30147; pos 1 693756 to 1694295)
ctctctctcaagaaggtctgttaccactttaatcatgcctttttgttttagtatgttcacagccagaacaagtaggagaatgtgctcaagggttttagctcattttactaatcatgtttcacttctttagcagttctcctgtctgttttggctgcttcttgttacatcactcatgtttttgagttattcttttctttctttctttctttgagtattttccttttctctttgactgtacttcatttggtctatgtttgtctacttctactagcttgctttgtgcttatgttaaccactaaagaggaaatagaataaagaaattttgaatggtatcttcgtatttggaattggaactgtgaactgttacatcatcataacatatttttaaaaaagaaattatatatatcatgttctaaaaagcgacacgagtaagttcatgtataattttatttcttttctgttcctttttaatttcgagttcttttcgatgtgatatgcgggttaggcctatcagaggagccagtgcagcaagagaaggaa

SEQ ID NO: 52497 - DNA, 459 bp, Ricinus communis
  Intron number 1 from transcript 30186.m001323 (locus 30186 .t000028) derived from phytozome v7.0 (chr-ID 30186; pos 1 383007 to 1383465 reverse strand)
tactctcgtcggaaaacgctctcgctccgactgtaatttaatcaaatttctttttgttcagttttcagatttcttcatgtctttcatgctctattaagttctgcaactctgcttatttgttcaaattagggttttcttctgattcagtttggtgtccgattatatactaaaatcaaattgacctacttctcaggaaagaagagcctgaatttgtttttcttttttccttcatttcgtgatgagcaatcttagattatgtctaacaccactgctataacaactcaactgaggaaaactttggggtttttattagaattatgcagtgaccttttttaaattagttatttttaataattttcacaagtactaggttatatctgtggagcattaagattgacactgtggtattctcggttctgttaaatagcttatttattggtaaaatgtataatcttgtag

SEQ ID NO: 52498 - DNA, 424 bp, Ricinus communis
  Intron number 3 from transcript 30225.m001694 (locus 30225 .t000018) derived from phytozome v7.0 (chr-ID 30225; pos 6 27345 to 627768 reverse strand)
gccctggagaccgcactcttactcaaggattaaaggtgctgagagctccattgattgttattcataaaaattgcatgtggctttcatattcttaggaatgattgattccataagccattcacttaccatcggggagatattgataattatgttgctcttaggatttaatttgtgtttatgaaaactttcctctatctgattttccaacaaattcattttgaatcactttgaagacgtttatttttaatatcataagaagaacaatcatttccatctggctagttaaaggcaacatgtatcagtggcataattgtatgttgctcgaggacatattcgaggaatttgatatgtattactcagaataatttgagttcttttatggatttcagggagacccaacttaccttgtggtggagaaagatag

SEQ ID NO: 52499 - DNA, 477 bp, Ricinus communis
  Intron number 2 from transcript 30226.m001977 (locus 30226 .t000001) derived from phytozome v7.0 (chr-ID 30226; pos 4 2566 to 43042 reverse strand)
ctgtatatcagcaacagctacaagtccagagatcggtttgtaatacagttttttgccataattattgaactttttatttttttacctcttgttccctttttaattgaaaccgccacgtgaagcagaagaattttaccgccgtgtgataaataaatggatgacaccataatttgagtattttgctctgcgtatctattgttaataactgttgcacatttttcggccttaatatatagatgagacatattctacgagtagttagatattctttctattatcaaatttataagttttcttttattgattttttctatcaagtcattaggcttttatatgatcattactgttaaattaagtggttaagcactcttacgatgatgtttacagggtgggatattaactgaagaaatcatcagaaaatgacattacaccctcttttctatttttttctgctaccatttatgtacttctgggcag

SEQ ID NO: 52500 - DNA, 333 bp, Ricinus communis
  Intron number 1 from transcript 30226.m001977 (locus 30226 .t000001) derived from phytozome v7.0 (chr-ID 30226; pos 4 3045 to 43377 reverse strand)
agcacaaaatcaggtataagattttatagctgaaacaataattaaaaatagcaaactatgacccatgttttcatatatatattataggctactaacctaacctccaaataggttactaccactggcatttactgttgtgggttcttcttcagcttccaatcatttcagtgctcttacagttacaagtactttccttggctccttttcaattttcaacacattttgcattcaaattctgaaaatctattcaaaccaatttctttcttttccgtggttgctgttttttgtttttctttagcttttgaattatactgcgaacaaggtttgaaggaa

SEQ ID NO: 52501 - DNA, 653 bp, Ricinus communis
  Intron number 1 from transcript 30190.m010893 (locus 30190 .t000129) derived from phytozome v7.0 (chr-ID 30190; pos 4 87164 to 487816 reverse strand)
taaaacagcttcttattcaagctaaacaaactcaggtattcacttttgatttgattttattttattcttttccattttgaaggacgaaattatttgcttaactaattaatgctatgaataatatagtttgtcacattatgaggttcatgttattagtgtttacaatgaataaaatgcgaatttttttagcgaattttatatgagtttgatttagagtattcgcatggataacttaataatatggatcttatatttatctgatacgaaaattaatgaattcaattcaatgatatatcacaagggacatcttttctttatttatctgtttgtgttaggattttgaattactatgtcagacttagaatgagaagatctttacttggttatgtgttttttattctttggaagtgtggcattgacttagtcttgaattttgcatcaatttttccgctgtctgttgatgttgtaattattgaattaggacactaaaatgaaataaagggaaacagaaaacatggcaatatagatgtaataagattggttgtgtccttcccttcttcttttgattctccatgtccattgtcggtgatgtcagatggtttaatttcattggtgcagaaacctgagcttgcggggttggcggaatttcttaa

SEQ ID NO: 52502 - DNA, 533 bp, Ricinus communis
  Intron number 3 from transcript 30170.m014321 (locus 30170 .t000733) derived from phytozome v7.0 (chr-ID 30170; pos 3 931728 to 3932260)
aggctgtagggtaagccataattcttgattctggatactgctgtgaatttggaactgggaaaatactgagtcagccagacagataatagaaactaactcagtcaatcacccgcttcatacggacatcatgatgggcggattacttttattgtcttatttatatttttctttcaaaaagcaaacgctttcttaccttttatatacgaatgagtacttgcgtcaaattaattgcttctggccttacattcgacactatccgcatactacacaaccatataaattatagagtggatttatgcttttatcatttatcccaacggagaaaagaaaaggtgacgactgcacaaacttatcatttcttatttttttttacagtttctagtataagactctaaccccgctaggatttgtaaatatacttttgctcaaaaagggggaaaaagaaagatttttggaaatgtacttgcttgacagggttatgatttagtgcactgttttgttatgttgtagggttgtagagagtgtaggggagg

SEQ ID NO: 52503 - DNA, 730 bp, Ricinus communis
  Intron number 2 from transcript 30199.m000880 (locus 30199 .t000004) derived from phytozome v7.0 (chr-ID 30199; pos 7 2200 to 72929 reverse strand)
aggtactcttcactggttcagaatttaaatatgtgggttattagatcttggtattgaggcatcttaactgttttagtgaattaagggctcaatattaaatgttgttgaactctaatctgtaattaaaccaccaaaagtgaatgttaaacatcacacttttggtctggaaagttttaaatgtaactctgttcagtaatttgcaaattgctcatcttgcattactggcattatatagcctttttgtttctctaattttcaagattctgttggaaattatgatttgatttcacgtggtccttggcaaatggttgtttgactggaattaaggtttatgtgcacaattatggcataaaagactgaataggaagttgaatggagggtttcgaagtaatttgaaggagacctctcgttagagtttagaggatttgttcatttattttgaaaatgagggagctttattgcaaatgcagttttctgtgaaaaatgctgtcaaacatggtagaggattactagaaatgaatgacttgttgtgtcaccttcggttgcttgatggctcccatagacaagctgatgaatttaaatcttaaatatattgcgtgatcttaatgaatcccttagttgaacttccttgccagtactattattccttttaattatttcatgtcaatctttgagcaaatttttttactttttctccttcagattgagctgtccaaaaaattcttcaaag

SEQ ID NO: 52504 - DNA, 855 bp, Ricinus communis
  Intron number 1 from transcript 30170.m014236 (locus 30170 .t000648) derived from phytozome v7.0 (chr-ID 30170; pos 4 381251 to 4382105 reverse strand)
tgagccttgggagcttccaggtaccttttgtttctttctttcatttttggatgaaatatggtgatattagatattggcacaaccggattaaaaagaaaaaaaaaaaagatatttcctttgtttattttcacttggtttgcagtacaggcagccgttcatttttattgtgtgtttaacatgatcgctttaccttttataatactgaatgcttgagctcaggcaacatatttaccctaacaaaccactccgtttctgcaaacatcgatcctacagtagctaagctctgaggtttgatttaaaaccaagtaatctttaaattatttttaatcgaacttaattacagaactatatatagtactcgaccaaaggttaaatctttaaggtaatccgaatgtatactgtgatatgcgtgtctagcattccctctctttacataaatccttaaaacaaagaagagttaaagcttgtaagaacctctgttgagtaatgaactactgacatagctagcatactcatttaagtcatactaattcagatccaagaaattctaaggcttttaatggtctttgttatttccattcaaacaaaagatcaggactttttgacttattcaacacattaattatatcatatgcatattcttggcgataataatattatacaagttattaaggtcactgtcatgaagttgagtatgaaacacacatacccatcaagctattcccaaccatacatttgtggataaaaaatcatccaggctccgaaagctaatatttctgatgaaatcattaaatatgggcaattgaaaatattaattgtgggcatgtcatttgttttgcttttggtgttaatcag

SEQ ID NO: 52505 - DNA, 457 bp, Ricinus communis
  Intron number 2 from transcript 30147.m014001 (locus 30147 .t000272) derived from phytozome v7.0 (chr-ID 30147; pos 3 900848 to 3901304 reverse strand)
tcgaacctgggactcgcgagaaagctgtgagtttcttttgttttttccctagggttttgaatcctgtttttttttaatctttattcattgaaatcaagatttttcctttttaaagttttttccattatttgataagaaaggaccacatatagtctgtgtgggtatctctacacttctacgtagctaataatttcttgaacttcaattgcaatattttgcttctcgttttatttacttgcaatttcaatggaccttatgtcattattaagatacgatttagatcctaaaagagtcatttactttcctttttctttttcatgcgttttttaccttcaaatatctaatcttgatttttaagatacgatctgaatcgcatgattagctttattgtgctaagttctttacatcattgattatttcagctcttggcagaagaccctgctcttaagcgattcaa

SEQ ID NO: 52506 - DNA, 584 bp, Ricinus communis
  Intron number 1 from transcript 30147.m014033 (locus 30147 .t000304) derived from phytozome v7.0 (chr-ID 30147; pos 4 122440 to 4123023)
ttctctcgttaccttctcaacactcttctccagaggtaagatcccatgaaatgtccttttcttaattgactttctattgtctcttagttttacaaattgggtttctgctgaagtatctaactttttttttaatagttatagttaaaaacttatatgggctgtgattagtgggttcatatgtatcatatgtataatatatttgattgttttaactgttgcacatgctcactgtcaatggaaaaagaaaaaaagactagaacttgcttgaagagatcatgcttgtaatgagttctttttatgtaatgtgaattacactgtgtcttgtattgaattgaatatatagtgtctaggctagggtggagtttggtgtttatgtgtgacactgaattgttttgaaaataggcaattttgtttacatgattctgaatattgtttattgtgccattctgtctgtgtccatgtgtttacatttcatataatgtaacagtaggacacttctttccttttctccaactggaaatgtaataaagtttgttggtattacatgattttcagatatcgaagggttggctatttggatacag

SEQ ID NO: 52507 - DNA, 316 bp, Ricinus communis
  Intron number 3 from transcript 30147.m014247 (locus 30147 .t000518) derived from phytozome v7.0 (chr-ID 30147; pos 1 195143 to 1195458 reverse strand)
aggtctgttattttgattgaacctttatttagcttcgtttatttagttcttagcaattaagtcaatcaagcatggtagtgaagattaatcttttattggcttagattttcatctatgcattagcagtaatattgaaatgattgagatgttggactagctttttctgtatgaaatctctttggtaatgtttcaacttgcatgtgcatagtttagagtctttggtttctgatagggactctgattggaattagtaaaagtttgaatgaatttctgtcttgcaggattcaacatacaaatactttgaggtcatcttggt

SEQ ID NO: 52508 - DNA, 476 bp, Ricinus communis
  Intron number 1 from transcript 30221.m002221 (locus 30221 .t000011) derived from phytozome v7.0 (chr-ID 30221; pos 4 74986 to 475461)
gttgggtttgttttggcattttgtaggaagaagagacgttcaagcaaactcacttcttctgtacgagtctttctcaagaattttcttgtattcatagtataaattactgagagaaggctagagacttttgcagaagtacttagtttctaatgaaatcttctctctgcaaattgaaggtaagttatttttattttatagagcttcttgtctatgatgttagttttagtctacgagttacaatttgatctttgtttaaagttaaacaactgcttagaattatttctatttatcaatttctgttctgttctgatgaagaaacatctctctttgacattaattattatagtagcctcatcttttccagaataactaccacttttatacatacctacacagaaccaacgctaatactttgaagggtactcgatgcaagtcaatttgcctaattaattttgtttatgattacagatttgggt

SEQ ID NO: 52509 - DNA, 382 bp, Ricinus communis
  Intron number 2 from transcript 43588.m000052 (locus 43588 .t000001) derived from phytozome v7.0 (chr-ID 43588; pos 6 45 to 1026 reverse strand)
agagatcttcctccgactccgagaaatcggtcaagcgggaggctaccctcgactcacctctctatctataaaaatccctccccagaggagagcagaagctccaggatgagtatgtcctggattcccggattaattctcgtcctgatccaccatggaattttcggaatctacaaaaacattctaggagagggctcgtaatgatcttctcaaagataaaaaaaaaggtgctgaagtggcaggataggaggggatctgtaggtttttgtgaaagtatcatattattgctgaaaagaaaaaccgaattcctctatttgatgtcgattcatccacacttccattccttgtagaggaaggctaactgcttgctggctgggagctgtat

SEQ ID NO: 52510 - DNA, 793 bp, Ricinus communis
  Intron number 1 from transcript 30174.m009158 (locus 30174 .t000555) derived from phytozome v7.0 (chr-ID 30174; pos 3 345947 to 3346739 reverse strand)
taccaggtatgtttcctcgattgttcttttgttccttaataatttccaaagtttctagttttccagttcaatctattctgaattttttcttgtctttttatccgaatgcttgaaaggttattggttgctgtggactgtcaactagaattaaattgaagtcttagcttctatagtctattctaatgagttaattgttgctttttgttatccacttcaagggagttagctcactttttttattgttcctgatttctcaagttaaaaaagcacaaaaaagcgttcacgaagatgctatgaagtgaaattcatatgtttatcaagtatgctttctgaagattggtttagctttttgtaaagttaagaaaagatggagtgttagtttgatctaaactttgatatagtgttatcctactaaaaacatttttatctacttttaattcaagttactcatatgctatctagaaaggtggattataatttttgtgagtggtgcattttatctttatggatcagttatttagcgagtagttcccatggtcgtgtagttatattggtttttttagttgccgaagatgctaatgtagctgtcttcgtgttttttctcactggggagccggtaatttatcatggtgtatttgttctctataatgcatgtgcttctctctctccatacttgccattttctgcttctcttactcctctttctggttatgtttttcttttcctatctttcttttctttttatgatttgtcttctcagattcatggttttggcagtattgatttgaagagc

SEQ ID NO: 52511 - DNA, 441 bp, Ricinus communis
  Intron number 1 from transcript 30190.m010897 (locus 30190 .t000133) derived from phytozome v7.0 (chr-ID 30190; pos 5 13717 to 514157 reverse strand)
tccccatcaacacgaaccatcgccagcgcttcaaggttaaaataataattccttggaatgtaccatctaatttcaaaaagattctcagaaatactaattaagtaattcaaatgcgtaaattactgcttttaggcctagttcggaacacataatttgcataagagttcagttgaattgaattcttatggaatcatattattttatgcacgatttcttcttgttcttgttttttttttttccaattaagttgatagaaatgaattagcaattatgaggtttcccaatatgagaattgaaataaatagattcttgcatatctggacttttcaaacaaggtgttaattggtaaattggattttcaatttactttgcgctgtatttgtttttttttttttttactgatctatttcgctttttagagttgtatcggttttaggaagc

SEQ ID NO: 52512 - DNA, 915 bp, Ricinus communis
  Intron number 1 from transcript 30169.m006401 (locus 30169 .t000178) derived from phytozome v7.0 (chr-ID 30169; pos 9 81431 to 982345 reverse strand)
tgatcgctctgaggccgactgctttgaattgcaaggtcagaatctgggaatgtttatgttgactttgacttttggattctatcatctactatgttggattctcgtttttctttttgttcttttgcaggagttactaataagattacattacaacacacgcgcgaggattgtttatttgtttatttatattttaattgtccttatatttatttatattttaatgtcacattttgcaactgtagtataaaaacttattattaagtttattctaaccaaaaaaataatttaaaaaacgaattaatcagtaatattataatcactggctaatttaggaatatcaagcttgtccttaatattgttttattaattagtaattctaatcagcatacataaactgataatttctttttttgtctgcttgtaaggttggtgaaaattgtattaacgttttttctggagttattatgacttgtagaattattttatccagttagccaatgagtagatatctagcattagcaaagtgctgtaccaatctctttaagaaaaatgaattattcttcaatctcatgtgaaaaagttttgtaattccgtgttttctacaaagtgcgtgattggcatggcagctttttggaacagttgacataattgagatggcattgtcaatagcaagccttgtttgttcacatatacatttttcttttcacaccctactgcaaaaggaaaaacccttcaaaacttgattttgcatcgcgaccataatgcttgatcttcaatattacagtacatgtatagccattacagtaaattgtacacgctttttttaaaaaaaatttattttttaaatcttcaacttcatccagcaatttaatagttactagtatttgacagcttcaagaagctctagaatagtca

SEQ ID NO: 52513 - DNA, 641 bp, Ricinus communis
  Intron number 3 from transcript 40757.m000011 (locus 40757 .t000001) derived from phytozome v7.0 (chr-ID 40757; pos 9 2 to 732 reverse strand)
ttcagcaagcaaaaccttcgagctctggtgtacaggtaatacctgttttcccttcatcatctcttcgggactaaagatggaagcagacagaggctggaatggactgtagccctatttgttttatttttattttattttattttcatttttttctgtgtttaaattctaaaaaatacattttttatttttagaatttgcaatttcaatggttctctattttctttggaaaaataagtacaccataaatgtataaaaaactttaaaaagaaacatgttcttaaaaagattacataataaaaataataattttattgatctcagtatatttagaaaaaaaaaaactattcttaattaatatataattaaaaataaaattaagacgtgatttatgcattttatataaaagaactataatgaataaataagaatctcattaaattttttttttaattattcaacaacagtttcctataaatatatcatcaaagtgttcaatattctaatatgctatataattattataacaaaagatagaataataatataataatattagatatgtgataataataataatttatttattctacttacagtcttttctttttttggcttttcttttttgcagtggtgatcacgac

SEQ ID NO: 52514 - DNA, 839 bp, Ricinus communis
  Intron number 2 from transcript 59505.m000053 (locus 59505 .t000001) derived from phytozome v7.0 (chr-ID 59505; pos 8 26 to 1664)
acctttttggcacacttgtcccttgtccttttcaggtaaactaacaacattatccaataagctattccttgtgtttgtttgatttttaacaatcacctatatccattttctgtgatcttaagacacaagattattttaatttggtaattgaggagtatccttttggattcattgtagaattatagcctgtcaattcaacacttagtaaggatgaaacttaactaaatggaagtgtcagattccagttagtagccaattagcaactttttgcaagaaatccttcatcctattttgttagtccaaggtacttgaggatatttcatattagtaaccggtgtaattggaatttcaaattagtttattgttgcagcaacctgattcttccaaaggagaaacatctgcgctggttgcaacaaaaaagagatcacaggaatttctaggattgcagattgtggtaagtttttggaatcctatctttctctgatttgtaaaattattgtataagaaaagagctaacagtgaaagtgcactaaggtggaatatgaaatcaccttatctttctctctctcgtgcttcctctcccttcctctgtatgtgcgcgcgcctgtgtgtgtgtttatgtttgtggaaatattgtctttagtgtttaaggctttattgaagggcatttaaacttccatgaaagtacattgtgctattgtttaaggttgtgctatgtcatataacgtggattcaatacgttgttttggcagattctatttgcaaaagatgcgtgtttattagtctttgtacttattgtgctttccttagatgtatgtttattgcaatgcaggaaactg

SEQ ID NO: 52515 - DNA, 1043 bp, Ricinus communis
  Intron number 3 from transcript 30206.m000772 (locus 30206 .t000020) derived from phytozome v7.0 (chr-ID 30206; pos 2 62791 to 263833 reverse strand)
tcttcaaaagtggagccacgaaagcttcattccaggtgaatatactgtagcctttttgaatgctattttgagtgtcttggttcaaatagactcttgaaagacagttttgctacagttgtattacgtcatttctttgtggcttgctttgagttgaccattataatcatagtcgcactgttacatcctactatgatatacccttcttggctgacacaaactagactgcccttacaaggcacaggttcctctccaatagaggattttaccatgcaattgaaattggtcgaataagctgaatactttttctttcgtcgaacaacgacacattttcactttccatggtcttgacttcatgtatataccaactatagtatactccaggagatgcacgccgaaactccttatcgaattttctggttttacatataacttaaatttgctgtataatgaatgataaaggacctacaacattattataccagcatataaagccgctgaaaactagttaaatgatgatatgaatgtttagtgtttatttactgaaagcaaaagccacagaatgttctcgagttctattttcattgtacagtacaatgatcaaatattatactgtcaatttcaactggcagcatagtactacatttatcatttagaaataaccataacatggtatattttgggtcaattggttcggatagtttcaacctgttcacttgattggggtctattgaccacaacttgtgatttctaatgtagactgaaattggcaaggaggggttgaactgaaccaactgattgttttgaatcagctgattttgtactacaggatctagcatttacaatttcaatggattagaaaagacagccttagagtttgattgacctcactcattcacaggaaggttgtgtggggtatgatgcatttatcctactttttctgttgtcctttcgtcaaaatagatatatatgtattatcatttactttattgttggtttaatgctccacagtctggtcaaataaactattttatctgggtagtgat

SEQ ID NO: 52516 - DNA, 275 bp, Ricinus communis
  Intron number 1 from transcript 37131.m000014 (locus 37131 .t000001) derived from phytozome v7.0 (chr-ID 37131; pos 1 144 to 1418 reverse strand)
ttgatagttgggataattattgcagcctttttcaggtatttcctccattttttaaaattagctctagtgtttatttaactcttctcatacttatcatggtgtttggaaaattgcaaaatgcaagaatttagtctaattgaaattaatcaaatcatgctaaaaggagtatgattttgcaagaatacctccaaacgagacggtatcttacttatttatatctaattaatttttttcttacttgttagttttatctttgtggaaataggtggtgctgc

SEQ ID NO: 52517 - DNA, 890 bp, Ricinus communis
  Intron number 2 from transcript 30209.m001522 (locus 30209 .t000021) derived from phytozome v7.0 (chr-ID 30209; pos 5 63302 to 564191)
ttcgcaaggtagtataaattttgcagatttattaccaaattagactaaattttttgcctttttcatgtttgggtttgaaattcaattactggtttttttaaagaaaagataagttatatattgggttaatggctcttctttttggttttctaagatgctgataaagatgggttcaagtaaaagatttatcatttatttagaatttgttttgatactgtttcattactggattaacggtataattatgattattttatttggactttggagcaatttataacgctaatatgaatgggtttcttttattcccagatattttatttttattggcagaatttggctgcttatataattttcttggctgcgcttaactggtcttctcggggaaaatttatgatattagcatgatgaaaactaaaaaggactttccttttggtagatagtctgaaactacttctctatagaaaaagaaaaaatgaaacaccactcttttagatgacataaaagtagtttgaaacttttgtttcaaagttttaatgaccaaaatacataaatctatgtgctttcagaacaattatgtatttaatagaaattttttttttaatttttatttccttttcccttaggatttttgaggtcctaatttatgacttagattttggggcatcggctagcctatatagtgtttagaacaatattgctgttttccatcaagtttcaagttaaagtaaccattgaagctttgttgtgatatctttctagtcttaatcaagtgtttaatctgtttctgtgttatccagtttgggttgctgaactattagtaccttaatttttatgacaaaattcaaactgatattgtcaatgtgctttaatggtagcagggataattt

SEQ ID NO: 52518 - DNA, 909 bp, Ricinus communis
  Intron number 1 from transcript 30183.m001302 (locus 30183 .t000032) derived from phytozome v7.0 (chr-ID 30183; pos 6 43603 to 644511 reverse strand)
gattgccagttcctcctgatagagaggtagtaaggctttttcttttcaattatttgtttttggtatgggagtgtttatagcagtaatttctgatttttattttaatgttagaattcttaattagaagcgactcaaattccaaaactagttatttggatgatgtttcggtttttagcaaggacctagaggtatatatatgatttaagaggaaaaagggaaagtggtgccaccatctaactagaggtatatgatttaagagtctatgctgtaacagatatctacatgaaacatatctgatatcacccataaagtgtatgcatacttgttcctttagcttttacatatggccgacggtttttctctgtccttaaaatcactcaaatcatagtctatcttagaagtatataaattgcccaaaggaatgcaatctcatatactcatttttggtattttgggttctactttacatccggatgggaaattattgatcaatttcatttaaacagttagctttttagcataaggccttgaattatttataaggactagtattgataacagtattagctttcctacttctaatatcacataattggaaaatttctttcttagtggatatagtttacatcttttactccagaaaatggaaagatgtgtgaattatcagtttggggaatctgtactctgttataagttatggggcttatttaggtgccctttagaagagtaattagaatgtgagtgccgaaaagtgggcaccggtccacaggttataatatcgtcattctacattgtaagctacattgctatactcttcagagttattttttccccttcttcttgtctcaattattccttttgtgctttattaataaatgcagtatttacgggctgagatttcaagaatag

SEQ ID NO: 52519 - DNA, 480 bp, Ricinus communis
  Intron number 3 from transcript 30198.m000878 (locus 30198 .t000036) derived from phytozome v7.0 (chr-ID 30198; pos 8 76755 to 877234)
gtatcgatttaaagcagctggggagcaagcaagtatttctttcgtttttcttttttccttttctctgtttattgttttaaattcatgttaattattggatactaagttgtgcaacaactatgatgtattgtaatattaattaggcagataattttagtcttctattttttattagcctttgcacttaactcatgtgattatttgatttagaaaaagatgctttgatacttctaccatgctagctactttcccatttcagatgatgatgatgtgtgtgtgtgtatgctgctctgcctattgtacacttttaaaccgttcatccacttttgatatatgttacattgtttgtcgcaaagttcaaaagaatagtaggctgaattttgggactttatagatcattgcttcttgttggtatgagctttattattttcttttgccctgacaggaaccatagaatcacagtcaattcccaaaggtgat

SEQ ID NO: 52520 - DNA, 574 bp, Ricinus communis
  Intron number 1 from transcript 30184.m001177 (locus 30184 .t000021) derived from phytozome v7.0 (chr-ID 30184; pos 1 092530 to 1093103 reverse strand)
aagaacacggtattcactttgtcatttctgttttatcaatttgttttggatactgaatacaggctttgatttttactttagtttctttaattggtcttatatacattctctctgtttatgattcttttgtgtcatagagctgttacagttcaagaaagttcactgttcttgtgtacactatattgtcgaaaaagttcattgcttttatttgtactgtgctctatgctctctgatcttccatgtctttagatcccagatctcagatcccatttcagaaattaatagcatggggctgagctcacatcataatccaattcgtgtgcggctgggcttcacaaccacagtcacggggccaacgctctacgtcatgttgttataaattatttcaattatttttgttttgcttggggtctcaaggatggatgagtgtatgagaccagacagtaattatcgttaatgataatagctgcctactgctactattgcattttgagttggtgacttggtaataagtgaccagctcaaatgaggttgtagtctttttaatagtttagttggaattttttacaggtat

SEQ ID NO: 52521 - DNA, 823 bp, Ricinus communis
  Intron number 3 from transcript 30190.m010830 (locus 30190 .t000066) derived from phytozome v7.0 (chr-ID 30190; pos 3 618296 to 3619118)
gcattgagttcgctccaggtaatggtaacttttagatgcctgctccttttatttctggctgattgcggactgcacagctaaagagcttggattttaaatatctgaatcatactggttcctttctgcaatttgaagggaaaatgttcaataaaccaagacaaaccgcttaagatgttcagtttatcattgttagaagttatatttatcccacatcgcctagttattggtctattataataatgtacatatgtggattgggcatccttttcttttgagctagtttttggaaatgacttctatctaaacccatttatcatacatagccagacctttgtctgcaatgatgggtagctaacttttggttttgagtgctactcaaacccatttgtcaatcatgattttcaaaagtcaatcagcctgttggaaggtcttaaaaaaggatatgtgcctctaatttttttggccagtttgtcgtagtcatgttgattaatggatatcagtctgcagtgggctcaatcatgattactccgttggttctgtttgaattaaaatatcttccttccaccagaagcatgccaagcattagtcagagttattgttcttttgactttcaactttaaatgcccttagtttatcttcccattgctattatttatgattgcagttctgctggttgactttataaatctttcataatcgggagagttgctttatgaagctttatttttagtaacctttgctaagtgatttcacaagttaaatgacattaatgtttgtttttcttttaggtgttgacaaagctagagtaccttgacctctgggg

SEQ ID NO: 52522 - DNA, 323 bp, Ricinus communis
  Intron number 4 from transcript 30190.m011179 (locus 30190 .t000415) derived from phytozome v7.0 (chr-ID 30190; pos 2 363221 to 2363543 reverse strand)
atattggtggcaattctggtttttactgtcttggcgtaagtattttgactagcattttagtttgattttaaacttgaccttttttttttgtaaacagtcttatgattttcctactttgcctcttattcatttatggttatcccctcctttaagaatccgcttaaagagcaattgagaattttctctactcttcatatagtaatattttatgcctatatataatactgaggtctgtatctctattatatcttttctttattttggagtttctaacatgttctgcaaattgatttggttttcctgtaggtttattataacagaca

SEQ ID NO: 52523 - DNA, 535 bp, Ricinus communis
  Intron number 1 from transcript 30190.m011179 (locus 30190 .t000415) derived from phytozome v7.0 (chr-ID 30190; pos 2 363908 to 2364442 reverse strand)
gatcaactttttcaccgtatgcttttctcttgcttctttgttatttacttttgttctttattttaagcttttaagttaaattttatactgcattgctaattagtctttctatactttcttggttttcttttgacgttgttaatttttttgtaaacgggttcatctccgttactgggaagtaatgaattctgcattttgttgaaggtgttaaattaaagtttgtttcttttggggttttctcgtttgtttgatttcttttttggactgtctgccattttctttcaattgggtgctctctcttctgttttgcttcatattagcaatgtaggtctgctaaaatgctttagatacatcgtttaatccagctaaatcattttaaaaattaccagaatacatatgtaggtctgctaaaagaagtttggtgcttgcttaaatttagtattaacagaaagtaaattttccgccttccttacgatgttgtttatttgtgcgctcattcgtagcttatagccatagctgtcataatttttggggt

SEQ ID NO: 52524 - DNA, 756 bp, Ricinus communis
  Intron number 3 from transcript 30190.m011058 (locus 30190 .t000294) derived from phytozome v7.0 (chr-ID 30190; pos 1 587239 to 1587994 reverse strand)
atccgagtctaaatatcgtaaacaaacataataaggtacagatatgtttttgttgtttgaccttgcttgtgttgtttcgtgtttctgattgaatttttgcgtcatggccggaaaataaagcgcatatttttcttaagggctttgcaaaacatgttttgatttttcttttatttgttcttttcccctataatcttggttctctagaaacatcaagaatttatgtgtgcttttattaatggttgccattacatgtctaccatgcttggttcaaatcgccgttacaagtttgcttatttgtgtatgtaatacgtggaggggtttacaggcttctaatgtcatgctttgaatcctcagattggacttaaaaacccttagtaaagtatagaggattaacaaatctataattcaattatattacatattatcttgtccttttaaaggatgaggtcaatctttttcaaacgcattaatgtttgtgtggggaagaaatgttttgcgcacatgctaaactatagaggattatggtttaaaaggagaagattatctccaatctgtgagaccttgatttcagttttagctcttaagttcttgtctagacttgcatgtgtgtgctcctgttcatagttgcttcactagttgtactaattgacttgcatgtgaatatgtgatgttagttatcccaggcatataattatgttacttgatgcatttcttattgcagatttttgagcaagaggagttttctctaattaatat

SEQ ID NO: 52525 - DNA, 261 bp, Ricinus communis
  Intron number 2 from transcript 30174.m008861 (locus 30174 .t000258) derived from phytozome v7.0 (chr-ID 30174; pos 7 23151 to 723411 reverse strand)
cccttgggagactcttgtaagcactaatttgtttctacattgctgttcttgttctctattattgatttaattgtcctttcttgtttttgtgatcgtatttccatttactatatattcttgtattcctctttttctttttgttcttttttttttaaaaaaaagttagaagtaaaggattggcatttgattctatagatattgactttcttattaattcttttcaaaaaaataaataaattcaggacgcgcattttgcgccat

SEQ ID NO: 52526 - DNA, 726 bp, Ricinus communis
  Intron number 2 from transcript 30147.m014384 (locus 30147 .t000655) derived from phytozome v7.0 (chr-ID 30147; pos 1 625442 to 1626167 reverse strand)
actacaaaggtatatagttatattgtgtattcttttggatctaaatttttgctgtctattttttatttgttaattttattgtttttactgttgtattgtttgtgctttcctttggagtttggtttttacttgcttatttggtggtattgctgctgtacttctggaagtgatttggatatggtttatttctaggttgttttttttcctcgtgcaactgattgtctgatgtagaaatgaaattgttttgatatcattttgatacttgaattccagtagatcaaagaaattatattttcaattaacttttcctggatagtaggcgatgttacttgttagttgaaatgtatatgtagagagagataattatgaaaatgataattagggtgagtggttgattttcggttgcaattgtgaaaattgaataagttgtaataattagggtaagtggttctgtctttttcttgacttggaatctggagtttaaagaagatactataatttgttatagttctaataaccatgactgactgcattgtaatcttgctacatgtctgttttaaatgaatagaaggaactgttgtttgtctatatttatattcttttataagctgagtttagttggttgtctctgtcaatttattgtcggctgttttcttgaggtagaagcagatattgatgtttttatattgtttataggtgagtggaagcacgcgaagagtgaaggtc

SEQ ID NO: 52527 - DNA, 443 bp, Ricinus communis
  Intron number 1 from transcript 32657.m000014 (locus 32657 .t000001) derived from phytozome v7.0 (chr-ID 32657; pos 1 00 to 542 reverse strand)
tcccaagaagcaacgagctcttcgcaaagataaaggtactctctttaatatctcttctctttaaaaagttgttgcttcattgattattaggcgttaattacttaatttacgaaatgtttggtttattttgaaattttttattaaaccctagcttaaaccctttcgatagctgttgttaatgtataaaaaggttatggttttgattaataatttggcattaattacttaatttatgagaaacattttgctttattttgagaatattttttgttaaaccttagcttaaacccctaggtagtagctacttatttgtgcatttactaaatcatgataataatattgatagactgagtttgttacttattttataacgattatgtttgtgttttctgttcttttgttattcagaatatcagcaaagagtggagttgcttgaggatttg

SEQ ID NO: 52528 - DNA, 679 bp, Ricinus communis
  Intron number 1 from transcript 30190.m010960 (locus 30190 .t000196) derived from phytozome v7.0 (chr-ID 30190; pos 9 37367 to 938045 reverse strand)
catttctccgatttctcggccgctagcttcctcaggtaaataaaggaaacacgaaggaaagatgtttgctttatgatgtgagggcctgcattgattttattataaccttctgttttagcattgctagttttgagctcaaagtttttctttcctaatgtctaagttctgatgggtttaataaagatctcgtgaaaccagattctttcaagttacaaaagaacttgctgcacttcttttctagaagtttttacttagattgtaatgtagtaaacagctgtatgaagatttcttttttgaaactatttgagcttcacttgtagtagatttgttgttttattgttctttacgtttgcagttaataagcttaaagtcccttactttaactcttgtttagtatttcatatgaatcttgttgttttgattttaacagagagctatcttcttggttactgtttacttttgcacaatgttagcttctttttaaactgttgcaacgttcgttactctgcttgtttttttctttctgatggcaataatatctgctatttaactgttgtttgaatggtttttggtggcaaatggcaatgattaggtgtggagtttatctttaatgagttcataatgttgggttaatctctctacagaataggagttacaactgctgttcggctgcttagaa

SEQ ID NO: 52529 - DNA, 548 bp, Ricinus communis
  Intron number 1 from transcript 30170.m013720 (locus 30170 .t000132) derived from phytozome v7.0 (chr-ID 30170; pos 4 434387 to 4434934 reverse strand)
ggactatattgttcgtggaacagttagagatcccagtaacactataaacctcttgcctttttcttctactttgttgatatgattttttatagtctgtttttccgtccttcatttcatctttctaactgctgtttttattggaatattaattgctttcttttctacttctgatcatctgtctactactttgcccgagattggctcttctgcttaaatctaccttttacaaatccaaatttgtattgccaagtggctacttcttgctggcaagttttaaggctttctttggttcatggaaatggaacactttgcaatttctccttcttatttaatcaacttttgaattcagttctttcatttttcataaaaatcatatataacccctgattttgaggcaactattccatagcctcttctccacttgctgagaatctcatcttgttttttatctggtaaccgtcatatgatatagtgcttttgctagaattattttgttaagctatgtttcatttatgaatttcaactattttatgcagaggataagaagt

SEQ ID NO: 52530 - DNA, 583 bp, Ricinus communis
  Intron number 1 from transcript 30147.m014404 (locus 30147 .t000675) derived from phytozome v7.0 (chr-ID 30147; pos 1 717914 to 1718496 reverse strand)
ctcgcggttttcacggtatcttctctcagatcgaggtacttagtagcttacttctctctattatatatgtgttatttaatatagttttttttattaagctttaaatgaggattgcctcagatgtaattttattcttagctatgaattgctaaattttagatattataaggtttttggagtacattttgaagctgaggcttcgaagttgataacctattactctagaagtcggcattgtttgaattgcatttttcaagtagattattatattgttttgcttttcagaaatttttgaaaattttagctttacatttagggattagaatcactgtggcttccttaaatgtagcgcaatcaattcggaatacaagtcttataattcagcatggtttcttaatttccatgaaagagttattgccaattgaatgcaattgataacttatgttctgtttaaaatatacatatcaaaattttcatttctagcttcgctgttgcttttatcatcttgatattatttttagtgtttactccttgctgtgtatctgcagttatcattttctgcaacaaacttgcgtgaccggga

SEQ ID NO: 52531 - DNA, 1065 bp, Ricinus communis
  Intron number 1 from transcript 30170.m013745 (locus 30170 .t000157) derived from phytozome v7.0 (chr-ID 30170; pos 7 67469 to 768533)
gatttgaagctgacgctattcgtcgctcaaatcaggtatcagtttctctctctctctctctctctgttttttctcttgtttagttgccaagaaagatcaggagagaaaattaattaatcacatgtgctcttttttttttcttctgaatttatgcttttcctttttaggactcagttatagaataaagtcctacagtttttttttggtcgttgaccagtggcagattgcttcctgatttgatttttattcttttttgttattttttataatttccatctcctttataaaaattaataattttcttatgcagatgtttctgaaaactgaagagttttttaaagattgagattatcctgtggaactgtttagttcttactaacagtactcagttcttataatgcctttcttaaggcagaatgtggcaacatagcattaattatttacttatgatctcatacttataaaatgagttgaatataggacggatgtattggatatttggatacagctatgatccgctgggatataggtagaatacaatgagcttgtggtgtatgtacggtagtaatttttgcacttcctggatcagcattgtaatatttccatttattagggtacaattttaacaatgaggcttcactagaaaaaatttggtcaggaaagcttatgcttgctaattgtgtatctagttatgaagataagaggagaagccaggtttctagtataattcctttatgcattacattagttggtctctggaaatgggttaacctgtcgaatgctctgcattaaattgttgtacaggctgttcagccagaaaactatctgtttcataattttgaactcaggttttgttcattaaatgctggattgaaacctattatctgtttctacatagccttggaaaatgttctttaccaaagttcctcaaaaataattgaatgcactgatttaggctcaagtgaaatagtaccttagtattttctctctttttcattcaatttttcggttttccatctttgcatcacaggagaagcttagagttgcagttttggtttcaaaagc

SEQ ID NO: 52532 - DNA, 753 bp, Ricinus communis
  Intron number 1 from transcript 30170.m014165 (locus 30170 .t000577) derived from phytozome v7.0 (chr-ID 30170; pos 3 258513 to 3259265)
gttctttggcttcaagtggatcacaggcagataaggtagattcactgctattcctgccgtgctcatttccattgaatccgtttttacatcctcattatgctcccattgttgatcggttaacactggtgcttatcaaccatgtccaggattgatcaaatgcactttgaatgagcttctgaattatgttaacattttgcaagtaatcacactatatttgtgtgctattatatgtttctttctctagttgtgataggaacaaaatataaatcctttgttttgggattaaccaatctagggaaacgctgtaaccaaacttctacttgattactagattctgaacccgcttcttattatatctatagggtgaaatagctgtcatcttcattaggatggcttatgataagtctagcaattgcagcacttctgcatatttctctgtaatcttaggaaattttttaccagattatcacgtaattgtgaagtacctagagttaacaataacaagtgagagatgaattaattatggtaaagaatgacaattacacctttttgtttccttgcctctgtggataagcaatgcaaatatattctctctccttccattagcagtatttttcttgaagttcttacgcatggcggacctgtctaattgttcttacaagcctgtttcgtttggcctttcattgattcattaaactttacttgtttttgtggcttcttaatttaaacaggataactacaagaagcccaatt

SEQ ID NO: 52533 - DNA, 886 bp, Ricinus communis
  Intron number 2 from transcript 30190.m010865 (locus 30190 .t000101) derived from phytozome v7.0 (chr-ID 30190; pos 3 772230 to 3773115)
gcaaagaacttcctacttctaaaggtttgatctttttgtttttcttttgattctttttactgatgcaaatgaaatatgaatctataatattgtacctaaatattattctggtatgtttgtagttatgacaatatttttagccgagttgtgtgtcagtggcagtgcttacttagtcaagtttctgctgtccaaacactaaacttcccaaccatcaaaacttatttcattctgttttctgataacattcattggaatttgtccatttttgtttcatcaattttcttttttcttttttttaattaccttgtctgacctgtcattttgatgtattaggctttcgttttaagtgtagcttacaggcattatgtgcgtggttttgtgtaatgactgatgtggcgcccctacaagttttttgtttgtaaaggatgagatagagaagtaattctcaatatgggaatagttttctagtacaaaacttatgaatttagaacaaattagtatggattgaccaagcaatataaagttaagattcttattacagtagttttggattatagctgtgttcctgcatggctcgtgtaatttataatgagataatattgtgtttcagcggcttgtttttgtgtgaataacttatataccagaaaaggatttaatattcaactgaatcatcctggtttggcatggacataaatctgtgtgaatatggctgtgcaattgtgcatgtactggaagttcggcaatttggattaagtttgtgtgtaaaaaggctagttaagcacatgttccttttcttggtgtgctggcatttttgtgctgttattatgaagagccactttcattgcacttctgctttatgttcagggattagcttgaaagaggagca

SEQ ID NO: 52534 - DNA, 371 bp, Ricinus communis
  Intron number 3 from transcript 30190.m010831 (locus 30190 .t000067) derived from phytozome v7.0 (chr-ID 30190; pos 3 626624 to 3626994 reverse strand)
gaggtaccttgtctcttgttctccttttcttgttttctttttcctttgatttcttgaaataaatatttgtgcgtagtcaactctcaattcagaaaagacaaatgcttaataagtggggtgggggtggactctgaagatcatgacttctactgctaaagtattgaactattaaatttgctggtgatattttggttttcaagggatttatgaccttagtttatccttgctgtttttgcttgaataacggggctggcatattcgtcatgtgtttgctcgttcatttcctggttctacatttgtgctgttttttcttcacattttttttttctgtttctcgtgttgttaatgctataatttgatgcaggcctgca

SEQ ID NO: 52535 - DNA, 1056 bp, Ricinus communis
  Intron number 2 from transcript 30158.m000504 (locus 30158 .t000007) derived from phytozome v7.0 (chr-ID 30158; pos 2 11287 to 212342 reverse strand)
gtccagcaacaacatcagaggctgtaactgcccaggtctgggttttagtggggcggggaagctattttcgatattggattggccgaagaatgacggcaacgaggtgattcaacgttggcagcggagggcggcttctttccttcttcctcgatgttaacgacggcttcaagcggagagagagaagacgacacggtgttggcaacgctgcaaggttcctttagccggagcttaacgtctagcggcggtagaaaacaaaagttcaaggaggatatgctcaaggacccaaatcaattttttttttagagaagaaaaatgcttttgagcctcctttaaaaagaaattgttacagtaacccctatacactatttattcatttatgttaatacatatgtacatatatatatatatacacactaaatacttagttatagtcaattaaattagtataaactttaagcttattaaaacgttctcaatgctaatagacattattccacataacttaaatcctttttttaaatttaaaaaaatatatacacatattaaaattaatttaaataaagcttgactcatttaatcaaggtcacaaaactataccttaatttcactgaaaatcaatatagtgaaattatttacgacactaccaaatttaaatattacttataataattgattatcgtctgaaagtattttattaaatgctaaactacgtatcagagtatttatttattaaaacactccccataaagtaaagaaattaaaatttagaaaaaattgcaagtattacaaagttcatctgattcaattgaaaagaaattggattttcttttgtctagtcaaaagaaattgcagggtgatcttagtggtcttcaactttacattctttgaaaatttttatttttttattgtttatcacctttaaaaaagaagcttagggttgatgaaaaaaatgatgatgtaagttttttattgttaggttttagttgattttatttctgtttgattgttgtttgtttttttgtaatttgcaggatcataaaaataacagtgttagtg

SEQ ID NO: 52536 - DNA, 542 bp, Ricinus communis
  Intron number 2 from transcript 30190.m011265 (locus 30190 .t000501) derived from phytozome v7.0 (chr-ID 30190; pos 2 910523 to 2911064 reverse strand)
aaaatgtaagtttcagtttttgcctcaaattttcagattataataacttttatacactttctgtttttccttcttgtttttgcgatggtcatttctttaataatcaaattcaatatatgcaaacaaaattgtggactatcctgatataaatcatatgaatacaggtcaaaatggctatacattagtaaagaagatgcctggcctagctcctaagcatttatttgttatatgcagtagtcaacagtttgacacttgaaatgggatgtcagctcaagcacctttttccaatccgtgatttgaattagaatactttctagtttctatgtacccataattgaaatttatatacgagatcttgaaaattgcattagaatattctatatgcatttccttgtatgattttttgatttatcttcatttttgtgtttggaggcagttctgtttcagactttttccattcctggcccttatattttgctcagtatttcacttctttccactgcacagattattgctatcagggacattatacgaccaccaaa

SEQ ID NO: 52537 - DNA, 500 bp, Ricinus communis
  Intron number 1 from transcript 30190.m011265 (locus 30190 .t000501) derived from phytozome v7.0 (chr-ID 30190; pos 2 911155 to 2911654 reverse strand)
gcattgtctggtaatattttcttttcttcttaatctttaaaagcttgtgtctttttcttttctgttcttttggtttagtttttatttttgggtattttgatgtttatgtgtttcatttttttaacaacctcttttctgatctttcgattattgtttttctctttaatggtgaagtggattttgatgttttttcagatatttcttgtttgatttgcttttctggtggtgaacccatgtgtagaggagctgccttcttaattattcacctgtttatcattttctgatccatattgattttagtgaaacatgatgtgatagggtagccatgtgcttatgtttaagaaaccatttataaatgctcttctcacactaagaaattccatgaagcaattcccttcagtttgtttgttagatgtcgaaatgcgaagtagaaagaatagtaatatgtaaatgcactctatgcagtgctgctgtgaattcagagacacgggaggaagttg

SEQ ID NO: 52538 - DNA, 965 bp, Ricinus communis
  Intron number 2 from transcript 30170.m013925 (locus 30170 .t000337) derived from phytozome v7.0 (chr-ID 30170; pos 1 790954 to 1791918 reverse strand)
gcagtaagctaatagtcaaaaaaggacaacacagagttagtacagtaaaaagggtgaaatgttagaaaacattgcaattatttgctagaaaggaaaaggaattagggattataagacgttccctcgtgtgtcctattaagccatcggggggaattagtagtagtgctagtgagggaatggaatattaactcattgagtctttcaagaagttatataaatttttttggcgccctagaccgtttagggtgactttttcgtgcttgttccttggaaataagagacaaatggcctcttcagggatctcaaagacagttaaacagcggaatgcaagacttggatttcctaagagcgctttcaagagcgttaactgccctttcttacgaggcattcaatgcccttgatctcgcccaagggccttttttcaaggagtgccgggtgagcttagttttcgtttactctcagccttgccaagccaagccgataggcggtcttctttccagtgaaggctcgcttcgttattagactgcgcggtaagtctatctatcccaaacccaattcaaatttcaaaagggacacttcaaccggcagaaaatggttataagtcctcaaggcggtcgcatcaacctaccaccagtgcaggccgaatcgggccaccacttgggatgggaatggctcagcctacatgcatcatttgatgaaagcactccagtccagccgcctcctagaagtggcttgtcaaccacgctttccctccctcaaaatattgcgactcttccatgctgtgtctcaggaaccttttcaatacggtcagcattgctagctcccgttcatagttttgctacagcttttctattggtccgtcagttagttaataaggatttgtgtgctacaaattacagtatgctaaaattacttgcgtgtttcttataggttgctggtcggcttgcagaggagagcgaaatctc

SEQ ID NO: 52539 - DNA, 1016 bp, Ricinus communis
  Intron number 1 from transcript 30170.m013803 (locus 30170 .t000215) derived from phytozome v7.0 (chr-ID 30170; pos 4 411744 to 4412759 reverse strand)
tggttctaacaaaaagcaacaacttgaagctttgggtactatttatttcatcattcttttcaatttttaaataatgtggtcatgaggttttatggtgtttgatcctgtttctttttatcttttgcattattattttgattctacacgtgctgagaatgaaagggaattttttttcaagttgttgtcgggagttttaaggcaactgggctttccaaaattttattttagttatcaatctctcttctattattatgcttataaaaaacactagacatatttagttttcagttttggttatttttgcttttgctaaatggttgggataatttcatagtcaggtaattggtataagaaaggaagaaaaagaaaagataaagagaaagcgatgtgagttatagtgtaacttgagatctgttccacatctgacttcagattcttctgtgccgaaattacctatctgccccttattattgttgttgttgtctatcaagttgtagctccatttctcgtcaacctcaaacatttatgtgctgtttattcttgcatttttctatatatgtgattattgataaaggtcaatgcttagaggaataaatttcaaagaatattttacactggttcaaattaaatattattttttgtaaaaaaattcaaattagaaatcgaatccgtcttttagactttgttgtttggacattttctcttataaaagtttataattatttctttttcaaatatgaaccaaaatttattcattatattgctttatatgttattgtctattatatagaaagtctatttattttgttgaatattttttcgtactatatgttaaaatgatattactagtagtactgatattttaataagtattattatgtgagcttgttcgtggatttttgacttttgattttttagccattattgtgttgttgatgactacctgtagtttaatttgctcaccaaggtttctggttgcaggatcagcaggttttggatttacgccacatattatc

SEQ ID NO: 52540 - DNA, 481 bp, Ricinus communis
  Intron number 1 from transcript 30170.m014163 (locus 30170 .t000575) derived from phytozome v7.0 (chr-ID 30170; pos 3 227667 to 3228147)
gcgattctccgtgaactcagctccttgcttttcaagttcgtttctttacctttgctttcttcttctatttccttatttctcttcttttaggttgttcggttaagacccggatgacagattattggcttcaatatttcatgtaaacagagaattgagtttaagaagcagaactcagttgattcattcatcagttctgtcagaaagccgaaacttgaagcataattatgtgaaagatcaatgaaaagctacaattttgtgtcttttctcttttgatttttgctcgcggccgttatttgtatttccaatgccaaacaatgagtctttagatgttgcgcatctgacttagcttgagtgcagaagctcaatgaccttgatcttttgtttagctgtcgttttacttgatgtctgtgcactactgggatttcaataattcatacattatgttgtttctcctgcttaatatgcgtttcctacaggttca

SEQ ID NO: 52541 - DNA, 1041 bp, Ricinus communis
  Intron number 2 from transcript 30180.m001020 (locus 30180 .t000010) derived from phytozome v7.0 (chr-ID 30180; pos 2 98088 to 299128 reverse strand)
actttgcttttgctacggtgtttccttcttgtaaggtttgaatatctctctcagctcaatctctacgttgttatgcagcatatttagaaagaagcatgtccgcagcagaatgcaagactagctgatacatttcaagcattttcttcttgcaaagtgaaagcaagttcatacgggaaatttgaattcctttttctaatcaatcacaaaaagatttgggcttcttctctattgataatattagaagttgctctggctaaaaatgatatatttttgacgctgagtttacattgtcatcattcttcctgtgataaaatttatttatttatacttggtaattttttaatcgttgaatggccaagtaatttgggaaaatttaaggaagaactgtgcatttgtgcatatgtgttttcatatatggcttcatagtcatagttcataaatatatgtgtttgctcattgaattggttgtgctgtcttttttcctatgtgggtttcttttagtcaagtttcaaaaggatttactcaaaatactattttttcattgtttataaagccgaaccttcagttcatggtggaatgtgaggacctgttgctttatttgctctcacatttgtgttcttatgtatttgaatttttgatgacttgaactgcctctctctccccactcatttttataatgtacatctctaattttaaactcaagtatttccaacttgttcaactgttgcttagcacgttccacaatcactttaggttcagggtttcactatcaatgcatttcattttcgctccgtttggcatgtaactacagttattcaataaaattggacacaaggcagtactgaatctatgtttgttagtagaagtgtgggaggcgaccctttattttaataaaagatttgcagacattctggctgttgagggaaagctgtagcctttttctttttaattaattatttgtataattttctcatttcacggaattgatttctggaaacttagaattttacccttttaacattcctttccaggctttgaagg

SEQ ID NO: 52542 - DNA, 395 bp, Ricinus communis
  Intron number 1 from transcript 30169.m006360 (locus 30169 .t000137) derived from phytozome v7.0 (chr-ID 30169; pos 7 61363 to 761757)
ctaaaaaggtgttcttttttctccatgaaattttgattttgttggtcaatttttttgtgcgagttgtttgttgtgtaagaagatggcagtttaaatttttgcaatttcacaattgcaatagggttcaaagtaatttgacacaaagataactacttcatgttatgtcatttgttttctggtgttagtttttcttttgaatttattgttaagatttatttttacatttcctttaaagtttccacttcttttttatgtatctccttttgatatgaagaaagtcatactttcaagtgtattcattgaatcacaaagtaaactttaatgggccttgtatatttaaaaagtcttgttgttgactaggtgtttgaaactataaagactcaagaagcaacaag

SEQ ID NO: 52543 - DNA, 449 bp, Ricinus communis
  Intron number 2 from transcript 42999.m000018 (locus 42999 .t000001) derived from phytozome v7.0 (chr-ID 42999; pos 5 749 to 6197 reverse strand)
ttcacttttctcgacttaaatacgtaggtttttcttgctagtccaattttatgtatttgactacttttatcacttaatatctatccatttctagattttgatcattattttcccatgtcaaatacatcttttgatcatatgttgcttttgcaatattataaattacttctctctgcttcccaaaattattcatcttctttcatgaaaaagataaattacatttgaattccttggatgttatatatctgtgattccttgagtgattttgggctgctgacgcatgtaagttgtttttaagttggttagatgtgactttttgcaaaaaattgaaatttcatctatggtgtttgttacttgaccatttctttcttgctcagttaatatttccactcttacagttcttctggtttgtagactactgatagtgaagatactgccagagacatctt

SEQ ID NO: 52544 - DNA, 828 bp, Ricinus communis
  Intron number 1 from transcript 30170.m014023 (locus 30170 .t000435) derived from phytozome v7.0 (chr-ID 30170; pos 2 372782 to 2373609 reverse strand)
cctctccgtcgcgccacctcaccagatctccaaaggttaattcaattaatttaatttctaacatttatccatatccccacactcagaatcgaggttttgtgcaaaaccctaacttcttctagaatttgagctagaggttgtgtcagtgaatgttgactttgattgcagtttatttatttttttcttgttttatttttcgtgcagatagggttttaggttttctactgaaatgcgagagcatacatggttcctcttttggtttttaatttatagattaaggaatatctcaatgtatcaccaaataaattgtgccgtggtctttgcttgctctgcgactatgctattcacagggcgagtgattcaaaaataagtttattttcttgtggtattttagctggtgaattgaagtctttttcaagttcttgcttgggagtattttgttatttatcgctactaagtaagtattttcctaggactgttttgtcttagtcctaaggagcatgctgaagggcggcaaagctacattcattagttatacaggattcttctcctattttttctcaattttaataatgtctcctaatcttttacttgtttattcttctacaagatattcatctagcaaatgattgagtgaaattagttgcttgtttgcacgttctgttataatattcttttaagttcagcgttggcatgggtcttccatagccttatcaatgtctttctaaaagatttatttttcgtatgcatggtaccatgccatatacgatgtctttagttagcctaatgtttgatacatgcctcactgatgcttttttcccagtgcag

SEQ ID NO: 52545 - DNA, 713 bp, Ricinus communis
  Intron number 3 from transcript 30147.m014111 (locus 30147 .t000382) derived from phytozome v7.0 (chr-ID 30147; pos 4 572692 to 4573404 reverse strand)
ttattcgagctcacctttgccaaagtcatagagtaagaagattttgttttactatttggtcatataacatactcgttttctgcttatttcatttttgcatttataaatacttatattgaaatgggaatcgcattgaatgatatttttggcatattttgaacagctttgggaagcttaaattttttccctttaatggtagactttttgaatatttttccttcctcactttgaccgaagatttacaaaaaatttcactctgttcctttatcgtaatcaggaacagtaataagcatttatgcactcccagatttagcaatagttatctttttgagtctgataagtgatcctttttttattctccaacttgtgggaattttggctattgagctaaaccatcttaattgtatatatcctaatgtcactcttcttatcttggtagagtttagtagtaagtttattttggtaatctctctcgtccttgaagggcggcacacaattaattctgacattgatgtttgctgcaaatagtatctagtttttgttgtgaactgaaattctataaatagtctggaagttcaactttataagtttcaccaaagtacaaaagcttcatatgttgatgaggtattatttattgaaactatttaaattctgctaaaattttctgctgtactgcaggataccaatctggtcatacgcaaagctcattgtga

SEQ ID NO: 52546 - DNA, 944 bp, Ricinus communis
  Intron number 1 from transcript 30204.m001814 (locus 30204 .t000083) derived from phytozome v7.0 (chr-ID 30204; pos 5 43372 to 544315)
cataataaggtaaggactttttcttttcttttcttttctttgtgggtttcttttgttattcatgatgacctgatttggtatcgttttgtttgtttcaatttggattgtgatattgttgttattgagattttggtgtgtgtttcttcagatagatgtttgtaaaaagttagtattctttcccctccccttttccttggagtgaagtaaagtgagggtcttaacgtgcgtattttatttagcctggagtatagaaattctatggaggtcgagaaaggttgtttctttttccccttcttaagaaaataaatcacgacattaggtttcgtcttgattttaatctctgagaaaatactgtgatgtaaaacgagagatagttttttaactagttatttgagtgcgagtataataagagaccaaccttaggtttttgtcttgctttttgttcgctgcagctcaattactggtgtgtaaagtgtgctgtatagataacaaaaggttacgaggaaaaggattttgataaccatttttgttctctgtggtgttatgtgatgatgattgaggttgtaggctctctatacagcttgaattataaggaattcttggatattgaggatgaggacagatgttttaagcatttgtcagcacttgaattaggttattattatttgaatatttatctttgccctcaagtattgaaattttccgcaacctatgtggtgtaggcatacagatccttgtggagtatgttattaggctagagattgtcttaatgcttccaccagtagtatcttttcttccacttagggaattgatatcatttgtcaccttagtataattgttcatgtgaattgattttcgtatgttaagtttctgaagggaaaagaatgtggataacttatttgtggttacttttcaggtcctttctgttgttgggcttcttcagg

SEQ ID NO: 52547 - DNA, 894 bp, Ricinus communis
  Intron number 1 from transcript 30174.m009012 (locus 30174 .t000409) derived from phytozome v7.0 (chr-ID 30174; pos 1 538131 to 1539024 reverse strand)
tgggactgggaggaagcaacaattagcttcccttggtaagatttttttttgggcaactgttttttgatgctgtatttcgacacaacatgatgaattggtgattttttttttttttttctgattctaattgagttagttataacttggtggaaatgctatggctgccattctctaaaagattttctaaacaaaattttaaatagagttttcaaagcatctgactgcatcttctctattgtgtagtgatctgcttagaatcttaaccacatgttttgataattgttaatcctttcaatacctgtcatatgaatctatcgaggtgaaaagtgtcattgcattgcaattagaacatgccaggatattaaaaaaaaaaaaaaattcgctacttttgagaactcagaagcgaaggtcctcaaaatagattctagaatctgctacatagattgaagggatatttcaaaatagaataaactagttttattgtaactgcgaaatggatatttaggaatgaaaccttctgcctattgcaaagaatatttagttataaactgatatgttcaagtccgttgaactatggattggtgagaccgtgatgagaagccatgctaacaggcatttatgtttatacatacataccttgtatatattatcataagtgaacttttatctgtgctatgcttaattgttaaattcttcaggttagtgaaagtattaccattacatacatctatttcataggatatctactgaaggtgtttacttcttgataattttcaactcattgcttaagagcagaacaatgccttgtgaaatgagcatgtactgatagattcttggacatgtgcttgtgcttggttgttgattgatgcaaactgtaaatgttttgctaggtga

SEQ ID NO: 52548 - DNA, 586 bp, Ricinus communis
  Intron number 1 from transcript 30190.m011004 (locus 30190 .t000240) derived from phytozome v7.0 (chr-ID 30190; pos 1 232693 to 1233278)
ctcgtcttggcaataggttaattccattctttcaacttcatgcatttaattagtgattctactgatggcgtttggtgcggtggctattatgattgtttaatttctttctccatgaagaagataaatataatgcgttttgaagtcaagtgtttgaataggtgacttgtagttaggatctctacatttcaggaaggtgcacctaatcatctgtaagatatgcataattagtctgctaaccaagatgtgattgattgtgataatgatatctataatctttatcatgataatcgttactcagaccaaattccttataaattagatatgtacttacgagcaaataagaaggtggcatgaggatagagctatgagaatgaagttcaagaatcacattccatatttgtttctaaaaattagcttaattctttatggtgcattttatatctgcttaatcaccaaatcaaagaactctcgcagtttttccaactcttgcaattctcggtttacttgtttttctttgttttaattaatatggttatggttttcgcttataggtggtccaagattgcggctagattgccaggaagga

SEQ ID NO: 52549 - DNA, 412 bp, Ricinus communis
  Intron number 1 from transcript 30170.m013774 (locus 30170 .t000186) derived from phytozome v7.0 (chr-ID 30170; pos 9 80333 to 980744 reverse strand)
ctggtaagttctattctatcttttacaaagtcaaaatcttgaattagacaaacaaaatttaatattgcgatttgcttgtgaaaatgagaacctattattcaacctcatcagccatccttatacagttgtactagacttcttagttgcgtaattgatgatttaatactgaaaatttgttggaggactaaatggtgatccattcgactgaaaataagacctttcggagacagttgcctcattgatgatgtaatttgctatgtcttgtttgactactaatttagcgattggcagtctatctcacagagcattcaattctagatgaatcctttaaaatttcctgctatggtcaattcaattagtgggagtgatctcttcataatttgacaatatttcttgatttcgtgcacaggtt

SEQ ID NO: 52550 - DNA, 749 bp, Ricinus communis
  Intron number 1 from transcript 59505.m000056 (locus 59505 .t000004) derived from phytozome v7.0 (chr-ID 59505; pos 1 2578 to 13326 reverse strand)
gagaggatttggtatttagcattcatagtgaggaggtatcttttctatttctgtacttgtgtcttatgagttctgaatttccaaacttgttagcagctcagtactatatgccaagactattaatgcagaattacctatattgatgaatattttatttactattcttttcctggttttattacactaaaaaaggccgttgctctaatataacaaatattacgcagtttactatttatgggtagcgataagaacatctatactcccaatgataaacattcgctgacactatcaattaactccttggagtattaaagtctgtctgtaggttgcttaagtacaatgaagtccagtgtgtagctaaaatggaggagtgcacatatttcaaatttaaaagcaaaatataataggtttattcccaaattgatctttaagagccttattgtgtgaatcatttgagtgatatctcctaggacttggatatgtctattaattttgctgttgtaaagacttacttcttaactgaattttataatgacctttcagccttaaattgagtccatttaaattaatatgtagttattgagattttgaattatgcataccaacttagttcactgcatactctcagtgatccacattgtgcatgtagattccgtacgtcagattacatttatgctctcgcattttacattttccaccctgtaatgtgcacagggcactgattcaggtgttgacacatattttggtct

SEQ ID NO: 52551 - DNA, 712 bp, Ricinus communis
  Intron number 1 from transcript 30178.m000852 (locus 30178 .t000014) derived from phytozome v7.0 (chr-ID 30178; pos 1 13223 to 113934 reverse strand)
gttgctgctcttgctcaaccttctacttttacttggtgggtttgtaaaatatttaatctttattgattttgattcaaagtggtttgtttttaagttggaatttttggttttgggattgttttgtttcagctgtttctctgggttgtgttttggtccgaggtttggttgtaatattatttaattatcaccataatatttttaaataccacttattaaactattgattttaaactatatttggtaaacttcgagactgttcttaaactatactttattgttttattgtctcttttgaatcatatgctcctgtctgttgatccgtttattattttcttctcttatttgtacctgtttttgtgattcttcgagttttctgaaaagaattacatttccgtttgctcttttacatgcttctttgtaaagcttgtatgatgcttctactttttaatacataaactacctattacatttaataggcaaaggttgttcctttctggtaactttttgagtcatttgtttttattttgtctttttcggaaaaggggattgaagagggtacttatgaaatggggttctatggttgttccttactgctgacaagtgtttgctttaagtctcaagagaatgcatgtctattgctttctgttcaagacagacatcatagcaaagggggaatttctgattttgatacttgtgcagggtatctaaggat

SEQ ID NO: 52552 - DNA, 686 bp, Ricinus communis
  Intron number 4 from transcript 30170.m013622 (locus 30170 .t000034) derived from phytozome v7.0 (chr-ID 30170; pos 8 6972 to 87657 reverse strand)
ccattgagccaaagctcattggttggtttcttttctttgatttcggttgattttgttgagctagacgaaagacaatgaaacattggtcagatcctccagattaaactagtagctgctttagctatgattgatgacgggagttagattggaaaatagttgtaatttctttgaaagtatatctataaaatttatactctgttcttttctgcattaccatataatagatcacttcttgaatgaactataaacagcaccggaggcaatcagtaatgaatcctatgaaattagaatacatcttgattttaccatatgaaagttttttttttaatcatgtctttggatgagagttgaaccatcttaaagtgtcctcatcttactactagcctaatgcattgataactatttttcatgtcttgtaatagcaagatgatgcttatcaaataaatcttatatcttaagctgctcgacttctctctttattatctttaacttgaaccttttttgtgttttgaactgaatcacaagaattactcttgtgtatgtgtgtgttctttttttcaattatacaaaataatagtttagaagttgatattttagctgaactgacaatggttacagggattggtttagagattataaacttctggatagaaaccggcaaacaagtttggtcttggaaacaaggc

SEQ ID NO: 52553 - DNA, 933 bp, Ricinus communis
  Intron number 4 from transcript 30170.m014345 (locus 30170 .t000757) derived from phytozome v7.0 (chr-ID 30170; pos 4 056695 to 4057627 reverse strand)
ctacaagtggaggtctgaatcaacaaaggactggggtaactttttggtctatttctacactagttttatctgtgtctttctccaagtaatgttgtatgagtgcaagtcccatgtcccatgaaatagagttttcaatctttgtgttaatcaatgtcataattgcatatacatttgaatgcttgcacgttcagacaagcaatcaatctttcattttattatatgaatgacaatgaacttgtactttttatctcaataagtcaattaccagcaagcatatattgttgaataggtttttttgatgtgattaactgactgcgtggtcttttaatcctttttacttgctgtatgcatgattcccactccaacccaatcctcatagtccctgtaatggcttgctttaggactaagctatcgttactatatattatttatggtaagatatattacttatgataagaagctgttactcatatgccaaattgacacctcaagcattgaacttgccttgaaagccttccaatttgacacctattgtctttgagatcaagtgatgtggcccgtctttgaagtcctttattgctgtatgcatctactcgttttttaatttagacattttaagcttctggtgattaaatttatctcattgccaactgacaatctaactttttttggctgcattgaaatgtgcctttgtaattttacatgtgtctgatttaatactgaaacagtttggtcactcagactttcaaagcagttatttcaattacagttgctctaatattggatccaatgatgctcttcctagagttctactgttctattatatggatgtttatactatgtcatgttgtggatatgatgtatcctatttgcatataatctattaatttataactgtttgatgaggtctaattgcactcatgcagataacgg

SEQ ID NO: 52554 - DNA, 305 bp, Ricinus communis
  Intron number 3 from transcript 30170.m014345 (locus 30170 .t000757) derived from phytozome v7.0 (chr-ID 30170; pos 4 057670 to 4057974 reverse strand)
ccagcaagagttttccaagtatgtgtcgtttctcttctgtataattagaaagggtggttaacttaactgtttatgttttaagttcctgataaagttacttttgaatcccgtttgaagcagttatgagaactagattttatttttgaggaaaattatgattcgaaaggttgataattacagttacaagccatttattttagccgattgcgtacttggttcttatatgggaattcgtgattcataaggttcttatatttgaatttgattcgcttttctcgagctgaatttgtttgataatgctgcag

SEQ ID NO: 52555 - DNA, 762 bp, Ricinus communis
  Intron number 1 from transcript 30201.m000402 (locus 30201 .t000006) derived from phytozome v7.0 (chr-ID 30201; pos 3 66220 to 366981 reverse strand)
tcctgaatcacttccgcttctcttggccggtgaatgtgagttctccttagtacctaaggcaactaacttgatgttttattatgtatttttctaattaaagaagcatctaaattttcatagtcaaggaacaatctgaaagtagggtttgctgactgggagatttgagctttcaacttgccatcatatacttgacaaggttgaaggcaaccatgcaaaaaaagtgcttgaaaaatgtggtggcggtggtgatggggaccaataacatattaacatgcatcaaaagtccatccataaccatttcattaattataatttttacatggaataaactgtgtttttgagaattacagttcaaattcatctgcatttggttcagttgcttggaagaagttagtacataagatatattaaacagattttatacatccactagatgtgaaaaagggaaaaatgaaatttaaataatgataacacctctgaagtcgatttatattttaactcataatatgtaatttaataaaaatcgatagaatgagattcaaaaagaaaagttttaattacaaattgggatcataagacacagcaaataaagtgagaatataatttgtagtggaaacttgggataaactaataatgcgtctttataactgtcggtgcatcttttgctgctaagactttggtgcgacttccagcttcatcactaaactattctttttttctgacgcagcatacgtcattgagtcctgaccgtagattaatagg

SEQ ID NO: 52556 - DNA, 500 bp, Ricinus communis
  Intron number 2 from transcript 30174.m008647 (locus 30174 .t000044) derived from phytozome v7.0 (chr-ID 30174; pos 1 928885 to 1929384 reverse strand)
aaaatgttagtttctttgcttttgttatgttcgggatttcataaatgaactcaattatattgctatctgatagtgtcttcttctgtttcttccactgttggattctgaaatggcttatctggtagctttaaactttctgttttcctgttaaattcatatttcttgggattaaagaacatcttttgaacagatgcgagcaacttttctagattataaatgttgccactgcatgctgtaatctccaattggttcttgggttactttcttttgtttttgtttcatgattgcccaactgcaagcaacaaaatcagacatttatgggaaatgaatctggtcttactctttttttttttctttctcagaaatgtgctcttattgcttttctattttatcagtaatttttctaagtctttgttgtctgaactagtggaattgaagccttatttctcattttcgtttccacagattgttgctatcaaagacatcatacgacctcccca

SEQ ID NO: 52557 - DNA, 523 bp, Ricinus communis
  Intron number 1 from transcript 30167.m000880 (locus 30167 .t000029) derived from phytozome v7.0 (chr-ID 30167; pos 5 47199 to 547721 reverse strand)
aaggtattaatttgttggtgttggtggggtgatgagatgtatgttagttaattacttgtattattttaagaaataaatcatgggtactgcacgtttctgtttttgtacatatatatatatatatatattgtcggtgcatatgcttgcttcctcctttctataattgcaatgatttgggtcacattgttgatcaatttgcttgtggaaatgttggttataacacagtgcttcatcagcttgttttatttatggaagagctcgtgccctttatatttctagtgcagaataaaagactcaaattcaagtgctcatttcttaaaataaaaactcttatctcttgaattaggttttaaaaatgcttcatcagcctttttgtgaaaccattattattttactacttttgtgaaatttcacatagtgcttaattagctaacgattagatacagtgagtgctgaccatctactttgtttttctatttgtgttgcagataccatttgaaggactgaagatagaagaggtaaa

SEQ ID NO: 52558 - DNA, 1030 bp, Ricinus communis
  Intron number 3 from transcript 30170.m014125 (locus 30170 .t000537) derived from phytozome v7.0 (chr-ID 30170; pos 2 994929 to 2995958)
ctatcaaggttattcgtgagcgcaaggtttgtcacttggcctttctgattctgtataagaaataagaagttgattctgtatttctactgttctttcagtactgtcattttagttgcattttggaacggaaacttgaactccaataattttgcttaattgtttagattagatgttaactcttaaagatatattaacttggaaaagaaaaattttcaaaaaaagaaaagataatttgaataaacaggcatgtatgaataggattttgaagagcgatttttttgattcattgaagggctaataggtcatggattatataacataagtaatgtgggtagttattatcttagactctctataaatacaaaggaaaaaacttgaacccatgacctttcactttcaaaagcgaacgctcttgtcatttgagctaaatctcaagtgtcaatttatagttatttttaaaattatgtccatataaattaatcatttatgtcatgtatacaataaacattagttaattaattaaagttataacacatacgtgcaaaaacattttatttcgaattatcacttatttctgtataagtttgacatcttaattatatatatatatatacacacttttcaatttccaacattttcttattcttgcatgttttggtagtaatacttgggtgataggagagtaagacgcttatagtatctatatatgccatgcatgcattaaaccattaaatgcaacacaccgaaagtaagttaattagcgattgaaagttaaatccaattgtacatctgaaaaaaatatagatgtgtggagtatgaatctagacatactatacgttcttctctcttgcttcagggcttaattagagtttaacttactgatcataatatatacagagtctccataaatattctcaaccatcgacacatttgccatggttggggcatatctttgttgctaacaaattttccttcccctaaatcatggtttacagaataaggtggtttccaatcagatagaaaagttcaa

SEQ ID NO: 52559 - DNA, 762 bp, Ricinus communis
  Intron number 1 from transcript 30170.m013847 (locus 30170 .t000259) derived from phytozome v7.0 (chr-ID 30170; pos 1 307145 to 1307906)
tcaactataccagtcctcagggttagtattggttttgattcaatttctttttattagaatttgaactgtttctttaaataggattttagagatttctggaacatgcattgtggaattagtgacatgtgaaagagtctgtgtccatattttaatcagaacagtccaatagaccttataagaaacgaggtttcagattgagaattgtaattgcgtaaatgcctcaaatataaaatttaggaagtaagatcaagaaaaatcaatgaagtggcggcaaacgcatttaaattgttgaccattgtttagcaattaaatgtggaaatttcttgatatacatgtggaaactgaagaactgcggagctagaaatgagagtgctggcaaacacgtaactgtgttgtgaaggagatgggagatgcaatattgaccaatatagtagtagttcagttaggtttagggttctttcatgatctaagtgcaacatattaaaactgcatgttttaccctacgagtatgaaaatgaagaggcagaagtttagttctctgcaccaactcttattgcatgtgccaacaaggagttatctattattagtggagtaatgaatgctattgtacttttgaatctctttttttattggatttctaatgctgctttatctgcaattgttaagtcaattttatatattgccataaatcatcttttattcagagttatacaatccttatctgcagctgcaagggcattggatatacttaacttcactcct

SEQ ID NO: 52560 - DNA, 687 bp, Ricinus communis
  Intron number 1 from transcript 33703.m000014 (locus 33703 .t000001) derived from phytozome v7.0 (chr-ID 33703; pos 4 72 to 1158)
attcgcgaggtattttttttcttttttctttcttccttttctgggttattatgttcttgaatgttaacttgagaagaaaaaaaaaaaagatttcttggcttcaagacttaatatttttcttttaagatgaaactttgtagatttattttgctgaaattttcttgttgaggggaaaagtttaagtttttattgcttgctttgacctgtttatacagtgagtaaaactcatgatctgaacataactggacatgaattttaatggaaatttgataataacctaaaactttaaataaataaaaaagaaaacaaaaagaaaaatatcacagtaaaaattctaattttgatgaaaaattaaagagaggtcctgtaaattaagatttagtttttggttttatgtatatttacaccagcaattacaaatttttctttttctttttctttttcaaaaaaaaatcttatataataactggttaatgattaatttttgtgaaagtgagatatttgaaagaagtgtttgaaactcaaaacccatatgaaattggcatctattgactttaaaataacagttgtttgtctgtacgtataagatttgtggttgtttaacgattcagaaactcttatcaactgctaatctgttttaaactaattttataaaattgtcaggaacttgaagcactggcagatccc

SEQ ID NO: 52561 - DNA, 635 bp, Ricinus communis
  Intron number 1 from transcript 30169.m006233 (locus 30169 .t000010) derived from phytozome v7.0 (chr-ID 30169; pos 2 206083 to 2206717)
tctctatcaaattcttcacaaatcgcaattcccaggtacctttctttctctatctttaaaattacgatagcgcactttctcatcttctatcgtattagaggggtttagggttcttaatgtaactacatggaatcgcagaatgttacattatagctttgtaatataatttggaatttcagtaattattatgcttcaatcttgtgtgttgaattttgtgctttctttcattatgcacaattgattactttacctaattatatatttcctcgctttttgcactcgtgatataacaagaaaaaaaaaaagttacttggttgattcaaaatttgttttgtctgaagtgaagtttattaagttgttttcttttggtcaagtgaaagtagctgacattgggacacttctagtggaatctcaaatgtctctatccaatcttgatactaatgtttatattgtgtggttttccatttcaaatcacttcattgtgaaagaatttcacgttttaaaaagtatatgaaacatgatggatctattactttatttttttgactaagagatacttatttttaattttatcacttattcctgtctatatggtttcagggctgcagagttataaatcatttactcattggtgt

SEQ ID NO: 52562 - DNA, 596 bp, Ricinus communis
  Intron number 1 from transcript 30190.m011089 (locus 30190 .t000325) derived from phytozome v7.0 (chr-ID 30190; pos 1 751680 to 1752275)
aagggggactacccccttggtttcaaggtctatttcttgactcttgcatattctagacagcatagaattcttccgaatttgcactagtaaccaaagagctctaaattgacactcctaacatagaatgaattccgataggttgaaagtgagataaataaatctcttgatacccaacttgatagctcaaatttgtaagttagaaggcccgagatgaattgcaaaattttttgaaatttgtacgtttgtgatcatgaaattgatagaggtggtgtagcataatcaattcatttaattatttaactgtttatttatttagttattattcctcttcttgttatcatgcaaatcgtagacctcatatctaaaattcaattcaatggacaatgttggtgaatttagcgagaaattagcatgttatgtgaaagaaaatgagttcttatacatcccaaaagtgcaaaacttgcgaactagaagatatttcgattatgtaaaattttcaatcttcttgctatgcatctcatagagcatattatcatcaaattggccttaatcaactcgcagttaggaggcaaacgagttgggattgttgggtttgg

SEQ ID NO: 52563 - DNA, 853 bp, Ricinus communis
  Intron number 1 from transcript 30153.m000741 (locus 30153 .t000007) derived from phytozome v7.0 (chr-ID 30153; pos 2 03665 to 204517 reverse strand)
aaagttgctctcattagaattggcaccagaggaaggtatccacatccacccacttggtttcctgtcaatgtagctctaattttgacgcagtgaatcaatagtttatatatgtgtttatgtcttccttgttagtttgtgtgcttagaagaggattttttttctgttattatctatctattaggttgtacggtgtctcaatgggtattcgcaattaatcgtttgatctctggaattcatttttctttttccttttgcaatcttgcttagatgtaaaatttctgaacaaataagtagctctcactttgctttatcaattcacttttccggtactaatttctttttttttttttttttttctggtcagtagttactgttactaatttcgttcacatacttgcatatcatataacttatctcttttgactttggtttgtctatagtgtgaataaaagaacctttattagttctgtttttatttaagtaattttgttcaaatttacaggacattgggaagttttattttccagtatgatatataaataaagtatcattttcatagtagtttctagtttaaacaaaatgcgaattcatacttgtaattgagtagagtaacatgggtaagaatcttcaacaccgtctaagaagcatgatggattttttttggggaacatttttagtaactgaatgtggatcttttaaaatgcttctttatggaaaagtacgaagtacaaaaaagaaaagaactttagaatcatatcattttctttccccactctgattgttgtgtcagatcttttggatcttgatgttgcccctctatttgtggacagcccgctagcacttgctcaggctc

SEQ ID NO: 52564 - DNA, 824 bp, Ricinus communis
  Intron number 1 from transcript 30154.m001150 (locus 30154 .t000034) derived from phytozome v7.0 (chr-ID 30154; pos 8 52521 to 853344 reverse strand)
ctttgattttgatctctggttccactgtacaccaggtatattcaggaatctgcaatttttattttgtttttgttttttatgctggtagatttttatttttatttttgttaattttaatgtattaatataaatatcctcatatttggatcgccgtaatttactgttcgttgaatctgaaatcttgatgaaaaatgtgatcttttttttttatttgctgaaaataattgttgtttgtttattttcaattgatctctctgtttttggtgattaatatattatgctgttgatcttttggattttagatacttgtggtgtttgtagatataatgtgacagaatttggagtgcaagagtgccattgagttaattttttttttttgagtttggttttcgatttggtggagctgaatgtgatatgggatagtgatgttttctctcttgtggtactgggaatctgaaagtagttggcaatacgaaacttgcactttgagaatgtttgttttgaatgactattgtttcttggactactacggaactgaacttgtcgatgatcacagttcaatcagaaaatgccatcactgattcgttgattgattattattttatttgaaattgaagatattgcgtcttatatatgaaatggagttcttttttatcttgaacatggtttaaaagtttaaatattcatgttccgaggaatgagaatggtgcgagaaaagagctgattgagcataaaacatgatacaccttcattttggttttttggcatgaattttggtggtttctggtttatttatttatgatttttgtaggtctcttcttcct

SEQ ID NO: 52565 - DNA, 781 bp, Ricinus communis
  Intron number 3 from transcript 30147.m013985 (locus 30147 .t000256) derived from phytozome v7.0 (chr-ID 30147; pos 3 807659 to 3808439 reverse strand)
aagttgtaagttcttctactgttgttttactttatacatcataaatccatttgatgattccctttttgacttctttttgcaatgtctattgcttctcatatccttgggatatatggctatgactgacctattaagatgatgctagcctttttatttattgtgacaagcataaaattaatcttaggaaaaatataatattgcagactcttaaggcacctgaggtgaatgctttactacacttggtagcaattatggtgttgccattttgaacttattctgctctcagttcattgagttatccatccgcaatttagttttataagtgaaataaaattgttctgccctgatgtgcgcatcatgattaaagctaaaaagtctatagaaataggtttaagactgatgccaagagccttggaaggatatcatgattaaggctaatggagcaagtgtagaaatagtaaatattggaagttgttttttggatgcaaagaatttgaactcttataggtcacaccaccttgagagcttaactacagtaacctcaatggccctgggtgctgaccctgcactctggctttggcaaactttgtcccgcaccttatatggtttatctttgtgttcctttattgacacagttgcccaagtattacctgctttgcagaatctggtcctttgagaatgacatgctttctctagattttgccatttcagtattatatgctgaagttattgatagtgatctactacgcaattcttacctgctatattcatgctgtccagg

SEQ ID NO: 52566 - DNA, 615 bp, Ricinus communis
  Intron number 1 from transcript 30147.m013985 (locus 30147 .t000256) derived from phytozome v7.0 (chr-ID 30147; pos 3 808674 to 3809288 reverse strand)
ttgtcgggattttcttggagaactgaaaggctcatgtaagacatcaaagttttgttctttattattctcttggtaattaaacatggccatcaatgcttttctctttattctttttctttctttctttcttttattcgttgatcattgcattagagatgttagatccatcgaatcattatttctgtgttggcatggctcaattttttgataatttgaagagagaaagcttactagtgatcatcaaattggttgtgtttatgaaacatattgaattctatatgttttgcttgcaagatggtccatgcttaatattaattttgaattcaatggttgattgaatggttacactgtggattagagacctgcattgtgcattccctcctatgaatgagtacattcccttctatcttttggcagttttacaaaatgcaaggtatggtgaacttttgaagaaaaatactccatttatatagtgttgctgatttgtgaaaccaaagtttaataacttctgggagcaataaatgttgttcacttacaacattatatacgtctgattcatcagttcttgttcttttaacagatttgcttttcagctgtgtctgacacttcaatttg

SEQ ID NO: 52567 - DNA, 468 bp, Ricinus communis
  Intron number 3 from transcript 30174.m008668 (locus 30174 .t000065) derived from phytozome v7.0 (chr-ID 30174; pos 2 072901 to 2073368)
agttcttagacaaggctaacgcgaggtcgcttttctcatatttgcttcatatattgcttattcttacaaatggcaagaatttgttatatatattactctttcaagtagaagatataatccctgcaaactggattcttgttttgcacttatggttgttgcaatgcttgtgaacctttcataacttattaacatatgtttataattgtccttcttatgcacacatgaaaagctttgacttagagttgtaatttttgttaattttttcacaagttatgcgcatatgactgattgattataattgggtatattgacatgactgttctaaacacatgatcattcttgcaaacctggatggatgaatgtgaacatcaattacatggaaagttatgagttgcagtttctacagttcctgaatgttttcattttaatctcttgcaaccagagggcagggtgactaccaaattgact

SEQ ID NO: 52568 - DNA, 654 bp, Ricinus communis
  Intron number 1 from transcript 30170.m013713 (locus 30170 .t000125) derived from phytozome v7.0 (chr-ID 30170; pos 4 329628 to 4330281)
tcattttagagaagtttcttcattggactggagaggttcactttttattctcttatcgcttttcaacttttaaccttgactgtttcctttttcctgtcaagaatatgatttgtgggctcttgttggttcaatttatggcctcggtttgatgcaatccaggaatcaaaatcttcctttctttctcttcacttttttttaaaattttttttttgataggactccttatattgccatgcagcagattttgtattggttttgtaagttgggtatagaaatggcatttcaagttctgttacttgtcctatttcttatattacatgataagttggcatgttaagatttgacaatccaagtctttttttaaattatatttcaatatattctatgacgttgtgtatgatctacgtagaatttggcggaagtcatcaatttatttttgctatcatcatatattggttagatacatctgataaatacaagaggagtctgcttcatttttttcccatttgtgccttagcttcatcttttaccttaatgtcaaggcccatacaagcacttctgtttttctttttcctcttttgctataattgatctccattccttctgcttcatttttttctcagtggtttcaagaaagacacaagagagctctct

SEQ ID NO: 52569 - DNA, 903 bp, Ricinus communis
  Intron number 1 from transcript 31177.m000030 (locus 31177 .t000002) derived from phytozome v7.0 (chr-ID 31177; pos 7 433 to 8335 reverse strand)
ataagcactttggtggcaactccagcgtccaggtataatgccagctgtatagtttatgactactgctattttccccccagcccctaaaaaaaggagagggttgagaagagagatgataatactgcggtaacaggtcgaccttaccccatcgtaatgcagccaatgcctatccctcccaggggattttattaagaatcatcacctctgacttgacatttttaaagcttgtccagttgatcaaattcattctgtttggcatgatgtttatagaaaaataagtttccttcagtcttgctttgaatagagttttcatatttgtttctggaaaaattatgattttaccaagctgtactgtttttcattaagttctttgttttacgtttatatagtttataaactagttaagtttatagttataaatacaagtgagattctggaaaacgtaatgagattatgatgtgaacttgatcattgtcatttgaattttttgtgacccaatttacactaacttaccgtggtacaattgctgtattgtcatatcctgtgcagttcacattgtcctgctgcctgctgacttgccaaatgcagcttaatgttccaaactacaatgctttttcaatttgaaatagggatcacccttctttttcttatatcataattcaaaattacaaagaaagaattttcattctcaaatttggtatgcaaataaattaaaattgtgagatatctaattaatgattatgttccctaattgcctaactatgacctggtcttcagttacaccattctttttcctgaagccaggtatgtcagatgctcttttttgtaaatttaccaagccgtatggcaactgaatttaagctcatggatttgatggaagcttaccagagatcgagaaagtat

SEQ ID NO: 52570 - DNA, 289 bp, Ricinus communis
  Intron number 1 from transcript 30153.m000744 (locus 30153 .t000010) derived from phytozome v7.0 (chr-ID 30153; pos 5 76699 to 576987)
ctgaaggtattttcttttctatgtgaatttttgtttaattgcatatgcatcaatttattttcttgttttaatccaagtcttctcttagatttttgaaatggtttttgagatttggctgtgttgacttctttggagttcaagggcttttatttggttgccgacttgatggaacttaaatgatagatgtttgaattactttatgttgccgataaatgattctgcttctttataattgttctgtttgtgcaagtcaggtgacgccttgaacgcattgaagaccagtttggct

SEQ ID NO: 52571 - DNA, 638 bp, Ricinus communis
  Intron number 1 from transcript 30204.m001744 (locus 30204 .t000013) derived from phytozome v7.0 (chr-ID 30204; pos 6 4094 to 64731)
aaactgctcacattaatctcaaagtcaagggacaggtatatgcgtgtgttctatgagttttgttttttctttttctttttttttttttggttttaatagaaaaaacattgtgacttcagtggtttcatgttgaaattggaactgggctgtgcttatttttgggtttgcatgttgaaattggagttgggtcccaacttattttgggagctgagggatttattaaatgctacatgcttgtgttctctcacttataatgcgtggaagttaatctctgacattgaagtaagattatattggaagacatggtttcatagttttttattttgatagttttgctgtctttggagtgttgggattgattcattgctttctaaaagtaattcagcacgatcttcttttttaatgaattaggctttcccttagatttgtagaattcttggagttgaaaatgagtactgcaatatttgagattagaataagattataattggttttaattgagttgttcttctttttctcaattagatatggcagtgatgggattagctgttgtgattattcgaacattgtctttatttcttggtttacttgttcaattcttttgccatgtaagttccaacactctttgattttatagg

SEQ ID NO: 52572 - DNA, 817 bp, Ricinus communis
  Intron number 2 from transcript 30147.m014191 (locus 30147 .t000462) derived from phytozome v7.0 (chr-ID 30147; pos 8 66511 to 867327 reverse strand)
tggtgaaggtagttaacttacataactcgcttgtcaattctcatgcgtgatttatagttgaaccaactcaagtattatttatgctcggaacatgttgattttccttgtttgctactatatgtataactcatgtaaagaactgtgcatatgtttgcataagatcaaaggagtctgttgtgggaattcaaaacaattgcaagtgaaaatgttattatttagtgttattactttatacattttatgataatctgaactgcagtacagagaccattactttttgtttgcttttatgtatgaatggcggaaaagaagtattgtgtataaatgctatattttctttgtagattttgatttcagttgcctctaagtctatgctcaagccttgttacatcttccatttgtttatcatctttattatactctgcaatgcatctatattctttttacttggcgactttaggtatcaaaatttttgctccttgatgtctggttacaatagtaaatattaaattcaattctcagatttttcttgtgacctcctggttttagaattgctgctttattcttatggcacccctaatttagtacacttttttggcttttcattacctctactaatatatcagctttctccgttgttggatcccaacagtctctacaacttatagattaagctgtgggttgttgttttgttcttacatggtttagctgtctgtattttattattattaattttaaaggtggccatgttgtggaagttgtgatataatgccaaacttatcctctaatcttctattctattgacaggaacaaatac

SEQ ID NO: 52573 - DNA, 630 bp, Ricinus communis
  Intron number 3 from transcript 30190.m010886 (locus 30190 .t000122) derived from phytozome v7.0 (chr-ID 30190; pos 4 40525 to 441154 reverse strand)
aagttcaatttgaagataggctcttcactttacaggttggtgggcagtatgtaatggttttaatatcaagtagttcagttatgtactattaataaagcattacttgcacgactgcatatggtttgtttcttttaatttgatctttttagctgcagatgttttgattttcttgcctgatcctttttattttaaagatcatattatatttttgctactcaactgatataatgagtcatcaacatctttcctataatcttttagggacacccttttttttaatttgttgcttgtcattccatgggattcagtgctatggcaatgtcctgggaaacattttggtgttctccagtcttcttttgatttttttacttgatgagccgaaacgaggattaatttggttatacttaagctgcttgctgtgtcggtgcatcagatttgcttaactggaatctatttggtgcatgtcatttatttacctcattgctgtactttgaatttctttgtgcttgtcatgtgctactgaattcttagtaaattttccagtgttttggttgtggtgctataccaagcatttagtgttctgttgttttggtagatctgggatacagctggccaggaaagattccagag

SEQ ID NO: 52574 - DNA, 721 bp, Ricinus communis
  Intron number 2 from transcript 30147.m014090 (locus 30147 .t000361) derived from phytozome v7.0 (chr-ID 30147; pos 4 442300 to 4443020 reverse strand)
atcgctgaatcgtcaacttcttctgcttccaagaggttatttgttttcttgttctacatgtagtcgcttcaaataaaagattcaaattcaatttatgtgtgtttatatttgagaagcaagttaatcttgcggtaaaaggaattatatgcttatattgttggatataaatctcgggaaattgaattgagaagcaagtcattgatctcatggtttagttgcatcgtttaaatcattttagcaaacagttatctttattttaatttgacgcgatgaaattttactccattatatgtgttttgcgaatgcagggtctctagggagaattttgtggcattttttgcgaattatagattataaataattaatttagagactctcttttttctatctatcaaaatcccatttggatcttgtttaaattctgataaacaattcattgctgtctatatgcattttccaatcatcctgtcagttaattcttctggatgccttgattgccatggccaacaattgggagagtcctatgcatagttctgttctaagttcatctttgcatttatattaaatgcatctaactttaacatttctttagtattagttttaaatttcctttatttttggtacaatctatctaccaaagctgaattctgaatttcttttcttttttcttttcaataaaaaaaacttcagggcaaggtctgtgcctagtgtaagtagaagc

SEQ ID NO: 52575 - DNA, 752 bp, Ricinus communis
  Intron number 4 from transcript 30148.m001418 (locus 30148 .t000017) derived from phytozome v7.0 (chr-ID 30148; pos 1 09006 to 109757)
gacaaagtcttgaagcataagtgcagctagtagtagtgagtacttcgaaagttcttttacatttgttgttgttgttcttcatctcaataaaaaatttaaataaatcaaaagcctctttctggaaagacaaatgtttagccacatttcttatttttctctgatattctagtaatgtgtgggtccctctttctggataacgtatgtacgtttactaattctagtttgacttgtatagaaactaaaataaatttgaagacttgtgttctgtaaatgattcaatgaacaagcatgtttagttgctttaagttccatatgctgtatgttcggggtcttccttttctggtgtttaaacaatgtttttttttttctttcttcattttgtgtagtctatctttgatccatatagctgatgccaggtaataaaaatgccaattctttcttctccttaccatgtttggaaattggacttcatggagtgtatggattgatgtcctgcttcatcggcatcatctatcataaccattattgaaaaagttttagtaaagtatgtttggaaagttcacaaaattaataatccgatgtatgctaaatgagaaaaccatgaaaccactgtgccattgattctcaataaaatataaacgtccaattaggctgagaatgagtttcctgcatcttattctctttatactgaggtaacttttattcactgatatgcagtgttctcaagctggccaagcatagaattcttaatc

SEQ ID NO: 52576 - DNA, 359 bp, Ricinus communis
  Intron number 1 from transcript 30174.m009089 (locus 30174 .t000486) derived from phytozome v7.0 (chr-ID 30174; pos 2 980873 to 2981231)
tctctatctttcactcatttcctctccttacccaggttctctctttcccttcattcctcttctcttttactatttgcttcattccttttcgctgctgaatttatgcttgctgaattttatattttcgcttttctataactgctgtttgattggtatgtttatatatatgccagcatgattaatgtgctcgattacagggttcttgaaatctttgtactttgtttaatggagaatactaaaaattatcatgatagttttagttccctaatcaattcattagttaaagttttgatttttaactttttgaatcttttttattatcagggggcattctacttgcccaaattaccagacagtga

SEQ ID NO: 52577 - DNA, 483 bp, Ricinus communis
  Intron number 1 from transcript 30174.m008802 (locus 30174 .t000199) derived from phytozome v7.0 (chr-ID 30174; pos 3 47433 to 347915)
tcgcaccgtatcactgctgccgcaatatcattgctgtaatcttttcgttcctttttttatttttcctttatttagcttttttttcttattggtcgaccaagagagagagagagaaatgtgtgtttccagtttataaaccgaacttagaacaaatatatatgtttctttcatacttcgcttttggagattcattttatggtcgggtaatatgcacgcccagatcgcgtactgcacgccaactgtttatgaaaatttctagctgagttttttgattgcattatcatctactctgccaagaactactttcagtttttgttttctggaattatcacactataagaactattttctgagtgtgcgagtgaaaattaaaaggcttttgctgtaatagaaatctttctcaaaacattcagctatatttaatctctttatcatctgtttaaattaggtatattcaggtaagagttcttccccaaaaaagaa

SEQ ID NO: 52578 - DNA, 525 bp, Ricinus communis
  Intron number 5 from transcript 30204.m001772 (locus 30204 .t000041) derived from phytozome v7.0 (chr-ID 30204; pos 2 72995 to 273519 reverse strand)
ttcctgttctcttgtcaagcaagaactttttgcaggtgtgtgaataatacttcatttaaactcaaaattgtggtaatgagatgatacacatccaaatctgcagtttctagatatctataaagcatcaaatgctgtgcatgtcacaaaagactagtggatagatgtgtgtgttcagaatgttgacaaattataaatttttttacaaagatgggaaatctctgatctattaaatcaaaattttcttctaatatagagtgtcatgaagctattcaatatattgacttcattttgtttggactgaggcatatttaagataagttgctatgtatctggaccgaagcacatagtgataccttttggttttgcacaataaattattgactgatcttgtaatacgccttgatttgtttgtttgtttattcattggaaatatgtctagttcaagtccttgttgatgttattgtctcttaaatcaaacagtgggtggtcagtataactagcatgttgttttactgatgcatttag

SEQ ID NO: 52579 - DNA, 1017 bp, Ricinus communis
  Intron number 1 from transcript 30169.m006530 (locus 30169 .t000307) derived from phytozome v7.0 (chr-ID 30169; pos 1 729613 to 1730629)
ggtggacaatctctgtgcagttcaacttattcgtaagaaatctcttcctaatgctaatgactctgtgatttaggaaattcggcttcttttggaacagagttggcaagttgtagttcaaactcattttaaagaatttaattttgcggcggtttggcttgccacttttgttgcttcttttaatttggaatataagcgctcactttatctcctttttgagtcttaagcttttgctaaatcataatctgtgtgatttggcgtgtcaacgatttgttctgttgtagttgggagttattttcttatttttgtttaaaaaaataaataaattaaaagaaaagaaatgatatcttctcgtcttactaaaactatttaaaaatattaagatttataactattttacttgtcgaaagactataagttagcatctaatattaaacccgttgaatctgtaactattaataaatttttaatatatttttttcaagctggctatgcttattaattttattaataatataaactgacttgattctttagtttaataatagatatgtatagtaattaaaataaaataattatatctaagagtgcataaatgagatgctaaaaatcttttatagtttaattaaaattttgagtttaaatcttggatatgcggttgctttaaaactattaagtaaatttgtcatttgtaagaaccatatctgccacactaaattaactctaaatatatatatactaaagaaaataaaaaataaatattatttatccataaaataaggttatctatttatttattttaacttctattattatataataagtcattataattatttttagtaaaaattataaacaactgtatattactcccctattatattaaggtaataatatgttcccgcacacagacaaataaatcaactgtagaatataaataatggagcagaaatgtgagaagtaattaaatataagtatggttaatctaatgattcttctatgatcatctcaagaaagagg

SEQ ID NO: 52580 - DNA, 579 bp, Ricinus communis
  Intron number 3 from transcript 30147.m014421 (locus 30147 .t000692) derived from phytozome v7.0 (chr-ID 30147; pos 1 846028 to 1846606 reverse strand)
ccctctgggtcttccttctatttttctctctcgcacttataataccataagaagaaagaagtttctgtgatataattaatcatgatgatttaaaagttcatgtaactatgtgacaatttatttactggaggttgcattttgaactaaactaattagtgtctaggagtgaatctacctgcatattcagaactgagaaatgttcattgaatgatttgaatttggctactaaacttagaatttatacatgtaaggaatgataatggaaggttgggctttggaaatttaaacttgtatttgtaatctaagtttctggtttggtttatatatggattcttgtagataataggaaatgcattaccaccatggcaataataggcccttaaaattgacctgcctgtgacagtataatacacaaaagggagtttaagctgctttaaagttgtgctagtttactatatttttactgaactttgggtttatctgcatgggaagtgataatgatgttatcctttttaacatgtttgtcaacactgttgccatccagctcaggagaattgcttgttgattcaaaaagtgaac

SEQ ID NO: 52581 - DNA, 849 bp, Ricinus communis
  Intron number 1 from transcript 30221.m002232 (locus 30221 .t000022) derived from phytozome v7.0 (chr-ID 30221; pos 7 64286 to 765134)
gctgttttctggaagatcggctttcagaattctaagtaagttttactctattacttttttgtttggcttctaacaaaatccaacaaaatataagagatatggagcaaatcgcaatagaatagaaatagaggtgaaagttttgtactgtaactgtattttctcggccaccgaacaagacctgatgcgatgtaatagtgataagaaactatctttttttcttttctggagattttaatatacgtataactttttcttttgtgttttctgagtgaccaaacagagaggatctaagatgtaatatttttgttttaagaattctctctgtaagaaaaatttgttataattattatccttgtcgttttccgtcttgtctaagttggcttggtattttgattgatgtgttcaagtctgattggttactgtcgtctaatagaaaggattcgtaatctaatttttaagactttgttcctctccgtttttggaatcatgtggtttggtttattctgttttgtcttcaagaatctcagtaaaagttgaatggtatttgtttgactaaaaaccctttctgcatttgaaccgatttgctcttcttcatacacacatgtgtctatttatactgtttcagactttttcctaatttgtttgattctgttccgtctcgttttcttgttcgtaaatgagagaatgcttacattttttttttctttatgttgattggctctaaagagaagttgtaaaagaacattggattcaaagaggacaaggatttttgtgtttgtatactgtagatttggttttctgaattattcatttgaactaatggatttgcaggttattaatctgggaaga

SEQ ID NO: 52582 - DNA, 472 bp, Ricinus communis
  Intron number 5 from transcript 30174.m009055 (locus 30174 .t000452) derived from phytozome v7.0 (chr-ID 30174; pos 2 784836 to 2785307 reverse strand)
ctgctcaagtcattgctctagtttagtacctccactagatacatattcatgcccttgttaacatttaggcatcaatcatccccatgcccactaccactctgctttgacttttcttttttcaaattttttatttgcttttgtatcgttatagttattcttgtcttttggatcttgcaataattgaattgttagagttattatggaagaaacagctttgcaagttgtcctttttcttccaaccccaaattggttttaatagaaagcataacagaaataaacgaatgatatccaaccatttcaaagtaaattatgtgactgccatatgccaaatatacttcactacatttatatgtatcacctcttcttatatgagaacgcatttggctgatggtgtatgctagtatagcagacatgtttctggaacttaatatctttacctgataaattggtgtttcgtgtgcttgaagcttgt

SEQ ID NO: 52583 - DNA, 858 bp, Ricinus communis
  Intron number 2 from transcript 30174.m008919 (locus 30174 .t000316) derived from phytozome v7.0 (chr-ID 30174; pos 1 012492 to 1013349)
aggtaccgaagcaccaagcgaattgccaaggtctgtttgttttgcaaatcttttcttttctcttggatgaatttgattgtatcttgactgatttgtttggattttaattttatcacgctgctttttctttttaataattttttttgggaattaccttaaatataacaatgctatatctaaaaatgagccgagtattgaatttctttccataactgccatttctgtatgttcagtatatgtttatactggatagatatacaggcatgaaaaatttgttgggtttaaagtgttagtgagttactgagtattgaatagtatgagagataagatggcaagttattggcttgcttagagtgctgcttaagaatttagtattgagagattagggttcctttttttctaaactgtctttgattttaacctgctatccagtgcctgtttaatcatcttttcaagttacaccattaccaacacatgtatgcaatatcttagtagtttggacttccttgttttgtgtgtgccagctgtagcacttttggcaaagatatcatatgagtgaagataaattattaagtgaagattgtaaggtagtgttctctgtagtgattaacctggcaaagtattcattattcaatacttactgaattatgttccataactccatcgtaatggctggctcatgattatggcagatgctttttatttaatagaactctctagtagttgaagctatgaaattgatttgtcctcttttctgaattatcacaatgtgttgttactgtttggattactgtatactgtatgatatttttctgcattgcaggcagttgatataaaacttctcgggtccttaaacag

SEQ ID NO: 52584 - DNA, 598 bp, Ricinus communis
  Intron number 1 from transcript 30200.m000341 (locus 30200 .t000003) derived from phytozome v7.0 (chr-ID 30200; pos 4 9009 to 49606 reverse strand)
taagaccggaaagactgaccgcctcactccgtcaggttacttttccaacttattaatttctattattaaaaacatttataggatttaatattttttttaatgaagtctactttcattttgttagtaaacaaatataggaaatatagatttctccaaatgatggctaaaagaattcaatgcacttttagtttcaaaaaaccttgcaagttgagctcataaagtgatctgtaggttttactaattaaaaatgccagcgctaacctcgttatgtccaaattctaatgatcagttcacaattttgtttttgtctttcttctaacaagaaaatatattataaagtaattaacttttgttttaaataaaatataatttactatcatcattagatgatatttagcttttcatgttgatttgctatattataaaattataaaaaagaaaaggtacaagtggaaaaaaattaaaatttttggagaaaaataaatttcaagactaataataatacaatcaaacttagcggttaaagtttaacaacaaaaatgcaatacaaatatttgatttgatttctccacttattctgcttgatcaacaggagtaa

SEQ ID NO: 52585 - DNA, 560 bp, Ricinus communis
  Intron number 2 from transcript 30190.m011029 (locus 30190 .t000265) derived from phytozome v7.0 (chr-ID 30190; pos 1 341220 to 1341779 reverse strand)
tgatcctcaagttgtcactcaggcatcatctctaagtacttttctttaatcttttcttggttttcgttttagttcttgagtccctttcttgtgcttaaagagttaaagatgcatatctttaagcatgtgcatatgaatgattgtagtttatgtaaaaaggattttatattctctactttcgtgtgttcttttctttttagttgtcaatttgtgttaaggacttttcaataagacggatttattgcattgaataatcctggtatggtttcctttgcttttgtcacatgcctaaagtttgtcaccctcgcctctattactccttaagaattctttgcattgtaaacttcattgatatttttggtgctttagggatttataattgcacgactccagaactatagttccaagtccagaatttttctagctgattcttgaatgtattttccttttgattttagtatttctaattttagtttatagcatagtaggtcgtataggagttagactatgatgtttattcttgacttctctcaggtaagctgccagttgactcttcatct

SEQ ID NO: 52586 - DNA, 1021 bp, Ricinus communis
  Intron number 1 from transcript 30190.m011132 (locus 30190 .t000368) derived from phytozome v7.0 (chr-ID 30190; pos 2 061251 to 2062271 reverse strand)
gcgtcactgaatctatcgccgttcaaaagctcgaggtttttatttattttcttattttctgatgatcggctttctcaatttttattcttttaagaaatttgattataattgtgttcttttctttttggtaatgttagtattggtttgcgttttaattggtattgaattagcaatatgttgtttaattagggtttttctttttctattgcattagtgttatgtaatttcagtaattaatgtaggtttcaattttatcttttttattggtgtgaattgattattaatcttgagctaatatttgattcttgttattatttgttaatttaagtgataattggaaaattctatttttgatggagttgatggagttattttttcatttttattttgcaatgcgtttacctttagatgattagtattattttcaagtgttacatagagaacattgctcaattaggagtctttatttgttgtctttggaaacttatggtttccttattatttgttattactgttacatgggatgctgtagctgcagtgatgtgtgtcgttcctgcaagtatgcacaattaaacttgtgttccactcattgtgcaagaaatgggttgtccgttctgcttattaggtttgttttttgctttttgtttctcaatgtcctcctaaaactggtggatgggggagtgctagtaaatagctattagtaattaaattgtggttacctgccctagtaataaagagaaagaatagttggttagataatatgatcatatttggaaggagggagtggatactttttatgcaattgtgtttttttttggttgactgaaaagcattacttttgaattactttctagcttttggagttgtgtatttgatttcagatttgaggatgatgttgtttaactggttagaattctagatcaactttcactaaacaatgaattgactagtaaattcgattgcttaattgggttagttcttctgcttctaatacatgttcttgattgtcatcaggagcatc

SEQ ID NO: 52587 - DNA, 868 bp, Ricinus communis
  Intron number 1 from transcript 30157.m000793 (locus 30157 .t000002) derived from phytozome v7.0 (chr-ID 30157; pos 2 2912 to 23779 reverse strand)
tcacctgtgtctactctggtactttaaaaagttttcatctgtttttctttttccttttttcttttttctttttttctgtttgaatttcagctcattataggacagttttgatttgggtttcattatttttgtctgatttatttggtttctctttgagtttctctgaatttctgcttctttgatggaagttattttagttggcaatctttttctgttttggttttatttgcaaataactgggaattgagtatctgaactcaactcagcttctatactctggtttgttagatcgagtatatgagtttaatttatagataatcgggatagttggtgaatttcttaattctatcttgatgtgacttagcacatgtccaaagaatctcacaaaggtgtgatgtaatctttgatggcctggaatattctggttcagttggaatattcatgcatatttgtgttggttagtctgttttctcatgttaatgctaaacaaatgcatccccaatggtggtcccacatgaatgcaagaggagagagcactgtgtcaatggattatttaattttacttattgtttttttcatattttttcttttaaggaggtatgattctactttctggctcctttatcttctatcatgttttgctaggatttggagtatgtgaatatgatttgtgctaaaaactggaaatgttattatgaaagaatgaacatttaatttattcctcttctctaatctcttcattgatgggtcatttgatatgttctttgttagttacatctttaattcactcatttgggagaagaagaacttcaattatttctaattacatgcaggaacaggaatagataagcctgattatctagccaca

SEQ ID NO: 52588 - DNA, 902 bp, Ricinus communis
  Intron number 2 from transcript 30170.m013981 (locus 30170 .t000393) derived from phytozome v7.0 (chr-ID 30170; pos 2 125900 to 2126801 reverse strand)
attggcaatctttcctggaaaattttgaaaaagtgagtgtgttgcctcatgctttttaattttattttctttgttttggcctgagcatgctggtattctttttcaagaatgtggcagatgtgattcttctttgtagcatatttgtgtagaaaggcaacttcacttctggtgattattattttattctgatttgtttatgcaaatactcataattatctgcataatatgctggactttacaggcatgaatgatctaaatttactagatcaatatcagcttcctcattctttctagaagctgtatgttaagaactatgacttctgttaaagactgaagtggtggtagctgtgctgtctgacttgagattccagctactattgacacaatattgcatgtgcagttattttgttgcatcctttgatctgtaattctaagttaacctacgaagacagactaattaatgccagaataacctgaaccattattatattccctacactggaaagtttctgttctcatcatgcactcagcggtttagtagtgtatattttaagattcagtagcttgttatttgctagtatgataattgcgggcatgtgcctgcgcatgcgatgatcctccttgaagtgacatttggtaacttttttttatcaaacaagttttatatcatttcctttattttgctaaagtgataggaactgaaaaatagaaggaaatattttgactggcattcggaataaggtttttgtgaagttcgaatgatgaattaagaggttctgcattcctaattctccataacgtacagacattagatgaactgtgttatccttatctgtgtatatggtatctgattccttcttgtccccttcaatatgtcagaagagagaaccacctaagttccc

SEQ ID NO: 52589 - DNA, 372 bp, Ricinus communis
  Intron number 1 from transcript 30204.m001735 (locus 30204 .t000004) derived from phytozome v7.0 (chr-ID 30204; pos 2 0643 to 21014)
attggtaatcaaaattattgtcgttttcttttttgttagggatcactgcgtttaattaattagtgttatgtttgtttctcagggctgttgatttaggaactagtaaataataatggatgaatcaagagtagagtaggtatcttaaaagaactaatagagggaaacatttggttttacttgtactaaacattaatttgtttcataagcagctttttaaggttaattgtctttgatcatattatgtttcaagttttaaattaaggtgataggataagacatatacttgagtttatgaaacttgtcttctcataatgtttgtgcattccgtttatcttgcaaacctttgtatttgcagggactttcagagaatag

SEQ ID NO: 52590 - DNA, 540 bp, Ricinus communis
  Intron number 1 from transcript 30170.m014053 (locus 30170 .t000465) derived from phytozome v7.0 (chr-ID 30170; pos 2 545593 to 2546132 reverse strand)
gatgtgtaccgcatttgttaagaaggcctaaatacttaaaaggggaggggtgttgggtattttagctgagggcgggaccatcctgttttttcacatgacctacttttaataagagttcaatacctctgcttttaactgcaaggtttcattataatgccaaactggcaatcatatttctacgcaaaaattacttattaatagaatattgacaccaataggagttagacaagtgtaaagctagtgagatattttgtatatacgaaacatagaaaacattgtaagaaaataactttttcaaggtaagaaaaagaaaacctttacatggtatgagagtaacattttccccttctcttctccttgttttgccctctatgccgcctgcgtttaggctgtggagaggtttgagtgtgaggctttttcgttgcctcctgccatttttgttgagttagagcagctttggtgttagagcaggtgttttccttgtgggtacgtgttttggtgttagagcagcttgaagaaaaggcttggattgaagcctaa

SEQ ID NO: 52591 - DNA, 619 bp, Ricinus communis
  Intron number 1 from transcript 30185.m000945 (locus 30185 .t000030) derived from phytozome v7.0 (chr-ID 30185; pos 5 79506 to 580124)
taggaccggaagaactgagcgcctcaccccaccaggttacttttcgaatttatattttcaatatatgaaacatttataggatttaaattttatttttattgagttttcttttatttccttagtaaacagaaataggaaatatagatttcactaatgatcactaaaagaattcaaatacaaaacataaaaatgacagcgaaagaaaacttgcaagttgacctcagaaagagatcagttcatattcttttgtttttcttctaacaagaaaatatattataaagtaattttctttagtttaaaatgaaaaaaaaatcaaagatttgtttggtcttcggaatcaagcggaaaataatggagtggggagcgtagccactcgaccatcaatagataatatttagcttttcatgctgactttgtgtattataaaattataaaatacgttcagctgccattatttactgtcttaatgtaaatagaaaatgtagcagtggaaaaaaaagaaaagaaacttcaagactaaagacaatacaataacctgaagtacaagtttcaacgacaggaatgcaatacagaaatttgatttgattttccccttatctgcttgatcaaacaggagtaa

SEQ ID NO: 52592 - DNA, 990 bp, Ricinus communis
  Intron number 2 from transcript 30152.m002439 (locus 30152 .t000060) derived from phytozome v7.0 (chr-ID 30152; pos 1 655935 to 1656924 reverse strand)
ttgccctgtgttattcaacttactagacctaagtggtaagtcagacaatgatggtgatagatgttgaaaagaaaggaaaataaaaagtgaacagttaataaacttaaatactcaccgtttttgttattcatttcgggaagttgattaaggaggtcaaacttcttattaagagcacaaacggataaccaccattgttggccaacttatttataggaagacttattcatttattctgcattttgtgcgatgtcagcaagcagtatgcgatgacaatatatgctttatgcatgtgattaataaggactattgttccttgcactttcccttcagtttagctgatatgttgcaattgcatagaactcctatagcacttttgagtttcagttatcctaaattagtcctatggttaacatactcatttcatctagtttgtagtttaatagatcctaagcagctaaaatgtgctttgaggacttcctatgccatacctgctaatgtcaccttgtcactttcaattccatttctaatccacagcacacatacttttatctgtttctacttgacctgtagctctcagatgacttcgtgctgctcgtttatagttctaggatcaagttaaaccttagattgggtttgtctatgaaacctcaatcatttaaaagagttgctgaaagaagaaaagaagctggaacttttacattttgtccttctaaagcggcatggcatgataagaggctggctttttcaacttcttttgcagaaaccttttttcatttcaaaagtgggttgtaaatctgcataccgattaccaaagcagcttgcaccaaattgctgacattattagtcattatcgtagttccttgatgctattcaaactgaattttgtccttattgtgcttttgctgagcataacatttaactagtggtcattgtttttgctatgcttgtattctaggaagtatcagagcctgcaaaagagctgccttgaag

SEQ ID NO: 52593 - DNA, 262 bp, Ricinus communis
  Intron number 3 from transcript 30190.m011267 (locus 30190 .t000503) derived from phytozome v7.0 (chr-ID 30190; pos 2 919855 to 2920116 reverse strand)
ggtggcccacctggcgatcgcccacggtatttcttttactttgatttgtttatagcatttctggtttgttaagttagtttttccatgttattaatatggtattttatgcagcttagttggttaatgctgtacaccctgtcttctttcctgcagtgtcattttagtttttaatttttaagtttattttagatggtttgtctaataagcattaattattaatctggttttcttttgatgtaatttagtggcccatctcgctttg

SEQ ID NO: 52594 - DNA, 716 bp, Ricinus communis
  Intron number 1 from transcript 30156.m001752 (locus 30156 .t000055) derived from phytozome v7.0 (chr-ID 30156; pos 1 389382 to 1390097)
tttctcaggttaattcattttcttaattgattttgcaaaatcaaaactctttcttgcacatccgaaattcggtattgtttttgagacgtctataacttcaagaattcaattcatttcaattctatcatgtcgtctctcatgtttagaaaccttataaaaaacaagaaatgattttgcaattgaattctatagttacaattcaattctttgacatttaaataatgataataattaaaaactgcaagaattcaattcaattgaactcttgcatatgatttattccaaacaagactgtcgataaatgaaaccatgccaaatatgacatggttttccaagaattcgattcattggatttcttggtattacttattccaaacatggccgaaattagttgaagtttttatgcaaatttaacctgaaaaagcacttcctcaaatcaagctataagtggacctgtctagctgagttggtttgttagttgttaaagatttcgaaatgtaatgggaagccatatcatatcatccaataatttctgctttgtgttgttttcttcatttattggaaagttgtatgttcgtgaatgtaaaatgtggaattttgatccgagtcttttactaaatattgagcctctaccttgaaacaagattagtaactgagttgatgtttggttgtgtattgcaggaatcgtgtgaagaagttcgagctataatacgcta

SEQ ID NO: 52595 - DNA, 1026 bp, Ricinus communis
  Intron number 1 from transcript 30190.m010864 (locus 30190 .t000100) derived from phytozome v7.0 (chr-ID 30190; pos 3 769133 to 3770158)
aaaaaaccagtcttcaggtccaagaagagtttaaggtctgttttcaattttgtttattctttcgttgagtttccgtttctgggttttcttaatatgttctgttttataattttaaaagcctaatgatggccaaagggtattgtttaagctaggaagattagtgaaactgtgtttctttaactcaaattatataaatcttatgcccaattgctgaattgaatcttgaaaaaggggaagtaattttttttcgacttggtggcgaggttaggtggacaaaatatatgaactttaggaagtagattgacagagtgagaagatacaaaaggtttttatggctttaataacctctcaatttaaaaaatggagctgttggagtatatggatttagtactgtttttgtaataagcatctggttgttttcatatatttagagttatgagagactactacagtttcattctttttgctactattgttttatatcactattttgtattttcatttgtcacttttgattatttcctatttctccataatccaaaatgtagtcttgggtggttgcaaataggtcagactagttgatggtttctcaaagattcaaaaacttggggatagtgccaatattcaaccagtgattacctttttcctataattagaatcaataggctccaattacagtaccttttacaaccagactatagttaatgcttctttacgcaaaagctttaggatttcttagtttctttagccatttcagtttgtttctcttctcctgttttgctttcttttgttttctggtacaagttgtgaaaaggtaaattctgcaacttgcagtttttaaatagaacgagaggaagttttacttaagctgccatttctgttggtgtcattattgattatatttcatcaccgcttctcgtttggatgatgagctaactgatctttttctctttccttacaaggtgcttagtataatttagttttcttgtctttattttgctgcaggcaaagagaagatcaaagtag

SEQ ID NO: 52596 - DNA, 950 bp, Ricinus communis
  Intron number 1 from transcript 30147.m014344 (locus 30147 .t000615) derived from phytozome v7.0 (chr-ID 30147; pos 1 454500 to 1455449)
acatgtaagttaattaccttcaaaactcaccttttttctttcttcttgtttttaagttctttcgtcactttcctttatgggatcttctgggtctcaaaattcgataatctccgtttctttctgctcaacatataaattggggttgtttcttgataacatgcagtatgcaccaatctttcttaatcactgactccatgataagctctgcacgttcttaatcactgatgtcttatctacgattaaatatgaggtttaacgaattccctagtcatcgtaagtttctattttatgtttattttgtaaggaagcaatttgttatgatctgacttctgtccccagaatttaattcagaaattgtagtaaaagaagaaaagaggcaattcggctaaatgatcttagtaattaactaaattagaaaagcataagctgaagcgtagcagcggtttaaaacagctagggccaactaaaagaagacaaccatgtgaaaaacccccgtcttttattggacagcaacgccaaagtttgtggtgtcattgtatgcgtgtatctagacagtgcctgtaaattctatcaatttagatcaaattgcaagaatgtgtcgttatcattatagagagagtcaatagggtgacagctcaatcaattttcttaaaaaaatttcaccaccttctctttttggtcattgaaaacatcctaccctacttggatggctctgcatattgattgccacagggtacacacagaggccaactttgcaatcctgtacaatcatggtagtgggttttcgtctgtcaatcttttcagtggcaactgattagacttcatatgctaacttgcttaaccataaattaacatcatctagggtctaatgattttgaatttagctggtaattgtgttttctggttttggttttttttttttttcttcttgttttccagatattacaaca

SEQ ID NO: 52597 - DNA, 631 bp, Ricinus communis
  Intron number 1 from transcript 30204.m001779 (locus 30204 .t000048) derived from phytozome v7.0 (chr-ID 30204; pos 3 21085 to 321715 reverse strand)
aagattaccagcagtggagaattattcagcgagtgagaatttgaaccttctctatttcattttcttgttcacatgctgattcaggaaaatgtttaaatgaatagaagatgatgtctttctttcttccttccttactttttgacaaaggattgttgaattccttctttacatgttttacaataaatgggagttaacggggttttattattcaaatattcaaatttatttgctgtttgtataatttgttggctttgtgctttatgttcacatggtggaacatgtttttatatccatagacaattgatttaactaattcattcttaactttgtatctaacccatttgatttgcttcttttcttaatgccggcgtttgcaatatctttatgagagaggatcagaatcttattatatccgggtaatgatcaaaatgaatagacaaaatttggtgacatgaagttgctgaatttagtgatgttgtagttgttagcttaaaaggtttaagttttaggttggactaacaatttggaactctagcccttctacattctggaattgttgattaatttgttttgcttctcttgttaacttcctgcaggttcgagatcttgatttctccataagaatagtagg

SEQ ID NO: 52598 - DNA, 980 bp, Ricinus communis
  Intron number 1 from transcript 30190.m011340 (locus 30190 .t000576) derived from phytozome v7.0 (chr-ID 30190; pos 2 133134 to 2134113)
ctgcctctggagagattatttattggtatgcatgtgtcttctgaatcttgattgaatcatttgtttcttggtggtggtttcttgattgttcaatattgatttattggttagtttatggtttatagtctttttttcttgtttgccatgataagagttttttttttttttttctttccatcaattaaactgcttatcatgataagagtttgagatttatattttattcaggtagctcaaatgtctagaaatgaaatttgcagacacaatgcttttttctcttgtgaaagagattaaaaaacaaaaagaaaagtgtctagtaatcgctgcttgtctcaaacatttatcatgaataagcaaaagcttagctttatctcgtgaacaaaacaaaagcctagactggttcaaccattaatttggtggagagagagagagaaagagtaagtatgatcaacataagagattaaatttgtaggtgaggatggtatttggatgtgacatcaaatcacaaagatagttagcgagtttaccgattgaatttagatgaactcaattgaatttaggtgtaacattgatttagtgctaccgcatggatggtgaatggctactggattaattaggtgcaacaaggctactggattaattaggtgcaataatgctcggatgactcgagcatgatattctactcagtcctcgcactaaggaagatttagattaaaaaaggttacggaaagttagcaattttctatctgccgacatttatcatgagggtgtttgatggaaggtcaagttagaggtttcttgcaatttcttctttccttttcctctgttattattattattggttcaaatagggttgctcatatcaaaacggtctatttggtgtgggtttgggttagattacagttttcttgttttcttagatgttacttgctgctgaagtataagtttcccaggaatcgttcagctgaacatctctacgg

SEQ ID NO: 52599 - DNA, 798 bp, Ricinus communis
  Intron number 2 from transcript 30147.m013996 (locus 30147 .t000267) derived from phytozome v7.0 (chr-ID 30147; pos 3 875510 to 3876307)
gcgtgagtatttcttttaagtgactgtgccttttctatttgagtttaataatagattctaaaacctgtgttgaattttttaaggtaaagttttgaatgaatctaattgtgtatgttttaggtgaggtttgcagtagtatttgttaacttgctttctttttagaatatgcatcttgttcttttagttcaaagtttgcttttcaccttatcctgctttatctctccctttatggtagtagatactccttttcaaaagggttaatgcccttctgtagaaataaactctactactctctttctgattattgaagattctgtttattttttaaaaggaaagaaaaaaaaaagataggaaaaaaagcaactgtttgtaattaattaatctatctaattttagatgaattttaatgtgttttcttttcttagtttctattttcaggcactgtgttgtaaatatatgatctggtcttctgtcggtgataatttccattttctatgcttctttaattttgatttatttatttctttattatcttatgtagataatattcctgttttttgacatttaatttcttttgtcctttcctgtgtcttaaatagaaccataatatcctttttctaattgttttattgcatgtgccataacatcagagaaactaatgaactgttttaatcctttcttgttttggtacgttatcaatgtgtagaagaaaacttttgtagagaattcgcatttgataatttaaaaattttgtgtaatgcagctgaggctatcttgcttggtttccagcactacctt

SEQ ID NO: 52600 - DNA, 682 bp, Ricinus communis
  Intron number 1 from transcript 30174.m009109 (locus 30174 .t000506) derived from phytozome v7.0 (chr-ID 30174; pos 3 097362 to 3098043 reverse strand)
caccagccgtatagtttttttcttcactggtattggtatgtttctctttctgaaataatttgtgtcagctcaatattgttgatctgatttacacttgttttttttttttttttatattttctttggaggtgttagaagccatttttgtttggttcatgattaattttgatatctctttttttcatgtttcgtatgagattttcttgcctaatttgaaaagtcgcttgatcaatcaagtacttagttatatccatctttgtgcatgcatacggtgtgggctgaatgcgtgttgttctcgactgatgtgatttgacacgtctataagcaagaaaacagtgacttacagaacagtataagtattggtggacttctgagttctgacaaatgcaatggtctccttttcattaggacccttttgagttgcttgatttgcttaaagaaatcctcgattgaaaaatcagtcattgggaatttcttctatttttgatacaaggtgattatatcgagtatttggttgatgagaaaatggatgaaagggaagaaaaatgcagttgtaaaatagaaaactaatggagagagagagagagagagagtgcacaataaaatgtaatccaggattgtcatctatatacatatcaattttgcaggatattttctggtacataaattactgtacgaggct

SEQ ID NO: 52601 - DNA, 1059 bp, Ricinus communis
  Intron number 1 from transcript 30170.m014355 (locus 30170 .t000767) derived from phytozome v7.0 (chr-ID 30170; pos 4 097871 to 4098929 reverse strand)
ctcttgttcaccttggaattaaccgtggggacgtggtaagtggtaactgattaactctcgcatagttttttcactatttttcttctagttttgaatttttctcttctactggaggaatcagtgccctgattgattcctttgtctttgttgatttttctgttgttttggttttgtgaaatctgcatatatttgatcaagaatagacttttttgacggcttgtgatggtcgcaactttttgtttagctgaatatcgtcgaaactgtacaagtaaagatgcttgggcaatttgctcgacgcaaaactgtttgttttatagctacttttcaatttacctcctcgaaatggaaagaaacaaaaagcctccaacattttggatcaaatgtgccgctttctgactttgtagaccatatgtaaattgtgtcactgcgctcgggcttggaactttactatcttgggctgctactattgaagttgcatactacttgaattcagggaatcattgggaccctttttaaacagaaacccttcattagcatgaataagtttgcctgcaaaggaaattctttttcaattttatccatgattatttgtttcttcaataacatcaagatccagcagaatataatgggactcaattctattcattttgtgattaaattgtggaaaacacatggaccttggtaaattaataagaaaagtttgattgcccagcagttgctaatcgagctgtagtcagcttgttgagcaactggcgtatcatgtgctatatgactagtagatgaaaaaaatttgttttgggtaaaactagcgcatatgcttgttagtcaatctcctgtattctgtcaatctgtgggcttgaaagtgctttatctctcgctggtaggtgagaattttctttcctagggtctgaacccttaactcttctacttcatttggtatttatcacattctgatggaactgatagtctatttttcatattcttaatcttcatcagcgagattaacctttgcaaaattaagcaggtagctgcattagccccaaatattccggcattgta

SEQ ID NO: 52602 - DNA, 475 bp, Ricinus communis
  Intron number 1 from transcript 30184.m001174 (locus 30184 .t000018) derived from phytozome v7.0 (chr-ID 30184; pos 8 24098 to 824572)
cgtcctactcaggtgctactttcttcttcttctttagatcattgtcgcgatgtcttgcaagttaactttatttgacattttcaatgattggtcaactgttttcccatggatccaggcatcagtgttttgtttgattttgctactgcttttttgtattattgttgttttaaattaaatatctctcattttttctaaaatttctcaagttccttaattgtgccatttgattgaggccttgtttggaacaaatcatgtgcaaccagagttcaattcagttcaattttggcaaaatcgtgtcattttcgacatgattccttttttctaaattgttttttttttttttttcaagttgaaagaattgaaatttattcttgcaatttaagactttccaaacaaggtgtttaaaagcatttcgattcaataacttggtcttttctttatattttatttatttattttatgtagataagaacac

SEQ ID NO: 52603 - DNA, 880 bp, Ricinus communis
  Intron number 1 from transcript 30205.m001589 (locus 30205 .t000019) derived from phytozome v7.0 (chr-ID 30205; pos 4 59565 to 460444)
cgcgtatatcgcaagatcagcttttcaagctccaagtatgatcgactacaccaccctcctctcatttataaatcagttttcttttagatgtttcttaattgtataaaatccatatttttaatctaatctgtttttccaattgggtatcatcttttttgttttttttttgtgaaacattatggaaaaaaagaaaagggtaataataatccatttcttatatgagaactgtgaaattgccaagttttaacaaatgggttctgtttattaataggtaaagaatttttggcagtcctgatgaatagtgtatatatatctaaagtttaggctttcttttttctctgtccctaatgttgtaagatcgtaattttttttagggggtaatagaatgtaaagaaacaaaattggggtggaataatgtactcggatctttgaataatggactcaaggcattaggtgaaataaagattaatgaattgcaagttttcaactaagacattctaaacttgaggatttaaattcagaattggtatttatgtttttaattagttaggctatctttatagcatatatatgtcaaccaattctgggaacttttttagacttgaggattctataatatctatacaagcatttcttggactgctatcatggagtaggacttctaagttttgacattctaaatggtggaagttaatgttattagtgcttacttcagcagttctctttgtatcaacttccaagactttctcctctgcaatagatatatatatggaattctttcaagatctttttttatatggaattcttttaagatcttttctttcttttcttttctttttatgtaggagctgcacaagagacgcttaaagataaaatcgaa

SEQ ID NO: 52604 - DNA, 864 bp, Ricinus communis
  Intron number 1 from transcript 30170.m014087 (locus 30170 .t000499) derived from phytozome v7.0 (chr-ID 30170; pos 2 752624 to 2753487 reverse strand)
aaagtttcctggatattcctcctctcgtagttcaggtatgtatatattctgataatcactagtcgattcttgctatctcagaaacaaattcattggattgattcacaaattgaagcttaactgtagatgagtttttaattaagttattctaatgatgatattaaataaactgagagagagctataggaaggggttatagctaactatgtagatttttcagtttgatttttctaatcaattacgatttttggagaagtaaaatcggccaaggcaacgaacaaaataaactctatttgtctgtggcctgggctggattaatctgatgccatagcgacgtcgttttctgctgttacaacttacatcgacgatgtttaactttcatggtgaggtaacgtcacccataaaagtcttgctcaccctacttttcatagttatattttctacttctctctttcattcactgagcatagtagggttggtccttttccttttccaattttccttcttatattagcaaatagccaatggttctctttacacatgacattattaaaacggataattatagaagttcaatgtatatcagtcctccagaatacactaattttgaaatttataattgtaaatggcatcaaatctattgattttggaattcttgatgaaaaaagaaagaaagaaagaaaaggacaagtagacgtatgtcaaaataagaaattattggaggacctacatattcataggaaataataataataataatgagacgccctacctaatatttctcttcttttatctttttatttttatttttatttcttattccgattttaccatttacaggtaacgaacctaaggtgcggagga

SEQ ID NO: 52605 - DNA, 1045 bp, Ricinus communis
  Intron number 2 from transcript 30169.m006278 (locus 30169 .t000055) derived from phytozome v7.0 (chr-ID 30169; pos 2 84355 to 285399)
catttctttctatttggtatacctatttgagccaggtaaattacattgatcgtgagttccttaggtttgctttatatattattaaattttaattaaaatatcatttttcattttaaattttaatcgaaatgtcactgaaatcctttccgtttgtatccgtttaatgcgatgatatggtatggctggtgggtaatttttatacacattaaatttgtttgccacgtcagcatttcttccttctgcaatttgaaacccctccctagggtagctttagaagatttgtagatccaacaatggcgcaaagatttgcatatccaccaatcctgtaaatgcaaagcatcccagaaatcgagcataaaagatgttgtccaacttcaaaatatcaaaaataggattctgattggcatactcaaacacagaacctatttgcatattcattgtgaaatctagtcagttggcctctttatcaatctaatgcagacagaacgagaaaaggggaaaaaggagaattgaaaacatactactacaatcgcagtgattgcagaggcaagtaaattaacaaaaattggaatctcgactgtctgcttggctcaattaccactgtcttcatctcgagcccatggagggggctgatcagagtcaggtttagcctaagttggtatactctcttcagatttgttggtctgcagaacctacagttgcagcaaacaccgtcaaccgtctgcagaatttgcgggtgcttccatcaactatatatatgggtttattcagtatcctccgactatcacctcagcatgacctaccacttttaatgagttgattatacaactttgaatttggatatcctggttaaatttcattgtttatccaaaatggtaagactaatgttattttatccagatgcttgaatccagtgatagatgctttaggcattgggctccgttttgaagggttgctcttttctcattcaactagatccctcactttttctacaagatttgagtcttaaatctccaactttaaaattttagttccaagtcactgg

SEQ ID NO: 52606 - DNA, 433 bp, Ricinus communis
  Intron number 1 from transcript 30169.m006590 (locus 30169 .t000367) derived from phytozome v7.0 (chr-ID 30169; pos 1 410849 to 1411281 reverse strand)
ttcttgcgattggaacaaacctgtggtgctaacaggtatgattgtgggacataaagggaatgataatgaagaagatggcaagaatggtggagttttgagaaaaagaatgagtggccattgttcaagatatgtgtcaaaaccaacaaacgtatcatacgcagtttaggcaattgagatttaaatttcggcttttgatagaaattaattagagtaagtggaatgcatctttccttagagaccaaactcatgcgaccctagttgttgatttttaggagaataagtagtatttgattttgttatgaatactagtggtaatatatgtagttggtttttcctttgatttcctggtagtgttgagtttgattacagcaatctgggcagcaagtttcttatgtttttgctttaaatttaatgggatgcaggagagataaat

SEQ ID NO: 52607 - DNA, 472 bp, Ricinus communis
  Intron number 1 from transcript 30167.m000853 (locus 30167 .t000002) derived from phytozome v7.0 (chr-ID 30167; pos 8 0730 to 81201)
ctcccaaataaacatttccagcttaaagaggcactgtaagtaaacgtgtgaagataccaatgcaactttatatttccaattatttctgcctaaacatacaataagcgtcaatgtgcacctgaggataacgttaagggctaaaatgcaccattttccaataattttataaataaagtatcaaaaatgaaaaaataaaaaaacaaaaaacaaaagcctaaaatgatagaacgaatgccaacgattttagattttgactgtttgtcctttctctaatcaaattagattaaaagaaatttgaaaagttaaaaaacttaaaaaaactttcatgaataccttttcctcatcccattgttaaatgaatcttattcaatgaactaggtagaaaagcattacaagtggcttaaaggataatagtgtttattttttatagatgaaagttttaaatttaagttcttactttttcattaggtga

SEQ ID NO: 52608 - DNA, 694 bp, Ricinus communis
  Intron number 1 from transcript 30217.m000262 (locus 30217 .t000013) derived from phytozome v7.0 (chr-ID 30217; pos 7 3054 to 73747)
ctgctactgttgaaactattgctaatctactgcaggtatgtagtatccacctctgaatttgattttgtttattcaaagttatattcttttttattaatgtgttccactcttatttgatttttggacttttgagttatttgatagattggattgtctgccgactaacattttttttttccgatacattaatgtgtgtttcttttgatcgacttttgtaatttgttgtgattctgaggtttttggcatctgggtatcttttattatgctgttctccatcacttgcacttgtaaagatatggaattggataattttgactgatttatgataatatagcatataacgatgattaattgtgtgattagtttgcttaactgcctgccttttttctttgtcaattttgtgactgacaagcagcaagaaattggaaattgtggctgatgtcaatttttaccttgtgcattagaaatggcatcaatatgcaaataattgcatttggttatgttacataatgcaatgtgctatgtacttggattccgtatctggattttgactggctttatttctgcttattataatgtcatgcaatgatcaaaatgactgattgaaagtgtcttttcttttctgtgcacttgttgttcgcttatactcatatttttgtgtactatcatggggaaatgtcttgcaggaggttgg

SEQ ID NO: 52609 - DNA, 443 bp, Ricinus communis
  Intron number 1 from transcript 30174.m008731 (locus 30174 .t000128) derived from phytozome v7.0 (chr-ID 30174; pos 2 554159 to 2554601)
ctaaaaagaagcctgttgttggtaattgtttatattgatatcattatagttttattgatttatacgagtgtgcttttgtttattaacttggtcttatttaactgtagacatagagaaaacaaactaaacattgtttttttaattgaatcttgttaactgtatccgtgaaatggaatttactgtgattttaactggggaacaatgcttacatgtaacagaactatattgctacatatcagtgaaagcttgtcaaagtgttatttatttttttctgaggttggagattggttactttgtgttaattgatggatatatgcagattgcattctggaggatattttgtcagtttgttctgttggattctcattctgtgtctctcttcaaaaatattgatgctacatataaccaggaataatatattgcagaaaaaagtggaggggctg

SEQ ID NO: 52610 - DNA, 794 bp, Ricinus communis
  Intron number 1 from transcript 30147.m014295 (locus 30147 .t000566) derived from phytozome v7.0 (chr-ID 30147; pos 2 87471 to 288264 reverse strand)
tggggtaagcttgatttatttatttattttttcatatattcctagtttacttttagagtatatacctcgtttttatttaggaagtctctgatatgagattgttatgcgagtcattataggaaaagaatggtgaaattttcttcgctagaaatgtacagtttaaagaatttcagtagagttatttaagggacggaggggttattttatccaatatttagattggatgtcatctttattatgacaaaaatctaaaacagcggctagagacgtggagtttaattttagattctggtcttaagtaggaaactaggagggaatttgatatattttcgttttatggtaagttaaagaaacttgacaaacttctgctgaagtgcatatcttttcctgacaaagggaattaaatgtatggattaattatagtatagttatccaattgaatagattgggtttcacccgaaaatctaaatgtcactttcatgtgcagtattgactaataagtatcttattattggataatggatcaagaaattggaaatttatatttgaatttacaatccccattttgtgctgtagccaaggtagaaatccaacgacttaattaattattaattctcgaggctgtaaaatttaatatttgagtgtcgtttcgatccctatctacaggagacgatcgacttttttagtcaataagccatgaatttagaaaaccttgttatgctaaaattatttaattagaatgtgtaataataaatgcaggtagcaagttggggtgcgtaccttctgtcacgcaa

SEQ ID NO: 52611 - DNA, 429 bp, Ricinus communis
  Intron number 1 from transcript 56871.m000011 (locus 56871 .t000001) derived from phytozome v7.0 (chr-ID 56871; pos 1 74 to 602)
aaacctcttgttgatttctttgtgttttgggatttaaaaaagttttattctttttgggtttagatttttgttttttcttattcttgttctgtaaagatctcagtttttatttcatgtacttgttagtgttaattttttttcatttttaacaaaggttagtcttcaacgttaatttttttatttcaatttattcggtaattttgattttgtgttgagaacagagcattttatcttcctcatatattattaaggaggttggattttgagtttttttttctttctcattgttgttttctttatcatcttctgcaacggactcttgcacttattcatgtttttcaaccattcactttgtctactgtgtttttttttcccttcaaaattacatatctttttgtcaaattcttgaacaggatcggtggatctggc

SEQ ID NO: 52612 - DNA, 921 bp, Ricinus communis
  Intron number 2 from transcript 30174.m008780 (locus 30174 .t000177) derived from phytozome v7.0 (chr-ID 30174; pos 2 51486 to 252406)
ttcatgttaagtttttcctggattctgagtataactggagatttctgcttagttgatttatgatgaaattttatttttcttatagttatttttgtaaaaggagggcttaatttcttcctccattaaaacatgtttgccatggttatcatttatcaaatttcacatactcattcctaataatatttgaaacccttgatgattctgttgaagaccttgcagcaattagctcaccatattagttttgtttgcttaatgcaactggcacccaactttttgactcctgttccaaattatggatgcttttacgaccagctctatagaccaatatggtttccttgttcttaggtgatgtaagctcttcaaaaattggaacagacaaaaagatgtgatattgtgccttttctttcttaagaaaaggaaattgtaattgaagaatctgctcttcttattcttcgtaacgttatttgtgcgttttctttgtcaagtaatcattcaaaagaaattcttgacagaacatacggaacattatggtttggaattatgctttcagctttcttctcattcatgtctttttttatatatattttgtttcacttctctttggctatttaacactgttattcacaatcactggccattaaactgaggtaagtttcacttcttgtttccaatgatccagatttatgtgtttatttactttattttgttgtcaaatttatcatttgcataatcagcattcctgttttaggtgtgaccgaaacgttttcttttatttggctgcaatcaaatttctttctttctgataaaattttatacaagtgcagatgttctgttaatagaaaacgctgctgtgattgattctctgttggtaatgagtacttgcttatatgtcaccagggagggcattaaccaattggaaat

SEQ ID NO: 52613 - DNA, 544 bp, Ricinus communis
  Intron number 1 from transcript 30147.m014465 (locus 30147 .t000736) derived from phytozome v7.0 (chr-ID 30147; pos 2 151833 to 2152376 reverse strand)
tcctgataactggcgcttcttcaggcataggagaggtaattattcaactcaattagttacacccattttcttttctactttatgaaaagagttatcgattttacaacaaccaatattatgtaatcacagtatctactcaattaagtgatcgattttattgaattagattgctcatgttacatgcagctagtggagtataaccgagtcaattcaagtcagtagacaaactcaagaaagtgtagatgtctctgataatttttttgagttttatatttacgttcaactttggattgatcagttccctgtatccgatttgatcatattataaatttaaataaaactacttttatgcattttgctctttagtaccgcttcaagtcaaaatttagctcaacatagtatttggacttgttccgtgagtcagttaactgaagcatagttgaatccaaatcaatatgatcatgaatctaattggtgaaagctagcttgattatacagctggaaatatttgagacttgttcatctctgttgcagcatttggctt

SEQ ID NO: 52614 - DNA, 530 bp, Ricinus communis
  Intron number 1 from transcript 30147.m014030 (locus 30147 .t000301) derived from phytozome v7.0 (chr-ID 30147; pos 4 099939 to 4100468 reverse strand)
acccttttgttgttcagcttcgttactcttttcaggtgaaatttgtttttcgtttccttttttatgtttactattgtgggtggtgatttttcttaaaaggaaaaaaaaactatgcattgctttttatttgtgataatagaatgttttctacctttcttagcttgctcatgacgattgcattaattttatggggccatgttattcaatacttctagcaatttttggtgcaatggttgctaccgtgttagcgttgtgggtgattatttttattttgatgcattttcatttatatagcattcttaccttgtgcaatgttcattaaattttgaatttttactgggccatgttattcgattataatgcaaagatcattacttttagcaatttatggtactagggtttctaggttttgctaacacagaatgtttatcactttctaactaactattgtccttcttttggttgtggataattctatgtgaatttgatgaaattactcttttcagaccaagtctaagctttatttgata

SEQ ID NO: 52615 - DNA, 533 bp, Ricinus communis
  Intron number 1 from transcript 43031.m000007 (locus 43031 .t000001) derived from phytozome v7.0 (chr-ID 43031; pos 3 44 to 876)
ttgctcatctttcactgcattcttatacgaaagtaattattcttgggattaattactatagatatatactgattaggttttaattatagctaattaatattaattatacactaattaatataattattctgttcattaaaatttaatacatatcaccgttgcagatggcgtggtagacatatttaaagtaattcctgttttcatcttttgaagtttgatatattaacaaaatgagttttttcatttaagaacttcaatttatatatatttacttttccttttaaaatttttttgaaatgcataatgcttgaaaaccctaatattgtatatacttgctaattgatcgctgataagtagagggaattaaactcaatattaattctttatctatttgtttactcacccaagctaagtaatagagtcccaactgcatgtcaggttagggattcttcttgatcactaataataatctcatctaccttttctgttattttccaggcccaataattttcaattactccaactacagtcca

SEQ ID NO: 52616 - DNA, 461 bp, Ricinus communis
  Intron number 1 from transcript 30169.m006518 (locus 30169 .t000295) derived from phytozome v7.0 (chr-ID 30169; pos 1 652836 to 1653296 reverse strand)
aattattcacaggagaagtttgtgaggttagttcctatttgaactgcattccccagtttgaatgtttgtttttttttgttgttgtccttttagcctttctatagctagttacttcttcctggcattttatgtttgagtttaaggcaccattagggcattttagaagtacttctcttgattgtgcaagcactcttaattatattgccatgtgtgataacaattacagtttttcttttagcaaattccaccatcagttgtcttatgttggttctgtgccactgtcaattttgtctatattggtggtgtagaagtgttattttgagatggtctataatctattttctgctttttccattgctggtagttgtctcacaataagttttataatctacagatggtatatagtgagttttcttgttgattatattttcaggtttcaggattggaggtcggagaaaagt

SEQ ID NO: 52617 - DNA, 847 bp, Ricinus communis
  Intron number 1 from transcript 30170.m013608 (locus 30170 .t000020) derived from phytozome v7.0 (chr-ID 30170; pos 6 93176 to 694022)
gaaggtgtgtgcttgtttttttttttttttttttgcttctagtgattcaaagtttgatactttgctttgcggaggtctaaattgtaatagttttaatctagtgttgtacatggaatggatttgtttcttcgttttgagggaaatctcattttttttcttgttcagttttgcattttattgatcataatcttgcatgctgttttaaatattgaataattgggcctactctctgtttatgtttaatttgacattaggacttggaacaaaatagattgctgcagccagttggtccacagtgagaatgtccatggctcattgaggagtatgatctattgaagtgctaccttttatacattgtggaatcaatttaaaattatgaaaggcgatttatgtaagcttaggattttgtaatcaggatttcagctcaatttctgaggcaatggtttatggttggaacttggaagagatagctagctggtataaagcgtaaatgtctatgtcatcgaggagtatgatatattgcagtgcaaacctgttacaaatagtagaatcagataaaaattatataatgcatttagataaaagtaggatttgtaatcgtgattttagtttgagttctatgggcagagctctttagttggaagatttgatccaatttgctgctgaaactggttagctaattttgattccttaagtggatattctagttttggcataatcaattgtttcctttcttttcattgcttcagtttgtgtttggcatattagttgggagatggtcaacaagatacagatgctttttgtcatattcacactctttcctgcctattgatgcagggaatttgtg

SEQ ID NO: 52618 - DNA, 628 bp, Ricinus communis
  Intron number 2 from transcript 30169.m006389 (locus 30169 .t000166) derived from phytozome v7.0 (chr-ID 30169; pos 9 11724 to 912351 reverse strand)
acaacaagcgtaaaagagtcttcttcgctaataaggtctgctctatcaaatcaataattctcatctcactagctaatatatgtttatctttagaatagataactgacatatatttttcaattttaaataaataaatatatgtcgatcattcagtactaaaatataaaatactaataatatttgtcactttttttattaaatatgctatctacaccacaggtaagaattattttacatatttataagttgtattatattggttagtaatgaatgtttctattttacaaaacaaatattttcagagctgatatttctaatttttcaattaattgagtaatatcttgaatactgttgattatactgtcatttggttgcaaattattttcctatttgcagaccattaaattcgaatagaactatatatgtatgtgtctgtgagactgacatttgtttggcattttctgttaacgcaatctaaatattgataaaaaaagaaaagaaagagaaagatgacaaaatctttgatttacaaaacctaggtagagaataagcttaaaagaaaatgtttagtattgaatgcaagtgttgtgtaatttggaacagtcatacttaccatcagagacgccga

SEQ ID NO: 52619 - DNA, 786 bp, Ricinus communis
  Intron number 1 from transcript 30169.m006616 (locus 30169 .t000393) derived from phytozome v7.0 (chr-ID 30169; pos 2 066104 to 2066889)
cctgaacacgacaagttcctagaagctctccagctgtaatataaatttccttcatttttattcaatttattataatttgtttaattttagggtttgctttactctatgtatcaatttaggttgcagtgttttgttttgctcgttgttgtttgaaatgtacctgatattctatagaaagttttgaattctttttgcagttttgtaatttgtgttttggatttcattatgcttgaagttgttgtagtaagttttatatatgaggttttgtgtcttgataactgctcaactaccatacctataaaaagctgctacaataataactttgtttctggcggttccttattatctggcaatttcatttctaaattttgccttaaaataagaaaattgctgacagaaatcattaataaatttatcataatgaaaattttatgttagcatatatcagtaagaaaattgtaaaaaacgaaacataaaattggacattagcttcaagtaaggtagagttgccggctttcttaccaccttgcgcactgctacaatttactgatttagtataacggcatttatgttccaccattttccagaagaagcatctcgttccgccaatattttgcatttgttagtattatgtttaatttttagagcaatgatcttttgatatttgatgattgattttatggttgttgaagttctttgttatcctttttcttcaaatgtacccttattgtgttcactttgaacctttcagctttgatcgtgattggaaaaagattgaagcgtttg

SEQ ID NO: 52620 - DNA, 732 bp, Ricinus communis
  Intron number 3 from transcript 30170.m014169 (locus 30170 .t000581) derived from phytozome v7.0 (chr-ID 30170; pos 3 325998 to 3326729 reverse strand)
gctccggtgctcgtaagatactctaatcaattgcattcttctccttttctggccgaaattaatttatgccttttgtcaacaatctgcttgtttgctggtgtgcctctgtagtctatatcattttatatgggatatgaaaaaccataaatttggtgggataatcaatgtttagttgtttagaggccatatgtttcattttgcctggccttgttttctttcaatcatgcggatagcaactggcttacacaagtatatgtcagtatgtgaaacaccttaatgaaggtgctaacacaactgtgtagagaatgtattaaacttcttccactagatgccattggcttctgctcttcttttttgatgtacttgattgaaatacttggattatatacttgctctttggtttaaatgattcatttagcgagcaatgttcaacacttctacgttactttttttatcaatgaaaagtgaaaactggaatcttgtattgttcagagctgattctgcaaatgcactatccattttgagcaaaagaggcggatagtggctgcatatgcaacgctaagatcttatatatagagctcaaatttcttagtaatgaaattcaaaaagacatgattctggaatcataactcaagttttctggtcctttgaatttgatatgaccatgttgaacgtctgacttctatattctgtttcttacacatagaattggtttacttcttatccagagag

SEQ ID NO: 52621 - DNA, 407 bp, Ricinus communis
  Intron number 1 from transcript 30170.m013806 (locus 30170 .t000218) derived from phytozome v7.0 (chr-ID 30170; pos 4 462886 to 4463292 reverse strand)
acgtctgtcttttctctgctatctctatttatcaggcaagcttttcttttcacattcccttcctattttctttccttttttttttttttttttatttcttttaattctcgaattccttaattcttacaatttccacgattataaagatttcaaaatttgatttttcttgttttttagatcgaattttctataattttgaattttgagaaaaagaaacgccaagaattctgctataaatttttattttctagaaaacgaattgaatcttagggtttacgtatctcatggaataatctaattgttggaacgcttccttttctaagaaaaaaaaaaaaagaaacaaaacaagaagaaggacatgaataaatgatgtataatataatattgcatgatgcttatacgacaga

SEQ ID NO: 52622 - DNA, 444 bp, Ricinus communis
  Intron number 1 from transcript 30167.m000878 (locus 30167 .t000027) derived from phytozome v7.0 (chr-ID 30167; pos 5 26654 to 527097)
caaattagtgaagatcgaggatctcctcatttcaggtaactcaaaaccctaaaccctaacattgctttctttatatatttttaggttgtgcgaatgaaactgagattaaatgctatttaggtcttccattagcattatgaaatttaagttatttatgagctagaaaaatgttttatacagattataaatattgttttccattggttgtttaatgctttttttttttttctactttttttcttcttacaaaaacaataaaggagttgagcaagtagtgcttaaggtgcaatggacctgcaaaagcaattccaataacctttctatgttatgcatatgtttgtgagatttgaattttccaatttacttgtgcttaattaataattcatgatgattttggtgtttcttttaggcaaactccattgcagataatacatataataggga

SEQ ID NO: 52623 - DNA, 873 bp, Ricinus communis
  Intron number 3 from transcript 30167.m000878 (locus 30167 .t000027) derived from phytozome v7.0 (chr-ID 30167; pos 5 27387 to 528259)
tggggaaagggcctcaagtcttgtggaccggttaggtaggtttgtactgccttaagcaaaattgcattaaggccccgtttggattgtggttagtgaactaaatatgagcgtaaggaaattgaaccatcaatccattaatttgattctcaatccaaaaggtggaatctttaaaatccatggtttccaaaatacctcaatccagatgaggcctaaaagtcatgaatttcttcaatgcttgttcaattgtaacttctatctttctttcttgagttatgggaggtgcagggtgtacagcaatttgataaatcagaaatgcctaggtgaaacttgtttttatttgtaacagggtatggaagtcttttaagatgcaagtttaaatatcaaattactcataatgcttcatggtttagtcagagtattggtttttttacctagttgctgctcatcttttgaagacatcttattctttgtgaaatctactgggttattgccatgtcaatttgtaagagaatggatcataggtgtgggtcttctaagagacctgacctgggtaactgaccttttcctttaacacaatatttggctggaagggggtgcttaccaatgcagttttgggctattgctggctgaactgagaaatttatgagcttatgttgttcatcacatcctttccaagctggatggtctgttagctacttctatcagtgcttgaccatatgtctattccaagattacattgttgtctttaacttgctatattacgcctttatattgtttcctttctacatttagtcagtaattatacatgcatttaccgatgttttgttctgactattagagccatattagcggagtattctggtgctgttcttg

SEQ ID NO: 52624 - DNA, 945 bp, Ricinus communis
  Intron number 1 from transcript 30169.m006256 (locus 30169 .t000033) derived from phytozome v7.0 (chr-ID 30169; pos 2 340380 to 2341324 reverse strand)
aactcgatttctctgttcttgctgggcttaagaaggtaaaccctttaaactttcatcacatgaatctatttattaacgtttttcttgtttgtttgcttgatgggtttatacagaattattaaatatgaaattgttgatggtgaaaaactttccatgtctaagctactataagtggagtttaataattcaacatgctttgctgtctatatacgtgaaagaagcattgtcacatgcatatctgtattctgtaggcatttattatatcttctcactgcaaccactacttaccaaaactacgtgattactatttgctgtgtatatacattttcttctttttattatatgtatttcatgatttcaatacaaatttgaattggttttgaacagcgtagaccaaattcagaaggtcaaggtcaaatacaacataagcaaaaagtccacgcgcatatggtcacacatatattgcatttagttattttattagaaattaagagagaatttagaatttcatttaatgttaagatatattaggttaaatatatagatgctctgctattaaaaatcaataattgctttagaatttttgtgaccaagaaaactttttttttcttttggagcaatataccgtccagaaaaaagaaaaagaaaaggacaaatcagtgtcataattgacaaatagtaacaaaaaagcacttttatggccagagccagccataggaacaggtggctaaaccccaataagttttgaccagccgaaaagaagaggtagcagacgcggttattgtcaaattagaaccggccaacggtacaaaatatgtagaatgaccatgaaaaggcctattatacgttttgccattttttgtctgtcattggagtgttctgtttttatctcttttccaattatgaacctaaaataaccatgtgaacattatgttgctgatgcag

SEQ ID NO: 52625 - DNA, 701 bp, Ricinus communis
  Intron number 4 from transcript 30162.m001270 (locus 30162 .t000015) derived from phytozome v7.0 (chr-ID 30162; pos 9 63785 to 964485)
cgttcagcacaattccgtggagaagttaggttcaggtagagaattcattcttggaatattcttttaacttcacatgctcttgtgagatacttcaatacttcaatctttgcaatttacctttcaacactgtgctttctctatctgtcttatacgtctatgtttttagtttaatacattttcctttgagcataaattttctatgggagtataagaaactacacattttaatacttaaaacaattatattaactctggccaacctaaacaaccctacattagcaagttaactatcagcaaaaactcttcaactctactttgaatgcgcatgtctgcatcttttcaccatagcaactctcccgccacatatagctcttcttgctgcttgtatcttttgcatcaattacttcagatatatttgaatagcacttcgtataagtattcgcacatgcttgacctaagcttccctctggctggccactgttcatattacgatagtagttggtgtatatgaattaatataaatgaaaaaattggtcataactgtgaatgtggctaaaattttttgaattcattttgtcattaacccttcatttcaactgcctatggaatatgcaatcaacaagtaaggagaagttggcttgctcttttgggacttcatggtataccaactgaacataccatttcatgggtttacagtgtgg

SEQ ID NO: 52626 - DNA, 613 bp, Ricinus communis
  Intron number 3 from transcript 30174.m008654 (locus 30174 .t000051) derived from phytozome v7.0 (chr-ID 30174; pos 1 957310 to 1957922 reverse strand)
tcatttccttggaagcctattctttctggtatatttcatggttttacttcaaagtgataaagagacatattggaagtaacttgtaatgccgttttgcagaaaattgaacccttaaaactgtttttctttgtaaatgaagaaacatctacagttgaaacaaaatgtaaagtttgcaggaaaatataactacactagaaatgggttttgctttgatagcttcccaaagatggatttctccttgattggtaccattcatgtaatagctttaatcccctaactgatatttgagattttaacatttaatagcagcttatctgatatctgtcgcacagttaaacaatccactcatggggactacaccagttttagcttccacttaagagatgtgttcatcattaatagataaaatgagaagggctttttacatcatacaagaaccttgctcttcattgaattgtgaggttgattaactttccatgaatcttgcttgttctgaaccaagcgacaatgagttggagatgccattcattttatcattgtaaaagttcacatagttagctaattaagccacacttctatattgcagctactggatatacggagtactattttg

SEQ ID NO: 52627 - DNA, 493 bp, Ricinus communis
  Intron number 1 from transcript 30170.m013833 (locus 30170 .t000245) derived from phytozome v7.0 (chr-ID 30170; pos 1 231278 to 1231770)
tctggtacgaggtttcattgaaatagacaaggagattaagtagaaacaactactgggaaactgaagtgcatgttttaataatcatcaagtatctgcaattgctaagcctgggatcaaataaagcgattatgatcttaatatttgtaagtattatcaacattcatgtgaagatttgtaagatatatatatatatatatcttaaaaacaagaattaagaacctggcctgcacttatatcaaaagaataaagaagtgaaccccacacctcaattaaaaaagtaacagtgactaagagtaagcaatgagcaactaatatataagtagtcatctgtttgccagctcctcccacatcctacacttctcttaactgaagctcgctagccatgtctacagttttccttcttatcttaattctacaaacatattcctctcactctcttgctcaaactccaaattcagcaccacctcggcctattccctttctctcgcgtacg

SEQ ID NO: 52628 - DNA, 591 bp, Ricinus communis
  Intron number 2 from transcript 46431.m000014 (locus 46431 .t000001) derived from phytozome v7.0 (chr-ID 46431; pos 2 04 to 794)
agaaagctaaaaaggtactactttctctcttccttgatgtcttctgcatgccattttagctttttattggtgcttccattaggaaactcttttctcgtttcacttcctttaaattctgcttactagatttccttttttgatataagattattgaaattttttttttttcttatcaccatcttcaatgtaattcttcatggtatcctttctaccatacaaatcttttaatatatctgtctattttgtatctctgcaatgcttcatcaatgccatggtattcttgagacaggcagattgagacatcattgtgcattaatccttaacaagatcgtgtgcccatattagtttattgtacagtgttctgttgaggactatgaaccatccgctattttcagagtgttctgttgtatgcaatatgccatttaatttcatgctctggctgttttcgccacatttatttcaaattaatgcctttgatttagctgtcttagaacttaaattactccatttttttccctgaagttatcttcaagtaaatactaatcaatgcacctggactgttgttgtgttgattatagtctgttagcatta

SEQ ID NO: 52629 - DNA, 732 bp, Ricinus communis
  Intron number 1 from transcript 30155.m001644 (locus 30155 .t000050) derived from phytozome v7.0 (chr-ID 30155; pos 1 346265 to 1346996)
ttgttagtgctttcgagaggattaagaaggtaagaggtttttgttaatgtttgaataaaattggatagagaaaggacatacattgtaatagatggattggctgatagagtggctatcaagtgaaagaaagaatttagctatttgagtttttgttctggtgtccctgattaatgcggaactgaggttatcatatattttttgcttcaaaaagatcagtccacatgcttatatcttgaatggtgtcaagaaagacgatttattcattattgttgtaagatgcgtgatttttacctgagattatgattgtgcattgacaaattgtgctttgaatgaattagttggcttatcgtgtgcaggatgatggctttgttttaggtgctgccattttgattcagttttatctcatatcaacacatctattacaaatgatttattctgatatctctaactgtgcactaagcagcactcacatgtactaactatgcctatagaggcttttcatgtggaatgacatgaaaatatacattacttatgccagtcatgaaatgtaatgtgattattttgcaggtgctgcatttttgttttatgaaagttaaagcctttttaattggaacagttttctgtaagatatgtcttctcctttcttattatgttatatccattcttcttcttcttattattttttttttattttgtaattaaatttcaataatcagccttccagaagggagt

SEQ ID NO: 52630 - DNA, 791 bp, Ricinus communis
  Intron number 1 from transcript 30147.m014442 (locus 30147 .t000713) derived from phytozome v7.0 (chr-ID 30147; pos 2 002008 to 2002798)
cagcgattcctcaacgtaagccaattttcatttttcagctctcattttgttcttgattaactattaaaatttgcaattatacgatcttagtttttgaaatttgtgtatttcttgtatgtctatgtggcttttagaattatgtggttacatggaaattagcttttcattttgaaataatctttattaatgttggattagcatgacgtataccttataatctttgcttctgttccctattccgttttaagatttgatgacccagaaactcaatacccacaaatttattaggctgcttagtatggtaattagagtgatattaacaattaaaacaatttttatggatatatattgagtaaagttggattctttttctctctgagtatgatttatcattcttctggtgttgatgatctaccatataaacagttttcgaacaacttttagagaagttttatgatgtgccactgtgttgttgagatttggtttattccatactccaacattcttctggatattatagggttagttgtctaggaagaactgaagtagtttttacctgtaatgaaatgcattttgaagtttaggtcggtgtatttcttagattggggaaattaataagaacaatctttaatcggaagaagattcactttaattcaaatgtaattcaaagatgcaatacatggattaattttgtcgttttggggcatgctagaagtcttaatgtctttgctgttatgtgattctgatttctaaatgactatgtggttatgcagcaagaaaaagaaaaggcc

SEQ ID NO: 52631 - DNA, 929 bp, Ricinus communis
  Intron number 2 from transcript 30170.m014066 (locus 30170 .t000478) derived from phytozome v7.0 (chr-ID 30170; pos 2 599386 to 2600314)
tgttttgagaggtatgatctctaacgcttcttgttttacaatgtgtgatatgcatgtatcgtttttttttttttgttcttttatcatttggactttggtttagggccagtagaattataatttatgtgtatatggattggatgaactggctgtattcttgtgtgctaatcatggcatatgacatataattatgtgtggctgagattgagaccattgaatgttgtagttttaacagtcatactttgagtgattgattttgccaattgttttctttcattttgcacaaaagaaattaacacttccaaattcatgttgatatgttaattaataaaattctaattttttccatgaacttttcatttttcgctaatcaatagatttcaacataacttttggactattgtcaaggctatgtttgattttagtccggctgcaatttgctttaatataattatcctatctggagttgaattaggcttactctgcatcaaggttatatatcgatatcaggtctcttcttgtattgagtttctagtttttttcttctttctgtaaatagcaagaaagataaaatattccctaaaacaagcagaaaggagtataatggtcctggttgcagagttgtttaattttttttgttgagttaataataacaagatgttagaaccaatctggttttgaattaatcatggggctatattttttcacttatatttagccccaaatttcttagaaccaatttagggtcatattacgtgtgtttattctctgctgaaggtaaccctctaagtgttttcggagttgaaagatttcttgcaaacttgtacgttttgaactggatgctaattgtgaggtagacaatgaaaattttgtggttatctcagctggtttcgtttataacaatgtaaatttttctttgtctataggtg

SEQ ID NO: 52632 - DNA, 435 bp, Ricinus communis
  Intron number 1 from transcript 30170.m013870 (locus 30170 .t000282) derived from phytozome v7.0 (chr-ID 30170; pos 1 474553 to 1474987)
aactacttacaaggattgcaagatcgtaaagataggtgtgtaattttgatcttctttttattttattttttaaattctttatattttaggattttagcttcaattctgctaaaattattgttcttttaattcaagtcaatagtaggtcaaacagtttaatgcatgtggtcctataactctatatgcgcgcattttactactttttatttctttgacttgcattttaggtagattggagataactgattcaattttccttttttatgtatatttttccttttttatgttaatctaaaatcaaaacatgaattagtgacacatttagatatagcgacgctttagtttatttattttttattatttttctcttaatgtgatgagttgttacttctgtttttagacgacaagcactgcaaagaagagcacaagaagcaa

SEQ ID NO: 52633 - DNA, 693 bp, Ricinus communis
  Intron number 2 from transcript 30169.m006358 (locus 30169 .t000135) derived from phytozome v7.0 (chr-ID 30169; pos 7 48778 to 749470 reverse strand)
ccaccacaatctagaaaagcttctccgcctccgaggtaatgttacatttttaacttaactatgcaatttttttaaaaaaaaattggtgcttttttagtttgtggttcaaaagtttattaatagagtgatattagaatgacatagctataaacagttaacgttttatgatcataatcgtgtctaagcgatgaatattttgattttgatgttaatttgggcgttattgcataaatcttatatgtgaaagttaatttttgccagtgaacttcttatagttcaactataaaggaaaagagaatgttctccggaaatttttcaagaaacatctcagttcataattttagcatttttcaaagaagaggacatttatatgtgaaaatactgagttatataaacttctgaacaaatattctttttctttctgactcatatttaaatctcattgtctggcgtaaatttatatgaagatgataggctcctactctctcagaactgggaagatgctatgtaatgcagtaatagcatattgctagaaattctgcatgtttttgcaatcgatatatgtcataagcaagtgttttgtctgaatttgggaagtaactcagccgtatttcaactttcatttctaaatcatttttatgcacggcattaattgcaggaaggcttctcccactcgtgagtctcttgttcttc

SEQ ID NO: 52634 - DNA, 654 bp, Ricinus communis
  Intron number 1 from transcript 30226.m002030 (locus 30226 .t000054) derived from phytozome v7.0 (chr-ID 30226; pos 1 795700 to 1796353)
ggcatttgggtttcagaaattctgcttgttctctagtgagtattttcactttactttattttagttctataaaaatattgattgtttggctttgatattataaggattcttcatttctctttgtttgtgctctgctgattaattgatattttcctggaaaaaaacatgtgtagcttgtaattatgtctttttgctattatctattaacttgctgcttttgggaatttatcacttttataaaaatatcttaatttttttcttatattccaaatttgctcgagttgagatacccacctgcggtcaggctaagcctgtgggcgctgatttttattttttacttctcagttagtttaattatgtttcttaagaaatttcttctcttgaaacaccactatctgctgttgcaatcactgtcttttaatgcaggtatttatattttaaagtaggattgagtgaaatatccagtaattatcactcttctatcagtaaaatattttaagggtcagtttagttaaatttaatggtggatattgtttgttcttccattataatgcttacatgtaatctggagtagtgtggaatctttttcttaagctgtgtcattttgttgaagttcgaaacatgaaatttttcatacttgaatatgcaggtcga

SEQ ID NO: 52635 - DNA, 695 bp, Ricinus communis
  Intron number 1 from transcript 30174.m009120 (locus 30174 .t000517) derived from phytozome v7.0 (chr-ID 30174; pos 3 146416 to 3147110 reverse strand)
acggtacctatttcctctttctttcattctttcatttcattcattttttttgcggatgataatgacacaaaagtacattacatgcatgatttcttttaattttgttgtatgattgccatatagattcaattcacttgaattctttcattttcttcttgttttttctttttggtttcagaacacttcgattaagaaaatattgcggttattttccttttttatttaaaatgcatccgggatgtttgtatatgattgattaatagagctgattcttcaatgtcaattcagttgctcttcatttttaagacaattatcataagaaacgttcgtatctcaaatacaatcaccggagagataggtcaggtcattaatagactcgaggataagtaactggacttattcaatcccgcatcatgaatgctttgtatctatatttatattatgcagacatttgctttttctaatttaaatttaggtgatattaaattggtgtattttcggtctcatgtatcaaagagaatcattctgcatttacttgtgaatcatgaattgttgttgttgttcttaaagattatttcttaatttattcagaagtacaagtaatgcacaggatcatacacattgtctttcttagttaacaagaaaaaagaaaacattactcgttgaatgatgaattgatgatggatgaaacagaa

SEQ ID NO: 52636 - DNA, 1029 bp, Ricinus communis
  Intron number 2 from transcript 30147.m014047 (locus 30147 .t000318) derived from phytozome v7.0 (chr-ID 30147; pos 4 187595 to 4188623 reverse strand)
gctgtgcttctctcttgaaatctatcctttgcgctgtaagactttctttttttctttcctctatttccaagtaacgatcaccaataacccatactgaatttaaaattgacccaggttgagtgcttgatggcagtgggtatgagtaatagtttaattaaaaggtagatgtgttgtggtggatcataactcctatcttgtgtccttttagttttcattctttttcctttaatatattattctctttctgtttgcatataatgtctacagctgtatttcaagtgaatagcaaaatataagcatcaaattgaagagctagtgcatgttaattgaaaacatcttgtgtttgtgtctgcaattgtttgctggacctttcgtgaaatcaagatcaatccggccagacctagatcataaattctagcaatgtcaatgccaatgttttctcgggttaaaaataatcaccaaaaatttatttgcactattgatctacttcatcataatacggtctaggacttaagaagcatgatattccaagtcccaagtgcagtgcagtggccttcatgtggtgctaagacttgctgatacttctggatgtgcattgaagactttcttcacattcatattcttcctacagatgtctactaaggaaacattactttaccagaaatttattttgaactattaatccctatttagttgcttgttgattatttttcttttatgtagaacggttaaacaatagtttgctctgtgctttctatcctagcttttgctagaaatattaatgtttaatgtgtcttccatgctctatctgtgtccatgtttcctacactaactactgacctgttagattgataaatgctgtatggtgtacaagtgctaatcttgtttaaatctttgcaaaagccgaagcagcttatatgcttttagaacaaatgagcatgtaaagaacgccaaatgatatctcaagaatcaaatcactttgcaagagtttttagactgttgatgtctttgttttcatggtttacagag

SEQ ID NO: 52637 - DNA, 741 bp, Ricinus communis
  Intron number 1 from transcript 30198.m000872 (locus 30198 .t000030) derived from phytozome v7.0 (chr-ID 30198; pos 7 53923 to 754663)
accaaccgcctcctttccaggaagcaattcgtaatctttctctttctctttcttttttctttttccttttttgctgactcagaaatcttaaatggaattcaaaaaggtctaaataatcagcttgtttgtatatttgctgttatcgtataaagatcgaaaatgttaatagttttagggatatgaaatgataggatgtcatattatataatagaagtatgtgatttgaatttatttgttgcacttcgttttatgtgattagaggttcagttttgcttttatgagctgtggactgctgcgatagacttttaggtttagtatttgctttgggccaatggtgtgagaaaatatttgctactctatatgggtttgaaagaaaatcgatttgatgaatcctatccaccaagatctctgaggctatcaatgtaaacgggtatcattaattccatttcttccttaattgatatgtggcttgtacaatttttttgaagtgtttgatttttcgtatgctgttgtgaattatgttgttttaaaactatgtttggaatagtaagttaactaaattgggtgttgttagttctttgtgggaccataaactgttttgtgtaatgtaatactatggaactgtgctgaatattagactcaggatgtagggagtattttcttgttttgcattcttagttgatcctttttactgtgtgttttttattttattttttatgttttgggtgatgcagataattg

SEQ ID NO: 52638 - DNA, 457 bp, Ricinus communis
  Intron number 2 from transcript 30198.m000872 (locus 30198 .t000030) derived from phytozome v7.0 (chr-ID 30198; pos 7 54691 to 755147)
tttccaaggtatatcttaatctagattaagctttctggaatattaaaactcttttcagactcttgtttttgcatttttcatatgcttgatttaagatgctaaaatttgaaagaaattaggagtttggctcattctatctatgtacagactccattacaataaaattaaacaattattctgtcaatgtattgtgtaatagtgtaaaatccatggctgggcagttctgcatgaatgaaatgttcaagtaactaaagattgtattgcagtagtaattatgctaccatcaaagtgaaagggaaaaagaaatcaccgttatgctcattaagtttgtaatgagaacaactgattctgactgggagttgtttttctttgatctctttttgttgattcaccttgttgtgatttcttctttcttgtgttgtgaaggcggagctaaaggagaagttagcaagtattt

SEQ ID NO: 52639 - DNA, 626 bp, Ricinus communis
  Intron number 1 from transcript 30174.m009157 (locus 30174 .t000554) derived from phytozome v7.0 (chr-ID 30174; pos 3 340591 to 3341216)
atattactgtaagtaaatattattgttttgctttttcttttctttttttctttttttggtttatctggttagtcttgtttttattgggtcataactcatgagttgtgtaatgtgggttgattgaagttacccacttaattatttctgttaatttcttctatagatctgtgggttctcgttgaaaaggaatgaattggcagatgggtttttggaatttggttgatttacggttaggatttcaagatgcaaaaatttgcaataaaattggtcttatttttttggcttatattgtggttaatttgattccaggatttgaaaatgttatttaaattctttatcattttattgcatttctttgttatttaacttgatccaacatttctcagattagtgaaagaaaaggaagagagagcaaaggaatggaaattgttagtcctttatgaaaaataatgaaggtgaaagttaccgaacaggaaggagaactatatggtcttgtttgggtagttgtgaagtgaaagggattatacttggaaatttctttactcttttacgtaaattctaataccttctataatctttcttatgtgattgcagactttctcaaatactgttgaagaaaaggcaaa

SEQ ID NO: 52640 - DNA, 593 bp, Ricinus communis
  Intron number 1 from transcript 30204.m001789 (locus 30204 .t000058) derived from phytozome v7.0 (chr-ID 30204; pos 3 79399 to 379991 reverse strand)
ctctttctcagacccaagaatcagttcgtctctctgtaggtttcgttttgcttcagtatattttgtttgattgatatcttctattctgtttaaattttctttattgaaattacaagtggatttaagtgaggtgttttagatggacagcttggattgaatgtccgagttaattatgttctctttatttttgtttatgatgtatggtcaaagtggagtcgacgtctcaaaaatctcaatttaaggagattagctgattggagaagttctccaaagttagtatctttaattttaattgcatgcatatactcctttgtgcggtttgtagtctcttttcttgacttgagcagcttgaatgatgttgtgtatgcgagatgttgaatctactgcgtttttagttttcaagatcttaagaacaaaagatctttaatataaggaagtaacaacttgcatagaccagtgaattggtatcgaaacatcccaaaagtaaactaaaaacacagtaatttatctttctacatatcaaagatgttgcctgactattgttcacttatttgttagacttcaatttgtgctgctggtgatagtactgcata

SEQ ID NO: 52641 - DNA, 451 bp, Ricinus communis
  Intron number 1 from transcript 30221.m002216 (locus 30221 .t000006) derived from phytozome v7.0 (chr-ID 30221; pos 3 7043 to 37493 reverse strand)
aggtgagttttaaatattttatcattatttggttacaaagtgctctatttggaaatggataattgttgaattacaagttgacatgcatgtgatagttatcttgctgctgactggagtgaagttttgaagttctatttttgcaagtggtttgaaattttttcgactctctactcaagggagtttgagtctattcatcttcttggtgcgccaatcaccaatatattcattgttgcaagaacatttcaagtaggcgctgaatttttatgaaactcataattctttcttaaaacagagaaattcaaatttgtggaatttggttgactttcaactgggaagtaggaactctgtcaagaaactaattattaagctttctcaaataaagacagtagtaaatgggaaaaatgttttgtattatcttttatgtcttaatttgctggtttacagaacttgg

SEQ ID NO: 52642 - DNA, 516 bp, Ricinus communis
  Intron number 3 from transcript 30190.m011330 (locus 30190 .t000566) derived from phytozome v7.0 (chr-ID 30190; pos 2 48255 to 248770 reverse strand)
cttgaagaagaaataccacttcagtgcactggtaaaggagttatctcaaacttttgctggtcatctacattggttatttttccagatatagatttaaatatcatggtaaaaatgaatttccttagactaattttcatttaacaatagaaaatcctcccaattatttcagtaacctttgattttttattttttttaaaagtggttgttagatgttgtttataaactttaagaatattgcattggaagagtggattgagaaattatctgaagtaagttgaatgaggaaaacataacttttagaacatcaatatactatgcattgggaactttagcctacacagcaacaccagcacactgtgcattcctttctagaaaaagcaaccaatctcatcctcaaaaggcttattatcaaagtgtcaacattatggatgctactttgtcctttggaacttattctgtttttgtttcgttttttgctcagcttggagcctttgcagtttttattcggcaaacgaa

SEQ ID NO: 52643 - DNA, 476 bp, Ricinus communis
  Intron number 1 from transcript 30174.m008935 (locus 30174 .t000332) derived from phytozome v7.0 (chr-ID 30174; pos 1 108564 to 1109039)
taacgataatactaatactaacactgcctccaagggtatatcttttatctgtatctttcattctttgcaagaaaactttttgagttgggattgctattgttcttttgatgcaagcattcttgaagaaaatggggtgaaatattctaggtgttttgattctttgatatttttgtgctcaggcaggcagtcttggaatgactgttttattaatttgaattggattttaatctttctcaatattgtttgtttcttgtgcttcctgttggtttcgatcctctcaattttcattatgttgtaggtaaccattcagcctatttccgttttattgatgttagatcattctcatgacgaagacttatatcctttgtaacatcgattagttactgagattatacaatctttttggtagctgtctctggtcgtctaaccttgagagtttgtcctgtatagggtcttccaaggatcttattccaagt

SEQ ID NO: 52644 - DNA, 445 bp, Ricinus communis
  Intron number 1 from transcript 30174.m008776 (locus 30174 .t000173) derived from phytozome v7.0 (chr-ID 30174; pos 2 24327 to 224771)
agaatcttcgtaatcaagagctgtaataataggcttttctctttctgattgtatgtatctatgtctctcaatttaaatagatttgataattagatgcacaaggacagacacatgatcatggacatggttactgatccttcgggaatatattgaagaatctccaacgccataaggacgaagatcttcttaaaggtcaagcagtgaagaaccaaaaggtacagcaacaacttttccctttttgttttcatttaataatttgtgcatgttatggatgcttgattcatttataggtgcaaacgatgataaactgatgtttcaatcttgcttaaacgctctgtgggacaaaactctttgagttttgattcttgcttcaaaaagcattcagatttgattacctgatccaaaaaaagctttggaatcgcaactgggattacaggaggtacta

SEQ ID NO: 52645 - DNA, 678 bp, Ricinus communis
  Intron number 3 from transcript 30174.m008776 (locus 30174 .t000173) derived from phytozome v7.0 (chr-ID 30174; pos 2 25063 to 225740)
gaagagtggtcgcatatttctcaaattcatagaaggtatttgtttttgctgcatactggttttttctttttttctttttttcttttgatcagtgggaggtttctattcttcttctctatcccaatgcggtgatttttacattagctttcccttttatcttccatgtgtcttgttagatacttcttgttgattgtatcattttcctcccttggtgatcgtgttttgttttgtaaaaaaatctagggtcctctctaatctgtttttgatgagcgactggtgcaaaatatatcgcctatcgtaaattttaaatactacattggaaacaaagttagaatttgttgatgttgtagctttcattttaatgtgtaatgtatggatgaaatatgagggggaactccttgttttttcatcacaacattttattgtgtaggaaaatttgtttaattggtgttcagtttccatttgtggaacaaatttttctggagctttctaattagattgaagtaactcccctcaaattgtaaggaagatagtagaggggaaattgacacaggcatcggcttatgcatttgcttgcatagatatgcgaataatggttgtttgattcagaaaagtgacacttcaaatacttctatctttgtagaacagcttctttcagagacaaatcaattgataaat

SEQ ID NO: 52646 - DNA, 845 bp, Ricinus communis
  Intron number 2 from transcript 30205.m001598 (locus 30205 .t000028) derived from phytozome v7.0 (chr-ID 30205; pos 6 05866 to 606710)
ataaattcttgggctattgctgctcttgcttttgggtatatgtgtttagctcacaccactcatctctagcagctgctattaagtttgaacacatataaatgcttttgccattcctgttattgcttcaagatgtttttttttttttcctcatatgaccttgaaattgaccttgacaaggaatggcgtgtactgcagtgaattgttgctatcttgtaactactttttatgcacgacattgatatgaattacttctaagcactatgttcttattttaggatcaatctgatatgaattcggaacaagagcttaatgattcacaaagattagttgcagtgaatccacaagaaactaaagagtgctgaaatcaagaaaaggttgattatgctaattctgaatttggaaagcaggattgttcaatagggttcaactcaatgatcaaagctcaagatgtcaactcacagatcttaggtcttaactactaaaatatagttgctagactgagaattatttcttttttgcaatatattttttttaaatttatcattctgtgtcttaacattgcctgcagttgcatatagtcagacttaaggtttcacagcacatgctctgattcatgctgctgctcgactacaaggcgacatgcctctttcaacattgttttccactcatgtaaacgaagttgttattgggtcttagatttgaatcatgccgagtttcttttgtattcactctcttattttctggcagttttttcacatgcaaagaattctttcatttttccatctaatctggttggtgtttccattacagacttgtgtgccagcaaatcatattaggagggcata

SEQ ID NO: 52647 - DNA, 263 bp, Ricinus communis
  Intron number 2 from transcript 30190.m011136 (locus 30190 .t000372) derived from phytozome v7.0 (chr-ID 30190; pos 2 091189 to 2091451 reverse strand)
ccctatacgagcttacatatatacgtgtatgttttatatttttttgttaaaatacttaagattacaaaatttcaacctaagttgaggatacagaggtttaatgttttttattttttatcttggagttgtaaagattgtggtaggaagataaatctgatgtagcaacgacttagggttttgcattttttgataatatgatgagtgtatatttgattattattttcttttttaaagtatcatttgcgaactgatcgatattcagg

SEQ ID NO: 52648 - DNA, 674 bp, Ricinus communis
  Intron number 1 from transcript 30167.m000887 (locus 30167 .t000036) derived from phytozome v7.0 (chr-ID 30167; pos 6 33311 to 633984)
gaggcactatacttccccttacaatcctattggtaggtaagtaaaggtcagaaaccctcatgggtgtgatccaatatgttggttgtcagggaatacctactacaagggttcatgcttaatataggtaatgttctttgatcatgaagttaaagctatcaagtgtatcctattggccctcattctcttaatgatagacctgtatagcattttgatagcaaagggtttctaagcttaaatatgcctaccacttgtatgtaacagctttgatctaaatgaagggaggtctaatctttcttactgaggggcttaggataatagcatttggaagtcaatttggaattgtctattcctccccaaaataaaaaatttcttatggagagcaagtagcaattgactttccactgtagaaaaactcttcaaaagaaggatcctcgaaacaaacatgtgtctgatttttcatgtccacgtagaaaccattgaagattcttttatatgatcatgctagagctacatggctttcatccaatctggatttcctacctaatttacagtttatatcctcgtttagaaactggtggcatttcattactgttcaattgagagatcctatgcatactttgttgttatttgaaaaaataggaacaaggtggtttttgaaggcaagccccttaacc

SEQ ID NO: 52649 - DNA, 659 bp, Ricinus communis
  Intron number 1 from transcript 30182.m000137 (locus 30182 .t000007) derived from phytozome v7.0 (chr-ID 30182; pos 1 09427 to 110085 reverse strand)
ttgtttaggttagcatatgtttttcaagcttatggtattcaaatattcttagagaattctatttgagctttggccataaggtctcaagtgaaaatacctttatcttcttctctaagaatgagtattcgtaaaactttgttgatgttttggggttttaagttttttggacgtgggtcgttacttgggtgtccttttgattaatggtagagtggatcagtcaatgtatggttatattttggagaagatagaaagtagttttgacgcttggcataataaaaagctttcacttactgagagatatgtattctatgcaaattgttttccttcctatagaattttatgagaatattgataaagtttaccatagttttgtgtggggattaaatgctactcaaaacaaagtttatcttattctttggcatattatttatcaacctcatgtgagaggtctaggtatgcatagagctcatgagtataattctgcttttttcatgaagctagcttgtggccttttttctagtccttatgatatctagtcttaggctcttctagctaaatactcaaaagatttattaattgagctttagtatctcaaaggaactctgagtctagaatttggaaaggtatttttggtgtttaggagacaactagaaggtgtg

SEQ ID NO: 52650 - DNA, 786 bp, Ricinus communis
  Intron number 4 from transcript 30190.m011152 (locus 30190 .t000388) derived from phytozome v7.0 (chr-ID 30190; pos 2 198476 to 2199261 reverse strand)
ttggtcgtctcatcattgttgttcaagcggaaaaggtgaaaatttaagattctgcgttacagcacatagctgaacacttgtaccatatccttgatttatgttttttgcttgcgctgatccatttattgaccagttgttgtttctgaatttggacatatatacctgctttagtgaagcctcgtctgtctcctgaatatttaagttctgtatttcttttgtaatgtttttttggtcaaagttatagtgaatctggagaatcagagccttgagtttgcgtcaactatcatgttaatcaagccgactgcaagagggcgcatcaattagttgctactgaagagaaaatgatcgtgaaacactaatatatgaagcttgctaaactgtcacatgataatgaaagacaaagtattggtcaggaggcagatgattacaatcctgctaatttgaaggggcaaatcacacattcagataaaatttcaattgggtgcttcagcagtgaaaactgggtggtgcacgatatgaagtggcacttgtgtgatcatattgaatgactttgttgaaactaggaacctagatttaattcttaaactttaggttggagcttagattttctggcaaaaggattttagcacctcagaactaaacttagcaatgattctttgacatggctcaaagaagttttgatcctctagttacagacatattgcactcctaatttactatgtcgatgttattggtgcatgtattatggcatcttaacttgtatcttgtaatcaatttaggttccat

SEQ ID NO: 52651 - DNA, 333 bp, Ricinus communis
  Intron number 1 from transcript 37798.m000019 (locus 37798 .t000002) derived from phytozome v7.0 (chr-ID 37798; pos 4 241 to 4573 reverse strand)
tgggtttgaatttaaattcaaatgggccgctaactgtatttgtttacttactaaataaaatcccaacattctcaaccttatattcaattgttataattcttaatttctgtccgttcctttcaattatttctcatgaattaatttttcttttcttcatctttcaactaagttgcttacttaattgagtgactcaaagcaaatggactctgtcatcgtcatcttgttattcgccctggtttcatatatacatggaagaattagttagtttattttccaggaacaaccattgggttttgatggcaacttctaattcctatccagacaggttttagc

SEQ ID NO: 52652 - DNA, 935 bp, Ricinus communis
  Intron number 1 from transcript 30174.m008820 (locus 30174 .t000217) derived from phytozome v7.0 (chr-ID 30174; pos 5 05271 to 506205)
tggaacaagaagaggacttcatcataagaaacgtacgtgatcaacaggagcttcgttttctttttgcttttcttcttttacgatattcttcatctctcatttttttctttatggattatcactgaatttagagagaacatgaagtggatttgatgcagctaaaatattggagtatagtggacgcaaattagaggtagttttaatattgctcaagtcatgtacttgatcaaccaaagtgctgtactggaataagtgaaaaaagcgagttacctgagttgactcgattagagcattgtataactcggtggagaatgctaacttggcacaccttctgatatatatatatatatataggccctatattagctagagggagaatgcaatgataatttatatccttgtgaagaaacatagaagctaattaaggattaatcttactcctaatatatgtctttatcgagtcttaatcatttttttaaagtttgtatttccatagtaaatccaaactttgtaactggaaaataagagagttctttgacacggaagctaacaaggagtttgaattatttttcttaagctagcatacttttcttaaaccttcctttttatgttctattaatatttctacttattcaatggaatttgaataatttttttgaattttacatttcaagaataaattgagaattcataaatcaccagaatattaataatttaatagttgttccataatataaattaacaagccagaaaacttgtactatgttaattccccacagatattagatgacaaatgaaataggtttgaagttttttattagtgaatggtggactgtatgtctgactaacatgaaggataattcagtagtgtttgattacaatctaatagattggtattactaggatagtacaaattcaagctccgaacacacatc

SEQ ID NO: 52653 - DNA, 941 bp, Ricinus communis
  Intron number 1 from transcript 30170.m013844 (locus 30170 .t000256) derived from phytozome v7.0 (chr-ID 30170; pos 1 289003 to 1289943)
aaaggtgggcggtgagtgggttttttaaactttttttttctgattcgttaaatgtttgttaattaagccgactctatctagggctaattaggacatcagtattcacttgcctttggttgtctacaattttggaataaccggttaaatattctcattaatggaattggacaaagaaaatgaatttcagaccgttcaagcttacataaaagaaacttttcagattaaaagtaattctgagttgaggtgttattgttttataactacttgttcatttttgaaaatttaatatccaatcgtaacagttaatttcaaatattttagtaaataaaattactgaaatatggcctatcatgtttttccaaaatatgagaaaataaaagaaaaagaaattgatacaagtaatgtaattttaatgaaattataagtcaattagtattgctgtcaaatattcatatatagttaacttatcaaaaagaaaaacaattatttatatagttaaagggagtttcagctttacttatgatctgtatggggaccattttatgcaacttcttgtctgagtgttctttttttaattttttgtggtgaagggagttgtttatgtttggagtgttgcttgtagatatgttctgtgcaacaaaatctgtggctgcttaactgttctccaatgaaattgcttttctttgcagaaaactagggctacttaagcaatgatctcatgcatgattggtccttagttaatataatttagtagagtagtagtagtggtgatgccttcattattcttattatttgtaagtttaataattttggtcggttgcaaataaaatacccatctcaaaatcacttccgaaattaatttattttcctaaacttatgtcaagcatatggagaagttgaaattgatttgatttaaatatttttttttccatccaaggatc

SEQ ID NO: 52654 - DNA, 784 bp, Ricinus communis
  Intron number 1 from transcript 30170.m013700 (locus 30170 .t000112) derived from phytozome v7.0 (chr-ID 30170; pos 1 333901 to 1334684)
ctttgcttcctcagctccctgccaaggtattttctttttttttgttaattaaaaattggtccctgaagatcaagaagtacatgtaaaaatatatatatatatatttattttctttctgtttattgggctctaatataattgagaattttaggcctttgattactgttgagagatttcaattttcgttatatcctccattctactgcccttatatatatatatatatatatatatatatatatatatatatataaagaattgaaatttaattctttcacccgagtcttatataattaaagatgattcgtagttagttttgtgtttaaaatcttggttttggatatttggctgcctcagaacaagccctttaaacaaacttgctttgagacatagggttttgtgatctaaatgttcttaatcctaattttaattagtacttaatagatgcaaggactctacgaattaagtagttacaattgaaaatagatgtacataactgtagctatagttaggtttattgcattccaaactatgcaatttaactattgatggcactagaaatattgagtttataatgttcatattgatttatgaattatgcatggattgattttaagaagtctttatatgatgaagagaagtcattacagtaaaatcggttatccaaatgcgttgcactagtataaattaagattctaactccacatgttgtatactattctttaccattttgcatctcttgtggattttactctttttcaggcagacaagtccaccattgttg

SEQ ID NO: 52655 - DNA, 790 bp, Ricinus communis
  Intron number 2 from transcript 30170.m014324 (locus 30170 .t000736) derived from phytozome v7.0 (chr-ID 30170; pos 3 947561 to 3948350 reverse strand)
gcagcttttggtgagcttcatctgctatttattatatctataaatagcataagtactatgatcatatatatcaactaaaattcatgcatacctgaacgcttttagtttataatgatgtagactttagaggaagactcaggtggattgatataattattagaaaggtttacgttttttttgctctaatactgcacatacatgtgaattaaagccatttccatgttcgaagaaaagcaaagcaaatgaatacataagactctttttattcctgacgaacaacacaacttctgatagaacaaggagactgctagtcaatcagcagaacggtcccactgctacgacatgtcttaaaattttccactgcctcataatcatgtcattgtactagttaatatctgccaataatatacctcactaaaagtctggatcctggagttttatgatgtgaaagaaaaaaataatccaagaaaattcactattagtcttgaattatagtcgtgacttgtgagaatattaacgtccctgtgaagagctttgtttctgtcacaatatttgggaagactttttaccactgatgttctttgtcgctagaaggttcagcgacgaatatgagctgatactaagggtttggtgacgatatttttatggacaaatcgtataagtgattgagtacttgattagcagttcaaattccacatatattagatctaatgtcatatatgctaactcttgtcaaaatgtgatggtattatcaggtgaaaagctagggaaattgctttccctctttcca

SEQ ID NO: 52656 - DNA, 698 bp, Ricinus communis
  Intron number 1 from transcript 30170.m013786 (locus 30170 .t000198) derived from phytozome v7.0 (chr-ID 30170; pos 1 145353 to 1146050)
ctgatctcaacacgccatatcttcctgtaatccaggttggtatactgctttaatttcctctgtttcttgcaattcatgatcttcttcctaggcatttttttttttccaggaaattttcaggcacaatgttgggttaactggatacttcctaggttggtagaatataagtaaccgtgccttctgcaataaatttagggagggaatcactgtggcagggacacaataatttttagctcaggagaaacagagtaacaattctcgtgatcatagaaagttaggcaagaggccaaaaactaggtagctcgtaaggttccttttcccagaattaggtcttagttcacatgaacttgtctttatccgagcaaatacagtcaatctattataggttgtaaccatgcttttcaaagtggggagcttcatgagaattctgagggttaaaaagaattgccattgggtcacaatacattgctcagttaattgcaagtaatcatgagtggcatgctataccagcatagttaattgtaggcacaatcatgcattcagacctatatctcatagataaatgaaggaaccatttgattacagaacatttaaaagaaaacacacacacacacacacacacacacacacaattcctgaatatttggtgtggctgtgccgtaggtagctgttgcttcaggtgaaggccaattcataga

SEQ ID NO: 52657 - DNA, 856 bp, Ricinus communis
  Intron number 1 from transcript 30225.m001719 (locus 30225 .t000043) derived from phytozome v7.0 (chr-ID 30225; pos 1 601599 to 1602454 reverse strand)
gatctttgcgctctggacagtctgctgttgctaaggttagttcattttattcattcttttgtttttactttcttactttttcatattggcttttgagggatagaaaagaaaccccccgaaaagaaaacgaaaaaagaaaaagcaaagtggtctcataaaatattaagacaagtcttggatttgttatatgtatggtgggatttttattttcaatacataaatatgcttaaatggattaattgtcattgaattaaaattatgaattcgttactaacataaaaaaaactaacgatttttcttttaaaaagtttgctctaagtgagtcatttcattgagcaaacaatatatgcatgtgtaaatatattttatggtataatttatattctttttacttttcttatttgttttagcaataaaattataattgttatttaatttcttggaaacatttaaataaaatttgctattttagaatattgggtaaaattgataatctacacaaactgtggattttttttatagtaattaggcctttgtaaatttgataaaaaagaaattcatctgtgctctgctaaaacatcaaaaagttttgatgagatcatccagttgaatgatcaattacatataattaaatacaagtttatatacaatccttataagtggctcataattctttgtgcaaagcttttattaatattgagagagcaaaattactgtcaatagtcatgcttgatccattggaattatatagagcattgctatatctgtacagtagtttgataatataattgaaaaatcttcgtttatgttgttatttgaaggtttcggaggtaagttcacgtctgggtagagctag

SEQ ID NO: 52658 - DNA, 336 bp, Ricinus communis
  Intron number 1 from transcript 30174.m008608 (locus 30174 .t000005) derived from phytozome v7.0 (chr-ID 30174; pos 1 711441 to 1711776)
attcctttggccttgagtaagtccacaatatgctttattttcagtagtgaattatcttctatggcctcttgattgttcttaattcattgtttttgactttcatgtaaagatcggcaaatttaatgaatattgttgattatacctattgtctatttaactccatcagcagaaattcggattataacattagccaaattaaatatggtctggtagtacagggaaaaaaggtgaatagggttaatagtttctgattttgttgttgaaatgtgtttttaattcaattgatgattttgtttctgattttttcttcctgttctgcagtgggcacaaaatttt

SEQ ID NO: 52659 - DNA, 813 bp, Ricinus communis
  Intron number 2 from transcript 30213.m000673 (locus 30213 .t000010) derived from phytozome v7.0 (chr-ID 30213; pos 7 71105 to 771917 reverse strand)
aactcaaggattgctggcttgttatctctggcaaggtctgtttttgttttcttttcttttacataagatcagaagatatgaatatttctagattgaatttgagagaatttcacaggaacatgtattataggattacattttagctggactatcgtgattgggatctttgtgtttgattgtagttttcttgatatcactgcttgtcacatgctgtagaaactgatcatgggtttaaattcaattggcatatgaagttttgagcatgaattattcttaaaatggataatatgtttgcagctaaaaataataataattaaagttgtcatatgctaaaataaaggaatgatgaaacatcttgtacattcattctatatttaatgatcccttgggtgtcacttttgattatgaatagatgaaaacccttgctcagttttttcatatgaagttatgtatgcgtaaatgatgggtaggcatttaaattataatttgacttatgcgtcgtgatagttacaccataggaacacataaataatgatggaaaattggtgtttgaaacttttttttctcgacatcccagttcatttttgaaacttatctgcatgccttgtagttttgttttgatgtgatggtttagaacatcttgttgcatacagtacaattcatgtttctctcccataaggtataaatgttagtaatgcatttataagtaatattctttaacatcagtttttgcccgtctttgattttgtcacatgtgaatgctttaatagtatatagttgattaaagttttgagcttcatgttcaggtttacg

SEQ ID NO: 52660 - DNA, 485 bp, Ricinus communis
  Intron number 1 from transcript 30170.m014145 (locus 30170 .t000557) derived from phytozome v7.0 (chr-ID 30170; pos 3 122277 to 3122761)
aaattagggtttttcattagtatctctttcttactgtacgcttcaatttctctcatttgtaaactttgctcttttatttatttcatttgtttatataatctttgctgattgttattctctttgtacctaccttaatcgcgagtaacattagtgtttgtttttactttgagttgattcttgttgcttttttctttccgttttgtagcgattgaagtttgctttgttcttcactctgtttaattttagtattgatttttgtttcgttatttattttttagaggtatgtaagtgaaaagttgcttgacggtttggtgtttttggattatgagggttgtgttcttgctgttgagagatgtgctttaaatgcttgattttgacttcatttaggatttagaattttgttattattattgtattttcctgactgataagggaaattggatcttttaggtaatttttggaggtattggaggcttaaactgtta

SEQ ID NO: 52661 - DNA, 703 bp, Ricinus communis
  Intron number 2 from transcript 30152.m002408 (locus 30152 .t000029) derived from phytozome v7.0 (chr-ID 30152; pos 1 017708 to 1018410 reverse strand)
ttggtaattactgtttaaatagacatcttctttttacaataaaatatatccagtttgtgcatttaacttgatcacttgataatttttctaccgctgtttttcaagtgcaactccagttatagcttcactcgtaagtttagagtgctaatgttcgtcttacaaatgtttatctgcgattatttgccagtagtgctggtggtattaattaatggttctttgcaccattttctttcatcttctcagctgtgaaccagatgattggattaaactaaatgactaaaccttgttatccctttccctgaagcagctggaatgttggcttttgactatcttagcagttctgattgttcttatgctttagatgtatgacatctcctagcttttaattagtgcttgaagaattaaaaattcctccccttcattaagtaactgctagaaaacaattagctgagtttgtctacgctgatcttgcactgggaaacagagaggacaaaacattcttgaatatttcttgtctgatgaatgcagcttatatcttaactaccaaccaacattggtcgaaagagatgttcaatgaaagatttggcatatgtggcacgcctgctacaagagtaatttgaattcccttgttgctctcggtattaatcagttttataagtgatgtgcagcaccactttccccgagtgatcctacagtgaagaaa

SEQ ID NO: 52662 - DNA, 760 bp, Ricinus communis
  Intron number 1 from transcript 30152.m002408 (locus 30152 .t000029) derived from phytozome v7.0 (chr-ID 30152; pos 1 018826 to 1019585 reverse strand)
acaattgataacatacgaatcacgggacctttcaggtatttcttgattgccagttctgcatttagggattcggattttgcttttgcttgtgttggattttgctttactttctaggtgcttatttgattgatgtttgttacgtgcaatttctgggtttgaattgagtttgtttcgtggatctaagttgtgtaaagcaataaaaaaggaaaagggaggaatagagaattaggctattgggttagctgtgaatacggattgtttatattcatctgagaattggactgtgtggtgcttaaattttttattgcagaaatctgacaaaaaataggtcaatgagttggggttgttcagtttttgcaaggggttatttgttgatttggatttcttttctatatgaagtcaattggcataatttgaacgattaatttgatatgctcgatgttctcttgtgctttttagttagatgttaatttaattttcagattcttgttaattaaatggatgtgctattttagaggtttgaatgagtttattcttgctgcttgtgaaatttggatccttgtgtttgcagaagattggtttttatgggcggtgaaattgggcttgtagtggcttagtcacagagtagtttcttttttttttttgatttgttagttctgtttagtcacaaggattagtcctaagatctatgtctgaaatagcttgaaagcttacttgtccaacagtggtttcctgtagacagcctgatcacaattggctc

SEQ ID NO: 52663 - DNA, 758 bp, Ricinus communis
  Intron number 1 from transcript 30170.m014183 (locus 30170 .t000595) derived from phytozome v7.0 (chr-ID 30170; pos 3 388568 to 3389325 reverse strand)
aaggagaagacttgtgccggtaattgttattattataattattattaccattatttagtgaccatccttttgttttaagcttacaattgtttgattgaataggcttttgggttttctttttcctactactttttgcggacagttttacgtgcaatgcatttcaaattttattgtttctgacatgaaaattttggcaactctatacctttgtgcgattctccagtttctgaaaagtggaggttctatctgtgttacctaaaagactatagaagtgtttgattagatttaaatatgcatgctatcctcggtagggcactccaaatttagtttgttggaattatagtaatcatacaatgtgaaatggaggaaggagtatttattattcttccatttcatataagaactaaaataactaattaagctgatgttatgcagtcaaatatgatggtagaacagcaaaggctcttaccaaagaaagcaagctcaattttatagagcaattgccctttggattctgctatttctcctctaattgtcattattctcaacatgaatcatgatgtgtgtaacttatgaggagagcttcataaaagtaagattttggttttcctaataaaacatttatctgtaatatcagtttctaacctagttttgctgtaaatgttgtgaatcaacttatctatgataggttctcttgggttcattacaattacgtctttgcagggttatcactgaaatcacaggagctgacagctatc

SEQ ID NO: 52664 - DNA, 1017 bp, Ricinus communis
  Intron number 1 from transcript 34625.m000010 (locus 34625 .t000001) derived from phytozome v7.0 (chr-ID 34625; pos 3 26 to 1342 reverse strand)
gttgagcgagtcgggagggtacgtaattcacttattaatttcatagttatcaatttaaattgaattatatagacttattagtattttaagttttataattattactttttaaatgtataattatgccgggagcttgacctgttcgaggtcatacacacccagcaaacatcagatgactgttgttaatacgttaactagcattctcagatgttgttgtaagatcaaaatgataattttaacttatatatgtataatttttttctcaattatgttttttctaatatttagattctttatttttaagaccgatactatcagctggtaaagattgcttcttagccatctgagggatccagatagccaccttaaccggacactatagagttattcctccaagtgataggcggtgaaaagaagtgcctgtctatggcatgggtgctatggtaccctctttcttcagccatggatcatcctacagctccactactaggtcttaaatgacagacgttctagatcctctagagacgcgagtcatcgagactgtcaagcaataggtgcggtctataatagatgaggacaatcttatccgccgctaggagtaagaggaggtgatttctagtacaaaggtccgacagctcatctgagaggttctcatggagtttttgacgtcccacacatcctcctctgccctagcccaacaacaagtgcaggatgactaggatcagtcgaccgccaacctgtagattagatttttctttttttgtatattttcttactatacactatagtaaacatgagtagtactcattttttaatttattatatattactttttattatatatatgtcatacaaatctaattagttagttaatattaataaagtaatattttaaaattattaatccaaatatagaattaaaattaaaaaaataaaactgcaacagattaatgagtgattagcaataaataatatgttgttaattatcctacattcatcgcaagattagcgacggtt

SEQ ID NO: 52665 - DNA, 827 bp, Ricinus communis
  Intron number 2 from transcript 30190.m010993 (locus 30190 .t000229) derived from phytozome v7.0 (chr-ID 30190; pos 1 165101 to 1165927 reverse strand)
gcaccaaccacagaggtccatccaatttctgacttaagaatgagcacatgaagtttctttccaagaatactgtagttgcgttagtttctgctataaagcccatttggatcagtttctgatttgcaagtaacatgtaatacattaccctgcagttcaacttaccattgttctgcacctgattcgagcttcatttatgctttgttagctagtgttatgatggaagttgagagaaaggaaaagaaaaaaaaaattagtttaattttttttggcttgggtgtttgaatgaataagggtaaaggagagaaatgggtggaaataagaggaattaagcccatttaattcttgtaaaatgtaaggaaatgatgggaaatgaaaatgtcaaagttacagctgtttgaatatctgctttaatgtgctcgttactagttattttttgtggcaactgaaaattcatttgatggatgggttggagttgtcaagagtttaacactatggaaataaattgatactagactgatatatagtttgaaatttgaaaagacccttgtgatgtgtgctcgcttttggtaacaagttgggaagggattaggggttttctgaaaagatttctgtactctgatttcaattgtgatgtttgtgggaaatatattgctaataaagctttgccaagtctatatttaatcaatgatttatcatatcttggtgtgtgggtggggagtgggggtggtaagttccatctacctctattgtcgtcctatagataattttaagattttccatatttatatatatgatgcatttgtaggaggaaccacgttgggtacttg

SEQ ID NO: 52666 - DNA, 462 bp, Ricinus communis
  Intron number 1 from transcript 30190.m010993 (locus 30190 .t000229) derived from phytozome v7.0 (chr-ID 30190; pos 1 165970 to 1166431 reverse strand)
tgtctgaggagttgattaaggctgcattttggaaggtcagagcagctttaaagcttttcttctagcttttaattgtgtgctacttcgagttgaaagagtttttgcctcattttcttccctagtctatcgaattccaactccatgacttaatgggtatgtcacatatgattacggattatgtcgtagaaatcaaaagacagaaccaaccaacattaacaccaacaaaaaattcaaagaatgaaagaaactatattgttaaacccttaattgcttttctattttgttctctggattccagctgcattatattagctgcttcctcttatcttgagacatcttcaccttggttagctcgaattgttgttttcttctcttctgctgccaagtggatttctgattttattctttattttctctgcatattcagccttctcgctttccaccttctcctatcataccagg

SEQ ID NO: 52667 - DNA, 533 bp, Ricinus communis
  Intron number 1 from transcript 30190.m011048 (locus 30190 .t000284) derived from phytozome v7.0 (chr-ID 30190; pos 1 480296 to 1480828 reverse strand)
accactcccaggtttgtttcttcttcttcttcttcttcttaacacattcctgttcaatttctgtccgaaaaatggtgttcacttgccattattttctgattttgccctttttgtttctatccttttctcaaacctcccttacacacgacaatcttttctttccattttccagaccttacctaatctacttcagattttatgtgatttcatctttttagtttttccatttttaaattcttttcttaaaaataagtaattgtctctttttatccaagattcacttgattaacttttctttagtggctttcataatatttagtttcttaatgattttgttgacttgtctttcgattttatttttgctgattcctttcaatttctcagaagctcgaacatcttacttggaccttttcaattatttctgctccaaattctttacctttgatttgaaattcccatgtaaaaaggaaaagaagaaaaaagcaatttctgacttgacctttctctgtatttctgcagggtcgtcatcgaca

SEQ ID NO: 52668 - DNA, 230 bp, Ricinus communis
  Intron number 3 from transcript 30147.m014476 (locus 30147 .t000747) derived from phytozome v7.0 (chr-ID 30147; pos 2 209412 to 2209641 reverse strand)
gttcgtgtttcggttgagagaggtgcggctgccttgattttcttttgagttcagtttgtcatgtgcaatgttgttttcttggcttgaacgtttagaagtcgttaaattgcttactttggattctagatatgctgtgtttattaatttcggcatatatgtaattaactgagaacgattaagattcccaaattccaggtgatttgtcaggcttcagtgaagacttctttgat

SEQ ID NO: 52669 - DNA, 921 bp, Ricinus communis
  Intron number 1 from transcript 30170.m014121 (locus 30170 .t000533) derived from phytozome v7.0 (chr-ID 30170; pos 2 953691 to 2954611 reverse strand)
ccctcgatcctctccgttctgacgattctcttcaggttctcttttctctctccaattggtaatttcaaatttcagttcgattcacttcctttctttgtcaaaaccctaaatttgtttcgtagaaagccattttgcaattgaaattagatctttttagtgtttaatcttatttgctcttacacctgctatgcagatacaatattttttttgtattactgatataggtattaatgttatatagttagtgttaactacaatatatgaaaatatccttaagcttacgtagctctgcttctagtcttactggctcagtttatagaagatcttagttcagtcaaatggttaacataaccatctagtaaatcaatggtatctggaccgcacatatagctgttattactttactaaaattcaggggcaatggtttggtttattacacaatgcaataccgtataggaattgtggcttgagccagtcactgaaagtagtagtcctgtgtttattttgaaatttaaatgtccatttcttatcaagtatttcgtcagttaaccattcttcaaatgctgggaaattcatgtataaggtgtttttatcttgccttgcctctccagtgttccatcagctgcttttagttcttaaccattgcacaattatttttttttaaatggtttgctgctgtaaatttgttttctatatttaataattcaattgaactattatggatatggatgtctgatcccacccgttaccagtttcggtaaaaaattccattgcttgaatgacttagagagcatatctgttaactggcagcaaagacttaactttgtttatcactttgttgtttatatagaaggatttatttttctcgcaattcatcattttacagtttttttctgtttccccaatgataatcagttcact

SEQ ID NO: 52670 - DNA, 506 bp, Ricinus communis
  Intron number 1 from transcript 30190.m011042 (locus 30190 .t000278) derived from phytozome v7.0 (chr-ID 30190; pos 1 446201 to 1446706)
ctttcagcttcactactcgcagtttagtttggaaagtaagttttttccttctttttttttccccacttccaatctttttaaattgactattgggtcatagtttgttaattttccaagtgatttaagcttcttgatcgactatatattactggatatcaatggtatgcgtattcatgtagttgtctataaaaaaattggactaacagttcactacggtgaaacctctattccaaaatacagaaaattaagagttcagcttctactaattttgttctaaaaaaaaaacactgtagaagtcattaaaagatatcgattatgcatatttgtaaatcaaactacattagatgtctgattagagccatatgttacttaattaaaactctatgtacggtcaccaaggccaaaagaatatttatttgtttgtttgaattttttaaatactttgtcatcttctcctcaaatgtacaagtgaaattggtgtcgggtgagtgcaggtctgaagccag

SEQ ID NO: 52671 - DNA, 752 bp, Ricinus communis
  Intron number 1 from transcript 30169.m006565 (locus 30169 .t000342) derived from phytozome v7.0 (chr-ID 30169; pos 1 900658 to 1901409 reverse strand)
cctggggatcgaactgttgtttggtcacctaataggtacactctactaattaacctcagcaaattcaatttactatagtttgctagcatataaccatgcaaataataataatacaccattataaactaaaataaatatgtgaattttaaattcataattatcatatcatagaatttgacccaaattttttcgtcaataagctctactgtgatctaaattagtaacctcacgttctatatgtagctcagtacactaattttgtggtcttgcataataatttcagtgtgtattttataataagaatataagtgctaactgatatatatttcaactatttaatattaacaatatgttttattaatctattagcttgggatatagatgagtgaataccaagtattttcctaaattctgatggttcatatataatgcatgaagatgaccatacatatatgtaacctttgcttgtccatataaaatccctcccagtgtttacacatgaatgaaggctcttatatttaacgaggatgacgagtaactaatgtccattttcataaatagtttacagaattgtttggtagtccatagggtctatatatagtttggaggataactggtttctgaaattgggaaaagtcaaaaccaatctccatctttagctttacaaaagcttttgcaggtaacattttcattttcctcaatgatcatctaatatagaaactctctggtcacggaagacgcttccctggagc

SEQ ID NO: 52672 - DNA, 956 bp, Ricinus communis
  Intron number 2 from transcript 30147.m014257 (locus 30147 .t000528) derived from phytozome v7.0 (chr-ID 30147; pos 1 233956 to 1234911 reverse strand)
aggagtttatactaccccaactccctttactccaggttttactcaatatctctgttcagaatttgaaatgctatttaacactaatgcatattttagaacgtgttctacttatcataacgctgatgttaattacttgctactgttaagtgtttgtttgcacaccgagcctgtaaaaatttatatctttgttcattcaatggtataaatttgcaaagtaaaatgaatgcatctcgtttttgcgttcccaactaagactatcttgaagttcttttattacataataagatgaactttatcttctccaagcctgttttatggccgactttgttgcattgaaaatgacctgtgtgattgttatgccactggcttttgttgggattttggattttagaaattgctctttatctctgaaatttaaaggtcatacatgtagggaaaaaacaaagtttatagagtttttgtgatttctgttaggagaaacagcacgatacattaatgtttgaaaaattaaagatagacgtgtgatattagaattttgacatatcaaaatgtatttcgtgtatcttttgatgagctttattggggttgcggagaaattattatatggacatgatctaccaatcttatcaaaaaagtaaaccaataaaacaagggcatttcgaccttttggaagttataaactgatatatgcaaatactgttaagattttcttaacaagcaattcctaaaagagcgaggtatcccattttcattgattcggtcattagatgaggtggtagatggtatccatgtaataatttcttgagttgtggacacagcaaatttttttgctcttctacaatttttgacctattgatgttgggttataagcatccaaaagatagtctgacctgaatttgctgaaatcattctctattgtaggtgtggaggctgttggagaggtcatagctgtaggc

SEQ ID NO: 52673 - DNA, 293 bp, Ricinus communis
  Intron number 1 from transcript 30147.m014257 (locus 30147 .t000528) derived from phytozome v7.0 (chr-ID 30147; pos 1 235000 to 1235292 reverse strand)
agcttggcggacctgaggttcttttgtgcttttcactctctttttcatccactttgtatttgttgattcttcttgtttatttgtggattattcattttgcgtgaagcaattggggttttaattggctgttctatttctgtatcatgctttcagttaggttttgatcaaattgtaagcttgtagtttggactggacttaaattcaggattttctttaatgagaacagaggggtttgatcttgacatgttaatatatatatatccatgaatgaaactaggtgctgaagtgggagg

SEQ ID NO: 52674 - DNA, 309 bp, Ricinus communis; identical to SEQ ID NO: 51949
  Intron number 1 from transcript 53289.m000013 (locus 53289 .t000001) derived from phytozome v7.0 (chr-ID 53289; pos 3 90 to 698)

SEQ ID NO: 52675 - DNA, 878 bp, Ricinus communis
  Intron number 3 from transcript 30147.m014070 (locus 30147 .t000341) derived from phytozome v7.0 (chr-ID 30147; pos 4 340532 to 4341409)
acatctatctgataagtgctgtaatagaattcgtaagatcagaaagctatttttctcttttatatttgcattacttctacaaggaatagattctttttttctttttcaattttcatttgtaatagtctccttgctgtcattcaagaaagctagcagcatgccttaactctccctactgagaaacacaaatgccaagagtcgcaatttgattgccgaattgcgcggtaaccacagccaactggcggtactgcaagttggttatgtcccaatccttatgagaatactattgagtaagaacagcaggatagagcagtaggactcaacagacactggaatctctgggtcctttgagagagacgagccaaaaaatgactggtccatctacacccagaatgtgccaatcacagggctctaatcttcggtaaccgtatttttagtacaaaatctagcctcactagatactatccagaccaaccataatactgtattaatgtttttaagaataatttgagtttcccaccaaaaaggggcaaaaagccagccaatagggagatagaaattaataacccatgctagattgtccaatcgaataaaattccaggccgctggctaggtcctacagcttgtgctcaagtgaagattgacaggtagaatttaattctctctatcaatgccggcctatggtccacttttagccatgccatgtgataagttggttaaacaagtgtataatcaatgaaattattcagaagcaccaccggaatctgtagattgaattccttttcaagttaaaatgtcattaaactaggagaagtactaacaaactctgaaaaattgaaacagggcctgttagtactcacagtccaagctcgctcgtc

SEQ ID NO: 52676 - DNA, 571 bp, Ricinus communis
  Intron number 1 from transcript 30170.m013988 (locus 30170 .t000400) derived from phytozome v7.0 (chr-ID 30170; pos 2 167508 to 2168078 reverse strand)
gtcttttctactgtctgtaattatataacagcaaggttagtaattgttttttgatattcttttttatcatggcatttattatatattttccttgaaaatctagattttattttgattgtggataagtatcttttgattttgttaatgattgattgtatgaatcttttagaagtgattagcctcaattgtatcgtaatccacaattgcaaaagagatctgaggaatttttttacatagtattttggattttgttaggttttttggtgtttatgattctaatttggacgcttgaatgattgttggaagaagtactactttttaactgtagaattcaaattcataagtttaattgaatgaaaaccttttagacttgtaattaagatctcccattcattatggaacttttaaatactagaagttgctggtttagaactcgatcgggtaataatattgctgtttttccaatttgttccttgttaattttattattgccttcgcttcctgtattaatttaggtatgtattgtgattttattaggcattttcaggttttgaggggtagtagttgggag

SEQ ID NO: 52677 - DNA, 956 bp, Ricinus communis
  Intron number 3 from transcript 30147.m014529 (locus 30147 .t000800) derived from phytozome v7.0 (chr-ID 30147; pos 2 454698 to 2455653 reverse strand)
atttttgttggaaaggtaaattgttatttaattatcattttctttctctaaacagttctagaattaaaatccggaaaaaaaaggggttatttctcttttctttttaattgtgtttttcttcgtttctgatttttctgttttaactggattaatgtttttgcaggctgataggaatttgaattttaaagaccgttactgggtcaaggcaagtgctttttcagcccaacattttatatataattatcattaggagactatgtagctaggcaacttaatttttggtcttgcatcattgtcatgctttccatttatcaactattcagtcatatcatgcccacttttgctaaatcatttgtgaaccctcttcttaattaataaagtcgtatacatgtttattcaccagctatcatcttaaatttctgtatcatctgaggtagcttttaggagttggtaattccattgtttcttcaaattcgctgtagagtttcattgagcttattgcagtacaatagtatgaagtcaaactgcatttcccattttgcttttctaaaacctactccatccattgtaaccttaaaggtgaaaatgtattataattgcatagacaggtttaaaagatatttcatatggcatgagtatcagttgactagatgatataattgtatgactttttaatcagaataaatgtcacttaagtttatgcggacttttttaatcatcttaactttgttttgttctccttatgagttatgactacttcagtatagttgcttcttttttcataattagtgcaatatccattgatgaacataattaaagaagtatttatcattaggcgtagatttttatgctttctttcttattttagaacattattgcagttcaatgtatatgtaatttgaagaaagttcgactctaaagataggttatcaacctcaattgtgaacttactgttg

SEQ ID NO: 52678 - DNA, 441 bp, Ricinus communis
  Intron number 2 from transcript 30190.m011325 (locus 30190 .t000561) derived from phytozome v7.0 (chr-ID 30190; pos 2 21255 to 221695)
actggtaaatatctagtaacatcaaccccactttgcataaaggtgtttttttatgttaatctgaaaagaaaaggaaaagaaaagagagttagatttttattttaagcaaacataaggtgaagaaagatcttggctctctatatgcatcttgataaattttcaggtggtatagtggcgcgtgggaatagatcttcatcttctttttgcatgcatgcaagcatacgatatggtattcaccaagtcaacttgatttgtgctttagtgaagtaaagtcgttagatctgtttaaatagatggttacatggtttagatctgctcttttggttttgatatttgtgcatctttttgttgttttcttatgttatttgatcttaattgtgagatggggtgcatgtgatcttcacaggctttacagtggagaaaccaggagcaagcatcgtt

SEQ ID NO: 52679 - DNA, 369 bp, Ricinus communis
  Intron number 2 from transcript 30147.m014252 (locus 30147 .t000523) derived from phytozome v7.0 (chr-ID 30147; pos 1 219117 to 1219485 reverse strand)
gcctccagaaaagcaattcttgattactcggagtaagttatgctatctttctccggctttttgtttgtaacattctctgtcagagttatgttatttacatctgtggaaattactaaactgatagtatttcttatacttttaagaaaaatttctgagaatttgatttgaatttgaagagagacgcaagctttagtcttgtgaacacagctatatctactcatggtccaatttgaataaacatggtgcaccataattagaatttttcttttatccctggaaaagattattcagtgactgcaatacattcatgactaaaggttgaacttccttttagttccttgtctacgaagagctgcatctgttgaagaa

SEQ ID NO: 52680 - DNA, 578 bp, Ricinus communis
  Intron number 1 from transcript 30147.m014252 (locus 30147 .t000523) derived from phytozome v7.0 (chr-ID 30147; pos 1 219500 to 1220077 reverse strand)
tcctacctggtcttggtaattttcttctttgcccattcctaatgttttccatttttcaattttgccctctcttttctttttaccctgattgttgcttaattagtgtgattttacttgttttaagctcgtttttgaggaattaagcgacttcgtatcttgtatagatctcacatttggatctttgatgattatgattattattttggccaagaattttttgaatattacatatcagtactgtttaatggaaattgaatcacattggtagtgtagggctaatgagattgccaagttacacccttttaagactttttttcactgtgatatgagctctggcatcaattaattacaataatattcatttctgtattggaaatagtttccagttgaatggcctttttgtttttgaatgaaagaattggggtttgggatcatttacggagttttctccttctgttcttttattctgaccatgccctttttatgtgaatcaggtttatgtcattgtatgattattgttttttgtttgttcttattttttcctgattaatagggaatcaggtgaaccaagcaagagg

SEQ ID NO: 52681 - DNA, 596 bp, Ricinus communis
  Intron number 1 from transcript 30190.m011116 (locus 30190 .t000352) derived from phytozome v7.0 (chr-ID 30190; pos 1 945205 to 1945800 reverse strand)
gagctcgcaagtctgactcacttctgtcatattgtttatcccaggtcaaaattctgctcctacaaataacactgcagatgatgttgatggtgagctgaatatattatttttctattccttttgggcaatttttgatatattgatgccatttttatctgaactcaaactcaaactcaaaccctgtggtgacttttgtgatcattgtcacttggctgttttatattttgttctgtattttcatcaatttatgtggaatacataatacctccatttcgtaattgcaattcttggggatacatgtggtgatatttggaaacagcttttgaactttaaagagtcaagattttggattgttctttcattatattggttcatttttcttttcaaaaatctcatctcacgtaaacagtttatttgcatgtttcttgagtgttgacatcataactggtacagggtataattcatcagttacttttataaaaaattcttatagacattatctccctgcctcacagatgagccattagagatactgaattgagcatctgtttcttttatcagaaaacgaattggagcaacccagcagcccatcattg

SEQ ID NO: 52682 - DNA, 657 bp, Ricinus communis
  Intron number 3 from transcript 30170.m014220 (locus 30170 .t000632) derived from phytozome v7.0 (chr-ID 30170; pos 2 287289 to 2287945 reverse strand)
tgtggtttctccgggtgtgtcagctcaaagctcaggtaaaataatttgatatagtattatattatattttatatgtatgcattgcctagcaagttagttatattgtaaataggtcaaaacaaggaattgaaaggttgtatcatatactatgctacttggtttggtatcatgttaagtgattttgtcttttgttgatgtcgttctcgtgtggatatttaggccttgtattataaaaaataataataacaaatgtgttaggtgcatgtgtgttaaggattttagtttttttcttttttttttttggttgttgttcacgggcacacaagttgcgcatagacaaggtaaaaggctcaaagatcaaaaagctgataaaggaaattgggtattttagatatgagacaaaagacgccattattgctttctcgcttttacttctataaagcttttttttttttttttttggaagttgaagctgttaaacatcagtagcattgcacatgcaccttcttttatcatgaaaaaagagaataccttttctattaccattttgtttttggttttaggttcttttattttaatattttcttttttctcggagtttggtttgattttcttgcctttttcttcctattatttctggcacagaattagcagaga

SEQ ID NO: 52683 - DNA, 467 bp, Ricinus communis
  Intron number 2 from transcript 30174.m009001 (locus 30174 .t000398) derived from phytozome v7.0 (chr-ID 30174; pos 1 483465 to 1483931)
cttgtcattcaacttcacggtattcttggaaacaggtaagactttctttaaggagggagcagagtacactaacagtacaaactgaaaatttcttgatagtttaactagttgattcatgctcaagatttggaacatactatgatctgtatatatgtgtgtgttgtggcattctgtgcaaagattaaaagttatactttcagctccttggtctaatcttctaactcatgtcaaaccaaataatttaattgcagcagaaacttgaatcatctgtggttgcaataaatcaactcttaaagattaatgcaaacttatcattgtaaggaaattattggaagtcaaatctctatcagtgaactgtttatacatgttatgtggggcattgtgcagtttcctgattaactcaaaagagtgatattttcgcatgttatttaggtgggctgccattgcctctcaactaccaggtagga

SEQ ID NO: 52684 - DNA, 644 bp, Ricinus communis
  Intron number 2 from transcript 30190.m011167 (locus 30190 .t000403) derived from phytozome v7.0 (chr-ID 30190; pos 2 315764 to 2316407 reverse strand)
aaaatagtggttctgcaaggggaagaaaatacaaggtatcaaatacattaattaagggtcataaacatattttatacgtaatttccactttttatattggatttaccactttgggcctaaagtgtgatagtgctggaagaatcttttctttctacacctttgtactttgtttccttggggttgctaatcattaatttgctacaattcaaaaaacatgatgagcatgttacatgcacataatatgtatataatatcccaaaagtcatctcataaatgcttgttttagttattctgattacaacttataattgtaacagctagctaaattttcctggcattattgaaaataaatcccctccggacaaaataattacttaaatgcttaaatttctttcctagaatgctctatgtcaaagagatttaacttgccaagaacttgctttctcggcttacctttcttcatataaattagactttatttttagaggataaggatggatgccaaaagtaaaacagaaatccgcggaaagttgtttgactgcatttcaataataacatcctcatacttttttccaaaatcaattcggctctattttttaatgcacttaatctgtatatgacactgcattttctgttgcagtgtt

SEQ ID NO: 52685 - DNA, 403 bp, Ricinus communis
  Intron number 3 from transcript 30147.m014187 (locus 30147 .t000458) derived from phytozome v7.0 (chr-ID 30147; pos 8 56439 to 856841)
tggtagcaaaatcttgcgtatcctcaaggctcgtattattcttttcctttctttattgttttgtggttcatttatgtaatagtatttgcttcttttttaggcaaatataacaaatgctattacttgaatgattgcttgggctttattttcatgtgaatttggaaaaaactttctcctgcctgtttgaatttttcaatttaatagagttcagaattagcactgaaagtttaacaaactaagtgcgccagtctaaatttgtatctgtacttaatttgattcagaggtatattagcctcttatttctttgacaaaattgaaaccatcagccctaacttgcttttatgttcgcttaatgatttgttgattaggtcttgcgcctgaaattcctgaggatttgtaccat

SEQ ID NO: 52686 - DNA, 524 bp, Ricinus communis
  Intron number 2 from transcript 30147.m014105 (locus 30147 .t000376) derived from phytozome v7.0 (chr-ID 30147; pos 4 542590 to 4543113)
ccggtataacttgtttttctttctctatgttattattattactactccgatcattgttcttgttgttgtgttgttagtgttattattattattagtagtagtagcgttcagtgtttgggaaattacaatgcatttggtggaacatataaaaaaagaaaaatcaaagtttgagaattagaaattaaaatttttaactcgtgatttttttcagttcataaattgcatcacatcttcaaagatggtatgaatggatattttcttttagacgtgatttagacacaagatgtaaatgaggtgcgggagttagcgttcatgtgtgtgtctcactggtgaaaattgactagttctgtcttccatttgtttttttcatttactttatataacaacagtttttcatctttatccttcaaagtagtcatcaaacatgcttccaattgcttgatcaatactttttgtgctctctctaactattttgttgccccttttcagagactgctttgaagcttgacactttagttggtgat

SEQ ID NO: 52687 - DNA, 781 bp, Ricinus communis
  Intron number 1 from transcript 30147.m014057 (locus 30147 .t000328) derived from phytozome v7.0 (chr-ID 30147; pos 4 261688 to 4262468)
tattgatttcggtctctccgtgtttttcaagccaggttcttttttcttttttaatatttagttatcgtccttcttattactttcatgaaaaagattctggcttgatgattttcttagtgatggttaagtatttgagttgtggttctgaagtgggcttttcaagccagtttttcttttttcttttttttttttttttgggttttcctttttcaatatttagttatcatttttgttagaatttttaccaaaatgattttggcttgatgattctaatggtggctgtatatttgagtaactttgtgaagtgggttttatctgattataggaatttttctctgcttgaactttgcgtttcagactttatcattttttttttctgaaacatttttctttaatgattcttctttcagaaaaaaaaaattgactttatgattttttggtggtgatcgagtattcagttagcttgtgaactgggttttctttgattatggtttatagctggatctagtgctcgaaccttgagtttgggttttaactgggacttagttaactgttagaatttggagttttgggcggataattttgtactttcttttgtttgattatttattgaagtttgatttaaggggtcaaggatgcaaacgactttgtatatttttacaatttaccgtctccgtccccctatcttttatgtttctctttacatgattctggtaggaagtctcagatctgaatgtttatgacaggggagagattttcagagattgttgggagtccatat

SEQ ID NO: 52688 - DNA, 317 bp, Ricinus communis
  Intron number 2 from transcript 30147.m014166 (locus 30147 .t000437) derived from phytozome v7.0 (chr-ID 30147; pos 7 33800 to 734116 reverse strand)
gactctgaagtaacttcagcaggtaatattcacacaagtatttccaaagagatttagcttattttcagtatcattaaaacacacattatgacatttttgaattaatttgcaaaaatgacttctgtaccagcaagtacggaaactccgttttgggtttactgttctataattctacagtataacaattgccttatctctttaactcatttcttgatttgcatgaattaaaagcttaatggcgtttcttcttattttgttaatcttcgtgttgttcatgaccagcaggatcagaaatatatagtgaagcaagatcacaa

SEQ ID NO: 52689 - DNA, 651 bp, Ricinus communis
  Intron number 1 from transcript 30178.m000855 (locus 30178 .t000017) derived from phytozome v7.0 (chr-ID 30178; pos 1 28745 to 129395)
accttactggatatcctcttggtgttaaacaacaggttcctttctctttccttcactgcaattctatttcttttatataattttatttgatttttctttattacttttttttcggttctcttttctttatgaaatttcagtttccaggaaagtcatcctggctgtagttttaattgttttactaaatattgagacaattattgatgagttctggtaattacataggagttaattctttttcttgagctggtttggagtttgaattgcatagttatgtcttaaatataattaggagcttttcagtactgttcaagttgtcttcatgcgcaagagttcaatcgaattgtattcttccaaaaacatactacttttgacaaatttttttttttcaaaatactttgtttttaagttgaaataatcaaattctataaattatgagctttccaaacatgagagttcactaaaatgctcaagcttttgggttgaagggttctttgaaactagtcacatccacagtgcactaatgattatgtttttctttatatttcagtttttttgcgtttagcttgatgatttatgccatatgatgccaaaataatgtcggttgcctgttcttattacttgaatcaacattccaggtgataggtatta

SEQ ID NO: 52690 - DNA, 1001 bp, Ricinus communis
  Intron number 1 from transcript 30170.m014384 (locus 30170 .t000796) derived from phytozome v7.0 (chr-ID 30170; pos 3 567548 to 3568548)
tctacacaagtttccaaggtatggcctaaacccaaacgattcctgcatattccaatttcagttttcaagcgtttcatgtgcttaaaaaaaaatttctttttgtaatctttttatttatttattttaagaatcagaatctcttatcaacatagtaaaattttcctactgcttattctctttaagtcccttactatatcgtgatgtagctcagtcttactatatcgtgatgtagctcagtctgacaaatgctctcatagaaaatgtctagcttgaattccacttaacgaacagaagaagtgtacttttctcattccaaatccaaaatttatcagaacatctgtccctttccagagaatagaaaacttgtctgttaaaatctgacaaccaaaatgcagtgtcatgtgttccaccgtacacagggctttggtacaatatcatgacccatacattcactacatataacaacagaatataaaaattgagcactattatacaaccctgaccctgaccctgacccagactcaccatgaattctagatactcaaaaagcaatttcatttatgaaaaacaagaaaatgtgaatgtacacaagcaagtggagagcgcatcaagagaatgtaggatcaatcattaacaagcagtgaagttttgcataagaaaaaaaaaaagaaaagaatcttttctattaattaaaccacattatgcaaatcatatataaaatgtcactacacatcatctaaaagaaaaagaaaaagaagaagaaatgaaatgatcaaagatttaactgtaatttcacgtaaccagcgagaaaactgaaacccaaaaaatatcagtcaaatgctaaaaattatgggattccaaaatgaagtgatagtctgcaagtttcttttctaagagaatttatcattttcttgactgatcctatttccagattgttaattagttcttaaagaaattttacatgaaaagtaaagatttatcttctacctttctgttgcagc

SEQ ID NO: 52691 - DNA, 784 bp, Ricinus communis
  Intron number 2 from transcript 30153.m000746 (locus 30153 .t000012) derived from phytozome v7.0 (chr-ID 30153; pos 6 72174 to 672957 reverse strand)
acacggacagctctcagcaaataatcaggggtaagttttgatctgttatttttaagcaaattatagcatatccttatgactggaaaaattgtttatttcattcgtaatatgttataatatatatatatgtacatttaattttaagctagtttttggaattaccacggtatcgtaattagacattttcttgcaaaaatgagttggactaagactcatttgcatgttatgctaggtgtgaggaaagatgttgaaaattataaaggtgttgaaaattatatttgtgcgatattcgctaatgttataatttagatatatatgtaatgaacaccttttatttctttattttttctagtttttaggaatgagttttatctaattccatatatcattatagatatatatgaattccatatatattcttttctttttttaagctagcttttaggaacaaattttatcaaaattcattaattattttttatttatataaatctgttcaatattagatatatacatcttctttctttttctttgatctagattttgaaagcaatttatacccaagttcatttatcattcatgatttataaaaatgttgtatttatgctacatctgctaagttattgtttgctataatataaatatatgtggattatattttcttttcttttctttttcagttagcttttggaaatgaattctatctagacatatttatcattcctgatctataaaattctgttcaatgttgctttctgcagaatcagaaactacaaccaagaat

SEQ ID NO: 52692 - DNA, 540 bp, Ricinus communis
  Intron number 3 from transcript 30174.m008683 (locus 30174 .t000080) derived from phytozome v7.0 (chr-ID 30174; pos 2 161181 to 2161720)
caattcaggttatcctattgatctatcgattttgctgcctctaacatttaatagtaaaattttagtggagtgggaaatgggactgcttcactgaaggtttttgaatgttttgttctttaacttcgtaatccaatcctctcgcatgcgcctttcaagtgtgtactcgagctaaagccatttccagagtgcaggttgagatttgtttgacaaagtatttaaagttcttttggaaattgggcagtttattccctttgttttcttaaaaaaaagtgttctgaaaatattttatgccggagagatattatattggtaaatgttttttgttgtataatacttggcttaatttaacttttgactaactcatgattgatgagcataggatttaatgggttgacctttatagacagcagtccttttgctaaaaaggacattttcctttgattgttgcagaaattaagaagaggaattttctgatagtggtctgcaaatatgttttagtatctaccttattgtaattcttttggcaggttttttcagtca

SEQ ID NO: 52693 - DNA, 972 bp, Ricinus communis
  Intron number 1 from transcript 30190.m010908 (locus 30190 .t000144) derived from phytozome v7.0 (chr-ID 30190; pos 6 12448 to 613419)
ggccaaaaagcagtgaaaaacaacaaattcccaaggtttgtcattattcctctctttgatttatatatatatatattttctcttttcccctcttcgaatttctgttaaaattaactatgcaattaacttaattatcactagaccccaccatgtatatgcttcttgatcctttaggccgcaaagcaaagatccttcaagatctgccagcagataagagaaacttgcttttagactagggttatggtatttgaaattttggatgcatgcatcttttttattttataaacaccattccacgcctgccccaagaaaaatatgggaagtcatggcagccatactcgatttgttttagggtttcttttgcccgtcaccacccccctccccctgccccccgccgatagcttgtttgcactactgtttagtattttggtctctaatacctagactctggactatttgttgcatcaaagagtaagaaaaagagttggtcgctagtcttagattttgtactttattaacttgaattgaatctaggatgttctgtcattggagcaactgttcttatagacggttcggtaacgttaattgatttctaactttgttgtgttagttaatcagagattacatatccattgcttgccaaacactggaacgagatgccgccaattaatacagtccttccatttctagtagctttctctattatccaatatcaggcacttaagtttatttggattttgatagctaatgtatatgttatttcaatcataattctattataattaccgagccccagattaaaggactgcaaaacttactacatatacacaagtaaagtagatgtgtttgtatgaccaaatacacaagcacattaagtttcattattgtttcacattttatgttgaacagctgcaatgattatgatgcttaaatttttgttgttttggttggcatttgcagaagctactatcg

SEQ ID NO: 52694 - DNA, 849 bp, Ricinus communis
  Intron number 1 from transcript 30174.m009045 (locus 30174 .t000442) derived from phytozome v7.0 (chr-ID 30174; pos 2 724180 to 2725028)
ggttggcctgtatgtgcagcaattgttttttcttttgcttactacgattgctccgcaaatctgacttttttagttagtgatatttggtttcttttctaattgaaaattatttactcttctaaacactatctgtagaaacgaaaaatggtttctttgtgatctttctgccaagttctaatggaattaacatgtttgatattattcttctattcactgattgtcataaagagttctcgctttcatgtgtgattattttgtggtcagtgttgcctgatgtggcttgtttttgtgagttatactatccttaatagctaattaaacgtttgatgaatgaataatgatgtttattttatgttaggaacaaaactgcaaaatctattttagtttctgggatgaattctcatgcttcactgattcattccaaggaaggaatccagacttcattttttgcttttgatcataaaagttttgtttccttctgattatcacaatgtattgattctcgcagctttaatatctacatcctgttagcatcatgatttcactatggtcttgcaatttatatgtggagtgttttactttgatagcaaatttatatcttgtacctctctagagttagatctttctgctcttcatacaattcaagaatatgtagctcaaagctctgggttttctatttctgactgaaaaagtggattctcctgagtttataaccatgattagtgccgttttctcgattggtttttagaaaaatgatacgacagaaacatggataataggctaaaacctttattaaatctaattcgggttgcaggaacgcccagacaactggcgaaatagtgcagtaca

SEQ ID NO: 52695 - DNA, 861 bp, Ricinus communis
  Intron number 2 from transcript 30170.m013942 (locus 30170 .t000354) derived from phytozome v7.0 (chr-ID 30170; pos 1 892551 to 1893411 reverse strand)
ttattgttctcaattcaactgacgttgctaaagaggtccgtcttctttttatgcttttatctactgagctaatactaaaatttcaagtctcttttcagtgaaaatgactgattattaaattaattttgctcgactttagaattcaattgattaggataagtccaaattgttggtcctctcccaaattttgctggctgtagtgtacctttgcattgtctgttttttttacgctgtctggtactgggatgaaatatgatttctgttacatcatcacttaccaaagaatgtgtcgtggggctacattactttgaactaatctgctgtttggtacttagattgaaattaaatattatttctttcaggtcattggctttagtttcttatgctaaagaatgcgcagttgcatactgtagttattctgtttgcaacactaaccagtctagagaatattacctgtggttggctagcccaagtaaatcagatttagcctatcattgacaacctaagcccttttacagcttatacccaaatactagttcttgcaatcagaaagatttctttcataaagtttatatttgttttctatgtctccattattcttccagttgccatggatcttatataagcatggtaattgttccttatttagatgtcagaacaaataaattatcattgcacttttgatgtgttgtaaattttctacagattttttatatttgttctttggttatagttgtttatgtacttgtggtaaagtagcatcttatttctcttgctgaacaaaaatgctacacagatttttaaatgcttgtcttgttatttagagaaaacaaaaattgattttcctgtttatttcaggcc

SEQ ID NO: 52696 - DNA, 615 bp, Ricinus communis
  Intron number 1 from transcript 30147.m014212 (locus 30147 .t000483) derived from phytozome v7.0 (chr-ID 30147; pos 9 88656 to 989270 reverse strand)
atactactgcctctcctcttggtgttcctcagcaggttcttcttcttcttctttttttttttttttttttttttttgctttcttgtgtatttattctgttagaatgacttaacttatgtttttcccttttcttctgttataatctctactttggatctactgagaagcttgtataagaaccttttgtaacatgggttttgtttgttatgcgatttatttccaagtaaatattatgtctcttcttgtgtaggataaatgggtttcagttttaatgaagaggatgaaagccgaacatgagatcttttgtttgttgttttgaatttctttcagtgctaagtgggaatgagtgttactgggttggtttatattaaatgattccattattagtgattttactattactgaaaatcttatgtttctagcagttactcttaggctggtgatttgtttaagtttatgtccttttcttttattaggttgtagttgagttaggctttaatgattggcttattcctcataccattaaaatgaagatattattgaataaaaaactcggaatattttcgacattttgtaattattttggtcgcttatgattacaggttatagcggtta

SEQ ID NO: 52697 - DNA, 691 bp, Ricinus communis
  Intron number 2 from transcript 30184.m001169 (locus 30184 .t000013) derived from phytozome v7.0 (chr-ID 30184; pos 6 03101 to 603791 reverse strand)
atataatccctcatattctcaacttgtaagtttttccccattgcttctctctgtaatatagtgctgtatggattattgttcctagtgttaccttatttggtatgacttgtctcgtttgatttgaagtattgcacttagactgaagcgggaggtagttaattttcgatgaatttacgattaggtagcatttcagagccaattaaggcaagcttttatataaagccaacaagtattagatgcgtagttaaattcaatattggcgattgatggagactttagactttgagttgggagctacaaaaaacttggatgtttttatagaatttattgttgcgagggcgattttgttgccatttgttgcaatgtcaattagttcacttggttttgttctgagaaaatggctttcaaaaatgttaagaagcatgaaatttttgtgttttccataggctatagaccttttattaatgcttagcccgttaaaatactgagtgaggatcatatagttgatgtaaatttgagaatggaatgccctaattatgtgctaagattgtgcttggttatgcatttgttatcaatcattatatttagcttggagatgaatctatgtttcattaaaattgcacttcattttaaatttcttcatttatcagttcaaaatcttcatgaaattgttttgttgattgtttcagat

SEQ ID NO: 52698 - DNA, 920 bp, Ricinus communis
  Intron number 2 from transcript 30171.m000408 (locus 30171 .t000005) derived from phytozome v7.0 (chr-ID 30171; pos 1 08742 to 109661 reverse strand)
tgcaagttgcgccctttgacagaactgttgaacaggtctttctctctctctctctctgtcatgcttgtttcttgttctttttttcttttttcttttgaaattgtgttaatgtctgttctttcatttacttgtttgttaccattttgacattttactgatctttctttctatcttctctgcattgtacactgctttctttctttcttgggtatcatcaacttataacattctttttcaatctgttgtttttgcaagttgagatttttttttttctcttttggatgatgggatgctggttattcataaattacgttatcagtttgtgggttcttcttcaattaatcaaactcactcattgaactctaatttttcgttgtgttctttttttggttttcttaaagctttttgagtggagactgattagcctttcctcttttgtaattagaactcacattatatcatctaaaggaaaactccttgtgtttattgatttctagatgagatacttattttaattctttttagttactggtatattagaatttctcataaaagatttcacatacttgtttcttcttttccattcttgttagcaatttactttctttttgcactagctggaaaatttgattaaatttccgcaatttttgctttgtgggctctcctttggttgtattactcccgcaatttcattcctccactggctcatttacttagagcttccaattttcattttgattatgctcttgatcaatttagctgcatgactatgctaccttgttattttttttaatatctgtttgtaatatacatggattaatttacttatcttatttttttttctgaggtgggagactgataaaagttacttttaatggctttcaggcaattttggctttgaagaaaggtgcacatctttt

SEQ ID NO: 52699 - DNA, 714 bp, Ricinus communis
  Intron number 1 from transcript 30171.m000408 (locus 30171 .t000005) derived from phytozome v7.0 (chr-ID 30171; pos 1 09633 to 110346 reverse strand)
tggtaataatactaatattattaaataaattacttaaagaaggaaattatagaaataaataaataaatttataagaaaatcaaaattttcatgtgttggagtgtacacgtgcacatgggtttagttttacttaatataaacacccagtctccttctctgtcctctcttctaatcctttgtgcacgacttacaaagtgaacaaaaacagtaatggaagtaacatattcagtggtataaagaattaatagggagaaaccaatattaagtgcaaaaagaaaacaagaagacagctctttttttcttttaaatttttttattctttaatatgttatatttgcatatatacaggacagtagtggtggtggtggttgttgatgttgttgttgttgcgcctgttgcagaggtactctgttgagttcagagcagagatagccattattttgtagttttattacttctcttttctttttctcttcttgttttacagacacatatactcaaatcacacattctgctgtacaagttactcataaggttccctcatggggatgccaactcctcttcaccttctgcttctcttgtcacttccctaaataattctctctcctctctctctctctctctctctgtatatccaatgtttctttcttgaaattttgtctgtcaaatatggttgaagaatccttgcaagttgcgccctttgacagaactgtt

SEQ ID NO: 52700 - DNA, 432 bp, Ricinus communis
  Intron number 3 from transcript 30184.m001172 (locus 30184 .t000016) derived from phytozome v7.0 (chr-ID 30184; pos 7 43744 to 744175 reverse strand)
taaacctaaaccggggctatccactaagaattgtacaacagtttatgaatgtctacgcggtggacttgattttataaaaaatgatgagaacgtgaactgctaaccatttattcattggagagaccgtttcttattttgtgccaaagcaaattataaagcacaagctgaaacaagtgaaatcaaaggacattatttgaatgttactgcaagtacatgcaaagaaattatcaaaagggttgtatttgctaaagaattaggagttcctatcataatgcatgactacttaacagggggattcactgcaaatactatattggctcattattgctgagataatggtttacttcttcacattcaccgcgcaatgcatgcagttattaatagacagaagaatattatgtgcattttcgtgtactagctaagacattacgt

SEQ ID NO: 52701 - DNA, 549 bp, Ricinus communis
  Intron number 1 from transcript 30169.m006512 (locus 30169 .t000289) derived from phytozome v7.0 (chr-ID 30169; pos 1 617600 to 1618148)
aaagaaaaggtaaaaatagattttcattttatttttctgataaatatataaactaaataaatcgaacttattagtaaattaaaattatgatatacctgggaaaaactttttagatgatttatcttttattttcacccctttaaaatattgtcactaaaaaagaaatagctttctttcatttcatttttttttcctccgctttccctctgttaccatcaaaacaaacaaagtgttatgtttggaccactcatagcgtgcaaagttgacttgattaaaacagtttaatggtaccaagttccttcactttcagataggaaagtgacaccctccgagaacaagatcattgattttcagaaactaatcaaatatgccattatcccaaattagttgtttcaaatttctcttttctttttctcattcttcttccttaatgccaacatcaaatctttcctttcctgttctttcaacttttctttttgttcttgtattatccctcacaacatgcaatgcccaggttacccatttctgtcctccatcttcttgtggcaa

SEQ ID NO: 52702 - DNA, 783 bp, Ricinus communis
  Intron number 1 from transcript 30184.m001157 (locus 30184 .t000001) derived from phytozome v7.0 (chr-ID 30184; pos 2 93506 to 294288 reverse strand)
tcaatacaaggtacacaagatagtttcttgagaatatagaatcatattttcgcaacactacaagaaactagcagttcatcggtattaagggcaaatcgtcggtaaatataatactgaaggattaaaattaaaaaaaaattattagtaaatttgtggtcagtaaatcattactgacaaaatcacagaccgtcggtaaattaccaaaaacagaaatcatcgctaattggtcagagaggttgtcgctaaattgtctttctttttgttaattggagacaagttaccgacagatatattatcaaaaagccgttagtaaattatacatattagcaacattttgtgtaacctcaattactaatttgaatgagatttaacaacgttttttgttttacaggaaatcgttggcacttaatttaattttttttagaagaaaaaagagaaaaatttctagacctgtcggtaatctgtcagtaaattattgaaatttttattatatatgaataaatttattgaataataattatcaagacgctaaatgtttgcaaaattaattgtatattaaaaaaatttagaaagtaaaaacaattgtatgagacatatatgttataatgatataaaaaaatagtaagtgtcaaaagttgtaatacaatgtaaatgtcaaaaataattaatgagttggtgactcatcgtcaccaaaatactggggagggagctgagctgaggtagaggttgagactgaggttgagctgggcaaatctcctggatctagggggcaaggtcttgcaa

SEQ ID NO: 52703 - DNA, 440 bp, Ricinus communis
  Intron number 1 from transcript 30174.m008811 (locus 30174 .t000208) derived from phytozome v7.0 (chr-ID 30174; pos 4 16777 to 417216)
acaacctcgactctgtttttcgagaactttgtaaggtatgtatcttctgcttttagtatactaacactttcgctcttgcactctgatcattaattttcttttaattatcaggtttacttcactgaaaccctaacatatcgcaaatttttttggctacatggattcttgttgatcttcctttttttatttttggttaaaatgagattaggtttcttgaatatttttgatctcttgagatttcggtgcttctttttcattattttcttaaaaaaaggaaaaactaataaaagtcgattaactatttagattttgttcgagcttaacagggagttacatagttgttttagcaactagatagtaaaacgaaagattcaagctgtcagtattagtttgtatatatgccattgttcactggagttctcactggcagtttactgaaa

SEQ ID NO: 52704 - DNA, 606 bp, Ricinus communis
  Intron number 1 from transcript 30170.m014227 (locus 30170 .t000639) derived from phytozome v7.0 (chr-ID 30170; pos 3 883349 to 3883954 reverse strand)
gggttcgtgcacttaactaacgatatgcacgcctcgttataaccatacaattagggttttgtttctgtctctaacagatttttgcgaaccgttttgttgttctgctttatctttcttatcgaaattaactgccgttcttttgctaaagaagctgagttcattatctatttttaacaacccaagcccaatcaagaggtgtgggatgaaaggcggataagagagctttttttattaacaatttaattattgaacgatttattcactgagtggattcgcttactggttgtttggatgctggggaacataacagaaaaaaagaaactataagaactgcatgttgtaaatagctgatgatatactgcggttatttcaatatttgctgcttagacctactgaagtaggttttcagagcggccattgttgcttctgtccctacaaccttttgcatacggtttcattaattctgctttagctctgttgcccaactgaaatattgtctgtttgattaagaggctgactagtagtctaatcaattaactataaattcacacaatgcatgggaatgtatcaaaaatttaaggccactagtttgcttctgttttagat

SEQ ID NO: 52705 - DNA, 120 bp, Ricinus communis
  Intron number 3 from transcript 30190.m010964 (locus 30190 .t000200) derived from phytozome v7.0 (chr-ID 30190; pos 9 85558 to 985677 reverse strand)
atcccaatgtaattactataccttgtctcaaactcaataattttgagtgttctctcctttttttgtgtttgtttgtaatcttttcttttcatttatttgtttagttatttgtgtctgcag

SEQ ID NO: 52706 - DNA, 778 bp, Ricinus communis
  Intron number 2 from transcript 30204.m001830 (locus 30204 .t000099) derived from phytozome v7.0 (chr-ID 30204; pos 6 84120 to 684897)
agtgaacccattagttatagaattggacgaactgggtatgtgaatgttattctttaacttttatgcacgtgtttataattgtgtatttgcattgttaactaccgcaatatttagcttggatgaaaattttctgatctagtttacattggtgatttctatgataaaacttgacctctatgagtagaagaattccagtttatttgctgttagtgtaactgttaggctaaaaatatatattcttttcacatttgttatgattatcgtttttgtcaattctgtgacattggtgcatcttttgatctgattagttatagaattttgaaatatagtctagaaatagtcttttatgtttaatatgatttttctttttctttttttttttacattggtgtttcatttgatacaattaattataagattttgaaatgtgggctagaaatatcaattctttttatttgattttgatatgactagttatagaattttgtgattcggtttatattggtgcttcctccaataaaactagatctatatacatagaagaaagatgatgaaatacagtttttgatattccagtatctttgcaaatcggaacagttaggatagaaatatattcttttccaatttaataagagcgagtgggaaaagtatttttactttttgtcaattttgtaacaagttctttatccttaaattgaacataagttatatgtgttggggaatttttctaatttccctttcaggtgcccaaggaccccagatacagaaggtactggaa

SEQ ID NO: 52707 - DNA, 403 bp, Ricinus communis
  Intron number 1 from transcript 30174.m008744 (locus 30174 .t000141) derived from phytozome v7.0 (chr-ID 30174; pos 2 642894 to 2643296)
aagaggtgcttgaagattggaagagaaaaagacaggtgagcattatgttaccagtaccagataaaatgcagctttattgtcttattgtttcttttgtttgaattttaatctttaggtttgatattctgaatgtatcaagaaatggtttagatagtagcttagggtcaaatttgaggcatgaattaataatagaaattcaaagcatgtgaaatcttcaggctcttttctgtagtctaattattagcttgactcacctgagaatttagagttggtttcagacctcttctttcttccttcttttcacttgtgatttccacgttgtaactgttacattggatgcataatctcgcctgttaaaatattaccaggatattgaagtgaacaatcgtaaggttaaagtgca

SEQ ID NO: 52708 - DNA, 566 bp, Ricinus communis
  Intron number 1 from transcript 30204.m001832 (locus 30204 .t000101) derived from phytozome v7.0 (chr-ID 30204; pos 7 31697 to 732262 reverse strand)
aaacaagtataatatgataaactttatcagcttgtctggccaatgcatgcccctagtgggcatggttacgtggtaccctctatcatttgctttatcttgccattagccttctttatccactgggggatgcatgctggagtatcaagtatgaagaataagtttataaattgatccatagaacaacttcaataaattaaatattggatataactaacaatgtaagttggtacctggctgtttacagggaatggtaataccagaaatattatcttattcagcatccatttgtttggtttacttggcatacttatagatttagtttgacaatcttttcctttcgatatctctgtatgttcattgacattgaaaagacaaacaaacctctttcttgccattttaattatttatatagataattggaagggtttgtttgcagcacaaatgcaatatatgaattttgaatcttatgcatagcaaacaaatgatacaattaattgatgaagtaaaccctcaacactcttggctttgcaggctgctgctgtcactctggttgttggatctcttgt

SEQ ID NO: 52709 - DNA, 485 bp, Ricinus communis
  Intron number 1 from transcript 30152.m002419 (locus 30152 .t000040) derived from phytozome v7.0 (chr-ID 30152; pos 1 445196 to 1445680)
gtgcttgatcaggtcaaaggtaggaggtaagctcgaccatattatttaaactccaaacatctgtgacgtctaacatgcccattgatgtttcgtacatcgcatcctttataatgacagctgtttatcatttataccttgccgaagggcaatttcaaccttgtgttcttgaatgttttgttagtgatattaagggttatttttggcatctagtatgactataaagtcaacattttttcctttcttaaacactttgtgccgttttcaagtttcttagtgcttttctcgctctctcttctttagcgtattttgatatttagaactgcctcctgcctcgcaagtcccaatttttcaccaataagcgcctttaatctcttttggttcttcttccttcttctttgttatggatttttgcactgtttctttaggcttttgaattctttactgttatagaatcatcctagccttcctctctttaccgagattct

SEQ ID NO: 52710 - DNA, 580 bp, Ricinus communis
  Intron number 1 from transcript 30170.m014085 (locus 30170 .t000497) derived from phytozome v7.0 (chr-ID 30170; pos 2 728667 to 2729246 reverse strand)
cctggacccaaaacatcactttgtgagtactctttctctctctttctctctcaaactataagctttatttctccaatgaaggtagctagctgttacactaccatcatgaattaacttttggatttccgaatctatctttttcttttgttgcccttgttttagtttttccttccttttctttattgatttgatgtacatcaatcaaaaaaatttcgcaagagctgcatgtagtttttgttaaatcatcaaatgattccatttcaacttggaaatgttttactaagggtgattactatatagctagcttctatgatacaagaaatttttttggttcagataatatccattaaacaaaataaacaatgcagagagaaactatagatcatctactctctatatattcttttctttttctctttttcttcatcatatagttgctgggcctgctttgatttccataatgtaactggtctttctaatggatttaaagaagtaatcaattaatgtagttgttcctctatttaatttttcttttctttctttttctttaattgaagaagtactggaaatctcaacaata

SEQ ID NO: 52711 - DNA, 561 bp, Ricinus communis
  Intron number 1 from transcript 30170.m014301 (locus 30170 .t000713) derived from phytozome v7.0 (chr-ID 30170; pos 3 810891 to 3811451)
gagctctggactcattttcatagacttcctactaggtaattcaaaccctaacctcgcaatgttttgattctgtttcggttcagaggaaacaaagtgaagaatgtgattttggagataaatttgatacttaaacaaaattctagtgcttgtttaacatgaaagacattatagaaaattgtacgctacttttttgattcactagactaatgatctctctttctaaaatggagatgcctggaatttatatgattctgtttccttcaaaaacatggcagttttgcatattctgctgtttttctttgattttctcgagataaaattgattccagatggataaacaagctaatcagatgttatgttggattttgtctctaagtggatttttttttagcaagcatagcctatcagttttaaaaccttttgtttaatcttttttttttttttaataatctgtttgagtcaattctgtaaagttgattggctggacaggtggtgatgttagttttaattacattatattgtttcttttgtttgtaagtgatctaattgcttgttttaggt

SEQ ID NO: 52712 - DNA, 385 bp, Ricinus communis
  Intron number 2 from transcript 30170.m014315 (locus 30170 .t000727) derived from phytozome v7.0 (chr-ID 30170; pos 3 900421 to 3900805 reverse strand)
attctgctgattctaagccacccagcagctctctggtagcctttcattttttaatatttatttcttttctttgtgtttgttacatgtatgcaattaatctaactttcttgagtactagtagaatacgggatccttctcgagggattgcaatacattttcttttaactaagcaggttgtcatttaagtgcaatttcctaatctctttattttaactgtgttgaataggataagaattggatacaattagtgagtcatttttatatgtagaaactataaccttttacagttctatgcttgctttgctaggattatgtttgaatttgaattttgaatgtcctctttcaaatttgcagccgaagaccaggaaagatattctgttagagt

SEQ ID NO: 52713 - DNA, 818 bp, Ricinus communis
  Intron number 3 from transcript 30174.m008701 (locus 30174 .t000098) derived from phytozome v7.0 (chr-ID 30174; pos 2 271742 to 2272559)
tccatatttgaggatttgacgcaaggtattgcattacctcatgatgcttttttttttccttgatagttaccactatcatatttatagtcatatgcatacattttttgttctttgattatcattgaaagatgcgcccacaattttactttgaaaaggacaagctgcatcttacattttgcttattccaaaactcttctctagacttttaagtggcatgcctttttatttagagaatagagttatctctatttcagaagttgtactattcttctaccagcagttcaaaaagttcccccgttttccttttgtttgcaataacctaacagagctagccttcatgctacactatactgtcctcagaaagatgatgaaatttaatcttgtcagcatttattaaacactttctttaaaatgagtgtagttgtctttatatttaaaaagtatccacttgttagtaatttgcatgaaatagctacctgcattttgcgtgtaattgtctctgccccccgttgattattttatacttgtgcacttctatgcaattgttttagtttttctcttcccaatgtttgtattttggaatacatgaatgaaaagctaagtaaattctaattgcttgaaaatcataatctgtttgtttttatctatttattatatttatttatcattatagagacaaaagaagccttctttaggtttattttaagcatatccgacattactgcattaattcttttttaaatggtgaagtatgtctgagtctttgatttatcttcatttcagatcaagattctgttcgactattggctgtagagggt

SEQ ID NO: 52714 - DNA, 810 bp, Ricinus communis
  Intron number 3 from transcript 30152.m002424 (locus 30152 .t000045) derived from phytozome v7.0 (chr-ID 30152; pos 1 519406 to 1520215)
tggcaaccatatctcaagacccagattcataggaggtgggaattgtaggcaggtgtctgatacactgataatatgtcgaggtggaggagatccggcaaaagaccgttggctgtcccgcaaaatgttctgacaattagtagcaagaatggtccaagcctgagtccaaagccaagtgcgctactgcatcaaagaatcgactgagcaagacaagtggccctggatctagtccttcatgccatattggaggttctatctctatggtagagcgtactagacatatggtgataatcattatcttaaattgcatttttaataattatttaagtttatttatctaatgtataatgtttgctttggcaagctaaggaattagatcgagagccagactacactgagcttttcaaggctacgcacacgagcaagaagaataaagattggattgatatgaggtctaaggaagtagctgtaactttattaacaagtaatttttaaggttaatttttctaattaattttgaaaaaatttattctattaatacttttttaaactaattacaggatcgatataatgagcttgaggagaaagctattcagacctaggatggttcgataaagacacaaaagccaaattcaaagcaattgttcttacaagcgtctggtggagagaagaagcatcgagtgtacgacatgggtgctagagctccagacttctatagtagttcctcttcctccacctctgtatctctagattttgatgtccagcatgcgagacgctattcgctaggaattgcagtaagagctacaataatat

SEQ ID NO: 52715 - DNA, 779 bp, Ricinus communis
  Intron number 1 from transcript 30190.m011205 (locus 30190 .t000441) derived from phytozome v7.0 (chr-ID 30190; pos 2 504444 to 2505222)
actttgctgtcaaggttagctccttggcctaagttttaatcagttgattcatagttaattgttttgcctggtcttctatgccaattgcttctatatacgaaacaaaaactgcattttgtttcttttactgacatgggtttgcttagcttgtccaagattgactgcttatagggtgtggctatattctaatactatcaagtatttaggcatgtttaggttgcggctagttcatatttaaccaagtgtagctgtatcaatgtgaaacaattcatattctgttttgatttagaataaaggatttatggcagaacacaataggcaagaagagaaccaaatttgttaagctttacaagggatatagatgaagtcgataccttcatattcaatcataaattctactgctataatatgttactggaaaacccaatagccaaaatctgaaatctctttttgttagctatcgaaggaactgtttatgatgagtcagccctttaagtatgttgatctagaaagactagaataattgattcttatatatttactgctccgttcagatagctcttgtattggagtgcatctaagacctgcaaatgcctgaaggcattactcaataatcatgtgttataactaatggttgagttggactagtggcctagtgactgtggtccttattatcccctttcctcttgagacaatattagcacttgcaggagcatgactgtctttctccaaaaaatgaacaaaacaaataacgtgcatcttttgtttccaattacagg

SEQ ID NO: 52716 - DNA, 539 bp, Ricinus communis
  Intron number 2 from transcript 30169.m006433 (locus 30169 .t000210) derived from phytozome v7.0 (chr-ID 30169; pos 1 159503 to 1160041 reverse strand)
gctggttgattggtgggcacatctaaaggtgtttaaatagatttttttctttcttgacttccttcatgggttttttttacgtctgtgtttactaagttcttttgcttccgattctagctagcatttgctcctaaatttgtcatattagtcctatttgataattcaaatctctaaattcacaatcttttttcaaaaaatgcattgtgcttgcatatttgataaagttaaaactgaacgaacatgacaaggtaacttgattgcacattagccaaaagactgcacgtgactaacattttaaagcctggtcttcagtgagaaagtaaaacctgccaaatttttaaacataccttgcttctgcctttccagattcatgagaactcgttccatacgacattgccacataacatgaagctagggggaaattcaaaatttttacattttactttattcatgcctctgcataacttttttcagtagcacagccaaatttttctgatttgggtgtagaacacttgtccttttggtgcagattgaagtgt

SEQ ID NO: 52717 - DNA, 433 bp, Ricinus communis
  Intron number 1 from transcript 38288.m000030 (locus 38288 .t000002) derived from phytozome v7.0 (chr-ID 38288; pos 6 918 to 7350 reverse strand)
agggcaagcgagagagaaggtgacaagttggcaaggtatgcacgaagagggagaaaaagagaagagtgagttaaggtttggtaaggaggaaggagaagaagaaagaaattgttgttttttacttattatttagtgacagagtctgtccgtcgcaagttaattagaaacgacagcttctggtgccgtttaaattaaaacgctaccgacggatgatatttgtcgctatctagtagatacaaacagcagctaagcttatcgtttaatcaaaaaaagataatgacggactaagcttgtcactaactttatccaaaatggcagcacccaactgcatcgagttcaaacaatcgaattataatcgtcgttaaatatcaatggatttggcatttgtgactaactagaggcgaaccaatcatcactataggatctaaccttt

SEQ ID NO: 52718 - DNA, 983 bp, Ricinus communis
  Intron number 1 from transcript 30174.m008694 (locus 30174 .t000091) derived from phytozome v7.0 (chr-ID 30174; pos 2 228061 to 2229043)
taagaggaggagagaagatatcaagaaagatagtttgtgcttttccttctttttaaattcccaacctttttcttctttttgttttcggttttctttgtttaccttgaaattctaggctttgtgttgaatattattttttcccagctgttttggtaatctattgctctttgtttggatgctgggaaaaatttaagaaatctaaaacagcgtcttgcccatggcttaattgcaaaattaatctaatgcttctgttatgcatattatcagctgtcctacgaatataaagttgctatcttagtttgtgggttgttgagaaaaatcgaattactcaattgtttcaccagaattgctttttttttttttttttgaggttttacgtaggttgacatttaagatgataatgaactatgccattgaatctccttcaagctttctttattaccaagggtaaatggtgattgtcccataaagttaaatgttgaaccgggacagtacaaagataacttcaagtagtaggagttactttctgttgagctgggatgagctaactcttgctgtctgtacaatgtaatgttttgtgagattgttgaacagatgaaattttatctcttagcccatcttaggtaaaatagaggggagtgaggaaattataaaggtaaaaatcttaatctgttgctatgtgctcatgcatatgctctttggacctcgtaccatatgcggtttcacctttacacacgttaatgttatttggtacaatttcacattgcaatttctctagcatataatctcttcttttgtggcagtaattttactgatttcctgactcacaacactgtccatttaaatggatgtatatttttttcttctgatacataggatgtagctttagttctagtatctatttgaggtcgtgctgatttttggttattgttcataatgtgctttcagctgtcgaagtctctgccggtgccgaggagcaaatt

SEQ ID NO: 52719 - DNA, 419 bp, Ricinus communis
  Intron number 1 from transcript 30190.m010799 (locus 30190 .t000035) derived from phytozome v7.0 (chr-ID 30190; pos 3 425290 to 3425708 reverse strand)
aataatagaacaggtaattctaaagttattaaatgttgattttggatttgttttagtcattaaagtagagtttttattttatttaatattttgtcatttagtttatggctccatattgtttgagttttgtatcctgatttagtttagagttttatttatttaatattttattgttttttcttttccgtgtgtgttttattcggattgaggtcgctagattgcaaggactggcatataatttttactagaattttagagtcagttcttggaggttgctgattatgcaatattttaaacgtcttattagaattttctgtttttctattccatgttattgattctttggacaaactctgagttgataagatgttaattttgtatcaggtggtggaagacctttatcagaagatattgttgag

SEQ ID NO: 52720 - DNA, 460 bp, Ricinus communis
  Intron number 1 from transcript 30170.m014188 (locus 30170 .t000600) derived from phytozome v7.0 (chr-ID 30170; pos 3 407604 to 3408063 reverse strand)
ctgccaagtctgataataaggtcgcaattctgtccgtttttcacttttcattatgtttttgcgctgtattgaagtcataacttttttttaatttgtttttgtttggtttggtttgttataattacaaagtaataagagaattaaaatatagctcaagtgtgcctaataattaggttggactcagttcagttaatggtcttttgaataatggatgacatatagtttatcttcttttgatatttctttttaatttcttgtgtttaattttttcattatacaatgtatgcctaaatcaaagctaattaaagatgctaattgatactaatatatttttgtctaatttacattagtaacaagcttactagaatttactttattcatcgaaagatgtggttttattttaatttagttggattgatttaaaggaattgaacaagaaaaagaagaaaaaagaggaaga

SEQ ID NO: 52721 - DNA, 464 bp, Ricinus communis
  Intron number 1 from transcript 30190.m010793 (locus 30190 .t000029) derived from phytozome v7.0 (chr-ID 30190; pos 3 398650 to 3399113 reverse strand)
gtcctccgctcctgctcctgccccaactagtggtacttctctttctcttttgttaatgtttcgctttatttttcttccagatctgggattgagttttggtgatgcattttggattctttcttatgatttgaattcttttgaaaatgtaatgtaaatgtgcttagatttgtagcattccagggtttgaaagactgggaaaagacacacgaatatagaactaacgcaaaccttaatgcttataaggtcgctatatgatgttttgttaagagattttcgccaactttaagagtttgttatgtaaggaaatagagcggataaggcacgcagtttttattttatttttttaataaatttgaaatacttatgttcttttggtgcctcagtaattgctttggtaattggaaatgatgaggatgatttgtttgtgcacaatgcagggacatcaatcgaccaaggaattgcat

SEQ ID NO: 52722 - DNA, 909 bp, Ricinus communis
  Intron number 1 from transcript 30180.m001071 (locus 30180 .t000061) derived from phytozome v7.0 (chr-ID 30180; pos 1 217269 to 1218177)
ataagctaagaggccttcttccttgcaattctaaggtaatattatgttttcaccgactcttcttttaaaatatttttataattataagccgtttttaatgtaaattgtcttgtaaagaggggtcttcaagagtaagatcaaatggttctgaaactaaaagaagttttaaagggtttccaatggcaggaattttgaattttctgttttttttttagaatcatatttttagtgtttaaagccttgaaaaggggtaatcattaaggttttgatcagtgtgtactaattatagtgtttgttcactgtttagtatctgtgaaactgtatgaaaatgaagaaagtgaaactttgattattagacttttcttttattatttacttttgaccacaaagccaaaatgattgacttgacatttgcctcgctcaattattatgtgaattcatcctttcttttcttgctttttttttttagcttaaacttgtagaatttttcataattcttgtttttcctcctttccctttttattttcttggcaaccaaacatgagctcaggatctactgctactaatctacgatgcttagattcagattctggaaaccccatctaaatccaggcttttgacccttttttttaaatgttcaaactgcaagtacagacccttatctgtaaaagcaaaagcaagtgttccatttctttgcttctcttttttgttttcatttgttttttcaaatttctctatttctttttcctttacccttttctctaaactgttctctagggttttagcctagtcctgtgttgggaaagttgcaaagctttttgacatttctattagggtttcttacgaatattcttcttttacaatatttatacagacagacaaagcttcgctcctcgcaaaagttgttca

SEQ ID NO: 52723 - DNA, 269 bp, Ricinus communis
  Intron number 1 from transcript 30174.m008904 (locus 30174 .t000301) derived from phytozome v7.0 (chr-ID 30174; pos 9 18204 to 918472 reverse strand)
gaggttgcttcttttctaccattgaatattgcgatctagaagcttctttgatacttgtattttcattattgtttttattttggaaaatgtgtttgattacctgggattttatttatgttgttattatcttcttttataaaagaagtattagtttcatttgtgattaaagtagaagagcatcatttgcaaattgatattgttagctaatgctgattttactgttttaaaaattagtacccggaagagttcgagtcgcagtaagattgcgg

SEQ ID NO: 52724 - DNA, 954 bp, Ricinus communis
  Intron number 1 from transcript 30169.m006427 (locus 30169 .t000204) derived from phytozome v7.0 (chr-ID 30169; pos 1 127295 to 1128248 reverse strand)
ggggttctactaagactcttggaaactttgtcaaggtttgttccttatttgcttccacatggttatttttatattttattattggattgatttctgtagtttgttgttcacatgttatgactattgtgatttctttattacttgaaatagttacaagatgaatgtgcgatactaatatcattttctgggtagtaaataaggggtccaaaacaagtgtcttgttattgatggatccatttgctgtgcgcgatttggccatcatttggaaattcttaaagcaagaattcaattctcacctttgctaagtttacaattactagagttcagttagatcaacttaacataaggcattatttgacaagaactgtattcaattcttgcacgtgatataagtctaaacaaggccaagtgtttattgctctgattatgcacttgttcaggttcttaatcttgtaaagaaatttctggaagctctgaaatcagtagattcttgcttaattgataattctaatatcattagagaaaaatctgggctgtgtactggttcctggaatgctaaacatgagattatgtaatcatgcaaggctctgtaaatttgttcttattggctgtgccggtagaagttttcacactttctgccttcatcggagtgctttaaatagggtttgtgtagacatttcctagtaggaggttgagtatgtccaatgctcaatagctttgatattaataggtagataataatatttaagaaaagctttctgtcgctaatgtccaaaatgcatgtgaaattgtgatggactttggactaggaaatgtttttgcagagatgaatgattttattagatgcttttatgtttgattagttgctttgtggatgccgttgatctttgttgttgagcccatctacatgcccatattgaatgcaggccacttttgactgtcttttgaagacct

SEQ ID NO: 52725 - DNA, 601 bp, Ricinus communis
  Intron number 3 from transcript 30190.m011209 (locus 30190 .t000445) derived from phytozome v7.0 (chr-ID 30190; pos 2 519883 to 2520483 reverse strand)
acattgatttggtggctactgatttccaaagtctggtgagtttttgagtcatatcttgtttattcttattttcctttttttttttttatttgttattttcattattttgaggcaaggcttggggcgcttgatagggtagtcctatttctctgtcaaatttttggagttgaggagttggtggcgttaaaagagttcttttagagtatcctatgaagtattaactattaactaatggattcagtggttcgtctagttgtaatctcctgcttcctttttgttgaccctttgtctggccaacagattatgtgatggcccatttcactgccctttaatgtttttttctttaaaacttttaattttagttttacttccatttttctgcctttaagcgaaggtaacctatcattgcttgaagaactgtactcatttgattaggcataatgcttttcttgatggctatccattttgtaaaccttcatcatgcatggccatgggaaggctagagagcgatagatatgtgatatggattttttagatctgactcattcacctatctatacatgcagatctctgaactttcgctggcggggtttgttgttgg

SEQ ID NO: 52726 - DNA, 447 bp, Ricinus communis
  Intron number 1 from transcript 30185.m000936 (locus 30185 .t000021) derived from phytozome v7.0 (chr-ID 30185; pos 2 40392 to 240838 reverse strand)
aaggacgaagttctaccttccacgaatacttgaatgtaagatcaaaccgcattggatggaccttatacaataactatcgatccatctcttcgacgggtataaaggctggttgcagcagcgctagagaatttggaactgggaggggtcgtgcttttgcttttacaaattaattttttaaaagttaaactttatttgtgttggacctctaaataatttttgagcccaaagaaataaaacaaaaaccaaagctgtaagcccataaatattaatttatctaattaattaataattaattaagttagttcataattacaagcaaagagttaaagaaattagcacacgtgaagaaaatggtgaaagaagttgtgtagcagttatctccactttctctattttataccataacttcccaagtaaaatgagataatgggggctctacaggcacga

SEQ ID NO: 52727 - DNA, 362 bp, Ricinus communis
  Intron number 1 from transcript 30170.m013983 (locus 30170 .t000395) derived from phytozome v7.0 (chr-ID 30170; pos 2 135084 to 2135445)
caccttctacttcaggggtaattaccaatgcagattctatgccattgaaccttttatgttttcatttctttggtcctttgtgtttttttttttaaattgtaaggttggaacatgcattaagccatgctttttatgtttttgattaaatcatgcgcatgttagaagttagctgacatagttgagtcttgacttgacgtgtccaatgatgcatttcttttatcggaagatggtaactttgacatatgttattaccaagagtctcttgatagccttgggtataaatctcgtttcaattaaatctgattcctaatgttctcttcttccactgacattttttagcctggatcttaaatgtaggttga

SEQ ID NO: 52728 - DNA, 826 bp, Ricinus communis
  Intron number 1 from transcript 30170.m014318 (locus 30170 .t000730) derived from phytozome v7.0 (chr-ID 30170; pos 3 916280 to 3917105 reverse strand)
gaaaattgaaattaaaggcgttaccagttgttcttgtgagttctttttcttcctcctcttattgtagttgatgatgtcaatgaggtggattaggtgtattttgaataattaacagtgacctacactgcggtcgtaaaggatacaatttaactgagtttattaaattaatcgagcctgctgttgctatatcgtttgatgattttatcgtgtgaggttgtttaaaataaattactggttttttcagtttttcttgtttcattttaaatccgcgtttcgcttattgatttactccaatctgagcagaatcctctatgactttcagcagggagttgtcttattgttattggaagtttagggttttaggtttccataatttgcgtttaggtaatgtgtgttttgcttgtgcattcattgcttgagtttagttctgggagatccgaaatcctttagaaatcttggcaggatttgcacaagtagagttgatcatttatgatcttaatacaatatatttttatcctagtacatggtttctaaactttgtaattccagtgtcctgcattttgaattaagtcaaggtgcagtaatgctttgatatttgctattattgtttctaattcaggcttaattcacaagtaattgagtaatggattttatagcatcacacatgatagcgcatgagttcatattgatagctccattgctaaaagtaggaaatgtatgaaaggcctaactttctatttttctgtgtttcttcttcatcttgtttgggatgtgtaaataattgtcaagagcaagctcgcattctgaggtgtccaattcttgtgtt

SEQ ID NO: 52729 - DNA, 585 bp, Ricinus communis
  Intron number 1 from transcript 30174.m009128 (locus 30174 .t000525) derived from phytozome v7.0 (chr-ID 30174; pos 3 182623 to 3183207)
tctgttttagggtttgaagtcgacgaattttagaggtaaattctcgttcctctaattatcgcttgaattgttgttgaattgtttcagttgatgacgtttgtgtttaattatgctctaatcattaaatttgttccatatatgagtcagttgtagtatcgctggatgctttgaagcatggctaaatatttcaattgaggctaatggtcttctatgataatgaagcatgttatgcaacattagtggttacttgtgtacatttttgttgaagccaatgttaaagcatctcgcattgtgttggcatagtttcaactgtttaacatacttagcatctttctactttgctttgacctttttatctggtatcccattcttgctaattgttattgccaatccttgttcccaatgtcttcagttttgaatgtggtttaggcggagtccttgagcacattactcttagatgcttttgtttttcttacatgtagatgctgttgtctcttttccttgttgttgagattttcttcagtagaacttgaatcgaggttttcaaactttgtattaacttttagttctgtcttgcagactgaa

SEQ ID NO: 52730 - DNA, 752 bp, Ricinus communis
  Intron number 3 from transcript 30157.m000816 (locus 30157 .t000025) derived from phytozome v7.0 (chr-ID 30157; pos 5 48482 to 549233 reverse strand)
aatcagtataggaactgattagtttagacactgccattggtcctcagggggttcttgtttgcccaaatgcatatttatttaccgacgctattgtatgtcatttttaccttttcagaactatgattttcagagtacttatgatgattagtgatggaaaagttaattgtatactttaaatgtttgaattgaatattatactattttccagaatatgtttctcctatcattctttttttctatatcaggttacttgtgttatgtagtgttttcttgggataggagttgacagatgggactttagtagtttccgtagataagattttactactgtatatgtaaaatgaatagtatgaaactggaatccattatgttttccaaaattgccttattttcttgagttctagatacatcgattagcttttagtcttctttaagggataattattcaatggaattatcatttcttggttctatttacttctgtaattatatataattcaggaagagtggatcatgacttgtgatccttacctgggttgatgttttcttttctgtcattggctctgtttggctataacttccagtatgttcttgtgatagcttaatatcacaatcacatagagttaatataagaaagtaggagatttcggctgttctagtttaactaaaatccagttcttgttcaggtactaacctaagatttgctggacttacttttgagttagagaaagttgatatgattcttttcttag

SEQ ID NO: 52731 - DNA, 972 bp, Ricinus communis
  Intron number 1 from transcript 30190.m010792 (locus 30190 .t000028) derived from phytozome v7.0 (chr-ID 30190; pos 3 395759 to 3396730)
tgtgcttaataaggtagacccaacttttgttttaggtttaatcgcaatttttcttgttattcatctgttataaacttctgtgacttttttccttttagttagattggtcttattagatttatttatcatcaccgtagaaacaactttaccaattcgccgaggattgccctaatcagtagttaaatgtagcataatcatgatggcttttttgattcaaatattgaagaagtctccactctccagagctctctgttttttaagcttttatagataactaactgaactcttggaaatagttaatatgcatacatatgagtgatttatttttataatgcgtattattgatacttttatgttgatttagcaatcatgtaatattattagtatacttttgtccattagactaagttgaccatattctcttttacttaaagattatcactaataaaactgaaactaaataagttgcaaaatgaaacacctagcttgcagtctacctttagcatttaaactttgataaaaaaaatgggcatgacatttatcaactaaaaatgtgttacgagaaaaccacataactgttaaagttcatactgtggtggagcaagtagtagacaattcaaatttaaaattttgtaaaaatattagaagttaattttcatcatcaaaattataaggtctagtttaatttaaagcaagttcattattttttggagtagaataacaaaagcatagaagaatagtttaagttatttactgggcaaaagtaatattttatatgcgacaaaatggatttcaaagaggaaaaaggggagagtaggggtagtttccccacttgccccaatatagatatgctactgcatctttgtactaaactcttatgtttcctcttattgcatttctagaaaattgattgcctcttctatcattttatctgcagaaagtgaagaagttttcacttgctgatcaggatct

SEQ ID NO: 52732 - DNA, 614 bp, Ricinus communis
  Intron number 2 from transcript 30169.m006356 (locus 30169 .t000133) derived from phytozome v7.0 (chr-ID 30169; pos 7 38686 to 739299)
tcatgtatgtatttgcttctcttttaagtgcgcttttgttatgtttttttttattaatcttcattcatcaattcataaattgtacttttttaaaaacaataattttaaaactttagtgttattggtaaataaacacaataatctaatcctaattggtattgctgttgattttattgttgtaatgtggttactacgaaattagcctcttatttaatcttgtatctgttaaaaattaaactattgacataagttgagatttatgatccaagctgggttttaattgtatctgagtgagtgttgtaagttacttgaagggcagtagtaatattagtttctttttttttgcattaccagaagaaattctttactttttctacattttccaaattgataccgcccagttgtgatatcttccaattcgattgatgaagtttggtttctttgttctctagtttaaagtaatttgtttgctttcaaagtttaacagtttcttatcgtgcatggtgaaacagcatactatagttatgcatacacccatcattgtacttgtagtccttaaaacttaaatttgatcatctcatggctttcttttctctttgatagttgctgtggca

SEQ ID NO: 52733 - DNA, 381 bp, Ricinus communis
  Intron number 4 from transcript 30190.m011044 (locus 30190 .t000280) derived from phytozome v7.0 (chr-ID 30190; pos 1 454393 to 1454773)
cccttgtaagtttattaaggttcatcattcttttctatttgtagttgtagttcatttattttgtagaatgcgtgtcagggattggatcttcaacctattctgtcattttgattaaccttttattttgcttgtaacaaaatgctgttactttattgggtgattatactgatcctcaaattgtggttttttgaacctctataagccatgtactgaaagggttgtcaatcatttgtctaggtgctatagaattttctttctgtggatttaggtttcttatgaagtacattaggttttaaaatttgttttatacttgtgcaaaatcttacttgcttttttttgttggcagtaccgagagcgtgttatcttcattggacaaaatat

SEQ ID NO: 52734 - DNA, 720 bp, Ricinus communis
  Intron number 1 from transcript 30205.m001596 (locus 30205 .t000026) derived from phytozome v7.0 (chr-ID 30205; pos 5 92426 to 593145 reverse strand)
gcaagacttgtcatcaagtaattttcttttgcttgcttattattatcatgattactattacaatcttttttgtttcttgtattgaatttggaatacccatgtcttgctcacttgttttgattccaagaaaaagaaaagaaaagaacagaagctagttcttgattgttggcaagacttgtacccaagtaacttgcttttgtttaaagattttgtgtttcttgaattgaatttttaatatccatttcttagttcttgattcttgattttctcagttacatttaatcgattctcgattgctgttgtcgctgtgccaataatttaactcttttatttttttttctttttccccgattgatttgattatgtatgaggaagttttgaatttcttttgtttattgcggacaaaatgaggtaaaatggaaaaagtgttgtctgcggtctcagttttatggtgttcagtcgatttgttttggttatgcttaaacaatgaataaattgagccagagttctccaaattgattgtccaagtttatttctttggcttcttgatattggtttttagttactggtaataggttttggaatttaggttgttatctttctcatttaataaatacatttcttttattatttctatttgcattttattgccttcattcttatttgtttatgttaattgttgaagtgccggcaaaaaacaagagattttgcagctgagtg

SEQ ID NO: 52735 - DNA, 833 bp, Ricinus communis
  Intron number 1 from transcript 30147.m014011 (locus 30147 .t000282) derived from phytozome v7.0 (chr-ID 30147; pos 3 966832 to 3967664)
attcttctgctttcgagtttcgaattatctccaaggtaacatccttctttgtttctaaaagtttcgtatttatgtttcatttttattacactttggaactccgcaattgggttgatgaagataatgtataaaagaccacgacaacatgctaggtaaggtaatagtggaattttaatatatacacaagactactataaagactaatacatccgccaccctacttccacagtctctcttctttgcattttccctcctttctgttctcctgaaccaattcagcagtcttatccgaactcttcctactactactctactctttgtagaccgaatatgtgcatcgaagtttctgaaatcccagcaatctcttccgtaccgatagaatccgccgcaacaggccacattttgactctctgacgcacacttattgtccggaggagtcaaactatcgcctcttggggtggattttgttggtaatgaaaagattgatgaaaaaaacttaggcaaagttgagatgagatactgctcgtatcatttcagagggcaaaaaaagacggtgatgtaaagaaagtgatgagatactgctcggccttctagtgtattaggtctttgtaaggatgctcttgttgatataaaaatttcaatgttacccttggctaataatgtcgggcttgggtcttgtatacatatgatttccatcaggtattattagaattactcagaagtgcttttgttttgtttgtatgatcatagttctgattaaagtttgaaactttgcacttgggtgccgttaagatttactgatacgcgtttcttttgttttataattaggagca

SEQ ID NO: 52736 - DNA, 109 bp, Ricinus communis
  Intron number 3 from transcript 30147.m014427 (locus 30147 .t000698) derived from phytozome v7.0 (chr-ID 30147; pos 1 874596 to 1874704 reverse strand)
ggctcaagcaaagaggtagcattaatggctgcatttttttggtttgtatgattttcattctagttgttctttgcttatggttcttataaacttttgatgttaataggat

SEQ ID NO: 52737 - DNA, 478 bp, Ricinus communis
  Intron number 1 from transcript 30147.m014510 (locus 30147 .t000781) derived from phytozome v7.0 (chr-ID 30147; pos 2 348343 to 2348820)
caattgtagcatcccctactctactgggtttaaaggtaatcacttttttggttactattgtgctgcctttttgcaaatctacttcttttttggcagtgtgctgaaatgaatttttgagtgtctattaagatttaattcaagtggaagtttgatgtttgtgttattcactttgatttcaaaagcaatatacaaaaagtagattctgcttattgttgtccttgtgcttaattatgttactatagaaaaatgaaatttacagtcactaacataccacaccatggcttttagagcgttgctcgactttgtgtgtatttatgatggtcctttttcttctctttagtcaattttgagtttatatttataatgatcttagctgacaattcatgctatatgtgacctgatatgttttatgtgttttaggagtgtaatttgatgttcgtttttgtaattttttacaactgcagggtgaggatactca

SEQ ID NO: 52738 - DNA, 951 bp, Ricinus communis
  Intron number 2 from transcript 30190.m010790 (locus 30190 .t000026) derived from phytozome v7.0 (chr-ID 30190; pos 3 374779 to 3375729)
tctccagaaggatcctcctacctcttgcagcgcaggttcagttcgagatctgctttctctttaatcctcttctattgctgatctccatcaactttttttctattttgttctcttagatttgggatttattttatggtttttaagcttggcttatatgaaattgtaataattttatgatttaaataacggtactgctggagaataagtattatgtcgcagtttgttttttgcatgctaattatgtgcgagtgtttaaatgtttgattttatacgatacttgtagtctgaatgaaattgaagcattagcagtagttattcgatctttacttgttaatcaagtgcgagtgtttatatgtattttatatttaaactcaaagccatggatatgctttgagcacagttttattaataataattaataattcattatacttctgattgaagcttatgacaatctaaacctttgtcaatacaactatttggctatgttttatagtgagactgacacccttgacaggcattactttctatattcccctcattagacctgcaatgttaaaagttatcctcaagtaatcatcaaaattcttcgattgatttctatacctttatggaagacatactgttaccaaacattgtctcgtttacagtaagccatgatataaggaaactcttataaattgattttagtgtgccagaaatctattataagataggagtagtatgcttatgttaaaagctgaaaacgaagcattatgttgtctgatatacaaataacatacatttagtacatgaaacatactgcacatagcacttgctgttcacaattacaccatcatctgcatcccctacatcgaatgttgcttttaagtttaatttagaacaatttagttgataaaaaagtgtacctgtttttgttggtttgtgtatctaggcccagttgctgaagac

SEQ ID NO: 52739 - DNA, 798 bp, Ricinus communis
  Intron number 2 from transcript 30174.m008970 (locus 30174 .t000367) derived from phytozome v7.0 (chr-ID 30174; pos 1 300084 to 1300881 reverse strand)
gttgtttgtctatctatcactgttttatatctcaatgccagacaacaacttgatatgcacttctgtgtgtcttagtgtctctgatttttagcctcaaacttgcatttgctaatggttggctgtgttgatatatttatttatggcataaaagtggggttgatacagtttgacatactaatgtttgcatcaaatttcagtttggtaaactcatgctttgaggttaaatatttctgttttaattcaagtgaacatgctagatggcattaactttccgtcaagggtattttgaaaataaggctccccccattattgcttttcttttctttttttttccttttttatttttggccaggaatattaggatgatcaatagttttcaaatcagggaaatatgctattgatccaatggtttctttacaagagtgatggggaatctataaagaaaggtctttgagtgacctagatagtgaattggcatagattcagttttaggtatatcttggcctgtggaaatattaggggcttaaaggggatatatgtgtatatatatatatatatgtatgtatgtatgtatgtatatcttacaagcgaggagatcattctttgatccctttgaccattttctctggtttgtggtgagagacaaagaggtacacaggggccatttacgtacttagcattttcatctagagtgtttctgtaaacaacctttgttttaaacatgttttgtcacctatgtccctgctctttattcacttgcatgcacttcctttgtttgatgatatgctcaggatattc

SEQ ID NO: 52740 - DNA, 842 bp, Ricinus communis
  Intron number 3 from transcript 30174.m009116 (locus 30174 .t000513) derived from phytozome v7.0 (chr-ID 30174; pos 3 122145 to 3122986 reverse strand)
gcaacttctacctgtgtctatcctgcttcttcaaggtatgcccttttttcctctctctctttctctatcctttttctttcctttggaaaataaaaaagatttttgatttcttgtgctggcaatttcaaagaaatcactttcccatctgaaagatttttccctgggtgtgtgaagagagaatctaggttaaagcttggatcacatttcctttaaaaaaagctttgtgattgtcaacaaagttaaaaattttggtgatggggaatataaaaatctgatgaaaacactgtgaatctgattcctctatatgttttctgttactttcttccccacgaacaccaattattgtttgtttccttcagttcgtcaaaattattgagcccagataggtattcttgcacaagcagtgtcagctgttacatataatatggattggtaattaatagcattagcttaagagtactcttattagacagcggttaagaaaaagtagatctaacatgttttacttgatatatctagcattactacatctttctttataggtcaggggcatgcatcttccttacagctgtgagctgtcatgatgttgatattgcattagttgtttgtcctctttcttgttcactttttaaagattcctgatctcagcttgacatctgttttccacattctcatatttttgattccacatgtcccaatttttttgttacttgcgtttgtaaatgcattatattgtttttgttcccatttgctttcatgatcaaagacttgcttattttacttgtttgattgaacttcccccaacagcactgctgggactagcacaactccaactacaggcg

SEQ ID NO: 52741 - DNA, 600 bp, Ricinus communis
  Intron number 3 from transcript 30190.m011134 (locus 30190 .t000370) derived from phytozome v7.0 (chr-ID 30190; pos 2 078808 to 2079407 reverse strand)
ttaactgtttcgcttggggagagtttacctccaaggtaatatatctttaatattttaatattatttccatgttaaatgctaaatgttaatatgaaaaatctgtttttaattcttgtgatgcagaaaaatatattattttctgggtcgatgaaaacaccacttggcaacattattatgttaatccggaattgattataatattctacatagataatgctgtagttgggtatactattacattatatatagaaacagagagatgttggtggtgttatgcattgccattttgtctttttgtttctaacgttaaacatcattatctggaggtaatattagtataggaagtgtcattaacctattcaactgggtttatctaattaattagctctttcatgagttagggccataattgtgatgttttgttctaagcttctttgtttaatggatctctttggtggattggtcaaagaaatgataacgttttatctttgaatattgctacaagattttgtcttcctctctaaagttccttgggttgacccattaatttcattgcttggaatcacctttaaattcttttataggcgtttgactttctat

SEQ ID NO: 52742 - DNA, 568 bp, Ricinus communis
  Intron number 1 from transcript 30174.m008750 (locus 30174 .t000147) derived from phytozome v7.0 (chr-ID 30174; pos 9 0457 to 91024 reverse strand)
cttctccaaaccctaaccgagacttcgaaattcaggtacttacttgtgcttcaattgtatgtgcactaaactaatgtggtggatagttgtgttttgctttctcgtttaaattatgtacaacgtcccagcttccttgcaagtatctttgttttaaattctacttttgtcttattttcatatttcatgtttaaattgaaatttaaaatgataatttctgttgaaacttttttcttagataattccttcttttttcttttattcgagtgaagctaattaaagtgataacttactgtgtcagtccgttatctgcaatgtttggaatacatatttactataccagatactcgagagtgattacttattaatttcaatgacttattataaatgtatttgagtagtttggcaagctgactattattgataatgagcaattggagttgattacatgaagaccttgagtccatgccttttcttttaaagcaaaattctatagaaactgagatacttcgtcgatctttatgctcgtatttcctcttatgtttgatctttgtacaggcagcattgagga

SEQ ID NO: 52743 - DNA, 498 bp, Ricinus communis
  Intron number 2 from transcript 30147.m014028 (locus 30147 .t000299) derived from phytozome v7.0 (chr-ID 30147; pos 4 090480 to 4090977)
gtagatccagcctctttgatatcaccactgatacggtaatcgatctcgtcctcttattgtttttaagtaaataactgaatctgaaactctgtttggctgcttagaacagttaagattaggaaagtgaataataatgaaatttctgaaaaatctgaagcagttgactcaaaagtaaattggtaattgaatatttaaagcttctagattgagatatttatgtttttattgaatgaagatcattaatttcctaggaaaatcagaaaagaacacacaaatacatggttttggtttcttgggaatggagcttcgacttaagcaagcaggccagaaatttaagttaatattaattatatttcattgttgttttttaagaaaatgaaaaataaaataaaataaaataaagtggtaacatctaataattgttggattttcaagatccatttgccaagcaattatcgttgaccttgtattgttaataatcaggtaacggcatttcca

SEQ ID NO: 52744 - DNA, 1006 bp, Ricinus communis
  Intron number 1 from transcript 30190.m010769 (locus 30190 .t000005) derived from phytozome v7.0 (chr-ID 30190; pos 3 267387 to 3268392)
tcttggctgatccttcagctagctctactgaccaggtatatatagttgcaatacactttcctaaatattgggtgtatagggtagcgataaacttcccttccttttctgttgggggttgagttatcggcttgggacttttgcttttcttagtttttttgttaaaattatttgagaggtttggccaaattgtgttgataggtccatttatggattggttcattgatatagttttgtcacttcctagtgatttgtgaaatttagatcgtggagctcactcttaggtgaaatttcttatcagatatcatagaattttagactatattgtgaaatgtgattgactaaaattattatctttatcatgttttgacttttccaaggcttagggctttctgtgaggatgatagtttgttgacagacagtgcaagatatatgtgaaagaacgacttacatttctataataccgcatccttacggggaatttattttgtaccatccgagttggtttgccctttcgctgcttttatatatggcgatactgtcatattgagtactgtggtttacatttggacccttgttttctctagtttttaactgttcttcaagaaggaaaatactgtcaataataattggtcgttgaatcgcctatggttcatgcaactgtagttacttctagggttcatgctcagtcaattatggatgttaggaaggtatcaactgctgggctcctctaagacttcttctctatacaaattcaaaatgctttgtacttcgccaagtgctaagcatttcatgaatcttgaatctgccacagtttcatagaatgactaaaccttgtttctcatatggttcctcctgacgctcaagtgaatgcaaagtagtactttattttaatcattgcagaaggatggaaatttaagtttgtaatatggagttccttttggccactgatctttgttttgtttcttaaccagccagagagtgcaggcagtttgaggagacatattgc

SEQ ID NO: 52745 - DNA, 662 bp, Ricinus communis
  Intron number 1 from transcript 30170.m013773 (locus 30170 .t000185) derived from phytozome v7.0 (chr-ID 30170; pos 9 76397 to 977058 reverse strand)
ctggtaacgtactcttttaactttcttattccctgattattggtgctattgccatggaaattaggaaaacgacaagacggaacaaagaatttaccaattttctttgttatttctttataagaaaaaaaggcagagagacaattttcgacgctccaagtctaacctgtgtttcaatacgggtgtggaaaaatcttaaagcagagacaaaacttttgactaatacatttagctgtcgtgtagagtttcatgtttgaccgctatagaaaaaacagacaagattaaaaagtagtcaacaaagtgttcattaaaacataaaattcctatggttttgtaatcatcattctttatttgaaagaattaataagaaattgttaaattattttaaatattaaaatatttttataaataaatagtcattaaaacaaagtaaattaataatactacaaccacttaaaaagatattatgctagtgaacaatctcttctaaatcagatgtaagccttttggactctgtttcgttttattcatatgactttctgctttgttgtgataataagccattgttaatgaatcaaaacttaacttcggaacaaagcgtacactaatgtttacttcatatctacacaggtcctactggcagcaggaactgatacttcagcagc

SEQ ID NO: 52746 - DNA, 499 bp, Ricinus communis
  Intron number 1 from transcript 30174.m009130 (locus 30174 .t000527) derived from phytozome v7.0 (chr-ID 30174; pos 3 190251 to 3190749 reverse strand)
ggttaaatccttttaacttaaattattttttgcatatcatcagttagtgtaaatgattcaagtaaaaaaaatttgtaacaatggttcaacaaaaatttagtctttctctcagtcaaggaacaatatcaaatactcttaacaaaaataataaaatttaaaaataaaaattatctaaaaagtatttattttatgaacttattccgtatgtaatttttatatgtatttaatgaattattattttatattttcaatgaattttaaaaaaaaatttaaaaattattattttattttattggtctaaattgagaccaaaaaaattattatttaatcaaaattatttaatttattaaatattaatttatcatgttctattgtaccatgattatgatgaaaaaaaagatactatgcgctctacgaggttgaaaagatgtagaaacatattgatgttgcactaccagctggacaacttgaagaatttaataatccttatacagggtgg

SEQ ID NO: 52747 - DNA, 949 bp, Ricinus communis
  Intron number 1 from transcript 29983.m003185 (locus 29983 .t000084) derived from phytozome v7.0 (chr-ID 29983; pos 4 77559 to 478507)
agggggtctttcaggtaagatagacaagtgcatatcgttatacttgtttcttaatttttctgttgttaattaccagcttgtttgagtagaaagttaacctacaaaagtttttggtttggtttggttctaagaacttaatttcagcagtaagtcctgattttgtatgtttgatgttctcattttcgtatctatttttatgaattgcttaatttgtttattcttttttttctttatttaagatgcctttcgtacttaagaattggcactagtgaattttacttttctgttaaaaaaataaataaggtcacctctgtacaaaggtcacaaatggatacagaagcatagcactaaaatgaatgtattcatagcaaatgactatgagtacatatttagtgcttgcacatttgtttgcaactaattatatgtcctttaagcctttctaatcgaatgttatatggctgttttgagttgttaatgagcaaatcacaataaaaagcagataaagaagcattctgagtattttaatgatgcaaactaatattttctactatttccttgtttttatatgtattgaagcagaacaaacttaaattttatatactgactattttcatttagtaacttttctccatattgcatgccttaacattcaatgtgatgactgtacagtgtatttgcagtaagaggttgtgcacctcaacgtttcaatgacatgatttttgctgagacaaagctttattcttttatactagaaccttcctctattaagtatttatatcgagggccattgatagttcgagctgtcttcattactaccttattgaaatggtccaaatagtggaattctcgttagtagttgcactttttcctctatcataagaatcataatggcatttttcccatttgcattctatatattaatgactcgaattgtggcaggccttggatt

SEQ ID NO: 52748 - DNA, 772 bp, Populus trichocarpa
  Intron number 1 from transcript POPTR_0017s05510.1 (locus POPTR_0017s05510) derived from phytozome v7.0 (chr-ID scaf fold_17; pos 4364214 to 4364985)
gtgtggatttccttcgatcacaatccacaagaagagtaagttgatatcttttggacgtgtatatacatatgtttgtgctgagggcaatcttcactgatagagcttccattatataaacaaactagagtttgttgaaaattctgaatgatttgtgtttaaactgattccagcaaagtattaaatgtgcctgccctcctatgacacccatcactttaattcatatactgattgctttttttcaaatggattcaatatgctttagtttttttttatttttcccttttattcatttgtataaacatagctgatattttctttaccgtctccaggaacagttacccgactttcttgattcaagagaggatcagttttcagcaacacattatggagttagacgacctcaggtggtaaatcatgaacaaccttaactctaatacaactgcaaactctctcatttctcatttccttaatcatgcatgttaagttattatatgtctgctggttgtatacccttttactcatttcgcaaccttaagaaacttatactgcaaactaaagcagttaagcctagacctgttcaatgattttttgggagaaacttgggcttcatgtaatgatatttgaaaagatttttagttggctagtaatgtttaaattggcttagttgagccaaattttgtttgatagtagtctgtccatatggattatattttgaattttcatttttcatgttgcagctacctcagtctttgggaggacggaaggacggtca

SEQ ID NO: 52749 - DNA, 415 bp, Populus trichocarpa
  Intron number 1 from transcript POPTR_0006s08150.1 (locus POPTR_0006s08150) derived from phytozome v7.0 (chr-ID scaf fold_6; pos 5920441 to 5920855 reverse strand)
ctcacacctccacctccgtctttaacaagttaaaggtatcatctagctttaaactctctctcgcatgtatttttttttaatcccagatgctgcaccctcttcttttatcactcttgtctttcttgtaaccatcttggatttgatttattttttattaattcaacgaacccaactatttatgatggatgatatggatcgagttccttccaaaaagcttctttcttttctttcctttttcttaaaagaatatctcttatcagctgtttacatatgatcacaattccacaatgaatattatttggcttctgtgggatgggatcggatggaatggggaaaaagaaacattttgacccgtcaattgattaattgattgattgcagtgtggtgtctgtctcagttcttcatcttcttcaga

SEQ ID NO: 52750 - DNA, 782 bp, Populus trichocarpa
  Intron number 2 from transcript POPTR_0017s12640.1 (locus POPTR_0017s12640) derived from phytozome v7.0 (chr-ID scaf fold_17; pos 12844148 to 12844929 reverse strand)
gcctaaaggttagaaaagcttcaaaggattcccccccctcaaattctaaattattgtcttttctcttaactgtttcgttgtgaaattttgcacaaattttattaaactgtgtctagacagacatgtattgatgctgggcttctctttaaaactttgtgcaatttctgtctatctgtggtttactattcggaagcgacaaccttaacaagaggaagtaacaaattatttatggatattgacttcaggcatttttgttcttatgaatattgatgaaaatttgtaacgaaattctgaaatctgaattgttatactacacattttgcctcaaacaaaaactgaagtaacaaattatttagtttagttgtttattcatctttgttggtaatttggattttcatactcttctttcttcagttaaataatttacgaatttagatggaataggatggcacctctgagactctagtttgggttgtgaacatggttgtttttgttcattggcaatccagtgggaatgcagctctgtaaagtgaatgcatttgaattttcagttgctggttattaagaaccactgtcaaacttgatagcatagcaatcagatttgtcatgtaatcttgctagacaacatcttttaagtctttgtttttgttgctgtttattccctagtaaagacaagattttacacttgtgaactttgatgctttctatagttttaagtacctccaagaaatattattcaaggtacttaaaaatcttaatatttatttgaccagaaaaggaga

SEQ ID NO: 52751 - DNA, 709 bp, Populus trichocarpa
  Intron number 1 from transcript POPTR_0017s07190.1 (locus POPTR_0017s07190) derived from phytozome v7.0 (chr-ID scaf fold_17; pos 5580212 to 5580920 reverse strand)
gactcaaagtaattctcttttttttttaaaaaaaaatatctttgttattataagcgcataacactgatgttttaaggttatggctagtaacatttggatgctaagtaatttttttatctttgtgataaaatcaatatcttgcatttgaagtaatgtgtagttactattgacaaatatgaatttgggattgaattctgttttcaataggctgaagaacaagaaatactctactatttatagcttcagaatttatgaattatgaggatgaaaaaaaaacaatgtgttttgatattttttaaattgatctcatcttttgaatttattaagtttttttatttatttgtgatgccacataatcaggaaatatctattttttgtgtgattttttttggtctttttctttgtttttgttcttgcatttcatgtttataatttagatttgatggaaatgtatcaatagttaaatgtgtgggtgttctatttataatttataaaattattctctaatatttgaaggtataaagggttgtcaattgttctcattgtactctccatcgatgaacgttgaaacacattagattttgggagtcttggggtttgaaaaaagcatgtgtttttccttaagttatctatataatttagtttgaattaatattttgatttttctttaataatccaattgaatcttcgtttgatacaggtactgcat

SEQ ID NO: 52752 - DNA, 642 bp, Populus trichocarpa
  Intron number 1 from transcript POPTR_0017s06130.4 (locus POPTR_0017s06130) derived from phytozome v7.0 (chr-ID scaf fold_17; pos 4760544 to 4761185)
tagtcccattgctaattggaagatctctagtcctggtgagttgatggttcttttggtttttggttcttggttggttcagatttagatttttcttgtttgatctggtttttggatgtttgaaagctcaaattcttgatggttcaagtgattaatttgatttaagatttttgagctcttttcattcatgtttgtagttctaattattgaatgtgttagatttgtaattcatgtataaaatgatgaattgggctcattgagatggaactatttcctgcattgctgtagtttttgaatctgtttctgatgtgatcattttgatcttccctttttttttttttctacttttggtttatgatgccaatttgaagatccatgatctgcttggcagtgaccgcatttaagagaccctacttgtcatacatttagcttttgcctgctcttaatacatgtacaaaactgagtgtctgtactgtacacagaataatctgcaaagatgtttgagggccagaaattatgtgctacggtctcatttgttgtttgtcgaatcgatttggcgataacctgaatatgattctattgatcagtcatttgattttaactttatgcttccatgtttaacccatacaggtgaccatcctgaag

SEQ ID NO: 52753 - DNA, 686 bp, Populus trichocarpa
  Intron number 1 from transcript POPTR_0005s23500.3 (locus POPTR_0005s23500) derived from phytozome v7.0 (chr-ID scaf fold_5; pos 22236943 to 22237628 reverse strand)
cgattgtcgaggccgcgattcgtactggtgcacaggttagtatccaaacgctgcgttttggtttctgagaaattagtgaacgttatatgaattttacttaaaatcgtgcttataattaagtttactatgatatgaattactccttttttttttctatctcgaatttcgaaggactttcggtaattagttatgacttgcaattgctgtgtcaatacttccattaggtgatttcaccgtgtataatttgactgcttaagcccttttcttttggttattatttgtgtataatttccatttagaaattgaagcgtttgttaattcctacttttattttttctctttacatggtgttagcaaagtgagcttttttaaatcatttttttttgttttacctttaaagttttaagctcttgggccatggctggtcactgtgcataagagttggccttttgcactttgtatcttggaagatagtagaatagcttattattttgagtttacaatgcttctagtaaccctgatcacattcattaaaagagagaaaagttatcctaaacatataatttccttttttgtgtgtgttatacagtgaggtagatgattttttttctttttttaagaaaatgcaaggacttgtttttcaaagtggatatctacttttgaatatcaggctattcacccgggtt

SEQ ID NO: 52754 - DNA, 415 bp, Populus trichocarpa
  Intron number 1 from transcript POPTR_0017s11730.2 (locus POPTR_0017s11730) derived from phytozome v7.0 (chr-ID scaf fold_17; pos 11494129 to 11494543)
ttagtggcaaaactacagtcaaggccttgcactaaaaattgctcatatgtcaattaaggttcgtttttgcttcttattgtctttgtgatttctttcttattcgttctttttggtgtagagcatgtaatgatgagtgtttcttgaagctcttgcctgtgattctgttttgatgctcaagtgttgcgttcttgagagttaaaaatgagggaaatctaactgttcttcgagagggaaattgtgtgatgagagataatttgggttataagctcgcgaattgcttcaattctttttactcttagtggcaaaactacagtcatcggggaatgttttgagacccccattttatggacataatggtttggaaattactgatttaagtgtgatttattgtttgatttggcaggatttattatta

SEQ ID NO: 52755 - DNA, 804 bp, Populus trichocarpa
  Intron number 1 from transcript POPTR_0017s01380.1 (locus POPTR_0017s01380) derived from phytozome v7.0 (chr-ID scaf fold_17; pos 956914 to 957717 reverse strand)
gctattcaggtatgaaaattaagtttatttaactttcttgtttatttttgttggatcagtgcatgaaattgctaaattttgagggttgcttttaaaatcttgtaattcaaaagagttgcgaagaaaaaatgatttttttttttgcttttttgtttttgtggctgtttgcaagaattcatttactgaagttaaggaaagatggatctaaagtgtgatcatgtaatgaatacttgtgttaaagctctggtctcgatacctaaagtgtaaaaagattcatgttgtaagaacttgtgtggtctgaaagggactatttgtggcaagtggcaagatttatggttcatgttgatgtgtcttttgtcggtctatataattacacaagcaagtttctttacgagtgtagttttatggggagtgtgatatggaagtttcaggtaggttttgctttggtgaacatttggcctgttattatttatgaatacagttcttgccttattttctcgcaacagaaagcagcataagcacattgtaattgttactttagttgtattttagtttagatttctatgaaatatgatgatcatttgattcttcttgttgaattttactgtatctgcttaagtaatgaatttaaatggatattgaattgtttggaagttaaaagaattgtatacttagttcaattagtgaatggagattagtgtgatggggctggtagtggtggaagcgggaatatctttctgatgactttgtttcccacaatttgatgcaggatcagtgtggagggactcgatcaaatctggttct

SEQ ID NO: 52756 - DNA, 486 bp, Populus trichocarpa
  Intron number 1 from transcript POPTR_0005s16060.1 (locus POPTR_0005s16060) derived from phytozome v7.0 (chr-ID scaf fold_5; pos 12711772 to 12712257)
atatcgagactgacaattctactgctcttgaggttttcagccttttcatatcacatcatcattattgttttgtaattttgttttttttttttctgttttaattttatttcctgtttggttgttgcggagatgtggaaaaagaaaaaggaagggaagaaacaaaaaagataaatgaagtttgaaaccaccgaattgctattgtggggccgaaagagaaaattttatggaaaaaaaaaaaaaaaactcaaatgacaatcaggtctaaagagagtggggttaatttgataatgattcgaggcgttagtcattttgataggcttttggtttctagtaaagtgaattaatgtaggcttttggtttttagtaaagtgaattaatgtactaagtcctaattaaggagttttggcattatccattttttgccaacaatgtcccctttttttgccctttttccagttatcttctgtttggcaattcaaaaggaga

SEQ ID NO: 52757 - DNA, 973 bp, Populus trichocarpa
  Intron number 1 from transcript POPTR_0005s15100.1 (locus POPTR_0005s15100) derived from phytozome v7.0 (chr-ID scaf fold_5; pos 11911346 to 11912318 reverse strand)
tggcgagtcagctcgatcaactcgtttctggatcggtgagttgaatttctttatgttttttcgagttttgttaggctttttttttttttttttggtgaaaagttttgttggcttttaagtttccattgaaatgcaacgtagcacgcgaactgtgtgtgtattgtttgtgttaggtactgtgtccagttcgtccggttaagctgtatagacggctgttatcaatttgatgttaaaattccattctctccagttcgtacggttccctctctattaaaattaccaatttatctgtctattttattttcttaactactatatatatatatatatatatatatatatatatatatatatatatgtatatatatatatatatgtatgtattccggcagagttattcccgtggttctgtcttggtccagataatattatttaattttatatagtttctgtgagggaaaaaagagatttattgacaaaaaatagagaaaattacaggattttttttacaacagaatatataattaattaaaaaggaggtgaatatattaattatttcactagattataatgcagttgtattttatgcagaatttgtacgatagagtctattaccgatatgcagaagaattacaactaaaattggatatataatttttagataaacactgatgattaaggggtcaatcaaagtcgtccattttatgctcttggactttctattggttaaggttggttgtgtgcaatattgtattccaatagtattaatctgttaggaaaagaaatttgagtatgatcactccattcttttagaatcgaaatttaattaagatcattggaagtgtagtgcatggacatttttttccaataccacacgcacaattaattatattggaccatgaagacaaatttctagcattttttattttttgtagtgattaaaaatgggttgcatatatatatacttcagtgt

SEQ ID NO: 52758 - DNA, 954 bp, Populus trichocarpa
  Intron number 1 from transcript POPTR_0373s00210.1 (locus POPTR_0373s00210) derived from phytozome v7.0 (chr-ID scaf fold_373; pos 10626 to 11579 reverse strand)
acccatccggataaagagttcatgtgcctttgccgtgaccaaccttatgcttttgtgtgtcaaggtaagctcggcatgcctcgctgatctctcttgttaattattagtacctattctatctattgtgtttcatgttatttgccagggaaatgaagttggtggggggaaattagggttgataattaggaacaaaagtacttgggggctctgttcttaatcaaaattttataaggacgttgaccagttgctggaaggttctcaaaaatttttttttgacataatataaaaaatataatataaacttgaatagtaaaattatatgtaatttttgtaactaattatatattgataattctaataagaaaattaaattatattaaaatctgataaaatgagttaaacatatcataatcaattagtgatctaaataaaacgagagagatagatattataaattaataaattaatgacatggagaaataaaaagtctcagaacaaagttttcaatatagaggaatcactgaaagttaggaagcacatataaacctagtaacaacctagttgttcctatcacaataagtcttgacatacctttttaggttgcaagataatgagtttaaattagtaattaagtaacataaatttaataatgaaataaacccctaaacaatatctaatgcactagaaaaaattcaaattaaaaataattatttaaaattaaataaataaataaaattaaataataaaaaaatcttcatcttaaatgtaacagtccatgtacgagtttttgccgtgatgggcctcgtctcaaatcttgtgaagctggtaactcttcatcaaatattctttatgattaatggtgttggtttctttcagcatcatgcgttctttatttgattactcatttttctctgttgctgcaatatgtaggaaacactgcaacacttttaaatc

SEQ ID NO: 52759 - DNA, 709 bp, Populus trichocarpa
  Intron number 1 from transcript POPTR_0005s10480.1 (locus POPTR_0005s10480) derived from phytozome v7.0 (chr-ID scaf fold_5; pos 7531463 to 7532171)
gcataaaaccctctctgcccagcaagatcttgcaggtttttcatttttagctttctctctttgtttttcttgatggggttttttgtttctctttctgtggtgttgtatatggttagattttgatagcaatgacataaaagtgacaacttttttactgggtaaaggggcttctttagcagtgctactgttgtcagtttgtgcactattagtagtatttgtttttagggtttttagttcatgtttgtgtctgttcttttttaagtaaaaaattgtaactttttgtgcttgtgtgcaattggggttctttttcgaggatactcactgaatctccctctctaattactggtttggtagcgaaggatctaccttgataagttagtttactcaaattattgtatcaatttgattaccttttcttattcttggatgaacaaaaaggttatagctttgatgtcactgctgattctgaatttggcattatatctatgtgagaacatgaatgccccagtgtcgttcttcatcttgatggaatatgttgatgaaattcaagtgttatttcaccaaaacacaattgatggcaaattgtgttatatcttagtaatatctggaggagagaatgagatatgactgttttgacgtgtgctcaaatattgcctttgcctgttctgttgcaggaggcaggctggggaatctatactgtgacccattg

SEQ ID NO: 52760 - DNA, 1044 bp, Populus trichocarpa
  Intron number 1 from transcript POPTR_0005s04800.1 (locus POPTR_0005s04800) derived from phytozome v7.0 (chr-ID scaf fold_5; pos 3204512 to 3205555)
aaactcactagaatccattcaatcacttgcaacaggtcagtaaccaagccacttcaattcacaatttctctcttttctgtgcaatcgattttatttgctctccgcattctctccatcactttagggtatggatcgttgattttgtgtatcgcgaggttcaatttgaataaactagcttaagaagatttatttatttattttttaatcgtagcatttaaatttagtatcgagcgtattaggatttgagcttaatgatgttactttcgcgtatgcgtagaattgtgaaacgaagcgtagttttgtagattgttagtttttttttttctttcccagacaaatgcgtgtgagtgcgatttgtatgtgggaatgctaacgtagtaggatatgtagggagcaagttgcaatccaaggtgtaggatttgatttattgtcttaatgagttcaattttaatcccagaatgatattgtttcggtacctttatggaattgctatggggatgaaagtgatggttttgtgtccaaaaaagcacgtttgaatagtgaagtggttgtagtctcaggtttatggtttggcttaccgtttgatgaattttattttattttctgaatgaactggatggttgcttgattggtgcattgtggctgtttcatctgtttctgggtatgttttttgcttgatttatgttagggttttttacctttttttttaattttttttattgatgcggtttgtggtttggacctaaggtatacctgtgtaaggaaaatttagtttgtgtaactcatgattattgtgagaaaagagatttggttaacatcttaaactggctacttggtaggaaaaactgtggaaacattctgaaggaatgtcttttcagcttttttcttttttttctttgatagttttctaaaaggaaataatagttgattaatatgcacttgtgcaagtagcttgaaggaattaatgatatgtttgtgatttttttttttaaaaaagaaattgctaattagctttgatttatatctctcttagatattgttgca

SEQ ID NO: 52761 - DNA, 904 bp, Populus trichocarpa
  Intron number 2 from transcript POPTR_0005s04800.1 (locus POPTR_0005s04800) derived from phytozome v7.0 (chr-ID scaf fold_5; pos 3205647 to 3206550)
acacaaaggtgaagtgatcttgtagctgttctgtttttaatattgagttttgctcaacattttgagtatttgaagtgaataagttgcttttttctaattttttttgtgattgctttatatggagttatcattgtccactttgatgttgtataagtgcctaccacctaacttgcttgcttgatgatattccagtgaaatcaacttcatgtagttgatattatctaccatgcacagtacttgatgctgtttcttaatacttctaaatgttacaatgatcattaaagtctttgcatgacattcttatacagtgttgacattaccaacatgctgttttttcaagtttaattttgggtaaacgatcgtattctctgctcatgtaccatgtccaaatatttgtactgtatatttgctctgactccttattgatgctaatgtatttatattgctcttccatttttatttggaattttttgttgttgtgattggaactacttttttttttccttctaggctgctgtctgtaataagttggttttatgcttgattttgttgttttaatggaccagagtaaactatatgagtacaatgtacatgctttccatgattaagttgaatgttattatcttgtctaaaattgaaattcagccttgagtaatactcataaatgtttgaagtatctgtaagggcatacagtgttaatattttccaataaaagaaaaaaaagaatggcatattctgtttacagagactccatcttcaattctgtgctgcttgattttctttaaacatatcaaattttgatgtacttgtcactttaattggagtcatggatcctaatactacctcttttggggatgtctcttttgcagcattgtgctggcataaactgtctgaaagtgttgaa

SEQ ID NO: 52762 - DNA, 977 bp, Populus trichocarpa
  Intron number 4 from transcript POPTR_0005s24970.2 (locus POPTR_0005s24970) derived from phytozome v7.0 (chr-ID scaf fold_5; pos 23365152 to 23366128)
tggttccaccttttctggctgccaaggtttgcaattccttattcttctaaaccgtttgttaagttttcggcaggactgcaatatgtgaattgttatttgatgctactggttcaagttcttgatgatagcatgaatgagagcttgaaccttttctgctagactttttcatgtttaagacagtcacttcttcttcctcctgctatggattatccttcattgttctatttccatagttataatagggagtagtcattgttctatgaattattcttcttgtttttgtgccttcatggaaagctgtcaaattgtcctgcatttctatgtaaaagtagaacaaatttcttctagtaaaaagtcaaaattggatgtttagagaacttgctgttaagctcggttgagatacagcagccttccactgtttaatgatgcatgcaaataatttatttgaagtgattggggaccaataaccaatcaatcatccatccaagatgttttcagagttttactcggtgacttgataaatgttcctaatattactttccaggccaagcaaatccatgaaagcttcatcaaacaattactagactcatgtgaattaaatatttcaatccacatagaatcctctatgatctcatctgcaagatttaagcaacctgtctctttctgtgggcatggatctttgaatgtgaggaaaaaattttatgcgatcgataccacaatgtaagtgggcatgatttagatgggatatgaagtggaaatgtgcaccccacagcttgtttatataatctgattgtctctgcgtactatgctgagtgttttccatcatcatttttagttccctgctggctggccattcttctggtttgtggttggaaattttgtgctactcgttttttgctttttatctcttcttttaatttgagaataaaacgttgtctacagatatctggaattattgaagacctcaggagtgcaaa

SEQ ID NO: 52763 - DNA, 829 bp, Populus trichocarpa
  Intron number 1 from transcript POPTR_0005s04590.3 (locus POPTR_0005s04590) derived from phytozome v7.0 (chr-ID scaf fold_5; pos 3087173 to 3088001 reverse strand)
gtctctctccctctctctctaaggggtgctctgaggtaaagcttcaacctttccactctcttctttgatcacattcaagggtcttacttatcatctcgtgattatttgatctttgatcagaatcttttgtttttttggcttcattatgctttgactttttaaagatcagccttttatgatttgtttgatgtgattaactggtagtagcttgatgatcatactagtgttatctcgttttcttatcatatatgctctctttattcacaaagtgttgagtcggtacttggatttggtgttttttgttgttactgcttgtgggttttgtgttttttttttcacagatctctctcaagttttgttcttttaataatatataaaattatctgtaccttgtttgggttttgtagatagaatagacaaaagggcaggagagaaaaataaggttttgtagatagaatagacaaaatggcaggagagaaaattaaaattttttaaattaggaattgggtcgataaatgggtatttggaatcatcaactttgcgtacttgtagctttgttttgagtagctttgtgggttctttagcttcgattagagtgatttagtaggtatgattgatgtgtactcttgcgcatagaagtttaaattttaatttggctgttttgagctgcgaatcttttggtgggcgttcatgtgcaatgtgccttttatttttttgttcccttgttgtattcggtcaggatgtggtgtttgtgtggttttttttaaagaatttaggtgattgtagatgtgcagtcctaactcttgtctcttttagatcacatagaaca

SEQ ID NO: 52764 - DNA, 504 bp, Populus trichocarpa
  Intron number 2 from transcript POPTR_0005s09600.1 (locus POPTR_0005s09600) derived from phytozome v7.0 (chr-ID scaf fold_5; pos 6715359 to 6715862 reverse strand)
tcctgctgtaattcctgccaaggctgagaagaaaggtaaaagctttgtacatcatggtttactgtgctacgttgttttactgtttgtgtggccttttttggctggtttagtgtggtatgatctgtttatcgtttgattgttgattttgggttttgtgtagggattttgaagtaattgactgtttttctctatagatatactgagaaagaagggtttcttatagaatgatttgtgttattttcttatacaaaaaagttgtttgatattgtttttcgtttaacttttatattggtcgtttagtttctttcataactattttgtaatgcgtggtgacgagtttgtggttactgaggatcgatttggaataatggaatggttctttgctgtattttatctgcttgcagttgttacatgtttgagatttgttgtttgttgagtaattgggcttttgaaattgtggggtttgtagggaagaacaagagggaagctggagaagctatagag

SEQ ID NO: 52765 - DNA, 875 bp, Populus trichocarpa
  Intron number 1 from transcript POPTR_0017s01490.1 (locus POPTR_0017s01490) derived from phytozome v7.0 (chr-ID scaf fold_17; pos 1026957 to 1027831)
ttaacaaggttggaccttttcacaatcccaggtaatccaattctcgtctttcttgctgttttgattaggttaaggttattggttttgtggggtgtcttcaagtttgggacttttgatgatttgggaagttggggtatgtgggatatggattagaaatggaattgtggagttgggttttggagaatttgattttagcattaatgtgtcagattctgtagaatccatttttttttggttttatggattggtttcttcaattgttgtggatctgagcttatgggaagtggatcttatgatttggtttcctaaaaaggaagatcaaagattggaacttggagtttaacatgaaaatgctgttgatgtcacttagttgctaattaagttggaaatttagcatagcttaatggttgtacaagcagttggtctagtggatccctggggagatagtttaggaaatgcttaatgggattttggaatgcaagcttttggatagaaacatttgcaagtaagtagagtccgttagttaaagcccagaataatgtccagtgactaggtgttgatttctgtttctggttgtttcttgtgagctggaaaagtttaagtattgggttttcgtttgttattgctgaacttggatctcagttttagatctttaatcagtcgctggaactctttttctgtaatcgtacatgaaattatgccggaacttaattgatatctactgtggtcatctctagacttttggttttcattttgagacttcaactgtgaaaactttcgttagtatttttttttattcataattgtttcatattgtttctttcttgttcattctgtcagtgaaacataccgctactttgatctgcctttctgct

SEQ ID NO: 52766 - DNA, 683 bp, Populus trichocarpa
  Intron number 2 from transcript POPTR_0017s07220.5 (locus POPTR_0017s07220) derived from phytozome v7.0 (chr-ID scaf fold_17; pos 5620280 to 5620962)
gagcagacccatttgagattgcggaataatttgaagtaagttgttgtgagtgccttggttttgtattgattttccttctcttgttgtcaaaagttactgttttatttgattttcttattgttgtttaatttctgtagctaaatcaataattaactcaaattttaattttaatgttgtactgttattttaaccagaggtttatcttgaactattttgtttttgatttattgagctgaattgatttcaaaatcaatcttgatatgactttgtattcataatttaatcatagaatatctgggatctgacactagcagactttacagggatcttcaaaatgaccagttaaagttgcaggtggatgcatgtggttgttttatacaaagaattattctttctgtacttcaaaaatgtatagtatagtgcaaggacataacttgcctcattattatttttatctgtctacgtttttcttgagctaaaaacatatattgtttcatcaattttcatttactctgccatcccttggttaaaatactgaggacttttcccctgctgatgatttatccggtgatgttggggatattactgcctggtgattttctgatgatttttttttcctataaacatctaagtctttttaatcatctactttatttataggagagattgtatagtataagaca

SEQ ID NO: 52767 - DNA, 254 bp, Populus trichocarpa
  Intron number 1 from transcript POPTR_0006s21260.1 (locus POPTR_0006s21260) derived from phytozome v7.0 (chr-ID scaf fold_6; pos 20338072 to 20338325)
actccttcaccgttggatgtattctcttcctatctcattctctctcgcatgccattcaatttttatattttgcatttatttttaatgtttagttcttggatcttttactgtttctgattaatgtaaaatcgagagttttctgaattggaattgaaactgagtttgatttttgtatgttttgatttagtttaatcaaagctagggtttattgattgtgtttttttcttttgaatttaaagcaagaagacgaggag

SEQ ID NO: 52768 - DNA, 696 bp, Populus trichocarpa
  Intron number 4 from transcript POPTR_0006s21260.1 (locus POPTR_0006s21260) derived from phytozome v7.0 (chr-ID scaf fold_6; pos 20338904 to 20339599)
caatcaaattcataacaagtactcaattagaaagggtatcttctttgatgttacgatttaatggcacttttcgttaatgtaacttttgttgttcttaatttattaataaattttgtttggatcgatttgttattgaattgacacgtggattgcttgcttgagcacattatcatatttcctgttgagcacatgttcattctaatcaataattgattggcaatttgttatcttttatgacctttatagatatattatcaatatttgcctattttataatcttatgactttgaagacatattgccaatgattgtttatttcacaagtgtattgaaagaaaagtgagtgcaccaatgtggtgccctatatgcacaaggttagaattctgcttacacaagctctagtatgaacgccacaataaaccaccaacagagtttggaaaccttgaccatttgccaataatatgatcaattacttgactatcttgtcctttgagggtttgtgctgtttggtaactttgttgttttttctttgctgtatgtagcaatatctcgtttttgttcttaaacatgctagcatggtaactccatatattgtgatctttaaaagcagtcaaagtaactccatatatactctgttctcttttaaaaataaacatttgcagacacacaacatcagttcaacgcaagagagagtgac

SEQ ID NO: 52769 - DNA, 759 bp, Populus trichocarpa
  Intron number 1 from transcript POPTR_0017s04100.1 (locus POPTR_0017s04100) derived from phytozome v7.0 (chr-ID scaf fold_17; pos 3101242 to 3102000)
tgacacttgctcttatcggtaagaattttactttgcttttattagctaattgtgaaacaataaatatatgtatatcagcacgcaacaattacagcttaagaaataattatttttcatgatttattttcattaaatttatttagttgtagaaaataaatacttgaaatttaaatatttcttatgagtcccaaatatttcacgttttaactttagcttaaattgatattatttttgcatcaaattaatgtatctaatattctttctacttttgttttcaattataaacaatgattttaaagcactagaagctaatgttctaatcaaacacagagcatgagtattttgaaagtatttactatttttttaggataacacttttctattttttcttttcattaatgatcttattttataaaaactatcagatttttttttttatgttggccattaattttctaaatggcaagaatgatattaataatactgtcgattatcactaaaaaacaatggtacgtactaataaaacttgcataatacagttttgttttcaatacagttttgttttcaatatcatgagatatttattagagtgttgagagccatgacgataagttttttaaattaaagaattagaatgaaaaattcccacatagctcacatgcatatactcgtcattaaaatcaatgaagtatttgtaaaatgtttttatatgtttcaaatgttaaccctttttgtaatgtctctgtacagtgatatatc

SEQ ID NO: 52770 - DNA, 458 bp, Populus trichocarpa
  Intron number 2 from transcript POPTR_0017s11070.1 (locus POPTR_0017s11070) derived from phytozome v7.0 (chr-ID scaf fold_17; pos 10730970 to 10731427)
ccaaagtaaccatatttttcatctcatttcttgctcctggtgtcgcgccaccttttactttacatgaaagctttgattttatcatatattagaagggttgtaaagaaatggtttttcatttttccatttctcgataatcatgggggctcattatatatatatatatatatatatatatatatatatatatatatatatagaatttaaaggtattttgatgtgtggaagatattacttttgttttttatgctacttgcctgctcgagttctaatgagcagctccactacattttgctcagaatttgttgtgtggctcgccttgttacttggacagctgataccgagtgcacccgttactcttatatatgttccctttcatcttgcaagcattaatacatctgtctcatttttctttctttgcaggcaattgaagcagagataacatccgcaagccaaca

SEQ ID NO: 52771 - DNA, 648 bp, Populus trichocarpa
  Intron number 1 from transcript POPTR_0005s26380.1 (locus POPTR_0005s26380) derived from phytozome v7.0 (chr-ID scaf fold_5; pos 24427761 to 24428408 reverse strand)
acccgcctccgggctaccagatcgagtcgatcaaggtttgttgagcaaatttgatttttccatctagtgctcgacttgctttcgttgcaaaattgcacttgtaattgtattcttgatgtgtactaacccttttcgccctcaagacgacttatcacttaatttgacccgctagtttaactaatttagtttagtaattaaaccatgtttaaatgttgtaatcttgattattgcacaatcgtgttcctgattcatgaaatcttgattgggtttttcgcttgtggctctagggtttgaataaaaagattgttaagaaaattggttcaaaaatagttcatcggataaaaaacccatcatattttagcaaatgggcaagtgatttaagccttgttttcttgaaataaattttaacctagcttctaacctataatgctgtagcttttcatttcttgaaatgaatgagcaagtgatttggatttacaaatgagcaagtgatatgcatttacaactgagaaagtggtttgcattttgtgggaaggtggaagattttttaattcgtgagttgggtaattcatagtactttgattcctaaaattgttcttttggtacacaaaagatccgaaaggaaaaggagaagtctataacagaaag

SEQ ID NO: 52772 - DNA, 892 bp, Populus trichocarpa
  Intron number 2 from transcript POPTR_0005s12560.1 (locus POPTR_0005s12560) derived from phytozome v7.0 (chr-ID scaf fold_5; pos 9341632 to 9342523 reverse strand)
tctgggttagctctttctgctcaatagtttcgatattgtaatacatattcatctttttgtattcacttatccattgatgttcaaacttttgcttgtagcctctttaaaattttgcctatggcctcttctctcctcatcatgctgtttcttttagaataatgtaagtcgcttaaatcatagtttcaaagtagttaggttatcaagaagattttcagattttgatgtatatgacaatgtcttagaattttgttaaggtcatagaattctcagccttgtatctgtattcacattctcgctcagttgcgtccaagttttgtttgcatgcgcactagtcaaccaattggttaggatttagcagttaagattcctgaaataaaccttcattctctcatacgatagaagaccttataaaccaacaatctggcgggaatatgtttgtcttccattgtgctgactctgtaactaaatggatatatactattaatttcttgatctttccttgcgcatttatcttgtctagtcccctgcattctggctagagtgccagtctttgcaaattaagtcctgaattgtatttcaaacccgatgatttcaatactgatagtcatgaaatatttgcatgattcaaggtttccatatacaaaaatacaacattcattagaagagtatatgtgccatatctatctgacgatctttgtgcatacatgtcttactggtgcataacaagaattgtagatattaacagttcacatttttgttccacatggaaatgactaatgtcttcaattctgcatcctcctaagatgaaaccatggaagtttcttgatacatttttttttacttggtgcataacaagaatttgctttgcttttgtagtgtcattttgcttcct

SEQ ID NO: 52773 - DNA, 721 bp, Populus trichocarpa
  Intron number 1 from transcript POPTR_0005s12560.1 (locus POPTR_0005s12560) derived from phytozome v7.0 (chr-ID scaf fold_5; pos 9342569 to 9343289 reverse strand)
ctatcatctcttctcatcactcctccagcgaagaggttctcactttttcatattcacttcttcttctcttttttgtctcgtatttaaattgatattgttcgtcaagttttatcgaatttcgtttttgtgttttgaaagagactgggtcaattttctgagattgctttaaggttattgtaatattatgttacttcttctatgatactggaagctaagcgtgagcctctcttataaaaattaagatggactcttgttgcgtctaggtctagacatgaaatgacatgacaagactagttcgaagaaataaagaactagttgtggtggtgcggaggacccatggataccccttgcttatgcgcgcgcgcgtgttgactaatattgtgggcgcatgcaaattggcttgcccacatgtttggtaaatctcggatggaagtccatggatgcagcctaaacttgaaattgtttacgtagtaatttgttggtgatttctaattactttgtagattttagtgcataagtctgatgagttgatcaattatttaattgtgagatgttagatgtgctgaaggaaattttaatgagtaccaggtaaaagtaaatgtaatcataatacatgagtgcaagttaaagtgagagtggcttgatgcatgctagaatttctatgtcaatgtgtctgaaatctacctaactcaaataatcttaatattttgtcgtgcaggca

SEQ ID NO: 52774 - DNA, 448 bp, Populus trichocarpa
  Intron number 1 from transcript POPTR_0006s20500.1 (locus POPTR_0006s20500) derived from phytozome v7.0 (chr-ID scaf fold_6; pos 19516434 to 19516881)
cagctgaaggagtggtaagaattgttttcagttcaatattgctaaattcattacaaaaatagtacgttcatatcctattatgattttatccacacttatgtggattaatttgcgaagtccttttccttagatagtaaattcatcaatcatgatgagttcaatacataacatattctagtcttctgcccaatagacatgaagtctgcaaatggttttgtccatgattgggccaattgcagcaacaaggctataatcttctattgtttgacttgtgtcaacttgttctcaaaaccatgcacctatagatcgtgtttaaaatttgaagatgctatttcatgatataactgttgtttctatgtgtgaacgagcttggtctagctgcttgatatgacaatatttttttttttgcttaggtaaacacagagagggccatacgccacgcaattca

SEQ ID NO: 52775 - DNA, 669 bp, Populus trichocarpa
  Intron number 1 from transcript POPTR_0006s09830.1 (locus POPTR_0006s09830) derived from phytozome v7.0 (chr-ID scaf fold_6; pos 7228642 to 7229310)
tggtccagtgcagggttcggcattacaaatttaatgtaagtataatattgctgtagaatgccttcacctgacaaaagcttgaactgctcgaggctgaggtcatttgtctcagtcacagagaacgatttcttgaaaaggatttcattattagaagataactatgttttgcacgatgcattgtacatcaagacactgatcactgccttaggcttaaaatcatgcaactatagcttttgcctgacttgtccatgattagaatgaatcataaggttccccacctatagccactattttaaataccaggaaagtttgttcttatttatactttattgggtaaataatagcagcagaaagctctcataatccatccatacattcatgcaactagtcaactagtagtaataataataataacacaataagtttacagaaatagttgagtacattgttaaaatggggccaactgagagatgaaagatgaagttcgacgacatgtaagtaaccatacagataagaaacaataagagaatgaaaatctcaaattactacagagctataatgacatattaatagtcacaaccaatatgaacaatttagttgtgacctttgaattatatacatttgatgtagaaatgagcttaatttaacctatcatttcaacaggtggtg

SEQ ID NO: 52776 - DNA, 911 bp, Populus trichocarpa
  Intron number 1 from transcript POPTR_0005s04180.1 (locus POPTR_0005s04180) derived from phytozome v7.0 (chr-ID scaf fold_5; pos 2810756 to 2811666 reverse strand)
ttgcagctacttgttctttcacttctggctattgtgtacgtacactctcactctctctcaatttctgagtttctttaaaatactatcacatggttatttctttaaaataatgtttgttggggcctggggggcctttagagattttgacagcaaatataataatttttcttttgctaatttaagtgaagaaaatagtggtttcatggagatgcaggtccctccaatctttgaatcctttagttcaggggtattgttgtattttgataaatattagactcttgtcgtcttcttagggattttctttctatttctcaaatattcattgcatgtattgccattttcacggccgtcattgtcatcgagacacttgttaaggctagggctatacaatggagataatttccctccactacgtgataattgaataaattagagccacaaggactcgagtgtggttgccactttcaagtttatgctaaagcaagacactttaagcgacaccgagagttgataaacattaggcacttggctattcatcaaaaagaaaaacaaaagaaagacttggctatatatagaaattcatttccaaacagcacagatttcccatcgctaatatcctgtgaacacaaatggaggatcgaagtctggcaaccaaaaatcttgaccacattttaatgatatttttcctttactgttgcacttataattggttctatattttttccccacagaaattagtgaaaactgaagatggtaattttgtgatcacttggattaaccaagtcattgatcaactttaccgtgctcatctaacagcttaattgtggttgcacacgagctctaaatttaacactagctaattctgtttttaataattctttcccagattggatattcgtcccctgctgaat

SEQ ID NO: 52777 - DNA, 913 bp, Populus trichocarpa
  Intron number 1 from transcript POPTR_0017s04970.1 (locus POPTR_0017s04970) derived from phytozome v7.0 (chr-ID scaf fold_17; pos 3812430 to 3813342 reverse strand)
gcatctaatcctcagccatcaggtttgtcttgaaaaacaaaaaaacccacctttctgattctctcaaattatgatttaagctttatgtgcttaccctttttattttgaaatggtctttgtagttgaaatgaaagaggattgatttatgggtttgggatattagtaatcaagagatgatgggaggttttgtttggttttaaagatgggatctttatgggtttttgattgtaactatgggtttgtgaagttgcgttgtgtttggtaggtgagaaaaatgtgaaagaaaagaaaagaagaaatggggtattttttatttgataaaggaatattgggtttggtgttggtgactattacaataatagtttgaaggtctttttaggttagaaaattgtgaactttttttatgggattttgtctttgatgatggaatagaatttcttcagattttttgttaggactatgagttgaagttgtgaaatccaaaaggttctgtaatcatgtggagacttgttctgattctaagctatgctcgagttgtttttggaagatgcttaggaaacatgatttttagctatttgtgtaaaagtttattctttctttttctctcttgcattgactttgatcactgccttctctttttgcatcttttttgaatgtctcaacttgctgtgattcattttgtgaaatgttgattatgctgaacatgtattttccttgagctgaacttaactgctaagatgctttttattagctctgtaaaaatcatgtcatttatcttctctacatacaatcttttggccttgctaactcttttaggtgtattttaattttcctttgctttactttgtaagatttttttctgtgagataatcacgtggttggatattgcagctaacaatcctcctccaaaacc

SEQ ID NO: 52778 - DNA, 616 bp, Populus trichocarpa
  Intron number 1 from transcript POPTR_0017s06620.1 (locus POPTR_0017s06620) derived from phytozome v7.0 (chr-ID scaf fold_17; pos 5027494 to 5028109)
tcaaatctcttctcctttaataccccggttagtctttcaattcctttatttttggtctcgatctgattctgatttcttagattatgtgattaatctatttttagagtttagtgtatttgtaattggaattgtggggtgtgtttttcttgtagaaaaaattaatggcgtatggttataggtttatttaattaatttatggtttaattagggtaaagattgaagcttttagctgttgaaaggagtgcaattttgttggattttattattttttcttgctttaaattggttacttttcttttacttcttcaatggttttaaattaattcattgatataattttttatttttttattttttctcttgttgggaaataattttttggttcttgttttttttttttccttttgaatttgagacaacaatgaagattgatgatgttatcgtgaaaagacttattaaaaaaaaatagcaaatgggtgtgaatatagtttaattgtttcttatattgagaaattagaaaatttaaagaatagtttgatttatggcattgaagtactctcactggttaaatttggtatcaggattcacgatcagttggggccgttgcggggcttgc

SEQ ID NO: 52779 - DNA, 1068 bp, Populus trichocarpa
  Intron number 2 from transcript POPTR_0005s10610.1 (locus POPTR_0005s10610) derived from phytozome v7.0 (chr-ID scaf fold_5; pos 7640525 to 7641592 reverse strand)
agtacagattgcctagcaactgctatttatcgaaggtattgttaagaactttcacttaatgattaatctttagggtatgaataggtggtggaaagtcgaggtaatcttccatttcttttccttgtgtttgataaaaagaaaaagactaataatttcggaaagcaagggttcaatcttgtttcgtgaaaaatagttttctaaatatcattttccaaacttttatatatttatttattattaaaaaaattgattaataaaaaacactttttagttgaaggaaaacttgcattgatttccataaaagtgtttttcttttaatttaagcaaaaaaacactttttaaaaattataaaaaattcaaaaatatcttgttatttgttgattatatcagatttggtccttaatcttttgattgctatatattttgttttgaattttttttttaatttcatcccttaaaatttaatttctatcaaacctaatatttttttctcttattattttcttaattgaaattatttttatctatcatacttggtttcaattctttcgattgctatttattttatttgaaataatttatgaaattatatttttttaatttcatcatctttcaatttttatttgcagatttggtctccattattttaattgttatttattttatttgaaataatttctaaaagtagaattttttttcaatttcaatttttcatgatataatcaaatactagaaagtgttttctaactcattttctatgacactaccacgtatcaaagaataattcacttttaaagaatttattttttataaaaactactttttaaattaagaagaattattttttaacaaacaaacagatgagatcagatcgtaaaagtaaagtgaaacatcaaaccttgcaaatataaatagcatgcaaaagaattcgggttcaaatggcgccttaattgcttgagaatgctcgcatacacgaagatgtaaatgggaaattttttattactgatatggttgttgaatttacgtgatgcaggagatcgtgctttgcaaagtatatagaaaggcaac

SEQ ID NO: 52780 - DNA, 850 bp, Populus trichocarpa
  Intron number 1 from transcript POPTR_0005s24350.1 (locus POPTR_0005s24350) derived from phytozome v7.0 (chr-ID scaf fold_5; pos 22930584 to 22931433)
tttgcctctgttttcatactctctgcttaccaagagtaactctcttttcctttccatttttgtacaatcttgataaacttctgctctactcctctcatcatcatcatcaattcgatttggatctgtttagccttaggttttaaatctaacactaaacagatagatctgcactttcattacctcttaaacttcttttgtaattttagtagtttgcagctaactaagaaacttaatttgaattactaatgagttgaagcatttatatgtaacttatttgaattaataacttttttttttgtttactaaatatgtactattagtgaaggaaaaagttatgtggtctttggatttattagtaaatgcatcgaaaaataaaatcactgctgaaatcatgaccagaatagaattgaggttttgggtcgatgctaattagtttatgcatttgccctgtctttttatttttcttgtgcgggtcaacattttgtgctagcccacttacttttttggagacacggcataagttggatattgacaagatttgttatttggcttggcattagttttctgttaagaattttattcttttcttttatgatgcaagattgagaaatttaattacagttttcttggatatattgatttgaagaaccagcattaagcttttgattccttgaatgtggcattgtatcttccttttgtttgggaaaaaaatttataacaaagcatttgatgctgttgaagcagttactatcttttgtttgtgaaattatgggttcctcattttcttgtttttggtaaaaggattcttcggatgatatgtttttataatctttccttgatttcaggttca

SEQ ID NO: 52781 - DNA, 792 bp, Populus trichocarpa
  Intron number 2 from transcript POPTR_0005s24350.1 (locus POPTR_0005s24350) derived from phytozome v7.0 (chr-ID scaf fold_5; pos 22931509 to 22932300)
aatctcacgccggcatacaagtaccggaaattgaagtgaggatctctcatatgcacatgccattgaaagatttcagagaaagataataggtgtattagcaagataacaaattttgaaataaaaaccgaaatgagaggctgagacttatcttgaagtttagtgtttaatgattgcttttctcttcttttttgtgagctttcttttgttatggcaatgggtcagttggcatcttggatttcaaggtggaatatcatgagcatgctgtatggtgaagcagagtctctctgaaacaacacaccatatgacaaaaccctgcttattagaacacaaaaactttgcttgttagaacattttggtggtatttcaagcaagttcaaaatcaaggttgtaaagagagctgtcaaaataactaatactaaattcttagcatacctcctgtgtgtttgcatgcacacatctcaaactggtctagtgattggaaggcaatgattaaatggcttaaattaatggtgacctgttgaattcttacgactgttttgcattatcgaacaatgggtgtccattttggcacactggaaaatcattatatactggatacctgaggaataggacttgtacgggcaacctgtgtagccatgcaaagatacacacccatgattaatgattttgacttgcaactagaatgtcccacactcccagtttgtatctgtatattgatttattgttttgtaatcttaattgatatatttatatgcagatcaaacatttagtcagcgctgctatatttctcaa

SEQ ID NO: 52782 - DNA, 789 bp, Populus trichocarpa
  Intron number 1 from transcript POPTR_0017s13750.1 (locus POPTR_0017s13750) derived from phytozome v7.0 (chr-ID scaf fold_17; pos 13915598 to 13916386)
aattcgcaagagagtaatacatagcaagtcggctaccacttgcagcacaattcatcaaaaaacgatgtgaattatcatttggtgtcaaaccaggtgcatggattatcagctgcagccacaattatttgatgcatagcaaaataattattcagaattaatcactccttggcagtcctttccaaccaactttgatgtgttgtgcgctcatctgatgaaaatagcggccttaattacgagagtacttccacttttacatcaaaaatggctgggatttcctttcgttatttagtaataagctgggttaatgagcttagagttcttatgttattgattttgttttaataaggtctctaatctgtgagatttatcaacccaaccattgctctattagtccatccatatcattagccctttcctcactaatgctgtcgcacgtggacgcgcggagggggtcgtttggagtcgccacctatatttgtttcttcattcaattattctgctgttcaagatattaagcgtttaatgtcgtggttaatcagttttttaattgcttaaaaggttcctgaatataggtattattttacgattttctctttttgtttatgcaagaggagcaaagtaattacagaaaattcgattatatgaatgtgatttagttgtgattttccggaattattgttgaatttggcacgtgtgggcatagccgcataggagtttggaatgattaatgtgaggaaattgtctgtttatgatgacaactgttatattgttgtggtaggttcagatacc

SEQ ID NO: 52783 - DNA, 560 bp, Populus trichocarpa
  Intron number 1 from transcript POPTR_0006s01510.1 (locus POPTR_0006s01510) derived from phytozome v7.0 (chr-ID scaf fold_6; pos 900968 to 901527)
ctgaaggtacaaattaaacgatctctttttctttctaagatatttgattgaatatgtatttaactgttttccacaatttagctccaacaaaaccttaatgatgcaggatgtggttaaagcatggagatagaagatcaaagaatttctaacgaataaattgattaagaaacgaaacctatcataataaatagaatatagtgtttacacacacacacgccaagaaaccctattaaccgagaccagctaggaaatgggaatgctaataaatattattactttgatttctttttatatagtatttataaaaaaaaggttatgcatacgcaatattgctgaggtctaatgattcaatccatcacttttaactttattagttaacatttcttgtgtaaattacagatcttggtcattctaacccataaatgtatgtttatagttaggtcgattgagtctttttatcttgaacatgagaagatcttagtcggatttgataaaaagagtttttttgtgttcaaaccttggcagcacgtactcttcgactccttttcaagagtttgcag

SEQ ID NO: 52784 - DNA, 810 bp, Populus trichocarpa
  Intron number 4 from transcript POPTR_0017s02900.1 (locus POPTR_0017s02900) derived from phytozome v7.0 (chr-ID scaf fold_17; pos 2097269 to 2098078)
tacaggtggctacacggttaaaggtgagttcttgtctcctgcaaggtacaaatgtctgtgtgttttgctgaattttctggtcttcttgctgagcaactatgcaatggaatgatgggggttggtgctttcttttgtaggtggataattagtacttcagagttgttctagtttctcaacccagtgttttcttctaacttgtctttgtcaatgatttgctctaatttgtagtttcaaatttttgagtaattaaatttgacttgattcaattttcatggataagtgaagcttctggtgagttagtttttttctagcacctactgcctgctatagaaatcatgtgtctcagttcctagaggagagatgttataaaaataactgcatcttacgggatctccttttcaaaaactagaggacctttgacctcaatgcgggcatttccattgaaactggtggtacactttgacctcagttagaggaccttcacattctaccttcgacctcaattctactagtggcatgctttacattctaccttcacttgttcctttctaaacttctttggcttatttcaagacaactgctccttccctgtatacacaacattttggcttagcatatatcatttccaggcaaacagtatcatctttgcaactcaatcaattaactttgcaaataatttaactagtcattctaatctattttgcatgcatctttatcagtccaagtttcacctctttgtttagagatagctataaacattccatatttaacttaagttatttctttatgctcgtcttttctttcagaatt

SEQ ID NO: 52785 - DNA, 732 bp, Populus trichocarpa
  Intron number 1 from transcript POPTR_0017s06600.1 (locus POPTR_0017s06600) derived from phytozome v7.0 (chr-ID scaf fold_17; pos 5011122 to 5011853 reverse strand)
tttgtcaggtgaaaattgaaattctgtgtatttctcttttgtgtttggttattgagaaagtgaaggaaaatttgagaaattgggaaagtttggaaccttttgtcttctgtgtagaatggccaacttgtaaatttttggctgaaataaagtaggactggaaatgtgaattatttgattttaatttgtgtttttctgtttggctgctgagaaagtgaaggaaaactggagtatggaatagtttagatcgataaagaggaataaaattctgttcttaagcgagtactactatcttttaacaaaattaaaaaatgtaaagtgtttggttttgatttaattctgtttggttgctgagaaagtgaagggaaaataaagagattgttgaagttggaaactattttttgtgtgcgtgtttgctgggttttgacttttgaatgcttgagaaagagagattctttgtttgaggaagcctaaaaaggctacttttgtaatttctgcaagtttaaattttggtttttattttatttttcttttctattgacgagaaagtgaaggaaaaagcttaaatttttaaattgtgaaaccctctgttgtttagggatgcttgacaaaaggaaattctttgcataagtgagtataaaatggataattttgtaaatgttagaaaaatcacgataaaattgaaaaatatttaaactgtttatgttttttgttgggttgtgaattgtaggaatc

SEQ ID NO: 52786 - DNA, 943 bp, Populus trichocarpa
  Intron number 1 from transcript POPTR_0005s07260.1 (locus POPTR_0005s07260) derived from phytozome v7.0 (chr-ID scaf fold_5; pos 4912970 to 4913912 reverse strand)
taaagtaagaggagaaaaccctcaatttccagccagtacatatatgatggagacatgaactcaaacgaaacctcaaaagtctaagaaatgaacaaacttaccaaaatgggtcttagatgttggcctttcttaaccaatttacagcagcaaattcaacgccaaaaatacaagagaacaaagtttattaatggagcaaaggaagtcggagcacagagagtttgtgcgccttccccaacacttcaaatgaattgtagtctgtaagtccagttctgccacggaaccgacttgtctttttaataataataaaaaaaaaagtgaagtgcctatccagagcactaaattttttttaaatacaaaaataaacaagattacaacactaccatattaaaaatatattaaaaaaaaattatttttaatatcaacatattaaaattatttaaaattatataaaaaaaattaaaatttaaaaaaacacacatataaacataccctaaactctaaagaattttaaaatgattcagtaaactttaaatttttttatttaaaattaattttttatatattttttaaaaatattatattaaaaataattttttaaaaataaaaaaaattattttaatatatttttaaataaaaaatattttaaaaatgaattgttaccgtatcaaattcaatcatccctttgcagactagataaatcacacaaaactgaaacgacttgtcatcttctcttttttgtggtctcacatttatgcttggggccggtgatgacgacgacgacgagttgaaaagctaataagtttgattatttgcaataaattactacttgggttactctatttttttccttctctaggtgtttttgatgttttaaaggacttccattttagggggtttgctacctttttgtgtctctgtgtgtaaaaagaaacaagcttggaag

SEQ ID NO: 52787 - DNA, 612 bp, Populus trichocarpa
  Intron number 1 from transcript POPTR_0017s11760.1 (locus POPTR_0017s11760) derived from phytozome v7.0 (chr-ID scaf fold_17; pos 11586074 to 11586685)
ttctccctgagattagtcaaaggcgctccgataaggtacgttagctccttgtctttctttctctcttggattgtagggaagggagggacatgaaatcttgtaggggaaagtagatagagtggagaaatacattagtaatgctgcacatgatatgctggacaagaatagtgtattacatttataataattgcactctctagacattttgagctatgacccggccatcaaggaaaatattttcttagatatccatgttctctttgaccttaacagtttttgtagctggaccaaccgaacgaaacacattttatggtcttaacaactattttcgacaatttagtgcataccctttagccacattaaatatacgtcaatgttctaactacatgtagtaccatgtggtttagactaacataatgacaatttggtaatttgcaaggaaggattatatatatataatttctccaatacttgtaacgtaaattaattagaaagggttttgcttgtttcacaaaaagtaataattgcttgtgaccaatttgaattttgactttcttgaatgcgtatatatacacaggtatcagcttccaaggtcctacaagagacttgcaa

SEQ ID NO: 52788 - DNA, 690 bp, Populus trichocarpa
  Intron number 1 from transcript POPTR_0005s22180.1 (locus POPTR_0005s22180) derived from phytozome v7.0 (chr-ID scaf fold_5; pos 21149489 to 21150178)
tttacaagtgggatcctgaggagttgcctggtatgctatcttttttatattattattattattattattttactggcgttgatttgagttgtgtttttgtatgattgttaaagggttttggttttcatttttgttttgtttaaatttgatcggaggatttcgggattggttacaggactcatggagctgataatggttaattagtatgtgttttggaattttgatttgggttttatgtggattttttgtttgataagtttttttttttaatgatttggaatggtttattgctgtgaaacttatttgaaggagagggttttctttgagaattttttccaattcgagttttttcttgactgatttttagctccctgtgtttgtttggctacttgagccttggatttgatgtttattttctttgttgaattgattttgatgttaggcacggtgttgactgtttgatcaatttattttgattgtcaaagcattagtttgaggtgaattgtagacttctttcggttttgtatttgttgtactgcaaaattgcattgatagctttggctgtgaatttactgtttgcctgcttttccaagaggcgagagttagagtttggaagattgaattatctattgctaacaaatcaaaaaatgatcttgcagggcaatcgatattgaagactggggataggca

SEQ ID NO: 52789 - DNA, 673 bp, Populus trichocarpa
  Intron number 4 from transcript POPTR_0005s08520.1 (locus POPTR_0005s08520) derived from phytozome v7.0 (chr-ID scaf fold_5; pos 5930791 to 5931463 reverse strand)
acaattgtacattttgtggtgtttttcgtaggcaggtatttatatcgctctttgtttccccaacgctgctgatgctttctgtttttgctctgtatctagaagatatgtcattaggccccataaatagatgtttgcaaatgattatctggtgcctgaatgacatattttagggcatcctcctgaaaaaagaaaaaaaaaagaattaataattgagtgtagaaaaaggtaacactaaagcaactttgataataatagatgtacaattacttaaattcataataatgatgttggaaacaccctgcttttattccaaactaagttcagagttcaagtcactgattgggttgttagtcaaggcaagcaattaatgcttcatacagcctgatttatgtcattcttaaactgctttattcatgcatcacttattttacttcagtcaattgagaaatagaatgctttagttcatgcttaaaaaagaatttttttgaactgaaacttatgcctcaaatggtatttgaaaccacgctagatattagatcgtagcgaaaagttttagcatgcagtttgatattgatattttcatgtgaagaataagatttatgtatttgatggggttggtttatttctttgtcttcaaggcccttgatcgtggcgctgcattgttgaaagtaga

SEQ ID NO: 52790 - DNA, 996 bp, Populus trichocarpa
  Intron number 2 from transcript POPTR_0005s07660.1 (locus POPTR_0005s07660) derived from phytozome v7.0 (chr-ID scaf fold_5; pos 5249596 to 5250591 reverse strand)
cctccaagtaagactttaaccacattgccttcattgagaaatcattcaatgaaccttttactccagttgccttgcattgtctttagggggataacaatagttcttttttgtttttagcttgttcattctagttattttctgctcttttgtgagaatctacaatgaaatttgttttgcatgtgatccatgtggcaagtttctttaaaaatcctaactgcctttgagccaaggataatgtcttgcaagcaacatttcagacctatctctcattttattattttcgtatcgcctaatgggtggatcctgaggataaaggtgtcatacgggatggaagaccatagaaccggcgtatgtttgatagattcatttgcagtagctttatgtttctaagatcaaagtgattgtcagatcagtaatcatgtgttcaccttttggtctcttactctctttcgtttgaaccttttctgtcggacatcagattggacatcattgtcacaggtctacagcagttgaaacattaaattgcaatcacatttattctaaaacaacgatttgattttgattttttgttttgttatttattaaattttaaaggaaatgataaaacagcttgtttaagtttcgcttatccaataaaactctgtttgtttcaactccagtcgcttttcatatacaattctatttgttttgagtttcaagtttctgtggcttcttttatctgaggagttcccacattaggattcctcccctttcttgtttgaatattaatgggtctaggtaatttacattaggagaagctcatagatagcagcctaatctgtagtgtgagtgcttctgtcctattttagtgtttatttacatttagtgcgatatcttctccactatgggcacataggcctcaatttgattaagttcctcggggtaatttgcagtcataaacatatcttggctctaatttcaggtggttcattgttcctttttgatcgcaaagtgctc

SEQ ID NO: 52791 - DNA, 736 bp, Populus trichocarpa
  Intron number 1 from transcript POPTR_0005s07660.1 (locus POPTR_0005s07660) derived from phytozome v7.0 (chr-ID scaf fold_5; pos 5250670 to 5251405 reverse strand)
tgactctagacgttaccctcttggtaaccagctaggtaagagtgtttcaacttttctttttatttatttttttattttgattttggattcatttgtatagtgtattgtagaacttttctttgaagatttcagttttgtttgatgactggcttgtatatgtttaggagaagaagatattaattagtaggactcagtttgtgatccgggctcaaagcttggatttttattgctgggttcttacttttaggacgaaagggacagcttttaagctttgttatttgtttgccagtgcaatagtccagcaaagataatttatttaccgaatctagtgataatcttgatgttcttctgggggagggctttgagattttgaggggaatttgtgaaaaagaaggaaagttttggtcaagatgttatcattaattgatagctggatttcagagtaatgataaaaactggactgaaatttctgttttattgttaaggatatagtttcaacatgctatatcagtctctaacttcttctctcatgcaggcttaaggtgaaataaagtagtttagcaatggtggcattagttttcatgctttatacactcctcttgtctttttttttctttttttttaatacttaaatgttgtaaagttattgctcatgctgtgcttttaaaaagaacaaaaatttttcctatggtggaatgcagatattcagcagatactggtagaagcacagaatcga

SEQ ID NO: 52792 - DNA, 714 bp, Populus trichocarpa
  Intron number 1 from transcript POPTR_0017s12950.3 (locus POPTR_0017s12950) derived from phytozome v7.0 (chr-ID scaf fold_17; pos 13114544 to 13115257 reverse strand)
aaaccctttactttaaaagcttcaaaagaagaaaggtcagtcagttctactttgatttctcgactggttgatgtttctttttctatctgccttttcttttattattactatccttttagatcttgctgatctttttctgaggagtaaatcaagttttgttctttatatgtagcttgcttttgtctatgactatgccaaatctttagaacctcatttgtgttatatgcatatttttctatgttaccctcgtgtgcttgagatcccgtctcctttttggtcattttttgtatgaatgattgatatgtagtgctgaatgaactgggtttttattgcctttctttgttcttgctgtttgtagatttgaagttacttcttttatttttttcttgaagcagttaatgatcttgcagtcctctaaccgacaatgcgaagtttcattttttaagttttacttgttatctcctcttaccatttggcattggatacgcaagtatttggaatttggttttggaaaagtaatgtgtggttttccaggtaagatcagagagtagcatgtattgctcagcctttagggtaatgaagtctatagctcagagtttggaagacaattattaagaggcgtggttgcaggattggggttcagttctggttgttgatcaaacaaagggattggttgggagtttgtgattgctattctttgtgaactttctagct

SEQ ID NO: 52793 - DNA, 912 bp, Populus trichocarpa
  Intron number 2 from transcript POPTR_0005s18060.1 (locus POPTR_0005s18060) derived from phytozome v7.0 (chr-ID scaf fold_5; pos 16070425 to 16071336 reverse strand)
cgtatccggtttgtttctttttgcttaattttatgacaaaaaaataaattatgttaaatttggtcatgaatcggttaaataggtattagaagtgttggagatggtttttggatttcaattcttaggttacattttaaatgcaagaaattaacgtaacttttggagataatatcctataatttagttgaaatagtggagtggaagaaaccaggtagttatgctttttgtgtattactggataggtcagtcttggaatgccttttgcagtgcttctgttgaatgaatataacctagcacttgataagttcctgaactgtgaattaaaaccatatttgatttgagttggattggtggagaggatgataatttggaaagtttgagcttttgagggagtttcagcaacagataaattggtacttggaagaagagagttcttttttttttcttgatgggttagcaagagcttttaggtttgtagatggcatgcttaattgtaattgcaattgttttgacagtattatgataaatgattgtaaaatttgctcatggtaatagaatagcgtcattcaatgtcatacttagttttagcttataaatgatgtgtaaatggaccaataaatttttggttaagactgaggtgtaaatattttcttaattttattattgagtgaagagttgtgtttctgtgatgatttggctgcaagaaattgtgagttcatggatatcttatcagaactatacttgaaaaattcaattttgtgctgtgtttctttatggtacagcttctgagaatttgattactgcttgtaataacaaaaaaaataaataaaaagaaacagacaatcatgtgtggatgccatggtttttttttttgggtctgacagaaatctgtgtatgtgtttaaggaagcat

SEQ ID NO: 52794 - DNA, 894 bp, Populus trichocarpa
  Intron number 1 from transcript POPTR_0005s08490.8 (locus POPTR_0005s08490) derived from phytozome v7.0 (chr-ID scaf fold_5; pos 5907530 to 5908423 reverse strand)
aggcttggtttaagcgtgctggtcaacaagttgaggttttatttcttttattttcatcatttaaagaagttttgcttgattgttttgtttcataggaaataaatgggtcttagaattttcgtgcttgatttgaatttagttaaagaaagaacagattttcgctaactaactagtttaacttcttactttgtgttgtgctaagcaatcttgattaaagttttgctcgtacctggactgagagggtcaagggaaggaagagcaagcaccaatgatctctcaatctaaaggaaaaaaaagggggaataccatcattttggtttataaatagtaatcttgcatgcatcgtcacttgttagtaatacttgtacgcttagtccatagtttccctttgtatcatagatataacatgacacaagtatgagtggattcctggagaacttgagattaatgtccattttaggaaatgtgtcctaccagttggctgtttatcagcagattatctttcttaggatggtaattcaagcatcggagaataaagttgagccagtagcaactctgacggaagggatctggtttgttgttaagcaagacatgaggctttgtgataggagaatgactgagaaactttagttgagcaagattgcaagcttttcatttctggatatgttgtctttgcaagtttctagtcctgtatggtcttaccagaggtcatggagatagaattacctcaatagtatatcccgctatttaattcaggcttcatcgtgctaccacctcatggctgagcacaattgcatttcccatgaaatctgggttctgaaacactgtttgtttgggatgacaattcatggtcttgcaggtttctgttgtacctggagggcgttggagtagatt

SEQ ID NO: 52795 - DNA, 267 bp, Populus trichocarpa
  Intron number 2 from transcript POPTR_1013s00010.1 (locus POPTR_1013s00010) derived from phytozome v7.0 (chr-ID scaf fold_1013; pos 6593 to 6859)
gcgcccaatcaccattacgaacttgttctaccgttgtatgtttgatgcaacattttttcttctatttatttatttatattatcagcgttaataagctaaccccagctcgaacatctcaatgcaagctgtttaaccggctgattaaacactgattcttgagtttttttttttggagcatgttaaattgcttacactactttaaatcccagaaggtttgatttgacttaagttgtgagttttttgcaggcttttctgccgcaaagggtg

SEQ ID NO: 52796 - DNA, 956 bp, Populus trichocarpa
  Intron number 3 from transcript POPTR_0005s15710.2 (locus POPTR_0005s15710) derived from phytozome v7.0 (chr-ID scaf fold_5; pos 12315629 to 12316584 reverse strand)
ctccttcaattgatcatctttccaaattcaatttggtaagtgacgatttaccaagtttttcaatatccattccattttctctaaaaagtacaaaacagcgggcgtggtggtaagtaaatccaggggtgtgaggctaattatattgaaacccaacacaatgggtccaaaaaaaaaattatttttctgttttattattaggaaacccattgaactaagcttcatgaagaattcaattgtaaattgagtcatgagctgttaatactcatagatatggaagttgtcctgtctcctgataagatagctgtcgttcttaaccttacaaaaacttttaactaaaagttgtacaaaccaaatcctactcgtagcagtaatattatcactgactaacttcttcctcagataagctaaaggattttgattttaaatatttctcatttcttttaaaggaagcaaatcttttctgcattcaggagaataaacaaaatggttttgtactgttgtgcttttagttggtggcactcaaatacgtaagacaatgaccagtctaggttcattttgaaagaaaaataaatggccctctaacttaaacaaggccttagagttcatggttcaccacttcagaatttgttcttctctgcttagatagcttgaaggtatattttaatggaagaagctaaatattgattaatcttattaacagcctagctgcctactagttatgaataaaatattggaatcatccagagagagtcaaaaaggaatttggtattgtttagattcaagtatccactcagatgggaatggtcaacaaaggttctatagtggcatgtaaagtgttgtatcttcactgaaagcgaaaaatcacctgcattccaaaaaactttcggcctcaaaatatttcttcatggtcaactaataacttgtacatgaactttttggcatttttgcagttaaac

SEQ ID NO: 52797 - DNA, 431 bp, Populus trichocarpa
  Intron number 1 from transcript POPTR_0005s20810.1 (locus POPTR_0005s20810) derived from phytozome v7.0 (chr-ID scaf fold_5; pos 19959351 to 19959781 reverse strand)
cagaggaagagattcgcaaagcttattatcttaaggtttgacttagattagatggtgttggtattttaatgctgaagaagttgtgcttggatgttaatgatgcttggaataccagaattttaatattctagttttggtaatcctatggtgaatttgagttgacaagcatatccatgttgctattgcttaagactggtaaaagagggaatcagaatctcaattgaatttaaaaagtaaatgaagattttgattttcttatgaatagaacctgatgccctttagaaactcaagagatactgagcttctttggatacaattttttttaccatttgatttgtcttttcttattaaaaacgagtgactgaaaagctaactataagagagatgtcatgttttacaggccaggcaagttcatccagacaaaaatcaag

SEQ ID NO: 52798 - DNA, 445 bp, Populus trichocarpa
  Intron number 3 from transcript POPTR_0005s16400.1 (locus POPTR_0005s16400) derived from phytozome v7.0 (chr-ID scaf fold_5; pos 13120389 to 13120833 reverse strand)
gaagcgatcaagaagcacacaaacctgctgataaggttatgaaactcctttcctctctctcgattaatcaaaaacatacaagctattattcttaaatttcttatgaattataccagctttgtgtggagaaaatgtgtagcatgtgaatcctttgggaaactagatgaaaagattgcttcaaataaaatccacaaatgggaatttgttgttggtactattctcacatgaagactagtagtacacaaaataatgaatttgtggatgtttgagcttttgagaagcatcctttcttattgaactggattaaactcaatgggattggatgttccgtttctctttagtgcaaagatgaaaaatcaatgaatagatgactaacagtgcacttgaaatgttcacaaatctaactgcagatacaaagacgattggcacaaaatcgtgaagcagc

SEQ ID NO: 52799 - DNA, 723 bp, Populus trichocarpa
  Intron number 1 from transcript POPTR_0005s20050.1 (locus POPTR_0005s20050) derived from phytozome v7.0 (chr-ID scaf fold_5; pos 19068196 to 19068918 reverse strand)
ttctctcctccactccaccatcatctccgtttcaggttcttaaaatttctattctcaattggtgtttctgatacttcactgggagtcatttattttctcgatgttcgtgtattgttatggtttgttgggtttcttaatatagaaatgttcgcactattagtattactaccaggctgggcatcagcatggtcacggttgcttttgttgttaacaggggcatcaagttttaagcaaccttttgctaacaattgtcctaaggagaaatcttgatttttcttttttggacagattgagaatgaccattgatttatttgcttaagcaaacaagtgcggccgacatggcctgttattgtgttagaaacataggaagtgtggtattcagagggaaaaaactaaaaagatactgggagtatagatagtacaatcttcggggtgtgtttgaaaggctgttcagtggggtgattcttttgatgaaaagcttatgacttactgactgatacaaagatttttaaaagaggagaaaggtatacctagattttacaaatcgatgaagcttcagatgctcaactaatttgatgcttgtaaactttatgttgcattagcatacttgcattccttccatgtgatgtgcttccttccttcttaccttgtcattattaattccgatccttgtctgcttgctgtgtagtggttaccattttggtaaatcagtgcttaaaaaat

SEQ ID NO: 52800 - DNA, 383 bp, Populus trichocarpa
  Intron number 4 from transcript POPTR_0005s12820.1 (locus POPTR_0005s12820) derived from phytozome v7.0 (chr-ID scaf fold_5; pos 9641979 to 9642361 reverse strand)
atgtgagtcatttataatgtttagccccctcaaaaataaataaaatgaagagtgcagttacaccgatgaatgaagaatcattttggtctggaaaaagtttattgtcttacttctgtggacatgctaataacttaaaagttacataagtaatttttttctctttttggagcaaaaactacccacgactaaaactcaaccattagaaacctttgttggacaaaatctacgcaaattgcatgagaacttttttgattactatattgtgatgaagtttcaagttttcgtggtatctgagtttctgcaaataaaatctgcatgctgatacacattttacatttaaataagtgatctaattgttgaattcgatgcaggtctccccaggt

SEQ ID NO: 52801 - DNA, 325 bp, Populus trichocarpa
  Intron number 2 from transcript POPTR_0005s12820.1 (locus POPTR_0005s12820) derived from phytozome v7.0 (chr-ID scaf fold_5; pos 9642730 to 9643054 reverse strand)
aggaggccatattcaggaaattcaggtaattttgagatttatttttaaaaggaaaagaattacataactcaagaacatgggataactgtgatatagaactttgaatggttgcatgcattttgaaatgatcaaggcattgcctagttacctaattggttcaaaacttctggttactggtttgagttatcctcagtcgtttctttatttctgctcttttctgggagtcaggctccctttgtgatggtttgcactttgttctgtacagttatgctaactcatatatcttacagcaattcttgacgaagaggaatttggggaggtgtcc

SEQ ID NO: 52802 - DNA, 731 bp, Populus trichocarpa
  Intron number 2 from transcript POPTR_0005s03670.1 (locus POPTR_0005s03670) derived from phytozome v7.0 (chr-ID scaf fold_5; pos 2450122 to 2450852 reverse strand)
cgcgttccaatcaccatcatcgatacctcatctaagtattttactctgtgtaaaaatatattttaatatgcgtattagttagtttaatttgctaaaaatagctgaatatttgtattgttttgattgtatttttagctgataattaatttagggttatagcttagttaagttgctatggtgtatttggctttgggataatggaaagaatgggaatcttttaatgctgttatagaaagtgtggagattttgtgaatgtccttttaaaatctatttgtggacatgtttggactggtggattttttggggtgaagttgaggtactctgattagtgggctttcatggtttttgaaatccataaggctaaaagcaactcttgaagtgtaaaaaaagaaaaaaaaatcaagctttgtcgaataaattgtgtttttgggtaagtttgtgttcggttgttgattattatgtgtggtaaagaggaaacagtcatttgagtttggcgtattttgttggcctccgagatgggaagagctgtatgtttaccgggttgggtatgtcctgtgaatgaacccaggagatcttttttgggaaggattgatgaatgtgggaaatgaggttccacattcattccatttttcttggttgggaagaggaggtgcaatgccattttttgtttaaagtaatggtgtgaggtaaataatgaatgatcatttgttctgtgtgtttcagagtggagg

SEQ ID NO: 52803 - DNA, 260 bp, Populus trichocarpa
  Intron number 2 from transcript POPTR_0157s00200.1 (locus POPTR_0157s00200) derived from phytozome v7.0 (chr-ID scaf fold_157; pos 548 to 807)
atcataagcggattcctataattgcagtaagcacttcactatcaaaaacccttaaaatcttgataccccatttcctctcctgattcacttgtaatcttactatcctgaattttattagccacttgttaaatattattatcaatcaaaacacagcaatgtgtcttggtttctatactagccgatttacgccagaaccaccgaaagatgtcctattttcttctgtccgcgtacgctaacagattctgctggtgaatgtgcag

SEQ ID NO: 52804 - DNA, 1005 bp, Populus trichocarpa
  Intron number 1 from transcript POPTR_0017s00590.1 (locus POPTR_0017s00590) derived from phytozome v7.0 (chr-ID scaf fold_17; pos 321323 to 322327 reverse strand)
tggacggatttcaccaattgcgcattggaagaatagtaagtttatctttgaatgtggcccttgtaagaaactaaccttatttgacattattacccaagaaataactgatcttggatatataaaagatattcattcgtgcgaaggaattttcgtttatcgggggagcctagtctcattcaaggatagaaatgaacactgggaagctgaagcgctagcacaatagactcgcataaagctgaagaaagcatcgcatggtatgaaacagtttttttatcagtagaatttagaaatttcagtttgaacatgtcgttgacaaagagatgcagagtaatataccgttgatccatgtaactcaataggaggagcagtcattctctgtttccttacataataatcaaataagaagtttctttgagtaatgaataatgtgttgtattttattgtgctatttatattctatatatgattaattagtcttcctcttcttgaaacgaaatcccataaatatagttgtggattcaacacagactaataaatatcaatgaatgtgaatcaaattttctactatattgatgggtgatacccaaatttctgaatgctgaattttgagatcatcaaaggagactgggcgcaccattcaattctttgcttttgagcatctttcatatattgtgatttgaaaaggagtatatactgcaggcatatgaaagagggttgatgatgatgttggttgcttgagaaatcacttgttgcttcaggatgaaggtagcctaagttgtaaaaacttcaggatttgattggggttttcatgattgtatcctggctaaagtgtgtaggctagaacttagattttatctctggactatgtttcttataacatgttagaataaggaaatctttaatgtaactgtatgtgtgagtgttcttgttagaaccgaatgttcaaccatgttgctcagttgatgtgaagcaacaaaactatttctgatcattcaaaggaacatt

SEQ ID NO: 52805 - DNA, 739 bp, Populus trichocarpa
  Intron number 2 from transcript POPTR_0005s12990.2 (locus POPTR_0005s12990) derived from phytozome v7.0 (chr-ID scaf fold_5; pos 9821485 to 9822223 reverse strand)
ttctattgtttctccagattcttaatttgtttcaggtgaagttctgtctgaaacttatgttttactgttttaacatagcatagacagctgtgccatgtaatctctgtatgattgcaagatgaggttggagatctttatccatgaagaattgaaatttcttttttctgttgatagtattgatgctgggcgcgttggggtgagatatgagggacgaatgattacatcatatatgaatttggctaaaatttgtaatcatggagagtgatactgcattacctatttattgtcatgaattcccatttctcatgattggattgaggtccttttcgtttccttgatctaattgatatctttttattcatttggtgagcttaattatagttcttctttagcttgatgcctgccatgctcggttgaattgctgcctctgaatttgaaattcgaaggcatctgtgaagtatgctccaagttgctactaccatttcagacgcctgctcattacaagccttttatttaccctgttaaataatattcattcattcatctctttgattgatatattcattttcaaccaattgttctaagaacttgtaataattgtatattgaataatgaatgagtttgtcgtaagtaatgatttaaatacttacctcatttcctttcttatctcaaattctttgtggcgctcatgaattattcaaaagaccaaaattcaccagcctgctaccgaaaaacctat

SEQ ID NO: 52806 - DNA, 494 bp, Populus trichocarpa
  Intron number 2 from transcript POPTR_0005s04670.1 (locus POPTR_0005s04670) derived from phytozome v7.0 (chr-ID scaf fold_5; pos 3134129 to 3134622)
tggtatgtttttttccttgttttctattcactggggactaaaatgttaaaaaatcttgaattgaataattggctttatagtttattttttagttagttaaggaagtagtcatgaaaaatttctgttgattatcgttgtggctgtgaattttattggtgtgttgtatgttttatgtttttggaagtttgtatgatatcagctttggttttgttattgatttgtgtaatgtgattgcttgtttgttaatatgtgaggtggtgtatttttgatttggtgattttgaagctagaatagtaactttttgtgttgattttctttgtatgattgtcatgtttatgctcgcagtcaaattcttgagtagctgttgcagcatagatttggtctatggagactagaccaaccatagcagcagggtaccaattgattgttttgtcttcttttactcatcaatctgctgattgtttttaatttttatttttggtgtttgaagataa

SEQ ID NO: 52807 - DNA, 336 bp, Populus trichocarpa
  Intron number 2 from transcript POPTR_0005s24040.1 (locus POPTR_0005s24040) derived from phytozome v7.0 (chr-ID scaf fold_5; pos 22696715 to 22697050 reverse strand)
ggcggaaagagttgatttcggatttatcaactttggtaagaagtttctgttttaactagattttcagttttcattctgtttggttgctaagaaaatttgtggaagggaaagggtatggatcaatgaaaatttacttcaaatgaatcaaacaactaagtttaagtgcgaatattagtacaattagttataatatttgttgactggtgaaattttcgcatggcgcctgaaatattagaaagtcaaattatactgataagtttgggttttgtaaatagagatttaacattgattctatttgtgtggtgcagagatacaggagagattctgtacagctta

SEQ ID NO: 52808 - DNA, 503 bp, Populus trichocarpa
  Intron number 4 from transcript POPTR_0005s18790.1 (locus POPTR_0005s18790) derived from phytozome v7.0 (chr-ID scaf fold_5; pos 17081657 to 17082159)
gacacaggtatgaacatagctttttctcgtttttcatgtcaaaggaacagtagaaaaagttgatgagtttcattatcaacttgtggataagttgactgcttaatgattagatgaaccagtaattcaaagttacctgaattcatttctgtaaaatttgacctcctgtgatcacttttttatattttctttcataatttctcgaatgctgccccaattatttttcttgacctttttccttcattaccaataagtaataaaccattaccttattgtgtttggccaattaatgctagatggatcagaaattgtatcttattattatccctttgaatttcagggctgttgtagttaaagaagaatggatgttcttttatcctgtcactgaagagataattgattttatgattaatcaaattgttgccgcgttatttgtagcttttattgacaaatgtcttttaaatgaatttccagagagcctgtgtattcagttgcatttagtccta

SEQ ID NO: 52809 - DNA, 1053 bp, Populus trichocarpa
  Intron number 1 from transcript POPTR_0005s03220.1 (locus POPTR_0005s03220) derived from phytozome v7.0 (chr-ID scaf fold_5; pos 2120867 to 2121919)
ctgttactagtcttgctaagaagtattctgttcaggtaattattaaagttgaatgctttttggtcactgggtttcttgttagatgttcgttcctgtttgttgatttggggggaagaaagtggtttttggtatgtgggaatcttgggatatgcttattttgcttgtagaattggataaaatgagtggtttttgccatgtttgtgatgtgcttgttttcttcttcttctttttttgtagaattggagatgattctgtttttcttgttgtatcattgctttgtttgtagagttgaaaaggtttgtgctttgtaggcagtggagtttttgctgtatgattgctctgtatctggttattgagaaatgggaagtttaagcttctgtcctctatcatttcatttggttgataggacagtatcatgtaatgccacttgaagtttgtaccgcatgattttggttctgctcttctttctagattgttaatgagtaaattatgatttttttaaaaaaaactggcaagctagcatgtgcaaaaaaaaatttagaaaatagcgcagctagaaaaaccgcagttcccacctgcaagttattaaaaaaaggcagctgggaactgttatttttatagaaactgctggtgggaattgtgtttttattttttaaatagcacaaccaatttttagtgtaaaggtgtctgttttttaagggtgtgtttgattaagttggcacactgaatttttcaaaagaaaaaaattcttcaaattaattaatttttaatgtttttatactgttctgatgttaaaaataaattttaaagaataaaaaaaattattttaatgtatttacaagcgaaaaacactttaaaatgctaaacacaaccaacattctgcagttcccaactgcgggagatgctgtaattcgctggctgtgctatttcttatttgaactatggagtcttttgtagttgatttatgatagaagcttcaaagtaaatgcactgaacatttatatatattttctttgcttggaacaggttagggatataaagcttttaaataac

SEQ ID NO: 52810 - DNA, 1012 bp, Populus trichocarpa
  Intron number 1 from transcript POPTR_0005s24190.1 (locus POPTR_0005s24190) derived from phytozome v7.0 (chr-ID scaf fold_5; pos 22803712 to 22804723)
cactctcttcctcgttaaattccattgtgtcccaggtgcattttctatctctggttttcattttggtgcttatgattgaaacccatttttaaagttcaattctttttatacgaatctgtgttgtaattgcattgtacattgtttttcacattgatcctttttcttttcacgtataatgattggtttagcggttcttaatttctcagcatttgtgtttctaaccttgaaagagtgcagatcatgcatgaagtagtgaattcgtaattatgcaaaattcacaagggataattttttttttgtgggaccaagtaaaaaacgatctcaaaagtgaatctgggattggcttcttagcattaatcgatgtggtttgcaaattaaatttgctgtctgtcatctttattggggttgttagctgattctagtgttatattgtgtagttgggttgggtagaggattcttcttctttttgttttttaatttagtattcttcttgttggttgattttattactaccttgtccaattgggtagagctaaatctgtactgattttcttatgaattctgagcaaggtttccctaactttgaaggttatttaagaatttgttccaactgtccatttttacgaggagtttgtcagttcatgatcctttcatttatgccgtaattaactttgccttttttttaggttcaattattttagatagagtctcacgttaagctttaaaaactttggtaaaagtacacagttgagttgagtatcctcctttttggggctttctaagatatttctgattttctcctttttttcttttttcattttttaaaagcattgctgcagatttatttgtaacttagttatttctgaattgattcaatttttctggtttctgggggttgtggccacgcactgcattgaattcagaagatatgcatttggatgattggtctatgaaatattttgatgaataacagccttttttttcttttcctatttagcgagtccagaaattc

SEQ ID NO: 52811 - DNA, 880 bp, Populus trichocarpa
  Intron number 1 from transcript POPTR_0017s10000.1 (locus POPTR_0017s10000) derived from phytozome v7.0 (chr-ID scaf fold_17; pos 8814502 to 8815381)
tcctagacattctacatcagatattccttctacaagtttccaacaaacagattacactataaatataccaaaaccagtgtataccaaccttgaccaataatcgcctccaacatctccaaccttttatgcagtaactaaaaacatccaaaacgagctgaatgttttgacttcagaaaaacattttgttcttgacaaaactcttttcaaaaaggatttttatgctgcctataattctacaaaatgaatttggtttttccaacactttctctaacagagaagtgagatacaaaaacaattttataattttattgagttacataaagtacaaattgtattctttgattggttcgaattatattatacatctgaacatcacattacatatctttttgcatccatcaagcatgcatgcccggtcacatcaagatccaaaatccctatatggaacctcactagtggaccaacagttgagtctgaacatccacccttgagaaatatccaaataacccacaaccaccagactgtagatacagccccctacaaattacccagtgatgacaccctttccaataccaaacacatcattaaccaaaacaactttacaaacaccaacctcaataccttagaaaaacagcttacccgactagaaaaacaaatacaaagaaccactaccaattcagttgacattaaaacctcaacctacctaaaattaaaaaaccccgtcttcaaaccttaccaaattaaaaaaacaagctaaacacaaatccaagaaaaccaaacagattttcttagagctatcaaaacacacttacaacaccttgacagttcatctttaattgtcctagacacaccacaaacaaccaacccttctacatccaca

SEQ ID NO: 52812 - DNA, 574 bp, Populus trichocarpa
  Intron number 1 from transcript POPTR_0005s20710.1 (locus POPTR_0005s20710) derived from phytozome v7.0 (chr-ID scaf fold_5; pos 19832313 to 19832886 reverse strand)
tcttattctctctctaccactctgtcctttgacaggtacgcttcaagatcttcaccctcccccctatagcttctcttctgtttctgacatcttgtctttttttttttcttgctttttatttggtggggttttcgcattttctcttttattgtcttaaatttggataatcagggcttgtttttaatggctcttactgttctcgagtttgatatggggttttatacacctgtatacaattcagttgttgttggttccttttgctttaatccatttgggtcgaatttgtttttgtttgatgatttttatacactatgaatatgatcgtgttgaagttgctgtgagattttttgtattctctttgaattttaatgggttttgatggagaatcaagtcttagctgctctattggtgataattttctttttcatatttgatcatgagtttatctatgttccaagtcacttgtatcacttcaattttgtacagtttcaagattggattttgcaattgatcacgtggctgattattttgctttgtaggataataagggataccgagcttaaactaaggaacc

SEQ ID NO: 52813 - DNA, 349 bp, Populus trichocarpa
  Intron number 2 from transcript POPTR_0006s03520.1 (locus POPTR_0006s03520) derived from phytozome v7.0 (chr-ID scaf fold_6; pos 2289317 to 2289665 reverse strand)
ggtaccgcaggtgcgtattattggttgtaatgagagataagaaacttttcttaaattcacatttgtaatattgttactcttatcttcttcgtatcattatacatttacattttcatgttttatagaaaaaaagtgttatagcctttccttggattttagtaatttttaaatatatggcaacatctgccttagatcaattttgatggtttattctaatgtctatttgtttggtgcactcacataggttttttaattcatatctgtcttgtcgttctttgaagggagcttccctcccaaaacaaagtctattattatgtttttaaactactttttggtatacagctagcag

SEQ ID NO: 52814 - DNA, 868 bp, Populus trichocarpa
  Intron number 4 from transcript POPTR_0005s17780.1 (locus POPTR_0005s17780) derived from phytozome v7.0 (chr-ID scaf fold_5; pos 15522786 to 15523653)
tagtaagtctgttcctcgattgtgttttattatattcatctattcctgtgctgccttatgctatagttacaaaatttataatgaactggacgagtgcattaaatattgtgttaatgcccaaccattatctttcatataaaattcatcactcacaatctttacatccaattacacagcttgctccacaaattgtttttccgttgccatgtttgtagagtttttgaaaactaaaaaggtaccgtgacgttgcttgtctgttgaattaaatggaaaacaagcatacatgtgtaaagcatgagcatatatattccaatttcattccaaccatgtactttcatagttgtcagcactatcttctgcatgtacatgttctaggtatgcacgttgcaagtgttgattatttagtttcctttatgtttaccactgcattaatctggttatgcttttttcacaaatgggtttcttgttctacttcagaagaaattttatgcctggatgttaaatattggtaatgatggtgactggtagatggagtttgaaatccattagaagctttatttactgtttgtcattaataaactggtctgctttaaggttaataaacaattttgtggattaatggctatgttactgacttgggtcaaagattgagtcttttcccaattccatggcatctttaagtatctgtagatatgctgtaaataatgaaatttgaaaatttaatggtaatcgtcccgtggaattatgttcaacatttttttttgtaccataaaatttttttagcactctccataattcattaggtttctgattttccattatttgatgatttaataatgtttaggaactgatcgtggcagtagggtaa

SEQ ID NO: 52815 - DNA, 854 bp, Populus trichocarpa
  Intron number 1 from transcript POPTR_0006s10550.1 (locus POPTR_0006s10550) derived from phytozome v7.0 (chr-ID scaf fold_6; pos 7900091 to 7900944 reverse strand)
ctgaggttgccaagcttatcggcaagccagccaatgtaagttttgttttcattttcgttcttggggtcttcttcagttctttaattttaagtttgtgtttttactcttaataatccactttgagggttttgtctatgatctgacctaaaagcttatgattcccttgtaaatattacatgcatatccttttggatttttcaattataataatactaaactgttgcgggttatcgatttttctttctttctttcctttgtgtctggcagatgctgtatggtaggtgtgctagttgtttattatttggtcacatgaaacaaatatctgtcttttttctcaaaagctatggtgtttgtttattctggttatttttatttatttattattttcaattttgaaaatcttaatttgtgaccacataaagaattattggatgtcagatgagatcaggcttgatttcttggtggggtcttagaagtttggtttccttatgattctgcagccacttgatgaagaatccacaacactgggttctggataatttaattctgatctgagttttgatttagcttacaatggcctgtactgtgcctatttttagaaaattgagatgggttctgatggattactatgtgtgcttttactcgtttatcaataaactaaacaagaatatgttctttagacatcaacttccaacccccattttgtgcttgttaccggttcttacaattggtattgtgaaaaaagtgatcttgatcatactctttataaatttttcttgcccagctgttcgtttgatgtatattggctatggaatgtgcctttcttaagtatttaatgtttgttgccatgcagt

SEQ ID NO: 52816 - DNA, 801 bp, Populus trichocarpa
  Intron number 3 from transcript POPTR_0005s15940.2 (locus POPTR_0005s15940) derived from phytozome v7.0 (chr-ID scaf fold_5; pos 12595936 to 12596736 reverse strand)
ctgctcttaacacaatcgggtcacacagttttgtggtaatgtctttgctctcttgttttgtagctttatttacattgcatttaactacgcctaatcttatatgttgcttggggaatttgaatccaataaactcatggtctctattgtttaaatcgaataaagactctttcaatgattgtgttgtggacgtgatatacaagttgtgtttaatgtcttttctttttcatgtactctaatcttcccattgtaagtgatctttttgctggtcatgccaagccattttattattaattgagaaaatgtcatggtcacagagttgttgttgctgtttatgccatttcagtcatttaggaatttttttttccatgttaattgcccctgtcatcctctattttggatgtcattacactttgcattttgttttttgaaaacttttcattctcgatttttcttatgattgcaatttccaccttctgttaaaaatctgttagttaaccttagaaatggagctgacttttggcaaaacaattccataaaatgaccaaataatccatgaggaacttgcaacaaagtcatcccttttcatctccttagattttgttgaaaaggaataagctgtacactaggtaatgaatctcataagcaccacatctataccattgcattcttatcacaacagttgcatctttaagcctttaagttgtattggtactgttggctagttgtatgctcatttgagtaattactgaaacaacttgcatggcagaaaccgaggaactggaaattgccaaaacagagtga

SEQ ID NO: 52817 - DNA, 942 bp, Populus trichocarpa
  Intron number 1 from transcript POPTR_0030s00560.1 (locus POPTR_0030s00560) derived from phytozome v7.0 (chr-ID scaf fold_30; pos 289048 to 289989)
ctacaaactacgtaccatttgtcaccataaccgattttccttttattccagcctcttgatcccatgccatattgtatgttcggtattattataagttaataaccatttaatcttaagtgtactgtcttttctcgtaacattacgtgctccattatattgaaaatatgtatccctattctctaacatgagtactgtaaattctgcatttcaatatacgtaattatttttaatattttagctttgagtgcatcgaaacagaagtcttgctggtccatacgcatgaatcatattatctctgatgatttaagtcgattttaattaactcgtaaaactcattctgaattttatttactttcttataatattagaatctaaatatatttaccaaatccaattaaatggttataaagttatttataaattgaagaatgaagaatatgatttgaatatcaactcttttttctacaaagaaactcttttaatttgagtaaaaatatgcataagttttctgtaactataaatagctggctaaattttactgctcaatttacaagtaagagaatctattgtataaacctctttaggggtaataaccaataggctgactcaatcaagattaattacacacatgtaatctcttttaagtaattaatcttgtcttaagtttctttctgttttcttcttcaagattaggtagatttgatcccatgttgctttagaaaaagtcaaataatacgatttcaaattcaattgatatatattttttgtccctcaagtccattagggcataacattgactgactatagatgtgaaaatgataacttcctgatcctccgtttccatgaaagttcttctacataatataatattctaatttacatttttaattttccacaagacttcctccatataatataatatcttcacatgccaggcaaaat

SEQ ID NO: 52818 - DNA, 884 bp, Populus trichocarpa
  Intron number 1 from transcript POPTR_0006s09640.1 (locus POPTR_0006s09640) derived from phytozome v7.0 (chr-ID scaf fold_6; pos 7079259 to 7080142 reverse strand)
ccatttccactccccttctccacaagcttcctcctgtaagtgacgtgatatttttctttcccttttcatctctttccgtttatttggttcaggagaaagaaaaaaaactatagcttttgcttttcttttttcttttttccttttaatttattttcttacggatagaatttgaatgtatttcatgaataattagttgtgccaagtatttttttaattttttaatttttcttttaggggttgaatacccgcaaaagaaaaaaaaaaggtgttatgacttgcaagaaaatgggtggcaaccaatgttcggcttgtacttgtactgtagtgttgaaattgtatttgattagccattgttttttatttataaatatattaaaataataatttttattttttaaaatttatttttaacatatcaaatcaaaacatccaaaaatataaaaattttaattttaaacaaaaaaaatcaaataaaaaaaaacactctacatgtttactttttgcatataaaatgtatttttaaaaatattttaatttttttcttcaatttttttaataattttaaattattttacgtgttaaaaataaatttaaaaactaaaaaaatattattttaatatatttttaaataaaaatacagtttaaaaaaaacaaaaacattctaaactatttacagaatgcatgtaaatgggctgctttgaaatgattagtcagattataagttttcttctttgcttttaattttgttgtttctcatggccaccctgacaatgcatgattatgaattttggtttgtaagttttaatccgtgaacaaacattctcattttttttccaattagcttgaatttgtgtgattgttgtttgcagattccaaaaatctgg

SEQ ID NO: 52819 - DNA, 1026 bp, Populus trichocarpa
  Intron number 1 from transcript POPTR_0005s03940.1 (locus POPTR_0005s03940) derived from phytozome v7.0 (chr-ID scaf fold_5; pos 2608364 to 2609389 reverse strand)
agtttactagagatcacattaaagccttggttttggtaagaacgtacaacctccttccacgagcaactagagatatttctcttcatttttacaaggcttttccaaaataactccaataacagacatcaaatttcactttggtagagaaatttttacagattcaaatttcatggatcctccctgtctattccatctcccttcagtaaagtatctattttccgatgggttattttattagaagtgacttaattaaggaaaaggactcatgaacagtatgttgtcacgatattaatgaatcattgagagaatctagtacaaaaaaatgacgccatagggttaaattgtgattttgtagagaatctagctagtagctatcgatttacattggcaattttgtactgtcattttatagctctatactatatttttgtagtcccaatgcataaattcagtgtatgatatttacacctaatttcaccagaaaaagaaatgcactaaaaatattttgccatttatatagcccattgttgccacgtctactaactgtagttatgagttctggttgggttcaactcaggctttgattaattaaggttcgtagatcgtagatcgaaagggtaaatccaggatgaacctaggtgttttttttttctttcctaaaacacaaatcatgaaatgatatcattaaaaaaaaactcgtagcccgaggtagcccgccgtgctgggcaggctcacaactatgttgtcgactcatttgttagataggtggagatgcgagttccatccgttcagtgaatgaatggtggttttatttaagaagacactcgttagatatgagtggatgcctctatgtatttgattctatttaatgaatggtacttttcaaggaatgatttactgataagagatttaagtaagaacattccctctaagattagcattgtattaagattcatacgtgacaaaatccttactgcaagtatttttataggatttcttaacagcaggcacggatacaacagcagc

SEQ ID NO: 52820 - DNA, 752 bp, Populus trichocarpa
  Intron number 1 from transcript POPTR_0005s09550.1 (locus POPTR_0005s09550) derived from phytozome v7.0 (chr-ID scaf fold_5; pos 6651736 to 6652487)
ctaaagtcaagggttacccttcttggcctgcgaaggttatttcctcctaattttaaattcaatttttatgtcttaaaaacttctttgtagtttgatttctaattctaccacctgcacttccagaccttattgtttatcttaagaatttggttaattttttcttccaattttgattttttcgggttggtttaatgggttttagtgatgggctctgaagattagtgggttcagctcatttgttatgtgaatcaatgtggttttcgtggtgggttttatttgtattctagccattttaagttgtaaattattacaatttaaatacgggtttaaattgtgtagttggttttatttttgtttctttactgattttagtttaatttgatttggtgtctgttgagcgctttagtttcgctgcttgtattagtgttctagtactttacaacgtatatcattccctggtattttgattaatttggagggcatgaatgctgggtttaattgattcatggattggtataatttgcgtgcatttgattagatgatgattgtgtaatgattgtttctgtaatttttgtggtttttggtaacagaaagatgttggtattatctgggtgaaggcgtcttcctccaacgattgtaatttattttgttgagcctttgagagtttgtcattttggttagtgcttgagctagatttcatgggtgtttgtatttcagattagtcggcctgaagattggaaacgagcccctga

SEQ ID NO: 52821 - DNA, 678 bp, Populus trichocarpa
  Intron number 2 from transcript POPTR_0005s09550.1 (locus POPTR_0005s09550) derived from phytozome v7.0 (chr-ID scaf fold_5; pos 6652495 to 6653172)
aaagtttttgtctatttctttggaactcaagaaatgtaagtttttctttatgaattccttattaacaaattttacatgtttgttcatacatggagaagggttgagaatgtggttatcctagtgagtagactgtgcaatagtatggggcttttatgtttcatatctatattattttgagataagtagagtacaacttgtgctctatttctcagaaatatggagttgacagttatcttcctctgcaaccattttgatgtggtttgaaaatgatagttgaggtctttgaaaataagattttgggactgaatgttgttgctatgagtacacaacctgggaaattttaagtacaattaagaaattcttagccgagtactattttggagtttgattgagcatctagacctatgttagcttgtcttcatcctgtcattctaatttagtaaaaattagctatcgagaaatgaaggaaaggaattgaacatttactaggttttaggatgggataacataaaaatttgctagtttatttgctgctgcacttgacttgattgagcgttggagacttgattgtgtacatggattaagttagttgccccttttattagagcttatttcttcccattgcttgcttgttctcttgcagtgcttttgttgccccttctgatattcaggtattca

SEQ ID NO: 52822 - DNA, 696 bp, Populus trichocarpa
  Intron number 2 from transcript POPTR_0006s10770.1 (locus POPTR_0006s10770) derived from phytozome v7.0 (chr-ID scaf fold_6; pos 8146917 to 8147612)
tgttagagaggctgaggcaaagattgctggttgtgacttcttgtgagtttcatttgattaaatttcttgtatatagtgcattagcttggtattcatcaagatactgtttttaagtttgatgtgttcatttacagttctatcttttagaaatcccaattctaattatcaagaagtgaacttggcttttcacttacttttcttttcatttgtccaaaacttctctgtaacttgaaggttcataatttgatgtatttgtgtgatgttgttcttgtttctagcataaatagtttactttatggtcactgcagatataacttcaaaatgacaatctcaacatattagtgaccttaatcatggttgttctcgaatggtaattgtcaatagtgattatggtgcctgaattagtctaatctcgtgtgtcaatctatctgtataagtaacctcttgattataaaaggaaggagtaaaatgtggatttgcttcattcttactgagcaaaacttttaggcaaaatttacagagaaatggttagtcatgcttaccacatgttccaaatatatttgttcaatcacagaaaccattttgttgaatgtaagctttctccttcttcgcgaaaactcctctctgctgcagaatgttttttagtctcaactttttagaggtattggcagggagtcggtctcttctgcagtgagt

SEQ ID NO: 52823 - DNA, 898 bp, Populus trichocarpa
  Intron number 1 from transcript POPTR_0005s02900.1 (locus POPTR_0005s02900) derived from phytozome v7.0 (chr-ID scaf fold_5; pos 1885550 to 1886447)
cgattgtcttagtaagtagcatctcttttcctatggttctcttttctgtcctatctttgcatacatttttgtgtttttgttcggaggcggcaaagcctgtcttaatataattgtctacctagtaattaacatctcgtttgacagctttgttaagctcagacctctgttagtaaagtactccgccccgctgataggtttaccttcagctctagcttgtgttggcttttttttttaaaaaaaaatcaatccagattgaattagttgattggacatattaatctgttactcggttagaatttcattgatttttttatcaaaattattgttttgatctttaaaaagaattttattagacttacttaaaaatcaatctcatgatccgagacttactctgaatgcaactccgagttaggtctaattataactatgacttggactatggaaactatagttcttcatacacggtggaaccaaaaaatttatcaaacccggcctgaatcagtaattaacctagaacccaattgatttgatcacctgtagtttaagttggattttaaaataaaattaactttgagatgatactgtttggcttgattgaacccaataaaattaaccctgaacctagttaatttgatcaaattttatttgattttttttattttttttaaaataatattgttttgattaattttatttaattcacccaactcgtgattcaaagtttaaaccagatataatatctttacttttaagtaatgttcaaaaacaaaaattaattataatatttatctcgggcctgggttttttccaaatcatagtaaagcaattaataagagataatatacaaaattaaatgactaacatacttaatttttgttatgattttttcttataggaa

SEQ ID NO: 52824 - DNA, 338 bp, Populus trichocarpa
  Intron number 1 from transcript POPTR_0017s12170.2 (locus POPTR_0017s12170) derived from phytozome v7.0 (chr-ID scaf fold_17; pos 12348297 to 12348634)
ttaacatttctcgctctacatcattcactttctaggtaataatccaatcggaatctttacgatcttgccctgattgcataattttgtttgctaattagggtttttactgttttgatttggccagatctagggcttatttgactaaccattgcttatttgatcaaaagttgttatctttttcttgaaaagaattcataatttcttttagtggatgttggttttcttagttatttatgaagttcaaaatattatggatcgaagttttttgtttttagaattttgattatattgtgtaattttgatggggttgttgtagaaagtagtctctgttgattgta

SEQ ID NO: 52825 - DNA, 762 bp, Populus trichocarpa
  Intron number 1 from transcript POPTR_0005s20730.1 (locus POPTR_0005s20730) derived from phytozome v7.0 (chr-ID scaf fold_5; pos 19876623 to 19877384 reverse strand)
ggcagcagtagaagtagcagcagaaacagcagcaggtatattgccatggatgaaatttttgtttaattgcttatttcgttaaaaaccttattgcaaagtgacaaagggacacaattttcctgattttacccaagggaagggagtctaatctaaagatggtgttttttagtagtaaaaaggccagactcaactaaatttgatctgctatttcctttgttaaataaaatgaagatcatatttccaattctaactcacttaaatcctagatcaaacgctaggagtgtttttctggagaactaggaggatgctaggagaacttgaatgtaactactctgacacgaaacaggggaatcatggcaggaacagaaccttatatagagctgtcctttaataaacaaagtaattaatcaatggttttgaaatcagttcgtgcactataaagtaaaattttgtatggaattcttcttgtgtcgtctaactaaaaagcaacagcccaccggtcaaaagtctttgctgaggaaacacaataatgacaaatagaaaaatgaaccacacaagatttccatgtaactttctgttctgtccaaaccctttaactcagccaggactaggaatttaagattgtgtgtttctttttgcagctgtagataaagagaaagcaattaattttgagtctatgatgtccaaatgttttgtttgtaacttggggttcttgattgcaatgcaggcgcggaagaggtggttgctggtctttcatttttg

SEQ ID NO: 52826 - DNA, 708 bp, Populus trichocarpa
  Intron number 1 from transcript POPTR_0005s18830.1 (locus POPTR_0005s18830) derived from phytozome v7.0 (chr-ID scaf fold_5; pos 17148029 to 17148736)
ttggtggaaaatcacttcccaaatccaggtctaatgtttccaattacaagaaaaagcgggcgagaaaaaaataaggctttccaaaaaacaatggcacctgccgtgattaaaattgtacatgctgcttatcctgatacgtatcttctctctattctcctttcctttctgctgcaaatcaagtatataattcctattctgtaaatcactatcaatctcctgccactttgtgcactatatctaagtttgaacttcgaatactattgttttgatgtgatttgttatattgccatgatacacattagttctcattcattaaaaatgggttctgtcgccattgcacctttacattcccaaaggtcttattaggccagtggtgtttttcagcagttttgtgtttgctttgtttcaatctgcacaagcatcttcttgcattgatactttttggtaagaaaggcatatgcttggatgaaggcttggctgagttgctttcatattacatggtaaaataaaacgttggcaggagttattttcttaattattaatactacctgcacctttaggagaggagggaagtgaaggggaatttactttctttgaagaaataaatttcaaccgcaaagagcttcgaaaaggaaaagcagggtagtgaaagagctttgaaaaggaaaagcagggtagtgagggctctatcagcaatcacaccacctg

SEQ ID NO: 52827 - DNA, 822 bp, Populus trichocarpa
  Intron number 2 from transcript POPTR_0017s01540.1 (locus POPTR_0017s01540) derived from phytozome v7.0 (chr-ID scaf fold_17; pos 1059165 to 1059986 reverse strand)
attctgctggttatcaggtgctctctccctcattatacaaatttaatcatcatattggattcctttttttttcttgggctgtttttgaaaaagcttattaatttgctgatcttacttagttcagtcatcgaagctttagttttagcattgttttttcaataattggtgaatataaggaatattttttttcctttttatggatttgtagttaattttaacttattcaaaatatgtatttgtttttctctatatatattgcttacctcacactttacttctattaatctgcagattattgggttttatcattgttgtatgtcttctttgagtagtttagtggataaaatctaatactttgagactaatcttcacatatatttggtattaaaattttaatttttgattaattaataaggtaataaaagacattttcttaatgcaataataattttgtgataactgaaatgaatgcctgtagtggccgtggtaatcttagtgatgatggtggttgcggtaatggtggcagtgtagtagtgataatattaatatgataatttcttgatgggttgtgctgagtgctaattttgataattgcatggttgtggtgatgatcattttacatgcattatgtgttcatcaagatccctttttatgataatttatgtgttgtttttctaataacctgttggtggatgtagctctactgattgattaaagtacaagcatagtatatcaatttcattaacttagttctgataggtgttttttggaactttattgattttagacttatactgagagtcgtggtcataattttactct

SEQ ID NO: 52828 - DNA, 1016 bp, Populus trichocarpa
  Intron number 1 from transcript POPTR_0006s21130.1 (locus POPTR_0006s21130) derived from phytozome v7.0 (chr-ID scaf fold_6; pos 20210886 to 20211901 reverse strand)
aggtacgttgttatgtactatgcatatgaatgcatgtgtttttagatcttttttcttgcagaaaaggaaataaagttagctcattttgatctattggtgcactattttcaaagaacatgtagtgatatttgcctttcctagatttgttgtacttttgtcaaaatgtatttaggtttttcgctttgttcttgctgcttaggagttctaagccaaggtaaccaatgttgtaagccccaaaacaaaaaaagaaggaaagaaagtaaccactctgtggtcattttctgagttcgggtgatcagtgcctcactggctctccactgagatgcctcaaagcccccactaagaaacaggccaattaaagaatatataaaaagagaaaagaaaaaacctcgagggccaacattttgtgggtcaagtaattaatatagctatcaagtacatgtggaaaagtataaagcgaaagggttaagattataatcagggtgttcttctactgggtcaacttatcaattcgaaaaattaatgattccaacgagggtctgaatctttttcattaaaacttgagggaaagttaactagttaaaagatggtctagaggagagcggtgatgtaattttctttgaaatatataccacaagaaaaactaaagaccatagagagtgaaaactgaaaagtgtgctcctacttaattattattattttataattgctagtacttaattcagtattagtaaaattaagtactcctgactaccattattgatgtggtctggtctgcctagcgagtagcgatatatatatatatataagaacttgggttcaagctggtatagtctataaaaaaattatagatttgtttttgtattttgaaggaaaacatttaatacaaaagattatgtttggtgaaaatttagatgaacttaataattactactgatttacactaactggcaacaaccgtaacacgtgtttaattaacaggtatcctcctcagctcaatacattatacaacattt

SEQ ID NO: 52829 - DNA, 617 bp, Populus trichocarpa
  Intron number 2 from transcript POPTR_0005s08980.2 (locus POPTR_0005s08980) derived from phytozome v7.0 (chr-ID scaf fold_5; pos 6309919 to 6310535 reverse strand)
agccgcccagttgggtacggaattcaggtaaatgtccttactcctctcttgtaatgcatttttatatgtatagatgtttgtgtgaacattctcatgtttttgagttatatatttgaagtttattcccattctgtattaataaaagtatcgtgtaaatcatcttctcgacaatgaaagttgacaagctatccattttgctgaactctgagacatgttgccttgtgcataggttgtggttctaccctctaagtcagtgatgtgaatcagtatacaacaatatgggttaaatatctaaccaattgctcaccttgtggtgttagttgattcggggacttttttagaagctgctcaaaaaacagatgttattcttgatactgtgtctgtaacgatttcctcagacacctaagattacatttgaatcacgcattaatatgtacactttaccattaccaacaaagttcctttttttctggaattctttatttgaggatccgtgtcaacatcctattgtttttttttttttgtgtgtgtgctcgcaactgtaagtagctgattgcagaatcataagccatcatgaccttgttttatgtgattttcagacaaaaattcttttggtt

SEQ ID NO: 52830 - DNA, 730 bp, Populus trichocarpa
  Intron number 2 from transcript POPTR_0017s09830.1 (locus POPTR_0017s09830) derived from phytozome v7.0 (chr-ID scaf fold_17; pos 8500449 to 8501178 reverse strand)
ctaagtcattaactgctggagcatcaggggtatgaagtttaatttgtctaaagttggacatgcgcattgacttgtttatctttagttatctatatcagggtgacatgatcttcttttgttgttatttttaatttattgatatttattaatgcatgcttgcttggatatttcttttgttactactaattttgttagcggatgtgatgttttgatatgttttgcaggttttcttgttattctggataatttatgtcatttagtgtgattgtatgttgtggtgtttagaaccatgtatcttatctagggccttaactaattctaaattacattagttgcgtgccggattcagagatgaaatttattggatttaaaagtcaattgttttttaacaagaagttatacttagcaaggtgttgaaatacttttagttttgggtccaactctactctgtaactttcaaataattcaacctaaggagattcagtggcagcatcttgatctctttatagggaaatacccctgcgccccctttttatctgtcagcaagaatgctgtcttgttgtttataagttactacttgttcacttagttttgtgtgggatgaacttatatgtcacctgagtttctagaactatcaaaaggtttcctctattttttgggtgttttccagtgatccttgttcctgaaaataacaggaaactcgtgcatcaaattctttgtcccttggaaa

SEQ ID NO: 52831 - DNA, 717 bp, Populus trichocarpa
  Intron number 1 from transcript POPTR_0005s08270.1 (locus POPTR_0005s08270) derived from phytozome v7.0 (chr-ID scaf fold_5; pos 5693672 to 5694388 reverse strand)
tttttggtaaccttcttcttctcatcaaaccttactcttgtttatttcattgatctatgtattttctgatattctttctgcttttgggtgccgaaaacccaatcaatgagaatctgatagccttaaaactatggaattggcaactgcaatcccactcttaaattagtctcagcatggccgacaggaaccgtatgaacggaactgcttggacttttcagctataaagattagtatcagcaactgaatacttgtggattttcttgtaaagactgtatgcgctggcttgcatactcgttatttttcttgaagcttgagtatcctctctctgacacacacgaacacatggtgcagctttcttataaattcataaacaaaccttcctgaaatatggcaatgacaagtttattgttgtaagataattcttcatggattaatccacttcttgtgtaagttatatgtgatgtctttgttcatgtcatggcctagtactaggctatgacttcgataaatgtcttgctgatctgttcatactacttcataggttctttagctactctgaaaaggttatatggacgatcagtttccaatagtgattacgaatttcaggactctccctgcatctttgatcatgcttgctagcacttgatttgctgttggtaaaactaccaagatcttgtttttcctgttgttttgactttacaaatacatgtaggtacc

SEQ ID NO: 52832 - DNA, 397 bp, Populus trichocarpa
  Intron number 2 from transcript POPTR_0017s12380.2 (locus POPTR_0017s12380) derived from phytozome v7.0 (chr-ID scaf fold_17; pos 12553104 to 12553500 reverse strand)
gaagaaaaaggtatggatgatccatgactcttttctatcaaaatgagtaggtttgcttgggtaatctggctgttccattatctttgatgatgggtgctcccatctcatgatttgcatggatgatatttttcccatagtgactaacagtatttatatgattaaaaggaggtcatttgaaacctgaaatacagaatgcaataccgagattataaagatttatatctgaggttattttaacagttttttggggagttgaagtaaggttttgttcctctcctcgtgcatgatagttttgttcaaattttcaacgactgatgcagttcattttgatttgcttatgtgctccctcttcttcccttttgcagtgagaagagaaatcaaaatcttgagattgttt

SEQ ID NO: 52833 - DNA, 784 bp, Populus trichocarpa
  Intron number 2 from transcript POPTR_0005s02440.1 (locus POPTR_0005s02440) derived from phytozome v7.0 (chr-ID scaf fold_5; pos 1567540 to 1568323 reverse strand)
ctaggtaaagtttctcactctctcactttattagattttttttatgtatcctatgaaataataagaaattttgatcagaaacaagtatacttctgtttatttactgcaaagcttcgaaggaaatgaatttgaagctttgaatttctttgttatctgtttcttgggtaatggcatagaataatgcattttctttttaggtgcacctaactatggaaaaggatgatctttttaaacctaaaagcttttaggcatatttggttacctatgagatgatcagaaagcaacctagtgcttgagcaattgtgaatggttcatagtatcttgatgttgtgtgatgattagttaaggattagcaaatgttatgatttacatgtttctagctgttggttgatcatgcctcaatttatgctgttattgatgttttctactcgacttttacccagttatcatttgcatcgttcctgaatgcaaaaccaatgattaggggcaaaatggttcttcgtagtcaataattcaccagatcttgaaaactttgtcagatcagataattctttccaataaacagtgtatggagcatgttttcctcactgtgccttccaattgttaaatgttcatgttcacatgggtaaactttttttttatcgctttctgatgccctctatgcgccttcttctggattgccttgttcatatacagtttgatgttctaatatatcttttacattgcatatgtttctgcttttgccttgttaaccttgtgctcatccttttggaattcaggttgc

SEQ ID NO: 52834 - DNA, 568 bp, Populus trichocarpa
  Intron number 1 from transcript POPTR_0017s11260.1 (locus POPTR_0017s11260) derived from phytozome v7.0 (chr-ID scaf fold_17; pos 10991380 to 10991947)
tcatttaaaggcaagactgtactggtattgcttccctccatccttccctctatgcattttgttgtttttcaattatgccattttgtactgatttactattggtaatttttgtttacgctggatcaaattcaatgactatattttgtttattaatttatgttttttttgtcgaattatgccaatgttagtttgattatggaattcatccggcttattcgggtatgactgctttgccttacttcgatgagattgacccttccactattgatgtacttctcgttacacagtatgtatttcatcaccttctcttgctaattctccttgcttgcctattgtatatatgtatattgattttccattccatgaggcaatattttgtttctcactattagtttcgtaaatgctagttttttctctcactgaatgctcctttgatttgaccttgcttgctttcttgtttgttcattttcttgtcaaaagaatactttgaagagatatctcctatgatgatgtagtaagattgcatgaaatttttagctgcgagagatcaacttgtccaaggaagaac

SEQ ID NO: 52835 - DNA, 1036 bp, Populus trichocarpa
  Intron number 2 from transcript POPTR_0006s13760.1 (locus POPTR_0006s13760) derived from phytozome v7.0 (chr-ID scaf fold_6; pos 10985619 to 10986654 reverse strand)
tgctctccaacaattcccactcttctactcgaaaggtaatactaacaaatctcctttattgatttcgtatattctatgacattagcaagctcattctcaaatggggctcttcattcttttatcccttctcatcttggtttgtttcattggtttttcaagtgtgtggggtgtggaattggaaaggaaacaaaaatgagctgttgggtgagcttaaaaatgaggaaatgaaatgatagatttagtttagatcattgtcaatgtcgggggtaataaactgccaattcagtgacatgttgttgctgcaatcaaagccagtgtttagagggcctttcaggcttggaatgaacttaattaaaatactaagttttttttatctttgtttgaattgttggtatgttttgagtgcaagattttcctagtaatttgtgccaaatagagctttcttgatgaggatcagggtgtgctaacccaatcatattcatagatgacagggaaaatgacttaaatatctgaaaagcttctaaattgtgatggagtgattcaactgcaaaggacttataaatgatcatttgctagtgatgcataggcctgctttatgatttggaatgaaatgatcgggagtaagctaatataatggagttgagggaagagataacaacaggatatttaaagtctaaaagtaaacatctgtgataaaaatttttttccaaaaggttttagtctcattatacatggttagatttgagaagattggatgttatttataattttgtttggtatcaatttctttaaaggatcaacaaggtttagatctgtgttttaattagaaagtcttatacttggattacaatttaatgtttgcattaagctttatacgtgatgctttaggagctcaatcttttatctctttttaagttttctacaattgattgacttacagttgtcttacatatgctgtaaccatttatattccacttgtttttgtttctggttattagtaggttttcaattgcagagaaacttattcttggactgt

SEQ ID NO: 52836 - DNA, 840 bp, Populus trichocarpa
  Intron number 1 from transcript POPTR_0005s25605.1 (locus POPTR_0005s25605) derived from phytozome v7.0 (chr-ID scaf fold_5; pos 23841021 to 23841860 reverse strand)
caaacatctatcccctctgcttcaacctccacaaggttggtatatgcttttctcaaatttttttcccaatttgatatacaaaatcaagatccggttcgattgcatttttttattagctattttttaacggattttagggttttatctttgtttttaatgatcaagttatggattcagagaaccaggttggatttcttgaattccttgctcattcatgtttattttttcgtcaaaaacgcattaattgctcagattcaaatctcgaagtctgtttctgcctgttgcttcatcgtgagaaaatctttgatttagctacagataacctattttatgttcttagattgtttctctcgttctcttctatttattcaaccttttctttttgttttcgtcatactagattaattgctgcagaaagggtttgtgaaaaaaaataatcctggtttgaatatttacgaaataggaggtaaattatacatgtgggtgatttgttgcatggttggggttttgtgtgtcaagttaatgcaatgctcatagtgttcacaaattgaaagtgtgaactgaccgaacaattctttccctgaagaggtacataaatcttcgtccagagtatgtttcggttgaagaaatgtttctttaagtttacatggtatgctttggatgtattgaatttttagtttgggtggtggttgttggacgaggattttgttgtagtgttgggaaattggtgtttctgtttgaaggttaaaataggagcatgaggtgaatgaatgcagataattttgggtgtgatcaatgttcacagggaagctgcagtagctgtggaagtttggtggtggg

SEQ ID NO: 52837 - DNA, 804 bp, Populus trichocarpa
  Intron number 1 from transcript POPTR_0017s07810.1 (locus POPTR_0017s07810) derived from phytozome v7.0 (chr-ID scaf fold_17; pos 6100494 to 6101297)
acctggctgtactatctgttggaatttttgtatcggtaagtttgcagcattaatcagaaaatggtcatctaattttgttatttgttattatcattattaacgtgggtgtccgagttagcttgcgtgcacctcgataaatcccacggaccctaagttaacgaccatgtaagtttcagtggctctaagatttgtgggactcgaactggtgacctctagggagtaggtgttcaagaacatcaaaacaatgagaaaaactaaagaacaaaacgaagatttgagaggaagaagtgttttctcttgtgtatttctctttgcatatattttaattatgcttctgattacaagcttgttgataggtctcaaatcctaaacaaataagaaattaaactattcaaaaaaaaatcttaatctgaacaataaacgtattctgctgacttgaattgttaactgtttttgaatcagttaaacgatttatttaattcaaccagtcgaccatttcttctattttaaaaaccaaaatatggtttactatcaacactattttctgtcttctctttatccatttagttggaggttcaatgcatcttaaactatacatagagaatagccctctaattctttaatctcaatcctattccttccagaatttgaactaaagaacaccatgcatgcactagaagtttcagctcttaattgctagggcatcccatcatcccatttttttagatatatatttttaagaagattacacattatattaatattcatagctaatttgcatatttaattgtgaattgtgactag

SEQ ID NO: 52838 - DNA, 520 bp, Populus trichocarpa
  Intron number 1 from transcript POPTR_0386s00200.1 (locus POPTR_0386s00200) derived from phytozome v7.0 (chr-ID scaf fold_386; pos 13235 to 13754)
ccaggttctctctctacccccctcagtttatattgcagatctctttctctagttggtggtttttttgtgtgtgtaaatttggaagatttttctatttttatcttttgtatattctgagattggttttgaggttgaagagttgttgctcatcagtgaaagttgtggtatttcttcaagcaatatttcgtccatgaagtcaaaagatgaccaaattatgtttctattatatatctaatttccttcttcttcttcttcttcttcttctttcttttcatgaagattcaataatctgttcttgtgacttgtttagaggccattttgcccgtagactggatgatagattagacaattaaccgagtcaaacttgtgcctaggaaagaactgtgagaaaagaaattgcagtccctttagcaggattgagatataactttctcctcatcttgcctctctgcatcgttccaattttcaggatataattaacggggtttcattttttgaattgtttgtttgtatctgcaga

SEQ ID NO: 52839 - DNA, 765 bp, Populus trichocarpa
  Intron number 2 from transcript POPTR_0304s00200.1 (locus POPTR_0304s00200) derived from phytozome v7.0 (chr-ID scaf fold_304; pos 11186 to 11950 reverse strand)
agtgatttaatagagaaaacaaaacaagagccgtatgttgtttctttctttctttttttgagagtaatgatcgagttaaaaagtgaaagtttgttaccttttggttttgttgattgaattggattgctggagtgtaacttgtaatgggttattgaattattgaaaatttagttgaaggtggcttgttatgatcatattagtgatgttggattagcaagttaattggtcaaaagaatttaatgaattgagtttttgaggtaaaatgaattaattacagtcaacagctaacattgattactgtttcagcaagataatttgcaagtttgcgcaaaaaaaggtgaaattataaaattggttgggaaatgctaggtgaattaggcctttttttcttttgacaatgagtggaaatttaggaatttcaagattcttaattattcacggtgaacatgttcacaaacctttgatgtttatttatgctagcatggtaatcaaagggtgtttttaatatttactttgtgatgggaactttaggtaaatgttatggtaaatagagtgcataattatgtgattgttagtggatgttatcgaatctatgcaaggagggtgtaactactgatgtgtttttaaaatttgttaaaatttctttgatatggttctcatctttgctttaacttgagtgtgcaatgtagcataacgttgaagaatttatttgccatttttcccccttcaggtcctacacgggattatatctgttgctgtttgttg

SEQ ID NO: 52840 - DNA, 631 bp, Populus trichocarpa
  Intron number 1 from transcript POPTR_0005s02490.1 (locus POPTR_0005s02490) derived from phytozome v7.0 (chr-ID scaf fold_5; pos 1595847 to 1596477 reverse strand)
attgattacattggtaagttacgatattcttgattacactctttctctaagcggtaatgctgccgagtttcaaactgtgtttgacttgaaaaggcttcattttttatgatttttatgccttgatctacaaaataatgctaaacatcaagaaaatccgacacatcgttgatggggcctgtaaatttttatctgtcagattttctctatgtttagcatttctctccgtgtcatttagcttgtgtttgtttaattttcttgcttctattccctttctcttgttttcttttctgaaactttcttcttcttcaccaacaaccaattaagccgccttaatccgataactttcttgttaaaaaatattacagtgtctatcagaattattcaagttaaggtctgttcatttcctatattattagggtaaattacataatcttaggaaattcaggttcttaactctctttcttacctcatttacagtacaagttgcttgattgtgttgacttttctttgaacaattgcagcacgctcggctaaacttccctgtcctggtgcctacttgaattcggcaagaaaattttccggtggccgcggtggagtgaattttgcagttgctggttcaactgccttgcct

SEQ ID NO: 52841 - DNA, 362 bp, Populus trichocarpa
  Intron number 1 from transcript POPTR_0017s07600.1 (locus POPTR_0017s07600) derived from phytozome v7.0 (chr-ID scaf fold_17; pos 5913788 to 5914149 reverse strand)
ttggcagagcctgtcaggactggggcttcttcgtatatctcatctcttttcatgtagcaagtaaagctcttcatgttatagaaatttgatcttcgatggctagacgtgatgtcgaatgactctctcagcaactttgaggactgaactagttgacaagtgcatgtcatgctctgtattttgttacacatattcatttgtaaaaaacttcaaacaaactattaaatataagtaaaagttattaggtatataactggggaatgcaaatgcgaaaaacagagcaagagaactaggtttttttctttgatttataacgtaaaagaaacttccatccttcttatttcttaattattaggtgatcaatc

SEQ ID NO: 52842 - DNA, 871 bp, Populus trichocarpa
  Intron number 2 from transcript POPTR_0005s23680.1 (locus POPTR_0005s23680) derived from phytozome v7.0 (chr-ID scaf fold_5; pos 22420131 to 22421001)
tagctcaattagttaccatgtatggacggtcttccacttttgatttgctgggcttgtttttgctttcttttgccattacataattctcataacctgtaagattatcaattgcaattggtcatttgccaaaaaagggatcaaaagatcatgctaggcatgcagtttttgttctgtgcatctgaatgcagtggaattatagaattttcaagaattatagagggaccatagcatttagtttttcctttaggttttactactttaaaggactttagaggtgtttccatgtctgagatttgcaaagtcttattgcaatattttttccttctagttttcctttcccttctctaaggagaatgtcttattctttgttttgtagttactgtttcactttctataattaatatagctctttattaacaaaggcttgattagcataagttagcatttctttactgattattcaaactgcactttctcaatctttttcttctgaaaattctgtagcaactatatctcttgaatctcgcaacaactttttgtacaggatcaaagtcatgaaactcatttcttatgtgcacagaagtttctattggcttccacctttcatctcattcagaatttgttttttgcacaagttatattctaaaatctatgtgatttcctcagttgcataagatatacaactttggttgctttgcatgaaatgcagctttcagtaatgcacttcaactgtaggactggctgttgtttttatttattaaataagatttctgcttttagtactttgcatggttcttggcttgttgaacatgttttcaatttttgatgaatcacaggttagttgaaacacatatattctcttttgttgtgg

SEQ ID NO: 52843 - DNA, 845 bp, Populus trichocarpa
  Intron number 1 from transcript POPTR_0005s27860.1 (locus POPTR_0005s27860) derived from phytozome v7.0 (chr-ID scaf fold_5; pos 25340487 to 25341331 reverse strand)
cacccctgcatcaggctaccagtgtcgaaaaggaggtaaagtgctgttcttgcctgtttctgtttgtctgtactatttccaaaatcttttacccgctcagaaaagagagaattattagagcctcaacagaactaatcagtgcaagtgaataaaagcttggcttgtgcatgttggtttgcattattgaactgaacttaaacttgagtggttaaactcttggctggcttagtatcaaatagtcctttgaatttttcttggtaccatatgtggtcaatctgttatatggaagatagagttgcacttaatgagagaaaagtgaattctacaattaaaagctattaaagtttacgcagtccataaaaatccacgcatctttttggttgcatacatgtacattatgtaattgatctacgtaagatgatagagtctgttacactggatgaaaatggggatgataaatcctggcatatttctgaatgtgaaatctgcttgcatctatatatggatgcatctgtgaagtggttagttatcattgttagtgcttgtcagtcatacaaattgctgataaaccataccagatttaacacttagttgtgctcataaaccatttatacaaccatgaggaaaccaagttgagtggaaaactacaggcccaaggctagtgcaactataaattttgtattttcttctgctcgtgggatacaatgttttcattggaatctgtatgctgataatcagttcctggttctcgttcctttttatccctgttttcgtaatttgtatttttatgcaattttctctctctaccagacaagagggtgccaagcaactggatcaggcagggc

SEQ ID NO: 52844 - DNA, 658 bp, Populus trichocarpa
  Intron number 1 from transcript POPTR_0017s11300.1 (locus POPTR_0017s11300) derived from phytozome v7.0 (chr-ID scaf fold_17; pos 11065961 to 11066618)
catctcataaagcttctaacattgttctaactgtgacatggagcactatcttcattatttataatataattattatattgtgttacttttattaagattttctagattttgaggagtcttgcaacataaaaaaagagtaaaacttttgatttagaggtaaaattctatcaaattgtttttcatgctcaaattaggtttgaatttaattaagattttattaattataatatttttcttgtatttaaacatttttgtaggcaatttttgtcagtagagaatttatgaaataaaaaacatattagaaaggctagcacaaattcttaagcgataaccacgagacattcagaagcatcgcaaaaagcaaaaaacttttatgctaatcctcttcaatttctatgatgcttttctgtcacggacttgaagcatctatgcttttaagattttcatctttataatcttttaacttttcaagtagcgtctttcttactatatgaacggaattttaattacctgcaccagatgttgtgttatctgattcactaaattttgcattcttactcctcaagtttaagattcctcacctaacacattgattgggataagtcatatgattcaacttccagagtatatttggggtttcaagcctccgaaagaagga

SEQ ID NO: 52845 - DNA, 705 bp, Populus trichocarpa
  Intron number 2 from transcript POPTR_0369s00220.1 (locus POPTR_0369s00220) derived from phytozome v7.0 (chr-ID scaf fold_369; pos 11024 to 11728)
caggcaattctgtcaaaacccacatttttttttatttcctctctattttgtgtttttttttgagttaatttagtggtttttatttgtgtctagaagaaatttcttcatcaatgttttccatgctttgaagtgaataaattccttgttttagcacagtagtttaataggtgttttgagtgtgttgatttaataacaaaaacggaaactaagcattaaagaatgatcaggttgtgtgtggattcaagagtgctagatatgaatgataaatgtttgtggatgagaattgagatgaaacaaaagcaggtgaaaaactggggagcatggaaatgagagaagaaaaaacaacgccaaatttgatgtttctattagaaaaactaggaagatttttattcacgcaatagtttttaagtgtcctacactaatggtttggagaaagagaagtaatgcggtacgacataaaatgaatcttttcatgaatggtttacagtttatacattgttaatgtttttgaaagattagtgattttctgtttatttttcgttttttatgctattgaagaaaaatgtaccttatcgtgctaattgatgtatattaagattacttgttctgaaagattttagattacacttagatttttatgttttttattattttattttttttatttcaggttatatacttggcaataattggagcaacttatta

SEQ ID NO: 52846 - DNA, 902 bp, Populus trichocarpa
  Intron number 1 from transcript POPTR_0005s14530.1 (locus POPTR_0005s14530) derived from phytozome v7.0 (chr-ID scaf fold_5; pos 11567660 to 11568561)
cagcttcaggtattttcacttaccctttctttaaaatcttatcactcgaaaaaaaatatatcatttcacgttcattagaagtagatagttttatttagagggagggtgttctttcgttgttcttttataaatttgttctttcttttttctgccttgaatccagtcttattatctttttaattattatttgatattacttggatatcttctcatgcataagaaagaggaactaattaatttgtatgaattcgaatattggttctatgatcatgagttacgaaatcaatagtgttacattgtgttcctcttttttttttttttacagttttgctctcttttttctacggcaaaatctactccaaaaataattattaaacccagcctatttggaaactcgttgacttaaagcacgagttagtttgagtttcatttcaaaccaatttaaaaactaacccaatgtaaaatattctccaacaatacttatttaatccaatcttctttgaaatccgttgacccggagcatatttcaggttgaatttcatttcaaaccaatttgaagattaatacggtcaaatcaaacaaaaccctggttaaaccatgttgggtcagctctaatgactttttttattattattcaaaacaactttattttattttaaaaaattaaaacaatgttgtttttgagaccgaatcacgaccataatctgatatgtatggcttcaaccgtaaaatatattcatcattcttataatttggtgtttcgtggatttaatttcacttatatgccagtgttttttttttaatttaatcaggttgacaaactaatgggtgggatctaattatttatatatatcattatgatatataatttattggtgttcgtttcatttagcgttgaatcc

SEQ ID NO: 52847 - DNA, 799 bp, Populus trichocarpa
  Intron number 4 from transcript POPTR_0005s10980.1 (locus POPTR_0005s10980) derived from phytozome v7.0 (chr-ID scaf fold_5; pos 7890014 to 7890812)
gaaaaggattgctgattttagcttcattcccgtaggtatgttgtttgagcttcatttacttggaggatacactgaaaggatgaaaaaaagaatatcggtttccagcaccagcgagattttgttctgctttctgttatttttttttaatatcaaatagatgaacggaattttaatctactttgaaggctaggttgctaccttaagcacatgtttccctaaattgggacttcatatcctaatgcacccctgtaatcactttttgctccacttcatcaccttcactcattcatgtgtttgcaaaagcgaaccatgatcagcttatagattgttgctggtgcttttatggtctaacctatttcaattctgttatgcatattgccactataaaaccactcgactacctaaggtgcaatcaaccgaagcaccaccagttcccactgagcgtctccacttttttctttctgttttttttttttttttggtgccacagatagtagttattaattatttgggactagtttcgtaacaccaccaccttcataatcacaaattcaagtaaagtcaccgtatagcgaaaaattgtactccaccaaattgagcaaccaaagctaactggttttgatctgaattcttggatccatcatagtgtaacttcaccctaatgcatctttaaggaaaaaggagattattcaagttcagaaagcagaaatctgttaggttttcaagggaaacatcttctagaaatttgcctttcagtttgattcatcacctgttactaagctgacatgatgtgcagagc

SEQ ID NO: 52848 - DNA, 979 bp, Populus trichocarpa
  Intron number 3 from transcript POPTR_0005s11030.1 (locus POPTR_0005s11030) derived from phytozome v7.0 (chr-ID scaf fold_5; pos 7959108 to 7960086 reverse strand)
gcgtgtgaagggcttgatacaggtaaatttgttgcatgggtattgttgtagatgttttaaatggctagcctttatactttactactttgttggtatcttgtgttatcgtaaaattcaaagcaagaattagatgcatgaatgctatgaagcattggaaatagattgaacttgttgtgtatgcccttcttgttaaatgtggttgcatcaaatgacttttttgggctttagaattctaaggtacacaaggttatggaatttatgttcccttgtttagaattcatggtgcctggtcgcatttatgataaatggatggaatacttgcctgcatttggagcaagtcaaattatgctgtagaattatctgacaagtgttatctgggtgctgatggatctgtaagaggttcatgttttgcctaataatcttggggagatgtagattttggtttttgctgtcttttttacccttctacagtaaattgctaagctaacatgaggtggattgaagccatcttagcatggctgcaaaagaacggaggctttgggtgggatggagttctatgtttatcattgattccacatgatggaagatataaaaaatcgcatgctttagaatttaggttctgaacaggtggaaagctttcagacatggtagtgccttgatgcaataacaaatcagattgattgatggtacttgtagaaaacacaacattgaagtagtttctctataatgaggacattgatttccaagtaaatatttagggttccatgaatgttggtcctaacttggaatgaagtaaaataaatatataccatgttgaccatactgaaaaaataaagacttttgccaatgtctgtcaattgcaatcatagttttgtgttttcacaatggctatgaagtactataattcagtttctaatgtggatcttaacgtggtatcatattgtgactaatataccgcagatttctagatctattggcg

SEQ ID NO: 52849 - DNA, 346 bp, Populus trichocarpa
  Intron number 1 from transcript POPTR_0017s00870.1 (locus POPTR_0017s00870) derived from phytozome v7.0 (chr-ID scaf fold_17; pos 651356 to 651701 reverse strand)
cgcgcaagccaatatcaaactcaacaatttcaccggtaacctaaccgtagcactaactggacaatttctctcttctttttagttattcagctatttctcgctctatctcagttttgctctctgttttacttttaatttttttttatcgtaattagttattaattgcgacagaaatctgattctttttaatcttttttttatctttatttttttgtaaaagaagagctgattttagaagattaatatttttttaattaggttataattgtgaattttatgcagatttgtttgattttgtgattttattaatgagagactgagtttttgtttgtagaggctgttgcgg

SEQ ID NO: 52850 - DNA, 725 bp, Populus trichocarpa
  Intron number 1 from transcript POPTR_0005s21810.3 (locus POPTR_0005s21810) derived from phytozome v7.0 (chr-ID scaf fold_5; pos 20884017 to 20884741 reverse strand)
cagattctctcgtagatctatcgcgtcgctatcaggtactcaaaagattttctgtttggttcccgagaaataaagagaaaggaaatatccactttgtgacaaccaaaagggagtaaaattagcagctgaattgctcttgttttcccctctgctttttttttttttttttaaaaagtgaattgatgcatgccagccatctttctctcgttgaacagttgaatcctgtttgggatgcgttcaagtcattttttttttaagcatctcatgatcgatacctgttttttttttttaatggtcaaaattgggattgaccatgtttgttagatgactttgtattaaatgggctgttgtatctttgatcagattgctgatgttggcgatctaactctttatattaatgccattttctttgccacttttggatagctttttttgtttttttttcgtgtgtggttctgggatttaaagtttgtagatcaccgtgataaatctaaccattcattggtcggaaacgaatataatttgcacaattctcattttcataatcactaacatatggctgtttttgtttttgttaatatttgattttttgtggtgttttgatggcaacctatctgaccatgaaataattgctctatgaagggctggtgtctttgttagtagcaagggggcgttgtggggagcgacacagaaaatatatgttgatgcccagatgatcagaacta

SEQ ID NO: 52851 - DNA, 504 bp, Populus trichocarpa
  Intron number 1 from transcript POPTR_0006s21060.1 (locus POPTR_0006s21060) derived from phytozome v7.0 (chr-ID scaf fold_6; pos 20170117 to 20170620)
cgcaggtattttgaagtgtttatgcggtttttcttattacccttaagtgattttgccttgttttattgaatgtagggttgtagaaatgaatgtgttagatgaaagtttgaatcttttcttcagtttttaggtgcccattttgtgattttcccatatatcatgataacttggttgtgtggttgttttgcgatgagatttcgagagcggcgatttttagaggattttgtgctttatgaattgatgtggaaattggagttttgtagtttactaattctatgtattctctttggttctaaattgtagttgatagattctgtcctaaaattctaagaaagcaactcttgagtaaaatcagttttctttcatggatttaggtataccttcacctcgtatgcaattaatgacttatttgaatgatattattggtgggatttattgatggttaaaggaatgatattttctgactacttaatccgtttatgtgtaggtacccaactcttttta

SEQ ID NO: 52852 - DNA, 532 bp, Populus trichocarpa
  Intron number 2 from transcript POPTR_0005s02680.1 (locus POPTR_0005s02680) derived from phytozome v7.0 (chr-ID scaf fold_5; pos 1709945 to 1710476 reverse strand)
tgggattgggagctggattgcttggtggattgctggttggtgatatgatttctgatgttggtgacatgggtggttatgatggtggctttgatggtggttttgatggtggcttcgacttttagttttttttttttttttttttttgcattttcttatttcctaagaagagtggtagaggaaatatgttgatttttgtaatgaagtaatgttagtattatgaaatatttgaagaatatttataaaagattagcactattctttctttctttctttttgtttcttaacaaattaattttcactcatgttgccgatgaacatgtagctagctcaactggcagtaggcttttttttctttagagatctcgtgttatattcctggagatcaaattagttcaaatgcttaattaatttcttgattagccagatttctcccctcaatcagctcaaattaatagctttaattaataatattgaccttcttgatcttttccttcaagatcacaacaagggattacagaactctagacattat

SEQ ID NO: 52853 - DNA, 948 bp, Populus trichocarpa
  Intron number 1 from transcript POPTR_0006s21940.1 (locus POPTR_0006s21940) derived from phytozome v7.0 (chr-ID scaf fold_6; pos 20908522 to 20909469)
cgaaatcaaaagaaaaggaaataaaaggttacgaggttttttatttatttattgtgacttttctttctaattccgtttaattttatctgcctatctatctgctacttcactatcttctgtttaaatttccttttacctttgcttttgctgcttctcttttgcatttccactcccacaaaattttagcttttatttctttcttgtacaagaatcaagaatttcacttctttttgtaaaacctccattatctagaggagattgtgcaactcttgcgttttctttcttcattcctgttgtttctttacctcaagaggttgcttatagatgatgtcaacttggtgaagtgggtagctagagaaaatgaattaaattgtgggtttcaaagttgacggtcaaattgcatgcctatttcatatatggggctgtttcattatggcctgtttttgtataattttgtggcttttttaatctttaatctctttagatgaataatgagtagctatggaactaaatttgtgaaacctgttcttgtaaagatgatcctttcatgtttttgtgtcaagtttgaatgatcttggatcgatttaagctttagaccgccaaaccgttcttatttctgttatttgagttttaaattggttaggtgatacaattcttctattattgaaaaggattgatgtatgtaacttagttgaaaatgctcatagagttcaactaatcaagttttagaccatttcaatctttcgagttactcgggttctgatctggtagtttggatcaattaagcatgtgatcttaaaagtgacagctaactcagtatatataactcttaatagcgtttgattagttttgtatttctaattatcgctttcaatattcctatgttcttataactatgcacttgcatttttttctcatttagattctcattcgtttgcaggagccata

SEQ ID NO: 52854 - DNA, 858 bp, Populus trichocarpa
  Intron number 1 from transcript POPTR_0005s15890.1 (locus POPTR_0005s15890) derived from phytozome v7.0 (chr-ID scaf fold_5; pos 12531740 to 12532597 reverse strand)
acgactcaacgcggaagacccaacagccattacaagtaccccaatccctttttttctctcttagctaattttgtacgcccatagtttattttcgatatgggtttttattttgatttttttgtgtgattaactctaattttcaatttgcttaataattcagtcttagggccgagatcactttatggttctgtttaatcatttgtccaattttggatctttgtgtagattttttcgctatccttctttttagcttcgttttccaatcaaatgatttgcttgaatgatggttaatggtttgaggagcataaaaaagagagctttttagctagggcgcaatcagggggttgttattgttggaaaactcaaactattagatttgtcttgactttggttcacaatgctaagttggtgagcagtcttaaacctctggttttgttgggctattatgttttggttggagctcaaatcgagttatggtggtaggctggagttaattgttttggttggagctaaaattgagctggttttgtgataactaatgaaaacacattattccttcaccgtgcttcctttaaactcaatcacaacttttatcgtggtaatacatggcttgaaatgtattgccctatttttctctgaacccgtaaatatttggtcaagcactgtggattccttcagtttacgttaattcatcatatgaagcaatgatttcattctgcaatggtttgatgaatagttccatatcaagttaataaatcacacgcctcagtatctttgtttttggagtccctttcttccttctaatattttggcctttctgcaggttgcaaagcgtttggagaagttcaaaaccacaat

SEQ ID NO: 52855 - DNA, 635 bp, Populus trichocarpa
  Intron number 1 from transcript POPTR_0005s02370.1 (locus POPTR_0005s02370) derived from phytozome v7.0 (chr-ID scaf fold_5; pos 1532031 to 1532665)
ttggcctaaatccgttacatctaaagaggtattatcttcttttcgggcttataatctcccgatgaatttgttcttaaaacttaaatagatatcatgggagactcaattgagataatcggtagttttggggtcaattctatcctttcttttcttttcattcaatgaaaatatctccacctgatcaaggtgatgtttgattataggctaggctgacggtgctaggaaaaaacaacaatggctgcacataagagaatttaacctctaatatccgagtctctatttaaatcactctctgggattcattttatgcatgcaatacttggagactgtacttctccatggctaacacaattttcattgttggggtactaggtaatgacccctggatttctctgcatagaatggtgaaaggatcttctatctatttctggcatgtacagggatatcttctggattcatgctaagtacttaaattatgtgtttgcaggcaacatcatttcaagtctggcctacctttctcccttgtaagtaagcaaatcaagattgttttgtaaatttgtgatgcctgacagtaaaatattgagatgtaatatttcccaggaaaactttttggagaattgtaaagaatagatcga

SEQ ID NO: 52856 - DNA, 626 bp, Populus trichocarpa
  Intron number 1 from transcript POPTR_0005s19630.1 (locus POPTR_0005s19630) derived from phytozome v7.0 (chr-ID scaf fold_5; pos 18505578 to 18506203)
atcagttgagggagttcttaagagaggtatgtactggttaaacctaaagtatgggttatatcagtgaggtaccctatccattgtcatcttcaatattcatgatgtgcaaattttgagtcatctgtatatgtttacttcctcagttgaatgggttttttttttttttctatattctctattctgtccaaggtttttatttctaggctttgaattcttgtttcatcaaaatattattcattctcctatccagttttttagtttcttttgttctgctcacagttgatctatatgctcagtcagctttgttttggaatgtcatgtggctgaacatacagtgagaactcttgattttacgctcatgtaattccatggtcttggtctctctgacagaaaatgttgtcttttagtgttacaccgatctagataagagtggaatccaacattcataggctgtattttatcttctctgattaacttatcaagtgaaaatacaagcacttcgtaaggcagtaatctatatattgctaggttttgaggcttttcccttcatagattaccagctttgggtgtgttctttctttggcaaataacactgatacagatgtagttcttattaggtggcaata

SEQ ID NO: 52857 - DNA, 1035 bp, Populus trichocarpa
  Intron number 4 from transcript POPTR_0017s05160.2 (locus POPTR_0017s05160) derived from phytozome v7.0 (chr-ID scaf fold_17; pos 3953639 to 3954673)
tccgagtcccggagtcagcttaggacagcgaggaggtatttacggtttttctttttcttttttctttttttaaccacattacctgatgaactgaataaggtcatttttagtgattttctattttctgaaatgtggaggtagtcttaatgttagattttctgtgttattggcattgtttcagtattgtctgattctttcttgttatggctttcatgccaaactatgaatgcctgggacctgtctatggttttttatcatcagattttcatttggtttgtgcttttatatatggattaaaaaagagagagagagaagattctttcttgtcagtccataagatattacagaggcatgcatttccctacaaaatattattttcaggattcagccttagttattagattgagttcaaaagactccccctttacactgttttgtcaattttcccccctatatcttactctaccatagtgcacgtgttttcctctcaaagtggtagaaggaagcattgttgttgagcccagttgcagttgtttcatgctcacctttcagtcttaatagatactgccatctgttcttcatttaaaaagagtttttaaaatccttttactgtcatcaatactggcttggacatgatctaacaagcttcatcagaccatcattatagagtttgcagacaatgaaacacaatgcacatatgtatgcatgttagcatagtgaaagcatcattaactccatacctttcatcttttatttctctcatcttctttttactaaaactatgacgtgtatataccttattgattgctttttttcagtttgccgtactttgcatgacacaatggttagcttttaatttgatttatcaacgatgtttttttctcgtgatgtgtatttatctgggttaagcaagttatttaagtattttgggcaaaggaatctgttttagttttttcagtatctttaaatcctcttaggagcaacaactttatgaaatattttatgcagggaacggtacaaagacctcattgaaca

SEQ ID NO: 52858 - DNA, 1041 bp, Populus trichocarpa
  Intron number 2 from transcript POPTR_0005s07440.1 (locus POPTR_0005s07440) derived from phytozome v7.0 (chr-ID scaf fold_5; pos 5082662 to 5083702)
ggcgctgttcaaggtttattttacttttcctctttctttaataaaaaaactaattctgttactgatttttatttctttaatttttgtgtgtcggaggaatatagatctgttagcacatacgctgtgatgcatatctatttcttaaataaattttcaggtgttctggatttggtctgctgctgttcttaaatattttggggtgtaatttaaacatctggttatctaggaatttgttgtcttggaattgggttaccggggatattttaaggttatttgtttgtttaaatggtgatgtttaaggaaaacttgtaagagaatattctgataagattaaaaggcagtttttgctacattgtgattttacatttttaatagaaagaagagtagctggaaattcgggatttttggatgatgaaatcagcgagtaggactttgtacttctgtagtttttgtgaagcttacttttctaagtggtttggaaattttggcagacaacattgtgctaatctgagatttggggtgctatttagttgtgctttacagaaattgtttctagaaatacgcttcccaactatattctgggatggggagttctgtttataaagtaataaaaaaaaattccgcgcccagtttctgtgagatgtcctgactcttttgcactgagatttattatacatttctttgcaacatggtttttgaccagtagacatctctttgttgtttctgttatgtatgaccaaagtgtatcatgtgattcgaggatttcaacacattgaagtctctacatctgtttttcttttttgcgtttattttatagcatataagtattatatcatttagcattgttgtacttgtagtttactgtttgagtggttcttgtcagaggtgctattcatattttatttttcttcatatccccagctggtctcttaatttctctctctgtttttcttttcttgaaacttgagctcatagtatgtatttgcatggcttcattttcccacagatccagctactgcagctgctaatcaagcaaacagg

SEQ ID NO: 52859 - DNA, 526 bp, Populus trichocarpa
  Intron number 1 from transcript POPTR_0017s12930.2 (locus POPTR_0017s12930) derived from phytozome v7.0 (chr-ID scaf fold_17; pos 13104560 to 13105085 reverse strand)
attgcatcaaaggccataaaagaaccgaaacaaaggtcagtttatgtttgatctttgtatcttaggatgctactcggatatatatgtatgtttgtttgttgacctgcaaaatctaaaatctgttcactatttattcttggccttccatatttctgcttaatttgattgtctttagcttgttttaaactttgttcttacaaaatctttggaactccatttctgatatgctacacatgtttatcgagctactattatgaacttgttctttcgtgtttaatggctgctaattaaagactggatatacagaatcctctcagaaagagtgaaaaatgaagaagatatatatatgtatatacaagtgaactggcttttaatgttgtctgatgaatttggagctggttactattactattaattgtagtgattctaactagtatattggaagtttaagcttataatacaatcacattggttttctttccttcaatcagttctcgactcgcgggcctttttcgaaagcactcaa

SEQ ID NO: 52860 - DNA, 515 bp, Populus trichocarpa
  Intron number 1 from transcript POPTR_0005s08190.3 (locus POPTR_0005s08190) derived from phytozome v7.0 (chr-ID scaf fold_5; pos 5643117 to 5643631 reverse strand)
ctcctccgcctcttctctctctccctctagaggtgagtcattactcacgagtgatctactgatttgttctttccttgttactagctacatttttatcactctttcttttcatcgatgacgtttacttgtcgtttctttgaaaaattcttaaagagactggaggtgctgccttttttaattcattgttacttcattttcattgaaattccttctgttataaaagaaaagaaagaaggaatgtctgtcctgtccatttgagttcagttcagaatttcgagtcatgttgtggtaaaaaacgacgacgttttttgagttgaaattggagtttattgatctgctgttagaattgaattgaaatgaattcaagtcaatgaagcaaccgaactcagtcatttcgtcacattcttattaattacaattaaaaattaaaatcagttcgattttttatttttgtaattagcagcattagttacgctgactgacttgatctgattgataccttacaggagagtttg

SEQ ID NO: 52861 - DNA, 783 bp, Populus trichocarpa
  Intron number 1 from transcript POPTR_0017s02410.1 (locus POPTR_0017s02410) derived from phytozome v7.0 (chr-ID scaf fold_17; pos 1746426 to 1747208)
ctcgagctttgtttcatttttcttattttgctaaggtaatttcttcttgaacacctttcgtttcctttaattattctctctattctctttaattaacctctgtggttttttttttatctgtcaaagtctgtattatcagagaattcatctatgcttgccttttggttgattgattaattgaattgaactgcttagggtttttacaagttgttgcttgattgggtttaagcatcaagaaattctttatttcttctgtttttgtttttatttgaagaggatttgttctttataattgctctgttttgatgctggattgtgcaatctatggaggtgctaataattttctttacaagttaatttggattagtcgaagacagtcctaagattagtgtgtattaatgatagaagtttgatctgtctttgttttatatcttgaaaaaaagaacatttaaaagattttgttcacttgaatttggggattaggatgatttcttttgcttaatcttgttagagttttttaagttcttgcttgattagaatctgttttgatttctttttcttaatctttttagggttttttttaaattgttgcttgtttagggtctgttttgatttctttaagtttatcattttagggttttcgaagttcttgcttgatgagggtctatttagatttcttttgcttaatcttttcagcgtttttgttatagtttaatttttttcttaaatcttttgatcttgaattacagaggtactcatgatttttttctttgggtgtaacag

SEQ ID NO: 52862 - DNA, 564 bp, Populus trichocarpa
  Intron number 2 from transcript POPTR_1063s00210.1 (locus POPTR_1063s00210) derived from phytozome v7.0 (chr-ID scaf fold_1063; pos 3880 to 4443)
ccagaacttggaagattgcgatctctatattttttgtaagtttcaagaagaagaataataataatcataccaccttgtaaaaccacggaagatagaaagaggagaaataaaatagaaaaagggtggattacaatccttttgatttgttgttgtagagacttgagctccaacaatttgagtggagaactgccgggaaattacgccaactttacttcggatcaattgtttttgttgtaagtgcaactcatcatgttatttcaaccaacaatctgtttaattattgttccaaggaaaagcaactaactatggctgcagtagcgtagctgggaaccgtttgactggtcaaataccaaggttcattgcgaagtggactgcactctatatgctgtaagatattacttgtactttctgtaattatacacatttgaatgtaagcaatattagctgatttctcaatgctgaatgtctacctccaaccatttgatcagagaaactgtcgatgatcgatgaatatcattcaataattggtgtttttgtgtactgatgacaggtccctctccggga

SEQ ID NO: 52863 - DNA, 465 bp, Populus trichocarpa
  Intron number 1 from transcript POPTR_0017s02660.1 (locus POPTR_0017s02660) derived from phytozome v7.0 (chr-ID scaf fold_17; pos 1912537 to 1913001)
cagggtgagcgttggggtagttcatgtaatttaggataccgtgaaattttttcccccttacctgaatattttgaactttattccaaagaattaccggaattttttattcttaaaattttttcaaacttttttttatccaaattaattgggataattattttttgtttatttgaatggtgcttaccgactgaactccctgctgcacaacccttgaagtgagtgtttgaccagaactttccctctcttcttccatatgatttcttcgtcttcttcttcctctcctctgcaattcaagccagagctcataagccaagataacaataaatctaagcaaccctattcttagcaaaatctaatgcttggcatggggggcagcactaatcttgatttcttaaggtttcttgtcttaatatcattctgtctccctctcacctctgcagcagcagaaacctccacttcaaacat

SEQ ID NO: 52864 - DNA, 808 bp, Populus trichocarpa
  Intron number 1 from transcript POPTR_0005s17120.2 (locus POPTR_0005s17120) derived from phytozome v7.0 (chr-ID scaf fold_5; pos 14263129 to 14263936 reverse strand)
ggcgagacttgcagagcaagctgagagatgtatgtgctttgttcaatcgagatccacaagctgcgactctttatttctttcttgctttcattttccttttatcttgttaatttatcacgcttaattcctgctgctgctctatgttctcatttttccctatgatttagtggatgcttacaagggtggatttgtgttttaatacgctgatttagtggctgtattgactgatacgcttgcttgttagaaccctaattactacattattatagttgcttagaaataagaatgaccataaaggattttctggacttttaatagaattaaatctgttaattgttttttagcatttcgatttggtagtactgtgttcccatgatggctcactcttttcggtatgtaggttgtgtatgggttaaaaaaagagaggggaataacattttttttttttttgatattcgaggatttgaataacgctaagcttttctaagcaacccattgatgaatgagtacgcactcttctgttgtgctaaattgagagaggagtgtaataattgaagatttttttatggatgattgttgtggttcacatagcaattaaaatgaggcaaccgtgttcttttcccattcttaatatttgatacagaaggtttctaattttgattctattagttttatttcacttccatttggcctaatttattcagttgaattgctgttgttcctttccttttcttttttcttaaaaacaaaatgtaggtaaattatattgaatatgaaaacatgacattaaaaaccaattgctgcagag

SEQ ID NO: 52865 - DNA, 416 bp, Populus trichocarpa
  Intron number 3 from transcript POPTR_0006s23350.1 (locus POPTR_0006s23350) derived from phytozome v7.0 (chr-ID scaf fold_6; pos 22101828 to 22102243 reverse strand)
aactccataatcttgcaggcggttctgatatcaaggtttatatttcatatattgtattgcttttcttctaccctcgcgcctcactttgttgacaatgataacctttgcacgattacttcctccccatggagttatttccatgcaaaagaaaaactaaaaccacagacaacagtatgcacattttttggtcctacagtaacatgtttccactctgaatcaaatctttttgcattgaaacagcataacgcttattataagattatttccccaacgttagtattttgccactgctgtgcatggctgctgctgtaatttatttttatgaaacctcaccttttgaatagtactggtactaacaagaaactgtcatacgttgtaaagggtctggaggctgttcttgacaaagctgtgcatac

SEQ ID NO: 52866 - DNA, 799 bp, Populus trichocarpa
  Intron number 6 from transcript POPTR_0005s01550.1 (locus POPTR_0005s01550) derived from phytozome v7.0 (chr-ID scaf fold_5; pos 1023434 to 1024232 reverse strand)
ctgatcacgtatcaaagtggatgctaatttagctgctgctggcttaccagtatcaatgtaagcttacctattgtttgtcccatttgcccgtttctctagctcttcgaatagttttacaattccaaattccatttttacatttagctgatagtcactgaaatgctcagtactttaccatggaatatgtaatgttgaataataattacatttcagaattgtataatgttgagtgtggagacaaactcacacaatcctagctttgatgggatggagacaaggcttgaagaaaggagttaacaaagggctaaaatcatggctgcaaatcaaaggaggatttgtggtgattttttgggagaaatcatggatgaaaatgggatgcgtgttcccccattttcaactataaattggcaccatatgtatgagcaaagtagagccaattgagaggagaaacagggagctagagagagctgccttggcagcagcttgtagtggcaagctgagtgagagagatgggagtggagttgagttgagtttctttctcctccgttgttgtgtagttgtagctttctctatacctaataatattggcttctctgtggatgcagccaagtgtccaaaccaagttaaaatattgtattcagcctctgggcgaagatcaaatcgatcctaacaaataagtgggtaatagacagttaatccaaaagtctacttttaattgagagacgattcccttgttatgaataaagaattggaaggtttctgttctgattattttgttaaatcttttttatcaggtttg

SEQ ID NO: 52867 - DNA, 848 bp, Populus trichocarpa
  Intron number 2 from transcript POPTR_0005s24860.1 (locus POPTR_0005s24860) derived from phytozome v7.0 (chr-ID scaf fold_5; pos 23284869 to 23285716)
tgcaaactggagaggaagttgctgttaaactggtattttctaaaaggattattcatttatgttttgatgttttggattttgaaggagaggagtggtttttttagctgcgtatttattattcatctaattttttggccaaaaattagggttttttctgcatgattgtgttatgatttcttgcaatgtataacatgatggatggtgtttgtaggttaggttttgtgcttggtttactttgctgtaatcacgtttatcaacctgtatgatactccccttttattgcgcaggagtatttgagatgtcaaattttattactgaagcagccattgatttagatttagattagggctgtttacttctacatgatttagaactgttatagatagtgatggagtgccacatgcatttggataaagagagttgtctattttgttgataagacagattcatcgatcacagtaagtgcacaaagctagagccctatcgtgtttgttgcaataagtgcacagagctagacccctctcgtgttcgttgcttttcgatgatgaaacctgcacttatcttagtgaaggaaagtaggaacacggatctgtatctttattgagctttgtatgattaattatctgatccttattcaaatgccctgctgcgcaatacaaattacgttattgttaaatgcattgatgtgaaaacaagtcttgtattcctttattttccctgtaagagattgttttgcatgagaatatttattcgagtacttcttctctccaatattccttgcgattcttgacccttaattattccaaatttcaggaatctgtaaagaccaagcatccacagcttcatta

SEQ ID NO: 52868 - DNA, 324 bp, Populus trichocarpa
  Intron number 2 from transcript POPTR_0005s15020.1 (locus POPTR_0005s15020) derived from phytozome v7.0 (chr-ID scaf fold_5; pos 11844215 to 11844538)
ttcgcggaaaaggggtagcattgctttgctcattcttttgttgatttttttttcatgattttaatctttattttcattgggatttgaagggaatatggtagaatgtttgcttaaatttacagtatttcaatgtcttcttaagcatttgcttgcaacctccccctctatcgatttgattaatgctttgagttgtttctttttattggtatgtgaattatgttttccttgctggccagcttatcgtttttgggtttgttttcacctttagcatgctgaagtgtttagatagtagtcttggctaacttccattctatttttcagata

SEQ ID NO: 52869 - DNA, 852 bp, Populus trichocarpa
  Intron number 1 from transcript POPTR_0005s11270.1 (locus POPTR_0005s11270) derived from phytozome v7.0 (chr-ID scaf fold_5; pos 8161649 to 8162500 reverse strand)
gagttggttaaggctatcagagtcggtcttaggaggtatctcctttgcttaaaatacacgagttcatatgtgtctctgttttgaatgtcgttgatgtatttaaatgcatgtttaggttccgttcgatacatgatgggaactcttataggacttagaagggtctgaaatgtttgcaaaactattttaatgtttcccatacatggtgtgatttttctattaaatacatggaactggtcctcgtggtagtggaggatcgaattgagaggtcgtgttctttgtacgattctgggtgtcgaaagtttatatatatattttctgttaagcatatgaagttgggtttctgctaaggagctaagggctgggactttgagtggaggacatgcctctgattttattttatttttacaatgcaaaaggtttgagttttaattagtctgtgttaggctttgatagtgcctaggttgcttagcatggaaactatgatagccagggtttgggttcttgaagtctgcttagcatgccaaaatgttctgatttttttgttttgttggaataaatctgcttatattggtgtttttttatggaaatggagggacatgaggttctggttttcttcatagtaccatgatcattgcttaaaatacatgagttcatgtgatgaatgtggaggcaatgttgttttgaacctctagtgcctgatattttggttaaattcgtaaaaaagtgaggtttttaattgattttgagctatgcgcggctgttatatgttctttcttgggtaattttttaatgttgtagttttaggttgatggttgatgatgactactccagtttttaatgttttcaacaggc

SEQ ID NO: 52870 - DNA, 366 bp, Populus trichocarpa
  Intron number 3 from transcript POPTR_0005s04710.1 (locus POPTR_0005s04710) derived from phytozome v7.0 (chr-ID scaf fold_5; pos 3162007 to 3162372 reverse strand)
aaggaaagctatctaaagttgaggtaatcattttttgtaactctgtttctgtttgttgtttggtttttgagaaaagtgaggataatagagttatgttcgtcatggttgtttatgtgttattcgttttggagtggtgaatgtatgtatctctgttatacatactgaggtcaattcaagtttttcttttcttgtctgtgaaataactgaaggctagagcaattatggttcagtgtacggttttctctagtttatttttctgcacaaatagtgcaatattacttcttctttttttgtgccaaagttaattgtgcatttatgtctcttgctacaggatttggggaaggagttttcaagcccagactcggc

SEQ ID NO: 52871 - DNA, 514 bp, Populus trichocarpa
  Intron number 2 from transcript POPTR_0073s00240.1 (locus POPTR_0073s00240) derived from phytozome v7.0 (chr-ID scaf fold_73; pos 44658 to 45171)
aacacccacatcgacaccagagttgctggaacaatgtgagtttctgatattaacacaaggggtttattgaactcgtgaaaaatcctgaaaagaagacagtaacaaactgtaaggaaaacacacaagtattgtcatttatctaagataatttttagtcttaaacagtatgatgtgtaactgggctcaagcgccgatggaaggggttagctttagaatatatggtaggcaggcatctagggttcaaatcacacactgcagggttctcatggatcagggtttccccatctatggctgtgttcctctaagactaacccttggagaggtttagcttggttgctaaatgaacatactattcacattattatccagggttcgaaatactgtttaggctgctaaaaatataactttcctatcaaaaacaaaaacaaacaatagacatttagcatttcttacatgttttagtgaagcaaactagtaaaatgtctctgtgttattctttctgtgcagggaatac

SEQ ID NO: 52872 - DNA, 561 bp, Populus trichocarpa
  Intron number 1 from transcript POPTR_0005s10210.1 (locus POPTR_0005s10210) derived from phytozome v7.0 (chr-ID scaf fold_5; pos 7299440 to 7300000 reverse strand)
ttctcttggaaaaaattcttcacaaagtcggaacagtaagttttcttttgtgtgtctttaatgcttttctttaatttttctgagttatacttgatgttcttttactgttttgccttcttcgtagcagagtttgttggatactaacatcaccaaattctttagcatcctgcttctttaattcgcttcaattcttcttcattgttgctgttggggggggggggggttaaaccattaatgctatgtctgttttatattatttaaaaaagaattaagaattcttaagtcatgaataaaactgtgcatatttcttttcctattttttttcctgcttgaatcttgttcaattttcccactactgctatgataaaaatgatttttttttgttttcctttattcttgtttcttctaatgccaactttacttggttaaaataattgtttttctttctgtcaaatttatgatttttttatttgagtctttaattcctaactcgatgattttcttcctttttttcttttcaattcagtggtttacagaaaagcataagaaagctttgtttga

SEQ ID NO: 52873 - DNA, 947 bp, Populus trichocarpa
  Intron number 1 from transcript POPTR_0017s01480.1 (locus POPTR_0017s01480) derived from phytozome v7.0 (chr-ID scaf fold_17; pos 1016974 to 1017920)
tcaacaaggttggaccgtttcacaatcccaggtaatccaattttcttcaattttagaattcaattcttgcagttttaatgttgtaatttcctggggtgccttcaagtttgaggctttttttatgatctgggaagatgggatttgtgggatttggattggaaatgaaattgtgaagttgagttttggagaatttgattttagcatttaaggttctgattctgaagaactccccctcttttttttgctcttatttgtgtttgtttctttgattttcgtggatctaaactaatgtggaactggatcggtgatttggtttcctgtaaaggaagattaaatattggaacttgaacatggtaaagagatgagttagttagtaatgaagttgggaatctcgtatggcttaatgattgtacttggagttgattaagtgggccatcttatgctgaggttagtggcattttggaaatgaaattgtttgatttggatagagaaatctgtaagcaggaagaagcagtcaatagaagactggaacaatgtctagagattcaggaggtgttcctttctcttgtggtttcttgtgagctagaaaagttcaggtattttagagaatttttacttttatttcgtggatgctgaacttggatctacattctcagatcttttcagcaatgagaaaaccatcattcttatgtaaaattattttagtctaagttcatgtgtgctgtgcgtatcttgcttggatttagaagtcttggctggtagcaaactggattagtttgaattagataggaaacttgtttagtgcttgagacattctcaatcttttgttattatattgagattttaacagttcctctataaatatcatattattttccctcatgattatctgatgttatctccttctaacagtgaaacataccgctattttgatcttcctttctgtt

SEQ ID NO: 52874 - DNA, 406 bp, Populus trichocarpa
  Intron number 1 from transcript POPTR_0005s04060.1 (locus POPTR_0005s04060) derived from phytozome v7.0 (chr-ID scaf fold_5; pos 2697212 to 2697617 reverse strand)
ggtatctttccttttcctcctaatttcccttctttgtcattcttcaagcatcaccacatcaccacttctgcttgtactcagaaaccttctttgcctcaaaaaaattgtgggtttgttagtaatactagcaatgacattagtattgatgatgccttgacttcattctatcgcatggtccgcatgaatcctaggccttctgttgtggaatttggcaaattcttagggtccattgccaaaaagaaacagtattcctctgttgtctctttgtgcaatcaaatggatttgtttggagttacccacaatgtttattctctaaatatattgattaactgcctttgtcgcttgaatcgtgttgattttgctgtctctgtcttggctaagatattcaaactaggtattcaacctg

SEQ ID NO: 52875 - DNA, 559 bp, Populus trichocarpa
  Intron number 1 from transcript POPTR_0005s12800.1 (locus POPTR_0005s12800) derived from phytozome v7.0 (chr-ID scaf fold_5; pos 9619247 to 9619805 reverse strand)
tccttttctctgtggattttcctcgaacagataaggtacctttataatatctctcttcctttaatttctctcattttagattttctacttaggcgttttgatttctgggttttgtgtaggtattttgtttttgttattatttggttttttgtgtgattgcaagtttaaaagtcttaattttttttgtgttttcaataatttggcaaacccctttattttcttttgcctaaatctagacttgaatataaaagattgcgatctatttgaaaaaatgtatcatttttaacttgagaatatctgattgttgaattagtgaatgacactaggattcatgtgttctttgattatttttttggggtccttttgtggttagagcaaatccttagaatatttaagtgggtgtttttctattttgattgattggtcaatagttttgtgtgtgattgtgatttgtgttgttaaggtaagttgatgtttttaagattgttgatgcgcatgatctttgtcataatcttaagggtttttctggctgattgtttttttttctatgtcaggagct

SEQ ID NO: 52876 - DNA, 444 bp, Populus trichocarpa
  Intron number 2 from transcript POPTR_0017s02510.1 (locus POPTR_0017s02510) derived from phytozome v7.0 (chr-ID scaf fold_17; pos 1817867 to 1818310)
actaagaagaacaataccaaggagacaagaccagcgtcctacctgcaggatttcttcgaactcagagactcttaaacttcccaattcaggccttctctctcgattctgaataattactatatggagaaggagatcagtcgtagctcaagcaactgcaagtttctagttattaatgttttctgctagatcttatagtatgatgaaatcccctttagatcacataaatttcggtgtttatttgtcatgtggtaggacaccagctcttactcgtgattgtaactattttgattgttaattagttttttcaatagtttatgttcataattcaacgatcttgcaaatcagtatggtgcttggagggttttctgtctattttcattggtaaactttcgtttgaaagatatgatagagtaaagcttgaaaaacactcttgtctctgctggt

SEQ ID NO: 52877 - DNA, 894 bp, Populus trichocarpa
  Intron number 2 from transcript POPTR_0005s24870.1 (locus POPTR_0005s24870) derived from phytozome v7.0 (chr-ID scaf fold_5; pos 23293904 to 23294797 reverse strand)
ctactagaggtattgcattgctctttatctgtttttagccaatttggctctcagcattcgaataccatgccagattgtatacaaagatgatcaaattcttttcttgttgctttttcctctcttaatattcaagctaattcgtgatcaaattctctctcttctttttttctttcaagttcaaaagaagctcaaacgtgtcgtgtttcccttagcaaaattgtccgctggagtgtttagatttaagaacatagtgccgccgccttttattatttggactataaagtgaaatgggttggcctgttagatgttgaaacctgatgggatggcattggattatggtctagataccattcaagctaccttagagcacgccctcctttgggaagttgaatgattgtcgataatgatgacctagggtggaagaaatggtgggaacttctatggcgatgctaaagtattccgatttgcaaacttagtgtgccattatgtgaagatgagatcttctctaataaaaaacaaagcaaaaagaatgatacagtttcctttcatatggatactgtattagagatagactagagcttctgcgggactgtacaagtgcatcaaacctattaaatgaaagaataagcttggaaaacagacgttcttgtaaagctcttaatttggtccttcttagactgccaagagcatagggttctttaaatggtttttgggtgtggctggcactgtcattttatgttctttatgtcattggattccgagacataaattatggagagatcttacgattaacatcctgctagattacgaggctggaaatttctttgaatctcacgctattgtttttaccttgattcaggtatagagagggaaatcggagcattgcagctagaa

SEQ ID NO: 52878 - DNA, 538 bp, Populus trichocarpa
  Intron number 1 from transcript POPTR_0005s12020.1 (locus POPTR_0005s12020) derived from phytozome v7.0 (chr-ID scaf fold_5; pos 8800527 to 8801064 reverse strand)
tcaggtaaagacaatatctatatacactatgtctatgcaatgtctcttttcctttactttcccttcctgtctttcaagtgaaacgagtcactcacaattctgaagattcactctttagaagaattcagaggcacacacgcccttacagagaatcttgagagagagagaggccatatcgattgcttgtgtaatgaaaatgggcctccatgataaaccccatcagctgttttttaacttttccttgtatgaatactgttagtaagtaatcctgacgagtagattcacagggaagaaactatttttcctctttctgtgtgttgattgatatctgcgtatataatatatatgagcatgtgtttgttctttcttgcttttgcgtgccatttcatatacataaaatataattttataaaaatcccattttttttttatctcagtactaatttaatcaaaatctaatgtaatctattttaatgggttctttgtggctttctttggtttagggttagaacttgggaatttcccagcagaagtgagc

SEQ ID NO: 52879 - DNA, 579 bp, Populus trichocarpa
  Intron number 1 from transcript POPTR_0005s20630.1 (locus POPTR_0005s20630) derived from phytozome v7.0 (chr-ID scaf fold_5; pos 19659652 to 19660230 reverse strand)
caccttcgtagccaggtaccattgccttcctttgttttaatagcactgtacaagtaaggctctatcccagttgtattttgatgcaatttgctctataaagtatggggccaaacaacgaggtggtcctattttgccttctgttttctccttgccttcctgtttctgaaatggacagctttaacttcctataagacgttatgttgtaggcgtggagcatgttgggggagatatgtttgttagtgtgccaaatggagatgctgttttcatgaaggtaaagcctctctgggttatcatctccatttacccctatctacgtgttcttagattgaagtttgtcaagatgtgagtgaaaggaaatttagtgaaatctgactaccctgaacttcataggaaataattcatagcagcccccaagatgtagactttggtttacaaaatatctattttacataagatcttcgtgtttgattcttttatttgttgagttaccaatgtaccttgcagtggacacttcatgattggagcgatgagcattgcctgaaaggctgaaactactcaagaactgttgggaagctcttc

SEQ ID NO: 52880 - DNA, 1013 bp, Populus trichocarpa
  Intron number 3 from transcript POPTR_0005s00910.1 (locus POPTR_0005s00910) derived from phytozome v7.0 (chr-ID scaf fold_5; pos 431881 to 432893 reverse strand)
ttggtggtcaggacaaggtatgtaaatgctttaaattgtaatgagaacttcgggtataattacaatatcatgaaaatgcatcaaattgttttctcggcattgtaaatgtctcatctttagtcaatgactaaatatgacactattcatgtttgtgctttaatctggttttaaaatgtgcttattgacggtattgtgctggtaagatattgctccctcagcgcataatcaaatcataagctacatggatttagccagttaatgttgcaatctttcctttttcggcatgaagggaaagataaccattgcatggctgaaattttactatttaagcatttgcacccttgcacatacccttgttgtctatttgcttatggacagtctagtgctgattatatgctttgtcattggcacacaagaaatacataagctataatgagtagagccatcttgtctttcatgtttttccccttgttggaatgaggaatgacaatccatgacatggcaacattttgttgtccatggttgtaaatgttgtctggtttgaagtttttggtcgtttaggtgcatgtgcttatcgacggtcttgtgctggctagttgtcttccaccagcacacaacatattcgtaagctacattaacaaatccacagttttattttagtttctcctgtctttgtgaggaaaagctttcaatgctgtggtgtacaccataaatcatatatcaatgtttgattatgttttgtgaaatgcattgatttggttgcattatctttaatgctgatcaactaaggatgtaattcaagttgaactggaagcatgtgtggaaaaaaccacctgctcatgtgcagtctatcgcctaggagataggagacatcttctgtcttatttccttgttattttgggtattgtattcttttcatatgttacatgtttcatgaaaaaggaattgtttttcaatttacttatctgatctgcacagattcgaccattgtggagacattatttccaaaacac

SEQ ID NO: 52881 - DNA, 625 bp, Populus trichocarpa
  Intron number 1 from transcript POPTR_0005s00910.1 (locus POPTR_0005s00910) derived from phytozome v7.0 (chr-ID scaf fold_5; pos 433189 to 433813 reverse strand)
tgcagatcctgccctctctcatcctctgcgtctctgtaagcttttccaactctctcttattttctgtatgtttatattggttgtcgatgttgttactgtagaacttgagtagtcttaatttggttctaaagtttgtttttatagaaaaaatcttttttggttttgttttgaatggttcatagatctgacccatgttagattggatctgttttaggggtgtttgttgaattcttttatgacccttttgcatgttttgtttgttggaatggataaaagagagatcatgaagtttggtgtgaaataatgaaaggaaaatgatggaattgaaagggacgggcattgtaatgtgtaaattttttgatgtttttttgtttatgatttgtttgttaatggattggatttggtgtgatttgtgaaatggtataaaaaagggaagactttgcttgtatttgtgagagaatgtgtgtggagatcttgcttgcacatctatctatttttattttgattgatttgtgtgaatgatagaatgttaaggatgatgtaatagtgatctatttctgtaagtttgattgttgtttttttttatttgctgatttgtttttgatgcagctaagaacttggaaag

SEQ ID NO: 52882 - DNA, 846 bp, Populus trichocarpa
  Intron number 1 from transcript POPTR_0017s04850.1 (locus POPTR_0017s04850) derived from phytozome v7.0 (chr-ID scaf fold_17; pos 3737644 to 3738489)
tgacgactttccttttctcgagggcttcttggctggtatgttttaatttttcattttcttttatggtttgccggcattttgcttttatttatgtatgatttggtggattgtggttgtcatgttgtgatgaatttaaattttttttctttttttcattgaatgtgtgcctaagcttttgaaagttaagaacttgaatgaagaggaggagtgttcataaatttctagttgatattgtgttttgaattgatttgcaatgaaatgcggatggatttttgtatgtaatcgaagtttaagtttttaatgttttggttgatcagtttcaaaaattataggttctttcttgatcagtaactggacaaagtttcaaagttgtgtgtggtggggatttcactggttaattggcgttgtgatttgctttggtttggttgtgatttgtgtgtactttgaaagatgttttcagtgggacatctaaagtctcatctcttgtttatttgttgcgagcatatcccatttcgatttgtttccatggcatgtagtttgcgctttgcaagaactctgtaaagttcagaaattatttatacccttgtcagaattgtttccagttcctgacatagctagcattttctttgtgcgcaatccagttgttactcgttgtctaccgttattgactaataaatctgacattagtgttgacattgttactgatccttctggtgactaatttagacagctggcttttgtgtagaagaaatggctgtgtgaatccaggcactctgttttttatattgttttcattttgaacgttggtaaattattgactagaaatgcttggtgacagaggaatct

SEQ ID NO: 52883 - DNA, 669 bp, Populus trichocarpa
  Intron number 1 from transcript POPTR_0005s09940.1 (locus POPTR_0005s09940) derived from phytozome v7.0 (chr-ID scaf fold_5; pos 7051216 to 7051884 reverse strand)
gtgacaccattgacaacgtcaaatccaagattcaggtagacttcttttctttgtttcttttggttttcgttttaatttattcttttgtgttccttgtttatagtcttttcttggatatgggtccttttgttttgattaatattccgtttcttgatgattgattattgggaaaagctatatttggtgctgtgggtttggtttgtgctgatatgaaatggaaatgatgggttgttttctcgtggaattacttataaaatttagagctttacgtggggttccttttcttcttgcaataatgatagcatgatttggatgttgctgatgagagaatttgttgataactagcaaagaatgcatgaatttagttaggttttaataaatatttcctttggaaaagcctttaacattgagctcagcacagaattctcaataagaatggactagcaatagtttattcatgattttcttgtcatatatcgacaaccttaaatgaattcttgaaaaaaattatttgggtttttggatctgtttccttatggaaaaggttccggtttgagtatcggatttgtaatttttttattttgttgggagttggtgaattggtgcttgacaattagtgatgtgcatggttcaggacaaggaaggcatccctccagatcagcagaggtt

SEQ ID NO: 52884 - DNA, 644 bp, Populus trichocarpa
  Intron number 1 from transcript POPTR_0005s12790.1 (locus POPTR_0005s12790) derived from phytozome v7.0 (chr-ID scaf fold_5; pos 9598330 to 9598973 reverse strand)
ggattgtcgaagaagacggtaccacttatcgcaaggtttgtttgatttttaattatatttttgttttaatggatttttatttatagatctagacatgcatgcagtggatttttcgtttaggtagccttttcgtgttttctttttatcttttctgtagctgtagtttttgtgtttcctgattccttatccaattggctttgatttatgtcatttgcagtaatgtttttgttcttgtctggttttttcttcgattcatgttaaaagttaagacaggatagtgcttttttttctttttctttttaccctgctttaatttgatatgggagttgatttctgtttctgctgatttgtgggttacttgtaatcaggaaatttgtactttactgtcaatcaaatcctccatttactccagccagactataaccggtttcctaagtgtcatgagtagtcccataatctcatccatgctgtaatcaaactgatttaggatggaaatttatgagtttaatttaaagcaatatatgttcttctaaaatctgtatgcatagcttttcttttatgtaattttgtcacctgcgagtaatactcctgtaatgtgcactgtcacagggctgcaagccacctccatctgagattgctggcat

SEQ ID NO: 52885 - DNA, 713 bp, Populus trichocarpa
  Intron number 3 from transcript POPTR_0006s09700.2 (locus POPTR_0006s09700) derived from phytozome v7.0 (chr-ID scaf fold_6; pos 7116746 to 7117458)
atcagattgcctcgttagagaataaatatcaacaggtttgcgaaggctgattagttgatttcgatactgataatatgaaatcttcttatgccgtatttgttatgttgcggtacagtgattatgaaaattgttggattgagagcaagtgtaatatcattaatctgatcatagtatcattttaaacatgatgtgatcacagccagaatgagtgttgatggtttctaatagttttggatttcatcattgtggtcctgacacgcccttttttgtttgtctaaatttctgtttccgtgcttctgctactttctaagtggataaggttgctagagttgtggatttgggaaatctgaactgaaactgaaagtgataagctatcaaaattcatttggatgagctagtctattgttctctgtgcatcatggtgagacctgacaatttgtgatgctttcccccagaatgataagaatgtatgattaggagaagggacggaaattaatgatagggatgcacatatctaatgcatttctgccattttcagaacctcttttgaaagcaggaaaaaaaacacaaatcattctgcttaatgctgtcagagtcttaaggttttaggcctgggataaattggtaatggattctgttgctttgagtattttcatgattttcaactattgatttcaggctcttaaggatttatacacacatttgactcctat

SEQ ID NO: 52886 - DNA, 425 bp, Populus trichocarpa
  Intron number 2 from transcript POPTR_0005s05370.1 (locus POPTR_0005s05370) derived from phytozome v7.0 (chr-ID scaf fold_5; pos 3550193 to 3550617)
ctatcaagcaggtaatagttgtttctccttttaagcagaatttgaatccgaattcttgttgttatcactgattttttatgattttattaagtattatgccattgtagagcttgccttttatgtctttagagtcttggttttgcatgcaaggaattatggattatgtagttagccatagtccttttcatgcatgctgatttaattgaagtaatgtaaagagaatggatttggatgtcgaaatcttttccttggaaacccatatagtagttttattaagttccgttgagcactagtttttgacattttaagtattctgggtttccatgcaattaaagttttgagttttaaaattaatgttgtcgctgtgtttgttttcttctaagctttttttattggttttttttttttttagggttatagagaag

SEQ ID NO: 52887 - DNA, 646 bp, Populus trichocarpa
  Intron number 1 from transcript POPTR_0005s07340.2 (locus POPTR_0005s07340) derived from phytozome v7.0 (chr-ID scaf fold_5; pos 5012090 to 5012735)
gattctcgaagagattcaaagttgcctttttcggagtattctattttctcttgttcctaatttagggtttctgattaagttcttcgatcattagggttacttgttgtttgaaattaaagtctgctttgggggattttgggtattgaatttgtgtgttcttgattcggtgtttgaaattgttggatccttttcgaagtttacggtttatttatcattttcgtttcaattaattaatttttcttgcgttgttatgattgcaattattgatatcaactttcaaaccaatttaggattttttagacttataagttttgatggaactgtttttttatgtcactagttgtgtaatagtttcaaggtcattcatatttcgataacatttgttgaattgtggttatgtttgcttgctgagaaaatgtaaggaaaacacattttcgttcatggcctatgttataagcttgatcaaagatatgaattctgcataagacgtgtggttttgattatgttttcttctgtttctcaaatgttgcccaggaggcctaaagcgaggtggtcaatatctgcatgaagttgtgttaatgaatgttaaatgttgtcttttatttgttatttggatgattgtttctgatgaattggttgtgtatag

SEQ ID NO: 52888 - DNA, 443 bp, Populus trichocarpa
  Intron number 4 from transcript POPTR_0006s22810.1 (locus POPTR_0006s22810) derived from phytozome v7.0 (chr-ID scaf fold_6; pos 21709287 to 21709729)
taagaggagtgaaacctgatcagcaatttgtcaaggtataaattcctctgaactaaatgcttcaatctgagtggtttgtgaaaaaaatggtgaaatttccttctttatgtttgcgaacttcattaagtttcagtgagttttgatgtggtatatgctcacttattgttatcattggttggcgcatctggtgctgtattcttctattcttctgtttctgtaaattattgtctttgttttctaatttgaactgaaactagcctgcagcatgaataaaaactcttaggaggcagttgacaccactctcattaaattgataatgtgttatcaaagtattataaatattgagtacatgactttaatgtggaagtcaagaaaagctaggaagtcttttatcgtgtttgaattggtggttatgaatctttggttcttgcagattgtgcgtg

SEQ ID NO: 52889 - DNA, 830 bp, Populus trichocarpa
  Intron number 1 from transcript POPTR_0017s14230.1 (locus POPTR_0017s14230) derived from phytozome v7.0 (chr-ID scaf fold_17; pos 14369811 to 14370640 reverse strand)
gcccttcaaagccagagcaagaacagagcaaaaaggtgacactgaccctgatattcatcttttaaagattctcctttgttaaacaatcaaaaccctactcgtcagtggattcatcagagaccaaataaactaaattgaaatcaccattgaagcttcttcttcgttttttggtcttttgaggcaagagttaatcccttaattgttattgttttattccttaattaacatgaaactgttaatttcttaagatttcatcggagaatcattgaaagtaaagttttttttggttagttatgactggaggaattgaagcacttgatttttgctttctttttgttgttgttgattaatactttattgggctattctttgattgattttagaccgttttggtcgtttttttactgtgttttagctatagtgtgagaaacccaatttgtgttttgctgttaatttgaagaaatcagtctctgccacagtgaagttattatggattttcaatttagaaagcaccttgattgaattagatatgtatatcaccaatgtatcactactttaatgatttacttgttgaagtcactggctttttgagtttatgataattctaatcaccgtgtgatttaccactgacttgcacgccataactgaaatcagtacattttaaggaacatgagttcaaagcagtttgttttgatatttgatgtagctttaaattgtcttctgactcagctcggaaactctttgctttgaattaacctataattaaaattttcatttcatgttgtttttgcacagctacttgtaatttaactaggaggcagaattagacg

SEQ ID NO: 52890 - DNA, 519 bp, Populus trichocarpa
  Intron number 1 from transcript POPTR_0005s27360.1 (locus POPTR_0005s27360) derived from phytozome v7.0 (chr-ID scaf fold_5; pos 25070607 to 25071125 reverse strand)
atttggtgattatctaaccgcaaattttattatttactattattttttgtttttattagaaaataaaacagagatttttttcagtgtttttgaatgatactttttttttttatttcgcgcgttattcgttgtttaaatgagttggatcggagtgagttgttgtgtttgacccggtcaggattgttttctttttttttctggtaatttatttctactttgaaaatcttggtagtggtggatttcaagtttctatatatttttttaatactttctttatatgctaaattcgaatatttaccataaatattttattcttagttgtttgttgtatttaatcttgtgtctggtgcccaacattatagaagcatagatcttgttgtgtataaagcttaattttgtcttttctctcataattctaagcctcttctttttctgtactttctctgcttttgctgtaactttcctcattgtttcttcactaataatttaaatcactgatttgtaattttttcttgcagg

SEQ ID NO: 52891 - DNA, 593 bp, Populus trichocarpa
  Intron number 2 from transcript POPTR_0006s19790.1 (locus POPTR_0006s19790) derived from phytozome v7.0 (chr-ID scaf fold_6; pos 18809877 to 18810469 reverse strand)
aacgcagttggattatcttcagcagtgcttgccaggtaatttttctctgatggtttaatcacgtggcttctaaccttatgcagtagtaattgagaagttgttagtgcgaattgcttttctcaatactgctatgttatttgatgcgtttatagctgctattgtagccatcatattcattggaaatacccaagacaatgtggagatattcgatcttcatgtagcagcaaattgcctagctatgccactccggttctgtgacatttatgaaggccatatgattaaattggtctatattcctgatgcattagcatttggcaggatagataacacgttgagctgccaaagtaatacaaatcttataattttgatttctgaaatagaaccatggtcttgagggtttatgtaggaccatcaccaaaaaaatatggaagggataagttctaacatgcctgtgttactccttttacatgtttctgcttttcacagtattgtgttttggcattcaaatgtatgcagtggtcaaaactctcttgttttcagctaaccagaaaaccattcacatctttgggttggttgtttatatctattaggtt

SEQ ID NO: 52892 - DNA, 671 bp, Populus trichocarpa
  Intron number 1 from transcript POPTR_0017s01400.1 (locus POPTR_0017s01400) derived from phytozome v7.0 (chr-ID scaf fold_17; pos 977405 to 978075 reverse strand)
cgccatacttgtcaacagattctgcagcttgaaaagtattataaaattatcattgaatttatcttatcaagaactatattttatgttcttcagatatgataggtttgatttctagttttgccatccattttttatgactttggagtttttgttgatgttcatgaggaaatccttgtatatcttttacatgttctgtttttctagtgtttctctcttggtttactctctgttggtaagggcttgattagggttaatttgccttcgaatcttagttggtatagatatatagtcttgtaaaggcatagttgagtggcttttggactaagtcatttcacttgacataatggatctattttatttatcagtgaattgaaaaggatttttccatcatttccacatttcagatagatggcggtgtttttaatggagatttactcttatgttaatgcattcatttctgtcttgattaagtcaattttcctatgtgtttgtttggcccttaattgtgttgttcggcttgtttgcttccttaattaattaattacttggcttagttaattactaaatgtcaggatttgtatatgcatcttgtaagaatattttatgtttcttcagaaagtccttccaaaataatctgtgtttttgctggtctgatgaagatttttcaagga

SEQ ID NO: 52893 - DNA, 613 bp, Populus trichocarpa
  Intron number 1 from transcript POPTR_0114s00200.1 (locus POPTR_0114s00200) derived from phytozome v7.0 (chr-ID scaf fold_114; pos 12197 to 12809)
gttcgttatttgtcaggtaagttatttgactttggtctttaattatttcttggtttgcctgcacgtttttatgatcctttttgcattttccctttttattatatctttgctttttttttttttttgggatactgtgttttttggcttttgcaatatggggttttgtgctgattgctgtattgaacagtcgggaaattgccatgtgggtgaagttcttctagttttgctactatttctggggaaggtcttccctttatagtaaataggctggctattggtaattgaaattagaaggtaaagaaaccaatgtacaaattgtaaaatgagtgttttggactatatctacacttgatttcagtcaattcagttaactccatctttaaaagttctagtcttgtctggatttgctctttactttgcatgaactcaatagttttctttaacaaatatagattagattttttgtgacttatttttggccgggtttattggatatccgtaggttgcattttgttaattgctgcattatcatggagttaaaaagaggagagaaaatgacaatgaggaacaaatacaggaaaccaaccactttccattgcaatgcagggagcag

SEQ ID NO: 52894 - DNA, 816 bp, Populus trichocarpa
  Intron number 1 from transcript POPTR_0017s01050.1 (locus POPTR_0017s01050) derived from phytozome v7.0 (chr-ID scaf fold_17; pos 771482 to 772297 reverse strand)
cggcatttctcctcctcgtaagttccaaagaaaaaagaaaaaaagcccaatttttttagttaaatttttcaattttattcgaatttaattttttaatttgatctctttttttagatttagaaaagaagatttacagttataatgatgttgcagaatctgctgtgagagagagaaagagaagtaaaggaaaaatcaagaatcaagggatttcaataaatgaagcatctcctggttcagctgagcaaccaaagaagaaagtacataattttttaattgcttattgttttttctactttttcagagatgggttttgctctttttgattggaaactcatgttttgatgtttattgtaagagattgataaagttattgactttgtattgttattggtttttttcttttcctagttttatagtaatgggttttgctttttttagtcagaaattcatgtttcgatgctcgttgtaatgtagagattaatagagttaatgaatttgtattattgttgtttttttttttttgtgatagatcttgcttttaaataaaataaaacaaaataaaaaaaattatgttttgatgctgattgtaatgcagagattggtaaagtgatttactttggattattattggtatttttattcttactcttttagtgataggtttatttctcattggaaatttatgttatgatgttcattgtaatgtaaaaattgatgaagttattaacttggtgtttttatcgatctagattgcatcaaatgcagttgaaggaaagaatgttagtcaaggaaagcagatctctccggttgtgtttt

SEQ ID NO: 52895 - DNA, 381 bp, Populus trichocarpa
  Intron number 4 from transcript POPTR_0017s08410.2 (locus POPTR_0017s08410) derived from phytozome v7.0 (chr-ID scaf fold_17; pos 6931152 to 6931532 reverse strand)
gcggtttgaatcagcaaagaagcgcggtttgtaatccgttcttgcatagctctcttaacttcttgtagtaatgttatattttcatacatatcttccaagcatttttattttatttttattgaaaatgtaaattgggtgcgtaagcttctacttccatggttgttcagtgtattgggaaatggaaggaaaatatattttctttgattacaagagggagagagtgtgtgtttttatgtatatatataactatgatagatttttaaaaaagatacacgagtagaatgtagccaagttaggtattatatgatggtgatacctggtgtaatggatttattttaaatgaattaatatatactatcttggatgttatatagatttgta

SEQ ID NO: 52896 - DNA, 347 bp, Populus trichocarpa
  Intron number 5 from transcript POPTR_0017s12700.1 (locus POPTR_0017s12700) derived from phytozome v7.0 (chr-ID scaf fold_17; pos 12889275 to 12889621)
cctactcggacttcataaccatttaagcaaaggtaatcttttcttctcaatgttaagtaatatctaaacaaaacagtctttgagcttggaatatgtataaatcttctgattttccttctcagtaatttcttttggaagggtggactgttatgccattacatgtttggcttgctatctgcatctatatgttcagcatttatgtggatgtgtgcgccacatttaccagaaattgttgtgcaactagtagcttgtttaatttgcctaccattatagtactattagttgccactctctgcacctacttgtttctcagattgaaatgtgaattgcagccaagagcttactaa

SEQ ID NO: 52897 - DNA, 998 bp, Populus trichocarpa
  Intron number 2 from transcript POPTR_0005s20070.1 (locus POPTR_0005s20070) derived from phytozome v7.0 (chr-ID scaf fold_5; pos 19085415 to 19086412 reverse strand)
tagtgctaataatcgcaggccccttatctctccaggtatgctttcgtatctctccccctctctctatccttttcttttctttatttcatcacatcttgtgtaagcatatgaaaaaaaactagagtatctcttggttgtgtaatattggtatgaagagtatggaactgtttgcaaaagcttcttttttaaaattggctttgattccttagcaaacttccattgtattctgcaaagtgcatcgagggaggttcatggagtatacttcgtgcatattcgtcataatctgttttactcaataatcttctgaagtcttgcttgtatgctcgtccttatatacagaggaagttggaatctcctcatcgatatactgatgcgggtaatgataaacttatctgtccaaggcctaaccatctcatcaagagaggtctaattgaacatgaacaaaattgaaattagaagatgtgataaccatgttgactgttttatttttctttgattattattattcccttgccaccatgggttcgttaccagaagtcttgcttgtatgctcgtccttatatacagaggaagttggaatctcctcatcgatatactgatgcgggtaatgataaacttatctgtccaaggcctaaccatctcatcaagagaggtctaattgaacatgaacaaaattgaaattagaaaatgtgataaccatgagcccatcgccaagtgcttattggcatcactctagctaattggatgcaatttatgtggtttggattctcttttattcaccaatgtggattacgtagagatagtgtcaggcagattctgaaaacaactgtcctataaaaaacaagtttgtcgcgcctgctttgcacaatgatgtgaaagtgcatcctgatggagattagtaaacttttttcattttggaaagcacctagttgttgatatgagtgaagtatttataataaaaagattcttgtgacctgaattgtttcatgctgcagttc

SEQ ID NO: 52898 - DNA, 616 bp, Populus trichocarpa
  Intron number 1 from transcript POPTR_0017s13110.1 (locus POPTR_0017s13110) derived from phytozome v7.0 (chr-ID scaf fold_17; pos 13277288 to 13277903 reverse strand)
gaagtgaaagagtctctcttttgacctccaaagatgtaatttgattttccttgtatttcttctatgccacagggtatttcttgaatcacttgagattttactattgttatatgcatgtgctcttacgtttttgattgcctttattgcttgctacatgcatggggaagtttttttcttttctttctcttttttctttgagaaaaaacataaaattttggttctttcttaaaatctattaatttggcgtggttttccagttattttttatttttaattattcatcaagcttctccttcttctgaggtttttgaaatgcttgtaatttgaaatgttacagttctgtttcgtcttgactgctttttttgttgggtcttgaaacttccagtttcatcgaggagggtggtgtctgatcatgggttttttgataatttggtctttgtatggattcctaaattttttccattaatcattcatgtgggatatgagaaaggattaatgggattttgaattgaagtcttctgttctagccaagtgctttggaaattaaatattggcacattaacatgaaagatgcagttgattcactttgattttatgtaggcaaagaggaaatcaa

SEQ ID NO: 52899 - DNA, 567 bp, Populus trichocarpa
  Intron number 2 from transcript POPTR_0005s15660.1 (locus POPTR_0005s15660) derived from phytozome v7.0 (chr-ID scaf fold_5; pos 12264063 to 12264629 reverse strand)
acaagtgggttccttgcttggaattcgagttggaggtgataaatccaatttcataatcttacaattttcactaattattatttatacgaggtgataattaaccatataaagcattttttgtattttgaaagtatttttgaaaaaattatttttttcaaattagtttattttttttgtattttcagttatcttctgttctgaagttcaaaataaattttaataaataaaaaaaatattttaatatatttttgaataaaaaatacttttattataattttataactatcgtactaaattaattgtacctatacttttacgttgaacacattataattattggatttgattaattattttatgaagattatgcatgttcatttttaatttgttgggtttacacgaaaattaataatgttatcaggtaacttaattaagcattcaagcagattcttagttcctcaatatatagtcacatataaggtttgtgattaattgtttatagacactaacttgaaaatgtttgattatgcagaaaggttgggtctaccgcgagcaccaccagtcccc

SEQ ID NO: 52900 - DNA, 752 bp, Populus trichocarpa
  Intron number 1 from transcript POPTR_0005s06430.1 (locus POPTR_0005s06430) derived from phytozome v7.0 (chr-ID scaf fold_5; pos 4291311 to 4292062 reverse strand)
ttcttgaagaaggtgctgttattttggggtctcaggtattttgattttgataaaggatgttttgtcttttttcgtttgttttttttttctgggtgtttttttatgtgaaaatgcattctctgaccagcttttccttccaatggatttctaaggtgtcttaagcatccaaactcctgaattaataaaaaaatttatttatgatttctaacatgaagcttgtgttaatggatctacaataattcgatggtagccctatgaagatgtgaagagaaagaatgcttttgtagttgatcttttttgggttgcaaatgtgaataaactttggcatgtttgaatatttgtgtagtagttaggtcacggttaatgcttgcagctaatatttttttagcccttttcttacaaaagagaaaacatggttaggttgatgctgatgatgctaaggaccccatttgagcatccatcaaactgcatgacactttgtctagattctctgatgtgtacttttggtttctcttgcaagtgccttgttgcttttctttactgcaattctgcaaagaaatagtcaaagcatgtgtgatacaaaagtgagtagtatgtaatcgagtcagcaagcattaactagttattagctttttcttttttctgcttcattttgatcagtattatgataatgtcttttgccaatatcatttttttttttaatttctgctgcttcaattatgttatgtttttgaatgataggacccaaagga

SEQ ID NO: 52901 - DNA, 822 bp, Populus trichocarpa
  Intron number 2 from transcript POPTR_0005s14510.1 (locus POPTR_0005s14510) derived from phytozome v7.0 (chr-ID scaf fold_5; pos 11560671 to 11561492)
aggtgagctcacattttcacttctgtttggtaaagtatgataatatcagttacagagtgctgaaacagcaaacaggcatggagcaactagcattctcttccaatcgagaccttctctttctatacccctagaattcaatgatcaatacattgaaccatagataaataaatagagagcgaatatctttcaaggttggactggcatctgttccttaaagacttttaattgcatacttcctagcaatgcaacaattaaatgaaaacatgagaagcatataagccaatagcgtacacttgctggcatcctcataaacatcgagtggagtaaactgcttttaattatgttcagcatgtgattgtgtgttgacctcaaatggattagtagcttccattttgatgtttctttctttggctgggtaaaattatattggtatatttgacatgagcattgatattattattttgtttgttctgtctcatttgccatattcttcaatttacatgtgaagttctatttcttgctatagctctgcttcatttgaaattggacgttagttttcatcaggatgtgctggacattaaccccattcctgaaattctggtgctgccaaaattgaatgtgcctgctaaggtcgtagctgtaatctttagtacagtataacaatgaaattgccaagtgtggactctgttaggccaattgacatgcactataagaaaaaaaaaatgtctgggttgtggtctatcctttgagaaagaaacgtggactgatattctatagtttttgacagttgaaggcactgctgcttgattctcagagaaaaaa

SEQ ID NO: 52902 - DNA, 784 bp, Populus trichocarpa
  Intron number 1 from transcript POPTR_0005s01430.1 (locus POPTR_0005s01430) derived from phytozome v7.0 (chr-ID scaf fold_5; pos 937792 to 938575 reverse strand)
ctttctgcagctctatttctcattacaaccaactggtatgcatgtgttttctttccttctcattcatacagtttctttcttttctttacgtttcctttccttttcttgttttctttttatgtttatgtttagctcttcttcttgatatgaaatgtgaatgtggtctgcttgtcatggttaaattcctgtttgtagctaggacttcaaatgtcgaatgtttagctcttcttcttgatatgaaatatgaatttatgggattattctaaaaatggtttgagaggcatggtcttttttctatcattacgttttgtagaaattaagtcagaaacatggttgcgaagtataggcacaatgctgatgggcattatagggccattggatttggaagaaatagtgaaagaggatccactagattcaaatcaaatggcccaatggtcattggcatcgtgtgctgatgttcgaagccttccgcattgtagcaacccccatcttgtagtcctaggaatcccacctagcaaacacatgctatctgaaaggatttttaactcatgacaatgtacctgttagtcttcttatttagtaacttcgtgttaccaaatgattcatgcggtttctaagttgctgtaccctcaatgttttgttttttggatcataagtatccctattttctgaactgatatgcagccttttgtcttgtatcatggaaccatttcaaattgcttctcacaacgtaattttttatgtaaacataatcagactaaagcttttgcagttccaaggagaa

SEQ ID NO: 52903 - DNA, 759 bp, Populus trichocarpa
  Intron number 2 from transcript POPTR_0006s20950.1 (locus POPTR_0006s20950) derived from phytozome v7.0 (chr-ID scaf fold_6; pos 19995800 to 19996558 reverse strand)
cgtgtaatttgttaagctttctctgaatgtatttaattggaatggcattggtagtgtaagccggatgcatttgtagattagttaatgtgtggataggtagtgtgaagttaagttaaagtgcgcttgagaacttgtatgcttttgtttgaattgattgtggggtgtcttttatggtaattttgaagaaattaatgtcatatattggagagttagtgctatgagtctatgggaaccgaagatattgtccgaagtccatggctacgttaatcaattcaaaggttctgcgttttatagtcgtttgtttgtgaaatattttccttttgcaaaactctgaattatattttcatagttttcacgtcatggtagtgaaggtaagaacacattgaagatgggctggctttgtgcttcaatttcgataatcaatcgatagaaggctttatttgcactctaaggacattgttgttcttactctaggagtatatacttctttgcagttccaggagataattcttgcttctgggattttaatcctctcatgccagaaacattaccaaaaaaggaaagcgagaaattctgggcttatttttacccagcattaattaataagctattaggccccttcatttttttccctttggggataatagctgatcaaacgagttatatttaagacattcatgttattcctttttttgtctctttatttattttcccatgcttgtagatcgggtgtttggtcctacaactacaacgcgccat

SEQ ID NO: 52904 - DNA, 847 bp, Populus trichocarpa
  Intron number 2 from transcript POPTR_0006s08990.1 (locus POPTR_0006s08990) derived from phytozome v7.0 (chr-ID scaf fold_6; pos 6614630 to 6615476 reverse strand)
ccgggccgagtttcaaaactgtctacactctacaccgtaagttccatttataatgtcattttgtttggttgctgagaaagttttggaaaaaaatatcacctttttattgttatatgctgattagttgaactaaatttaattaatttcttgataaattattgtgcttaatatcggtttggtttgctaatgatttagaggtgatgaaagtttagattttgatagaccagaagtagactgtgataagaaaaaatgtatgcaacatgaaattattcaaatcggtaagaaatttggaggattttatgggtttttttattattattattttctgtagattttgtgggaagaaatcgaaaagaaattttgatagaccagggggctatgtttaacttgatggttctgctctgtgaataagttgtgattgatggaaggatttcaaaacgacttgtgtttgtttgattttagagttggaaatcgattataaaaagaattggttggtgtggattatttgagcttagagcttaaaaaaggttttgaaatcctggaatgaaaatatagttctcgagtgaaatcactggtccaaattgatagtagtgtttgttttctgtttttgttgatttgcccatgtgattgattgatatattggcattgattctgcgtgcagctgttgaattatttgtttttgaaaaatatggttttagaggagaattactagttgaacatggatagtaggctatttttgttgatttttcgttgtgattgattattttcattgactatgggatgcaactattgaattgttattggctgattgatcaataatcatgctaaggttgttgagacacagtcc

SEQ ID NO: 52905 - DNA, 764 bp, Populus trichocarpa
  Intron number 3 from transcript POPTR_0006s12820.2 (locus POPTR_0006s12820) derived from phytozome v7.0 (chr-ID scaf fold_6; pos 9982841 to 9983604)
tcaaagggtgagaaatttttgttattagtgtttctttctactgtcataatattgttctctgaaatgcttggaatcattcaatgctgaaggatatttccccatccattttctctggttgctatgttgaaggtacttgataatctggactaattacaaagacagaagaggttggctacgtgtcagtcaaactattggatttaggttggaaaaaatagtcaaatgttttacagaaattaaacagttagtgggttactgtttttcaatatttcttcaaattggtgatgtatgcagtaggctcctctccattaaatgtgctgatgtcaaaatcaaatgatacaaagtgtttgtggttgggaaaatctttgtaccttgctctgctgacccttttggattcaacaattgctggacagacatcttgtttgttatatgggaaaagtgattttgttgaggctgtgtgtgatattgtgtgtttatttgacatgttggttggtattgtgccattttaattgatgacgggaggtgtgttgcaatatgattttcttgatggcttcattctgttcatcatggcatataggtgacatacttttggaataacccttctgtaatattatgtacttttccttggttcatggttttgctgatgtttcttgttaacaggctatttttctcatacaagtaattctgcatctttcccccccctcaaaaatccgtgtcaatgttgtcgttacaacagtttcttattttcttttgttaggtaaaggtag

SEQ ID NO: 52906 - DNA, 991 bp, Populus trichocarpa
  Intron number 1 from transcript POPTR_0017s06920.1 (locus POPTR_0017s06920) derived from phytozome v7.0 (chr-ID scaf fold_17; pos 5305243 to 5306233 reverse strand)
attatttgctgtcttcggacactgacgaatcggtacgtacgtaaaatctgcaggaaaactcccccttctctttttcttgtattttttttcatttacaagttctttggatcagcctgatcctccatttctttcatttagtgtaataggatttgaaataaggagttataaccatagttttcagactccgcctggactcttactcggaaaaaaagttggatatcattctcatcaaaacaatgttattttattcttttttcttgaaaaaaacaactcgtggactaggtttgaatcagatcaccagttaactgtcgggttattttttttttagtttaaattaaaatctaatctaagctaggctctaggctgtgagttcactggatcggccatcggacctagtcgagtttattaacaagattacttttattttattttggcttagtagtttgcttagctaattataaattcagtctagaaaactagtctttcagtacatatatcttgtgactgtttgcatttttttgttttaagtttcattcttgttaaaacttaaaggtgaccttactaagataaaccaacacactcctttaatttttaactatagtaagatgatactataaaaaaatactttctacttagcgatctcatttgaatttgtcaatccaagattcctggatttcttaatatatctccagatcttcaaagtggatccgactcttcgttaggttgtggctaagtgagtcccacttacagctactgctccatgtggaccgtgcgtggcctgcatatgatggcgctggttccatcgcccatttttgtgaaaatcagcctggctggtcagattaacctggcatatgtcaaaattaaaatgaagagggttgtgaagaaaagaaaaggaagaagctatgtagtcatcaatcaatctccaatttctaactttccataatgtcatcttgtagattgaagtatacaaagacaaggccaaaaagctgga

SEQ ID NO: 52907 - DNA, 652 bp, Populus trichocarpa
  Intron number 1 from transcript POPTR_0005s10580.2 (locus POPTR_0005s10580) derived from phytozome v7.0 (chr-ID scaf fold_5; pos 7615692 to 7616343 reverse strand)
ggtcgttgcttggtctccagactctttccactcttgtaagtgatctctcagtgctccacattgtttgaattctgtgttgtaacccctagtctgtaaggataccatttcagttgattataaaagagcagaaattgaaaagagagaagttgtttttatacttaaagagaggttgtttcctcagcagcgaaatggaaatgtgcttgaaattgcttgtgtgttgttgggttttcttcgtttttgttattctatctctgaagttgccaagaaaacaagataaacgaaacaaaaaaggaaaagaattttgttgaatatcatgttgtgtgtagttttggctgctttttagttgataattgtaacttggatgagtcgcattatagtaatacagtcaagagagaataatttgactgaaattctggtagtctttgatcctgtgtagcaaatcacaaaaatggcacaatgctatttcttcttttaactgttttctcagtaaccaaagggtaagccttaactttttcttcttctttttttagcattgtttgctttaggggaatgatattggattgaatgtcaataggaaattcagagggaaatctaactttggtttgtttttttcccagtttacacaggttcccttgatatctgcacttgatta

SEQ ID NO: 52908 - DNA, 691 bp, Populus trichocarpa
  Intron number 1 from transcript POPTR_0005s16300.1 (locus POPTR_0005s16300) derived from phytozome v7.0 (chr-ID scaf fold_5; pos 13033112 to 13033802 reverse strand)
ccatccgccgccgattttgtcaaatccattaaaaggtctttctctctctaatcgctcagagcacacacagaatctataaatagagtatttatgattgtattcgagtcttttttattttattttgtttgtttgtttgtttatacataatatcttaattcagattatttgtcgatgttcttctttctgtgagacatgaaatgcaattactataataagcttaatttttggagttaaaaaaaaatgctatttttctagatacttgatggtatttaacatcattgtagaaacgatagtttagacccctagaaacgactgggttctttcttaataagaatagaaagcaattcccacgaggaggaaaagaaaattgttttttggtgggtaataatagttttgaatggtgggttttcttttggtgctcaattccgtttgtcatgtcgaaatgctacattgtggctatatacgtttgctgggatccatctatttttaggaatgcaacgatgcaggaagatacttagctgttggaattgagttgagaaggcagttttcctgtgtttcctacccgcctaccttccaaagtattagtattaatgctaaatggcttgcatgaatttgtttaagttctaaaatataaggtttgactgtgcgatggtacttctgtatggcagctttatcgtctccttttcaaacc

SEQ ID NO: 52909 - DNA, 521 bp, Populus trichocarpa
  Intron number 2 from transcript POPTR_0017s11160.1 (locus POPTR_0017s11160) derived from phytozome v7.0 (chr-ID scaf fold_17; pos 10826082 to 10826602)
tcttggtgcactattgagtctgacccaggtaataaatttgattgctttctacttactaatctcatcatcatcatcatcatcatcatcatcttgctagggttttgtgatagtattttgggtttatttaaaatctttgcatcaagtggttgcttgaacctttggattagtctttcgaaatacgttagaggagttgcttctgtgtcagtttgagggttttctctattctggtatatttttcatagatttctgttgctcacgaactaataaaaagaattaaaattgtattaattttctgtcttcaggtttacatattgcctgtacaacaattcttgctgctttttttcaatttagttaactatatggttggcaattttagcttgtggattgttaattgtcaaggaaggagtagtttgcagttcccacgcatgaatatacactatatctgtacttttaaaatggaaacctcgttgctaagattcttggtttgtaatccaggtgtgttcactgaacttatacaacag

SEQ ID NO: 52910 - DNA, 765 bp, Populus trichocarpa
  Intron number 2 from transcript POPTR_0005s11870.1 (locus POPTR_0005s11870) derived from phytozome v7.0 (chr-ID scaf fold_5; pos 8637712 to 8638476 reverse strand)
gtcctccacaggcaagcatatcaacttatgtcactataacaccccccccccccaacacaaatggatatgtcgccctaaaggtgaaagcaagttaatggccttccaacatactgattagctttgaataggctctacataaatatattgatctaatatgtggaactttctttgacatataagagtttataaagagggtttaggaatccattgctttgagtttcatgagacaaattaaagttccttctcttggacaagatctttagtgcttcataaattcttcatattacctaacttttaggggaaaaatagatggcctttagattaaatcattctcttcaatccaacttttgagaaacagaatcactctttacttttgcatgcacagaccactaactgtagtttcactgtttatgttctatagaaagaagacttccaccatccctttagtcaaaaggtcattagtaattctaaagcatgtgaaatagctttcttccgattccttttccggtatgggatgcttttatttgttcattttttcaaaagaaaaattccaattctcatccttgttcttcatctttgactcctacctctctttatcaaacaaaaagataactcaaaaggccaagagaaattatgtaaatataacaaaacaatcaacttttgttttgagccttcttttatacattaaacaaagtttgaaaaacctaaaatgaaaaagaactcatgatctcttaatactctggttaagttattgcaggaagaagg

SEQ ID NO: 52911 - DNA, 826 bp, Populus trichocarpa
  Intron number 2 from transcript POPTR_0005s17010.1 (locus POPTR_0005s17010) derived from phytozome v7.0 (chr-ID scaf fold_5; pos 14046904 to 14047729)
gttaccgaggaggagttcgagagcttaaataaacggtgagatctgcctgccttcttttgttttttctgtcccgttacttttcatggatcttaataattcatctttatttccattctaaactatctaaatttggctttgataagaaacggagaaagaaaagattttttttttgtctaaaattggaagagttgtcattattattattttttcgcacaatgggggtcttatatataattctagttactttctgttgaatttgaaccattttgtgcgatatatataattctagttactgtctgttgaatttgaaccattttgtgcgtgattaatccatcttgttgtccttagatctgttgaaacatacatttccatcagatttcacagagcttaaaaaatatgtttactcataaggtgtgtgtcaaaaaatttgttttacacatcttacttctaacatttgttccttttgacttataatcctctctaattttatgttactctttgccaatattctcattgaagtagtataataatctctaccgagtttttttaaagtcattgatattgcttttaacaattctagttttttaggtttatttcaaaatattgaaacaaccattttcaatattgttttcttagtagaaaattaagtgatggagtctttgatggccgtggggttgtcaaaatctctgttttctgatactaaaaaaactgcagtgatgtacagtcattctgcaccttgttgttgttcattgttttgaggtttccatgtgaggtctttgaattggctggctttgaaattttcaggaaaccttgttctgggtataaa

SEQ ID NO: 52912 - DNA, 799 bp, Populus trichocarpa
  Intron number 2 from transcript POPTR_0017s00890.1 (locus POPTR_0017s00890) derived from phytozome v7.0 (chr-ID scaf fold_17; pos 658579 to 659377 reverse strand)
gcctgttgctgtttctgggagctctttgcggcattgtgagcaggtgtgcttcttttaattgtggaattgttgtttagtattctttcttgttgatgaatggattgttctgttgatgaacaaattgagacttttatttggatcttggggcttagtttttctttgaatttatttctgcataccaattgatgtgctgcgtgtatacatcttctgtgattcctaaacttgttatgagcagttgaaaatgttttggtgcgtacaatttagtttatcagcttaggtttaccccaattattgatttaagaagtccgagtttgatatgcaaatcttgtttctttatgtccgtttcccatacctctatgtatattagatgggatgaaagccctgccttgctgttagggttaaatttctaatgaaatggacatgtttactaaatccgctactttatagtaggtcttaattgtccatagataattataagtatacaacaatctaggtaggttaataagtatacaacaatctaggttggttctatctaggaagactgtaagaaaaactgggataatgtgtatggccagctaggttgtcatctaattctaccctatttgttacccattgaaaatctgcagattatggcgtatgatgcttcacatggaaatacttaacttgtcctaccgtacctatatgcatgagactgtaaatgcaagaatatcttgtgcattacatattttctattgagtttgatgggcctctaagatgctctgttgcttggctatttctttataggaagttggagaacaaa

SEQ ID NO: 52913 - DNA, 520 bp, Populus trichocarpa
  Intron number 1 from transcript POPTR_0005s14050.1 (locus POPTR_0005s14050) derived from phytozome v7.0 (chr-ID scaf fold_5; pos 11081459 to 11081978 reverse strand)
ttagaaaaggtacctctctgttcttattattattattaagacccctttttccctttctaattaagatggttatgcacgaaaatgggttgatctattttgtttggtttctctattcgagtaaatgctatgaataaccctaggtttgacgaaatctgattttgaaaatagaataattttaaggtcttgagactctcttttttcataaaagtatttcttagttcactgatgaaatcaattcgaacagtatcaaatcagatggaataacaaccctcacattagtttttgaagagtgtgaggtagatcgtcctcttgtatgtatgatctaatgaaagatccaaaaggctaaaagtgataattggtattcgaaatgcttgattagcttcaatcatttgcttaattcaagatgaggttttaatgcacacacatgcaaatgtaaaagtcattatcaatcatgttctaacatcaaaatgatattttggcctccttgttagtttgctgaaatcggtcccagggacgaaga

SEQ ID NO: 52914 - DNA, 951 bp, Populus trichocarpa
  Intron number 1 from transcript POPTR_0005s02390.1 (locus POPTR_0005s02390) derived from phytozome v7.0 (chr-ID scaf fold_5; pos 1541343 to 1542293)
tctcctcgagattaaagctcccattcgcatctgtggttagcactctctcttctcctctcttgataatgataaattgactttcatcctgtttgatactgtgtgtttatgtttttcatgcgatatgattgtgtgaaattgttggaaaagactgttttgaatgattttaagaaaaagggattaattttcagcttatctacagacatggatcacttgataaattaagtatggcttgatttgattggttgatcttgtcttaattgtatttcaattgttgaaggatttgtaatgtttgatgtgaagggattggttttttactctatttaatggatttgtgttggaggacatctttgtcgttgtaagtcatgtgtttcttcagggagagacatgaggcaaaagctcagttccatccacttgtttattaccatcaaatccaacatttattggttgaagcatggcctatttggtagctgcacttcctttgaataggagaatccgttcttcctgactaccaaattataaaaattccaacattctgaatggttgttgagctttggttaggtcaaattggcttcttgctcatttggttgagttcgagtctttattttgcaataaccagcgcacaggtccgaaaaaaaaaaaaacagaaatagcagggccttagaatcagaattaggtaggaactgtctcataaatttgaaaggacatgtgcttttgggagaaagttatcaagttcttcacttgtttcctataaactatgtgaaactcacggtagcaatttggttgttgaatatttttgaaaatacctctcccctggcaaggatcttactgctcatttgcacaagccaaatggaacaaattatactttacaatgcagcaaagtactgtagtcattgtttgcctcctctttcgccccttgcatatctaattgttgtctttttacaggtgacatac

SEQ ID NO: 52915 - DNA, 760 bp, Populus trichocarpa
  Intron number 1 from transcript POPTR_0017s14410.2 (locus POPTR_0017s14410) derived from phytozome v7.0 (chr-ID scaf fold_17; pos 14475881 to 14476640)
agcccgctaaagctgcttacagctacgacggttcagtcagtcaaggtgtaagtacaactcactgtaggatttaccaaaagttctgatactctcagaaattttatcatagtatcttctcttgaacagttttgagctctaataaggtcatgttaagatcattgggaaatttctttagtccacaacctatttcaacgaagtgttttctcaaaatttcatctcatttttactatcggcagctttatacatatgttgaattagtatctatctttgttgacaattaggttgctaaactagccgaaccagtctgcgtactccttttagtatcacttaggtatcttcctatagctagttgtagactggatattagaatcttttgtgtgtcaagattaaagagcttagaagtatcatattctaccactcacactgcttgtactggtaaaaatccgaaggggatatctctctgcactttaagagctctcttttccttttacctttatctttctcctttaatggatggaatctgagggtacaagtgtttgagcgcttttgtttttcatccccttttcttccaagtgattgatttaggattgacatcattaacttccaagtaatccattaacagcatagtgagtatgatcttatatgcaacagaaaaatatacgttacagatagtgataatccaattagttcccgacaacttggtgaaattatcttatggttctcaacatttgcttttctttactcatctaattaggtctcc

SEQ ID NO: 52916 - DNA, 1027 bp, Populus trichocarpa
  Intron number 2 from transcript POPTR_0005s27450.1 (locus POPTR_0005s27450) derived from phytozome v7.0 (chr-ID scaf fold_5; pos 25118471 to 25119497)
ttcttttgtctaaaatctttacataggtttggcattggctattctttcttgtatgagtgcttggtcgggtcaaataattttgtgtgttcaagtggcctttgatatgcttcaatctgagtacttgacaaaatttcattcttttgtctaaaatctgtacatggctttggctattctttcttgtctgagtgcttgctcgagtcaaagatttttgtgttcaagtggccttttatatgacagaactcttttaaatgaatgttactgcaatataaaaagggtgaatatgaaattacacgatccaagattgttgtaagcatcaatggtagatcagttatagcaattgggacgcatgatttatcttgatatgccgatcatctaattagtagcatccaacaatgtgttgcattatcgtgtttggagtagttgtattgttgaaatcagaatagctcatctgattttctggcagatacctgcttaaatcatcagttgtttcagcactttcagcgctcaccttgaaacccaggtacgccgagttccattctttaaaatgagaacaactttatttctcttgaattcttagggaacttctgttgtgaattgtattactcaggtacatcgagattcatttcttaaaatgatttctcttaaattcttaggaaacttctgttgtgaattacatttgtggatatcttaaggtttagatatgaaatctgagtggaaaaatgtacttagcactagatcttagtcacttttgagcttttgtagaacaaatacagaagagaagaaatagctgatatgtttttccttaacatcggccctattccccatcttcctattgatcctaggttataatatactatatatttataatgtattttcctgtccttctgtttattttacgtgtttttgcattcatgcatgcagatatcttcgtatgtctgctaatgactttacaatccaagggttataaacatactggcttggctatattgcagttccagtgatcttggtgcgctgcaacaactcttga

SEQ ID NO: 52917 - DNA, 434 bp, Populus trichocarpa
  Intron number 1 from transcript POPTR_0005s14280.4 (locus POPTR_0005s14280) derived from phytozome v7.0 (chr-ID scaf fold_5; pos 11366510 to 11366943 reverse strand)
aggctacacggttgccatccttgcccgtgacttaggtacttatctagctagctctgtagtactctatctgcgcacctgtttttgcttccaagaaaaagaaagggaaactcaagattattattattattgaacaccattttatagcgaaacctgaaatagcaagagattgtgcagcaccattttctacacacatgcctgcagttttttttttctctccctagctagacaagaagaaaaaggaattactaacaattagtttttacatgtattgagattattagtaattgtttgacatttaaaacatgcaagtgaagaaacaaacttgaaagcgcagtgaattaagacttgtaggggactgaagagagggttttgaggtaattagatattgtagtgagagatatggggttttgtagggaggctatcaagatttgcag

SEQ ID NO: 52918 - DNA, 805 bp, Populus trichocarpa
  Intron number 1 from transcript POPTR_0065s00220.1 (locus POPTR_0065s00220) derived from phytozome v7.0 (chr-ID scaf fold_65; pos 15629 to 16433)
acgaagaagggggtaatttgttggcacagcttcgagtacgtcctttatatttctccattttttttcttttctaatttaaattgtcaacttcaatacattgtgataatttgttgataagttctttaaccatccactgaatttaattgatgatttaaattggcttaggaagttagacatcaattactgtaatgtaatttcttatttctaaacctaaagtaaatggataaatgctagcaaatcctttagccatccactgaattttaaaggagtgaaattgaggcttttccgccgattaatggaaaatatttggacccgatgataaagcttcgtctgagaatattgagttttttgtttcagtgctgcaacttatgaactgttcaaaaaattaataaagttagagtcaaaatgtaaaaattgaaactttctttttaaatacaatattccaaatttgtgttgaattcaaaaaacatatatttttaaatatttttcatgtttttgtttcttcaattgttttcacttttttatgaaaaaaataatttaaatgatcaataatcaagcatttttattaaaaaaatttactaatatgtaaaattcaaattattttcttttatatttttattttttgataatgtcatatttgttttataaatcgaatataaaaaattaacttttgagttaataagtgtattttttcatgattgcttttaatttaactaatataaaataatagtttatattcagtttatcataaatatgaaaaaatatgattttatattcccattgttttttttttaagcagggattt

SEQ ID NO: 52919 - DNA, 616 bp, Populus trichocarpa
  Intron number 3 from transcript POPTR_0017s04960.1 (locus POPTR_0017s04960) derived from phytozome v7.0 (chr-ID scaf fold_17; pos 3806293 to 3806908)
atgtaagttgaattacaagtgggtttttgtttttgttggaaaatatttagtgttgaagtcaggggattatatcaataatgagtaattagaagtgggtttttagtttcattgaggaatacttagtgtttgagtcaggttttatgttaataatgataatttgcaagtgggtttttaattttattgagaaatagttagtgtataagtcagggtgatcatatgaacaatgagtaattggaagtgggcttttagttttattgggaaatagttagtgtttaagtcagggtgatatgtactttatacactttatttttgttgtatttgtgtggaatttcatagagttttgtagaattttttcatggtctccatgtgaatagaaaggaggcatgaaggggaaatatgaatttcttattgttctgtccgtgttaattaattggaaaagaatttggactttaagatggttttaaaaggtaatgattttatcttagttgtagatgagatttatattttctgcgaacccttgagcatgaatatgtgtttctctctagcttgtgtggcttgccatacatcctgaagttttgactttcatattttgcatgttttgttcaccagatattct

SEQ ID NO: 52920 - DNA, 508 bp, Populus trichocarpa
  Intron number 3 from transcript POPTR_0006s19820.1 (locus POPTR_0006s19820) derived from phytozome v7.0 (chr-ID scaf fold_6; pos 18837660 to 18838167)
tctgcattcagccaggcttgcaaccaaagattcaggtacgtagatatgtaataatgttattaattgagcaatgttatttgctcatattttctctcaattatcattgcatgttgggcatggacttgcaatacaaatacttgcctcgtttgtattgaatgatgacaagtagttaactgtgcttatgttcttcattggagaggaacaaaatataaaactaatcaaatgattaaacgatgatcaatctttattttcatgtttttttttttagaaaaacacattttctgttggcagtcatctttgatcgcttcctgttcatatctataatagagtttatatgtctcccacgagccaattatctctgcttaacttctatacttcaagatagaaatacttatgctatatctcaataagagattggcttcttctctgtgataagttgactgactagttcttcctcacttgcatggaaatgatggggtgtcaaataatcaaaactcagtggttggca

SEQ ID NO: 52921 - DNA, 793 bp, Populus trichocarpa
  Intron number 1 from transcript POPTR_0005s08350.2 (locus POPTR_0005s08350) derived from phytozome v7.0 (chr-ID scaf fold_5; pos 5757860 to 5758652 reverse strand)
gatctgctctctctgtgctcagatcttcattcctggtacgcttcacctctctaattctcttccttgtgttttaatttctctgttttgatcacttctctgcttggttcgcttccttttgagctcggttctgtacttttcctctgagaatgaaagtttttttctgttgatttcttgtttacttgccgttttgagcttttgtgagcgctttgagtcaaatttagctgtctttgccccaattttcttgtttacagtgaaaaccgagtaattcatcgtgttttattcgccctttttgtgaagctttgctcgtttttgcttccaattctctggttccgttgaattttgatgctttctctatgagaatttgcttgttttgcttcaaacttcaggtgtttgtctgcttctgttacgatttccgatatagtttaacttgactttgtgctggtttttcaattttgaatatctctgtcgaagaccgtcgccggcaagggtttatcctcgcagaaagctgttttttgtctagttctgtgttgaaaaaaactctttttctttaaaatacgttctcatctctctgtttaactttttttcactgtcaaacgaacattcttgaaaacaagatttttatttgtttttgtttatataattatgagtttcatttatttttatttatttggatttttttgtcttttgcgcggtgcgagatctgacagctgatacggtttttggaacagatctaacggtcatggatcctgtttgcgcaggtgctttttatttctcttttttttcctttttttga

SEQ ID NO: 52922 - DNA, 859 bp, Populus trichocarpa
  Intron number 1 from transcript POPTR_0017s08230.1 (locus POPTR_0017s08230) derived from phytozome v7.0 (chr-ID scaf fold_17; pos 6686914 to 6687772)
ggaaccaagttcatgtaagcttcttcgcattggtgtttagcattatttcaacttatggattttgcgttttgatggtctaccgtatgtaattttggacgccgtgtttatgctgcaggatcaaatgtatgcgctagtactcttatcaacatttctttttctctgctctttgtgttcatgttagacggtcctgttcctataattttatcaacaatagttttcaaataatgatatcaatgctacctgcaaatgttatgccaacttctccatatttggcagtagtttacgagctctatcgcaagtcacttttgttagcaactgtactcataaactcgtttaatctacacaggtcaatcattagatttttttttccattattgattgttagttgtagataatcttaatatagtgtttgttaaaaagttagttggaaggtcaagggagaggagctaattgcacatttaatttctaatgatcagaaaaatgttgttaaaagcttttcatttttggtagattttggatatttttaaagttgcaaagcaaaggtaaacacaaaaggtttcctgaatctggcccaatgtttttaaactgactgcaaatagtcgaagcatgtactcctctcttaattaacccagtaaggaaagtttttaaaaatgattgtgttttcaacccgagagtttgtaaagtttcaaactgttgttgctttaaattagagtttcctggtgaagaactgatttattatagtagtgcaggggaacacaaattatagcttcttagacatggatttgtcctttcattgcattcctaaatttgaatttcgattgcaggatccctataatagggggtaaggaactgaacttgc

SEQ ID NO: 52923 - DNA, 850 bp, Populus trichocarpa
  Intron number 5 from transcript POPTR_0005s01370.1 (locus POPTR_0005s01370) derived from phytozome v7.0 (chr-ID scaf fold_5; pos 915451 to 916300 reverse strand)
ctctgccaaagctagaacagtaagcactcaacagtgtattgatgattttgtttataattctaatatccatgtgtatgatcatttcattgttagctttgcctttagctgtttctgtggcacttttttcgaatttcgttgtgcgtttgattcttgttattgttgattaaattcctcaaatcttgatagcttccatgcttctcaatcaaaaccacattattttttttatcatcaatgcaattagttgattcagcttatctctaatgcaacacagaggaaatgcagtttttcagagaagagtccttaaaattggtctgacataatgggtcaatccgtgacctagacctaaaacatgatataagtcaggttttatattaaaccagataggagttgaattgtcaaacccattcgatacggcttaaaacctggattagacttagattgattttaaataaaaaaaacgatgtcgtttggatttttttttaaaacaaaaaacttcaaataatgctattttgaattcatctacgtcaacccgtgatcaatgccttgaaccgggtcgtgggccaagctaggtttaataatattgttttatgttgcgatgctgcacgcattacggttcttctgcagaaatccaacagagaaactgttgtcgagaaacatgcttaaaccatggcttttcccttttctatttaaacatcatgcgtgcgagatttgatcaattatggttagtttacaagaaatcaggaaactccgcagtctatctagcctttcaataattgctgctgtctttgataatctgaagttctgttgattctcaggttcatatactgctcttcagctggggtttacctca

SEQ ID NO: 52924 - DNA, 764 bp, Populus trichocarpa
  Intron number 1 from transcript POPTR_0268s00220.1 (locus POPTR_0268s00220) derived from phytozome v7.0 (chr-ID scaf fold_268; pos 21074 to 21837 reverse strand)
ttccctacctgaaaaattagatcgggttccgattagtaagtggtttgtggagattttatggtgtttttagataaaaataaattttttacttttatttttttaattgtactattaaattaaccatgcttattaatccaaatcaaatcaatgaccaaagtcatagattttattcttcaaaaccactagtgtctcctcaacatttttttttcatgttaaaaaaaatggatccaatacataacgaaacccatgtcaccaatctagtattaaaaaaaaaactaaaagagatcagtgaatcactgtagattgtctctagaattactgtggattgcattgtttacgtttaaaattcattcttgcgataagttttggccagttttctttcactgttttttcatttgttttgttggatacgtggcagcatccctaccatgtatctttttttttttttcaggttacatctttccatgtctttgttttttctgatacaaacgcatcagagaacgcctcaaaaacaaaccagagagcacgttcacaattccagatccatctcaattaaaataaaaaaaaatactaattactgtggactcgagcaattcttatcgcttgaaggtctgctttggttttttcttgctctaagttgggattcatggagatttattccctattggtttattcgtgtgagatgggagtttttaagctgttagttctcggctatgtgtgcttctataggcttgggtgtagctttgaggctgggctggctggtg

SEQ ID NO: 52925 - DNA, 841 bp, Populus trichocarpa
  Intron number 1 from transcript POPTR_0005s06640.1 (locus POPTR_0005s06640) derived from phytozome v7.0 (chr-ID scaf fold_5; pos 4448068 to 4448908)
cccagatctgcttctcttcattttatcaacacaaggtttgttaaatgtgatttctcactcgcttataatcttcagctcatttatcattggatcttgattttgtttgtacatttgtgactgtctttttaagtttttatctgggtttcttttcttttttgcaaaacatgtgagacatgattaaggtgtaatggatcttatgcgattttaatggggttccttttggagttaaacgtggtaaatatttgttttcagcgaaagggttgtcattgtaatggcttgattatatagatgtgcattgtttaattgtttttcttgtttcatctttattggttttgcctgtaatgttgtgttttgtggttatttgtaatggcgttttcaaacttctttttattaataagttagaaacctttcgaaagccaagcatttggtgtggtagtagtgtgtttttttcccgaaggttggtattgtatatgctaaaagttcgtcaactttttttaaagggtagttgatttgacccattctcgatcttagcattaatatttgttttttttctttttttggcaacttgtgttcgatgccaaattgccaatttcatttcataagttcagaagattgtatcttttttctattatttctacgattttttgaatctggatatgttgttgtctatttggggagctattcaacttcgtgtgtgttaaatattgatgaaatgttatttgaagtttttgaccgatgtgtcaaaatgtatgctttttaggctgtgttgcgatgagatttttttgagtttcaactttgatctgcaggtcttaaaagttttgagaattgattggctatagta

SEQ ID NO: 52926 - DNA, 850 bp, Populus trichocarpa
  Intron number 1 from transcript POPTR_0005s00220.1 (locus POPTR_0005s00220) derived from phytozome v7.0 (chr-ID scaf fold_5; pos 14553 to 15402)
gtcccggtttgtgcttctcttctttctcacttgctgttattatatttataatagttcaattaagaaacatgaaggcaaaaagggtaagctggttgcactgatatatatatatatatatatatatatatatatatatatatatatatatatatatatagagagagagagagagagagattttattaaataaccaagatagtaaataatgaaaaaacatgtgcatataatctagcggactttgtgttctattttttcttaaagaatggaaaaaaaagtgagtagaaagaggttttattaataatcaagatgttgtataacgaaacaatgcataatttgtgtgttaaaggaaaaaaaatgaagaggtaatttgttatggaatttctagttgtcgtcaatacaaagaccgcattagttactaaagttactggaagagtgaggtttatcatagtatgaatagcccgctaactggacaggcagtagaataggttggttattggtctacgtattcaaaatttcttgtagtggagtgagcaataaatgaagaaaaaatgctccttttcacagagacttgttaggagcaataatctgttttcttccaccaccctttccaggttattttagagttgtttggctggctttcatttaataaaaatccttcaccctcagcagctagttaaacatattcaaatacatatttgtgaacggatggtcttaaaattcgcagaaggcatactttgtgcttgttagttgattcacaaattatgtggaacaatctgtttgtcctgttcctttaactgctttagaaaggtgtaagtgagaaattttttattggttaaacgttcacaggttt

SEQ ID NO: 52927 - DNA, 559 bp, Populus trichocarpa
  Intron number 1 from transcript POPTR_0005s08650.1 (locus POPTR_0005s08650) derived from phytozome v7.0 (chr-ID scaf fold_5; pos 6021308 to 6021866 reverse strand)
ttttgaggtttctcgctcttataacaattctcgaggtacaacttctaagtccttttcattgcatcacttggatttgtgagatttgtcttggttggagatttttagatttttataagttattacaacttctaaggctatttattgttagattttctttttcaattctcttctcttcttttgtttttttttttttttggatttatggcacctgggttttgtttttgtttttttttaagagcctatctgaatgtgcagttggagctgctttttgcgttttttctataatgttactgggttcatttgtgatctttgttattccttttagctgataagtgaaaatggtttcgaaacatttttggggtctgtatcagttgatggctttaatcaatggaacttaacagtgctttgagaacagattctggttaaataatgtaaaaggattatgaggttattgtttcggcataagttttaacttcctttctattttccttttggattttgaaagatcctttttacttttgtagtttcgacgttggaatctgagagtctccaggatttg

SEQ ID NO: 52928 - DNA, 799 bp, Populus trichocarpa
  Intron number 1 from transcript POPTR_0017s02930.1 (locus POPTR_0017s02930) derived from phytozome v7.0 (chr-ID scaf fold_17; pos 2110768 to 2111566)
tgttttttacactctaccatttcccatttctcagggtaataaatttcatttggagctagaagtaaagttcattacttttcataaatgttgaatcctaagtgtggaatttaaaaaaaaaaaaaaagtttgtagcttgtttgggaacaagggtgtttaattgggttgtgctaaaaaaactgacttgaactgggtttgtgggcctcatcatatcaatggtggacacaattttgtgttatgaatggtgccacaaactcgtgcaaggggatagattggtttggaatgggcagttagaaacaaaaaatgtcaaaaagttgaatgaaagtaattacaacttctgctattgtttttgttcgtgttgtttcatgtaaaaacatttgtgttctattgcatcatcatcttcgtgtttttttctcttttgttcctttatattgaagcgtggtttcccttttatcatttttttccgggcttatagtgatgaatgccatggataaaagttgtaaattgggaagtggatgcaaccttttttatggtagtgtccatctttgcaaaggttaaagtttgaatgttaattattattcttgttcatgtgaaattctgaccccttgaggttggatttgttttttaatggaaatgagagtctgaattgaacttgttgactaatgtcttagctttctcaatacaagaattaaactttatagttgaattgagcgctttcttaccaaatcagtggattcagagaaggttgttagtgatagcacctgattcattgacttgattatttatattatcaaaattgcag

SEQ ID NO: 52929 - DNA, 496 bp, Populus trichocarpa
  Intron number 1 from transcript POPTR_0017s02620.1 (locus POPTR_0017s02620) derived from phytozome v7.0 (chr-ID scaf fold_17; pos 1894685 to 1895180)
agaagaaggagaagaagaggaaggagagaccaaaggtgattgtttattgttgttggattatgcttaaagtttcttaatctatcgtttttgaactgttttgtagggtagggaaagggttttatctctaggcgtaagtttcgaaagaactgaaagagtgaagacacgatctttttcttgaaatcttgaaaatacaatttatcagcagagctaggcatatatagagtttgtcattcttctatatgcttgttaatttagctttgagaagacagacactgatcacattatcaatgttggggaatcctgtcatatgagaatcaattcattgttctataccggcgttttctgagatataagtaaacactagatgttttttttttctcaattgagatgatttgatgatttcatttggtaatggcgctgacatatgatattgtgtgcatttggtaactgttttcttgcagaagctacaaagaaaaagaagaagaaaaacaaaagc

SEQ ID NO: 52930 - DNA, 483 bp, Populus trichocarpa
  Intron number 3 from transcript POPTR_0017s02620.1 (locus POPTR_0017s02620) derived from phytozome v7.0 (chr-ID scaf fold_17; pos 1895348 to 1895830)
tttcctgaaggtgaaatccagcaatacaaagacgagtgagtatatgttattattattcttattctttttccaatctcttgatttcaatgattacacttgtgagtatctgtggactattggattcactgcctgccaagattatattgctgctttttttttctgagcttgactagtagtgcaaccttataggctcaaatacacctgaagtttagccaaaatctgtagcagtcatagaccaaaagacaatgcatacttgatactttgatttgttaaatgcagagtgatatatgtttttttatgtttctgatttataattttgagacatgaaaagttaaattgtttatcaaatgtgtttgtctatcccacaagcatcttgttttttttgtttttctacctgttatgattttttcttatcttttttcctgtccgtgggaacttgatcttttagtaatttgtggaggactacatctgatctgaagagaa

SEQ ID NO: 52931 - DNA, 482 bp, Populus trichocarpa
  Intron number 1 from transcript POPTR_0005s27910.2 (locus POPTR_0005s27910) derived from phytozome v7.0 (chr-ID scaf fold_5; pos 25360737 to 25361218)
gaaccgttagagatcctggtagttctcatacctctcacctctctctctctcactctttctcattccactgctctttttaattttttgttgtatgaatcacttcatgtgtcactttttattactaatttctgatttacagtttcagcttttaagaaggtaacctgttctagagagatattttcatgtagaccaacttccttcgattcttaactacatgtttctgtgttgttccttccttccttgtatattttgcctactttatggagctaattagcactcttctaatccgaatagccccagcttttcatgtattgttctcattttgttagtttttgatcgacaaaattcgaatttgaattgcttctagctgccatcgttgactacatatccattctcagatgaaacatgggcacgagcagctagtgcttctcagatgaaattatttcttatgatataaatttcttgatcatattatgcagcgg

SEQ ID NO: 52932 - DNA, 701 bp, Populus trichocarpa
  Intron number 1 from transcript POPTR_0005s10060.1 (locus POPTR_0005s10060) derived from phytozome v7.0 (chr-ID scaf fold_5; pos 7155598 to 7156298 reverse strand)
tcaacaaaatgttacaggttccaatccttgcacctgatctctctctgtatgtgtattcatctatttatatactattcaaactgttttagaaagttttcttcttctttttcccttctaaattcttttgcaacgggtaggagcatcatgattttggaaaacaaaattgttcttctgtacattggatggtcaagcatgcgaacagaatctactgaaaattagggagaaaaaaaagtataaaaagcatgtttagagtatggcatttctagtgttataaaaaaatcagaattttgtcttctcaaagtctgaaattttcaaaatactccataagcttattaaatttttatgaagaccccaactataaaatcttgtccccgtttttcaaaatcaggatgtgtccctgatcgaatattgattggaagagtttaatatacagagaaaatattcagcaatactatatataaaaacaaattatgagtaggcaagcaatcgataaagaaaacttatgatttttattttttttgccatggacgactttgtcctcatgttcagaggtttgccatgctttctcctgttttttttttttttgttttttttttttttgctaaacattttctgtatataaaattattttgtaaacattagaggtttacaatatataattattttgttcacgatagtaaaggataatttcagagacatac

SEQ ID NO: 52933 - DNA, 586 bp, Populus trichocarpa
  Intron number 2 from transcript POPTR_0005s03640.1 (locus POPTR_0005s03640) derived from phytozome v7.0 (chr-ID scaf fold_5; pos 2428457 to 2429042 reverse strand)
gagctacaagagagaaagctcaggtatgaatctaaaacaattactcgtatcaggctcattttgattattttaaattctctgaagaatggaatctatttgatgcatgatcctcctcatgaacgatatcatttctttagcatggcagtatttaagattagcacacaagtggctagctttaagttgtattaggaacaaggggagaagattatctcctcttctttgtatactgaaggattgttttcctgtcttatgctgttttttttttttgctatgaagaattaatgtgtttactaggtttctgaaaaccagaaaattacatcaaccagcatataatatgatgtcttgcctacttgagtgagggagctttaatttggccaattttcatgcacttgggaacctaaagattccgagtcagtcatctataatatgaagttcataattccagaatcatgcagaaacgttgtaattatggtagttattgtaataggctttctctcaacgttgatttttgaaatttttggctgaattcacttgattgttgctataagtaggctcacatcagagagcttgaggaagaagtgaggct

SEQ ID NO: 52934 - DNA, 859 bp, Populus trichocarpa
  Intron number 1 from transcript POPTR_0005s14610.1 (locus POPTR_0005s14610) derived from phytozome v7.0 (chr-ID scaf fold_5; pos 11622814 to 11623672)
tttccatctactcaccaaacccagattcctttcaggtaatcccatcatcattaaatctttttaaagtttgaaactttaaattacacaatcttttaatcctctaatttgggatcataaagtttgatactttggattatgtgaagcttggagcttcaaatttgtgggtaatagaaaatgggtttcttcttttgttaattaattttttattttaaatgggttttacttctgtccgagagaaattgaaatcgcaaagcctgaaccttttgatattgttagcagcctgatgcaatcagctgctgataataattgactgtgttgagtgttaatgtgggttagtagtatgttagcatatcaatacagttagttgattagttgtgaaagatagctggttggtttcttcccgccaaaactggtagtgtataaaggagtgattgctgtaacagaatttgcaaagtagaatacaattcagaatttacttgtctctctctctagtttttttctgtcataatcataactgtcgagggttaaattcctaagttcttgacaaattggtatcgaagagaggatcaaagggtgaattgaagttgcaaaaatggtaaaaaatacaagaccgagggtcatcaagtgaaacagactggagcctgttatagcatttcctatcactttagatcactaaaagtatcagataactaacaatgtaaagaactgaaaatggaaattacgtataaaaatgtatgttttatctcttggtttgtgaatttgttgaagagaaaaattgggatttaagcaaactagtacttgttttgggagcttattcacatttcttattgcttttcagttgctgctgctgcaacagaaa

SEQ ID NO: 52935 - DNA, 605 bp, Populus trichocarpa
  Intron number 1 from transcript POPTR_0005s12340.1 (locus POPTR_0005s12340) derived from phytozome v7.0 (chr-ID scaf fold_5; pos 9111811 to 9112415)
gcaaagtaatcaaaacatggtctttattgctaatcttgggtttcgaaactgcgaagttttgatttttatgtaatttgagcttggtttgattaggacccatttctggcctacatgtataagtttggttggttttgagaaatgtttgtctttttggatctgaaagttgccattttgcgtttatttgccgtgggattcttttactagacattgtgatgtgtgtgttttggtgaaaactgagaggttttggataagggttgatgcaatttaagaaagttatgatttatttattttatctgtaattggatccttctgtgtttcccttttatgttagaatcttccttgattttggagtttcagatgggtttgcgtgtatttgattatgattgctgttaagcattatactttttagacttgggattaaagattccattaataacatgcaacaaatggaactgcagtcttggatttacataccaatggaacaagttgggttcttttctttcgttttttttttaaaaaaatttaaagggaaataattatgttttgattttattaagttttgtattgattctccttgtttttatgttgttgtagttgaatattaa

SEQ ID NO: 52936 - DNA, 366 bp, Populus trichocarpa
  Intron number 3 from transcript POPTR_0005s19515.1 (locus POPTR_0005s19515) derived from phytozome v7.0 (chr-ID scaf fold_5; pos 18375433 to 18375798 reverse strand)
atattggagcaggcactttccaagcttttattgtaaattaaatccttgttatttattctctcacaattaaattaacctttacgttttctttttattgcttggagggctgaagccctcgggtgggatacaaattagtcagggcacatcctggggaatttgacttggattttcttattctttgcttttgagatgattcttctatctttgagataaaaataaaaaattgcttgagaccgctgcttgtccttgaagctcattgcatgcttctgggcttgaaatatttcttttctatacgtctataaggtgtttattggcaaatcattttgattgactgtgattttcgctacaggcttccattctggccct

SEQ ID NO: 52937 - DNA, 267 bp, Populus trichocarpa
  Intron number 2 from transcript POPTR_0005s02630.1 (locus POPTR_0005s02630) derived from phytozome v7.0 (chr-ID scaf fold_5; pos 1676011 to 1676277 reverse strand)
tataggtatgtgatggtgagatgatagagttattataatttaatcaaggataatacattttgatcatgtcatgaaatcttcttctatgcatgttaaaatcatgaaagggagaaacattcatgttctgaatgcatgaattttgtgttttttagagtgattatatgctcgtcctttcattattttttaaaaaaaaatggaaaagaaaaaaatattgttcgatagatatggacttactgctgacaaaatatggtggtaatgtgatcaggg

SEQ ID NO: 52938 - DNA, 581 bp, Populus trichocarpa
  Intron number 2 from transcript POPTR_0005s01150.1 (locus POPTR_0005s01150) derived from phytozome v7.0 (chr-ID scaf fold_5; pos 725224 to 725804 reverse strand)
agccaatcggttgaaaggatcaagaggcttcagtaacaatttaatcatctagctcataaccttttccttttctcctttttgcatgattttttctatacctttatttcctttccataggtctttaagaatcatcttgcagtgcatagcgcacactcatacggatttatgtttttttttttttcttgaaattaataaaagttgggattggttcgtataataatttgtgtacttgtatacgttgtttcattttctaatcttgtaacagaaaagaatgcggagaaacctctagataagaagaaacatttagttattaatcaaacacgagtggataaaaagaatgaaggctgagccaggcaaggggctgaactacaatgtgaattaaccctatgacaattgatatcatagcatctttaaagaaactggagcacctttacctaatggggaatctctacaatgatagcattttttcatctctaactgggtttttatctctcaaatttttcgatatgtaaaagaatattttgtatgatctttttcttgctacaggttttgaagtcttgtcatcaaggttgaagaaactg

SEQ ID NO: 52939 - DNA, 952 bp, Populus trichocarpa
  Intron number 1 from transcript POPTR_0017s01640.1 (locus POPTR_0017s01640) derived from phytozome v7.0 (chr-ID scaf fold_17; pos 1173231 to 1174182)
gaagtgaagaccctttcaatctctcagtgaaaaaggtttgttttgtatacctttaaagttttgatttttattcaatttttatttgtgggcttattgaatttagtatgtttttattgaattaatgttttttaatgaattttgtgtcttttagcttgatgggtttttggatctaatgttattgtatctgtttaactggtttcttattgcatgtttaatagtttggtgatgtgggtttgttttgtttgtctaagatttgatttgaattatgattatcggtaagagttgtagcctgggatctaataaaggattgaaatttgaattatgatgttattttctgtctcaaaagttgaagactgaactggttggaatttttagatgtgatttgttacttgaatggttaattggatgcataagtgttggagtcttttgggatctgaaatctgaactaagagattgtgatgttcaatcatggaatcagcttaagaaagagtgatttctaattgacttgatataggatagtataacaatgaatgagttgaagaatggcaatgataattgatcaagggagtgaggattaggtttagtttctgtatgttttggacttttgattattaataacaggatccagttaatatttttatcaatatggcattagtttctgctggcaccgatgcacagaacacaactttatcaatgtgaggatctgttttgttggttagggttatataattgacaattaaattgttgtgaattattaaatagttaagggtagatgctttaaaacttatttttgtggctgaaacaaggatttaaatgaggttagattatgtttggtaattctgtgcaatgtgacctatccgtgtattattgcttgtttaaggttttttggatggtttctagtgtggcttcattttttgacttgtttagcttttcgactgcaggagagaaggcc

SEQ ID NO: 52940 - DNA, 752 bp, Populus trichocarpa
  Intron number 3 from transcript POPTR_0005s28160.1 (locus POPTR_0005s28160) derived from phytozome v7.0 (chr-ID scaf fold_5; pos 25511573 to 25512324 reverse strand)
gtttagctgttttgtccacctctttgcaacagattgtgagtattttttgtaaacattcctttccctttattatatctttccttctttctgcctgcaagccccataccatcccaggacagaagtgctatattaataatcagttttgtgacatttgaactttgttgattttttgagatgcatatgattttgattccacctacacctcgagacttcttgtgggaaaatgaatttgtggcacatgctagcctgtaagatagagatcgaggattctaaggatcaataaatagggaagccaaaccatttgatatggtttcttcccatacagatgtcaatgcagcatttgtagatatctttctatctcaataacccaatgaattggcttcggttattatagagtgagagagaggagtgtctgcattcttgtgaactaaaatttaactgctgtttccaatgcactctgggctacaaggaagagcttcaacaaagacggaaaaatctttttgtaaaaggttttgaaagaaaatatgtagtatgcaagagtcataaccttttcaattaactgtttccagggcatgatactgaggtatggaatgtagtccaatcagcacgcgtgaccatgttatgatatcaaagcacattgtcgcataatactgtgtttcatcatgataatgtttgtggaacaaatttcatttcttttcgttttactttgtggaacagactatcggttccttgcagaagaagtactcaattgg

SEQ ID NO: 52941 - DNA, 871 bp, Populus trichocarpa
  Intron number 1 from transcript POPTR_0005s21600.1 (locus POPTR_0005s21600) derived from phytozome v7.0 (chr-ID scaf fold_5; pos 20709398 to 20710268)
cgatttccgagacactataaggatcttctcaggtgaacttcatgaaacagccgagcataattaagtaattttcaacttttgaatacaaatatgaaatagtatgatgtttgtgacaaattggaagggaatcgtcatcaagagttctatagcagtttgatcagcttcagggttattgcggatacaatattgctgaatctcaatcaatattaacattgaaaagcccaattactagaggaaagctgcaactcccttttgcttttagctgtcgttggcatcgctggcttcttattggttgcaatccgaaatagttagtttttttaaaaaaagtgttatttttaatattaatatgttcaaataattttaaaatatataaaaaaaattataatttaaaacacaattccaaacaactcaaaatcacaacaaaatgagttcgaaaaagttagccgtaatatatatccatgaatgaatatcacttaaaactgtaattttctcaagacaaattaaattggatccacccaccaacaattctataaaatatcaaaattttgtcttataaaagaagagcaatgtttcgagcaatatccaagaatttgcacaataaatcaaaagaattatttaaatatagaatttcttatttacggttggttcgaaggagatgacacagtgtattctagggtttaattaatgttaaaagcaaccatatctaatttcctccatgatgatacgtgcaaagaacttcattataaaagtaatatatagttaattaaataatccgtgatcccagatatcctaatcatccatctagcatttatttacttgtaaccaagatataatttatagaggagattagaacgagtcactgtttgccatc

SEQ ID NO: 52942 - DNA, 326 bp, Populus trichocarpa
  Intron number 1 from transcript POPTR_0005s23430.2 (locus POPTR_0005s23430) derived from phytozome v7.0 (chr-ID scaf fold_5; pos 22195312 to 22195637 reverse strand)
tcgtccccagttagcgtaagttcctctgatgatttcttgtgttgtccatgtgcaaagaacacagaatattaactcgaaaatgtgcgattattaggtgactatatgccatctctaggacaaaccaaaagctgatattttcctataaaaacatggatcagttgaatccaacccaaatgaatagagtatgtactgtgcgtaacttttgaaagcatttttgtagatattgtcttcttctgaattatagtttttggttgaaaaggctctcttgcttgttcttattcttattcatggtttggttccttattttggcaggtgggcgctctgct

SEQ ID NO: 52943 - DNA, 500 bp, Populus trichocarpa
  Intron number 2 from transcript POPTR_0005s25340.1 (locus POPTR_0005s25340) derived from phytozome v7.0 (chr-ID scaf fold_5; pos 23627725 to 23628224 reverse strand)
gaaagcagtacaggaataggcgtgcctctgtacctgttacctgtctctatagtatcttcggtaagaaaacgcaaaaacatcctgttatctatccttccttttctttttcaaaacagaaagaaaaccagagagtgcaggggcggttctttagaccgaccgctaacattataggtatgtcatgcatttgacttcatttaggttggttacacaaacgctggaaagagtacactacttctgaatcaattaacaggagcagattgtttgctgaagatcggctatttgagacactgggtccagctataaaaagggtttaggtcagtccaacaagttaggaaaagaaaagtcttcgttacaacttgcttagggcttgcataattatgttcttgcagaaccaaacaattattgatttccaatttgtactgtagactttttgcgtttatgaaaccaaaacgtttgtggcaacctggcttacagaagctggcagcatttactcacacgag

SEQ ID NO: 52944 - DNA, 462 bp, Populus trichocarpa
  Intron number 1 from transcript POPTR_0005s27270.1 (locus POPTR_0005s27270) derived from phytozome v7.0 (chr-ID scaf fold_5; pos 24989961 to 24990422 reverse strand)
gtcccttgaatattctatcaggtaaaagaaaaaacttacattgaatctgatattttgttgttacttgtcgtcatctttttcatgggccatgaccttttttgggtatgttttgaagatattttaatgtactgttattgtctttgaaatgagattttggtgtaggattgatgatgggtttcacagtttttttgtcaagttgatggttttgtttgtggcagattctaggtttctctctagataattcattaggttgctattgttatttaatatcaacattttgtcatagtttgatcaattgattttgatggtttttatttgtttgagctatgggaattttagagcctaaaatctaatacaactgttcatgctttccttttcctgatagataaggtggcggcccttacttggaatctctaggctcctatatgtgattgtattttttttttcgatagtgaggaagag

SEQ ID NO: 52945 - DNA, 891 bp, Populus trichocarpa
  Intron number 3 from transcript POPTR_1122s00200.1 (locus POPTR_1122s00200) derived from phytozome v7.0 (chr-ID scaf fold_1122; pos 661 to 1551)
aggcttgatttattctctagtgaggcttgatttattctctagtaagcttgtttaataattagatgtgtattaaccattaagttgtttggatgaagccttgaaaaggctttatataattaattttttaacgtgtgaaataattttgagtttgaaacttatatatacacatcattaacttttcttgtatttttttaattttttaaaataaatgaaggtgatatgattctcaagaatatttaattattaaaattttaatattatattaaaacattattttaattttaaaacttaagctatgtcttgtaacattataaatgatataattattgtaaatcattattattgattgttctctctatcacaggtttaaggaaattagaaatcttgaatctggcattttcatctgacttcaaggaaagcattttgatagtcattgggagcgttgccatgccttgaagaagtgttcctcgatttttcttctctcccaggaagctttcttaggaacattggacccttgtctactcttaaagtcctatcattgaccggagttgacttcaatagcaccctacctgctgaaggtaattctacaaatgaacaattataagagtattgaaatccaaataacagttgttcactagaagtttactcctagtaatcttccgcggcttgaatacctctcagtttcaaataaccactttcaagttccaatatcatttggttcatttatgaacctctccaacctcaagttcattgcatgcgataacaatgagctaatagctgcacccagttttcagccttcagctcccaagttccagcttcgtttttttagtgcttcaaactgtacttcaaaaccacacgaggctggatttccaaacttcctccagagccaat

SEQ ID NO: 52946 - DNA, 528 bp, Populus trichocarpa
  Intron number 2 from transcript POPTR_0598s00200.1 (locus POPTR_0598s00200) derived from phytozome v7.0 (chr-ID scaf fold_598; pos 10794 to 11321)
tgttctgatcttggtgggttctttctcaaggtaattttcattcttatatctttactgtgtacggttctttgatcttgagagatttttgaagttgaattatgtactgaaaggagtctaattccattgagttttgacctttttgctttctttctatgcaattatcttttcaattgtctaatcttcatgtttcttcatgttttttttattaatttaaagattttggtttttttttgcctaggggtctgaagggtgttcgtttttctgctttagaaattgtattaggaactgtttgattcctcatcttttcaatccgttatgttcttcttcatctttttcttgttagtaagctttgtctttgcccccccttttttttttgccttttgctgtccattttgattattggttggtaatgatgtttatgctgttttggtttgagagagagctacattttactatctactttttgtaattaattttactggatttaaattaggttgctcaaatcattgggaagcctgacctggctcc

SEQ ID NO: 52947 - DNA, 422 bp, Populus trichocarpa
  Intron number 3 from transcript POPTR_0005s00710.1 (locus POPTR_0005s00710) derived from phytozome v7.0 (chr-ID scaf fold_5; pos 312751 to 313172 reverse strand)
gccagccaaagcaggtataattgttgtcttttttcttcatatcttctagcaagtcaaaatccccttgcagtttgaggggtagtcctcaggatgtaacctgatttaaacaactggcaccatttcctcccattattcaccttgttattatcgaagcctcaacagatacgattaggagaattccataatggtttctccatacattgatatttactgttatcctccaagtgccatgattttaccataacttcaccgcataacccatcccattctaagacattcttctccatttctaattaaagacagtgaaccagctatttggtttgtctatcagggcatgtcccattcactttgttgtattatgcttcttttattcctagttaatatgtttttcttccatttaaaccatgcagactataagttac

SEQ ID NO: 52948 - DNA, 898 bp, Populus trichocarpa
  Intron number 1 from transcript POPTR_0005s00710.1 (locus POPTR_0005s00710) derived from phytozome v7.0 (chr-ID scaf fold_5; pos 313518 to 314415 reverse strand)
ttctttaatacccaggattttttccggcttaattggtatgttttcttattctctctgtttctctttttattcaaaaattggcatcttttttatttaagcgtgaaaagattgagactttttgggtttttttgacatagattgtgtgtcttggctcccggggtttctttgttttggatcaaattgtgatgggttgtcttggatcttgttaaagttttgagttttgcatctgggctctatttttttttaatgttctttgggagcttgaataatttttttttatgtttatgggttttgattatattttaaaagttctgtcttgggaattttgttgggaggatttgtttgttttcgttgttagatcttagattgaaagttgtggactttgtttgagctattgtaattttttagttagttatgtcttatgtagatcaaaacacctttttcaggttccattttgcatgtcattttttttaatgttttaatttattcatctggggtgatttgtggcgaaagtgcttgactttgatggcaaaaaacttgtccagaaaacttgatttactgctgttttgtgggaatttacagagctcttgtgtctttgtgttctattgtgttggtgtttgagcattttgattttgaactttgtgcaggaatttcattatagagcctgacttgatctgttggttgtgctatgtatggtcaccggtcattgatttttaagctgtgaattggataaactttggagtccgagtttttgttggagtactagctttccttttgtgggttttggtttagttctgttactgcacgttgtggagaatcaatgaatgtattttatatgtattttgatgcaactaaatctgtcttctgagatttttaaccttctccgttccagcaggta

SEQ ID NO: 52949 - DNA, 330 bp, Populus trichocarpa
  Intron number 2 from transcript POPTR_0006s04840.1 (locus POPTR_0006s04840) derived from phytozome v7.0 (chr-ID scaf fold_6; pos 3361021 to 3361350 reverse strand)
gaggtaatgctttattgatttgcagtgtttttaacagggatttgattgtttttaggacaaaatggaatattatagttgccaataagcaattcctgtcacagtagttgttgtggaataaaatttgtttcttggcacctttatggcttcatatttcgggggcatttagttgctttaggtggtattcaaaggaactggacatcccttctgtttctcttgtgatgcttggccagttactttctagtttctgtccctatggaaatatctgaagctttctaccttggtcactatatggttccaaattattcttttttcctgctaggtgcaaaccag

SEQ ID NO: 52950 - DNA, 812 bp, Populus trichocarpa
  Intron number 1 from transcript POPTR_0006s13120.1 (locus POPTR_0006s13120) derived from phytozome v7.0 (chr-ID scaf fold_6; pos 10335241 to 10336052)
cttcaggtgcaaccattgcaactgtatctgtcagtgtcgtgctgatcgcagcaatttcattgaagctatgagtttttgttttcggaaattgataaggagttcttgttttattgatctgttgtgatttgaactgaggtggattattctttggttactctccctctcctcttttatgtaatgtaccatgattggctgagatcttcctctccactcaattttgtgatcttatgttcaaatttaaagttaattgcaataaaattccgatcctgtagattgaaattttggattgaaatctaatcaatacaatcaccaattatagagaatcggatgcaaaacgataatataataatggaggatgcaacagaaagatgaatcggagctcaataatttcattgaatcaaccaattcaagttattgaactgggaagattttggaagcaaaactttatcgaggaataaactgatcccgtgacaaaccctcttttaattggccatgatgtgcctgttagtatcattattcaaattggtgtaaggactatgttacaataaaagcaaagagaagagcagactacaaggattgatcaattatctgagtagatggagtcagtgctagctactctctagtcttttgcaactaataaggaaaataaagggacacgagggaaaactactgtcctgatgggattcatttaccacaaataaactacaatcgtggagagataatgagtagcaataaagtttcaagtgacgatacaatatagctttaccaagaatgaactaccaatatttgacggtgagaatccaaaggtgtgg

SEQ ID NO: 52951 - DNA, 539 bp, Populus trichocarpa
  Intron number 2 from transcript POPTR_0006s24650.3 (locus POPTR_0006s24650) derived from phytozome v7.0 (chr-ID scaf fold_6; pos 23231872 to 23232410)
ccggaagcttcaacaacagcgtagctgaacagcaggttggttgtttttttttcttttctcaaattttgaatgacagcagatttgactccgttggagggtttagttttgggtgtaagatgaatttatttaacattataatcagtgattgaggcacaatgcactcaagaaggcagatgatgccattagctttgattcactgttatggttttttagaattttttaactaattcatgcttttataattctcaccatatatactgagattctaatcaagtagttttttaatcgaaatttatattgtgacgagaaaaactggcaatggcagtgtttttcacctgtactctacttgtggttataatctttttttcttgttcatcataaatttgatctagttgctttgagaaaagtctgcttggtttagagcttttatctttccccttgtttggattcatttagaacaagtttttgctgaacatatcttcttgataccttttcgttgctcaggcagttttggaaactgttgccagagttaaatcgaa

SEQ ID NO: 52952 - DNA, 1020 bp, Populus trichocarpa
  Intron number 2 from transcript POPTR_0005s08170.1 (locus POPTR_0005s08170) derived from phytozome v7.0 (chr-ID scaf fold_5; pos 5621541 to 5622560 reverse strand)
gtgctcctttatctgctagtcactacagtagtttggtaagcctgaaattccattattttttcttacttaactttctctcgattgggtttttttagtagttttgtggtaattttagctgttttacatggtaattttctttcgggctatactatttttttttatggaatgagtgttttttttttttttttttttgggggcgggggagatgatgttgtttgttcgcatttgattctttgctaattggtaggaaatgcaatttggagttttcttttggcagcattctatgtgctgagtaaatgtaatttatgacaatgtttatttgtcgaggcggttttatgcgtggaattttgaatttcgttcatcgttatgccaacgaaattccaaatttcatttacataagtatataaacataattgttttgtgtacatgaggaaaggctgtctttatgcaacatattaacctataggacctatttgttctgaagcagattgtatgtttagttatttgttctttggtattactctgactaacttctgctggagaactcaggaaagttagatctagtcatgaagttaattggggttctggggagtaaaaaataggttattttattttctgaaatctttttgtagttgactgtgcttcttggaggtgctttgtacctatctctattgccatttgacccaatccacagtgttaatttcagccttttgtttttaatttctctcaagcgtgttgcaaatactatgggccaaattggagagtagtttgttatttggcattcatataactgtgccgcaatacgtgttggtggagttgtttatctcagtgaagatggtttcttacttagaataagaaaaataaaatgaccggaaaatcaagggaatcgctggttttatgctaagatatgataacaggtttagcacttattttccgattattgattggcaggtgctccctcgtatttggagcatctattgtgcaggatagagatcttagtgaatatagcccgtctcagtc

SEQ ID NO: 52953 - DNA, 531 bp, Populus trichocarpa
  Intron number 1 from transcript POPTR_0017s08060.1 (locus POPTR_0017s08060) derived from phytozome v7.0 (chr-ID scaf fold_17; pos 6463931 to 6464461)
ttttctattcagttcctcaggtaatgggtttttttactgtcaatatttttttttatatataatgagggtttattcacatattaatttaattttgattgtattagaaaagttttttttatattatttaatgcatatatttttgtgttgtcttcatttgtttacaatctgaaacgtgaatttttagatttttcgatttgaaattattattattattattatttagactggctataggaaaaagaattaactgtgaaatgctatggacaggggaattattatctgttcattttgcaagttttaatagaccaattttgcatataataatgaaatgaattgcaagaatattatgattttgtctgctttgtgattgatatgaattgggaacatgtatctggtgattttgatgctggtatatggtaagtttttccttcatagttttgtttctctcgtaattttagagcaagttcgttaaaatgaaagcatgcatctcttgtaggtagagcttgctaaacgtcttgtggcttgttcatt

SEQ ID NO: 52954 - DNA, 506 bp, Populus trichocarpa
  Intron number 1 from transcript POPTR_0005s15170.1 (locus POPTR_0005s15170) derived from phytozome v7.0 (chr-ID scaf fold_5; pos 11950433 to 11950938)
aaggttcaattgtcaaccccagaaggaatttcaaggtattgttgttaaaactctgttttttatattctgttttgagttttttaaggttagtttggcatttcttgttcgataatcttgagaagtatgcatatttagattcttaggatgttaaagttctgttctttttagtagaaacgtatttaactcaaatgatcacatctttaattgttatataatcattgctaggtattatgtagtagatgtttgatttttatgtttcgggaattttgaggagaatgaatatgatgcctttttgtggtaaagttattttgatgttgatgaataaaattggttgttaattgttagtagtttttcgtttttgatgtttcatttgggtgtgaatcttcgaggtttgttttatgaaaggtttaatgagagaaatttggatgttttagatgttaaagtcatgttattttggctgtaaatgagtgtaactggttgctgtaactctggttgttgcagtgatc

SEQ ID NO: 52955 - DNA, 446 bp, Populus trichocarpa
  Intron number 2 from transcript POPTR_0005s15000.2 (locus POPTR_0005s15000) derived from phytozome v7.0 (chr-ID scaf fold_5; pos 11836150 to 11836595 reverse strand)
cgattgacggtgattcatcaggtagaatttggtttcattgtgttgagattttagattttttaatgtaggaaggctatatgcatgcatatttggaggataattatcttctatgctttttttaagtgatcaaataactcatatttgttataattggaactgtcatattattgacagcctttgtttaccatccatggtaattgttttggtttgaattttccattttactatgattccatgtgcaaccttttttctgctatttcgagcccttgttcaagtttaagatgtttagtagttatggatggttactaaccaattcatcctgttcgaattgttagtaacagacaaattaacaatttgcattcaaaaggcttgcgttttgttcatagtgtaaacttggattattattttgagatgtctgacaagatgatggcatggtgtaaatgaag

SEQ ID NO: 52956 - DNA, 338 bp, Populus trichocarpa
  Intron number 1 from transcript POPTR_0005s15000.2 (locus POPTR_0005s15000) derived from phytozome v7.0 (chr-ID scaf fold_5; pos 11836623 to 11836960 reverse strand)
aatcagaggcttcatcatcatcatcatcaggttttttttttcttgttaattatccggtttactcaattttggttagtgggtctgatttagattgtgaatattagttgaaaggttttggtctttatagaaaagaattgattttgggtagtcactctgatagtttattactagcaaactgtgtttgatttttttattccattgtataatttaatttgtatgtttagttgttttcttggtttcttgaaaatatattctttttgcaagttttcattttgagctgtatattgtttgttggtgcacttccttttcttttatgattcattgatatgtttcaggtt

SEQ ID NO: 52957 - DNA, 848 bp, Populus trichocarpa
  Intron number 1 from transcript POPTR_0017s04080.1 (locus POPTR_0017s04080) derived from phytozome v7.0 (chr-ID scaf fold_17; pos 3071516 to 3072363)
tattctttcccactgtgacacttgcccttatcggtaagtattttattttgcttttatcagcttattgtgaaacaataaatatatattattgttcattgtggttgtagaaattaagtccttgaaatttaaatatttcttatgactatcccactatttcaagttttaactttaggttaaatttatattatttttgcatcaaattaatgtatctaatattctttctacctttgttttcaattataaacaataattttaaagcattagatggaaaatgttctaatcaaacacagagtattttgaaagtatttactttttctataggataacacttttttatattttttctttcagttaatgatcttattatataaaaacaatcagatttttttatgttgtccgtttttctaagttcctagcatgataatatcgattatatatatatatattgaaagcttttatagttccttttattgtttgtaacataacttgcatggatactattttattttcaatttcatgaggtatatattagagtgttgagaggcatgaggatcagattttgaaattagagaattagaatgaaaaattaatcacacatatatactcgtaactaaaatcaatgaagcatttgtaaaatgttttgatatgtttcaaatgtctctatacagtgatatatcatgtgctactgttcccatgtgggcttccatgtctcctaactttactgatttataaatggcgaagacggcatttatctatgtacgaagacattgaaaaattcttgcaaagtcatgataatgatctcatgccgataaggtacacttactcagaaattaagaagataaccaacg

SEQ ID NO: 52958 - DNA, 599 bp, Populus trichocarpa
  Intron number 3 from transcript POPTR_0005s16410.1 (locus POPTR_0005s16410) derived from phytozome v7.0 (chr-ID scaf fold_5; pos 13164629 to 13165227 reverse strand)
acaatccaagtgagcaaagtgagtgtgtgctctcacctttttggtgatgtatttattgataatttatttgtgtgaacactgtattcctagttggttgtggcggggtgatcagatatcaagtctaactggtagcaagattggaagttgtataattatgctacctgttgcctgttctagagatcaaaaaactgatactgttatataaacatatgcgctttattttcttgaaagattgattcacctccatccatggcagtggcatgtgagcttgtggcaatagcagtcagatctcaatcaccttgtctgctgtaacttgttcgctgagattttcagacaagcatactctgttgtcatagctgtgcaaagtccatgatggggataggctttaatcctttattttcttcaagtataattggatgctgctccaatgattgggctaatccttcatttgtcaaagacttcttgttgaacgttagcatgaatggaaaacctgccattaggattgagctgaaaatacatttttttccctgtttcgtcttgtgttttgggtgatactcagttgtattttctcgtttgcaaagccctggcaaagcttggaa

SEQ ID NO: 52959 - DNA, 717 bp, Populus trichocarpa
  Intron number 1 from transcript POPTR_0020s00300.1 (locus POPTR_0020s00300) derived from phytozome v7.0 (chr-ID scaf fold_20; pos 347274 to 347990 reverse strand)
tgatttttggagttatcgttcaattaaaattggtattatattttctaatttactcctcattgttttgattcctaattttttttggcccttttgtaaagtttattattcttttttatttcaccctttaattacaacattatttttattttttatgttaattttgatcctcattcttttaattgttatttcttaaaaaaaaattaattttatccttcaacatatgattgattgagaattgaacttcataatttttccagattagatgttttgagtataatgactctagttactactttttttaaaaaaaaaacttataatcctctttatttttttatcaagttatttaaatctcatgatttgtgctaatggtttaacaatatatagaataaaataatttttttttatcttcattatggtggttgtactgattcctagatatcttagatttagaggtaaattttataaattttaatatgattgtgcgtgtgtgaaggtgtgtttgatcgatttcttaaaattcttaaaggtttatgaagactagaatagcttagtaagggtaattgagaagaattcaaacaaacttgatgggggcattgagacagaacaaagttgttttaggggggaattgaaatttgccctaattaagataccctaaattaaacttaaccaaccgaataaccagataaacggcaacgcttttgccgaaagggaccttca

SEQ ID NO: 52960 - DNA, 974 bp, Populus trichocarpa
  Intron number 1 from transcript POPTR_0005s10100.1 (locus POPTR_0005s10100) derived from phytozome v7.0 (chr-ID scaf fold_5; pos 7193214 to 7194187 reverse strand)
gacctcttggtcccccaaaaatttcttcagataaggtgggtttatcacattcacactatatgaataagtcaatgatttgaattttacttttggcccagctttgacttttgacgaagttccatgctcaaggttttactacgcatatgcatctttccttaagttttgcaagaatcatggtacctcttgtcttctactaacatttttttcattccgtatgttgaatcctttgacttcatgtaatatatatttgatgggtttttttttaaaagattttttgtcttcatatatgaagttaaatctatccccttatttttttttatttctagaaaaaaaaacaaatttataataggtaatttatcctatagtctaatggcacctttctctctttttgtagaaaaaataatatcagagtttgatccattatgtaaaatacatggaaccaaaatgaaataataattttttttaatatatattcttacaaatattgggatatccatgaatcttttagccaactgcaactaaattctgcactccttttaaaataatatctttttttataattttttcatttgttaactaagcacgttaagatttaaaaatattaatttaataagtttttaaaacaaaaaacaatttcaaaaatacttttaaaaacataatctatcacaatcaaatacctacaacaaatcacgtcaacgtttaaatcaacaataatttatttggaaatagtttaattaaacttgtggacatctctcggagccaaaaaaaaaaaaagtcaaaattaatttgttcaactagtcacggcaagtgtgctaatataaaatcacattagtagctgacctaagatgtgtattttataatcatcttatgtaagcctaattatatatttattattctttgtaaggcataataatatcatgaccaccatttctcaccttttttttttcttggtgcatacaggaagactgggtttt

SEQ ID NO: 52961 - DNA, 533 bp, Populus trichocarpa
  Intron number 1 from transcript POPTR_0005s12580.1 (locus POPTR_0005s12580) derived from phytozome v7.0 (chr-ID scaf fold_5; pos 9362552 to 9363084 reverse strand)
gacagaaccgcgccaacgttctccagctcaaactggttcgattccatactagctattgctttttttttttaaaaaaaaaaattgattctaatgtgagattttaggttttgttttttagattttgtttttttaattaatcgaaaacgattactagttttggaatttgtgcaatatttctgtggatttgtccatatttctagcttcatgctttttagggttttagactcgttaatgtgtcagatttcgttattgattaggctcttataaacaataagaattgattattttgtggcattttttaaatatttattcgaggagtttaagttagtgtaattttgattgccgaagagaggaagaaaatagaaactcgttttctcttatttgagaaggataggtttttggatttgtgatggaatttggccgaagagtgtcggaagcaattgaggtttgagatttttgttattagtgggagtgtactgaatgttttgacttttgcagattggtcaaagtcatccgacgggattaacaacaaa

SEQ ID NO: 52962 - DNA, 595 bp, Populus trichocarpa
  Intron number 1 from transcript POPTR_0005s06230.1 (locus POPTR_0005s06230) derived from phytozome v7.0 (chr-ID scaf fold_5; pos 4091684 to 4092278)
gaaagtggtcgcttgagaagagccattgcttctaggtaaaaataagagaaaaatcctctttcttttttaaatccatttttgcttaacaatttatgaattgttaggattagtaacttatcgggtttttattcactgtttctatgctacgttacattctttattgtttgttttgattttgtgcccaaatggtatcctcaggccagttttcctgtcgtacattttgtttgtgcctgaaaagacatgccactagcattgtgatgattttttttttaatttgcgaattcttgaacctcaaacaaatcgtctccaattttaaacctttttccattagtaattgattgattgttttactcactttctaaagctgaattgagctatttctagagtgctacttgcatgatgtgggctaatcaaacttaatgtttgctttagtgtttctgaaagctgaagaacacatcctttctgttaatgtcataaagtagggaactttaagggcatctttaaatgttttaaatattaggatggcatgtatatgtattttgtttagaatgcttacattcatgagtacctagggttcaaaagccagagagtgtcg

SEQ ID NO: 52963 - DNA, 955 bp, Populus trichocarpa
  Intron number 1 from transcript POPTR_0005s23090.1 (locus POPTR_0005s23090) derived from phytozome v7.0 (chr-ID scaf fold_5; pos 21929549 to 21930503)
aagctcttctgaagctcatagaaagggctaacgtggtaagttcaaccaccatcaacaacaagcttggcttttttcttttctttctttttgccccctttagaccaagtgattctatgttttttctttttatttatttatttattcagtttatccgtactgtttttcatctattctctttcttatttccgaagatagattgttctctctctctctctcttaccaagtgattctatgtttttatttgcttgttttctgcttgttttcagtatgtattgcatatgctctggtttcccttgctattccctgaggggcattctttacctctgttttcataaagaaaatgaaaaaaagaaaaggacagtgttggggttgtcaggagaggaatatttttgttgaagtcggttttgaattggatattgcgaaataacaaaatctgttgatgtgcaatggcggcccttcgtatttttttatttttagcattttgcaattgcttggtaatcatgattcagggttacaaagtcacaacccaaaagggtggttgttatggcttagtttagcttataatggctcgtgcttgtttattctatgattttcttttattaatgtttgtggttttgaattccaagtccagccacggtgggatcggtagtatttgacagcatagccacctgtgttggaaatttcaaaaacacaaatgtggtataaaaaaaagcgtgtgtggtattaaggaaatttcaaattctagcctcattgtagatgtgtaaggctttaaatccccacccttgtaatgttgtttctgaaaatattaccatttagcgtttatagtagtacgattcttgcatagttggaagatttagcttccatgttgtatgtgttgtgaaatgtcccctgggttaaacatttataatacttgcattcagttttaaactgatagctgtttgattttgatcgaagg

SEQ ID NO: 52964 - DNA, 1003 bp, Populus trichocarpa
  Intron number 2 from transcript POPTR_0006s02030.3 (locus POPTR_0006s02030) derived from phytozome v7.0 (chr-ID scaf fold_6; pos 1258588 to 1259590 reverse strand)
ccaacagtacctccatattgtcctgtaccttgtagaagggcggtgtgtgatatatgggaagacggttgttgtagttgccgaagtaggggttactatctgtgcagaagtgcatatgtttgtgaagagtactatccctcggcgccatgcacaatcatgtaaagggaaatcaagttcagaagaccgatggtttgagtcaacgtccaagatcaaacattggattcaaatccagtggtcatgatggaccttagtactgttgttgtatttatatcatccctttagtgttgctgctgttgttttgacctctttcatctagctagatgatgcacgactttgtgcctagctagtactctcaagtcaatggtcacagtttttccatggttgatggcttgttacatgtttggtcagcaaatattgttaaatggcttgttacatctagattcaaatcctagtctttgttttttatgctctcttatctttgttttaaaggtcatgatgggccttagtgttgttgtgtttataatatcatcccttttgtgttgctgctgttgttttgacctctttcatcaagctagatgatgcacgactttgtgctagtctttgttttttatgctatcttatctttgtatagtactcctaggattttgtccctttgaatgttttcttccaaagtgctattatttgtttcaaaaaacccctcgatctccatctattctctcgtcatttttttgccggatgaaatgcccagaaacaaaatataataaaagactggctatggtttcccaatgaaaattatgttagttaattgataatatatttttcattccataaaattaaccttagaaataaactcatataatttataatattttacgcaaagagaccatcttatgtgattaaacaataaggtcaataaggttggtgagatgtataaatattattgtagggtcacgtaagtacttaatattattgcaaataaaagcaaaaggtttcattttccaaggta

SEQ ID NO: 52965 - DNA, 697 bp, Populus trichocarpa
  Intron number 3 from transcript POPTR_0017s06380.1 (locus POPTR_0017s06380) derived from phytozome v7.0 (chr-ID scaf fold_17; pos 4893004 to 4893700)
accgtaaaagtgagtaaaatttgatcttctttctttatacatgctatttgcatggcggcgtttttttttggagttttttttattatttttaaaagctaatttgtgcctgttttgacttgaaatttgctgaaagttagagagaaagctattattagcgtagatgattctgtttagtactgcggtaaagctgtttaattcgttgcgttagcgtgttattgttactaatgagtttgagaaattgtattaggtttgtagtaacttgttagggttgccgtttttagaattgtctcggtagtcttgatgatgaacattggacctgaggaaccttatgtgggaaatttatgttatatattagtgtctgtgtgggttgatgaaaatttggcaagcttgaactgtttgaggagtcttaagcaatgctgaagctttgcaatgacaattcatacggttgattactctatgtatcttatgctcatagctattgccttatgtagactctgtgttcctgtgaataaaggcatttttttttgttacttcgagctgaattacttgtccataggaaaaagaatgacagaaaaaagattagtttttttgttgtgttaatttggtatgctttttgttctatctaaagtcttatgcctcttattttttgtgaaatgaaacagagattgggttaggcttgactggatttggcatattt

SEQ ID NO: 52966 - DNA, 680 bp, Populus trichocarpa
  Intron number 3 from transcript POPTR_0006s18600.1 (locus POPTR_0006s18600) derived from phytozome v7.0 (chr-ID scaf fold_6; pos 17149035 to 17149714 reverse strand)
acattaaggtatgcagttgtgcagccattgaatctatacttagaatgttgtaatttgatctggtattgttgctgtgtacttgttagtttggttcatacagtttgctaccttgaagggtattcctggggtgcatcttgctctggtttcttaagtggcattgatatgttggttttgtgttctacttaaaaataaataaataaataaatctttgtttgatgttccctcaatgtccttttctaattttagtaagttctgtgaatcatttttagcaaccagtttctattactatctgatgtgcaaattttctgtctttatgggaaatagttgacgtaagatattgtattatgatgctaaattattcatacaggtaaaaaattacagtttgatgttaaatgacaagttgtacttagaactttccagggggaacacaatgatgatcagtttgaagttgtgacatgggttgttaatgggaaagaaataatgtgccctgtttcagtattctatctgcatttgactttgatggttgtttcaattggcatcttctttcagagcttgactatcgctattgctggtgctatgactttgtactctttatgcctttgtctccatggttgccttgtctaagaccttatgggccatgtgcaggatctggatcttacaaagccatttgtacgtagaga

SEQ ID NO: 52967 - DNA, 443 bp, Populus trichocarpa
  Intron number 2 from transcript POPTR_0006s18600.1 (locus POPTR_0006s18600) derived from phytozome v7.0 (chr-ID scaf fold_6; pos 17150013 to 17150455 reverse strand)
ctccttcaggtactgaatccgtctttcagataccctttagatgtaacttttttaatcgaacctcctataactttacttcttgtaaatagaccgaaagggatgccaattctctctctctctctgtatttttttttcttgtgaaatgctgttttggatgattggggatttttttttaaaaaaaaaagaaccttagacggttttcaaatagcttaagttaaaaatatgtagcattttatttattgattgtatgatggttgacaattggttatgttattatttagagttcctgagtacagtcttcatattattgtcattttatatatatattttttgtttcatctgggccaaatgtggtggaaccatttgtgaacttcattgtattgtttttgatctgtggcatttgattagataattggattggagacaatcaaagctccaattct

SEQ ID NO: 52968 - DNA, 323 bp, Populus trichocarpa
  Intron number 1 from transcript POPTR_0005s25210.1 (locus POPTR_0005s25210) derived from phytozome v7.0 (chr-ID scaf fold_5; pos 23519393 to 23519715 reverse strand)
tcgagtccgttggatctcttagctcggccttgtaagttctgtttctttaacatcttcaatctatgatttctattgattttgatttgataatttaattttttaatggattctagggatttgaattgtcgattattgttagtttctgttaattttttgttctcatgaattccgtaccaaaattgtctttcatttcgttgataatttggaaaggtaatagtggtttaatttgtaatgaatttttataataccttgaaattaaatttcctattagttttttttttaatcttatatgtggcttttaggctttgagggattctctagta

SEQ ID NO: 52969 - DNA, 388 bp, Populus trichocarpa
  Intron number 3 from transcript POPTR_0005s19080.1 (locus POPTR_0005s19080) derived from phytozome v7.0 (chr-ID scaf fold_5; pos 17685246 to 17685633 reverse strand)
gtttcaaaacaggagagccaggtaattaagaagataatctttaaatttaacagttatcaaaattatctccatgaaacaagtgccatgatatccataacacacccaaaagccccacaagaaatgtttcttatccctgaagaagaaccctctgaagcattttcagcaccaaggtacctgtgcttaaatcagcgaagtacaacaactacctgctttaatcaataaagcttacaacaactacctgctttaatcaataaagctatctcaaactatcataattaagctggagggtttattttttgtttttctttatcagaaaagaatctgaattaatggtggtcggtaatactctgcaggacaaaactcaagcaaactgaagtggactgtgagt

SEQ ID NO: 52970 - DNA, 522 bp, Populus trichocarpa
  Intron number 2 from transcript POPTR_0005s20170.1 (locus POPTR_0005s20170) derived from phytozome v7.0 (chr-ID scaf fold_5; pos 19223870 to 19224391)
cttagttgaagaggtgttgagataatttctagggtttttttaccccccctctcgtacttactctttactttcttgcagtaattgtttcttgaaatgttgtttttgtcatggaaaaaccaattttcttttagctccatccgtaccctgcattttgattgttcatcgggaaaaatatgttatcttccagaataagttagaaataggagtaaggcattgttataactgatgccttttgcttgctagcagaaactgtgtgttgaatttctgctatatttctactattattattggataaatgcatatacttgcacataatattctttgaaaacggccttttttgggggcgaaattgtattttttgttatcttcgctgatacataattatgctgtgttatgggcacataattatttggatactttcgattgcttaaatatttgatgagatttttatttttactcgtgaaataattgagttttttttaatctgtgataattatcgttgctcattagcagagtaggcta

SEQ ID NO: 52971 - DNA, 304 bp, Populus trichocarpa
  Intron number 4 from transcript POPTR_0005s20170.1 (locus POPTR_0005s20170) derived from phytozome v7.0 (chr-ID scaf fold_5; pos 19225121 to 19225424)
gatctttttcgaggaagtgtatcacaagtaacaacgtaagacgaccaaattttgattgtgttttatttttatcattggatttttgtttgtttatctggtgttctgatgattatccttctatgtttatgtcagttgtatattttcttcttttgatttgcctttttgtttgtgtggtcattttttagttatagcacttttaagtgtccgcaatgcttaatagtcattgatatggattttactgtttctttttttgtttgttctttatgcaggtgctcaaattgtggaagagattctgaagcatctt

SEQ ID NO: 52972 - DNA, 493 bp, Populus trichocarpa
  Intron number 2 from transcript POPTR_0005s24700.1 (locus POPTR_0005s24700) derived from phytozome v7.0 (chr-ID scaf fold_5; pos 23154458 to 23154950)
agcaagatttgcagcgtgagtaattctgaacagcttatttgtgtgtagtggatcaaatatacagtgtgtaatgctttcagatggagttcaaaatattggccttcattatttctgtgtgctggttcttccatgatgaagctcatattgttgtttgaaagactaagcaacaaaagtagtcttctatcatgtaattgttagtctgaaattgtctttctgatccacgctaaagaagccaacatatatgaattctataagattatttgaggcttgcaagttagaagaacaaatgcaacctgaaactgtaatggaatctcttccttttattttcacttcttttttccttggcaatcaaatgtagctgtttatgatattcgaacacgtgagctttgacttgggatggccggggaggtagttgagattcaaactcttaatggacatgtggttttttctctgtccaggtccagcaaagtgaagcactattgaagaaaatcca

SEQ ID NO: 52973 - DNA, 841 bp, Populus trichocarpa
  Intron number 4 from transcript POPTR_0005s06600.1 (locus POPTR_0005s06600) derived from phytozome v7.0 (chr-ID scaf fold_5; pos 4418113 to 4418953 reverse strand)
ggcattcaaacgcacgaagaatttggttctacaaggtcaccttctcttcttcatatattgatatatagttttgacttatttatctgatatatgaggtttcctcctcttttgtttgaagcttttgattgtgtttttcagtatattgaagtcactgtgtttgaaaaatattttaatagtctggttagctcactagctagcagatgatttccaaatgaaaaatttacttggttttgttgtattctgcaactgctaataatagtattggtttcaaaatatatcaagatggagatgtgccctttttagatttgtgataacatttagaactaaaggacaattttttttaaaagaaagacagctaattgtccgttgatagtttgagttacttttcaagaaacaatcatttccatgattttcatatctgaggaaatttgatatattgatgtattctgctgctttaacatgtgatagaattgtgtagtatccagacttgtatatgctaaaaaagtggactttctttccagtgtattgcatgattgtacactaagccaaatgatacattctgatacattaaaagatctatcctgtctatgattgttcttatgtgcgcttacatgttcttataatatggtcatatgtcttcaacaccttttcatttttcatgcattatgccttgtaagtgtctacctgctttacatttttcgttgtcttttatcttctttcttgtcatattctctttaacagtaacactttggggcgaaatgagcaattctgcaattaattgtcacattctttgattgcacttgcagagaaagagcactctttgcagttgacaaaagttata

SEQ ID NO: 52974 - DNA, 460 bp, Populus trichocarpa
  Intron number 3 from transcript POPTR_0005s06600.1 (locus POPTR_0005s06600) derived from phytozome v7.0 (chr-ID scaf fold_5; pos 4419072 to 4419531 reverse strand)
aaagcttgtccttgagaaactttcggattcgggtgattaatgttattgaattttgttgcatttttattatgatttataaatacttaatgaagatatagggtgaaatgaagtgaagtgatctttaggcatatcatttcttacatgttgtaaagcgttgttttttttcttcctttgttatggtttgcgtgctcccttgggatatctgaaggtagttctagtcagacttgattagatgctaactaaagcatttacgagtttgactcatgttaactacgttgcttataagattcaaaaaaggaaaaaaaatgagatttttattatttgtggaattgaattaatgcggatgatggctcaaaagtcttttatatatccaaattttttgtcgaaaccttttatggaccaaacatgtatgcatttaaattgcgctagttcctttttttatgtgtttcaggtgtggcat

SEQ ID NO: 52975 - DNA, 540 bp, Populus trichocarpa
  Intron number 2 from transcript POPTR_0017s13580.1 (locus POPTR_0017s13580) derived from phytozome v7.0 (chr-ID scaf fold_17; pos 13702070 to 13702609)
gcttctacatcaggcatacttagatattcttacaagtacgtaaatctctaaaagggaagcaaagtttttttattgcgctgcattacaaatcaacttatgatatgtgtaccaacactttttcttttttatctgaatacttcattgaccatataaaagtttatttctaaacatatttcttgataaagaaaaagaatccacccctcttactctattgaaagatacacctattgagaagatattgatcctacacaatagtcttttcttggtagattctctccaattcgtttcttttctattcaaatttccttaatcaagaagatggtgctatgatgagggtaaccaacctctggtttttagtagatttgattttgggtatggggtatagtacctcattcaactttcttatagtaaacctaaatagacattacatgtaggcttcagaaatccatcatccaatttgtaaggcttaagttgatgtcttaatttattggttttacttttgcagggatattcagaaagctactcaaaatttcacaacag

SEQ ID NO: 52976 - DNA, 684 bp, Populus trichocarpa
  Intron number 3 from transcript POPTR_0017s13580.1 (locus POPTR_0017s13580) derived from phytozome v7.0 (chr-ID scaf fold_17; pos 13702694 to 13703377)
actcaaagcagggggagaaagagttccaaacagaggtactacattgcaacacttatactcagagtatatgtagaacatagaatcgctgcaagagatgcttctgtggcatggttaggacagctttctcattctaaactgacaaatttgattctactgagcctccccttttttttcttctaaataccataatacaatttataaattttgaagacactgtctaagataataaggatctacaatgcaccaatgatatttcatcttttctagtagtggcttgcatttttttttaatataaccaggaaaaactctcaaaaatagtaaaagaatatcaatcatcataggggaacattccggggaagcaaggtctgtttgactatttattcataaatgttaataaactcagtgatgttcaaaaatcaattacactaatccaaagaaagatttctgcttccaaaagatactctgcaaatttctgggaagatgaggaactaaatacataaaggcagccttatggagcattcattgctacccagttgttacaaattttgcatttatatcttcaaatctttgcaagatttcttgcatttaatgctctgaagttcatagaaagcatatcaagtagtcattttttagcctggtcattttgcaggtatctctattaggaaggctgcaccaccggaatct

SEQ ID NO: 52977 - DNA, 857 bp, Populus trichocarpa
  Intron number 2 from transcript POPTR_0005s17270.1 (locus POPTR_0005s17270) derived from phytozome v7.0 (chr-ID scaf fold_5; pos 14528414 to 14529270)
ttggatttcacagagcacagtgagcaaggagacaggtaatagtttaattttggaatctttttttatgaagatattccgtttatctggttcttggattggttttgatgctttttagagagagttttcatatagggaccagtaaaaagctgaatcgatttatttttggttatttatgttagctgattttttagagtttgatgaaatagtgtctgcacttttttttctttgtaaccgagcaagcagtcgggtcggtcctcaactacctttggcgggcatgcactagatagtgatatttactccatgtgtattcatttgatcagagcatcattggcaagtttcacgatcacaattatccatgcttgaattatccgcacaaggcaaccgaagttctttttttacttttctcctatgattggccttcgagaatttagattctaagatcctctccacgtgctcaccaatatgctctgattttaatggttttgctgctatatggaattatgatgggctttatgccctccttcatgcgatgccattaatatcactttaaaacttgctgtttaaaagagtcgccttctcttttggggtgctgcaatttctgattcactttgttttagttatgatgggttctcttaagaacattttttagaatcttggatggaaatgggttcagtgcatttctatactcgtactgttattgggttagatctcccttctataacatgtttatcttggatggaaatgatttcagttcattgctaatttcatatcataattgggtcagattttgcttctataatatgtatatatataattgtcttcatatgataggtaccgggaacttgcccaccgggtcg

SEQ ID NO: 52978 - DNA, 1022 bp, Populus trichocarpa
  Intron number 1 from transcript POPTR_0005s03950.1 (locus POPTR_0005s03950) derived from phytozome v7.0 (chr-ID scaf fold_5; pos 2630555 to 2631576)
agtttactagagatcacattaaagccttggttttggtaagaacgtacaacctccttccacgagcaactagagatatttctcttcatttttacaaggcttttccaaaataactccaataacagacatcaaatttcactttggtagagaaatttttacagattcaaatttcatggatcctccctgtctattccatctcccttcagtaaagtatctattttccgatgggttattttattagaagtgacttaattaaggaaaaggactcatgaacagtatgttgtcacgatattaatgaatcattgagagaatctagtacaaaaaaatgacgccatagggttaaattgtgattttgtagagaatctagctagtagctatcgatttacattggcaattttgtactgtcattttatagctctatactatatttttgtagtcccaatgcataaattcagtgtatgatatttacacctaatttcaccagaaaaagaaatgcactaaaaatattttgccatttatatagcccattgttgccacgtctactaactgtagttacgagttctggtggggttcaactcaggctttgattaaggttcgtagatcgtagatcgaaagggtaaatccaggatgaacctaggtgttttttttttctttcctaaaacacaaatcatgaaatgatatcattaaaaaaaaactcgtagcccgaggtagcccgccgtgctgggcaggctcacaactatgttgtcgactcatttgttagataggtggagatgcgagttccatccgttcagtgaatgaatggtggttttatttaagaagacactcgttagatatgagtggatgcctctatgtatttgattctatttaatgaatggtacttttcaaggaatgatttactgataagagatttaagtaagaacattccctctaagattagcattgtattaagattcatacgtgacaaaatccttactgcaagtatttttataggatttcttaacagcaggcacggatacaacagcagc

SEQ ID NO: 52979 - DNA, 711 bp, Populus trichocarpa
  Intron number 3 from transcript POPTR_0017s05430.1 (locus POPTR_0017s05430) derived from phytozome v7.0 (chr-ID scaf fold_17; pos 4298104 to 4298814)
gaggtgttcaaagtcaactgggtactgcaggtactggttgaacagtttctaatgccctacctattccaagatcgacacttctctcatccttcatttttccatataatctgaatgtaagatcatggtacataatgaattgtttcatgccgtaagctatctcaagagattttttttagctttttctgggccctatgataagaaattgggttgcattgaattgatctgttcaaaatttggattcaatagaaagtcatagtagagaaagctcatagcagaatttacttatctcttaaaatgcaaacaatgactattctagggagagcaatcatctaccttgttttttcttaatatctgatatgttaatctatttatcttgttccaatttagtcatccgtgagagaattgttttgtaaaaagggaacaatttcttgcttgctggacttaatattcatgttgcctttagaccccccaagtagtggcgaccaaggttgattttcagcattctttgtgggtacatttcctaacttttttttcctttttgtcaaactgtcaaggaagcagctgtcttctcagttcattatatgtttgagcaggtttatgcatgccaattgtagaattgtttcaagcttgattttgtaaatatattgtggttcatgattctgaggttttttatttattggcttgagatcaaaggcagtgccttggcgaagc

SEQ ID NO: 52980 - DNA, 331 bp, Populus trichocarpa
  Intron number 1 from transcript POPTR_0005s19410.1 (locus POPTR_0005s19410) derived from phytozome v7.0 (chr-ID scaf fold_5; pos 18241996 to 18242326)
ttttctctgcttgggttctcatcatcaccacacaggtactcgtcacatctctctctctctctctctctctctctctctctctctctatatatatatatatatatatatatatatatatatatatatatatatattcctgatttagttttttcttttataatgcctttagacaaaatatgaaaatgctattgcaaaaggtactgttagttctttcttcttgtcattccttcctttctataactaatttaattctagctagcttttgagttttgctaatctcgagcagctaacaaaccgacaagcgatgatgtaattgtgcaggttttagggt

SEQ ID NO: 52981 - DNA, 538 bp, Populus trichocarpa
  Intron number 3 from transcript POPTR_0006s04750.1 (locus POPTR_0006s04750) derived from phytozome v7.0 (chr-ID scaf fold_6; pos 3284537 to 3285074)
cgataagtgcacacagcaagagttctgttcagaaggttagttgataagctagataaagtgctgttaaaatttagttttcaattttggttcaaatatatttatagttgctgatgaaatactgaaaaataaatttgctttcatcataagaaaaccttaaatctatgctaattgatcgaaaatgttgtgtttattaccatttctcagcagtacaaaaagaaatacttgcatttgcattaatgttttctttttcattggctgaaagaaagcaggtggccagcctatgcaatatttaaagtaaaatagctagctatctaaagaaaagaaaacaaatgaaatcaaacacgaaactgacttgtgctacaattgcttgactttcatttggtcaattttatttgattgactccatgtgcctgtgtgttcaattaaatttgagtttttaatctaatattcctgtaatattttcaagtttgttcataatgctgtttgtgattcgtgtgctgaagcttcttgaagttgtggagttcaaactcaaggaggt

SEQ ID NO: 52982 - DNA, 613 bp, Populus trichocarpa
  Intron number 1 from transcript POPTR_0017s13070.1 (locus POPTR_0017s13070) derived from phytozome v7.0 (chr-ID scaf fold_17; pos 13225432 to 13226044 reverse strand)
agccaccagccaaaaccaaaagaagcttccatcaggtacttttcatagttacaacgcaaattacctccatgttattaacaatgtggattctctggattctcttgatgttttttgagctatttacttgtgtaatgttcaaactttgtaatttaattttataataaactccacgctttgttcaaaatgctgaaaattcacatttacaagattattctttgaccgagcaaccatgagaataggttttaagtgattcagaattcattattgttgcctggaaatgcatccattacagagccaaccacttggattttattccctttctctgtcttggaatgattgtgatgcttctgcaaaaagcaacatctgccaggattctttaaatgcgaccatgcatttgcacctaggaacagtttccgtatcctgttagtcctcaccatgcctagacatagtcatcaattcagtgatacgggttttttcttagttccgcaagaaaattattaatgctcatgcgtcatggctgaaatatgaatatgagaaatagatttcaagttcgaaagatatatttaccagtaaccttagacagctaaattatcgatcttctacccaggtcaaa

SEQ ID NO: 52983 - DNA, 581 bp, Populus trichocarpa
  Intron number 3 from transcript POPTR_0005s10490.3 (locus POPTR_0005s10490) derived from phytozome v7.0 (chr-ID scaf fold_5; pos 7541052 to 7541632 reverse strand)
gattggtgttactgggagaaagatacggtagctaaattttgcttttattttttatttctttttgatatgtatagagtagtaagtcatgtttcttatgtgggtttttaacctaagtttcgaaatttactttttgggaaaatgcagctgatgtttgtaagaggattaaatatcaatagcatatgatactcagtgaaaacaaatcttggattatctgtaaatttcaaaaaactatgttggcttctctgatcgtgaacatataaattctaaatcaacttagggtaataaacttgatttttaacattactaggctctctataaaagaaaggattatggatggctaaagatggcatactacaagcactttaatataagatcagtggagaatggtgttagttcttatggtgggatgtatgtaaaggcaaaataatcatgtgttataaccagaacacttacagtggaagaaaataaatgtataactaggttgatgtcatatggtctttatttattatcctgccatgcgataatgtttgggtttctctgatgtgtgaacagtgacctcaaaggttcaacatttggctgat

SEQ ID NO: 52984 - DNA, 902 bp, Populus trichocarpa
  Intron number 4 from transcript POPTR_0017s10670.1 (locus POPTR_0017s10670) derived from phytozome v7.0 (chr-ID scaf fold_17; pos 10143144 to 10144045 reverse strand)
attttggtaaagaaatggactggaaaaaaaaagttctctcttgattttgtggcaacaagtgctattgtatcggtccatttcttcatttcttttgttttgcaagttcaaaccctggaatttgttttgattatcaccatggaacattcttctttaagaagtgaagactctgctcttaaagcttccagccattcagccattcttcactaaatattattttgaaactttcgcgaaaatgatcaatatgtcatagttggtgtatttaaattattttgcagccaccaatgaatgaggttgaagacccagctgtcttagctgctttgcccccattaatgcaacttgatcttctggtatggtttcttgatcagacgtgctgttcattccatctttgttcgccgtgttattttcttacctctgccgattaataaggtctcttatgtagatgagagagagatcatttgcagaaaagggaaaaagtaatcaagacaagcaggtcagttcttgaatgcctagttgtatattgagatttatcttaatatgacatgtggtacagcttgctaaaaatgcgtgcttgttgtgctaactaagagcctgtgttcactgtgttgtgtttgttttgtctgatttgtactttggaatgatgctaagtgtttaatttttcattgaagttggagaaccagaatgacaagcacaaaaataatgcaaagggcaaggaaattttgtcggatcatactgaatttgaagggagcaatatgggaagagatcacgtggcagcagagagttacaatcaggagaagttagatgaaatgtaagctgtcggtccaattttcatactatgctctttccaattctggtttaatattctgttgattgcgttgactagttagtttaggttggcagcatct

SEQ ID NO: 52985 - DNA, 899 bp, Populus trichocarpa
  Intron number 3 from transcript POPTR_0006s29040.1 (locus POPTR_0006s29040) derived from phytozome v7.0 (chr-ID scaf fold_6; pos 26527558 to 26528456 reverse strand)
acaagggaacaggtatgcaagtgtcctttgttaattataggagtactatgattggttccgtccattattcttctttgtaataaggaataagggaaaagtatttttcataacattctaattcttttcatattgtgctttgcttcttgaataacttagacacgaacatgtaaggaaattttgtgtttggtttttttaactgctttctgctttgtcttacattatccttttcttcctggataacattagacactaacatagtaggcatgcttttggtagtgcacaaagtcagatatcatttttggtttgatatcacaatgcagtcagcttgcatctctgttgttatttaggtttcctttcaagctggttctccgtttatagaatagatctctttcatgcagttggcattatatgcaaagattctggagtatccattatggccaagtctctttttgcatcattgccacatcagacaccacaaaaggctgtagtagctcagcggcggaatgatgattttgtgacagaggagggcaataacttccaaaagcttgggaatttccaaggaaaatttgatgaattccataaggcttttagtccccataaccgctcccattttgatataggtccgaacatgttttataacaggatgaattgatgaaatcagtagatattaaagacccattttctttaacttaagaatccttttggatgaagctgttatatatatatatatatatatatatatatatatatatatatatatccagctgatggctgttttttgaggccattttgccattttgcttctcaaaactatcattagatctgtggcttctgtgtgtgtactgatgttgcgtatattacttatacagctcctttcaagtttgatttcccatctccag

SEQ ID NO: 52986 - DNA, 397 bp, Populus trichocarpa
  Intron number 2 from transcript POPTR_0006s29040.1 (locus POPTR_0006s29040) derived from phytozome v7.0 (chr-ID scaf fold_6; pos 26528572 to 26528968 reverse strand)
tagaagatcaaggttagtatagatacgttatattaattattttttgggtagcattactaataggaaaggtatgttgaaaatcactgagaaaaagattggatttttaagagatttgatttgtggttttctcgaattacaatttcaattatccaaataacctttctaatgaattaattaggattttctgttttttttttttttcataatgagtgtaagaatagaaaagagcttttgaatttgtgcatagaaatataggattatgtacatataagtttatgtttattgaaggggacatgatgttgatgttcttcaagttgttgatattgtaattgctggttgtttggaatttatttgtgtaacagttgaagcacctgagcctaagaaaaaaacgagtagt

SEQ ID NO: 52987 - DNA, 486 bp, Populus trichocarpa
  Intron number 1 from transcript POPTR_0005s26650.1 (locus POPTR_0005s26650) derived from phytozome v7.0 (chr-ID scaf fold_5; pos 24571353 to 24571838)
tccatttgcaaatcaagcatcttatcttggctcaggtactccctctctctttcaccttttgtatctgtcgtctcaaaactaaatagtttcagttcttgaacaactcaatcgaagaaggtagcccgcaatttattattaaactggacaattaatccgtttttaatctggattttacaccaatccagatcaatattagggtttagttcttttgaaggatggaaagtttgattttttttttgttttcattcaaaaagatcataaattcgtttttctatatgtttttttttaataattaaattccatgaaatccaagtttttatattaggaggattttgttattttatcttcttaggttcttgattgtctgtgttactctagttgtgattttttgatggatctgttcgttgccggggtgtatatttgttatatgtaattgtgtgtgttaatgtaggatcttgaggttttttgacttgttgcattagcttg

SEQ ID NO: 52988 - DNA, 578 bp, Populus trichocarpa
  Intron number 1 from transcript POPTR_0017s14250.1 (locus POPTR_0017s14250) derived from phytozome v7.0 (chr-ID scaf fold_17; pos 14377994 to 14378571)
tctcttcctccatcttctgtaagatttatgtcttcctcaattagccatgattagccccatttttttttctgtttatcaagttaaatttgctctttctttaattagttttcaaggatctcgggtctctgttctgtttctcttgaaattgctttagagattagatatggatcctgctgtgtatgttagttttacagcttaggatgcgagtagaatccttgatcaagttgatcatgtgcaagcagtcgtgtccaattggactccattggtcatattgcacaccattgaccataagagtttggcaatatatgcatcacagaaagtgacagaatgagaaacaatgactgtccttttcatggttgaggtgccccatcagaaattgaacacactagctacaagaacacttctttcttttggttttaggggcggggtgtcctcgggcaagctttcgcggatcttatcgagtttgttttgtctttctttgattttggcagaaagaaaccgactctaatattgtaggctaattttatgtttttttttactcgcatcaggtgagcagtgtggtggcaaaggtcacagca

SEQ ID NO: 52989 - DNA, 780 bp, Populus trichocarpa
  Intron number 1 from transcript POPTR_0005s16980.1 (locus POPTR_0005s16980) derived from phytozome v7.0 (chr-ID scaf fold_5; pos 14019053 to 14019832)
acacggacccaagtggacttgggtccttgacttttgtttaggtctatagtgcagtcctcttgctgcttatttagctgtcaggcatgaccgtgcccgtgttatagctctcggtgcctttctttgagcttttcaagttaaatcaatttcttgaatttttaaatttatttgttaataaataaccaaaagcaaattcctcagagaggagactctttaatgtgctacggtaatttctcatggaattaacattaaaaataatatttcaaaaataccatttaactctgattttgcttgaatgaagtcttacgaatgtgatttggtgggaaaacattattatccaggattaaacatttaggcgtcataatgcatgctcaacatgctctagatgggcaattaccatggaggcatatgaactctgtggctatttaaaaagaattgtggacgtcgtgattcgctgctgctgctactgatttattattagattagtctgctctttgtatacataagcttgtcaacagctgctatctaaaaaggttttttgtaacaaaaaaaaatgattttaagaacaaaatagtcaagacagtttattttcattagaaaagaaaatatttgaaaatagagtacttccagttcatgtgttcgagaattagtctcaaataacttttggtaggcaattatcaagaaaagtagcccttggcataccagctgattgtatgcctttccaagccattcagcttttctcaaacaggtggctgtttctagagctttgaaaggcattggcct

SEQ ID NO: 52990 - DNA, 425 bp, Populus trichocarpa
  Intron number 2 from transcript POPTR_0017s09490.1 (locus POPTR_0017s09490) derived from phytozome v7.0 (chr-ID scaf fold_17; pos 8108840 to 8109264)
taactcagtcgagaggtaatatattagtgggtagcacaaacactcataggagattaaacttaaaatattgattataggcctggataataacattttgtttttcttttcaacaattttgtattctttaaggtttaggcaccattcttaacctttcttattagattgatgactttatgtctgtggatgtgtttctatttagttctttacattgaaaaaaaatatcaatactaattttaaataaagatcaataatcattgcctttttggaccacgtctaatcaaacttgaagaagttttaaataagtaactcaggctttatagtttatacacgtgcaaaaaaaggcagtctttacttatatttagctttatctgtgtgcttatatatataaagaagacaaatttggaggtgggtttggtgtgttattg

SEQ ID NO: 52991 - DNA, 558 bp, Populus trichocarpa
  Intron number 4 from transcript POPTR_0017s09490.1 (locus POPTR_0017s09490) derived from phytozome v7.0 (chr-ID scaf fold_17; pos 8109481 to 8110038)
gctttctgggttatttctgtcgaaacaggtaaaaggttaggtttcccaagtgtaattattgagttgtttttagttattaaaaaaaaggctaaagagaggaaattgagctcttctgttttgcgggtagataaaaatctgagcagaaagagtgaaactttgaaagatttgaagttatgcaagtgagggaagatattaggaaacgaagaattgagtttttgtatggtattttgattgaaaagaggggagagtattttggttagttatataactaacgaaaatggagaaccccttctcgtcgaaagaaatatggatgggttattgcgcttggccaagagctcaaatagatagtgtcccacctttcgatgattctcttaggaattcattgttggaggacccatttaactacttttcagagcttaggagttttgatatgtatgctggatggtgcgacagcccgtcagctatggatcaaatgcttgccttcgatgagatgccatcttttccatcaacatcctatgtgcagaaagttttgcagaacaaacttctgctcccttactg

SEQ ID NO: 52992 - DNA, 1047 bp, Populus trichocarpa
  Intron number 1 from transcript POPTR_0005s17820.1 (locus POPTR_0005s17820) derived from phytozome v7.0 (chr-ID scaf fold_5; pos 15567624 to 15568670)
acacggtgtgcccgctgtaaagctgttagatattggtatgttaatttcgtgttaatgcttgatttttatcgggttttagtccttaattgcgttgaattcaggtttggttctggggagatttgaagtttttgtttttgtttttgcttttttcttgtaattaagtgaatgagagataattgctgatgataatttgtaatgattttgaagggaagctgttttaacagtaaactttgagaagaatctgattctttacttcgcgttgttccagttaaacagggaaggggaaaaaactgtggaattaggtgctaattgatgaagggaattcccaaatagaggtttaatctgcgtggaaatccttagggatttctgacttactaaactaattatcaatgtttattaattagatgctaaatgtgggatttaagaatctttgctgaccagtttcttgttttgcgtgggttgtattagagttgttaggtatatgggaaactaaggaaaagacttgtattgctaactgaaaacattttagtttgttaaaaagagagtgtggtgagagtcaatacttgaaggaatttgtagagattttgtctcaaattaatcattatctgtacaactggtttcatacacttacaaatcactacttgtttaactacaatctacttttttatcgttatatgaaattaaattcccaaatattgcaaggtggtagcttacctggattagtatgaaatgcttgtttgttataggtaaatagtgtttaattccagtattactctgttatataattgtacaaagtttgtttgcataatcaggggtattctagaatttaatgtcatttagtgcactaacttttgatgaaacatattttataaggacctaatagagatcagctaacttgtgatgtgctcttctctacaacctataagactattttttcacctttttccttcctacttggtaggcttctgttatttgtatttgtatattgatgtcataatttggtctgtttcagttctggcaagtgtcaaattatccactggcgacaag

SEQ ID NO: 52993 - DNA, 713 bp, Populus trichocarpa
  Intron number 2 from transcript POPTR_0005s25460.1 (locus POPTR_0005s25460) derived from phytozome v7.0 (chr-ID scaf fold_5; pos 23709611 to 23710323)
atagtgataaggtgaagaacataacctttgatttatttctttacactgtttcatgtatgtaatgtatctgggcttaagactcgtgctagattaagttgttgagtgaatctcatttgaatggttttcttgctggttatgattgcagttcctttattggtgttctagtcttttttaagagtttaagatatatgcaaggatgattattggattggataactgtgtagtgatttctgcaaatgggttttggtttcttgcctatttatatggtaaacaaatgcttctttgtttgttcatctgttttggaaagttttctaattgtaaagttagtgattttgccctgtaatttttgttgctaagatctcaacatatgacctgcccacaggccacaactctattgaaatcaattacctcttgaactgaggccctaaggtgaaatgttgattgttgactcatacctgtgaagataatcatgactatctctctattcatatcacgaaatgttttattggaaggcctttctgcatagtttagatttattaaagaacttgctcaacaagaattctagactttgctatagagctataaaataatcaacaacaacagatctatggtttaccactactcacgtttgattttcacttaccctaaaggagccttgaactttatgatttaccgcaggttttaattcttggtcagaccggggaggaggtcag

SEQ ID NO: 52994 - DNA, 616 bp, Populus trichocarpa
  Intron number 4 from transcript POPTR_0006s09930.2 (locus POPTR_0006s09930) derived from phytozome v7.0 (chr-ID scaf fold_6; pos 7360098 to 7360713 reverse strand)
ttcaaaactttttgtgaagcccaaaaccgtgaagggtgagatctcttccacactttcatagcaaatttgtatctttttcctttcaatcaatagtaatttgtaagtcttatccagttccacttgaaagtttgtctatcataagattcttgactgtttatgttttgatctatcaaaagtcacaaaaggaatttacgtgttcaagttttcttttgtgtttattttttcctgtgacagcagagttcctttggattccagaattgttaaccttagttggatggtagtggatatgaagtttgacaatttggatactataccagtaaatcaattagtttaataggttttcatgagatactcgtgtttcaggaatggtctatctgctttccttgattgatcatagagttaggatggagtcctataagcatctgttgtttcattgaagttaaaaaaatcattgactggtgaagtattggagccgtgatttaccagtgtgttatttagtgcagccatgttgatcttgctgggtattgttcgtcctgtttttttggctcttacccaagtcttatgatagttgcagaggattttgattgacctaagaatgttggtgcaggtgtttgag

SEQ ID NO: 52995 - DNA, 918 bp, Populus trichocarpa
  Intron number 2 from transcript POPTR_0017s07350.1 (locus POPTR_0017s07350) derived from phytozome v7.0 (chr-ID scaf fold_17; pos 5707214 to 5708131 reverse strand)
ttccaccagattttggagagattggtgccatttttgttgaaaatgagcaccataaagagatgtaccttcatgatgttgtgtttgatggcttccctactggaccagttcatgtgacctgtgattcatggatccattcgaagtttgacaataaaaagaagagactctttttcactaacaaggttagttactttcttataataagattgttattattaaagaactattttaatttaaaaacttaaattgttaggtcaagttgcagatattatttatatttttttctaacgtatttttttaagtgaaagctctaataccataccaaaaaaaaatgaaaagaaaccatctcaacctaaaagtttaaaagtggttggtgatatcctaaaatataatttatattattttctaatagttacttacccttatgtgatccaagtttttttttttttaatttgatgttattattaatcaattatcatgttggataatattttttcttaatatatatatatatatatatatatgtatgtatgtatgtatgtatgtatgtatggtactttatgtacaaatttttttcttaaaaatgtttgggtggcatttgtggatgttatgtgtgggctgatccaattccattctgtcagttcgaatgttctgaaaatttcaactttatcacactaataatataaaataagaataaattaaggaaaattataaaaaaaaatattaaatttacattaaacgttatgttgaaagagtgaataactacaaaaacaatacaaaagatttcatgtgataaaatcacaggatataatccatcggaggagctgacatgtatactttacatgctttaactcaacgttcatgatttatatttttttttctcacgataatgtcaatattaccatgtgaagttttcaggtc

SEQ ID NO: 52996 - DNA, 1013 bp, Populus trichocarpa
  Intron number 1 from transcript POPTR_0017s06960.1 (locus POPTR_0017s06960) derived from phytozome v7.0 (chr-ID scaf fold_17; pos 5421428 to 5422440 reverse strand)
tatatacatgttatgtttgactcgggttttgggtcgagttttatgatatttatatcgtattcattatctattaagtaaaataactataaaaaaatccatatattcgagtcagattaaattaatatttatcatgttcggattattttgtcattaatgaatatttaagaaacaagagtcatatatgaagtatcacacctgactacaaattgaaagagcgatggatattgtctagcattaaagtatagggattgaaggtatttgaaagtgtggttgtagttgttttttaaagtgttttttatttagaaatatattaaatattttttttattttttaaaaattatttttgatatcagcgtatcaaaatgatcagaaaacactaaaaagatattaatttgatgcaaatatatttttttattttttaaaaattatttttgacattagcgtatcaaaatgatttgaaaacactaaaaaatattaatttgatgcaaatatttttttatttttttaaaattaatttgaagcaaagaaaaaaaatatttaaattttttcaaaagcgcttttgaaatgtaaaaataaaaagaaaatttagagttgcgttaattattatgttagcggttgtttttcaaagctttttttttgaaaatacatcgaaataaattttttttttaaaaatttatttttgatattagcatattaaaataatatgaaaacataaaaaaataattaatttaaaataaaaaaatatattttttaaaaaatcggttctaaaacataaaataaagaggttgttaatcaaattttaaaacttgagagacaacacagtaaatttaccacaatgaagtacaagtagtgaaattgcaggactatttaatccatgtcaatgtctaaagccggtgaatcggttctgtttgtaatgatttttcgccaacaattttccaaaaccctccctggaataagagcgaaaccttgcataaaacgaagttttagcactaacaaaactggcgagagcagcc

SEQ ID NO: 52997 - DNA, 420 bp, Populus trichocarpa
  Intron number 1 from transcript POPTR_0017s00400.1 (locus POPTR_0017s00400) derived from phytozome v7.0 (chr-ID scaf fold_17; pos 124765 to 125184)
ttccaccttcaccgtcagcagccacggcatcgcaggttcctatcttgcccgcccttctcttttcctttcatctttcttaaatttcatcacaggtttgttttctttttgtactctcttgaaaactcatcatatgctagctttgatagagtttcttgaatctacttcaaaaatcaatctttatggtaacccatgtttcttttttcttctgactttaatgctctctatgctttatatgtttaacagaaatcgtactccttaaatcctgttagcccttaaacatgtaatctttttggattgatgtgtatgttggcttctttgtttaatagaaagatgataaacttattgaaactgattgaatcttttatcatttttgcttggaatccagttgggttattggggacgacgttgcttggtacgaat

SEQ ID NO: 52998 - DNA, 889 bp, Populus trichocarpa
  Intron number 1 from transcript POPTR_0005s00830.1 (locus POPTR_0005s00830) derived from phytozome v7.0 (chr-ID scaf fold_5; pos 382335 to 383223)
tccttacgattttacgatccgtttttacgatctgagtttgtgattttacgatcatcaaaactgaggaagctgaatgtccttcaactacgttataatgaatttaatgatgacaacattttatcatgtttgaggctttcatctctcaactctttggatctatctggtaattatatgtggacaggatcaggtaacatttaaattatctagttttgaacccttttcttttgttctttgtgtataatttttttaatgtgtttatttgttttcaatctacttttgagaatcatcttgcaggttttgaagtcttgtcatcaagattgaagaaattggagaaccttgacctaagttttaattttacaatgatagcatcttttcatctttatctgggctttcatctctcaagtctttggatctatcatacaattggttgacaggatcagctggcatttatggtaacagctaaattatctagattttaatttttttcatcagtgcaatgatagcatttgtttcatttcttaatggattttgatctcttaaatcttgagatctattagcgaatatgccgactgcattttctagtagttgttaatcatctaggtggtggcctagtggtaagagcttgggaccaagaagtttgctccctctgtggtctcaggttcaaaccctgtggttgctcatatgatgaccactggaggcttacatggtcgttaacttcagggcccatgagattagtcgaggtgcgcgcaaattggcccggacactcacgttaaattaaataataataataataataataataataataataataataataataagacttacatgtagcaccaactctcttgcaggtcttgaggtcctatcatcacagttgaggaaatta

SEQ ID NO: 52999 - DNA, 705 bp, Populus trichocarpa
  Intron number 5 from transcript POPTR_0005s27500.1 (locus POPTR_0005s27500) derived from phytozome v7.0 (chr-ID scaf fold_5; pos 25133945 to 25134649)
ggttagagtggatagctgggacaatcttgcaattagtaagtatttaataatattgcctgttcttaacaatattcttgtctcttgttgtggcttctgtgcattaaccaatttgtccctggttgtcatgatgttcctccatttctttattgaacttgatgtctgatttgatgtcatgctttttgtgcgttcatttagtttcaaatgggccatgtttgataaagagaatgtaaaatgatagtaggactaggactactatcttactcttggaataggattggtagcttaattgtgaagtgcaactagcgttagattaatagatgtgagtttaagatttggtgggaagctgaaaacaaagatcttgatcacctcataacagaatgggaattctatttaagcagaagagccatatccttgctctggtgagtttgttttcctttttaggagaatgggattggaacaccacaaaatttcttatccttgcctttctaggaaattggaatcactgccttttcccacaattggctcacgcttattagttgtgatgccaatggttggccctaactcagcatttttgttatatgttctttgtttctctgcctttgaacttttattttcaactgaaactactacaaattttttaagttgtttttctatttttatcttttgatagacaagcaagaagccaaggcatattcaaaagatata

SEQ ID NO: 53000 - DNA, 725 bp, Populus trichocarpa
  Intron number 1 from transcript POPTR_0005s07130.1 (locus POPTR_0005s07130) derived from phytozome v7.0 (chr-ID scaf fold_5; pos 4779795 to 4780519)
tcaaaggttttcattttcaattccatcttccatcatatacttcactttcgattgctaaggttcttttgcatatagccttatcacagaaacaatcaaggttcaagttcaatatggtagggttaagttgatgagtttttgctgatgagatatttgtagacaagtttcagtgttttaatctgaagcattgagattcatttaccattctatcactctataggcagagaatcttgaaccaacatatcataactatcaagccaaccatggttggatgttctttctcgcaaaattctcgactttttgttaatttggtactgaaactaactgtttggacagagattctatcaagtcaggttgcttgaacagatcttcctgcagcagagtacttttgtttgtttgatttaaataatgtttacaatttattgatcctggaaacaatgatagtgaaatcacttactctagactagtttcgttgtgcttcaggtcctttcttcatcatttaattaaaaccggtcctttcttcatcattaattaaaaccatatttaccaaaagcagaaacttcaaggcaagctattgaagtcttgcttagcatatatgcccttctgcatgtgcctatacttgcctgaatatatttgttgcagacatatgcttgagttaattttcatgctgtttggctaatgtgtgcatatatgcgctaaaatttgcgtctgtttcataagctcctcgc

SEQ ID NO: 53001 - DNA, 571 bp, Populus trichocarpa
  Intron number 1 from transcript POPTR_0017s07570.1 (locus POPTR_0017s07570) derived from phytozome v7.0 (chr-ID scaf fold_17; pos 5894425 to 5894995 reverse strand)
gttttaatctttttctcattttctgctctattaaggtatggtgttactttcacatccttctttggcattcttctttgtccagtttctgtttgtttcttgggaaaataagaacacaaggaaagtgggttccttttattttccttttcttttttttgggttagagagaatgaatggcattaactagaccaaacccgcgtatgtcttagcttcatgtgaactgtttttttgttttttgttttttttttcatttttagttccttttttcgccagtatacttaagaaggtgggtttaataacattcaagcaaacaagatgggttttgtctgctttgcttttagttttgtttactctttcttatgttggttgtggtgttggtgacttgtgtttggtttgttgaagtggagagtgtagttctgttaggtactaaagaagtaaaatttcatatttgattatgggatctgtcagtatattcctttatgtgaaactgcttaagcaagtattggccttttatgttttgcttaactctctcattctcatgttgggatgattgtaatgtttgcaggttttggtt

SEQ ID NO: 53002 - DNA, 942 bp, Populus trichocarpa
  Intron number 2 from transcript POPTR_0017s05870.2 (locus POPTR_0017s05870) derived from phytozome v7.0 (chr-ID scaf fold_17; pos 4557348 to 4558289)
gtcgaatcgcttgcgttttactttgtaattattttatgaggaatctcaatttctgttattaatttgctaaatttgtagtgttgaggacgtaaattggaaaattaggcaatttttttagaagttttttaacttaatttttgttaatagcttgccaaatttgtagttttgttactattgtttggaattatctgtgtgttttatgaatatatggtatgtaattgatatgagttgtttaggaagaaagatttgtagttttgttaatattgtttggaattatctgtgtgttttatgaatatatggtatgtaattgatatgagttgttttggaagaaagtttttggagtaaatgctagttttggttggcatggaagtgcggtttgttctcgaagaagtatgattcggtttctttagtatgttgtagaaaatgtttttcgaggtttttgaacttatcggcatgctttatttgccaaattcgtagtttttgttttatttgaaaccatccacgtgttttatgaatagttggtatgttaatttgctatgagctttttgaggataaactttgaagtacttactagtttttgttaaataatgaattttggatctgattcgattgagtgcagttcattcttgaagaagttaccattttgttttttaatatgttttagaaattgcttttttgttatttttgaacttattcatgagttttatatgtatttgaggaggtagttgtgaaaattaggcaagttttagtattgttttgcatggtatgctaatggcatgagggtttgaatttttgttcttttttccgcgcacagacagattttgagttctgcatttgttttgatatcagttaaaatgtttttgcttgttaagtacactgaaacactgatgccttgacatatttgcagaggaagggtttgagtttggtatcatctagcacaag

SEQ ID NO: 53003 - DNA, 421 bp, Populus trichocarpa
  Intron number 1 from transcript POPTR_0005s05720.1 (locus POPTR_0005s05720) derived from phytozome v7.0 (chr-ID scaf fold_5; pos 3750484 to 3750904 reverse strand)
acctggacacagacttccagattcattcctctcaagtgaaatgggacatttaatttgggtggctgtggatttttctgcaccttttttctttctctaattagtttttcgatgaattgttgtggtgaacctgtgatgattacatgaggcatatccagagaagatatgcgattgcatttgagatcttattatcatttcaagctgttgcaaatacaattgtgtttgtagaatatgcggattttaatttcactttgttcgctgctcttactacttgttgttttttgtttgatttcttttttatagtgtatttaataagagctcaaaagttaacttgtcataaactcttgttttatcttatttgcataaagtttatgatattatatttggataatcatgtttttgaatgtgtgtgcgaggtttagat

SEQ ID NO: 53004 - DNA, 491 bp, Populus trichocarpa
  Intron number 1 from transcript POPTR_0005s02530.1 (locus POPTR_0005s02530) derived from phytozome v7.0 (chr-ID scaf fold_5; pos 1621712 to 1622202 reverse strand)
cttcattagacatcttcagaggcctcactgttgctgtatgtatctatgtctctctcaaaagatatttactgtctctgttttgaagtttgatgaactcagctgtcgttctatgttaagcactcagtttttgtgcttcacctcatcgtttgggtttttggggagtggggttttcttcaaaccgagtgcgcacatgcttagattttctatttattacatatgacttgcgaaatagtacaattgggtccatagctcagtggtagagcatttgactgcagatcaagaggtcaccggttcgaacccggttgggcccttttacagtttagttttttataaaaagcaattgccactttagtccttataccttttgtctcaattcccccccttaatttttttgtactgtgtctaggcatccttgtaaaaaaaatttatgaaaccttaatcatttatttatgatactaaatttgtgtcttttgatgggatcaatgtagtta

SEQ ID NO: 53005 - DNA, 666 bp, Populus trichocarpa
  Intron number 1 from transcript POPTR_0020s00320.1 (locus POPTR_0020s00320) derived from phytozome v7.0 (chr-ID scaf fold_20; pos 367459 to 368124 reverse strand)
atttccagactttaggagtccctcctttgcctaaggtaattatctatttgtgcttcttaataatcactgtaaagcttaaattagtgtgtctgaggggttttttgtttgcttcagatgaaggttccaattctgcttatgctgtactgaaaagtctcactttaaaaaagccatgtggttgcggtaggtttcattggtttaaactacaaaaagatctaaaaaaaaaaagaagcttttttgctcggattgctggcaaacaaacacaactgttttttttttttaagaaaaaaatctttgttgactaattgtgttttccctttaggttcctttgttgatatatgcacgagtttaattgagatttcttgaacctctgtttgatttcctcatcactctttttttttttcttttcttttttttctatgactgaaaattatccagaaagttttatgtgggaaaattaaagtacaagcttgataagtcattggctataaattttagttttctaaaaattaaagttccaagtaaatttgtgtagatttttagtgttttggaattatgatgttcttctccatatgaaaaatcttagttgctaaatactagtcaaattttgtccatggactgctgtggttttgacctggttgaggatgtcattcttgaatcagaatcgta

SEQ ID NO: 53006 - DNA, 421 bp, Populus trichocarpa
  Intron number 2 from transcript POPTR_0005s20650.1 (locus POPTR_0005s20650) derived from phytozome v7.0 (chr-ID scaf fold_5; pos 19741744 to 19742164)
gtgcccttgttattaacattggcgatacctttgtaggtatttaaaaaactgctataattaatatgcatgtgttcttttcgtttcttgtctaaccttttcttttccaataattttcttgtctaattggcaatgctcatgttaaacgacacacactcgtggcatgcttctatattaacattggcgatacctttatggtaggtattaaaaaacatataccacgtgtgtatggtaaacgtcatgtgtggattatatgcatagaaaaagtaatatcatgcttggatcctttatatcataggaattacttgatttattttaataaattatagcaattaactgtgaaaaaggaacaacagtcgtgcgtgtaattcctgtaggttcctcctgcttttgctgattttgtttgattcgcaggccttatcga

SEQ ID NO: 53007 - DNA, 340 bp, Populus trichocarpa
  Intron number 1 from transcript POPTR_0005s11690.1 (locus POPTR_0005s11690) derived from phytozome v7.0 (chr-ID scaf fold_5; pos 8522042 to 8522381 reverse strand)
caaaactctctccgatcgcattcgctctctctcaggtttccacaatttttttcttcccgaattaacctttctcgttcttgtttattaccttgataccaattttttatttttttttaaataaatataccatcacttagtttgattattcctgaaaagctaggttttttttttttttgagaactagtatttgtttgtgttactgttatttgtgctaatttttgttgaagttaagggttaatgtttgaattgttactgttaaatgattttgagagtttgggttttggcatgtttggtaattattgtagaactccaaggagaagataagagtggggatttgccg

SEQ ID NO: 53008 - DNA, 409 bp, Populus trichocarpa
  Intron number 1 from transcript POPTR_0005s20800.1 (locus POPTR_0005s20800) derived from phytozome v7.0 (chr-ID scaf fold_5; pos 19952177 to 19952585)
aaactcacatacaggaaaagaaaatcacttcacaggtaaaaaaaaaacgtttacatgatcatcatcgctagaagaaccttcaatatttctttgctgctttgatcctgtcttttatttatgtccttcttgaattattcaattcttctttctttttttttttcttttagaatctgttggtaatgaattaaagatttttttttaaatgatctttgattttatgtcttgttaatgattcttaatcgttgtttgtttttctctgttatcacgattttaacgaggtttttgactcttgggttttggttatttttctttgtattttgtcgtttactaaaattttgcttcttttatctcctaatcttttcaactatcgatgacagaaacaagaaagaaagagactttcccacgtgaa

SEQ ID NO: 53009 - DNA, 647 bp, Populus trichocarpa
  Intron number 2 from transcript POPTR_0005s20800.1 (locus POPTR_0005s20800) derived from phytozome v7.0 (chr-ID scaf fold_5; pos 19952832 to 19953478)
ggactcacccatctctgtctctcttggtataacctgttttctctgtctatgataatcaatatgttgttccagctgtttctaattcttttgggtttttcgttttgtttatgttgtgttaattgtgtgtcaaattgttgttatcttttaatcagggccaggataatcatgctatttcagttattagagtgtttcatacctcactagagtttgtatttggcctctgtattagagcaatttgtcctgggttgtcctctgctctgctccgaggccatgatcaaaacattgctgattagttacatgcagtctttgtgaacttgtaatcgtaatttaatgttggtggcacttcaataatcagttgaataaatgaagagatatgcgaagatagtttatctattttcttgtttgcgtggggcatgctaaagattaagttgaggttgatctgcatcaagattttagatttgttctattgaatccctaagatgtttctaatcaagattcgataccttttgaaatctaacttcttagaaattgtttctgcatgttgtctggtgttattttgttgtctaatctgttctgaattcattctccttcatctttggtgctgataacatcttgaattaactctttccttcaggtgcaaaaacaac

SEQ ID NO: 53010 - DNA, 944 bp, Populus trichocarpa
  Intron number 1 from transcript POPTR_0017s02890.2 (locus POPTR_0017s02890) derived from phytozome v7.0 (chr-ID scaf fold_17; pos 2094447 to 2095390 reverse strand)
ctccagatctcaccccgatctttgattctctacaggtactcaccctctcctcctctctcggtgttgtgtttttagggtttcgaatattccagggatcttgacttgtgtttgttggctgagttattgacttctgtagctttttgctttaagggacttagaagttttcttttattttctgcttttttgggggttttttgttatttttcatttcagaggctctgtttgtttgtttagggatttgaagctgtgggattttgtgaattttttttgaaaatcttagatccgtaatagcaccaattgaggtttattttgttgcttcacgcatgattcggatctaatatttctcgacgaggaatctttgtatagtgacgagaaattggagtgaacaacaaaaaaccataatttaagggtttcttgtttgttcttgaatggtcaatgttttagtccgagtgtttgaacttctgaaattcattttaaaactatttaaagttgtttttcttgtttttttgttgttgtaaagttattttttctgtctcttttcctattagaaattggagtttcagcatgctagttagatttgtttgttttatgttgttgactgagcattttggtaaattgttgggttttttgtgacttttttcagagatcgagactgaattctattactctgagtgttaaagttacaatacttagtatctggcacaccattgcttgcctatatatagtttctgttgaaaatcttattggtgtggtggagacattaacaatatctattgttaatatgtgctctctaagggttgtgttgtaagggactgttggtgaatgttgactaagcatgtattatttcttatgccaatgttttgatactgatcattgcattgttttttcctttgtatcttcacatagcaggtttacctactgctcattttctcaaaaacgtttgt

SEQ ID NO: 53011 - DNA, 710 bp, Populus trichocarpa
  Intron number 1 from transcript POPTR_0017s08930.1 (locus POPTR_0017s08930) derived from phytozome v7.0 (chr-ID scaf fold_17; pos 7575967 to 7576676)
atacgcgtcgctgaaaggtgcaagcgtccctcctggtgtgtgtgtgtgttagatgcactaaccatttttcttttttaaattatatttataataatcaaaagatcaaattgcatttaagataacttgtcaattaaaaaaaaaagaaaccaatttgaaaatacaaaaaatctattgaatgcaatgttgacaatatttgcttttaaaaataatataatttttatattgtgtttttaaaatataaaaagattgaattcttctcattaaatcttttaaataattttactattctttatattatgtattttaaaagtaaaaagatagaattgtccaatcaatcttttaaagtattttttgcttttagtggtgataaagttcaaaaggtgaatagactaaattgttccaattgatctcgtaattataaatggattatacgggaaaaaccataacactactaattgcaagtgcattaatttttttggtggaaagataaaatagtaattataatattatgttgaataatgatatgtgcctacagacaagtgaattttctatgccaatcattttttttaaaaaaattaattttaattttgcagcgctgcttgtacattcgcaataccaaaagattttgactacagtcacaaattgtgcccctgcgggaaggaagtgtgcattaagagacgaacaaagcgttttatatagaagtcaagtcc

SEQ ID NO: 53012 - DNA, 724 bp, Populus trichocarpa
  Intron number 5 from transcript POPTR_0005s11330.1 (locus POPTR_0005s11330) derived from phytozome v7.0 (chr-ID scaf fold_5; pos 8206425 to 8207148)
caactgctgatcttcttagtgctgtaagttcatctaaattcattcgacaagtgtccctgccctggttctcgttttgttttgtgcctaattttttgaacactcatgagcatgattcgtattgcagctttgttgtttttaaaatattttaaaataatattgttttatttttaaaatttatttttaataaaaaaactaaaaaaaatattaatttaaaataaaaaaataaaaatattaatatttttaaaacataaaaacaaaaaattaatttgactagtattaaccattatttttcttccaaaaaccaacaccatctctcctcacgaagtttttccatcttaattaattgttcatgagactgagttttgttagaatatggcatattcgaaagtatggtaggctgcgaataatttgtttttttaagtgtattatttttggaaatatattaaaataatattttttattttttaaaatttatttttaatataagtatcaaaataatccaaaaatgataaaaaaataataaaaaataatctcaatttttttaaaaaacaaagctcaaccgaatttccaaatgcactttacaagtatccatccaagttataatgaactcatgatttataaaagttaataaatgggttagatgctttttcaaaggattgaagagtgagagaggttgaaagggtgagaaaactgaattgttgttgaattgggcagggtttcaaag

SEQ ID NO: 53013 - DNA, 851 bp, Populus trichocarpa
  Intron number 1 from transcript POPTR_0017s09870.1 (locus POPTR_0017s09870) derived from phytozome v7.0 (chr-ID scaf fold_17; pos 8588140 to 8588990)
tgtgtacttgtgttttgtccggagaacatttcttggtacattttttggctttgctttgttgggtgtgtatccattttggtgttttttagacttttgaattcgttaccaatccaacccatgacactgcattttctctaactcttttggctattttgattatacttctcatcttcatagattttttttttgttatgtgttaattcactctcttgttttgatcaactggtgataaaaagtgttctttgatctcaaacttaaatagatcttttgaggttggtgaatataataatatatactgttgttgaatttgaatcatagtcatgttaattcatttgtggaatcttgatcaagtttgattcatggcatagagctgtcaagttttcatctgggttttgcttcgtctatgttgttgtattcctataactaatgccccatttctggaatctaatccagccatgacaaccgtacttctggtttcaaatactctttaatcttttgggtcgaaagattgattctttttgttagttttgatcaatttcagtgcatagaaatgattaattgatctaatttatctgggcaagaaccgctgcttctaggtctgttgatggatattcagtcatttcctagtagcatgaaagatttgttgttgggttctgtctctcagggaattcttttttcttttgtcgaggtgtatccatatccactcatatgtttagctgttgaaaacaaaattgtttgttttatggttttctgcttattggtatttttattgctgatgataacctggcgtttttaattgcctttttttttaaatgacagagaatttcaggttttgaaaaggtctttgatcc

SEQ ID NO: 53014 - DNA, 491 bp, Populus trichocarpa
  Intron number 2 from transcript POPTR_0017s13090.1 (locus POPTR_0017s13090) derived from phytozome v7.0 (chr-ID scaf fold_17; pos 13263242 to 13263732)
gacagaactgtggcaactttatcacggtaatgtcctcattaagttcatactctaaaggctgcttaatgagtttaatcacatcatgtgatttcttctattttggtgactaaaactaaaatgcaacgaaaaaaagaaaacagtaaggcttgtctctacatatatggcatgccaacactttgagggtgttccattccactcatgggatggaacctaggctttccggggactcatcaggcttatttttccttgtcaagggaaacaaatgtacacgttcccgacatacttttccttgatagaactttgagggtgtttctgctaatatgccatatattatttcttcagtagattatagatgagagatggctgagttgattggcgacgtaattctatttttgaatgttccttactgcatcttgtcatcttatcattgaggtaatgatttgtgaatggctttgctatatatgtgcaggatcgaccatccaccaaggttc

SEQ ID NO: 53015 - DNA, 366 bp, Populus trichocarpa
  Intron number 1 from transcript POPTR_0005s24550.1 (locus POPTR_0005s24550) derived from phytozome v7.0 (chr-ID scaf fold_5; pos 23071702 to 23072067)
gcaattggcgtgcactgcctaaacaagctggtaatttacacatcgctttcaaacaaaaattgcctgttaaaagcatatactcatcacgcattagtactaagaataaaatgaagattctgccacacatgtctgtgatttgaagttggaatttcacaagtaggtgatcctgttttttgtgctttaattataagatcagttagaacttctgaagtgaattctaagaaattgcatggattactaagtaaaattgatcatctgaaagttttgggaaattacaagaactgcataatgttttggttttgaatcaattctcttttcactcccttttcaggtttactgaggtgtggaaagagctgcaggctccga

SEQ ID NO: 53016 - DNA, 728 bp, Populus trichocarpa
  Intron number 2 from transcript POPTR_0005s24550.1 (locus POPTR_0005s24550) derived from phytozome v7.0 (chr-ID scaf fold_5; pos 23072152 to 23072879)
ttaggaaacaggtatgcaatgttagcatttcagtcaaactactgtttatcataatttacatggtataatattgacaacacagacacagtactgaatgctaagttaggctctaggcaagccattcagctaagggaaggataggacggcttcgccggaaaaaaaattatgcaaggaagcaaatatcattaaattaaggttaagatttgctaatggggcattgttctagagctgaagaacatagaattgatacttagtgcctcgtatggagatgggagataggctaggcataaaacacatatttctcatgtgattaaatgactttgtcattttagccgccaccccacaatctcccctagaccaaaaactagaaaaaaaaaaaaaaaactagaaaaacaaaaaactcaacttgtcattttaaagttttttcccctcatgtgattgaccaacatgtcaattttttttcatggttgtatcagaaacatgtgtgtctgaacagattcctagcagtttccatcagcgtatgcaaataaaaaaaaacacttttttcaagttgaagcactctcaaacaagattggcacactttggttaatggacacaatagtaatcattcatgtgacatgatacatgccaacaagtcatttagcattttaaattctgcaaatcatagaggatcaaaataaaggttagtgcatatcttgacatgattttctttttttttttctattcag

SEQ ID NO: 53017 - DNA, 607 bp, Populus trichocarpa
  Intron number 4 from transcript POPTR_0017s09850.1 (locus POPTR_0017s09850) derived from phytozome v7.0 (chr-ID scaf fold_17; pos 8565712 to 8566318)
ttcggatagcttcaggcaggtacttactttaccgaattttcagcaccaatgacttttttttttctgaggattggtgtgataattttggatacgggatggtaaatcgtgacatgtttgatcaatcattttagcgattttaacttggtaccccagttggaaactcttccttttataaaaggtcgaggttgctgcgtttcgctcccgctattggcatggatgaaaatgtggtatcacatttatttttttcctgctgcaattctatgcgggaaattacaagcgcagagggtgaatgatttagtgataatattgtgagggtttgtgaattttgacatcatcacaagtcaacctactgctgttagtgcactttctcgccatttagttaaatcccctataaacagctgcaaagctctactgtcatggaaagtaagaagttgaaatatttaatacatgggcatttgaattgttcttggcactatttactcctttttttctaattatttttcaatctctttgcctttcttcttctagagagggtcattttaaatgcaaattctttctagtttcttttgaaacattacttggattttttgtcaggtaaacgcttctg

SEQ ID NO: 53018 - DNA, 378 bp, Populus trichocarpa
  Intron number 1 from transcript POPTR_0017s10800.1 (locus POPTR_0017s10800) derived from phytozome v7.0 (chr-ID scaf fold_17; pos 10333399 to 10333776 reverse strand)
ttcaagtccctgacgagggttctctacatctccctctctttttattaaataaactttatcgaatttctttagggtttttgaagtgagatgtgctttggaattggataaagaaaaacaaaaatccaaataatctgacggatcatattttttttttccttgtaatcatttaattgtgttctttaaattcaactgtgttcatatttcagcgtttttcgtttcgaagatgatatgttagctttctttagaaatgtgaaaaaatgaagcaacacaactgctatggacagcttgtgaaacctccatttatgcttattcctaaatttgcaactatttcttcttcttcttcttcttcttctaacactttcttttcaataggttttg

SEQ ID NO: 53019 - DNA, 787 bp, Populus trichocarpa
  Intron number 1 from transcript POPTR_0005s22360.1 (locus POPTR_0005s22360) derived from phytozome v7.0 (chr-ID scaf fold_5; pos 21317118 to 21317904 reverse strand)
tcttttcaattttcaatcctgacagataaggaaatgtagtttatgaaggctattattggtgggatattgagccttagagagattggcctcaagttggtaagagcactaaagaggatccttaccatcccatcatacatcttcgcaatgtttgataaaagcttccatcgccatttagctttgactgtccaaatgaattttaatgtaaggaattctattgtttcttttctagtttggttttatgattaccacttttaacatttacccttggtagacctttatgatgtgtgtccactatcaaaggcgctaggtgcccaaaaggggtcatgtgagggaggtcgtgggcacgaacaagaacaatcaagcagccttaaaaaatattgttgtagaggccaagttacagagccttaaagtggtttattccacattgaaggaccaagtgtagggccttgcccctggagctgagctccaatgaaaaatcactataaactttttataaccaagtgccccctaagacgaggttattgaagcggtgacttcttaaactagtctgcaggttgagcttgatgctgcaagggaataaacccaacgttcccaggctaagttggaagctttaagggacccttataaggagtttcaaggattttttagatgattgacaactttgaccaagacagtggaatacataagatttttcttgtcatgtttaacctgtatttcttttatctcttgatgggaatgcaggtgaatttcaggttagcctttcatcccatcccggttcctgactttg

SEQ ID NO: 53020 - DNA, 622 bp, Populus trichocarpa
  Intron number 5 from transcript POPTR_0006s20510.1 (locus POPTR_0006s20510) derived from phytozome v7.0 (chr-ID scaf fold_6; pos 19530234 to 19530855 reverse strand)
tgtttactggcctacagaacctaaaagagatgtaagcttcttctagccctttgggtttagctttgtcaaaggctgcactctttagagaagtatatacactgggtcttctgttaaataaaaccatagcataattctgaagctgttttattggtgcagccttcatcagcacagtttctttaattagatcataaggaagaaatatttcgttaataagaatatcaaaccaactcattttcttccgtgttgccatcttgcattaaaaaattgtaatttgttcaaaaagctttttttctcaaaaaacttgttcttaatcaaacactggcaaggaaactggttttattatgcctttgagattttgttttttacataccaaagttggcaccataatcaaaccatgatttggttgatatttcagaacattttatataggtgggtatcctgaccatgcagtatgtcatgcaaagcaagttgctttttggtcaccttagttccctaatgttatcagttccaatgccatgcttcataatattactagtaaattcatgatcactctcatttccttgtgaaccttccatctgctgccacagcgacctgtcatacaataacttcactggagatttgc

SEQ ID NO: 53021 - DNA, 826 bp, Populus trichocarpa
  Intron number 1 from transcript POPTR_0006s00580.1 (locus POPTR_0006s00580) derived from phytozome v7.0 (chr-ID scaf fold_6; pos 305098 to 305923 reverse strand)
tatcttccctgagatacattacattccttctccttgtaagtttagatctgatcgatcattgattttcttcattttcctgtttttttgtgttgaagttctgaatctggttggtgagtcttgggtcagactcaagactagtaattaaataaattcgtggacaacttgggccatgtcctttttttctggtctaatgtcttaaccaccattaattaatggctttacttggaacaaagacaaaactactattagcatatagtataactttgttttgttctaggtgattagtcgggactttgattatgtttagaggttgaaaggtcttgtattattgttgttgttgttattattaaaaggcacaaatatggtcaacaattggcattaagaggtaaacatgggagttaatgacctagctaagctagagtgctagttgctttgcagttcagtttatcatgtaagccaaatcttcgagaatatagtactgagaagccaattatttcttgcaatttagtctagttttgaggccttgagcctggttttagctcatattttaaggcttttttttttattgtttttttttatatataagattatatcagcgggagttacaagggttgattcttcaactttgtctgcctgaatcttttgacccatcctcactgtaagacctgtgttaattattcaaagttttgtgaaagacaagaagtgggaatgcgtttgttcatggtagatcttgataatattgttacctgaaccgagttttgaatgatttttgtgccttttgtggatggtagtgggtaggcttccaaagagtcaagtgagtgctcag

SEQ ID NO: 53022 - DNA, 477 bp, Populus trichocarpa
  Intron number 1 from transcript POPTR_0005s19240.1 (locus POPTR_0005s19240) derived from phytozome v7.0 (chr-ID scaf fold_5; pos 17961493 to 17961969 reverse strand)
aaacaatttcacaaacaccaaccttcataccattggtaaacagcttaccatattggaaaaacaaatgcaaaagaacccagtccacttcatgactgataaaacccccattgaccttaagctaaaaaacccatttttcaaaccatatcaagttactaaaacaagccaagcacaaattcaagaaaatcaaacagattttgtcagagccattaagacacacttacaaaaccttgaccgaacaaccttgactgtcccagacacacctcaacaatccaaccctttatcctctacaaatcaggttaatactctccaaaataaccccgcatcaacttccgatacagatgcttttcaagaacagcctcttcaactaaacagacttacctggcaagttcccaaaacgaccattgctcaagacatttccatatccattgaaccaactgtcattagccaacataaatataatgcttcttccctctaaga

SEQ ID NO: 53023 - DNA, 702 bp, Populus trichocarpa
  Intron number 1 from transcript POPTR_0005s10070.1 (locus POPTR_0005s10070) derived from phytozome v7.0 (chr-ID scaf fold_5; pos 7172625 to 7173326)
caagtgagtgctctttgactaaattctatagctttcttttttctggttgtcagtgattagaggtagtttggcgctgcagttttaaattattatatttttttctgtatttttaaattatttgttatattgatattaaaaataaaattaaaaatataaaaaatattatttaaatgaaaatttttttaaaaaaataatctcatattagaatataagatctaccggcatgcaggtttattcttttttttaacttttcaacttgtaatcttggaaacagcacttgaaaaaatttatttctaggcctgtttggtcaaggacagcttatgtatggagttcatgtgaaccccacttaaagaagtccaaaagccttagccatagtccccactgctacaggtacatatttaacctaccctcaactccaaacattccctcacttgcatttattaatcaaaagtattcaacgtactaaaactgaagaccaactgttatccatggctgaccagcaacaataaaacacttgcacttggaatatctcggggaatagcactaaaataaagatatttttagtgttttcttaacatctagtggacactatatgtttattaatcttcatgctatggtgtattagaatgtaataactgcgttttcattctaaggggatagacaaaacttgtctgatgataaatatttttactgttgttaggg

SEQ ID NO: 53024 - DNA, 1038 bp, Populus trichocarpa
  Intron number 1 from transcript POPTR_0005s14370.1 (locus POPTR_0005s14370) derived from phytozome v7.0 (chr-ID scaf fold_5; pos 11429296 to 11430333 reverse strand)
aaatatctctttctcaaagaaattagtgaaaaaaggtgactttttataggtttgcattttgttcaaagtctggttttgagtgtttactttttttgggacttttttaatgggtttctgactgggttagtttctgatagagattttttttttgtggggaatacaaagtttgtatcttgaaggtttctgggattttttcccattttcttacgaaacaaacagaaagaaaaagagagttgaataaactttctttttggtgcatgtcttggttatttaattgcatttctttaatgtgttttgagtttggttcaattttaaaaagtactcattttttctcctatctaaaaaaagaggaatcactttttttttttgttgtttataggctaccgagtggcaaaatatcttgtttccttgctgtgatgggacagtgctttctttttttatttatagtaattattattggatattagtcccagatagcgttagtttcactatttgaaaacgttgtgataaaacagaagaacacattttgttggtgtaataagtttctctacttgactatgaaggcaaattatttaatgattctagaagaattgccagaggtgcgcatgtacgctgacattattgaataattgcttgattaaggaaaaaagtattgattgtttcatgtaaaatctgtttcactgtgttcagtaaaaggtcactctgctattattgactgtaaatttgactagttgtcattcttgaatcctatgatttttgttccaacaatgttatggaatttaccagcacaagctagcagatggccttgtgcgtcttgcttagggaaccatcttaatttatcatgtgcaagtgatattaattattctgtattcatgaattttaattgtggtttgatggccacccaccattgatatttcacatttagtttggtgcttgcatgttttgtatgtaattgtttaaagtttgattatatttgataatgcagatggattaaaatttttatttgcatgagaattttcaggccttccggacaacctg

SEQ ID NO: 53025 - DNA, 828 bp, Populus trichocarpa
  Intron number 1 from transcript POPTR_0005s23880.1 (locus POPTR_0005s23880) derived from phytozome v7.0 (chr-ID scaf fold_5; pos 22590773 to 22591600)
tccgggtctctctcaattgacaattttaaccgagcgtaagtgatttcaaaatgctgcaactgcacattttgttgttaatttgtatctatttatcagacttgtagttgactagtttagtgtgagaattctcgtgctttaatgttctatgaagttataatttttttaatttacggaaacgatccctggtaataaatatatcacatgtcggtggttctttcctgtggtaatttgtttgatgaccgtaaagttcgtgtcttttggagctgcgtatattttttcagcatatgatctctcttgggtggcatgttaatgcgactgaaatcaaactggtattacgtatgtagtgagtgatgaatttgatgagctaaacaatttgatcactttgtttctgtttgctagaaaggatgtcctttaggtttggaaatttcctagttgaggacatttagtgctagcagttttaagttgaactatgaaaggagacaaaactgaggatacgcattgaaggctgcctagttcatagttaagatagacattgacccgatcctgttgagtttgggatgattttttttccccagaagagcatgtgtgactttagtttctcatcgctgtacccatgagcttgttctgcttgatgaatagcaaatattccaggaattgaaattgtcaaatgaagtcaatggcattgcaaatgttgctgtccctcgcttcacattattttgcctcactttgattacttttttttttgatatttttcatcatacccattgcttgtcgctgtttctgtataccacaggtttcctatcattgaacctgatcctaatcacacga

SEQ ID NO: 53026 - DNA, 849 bp, Populus trichocarpa
  Intron number 3 from transcript POPTR_0006s06980.3 (locus POPTR_0006s06980) derived from phytozome v7.0 (chr-ID scaf fold_6; pos 5031632 to 5032480 reverse strand)
atactgaggtaaaatcttccgatggcattctcagtctatgactttatgaactagtgaaggttgattggggatcgagtcgggaaattgtatctctctatggcatttattttggaatgcagtagatcataacgacaggatctaggattaacatttcctgtgatgattttgtaaatagtatggggtgcagagttccaaagatcacctaggcatttggcaataaaggttttaaatccttcaataacatgatagtttttcgtatcacgggtcataagaccaagatgcaaatgtgtttccaaatgggcttatgttgtggttgagagttcaagccaccaagtgttagggggactgattagagcagcaggccgtggttttttaacctgtaccactgtagattctgtgccttgtttgtagggtcttgcaatatttgagtctttacatgcacaaatctcaactcaataattgttgagatcagagtagaaaattttagttttgttccctcagttgccaaagaatattgcttttggctattgatgatgagtaacctaagggaaaatatgatgtctaaataagatcatggtaatgggggagcctgtgacttgaattgttcttagttaaatgattagattaaggtgggatgacacagcattttgctttcttaagtttgttgtgattggatctagcttatcaaattgggacaacattatcaatttctccatctgaaagcttcagaagtgttttgatgctttgcccatgcaattatcatcacattccttttccttagctgctcttactgtccttgcaacacttggtgtaggttatactgcgttcaggacagttcaaaggagaagt

SEQ ID NO: 53027 - DNA, 867 bp, Populus trichocarpa
  Intron number 1 from transcript POPTR_0017s12130.1 (locus POPTR_0017s12130) derived from phytozome v7.0 (chr-ID scaf fold_17; pos 12298026 to 12298892)
ggcttgtctgggtaaaagacttcttaactcccatctccttttctttttgctgactgaataggggtatctatattagttggttgttgtcatttggaatctcagctgaattttgggtaatcttagccctagttagagattgcttacccactctttaaatagtcttttttttattattgttattattattcgacactaagggatatcctcaagtctgcttgcgcgtcgacccccactaagttttgtactctttagttatcgatggattcaatgagactcttcatagctgtggttttttcctttggtagagagttggtaaaattagcagtttcaaggttatatttggtgttatcctttgttttatagaagatttcagataaatgtggttcatccaatcctttcccaccatatggccgttttagacagccataatctgggaaagtttaatgtccttgttttccactgtcttgctccttcctttcgtacccaaatgatgatgatgataaaataaaataaaagattagggagagtttctttaagagcgactgattggatgctccacagtgagatttacttgttgtgagtctcacacatggacatgcttctgtatttcacctgaattgtgatctagagtttgttcagaaagttgatcttaaaagtgttgtgcttagttgctcttgaattaataaaatgacatgtctcatgaaattttccatttttgacttgttatttgaataaatgagcaagcatctgtagatgcctggatttttttatttctatccttgtttcattttcttgggatacgcatactgatagatgtgaatgctttgcgtaggaaagcttcagaacttcttgaacttgggtttgttt

SEQ ID NO: 53028 - DNA, 640 bp, Populus trichocarpa
  Intron number 1 from transcript POPTR_0005s11760.1 (locus POPTR_0005s11760) derived from phytozome v7.0 (chr-ID scaf fold_5; pos 8561047 to 8561686)
tcctcgattcggctccccaggaaaaaagcaaaaaggtctctttttttctcttaattcttgatccatttcccttattcttcgctcactatcttttgatttgtacacatcctgtgatgtaccctttaaaaatccctgctttgtcttttaattgtctctaattttgtatcattcaatgcaagtaagaattccctttcatggtttggtgatttatttgtgaatttttgtatctgggttattgagtggtaacccatatttaattgggggttttgttaataagattgtttaagttcttgatcaaggtacccttttgtttgtttttggagaattaagtgtgacttttgccataattgtactgctgtagctttttttttgtaatttgtatatatatggaaagtcttgatcctgctgcttaatattctctttatgagcttggctttgctttgttcttgacaaagtttggtgcttgttaattatcctcaatgtgtttattagtttgcactagcgttcttgtcttgtgatgcggtattatgtgttaaagccgaagggtcttgtatgttgttatggattgggtttatgcaatctagaatttgaatttctatccttttcttttttcttttctatttgcaacttttggaagggt

SEQ ID NO: 53029 - DNA, 769 bp, Populus trichocarpa
  Intron number 2 from transcript POPTR_0005s11760.1 (locus POPTR_0005s11760) derived from phytozome v7.0 (chr-ID scaf fold_5; pos 8562506 to 8563274)
aggcaatttcaaactattgagaggctttttgagcggtcagtgtactttgatttttctgaaataagataataagcttcatcactgcatgtttttcttttataagtgtagttctaagattttatgataactatagcatgggatttgaacctgcattgtactaccagggttaggtgtagcacacactgtccttcatggtgacatggccaactgatactgatgtttactagaattgtttcttgatcgtgcactttcattagtcacttttaccaaatttgaaaactgtggttactatggttttgtaagttttttctttgatagcataattgttggctatgggtgacgattctggttgtttagcattataatgatgtccatgtcagctcatgcatcattgatttatatggtttttttgggagacgcatgtgcattctggcttatgatcagtagtcaacctaaatagatatggatttttaatcaaattttgaatagccactgacatgtatgtttggtggtaatgtctgtgttttcactcttcttcatggtccaagtcctctacttgaattgtatgctctgacactcttgactttgtctgcactcagttcataggaatagttggcaggctagttctctccctctcccacagcatggcattatccctttttcggtttctcctttgtagctgcttttcagctggattacttatttgtctagcatctaattttgctgcgaagcaggctagttgcaaaaacaacacaattggagggcgaga

SEQ ID NO: 53030 - DNA, 262 bp, Populus trichocarpa
  Intron number 1 from transcript POPTR_0005s23590.1 (locus POPTR_0005s23590) derived from phytozome v7.0 (chr-ID scaf fold_5; pos 22312760 to 22313021)
gatacatagtggtcgcaccgcaggtactcctttttccatgtcctttcttaatgcatccaaacatactgtacaaatcgattcattcttcatgagtttcatgtataacttttaataaatctgcagcataccatggatatatgttgctccatgtattttatttttgtctattttttatgaagaaatattctctgtgaagattgacctgacattggagttttgatccttagttatacggattgaaaccacctagcggacaagacga

SEQ ID NO: 53031 - DNA, 712 bp, Populus trichocarpa
  Intron number 4 from transcript POPTR_0006s06470.3 (locus POPTR_0006s06470) derived from phytozome v7.0 (chr-ID scaf fold_6; pos 4617292 to 4618003 reverse strand)
attcaagcctcctttcaaaatctacttctctcttggtatatctgcactttctgcataaactttatctttaatgtacttaattttgaggtttagtttattatgatgaggttgaactatgtgccatgccatattatgaagcttttgctctaattttccttgttgcttatctgaatggcaggtgatgtgcaatttggctttcaaattaattctttgattcttcttaccagaactaattgattacatattactgtgtgacttttggttgtttggaatgattctggcacactaatattttattaaaattggaagttacctcagacaaactacttctgccaggtcttattctaactcatcagtattggtgtcatgaataatctttgccttcttttctttatggggccactcttgtattcagccatgaacaaacagggtttttgcactgtattgcttgtgattaatttttttcattggttggacttttaggtttaaagtgaacatgcttaagggtttttctttgtgtgaactcccccccatttggaagcattttattgctcttgatcatgcttgatcatgttggggtgaattaagtgatgatagtaataatgaagttatgattagctgaagttgtgttttcccttctctttttcaccatcttatttcttcttgttatctgacaggagagttgaagaaactcaagaaccttgttataaat

SEQ ID NO: 53032 - DNA, 487 bp, Populus trichocarpa
  Intron number 1 from transcript POPTR_0006s06470.3 (locus POPTR_0006s06470) derived from phytozome v7.0 (chr-ID scaf fold_6; pos 4618723 to 4619209 reverse strand)
tgaaaaacattcaattagggacagtaaccagtaaggtaaaaaacactccacatgagaaaattagcatcgtcgtttgaaacaatctaaaaccaaagcaccacaaaaaccttctcttcttttctttcttttttatggtttctctctgttttaattttgtttttttgggttaacatagaaagaaagattattcaaataaagataggacctttatggccaaaaaatcctcttttttgatcctttctaaaagtgtatttcagtgcttgctcagtcgaagatattgcttattcaattcttaacatgggtttgttcttgttcaattagagatatgaatttagtccctttcttgctttctttctccgtttaaaatcttgaaattgaactcaatggttacttaggttcttatttttcttgttgatattgtttttccaaagggttactggaattaatattgtccttgtgttttaatatttgaagagtctctggcgct

SEQ ID NO: 53033 - DNA, 849 bp, Populus trichocarpa
  Intron number 1 from transcript POPTR_0017s11410.1 (locus POPTR_0017s11410) derived from phytozome v7.0 (chr-ID scaf fold_17; pos 11178318 to 11179166)
ctctctgttgtcatcagcaagaagaacaagaacaggtattatatctcttctttatgattttctattactctattttgtttggttcttgagaaaacggaagaaaagaaacagttggcaacatgcgtgaacgctgtgtttcattcatggattgttttgtgtttctaaacaaaaacttactgttttttaaggattttgttaaaaaaaaaagagctttcgaaagtcaccatcattttcttgtgttttgtagaggctaggttttgaaagaaattttgttcttggagatttcctgtgattctcgttgtgttcgcttgaatatgctctgccttctcttttctttttttcctttcctgcgtttcgtttctaaaaaaaccaaaaagaaaaggctggagaaaatatcaaagtaattatgtgtgttaaaattagtttttttaaaacaatcaatgtgaaaaatactgttaatttggtggatccaatttgggaattaacatctgtttggttgttgagaaaacaagacaagagtaaattgaagatgaaggatgtttgttaagttgattgaaaattatgggctttctttgtttgtttttagaagcagtctgaaggacaaagcccttttgattttcagacatttttttcaatccagccactgaaataaagagagagaagtattatagaagctccaattttccatattagatggatttttttttaaatctctgtttctgctggatttgcccaacgataaatgaaatataacaagttgtggaaaatcggttttctggcttgcaagaattcgggttttaatccgctgctgctgctgcttgcaggacagaagaagaagaagaagagaag

SEQ ID NO: 53034 - DNA, 709 bp, Populus trichocarpa
  Intron number 1 from transcript POPTR_0017s04480.1 (locus POPTR_0017s04480) derived from phytozome v7.0 (chr-ID scaf fold_17; pos 3455839 to 3456547 reverse strand)
ttacggcgtcctacgctccttctcgtatgcctctatctctctctctcgattgaccggtccatagttcttttagtttattctctgttagttttgattcacagtcgagacgctgaaaagaggattattttttaggttttaggtttttattgaagattatttctattttagacgtgattttaatcttgaagaaggatgatatttttattttttattggattaatttactttttgtgtgtaattaggattttgttagatttgttctgcgattttagggttaaattagggttttgttggttctgaataggaatttcgggagtggaattaagcaattaagggaaggtagagtggttgtttgtgatttttagggccatgttgtgtattaattggtgatttgggattttgagggagattagagaggggagagaagcttgatcatgattttgagggtttttgaaggggggaatggagaattaggaggagttgaggaatttgtgtttgatttcgattaattaagttattaaaaagagataactataatttgagggagctaattaattaataatgcaaattaggggactgaattgaatctttgtaggtttttgctgctactgttgttgcttgttcttgtttcttgtgtgtgtgttagagattaaagagtttagtggatgattgattcttttgtgtttttgtttgatatgttgcagctttt

SEQ ID NO: 53035 - DNA, 912 bp, Populus trichocarpa
  Intron number 2 from transcript POPTR_0146s00220.1 (locus POPTR_0146s00220) derived from phytozome v7.0 (chr-ID scaf fold_146; pos 12108 to 13019)
cgttgttctggctctcatttgtgcactcttggtaagccaacagtttcaattcattattcaaatataatagtattgcccctcaatgatagagaaaacttgggaaattaaagtgcagtgaattttgattgtttttatgacctatagggttactaaccttggtttgattaaattttcaatcccaaacatgagtattctagatcatgcccgtttcttttcactttcttgcaattaaaatgagaagttctgttatctttggaattttaccgactaaatgaagccgaggattccttttacatgtgtctgtgaaaaattgagattccttggaattttaatcgagtggttaaacttgaaaccattttcacctctgttcatgcctcctgatgggcttccattccctatacttttatccttgtgctgtctctcagaagaacttctctcactctctcacaaattcaccaaaatttcagtagaggtcaaatcatgaaaagcttctagtttgaacagagtggtagagactaaaatggccctgccatctcacatcctggtccttgtgagcttatagggctaaagcttcccctccttttattagagaaaaaaaatgttcaagatcaatttggagaacaagacatctccaaatgggaaaacataattaacaaattttaaaatattagagaactgcaattgtgttgaatatctgacaataaaacacacccaagtcacctttctcatatatatatatatatatatatatatatatatatatatatatataataaaataaaataaaaactttcaaatcgtagcagttttaaatcatttcttgcttatttcataaccttacaaacgggcatttctacactttcttttcgtgttgcagatccatagcaagattttaacagtgtttgccatcat

SEQ ID NO: 53036 - DNA, 767 bp, Populus trichocarpa
  Intron number 1 from transcript POPTR_0005s14410.1 (locus POPTR_0005s14410) derived from phytozome v7.0 (chr-ID scaf fold_5; pos 11458228 to 11458994 reverse strand)
ctcgtcttggtggctcatcagcatttattgggaaggtaccattatgataatatcaatccatttttgtggaaatgagtagaaaataaggaagcaaggataaattcattttcaaagagccaatttgttaaggagtggattaaaacttctgcctgactggttttttgattctatagggccgggtaatctaggattgtggtattaaatttaggatcctattatagtgtcatctatgtttcctttctccatcttaattgcgtcaagacacagaacaaccttcttgtttcacagagattttgcttgcagattccaggagttttctgagattgtacggcacagcagcttaggaatttaaatgcttctgtgcatccactaccacaaactctttccttgaaattcatgatatctaacagtgaaaaactgtcatcaacctctttgagttgaatggaaattgatttattgcttatagactatggatagttggagatagaacctatctgtaaaagccaggagctgtcaaagcagtagttcgctttgttaacaacatagttatattgattgttctttcaacctagtgcattcttgacaaaggattgcttattccctctttcttctaaaaattaactgtgcatcagtttcatagcatgccattccatgcttttatttatcatatttgtgtgttttcgacaaaaattaaccatagatattttatctctcgtctattctctcagatctcgaatcttttgtacgacatgcacaggttggtgaag

SEQ ID NO: 53037 - DNA, 891 bp, Populus trichocarpa
  Intron number 3 from transcript POPTR_0005s11540.1 (locus POPTR_0005s11540) derived from phytozome v7.0 (chr-ID scaf fold_5; pos 8370780 to 8371670 reverse strand)
aagttttttaagatattacaggtaattaactttgttttttccccccttgtcattggtgattatgcatgagttgacatgaagaggtttatagcacatatcacgtttgctttttagtcttttgatggttaagttcgagtacttgatgtcggtagtgtattgcatagtttatcacggatgagtgatgaagagttccgtatgctttgattgattttgtcgatgtgatgctggccccgattttgagaagaatgattaagctgtgaactaatttttaagcagagcttgtctacaatgctatgactatctggagcattcttagtgtgttgtagctttgtacaagttcataaaactttaacagtcaatgcaagcattgaatatatttctattctcctctttgtagatttggaagatggttcaggtctatgctagtgcagtcaggtggcctcttttttttattttttcagggaaaaacatcctgaaaggtttaaaaattcacttgatttgcattttgcgtggttttaattattgatttataggttgagttatacttggagagcaaacagagatttgcagttcttatatagatagtgttgtatttttcactgtccatgtttactagcctcttcataataagagttcatcaattcttatctccttctgtgattgaccaattatccttcatatccttgcacattataaattttcacgttgctaaaattttgtttcctcagagggtatctttctgattgattgaagtttccattgagtagtatttaaaagttcttttttacttgcatcattatgaagtcattatgtgtttgcttccttttctttgggaaaacttcgtaccgagtcctagtttttccatcctgaattgttctgcagaagaggagc

SEQ ID NO: 53038 - DNA, 874 bp, Populus trichocarpa
  Intron number 1 from transcript POPTR_0017s04500.1 (locus POPTR_0017s04500) derived from phytozome v7.0 (chr-ID scaf fold_17; pos 3462900 to 3463773)
aaggttagtggaagccttttcttttctttgatatgtacttcgtaccttttggtgttatttgtagtaggtaaagagattatctttgtgttgttaatgtatatgcagttcatgttagtattcgaaattttgagctgttttggaaactgggtatgtagtttttttttttttgttcattttgaagagaagggtgttgttgaacaagtcttaaagtttcttacttggaatctttattcgatgtatagtatgattcattgcggaaaatgagaattttgaatgatgaaaattataggcttttcataatttgcttcaatatatattatcacatgggatgtgaatcatattgggatgacaaccttgatgagtcttggatgtgtttgttgggaggtttgataagtcttggagtagtaatttttggatgattttgatatgaaaatgtcaaaattactgaaaaaacaactaaaaatgcatcaaatattgaacttttagctcaaaatcatctttgcaatagcatctgcaccgcgttactaaacacgaatttaggctttgtttgttaacatgatcaactgcgcagttggccgcgttaacaaatacacgcctggactgatgaaagttagggtggttcatgagtacctatactatggtaacaaagaattttcataggttgtcgtccaaattgaattgataactcaaaccgatgagaactaaggtaattgttggcaaatggctatggagcatctaattatgaaactccctgaaattgtagtttggttgattcttagtgatcctatcaattcactatataatatagttccattggttaattattgtcggtcctataggtgaaggctggattgagttcatctgcatctggtga

SEQ ID NO: 53039 - DNA, 1049 bp, Populus trichocarpa
  Intron number 2 from transcript POPTR_0017s08590.1 (locus POPTR_0017s08590) derived from phytozome v7.0 (chr-ID scaf fold_17; pos 7201599 to 7202647 reverse strand)
ttttgatattgagtggaagccctcatttacaacaggtttgtttgttactcattttggtagttgttttcgtcaatttaagccaggtctatccaagcaagttcatggattcatgttgtttgagttctgataaacctatgatgatgcattatgctctgccataacaagcactccaagctggcagtgttgtaaatattctgttttggaaaagggaattacaagataaaatgcacattctcttactctatagaagccttttcacttttaattttagatttattcagggaacaattgaatttgcccgtttttctttccgttttcttttaaacatccttgtcactgattttgtgttttctctctctctcaattatgcttatgcaattcagcttccttggagtcggaggagatctttgggaatgtgaactttaattacgaactgattaggtcggaggagatctttgggaatgtgaactttaattacgaactgattaggcttattgattattgcatgcttaaatttattctcctatggattttatagttgtagactatgcttaaatttattctcctatggattttatagttgtagactatgtatgtttactattccatttgccacttcctcttttgcttgttgatgctcagtttttatcatggattgtagcttggtataaacaccttcagtatacaccagaaacataaaactcataaccaaccaagctactgttacgttgcagcatggcatcaaataaatgcagttgacttttgctctttcatttcaaccttatgttatgtaccccattttcttacaaccagagtattattacttggaatattagttttttctttcttgatttcccagtgcttctggaagagaaaggtagggttccatagcattttgttgtagtacttaaactaaattaatgaaaaatgaatcaaaatcttgttctctgcaagcgtgttccttcccatgctgcctctcccttcatgaaatatatttttcttggataatcttggaatctgcaggtgtgttgcctggaaaggctgcagtt

SEQ ID NO: 53040 - DNA, 377 bp, Populus trichocarpa
  Intron number 1 from transcript POPTR_0017s04650.1 (locus POPTR_0017s04650) derived from phytozome v7.0 (chr-ID scaf fold_17; pos 3553217 to 3553593 reverse strand)
aattcactcgagaacgtagccaagatctccaagtaagctccttctctctctctctctcaaaatccccaattttttgtatcaattcattaaatatttcaaaacccagcttttaaaaattccttttttttgtatcagttgatttaacaaaaaaaccccaattttgaatcggttgatgaactcaaagggtatctataaaaatcctcaattttgtattaattgatctttcggaaagtaaccctttatttttctgtctgggattttactcgttcttcaactttttttctatttctcttttaaaaacctcatttgtgcttctttttttctcgctcggatttggattagagagtgtttcacaattttgatccgaatctaagaac

SEQ ID NO: 53041 - DNA, 769 bp, Populus trichocarpa
  Intron number 1 from transcript POPTR_0005s01840.1 (locus POPTR_0005s01840) derived from phytozome v7.0 (chr-ID scaf fold_5; pos 1224258 to 1225026)
ctatttctgtcggtaatctctctttctctctctgaaaatgccttgatgcaaggccaaataaagaaagattatcattgtggtatatgatcttggttttcttttctttttcctgagttaaaatatacatgttttcttgtctgttatgccttttggttttgatttttctgatgcttcctcgtgcatcttttatttgtgtgtgattctgttttgtctgttctgttgagttgtttattatggccagaccacttgttgttcaatggtcagttagcaaattctatgccacactacaggccaataacattgatgatcatctggtgaagatagcagatctgatttaggatgatgagttccattatcttaggctaaagatatcacaaactagtattttgtgattgacaacttgaagttcctattgttgcctctctggattgcctgtgtgatctttattttcttgcatgtatccccacttcccttcccttcaacctatctgaaggaaatcttcaaaattattgactttgagtgctgacacttgaattggaaagagtatttcccaatcatcggaatgcaggtagtgtttatatttcaagtgcataggtttgacccatattttgatggattttggtgcttctggttaagtgcataaacgagtataagatgctgcctctgatgttcttgcattgatgatgaaactttttggagaattgtgatctttatttgacctgatctgtttccaggggcaacgtcattcctgtttactcagtacaagtac

SEQ ID NO: 53042 - DNA, 777 bp, Populus trichocarpa
  Intron number 4 from transcript POPTR_0005s06930.2 (locus POPTR_0005s06930) derived from phytozome v7.0 (chr-ID scaf fold_5; pos 4653560 to 4654336)
tggaattcctgattatagaaggttttatctcttctctatactgttcaataagcttaatactgtcgtacaagtctatcatatctacaagatgtttttttgcacttttaatatatcagtaagcagtgcatttgtaataataataacagaatgaactccttgcaagtttgctcaagctgctagtggtcaataactttctgctttggaattgtggcaactatcgttgatgatggctgaattgaagttttttgatgcttgcattgaatttattctctcactcctcaactcgtgcccatgtttgtctggtataatgccatggcatgttgtgattcattgatgaatcttattttcttcatccacattaatatttaggatgcacaagaactccttcactgtggatggttttgtaaattgttcatttccgtgtgctcttcatgtgaactgggctgcatgtttggtattagatagccatcagtggggaaaggcaaagattgcatatggttcatcgatcacattaatacaagtggctggagcctgctttgatctatagttgtctactcttcccctctgttgagtatatgatgatcttcttctttttcccttctatttgcttatgcattggctatgtccaagaagataaaattgtgtagtaattcaaactggttatccaatctatgggtaacatgtgatgttttatctctagaagcatttttgttgaattttcttggtggggccaaactgatgtataatgatatggaattttatcctgctgcagtccaa

SEQ ID NO: 53043 - DNA, 665 bp, Populus trichocarpa
  Intron number 3 from transcript POPTR_0006s12470.1 (locus POPTR_0006s12470) derived from phytozome v7.0 (chr-ID scaf fold_6; pos 9606926 to 9607590)
ctgcattgcagcttgaagttcaaaagtgtaaagaggtatggttataggtgttaattgtgtttacctttttgatcgcatccttacacaagtttcataagcaatagaacttgttttccatgttatgaaaatcacactttgaatctcccctttgttttttgttactggccatagtttgccttgaatgggtgcctcttgtatttagctgttgatcattatctttgctactctttctgttcctttttcaagctacaacaatttatgcttgtgtccgctagttatttcttgtgtgttggccactttacatgttcgtttagctgggcacttgtttagtatttccgttaacagaggttttgcatttttatcaagagttaagaactagtggtcaaaataatttttaagatatagaaactaagtttggaaactatatctgtcttaatttacttgattaagagaaataaaaaagttttgaatttggttgaagttataatctgtgtttttgtggttggaagaaaactgaagtataaaaattcaacctcatatagttttatgggtgaaagaatgtctgttttggatctctcttaggtctgttattctttatttttttttcagtttaaacttttttgtttgtagaggacaatttatttggagcatttattaggagattt

SEQ ID NO: 53044 - DNA, 415 bp, Populus trichocarpa
  Intron number 4 from transcript POPTR_0006s12470.1 (locus POPTR_0006s12470) derived from phytozome v7.0 (chr-ID scaf fold_6; pos 9607644 to 9608058)
aatttggtaagcatcttttcacatttaacattcacatgtttcatgcattgcttgtgagtatcttcaatttagaaaaataatcttttttgagtattaatttaggatcaccattatgttcaccttttgaggatattttgagcaattgttttatgtcagtgaatgccttttttccttcttcttcttgttccttctctctctctatatctctctatctctctctctctctctctctctctctatatatatatatatatatatatatatatatcatttactttttgtcagtttcttcttaaggctattattaagggcaaaaatcatgtcactttgcttcccgctgaacattgtgatttttttctcttctattgtgtatgttttaggaaatagcatctactctgatttcaacaggcaggga

SEQ ID NO: 53045 - DNA, 790 bp, Populus trichocarpa
  Intron number 1 from transcript POPTR_0005s26050.1 (locus POPTR_0005s26050) derived from phytozome v7.0 (chr-ID scaf fold_5; pos 24186787 to 24187576 reverse strand)
aaggagaagacttgtgctggtaataaatatgaaacatctctctgaaactttatgattagctaaaaagtcagggttttttttttttcttgatttgttgtgctaattgatttcttaagctgttgtaggtaaaatgtagttggcttttttgtttatgatcattttcgttttattcgtggctgtaaagtgtaaaaggtttggtttattgggattgtttctgtttaaccattgaagaggactattgagtcttctgattaaattagtgtgagagaggaaaagggcttttgcttgatatttcaggctgaaaatcttagaccgtgaaaactgagtcaaaattcgcttaaaaaatgatagggctctggtgcagtagtcatggggtttatcatttatgccaatcttgcattgtgacttggcgaggtcatcttcttgttttctgtatatggtgatttatcctttcattttgggaagtctatggagtgtcaagaatttattttgaggggtgaagatctaaattgctagtttaggataaatagcttttattgaagaaaagcaagattaattttcgtcgtatcagttatcatgtacagataattgcttggtcgatgctactatttgtctcgtgattgtagtgattttcaatatcgttcatgtaactcattgcaactaagcatgcattctgtctctctaatttgcaccaacacaactctggcctttgttttgtctttatcctggtcttctctaattttagttctttgcaggactttcactaaaatcacaggagctaatagctata

SEQ ID NO: 53046 - DNA, 763 bp, Populus trichocarpa
  Intron number 1 from transcript POPTR_0030s00360.1 (locus POPTR_0030s00360) derived from phytozome v7.0 (chr-ID scaf fold_30; pos 134239 to 135001 reverse strand)
ttgaaaatatttgcagtgctctacgctactaataggtacgtaattttcatgtatttctactgatgctgtgcttgtgattgattcttgatagtaagacctctacctggtttttatatgctagatggtttggtagctgaaagatgcaatctttgatctttttagacctttgagtagtttggtattttcttggcaatgttttctttttgctggctataattccttttggtattctggaatcatctgggtttgggattttctttgaaaaatttgtttattgtaagtgtctgctctatttggttgtcaaaattctataaagaaacttgtgagcacaaaaaaattctctgttttatactttgtttttgcaactaggtaatttttatgaagaatcccttgagcttttggtgattctttgttgcaaatgaactgctgggtggttctcaatatttggcttgcttcaagaattgtttggctgtgtgaattgttcgtaacatttttcctgacgtgcaattttccatgaggacattcttgacctgttctattatcacatttaatgtatcatttcggggcttttgataaaaaataatatctcatatctgtgattaatttgttgataaaaccataagaagtatttgcttggttttatttacttgatctgggaagtgagaaattacttgcaaaattgggtgcctaagatttgcaacttttttcattttttctatttctccctgacttccttgtatgcttgcagattacctggaaagat

SEQ ID NO: 53047 - DNA, 556 bp, Populus trichocarpa
  Intron number 1 from transcript POPTR_0005s21840.1 (locus POPTR_0005s21840) derived from phytozome v7.0 (chr-ID scaf fold_5; pos 20899036 to 20899591 reverse strand)
aactctccttccaagccggtgaacgtcaaggccttgtaagattccctcgtcatctctttgctttaaagaataccagcttgctctttgtgtatatgtgttccttgtggggttgttcttctttgtggaaaagttattgttttttaatcaatcaagcttgtgtctctttgttgtccttttattgggtcactgaatttggttttatttatttatttatttattattgttagtctagtttaaaggttacccatttcgatttttgttgtaaacttaaatgggctgtttgattctgagttaattgtaaagtttaatggctagatagatacattatgcggttttgttaatggattcacattgaatttatggtatggtattttagtttttgttaattgttgttggaaattatcattacaattgaactaggcacgttgccttttcacttgtttctgattggcttgtgctttgaataaattggcattgtaattcgactgttgaagaggtatattgatcaaatcatcaatttttttttctaccattcccatttaaggaagcaagcggg

SEQ ID NO: 53048 - DNA, 706 bp, Populus trichocarpa
  Intron number 1 from transcript POPTR_0005s24910.1 (locus POPTR_0005s24910) derived from phytozome v7.0 (chr-ID scaf fold_5; pos 23323111 to 23323816)
gccatcgaattaggtgagtcttgccttatacagcaattttctgtgttgcttcttcccttttctcatcaccaccactcttcctagacatttgtcaaaaacagaagtgtttctgatcctactccttgttttctttgaatcttattccttcttcaagcttggaaaataggctaaaagtttcttatagagtaattcaaccgtctagtttctcaacaactgtagtttgaattcattgttgccatgagtttggtgacttggcttgtctcatcaaagcaaagttttcttgtctaagtatggtcttgtttccatagtttttcattaatgaatatccttaatgcaaatcattttattaatttgtatgacagttcttgcctttcaagatatatcttctaaattcaaaaaaatctctccttgctttctttgtttcagatttgaagcttcaatttgtcatcagctcctacaaaggcttttatcgtccccaaattaatcctatatgtatgtctacttgatcaaatgtcaaacaacaaaatgaagggcctattaaaaggcttaagatacatctctcaaatattcggtatgcaatttccctctctcaaactgctctcaaattcttcgttcaacatacttatgaagcaatgcaaaaatggcaaacaatttatgtgttgttctacgggcgatgttgatagaaattttaacgatgttacagaca

SEQ ID NO: 53049 - DNA, 386 bp, Populus trichocarpa
  Intron number 2 from transcript POPTR_0005s24360.1 (locus POPTR_0005s24360) derived from phytozome v7.0 (chr-ID scaf fold_5; pos 22936538 to 22936923)
caggtaaaatactttgtttttttaactctttttttcttcttgcgtggctacatttgcacttgagacaaccagaggcaaactagaaggaacagaaatgctagggggaaaaaactagtcttgatagggttctgtagcattttgaaaagagcaattaatttcctacaaattaagacttgaacctacctccattcacatgcacgcacccgataattctttgtcgtataagcacaagcaacccatttaaaacccaaaataactgagaaatgaacagatttgtcattccaaaatataatttgacagttcataagaaaatgcatgaccttaaatctgctttcttgctattgtatgtagctgatcaccaataacaagttcaagagtgtggagca

SEQ ID NO: 53050 - DNA, 528 bp, Populus trichocarpa
  Intron number 2 from transcript POPTR_0017s07220.2 (locus POPTR_0017s07220) derived from phytozome v7.0 (chr-ID scaf fold_17; pos 5620617 to 5621144)
accagttaaagttgcaggtggatgcatgtggttgttttatacaaagaattattctttctgtacttcaaaaatgtatagtatagtgcaaggacataacttgcctcattattatttttatctgtctacgtttttcttgagctaaaaacatatattgtttcatcaattttcatttactctgccatcccttggttaaaatactgaggacttttcccctgctgatgatttatccggtgatgttggggatattactgcctggtgattttctgatgatttttttttcctataaacatctaagtctttttaatcatctactttatttataggagagattgtatagtataagacaatgactacaaccagcaacctttggtattgagcttaagaaagaaagataagcctgtctttgatttaatacaagttttttgccatctacttcattagtgtgttgcatatttgcatattctactaaattggctttcttcaacgatttcaggacaaattcagatttgagattacaggcttccaggg

SEQ ID NO: 53051 - DNA, 933 bp, Populus trichocarpa
  Intron number 2 from transcript POPTR_0017s13840.1 (locus POPTR_0017s13840) derived from phytozome v7.0 (chr-ID scaf fold_17; pos 14054906 to 14055838)
actctcctgatcgtgcttgcagtcttgctaagcaggtacttccttgcataccttatcaattggcctttatctgcctctatgtttaggcaagttgcgaaattcatattcttctgtttagttttcattattttgagtaaaaggaagtgatttatgtttttctctattgatatgattatatttctcttattcagtttagcttaattagtgaattttataactggcatctaattggattttagctttgaacttgatggaagttaaacgttttgagtgccttggtagttttggtcaattattttatgcaaattgtattgctaaaagttggttttggtgtgaagcattgatgccgggacatttggtctctcccttaactgtaactatatatttgtccatagggttgacatctttgattgattgttgtttattgagagaatgtttttgtcctctcttcttcaatttactaaatacttttacatattagtgaaatcagcttgctttttgcctttgtattaccaaggaactgcttgtttttgcatttaaaactgcattttaaaactgtgttgggcttgaaaaagcttcaaattgattttttttaatgtttttttgatggttttgatgtgtcaaaaatttaaaaaaaatctgaaaattatttttttccatatattttcaaacaaaaatcacttttgaaaagcaccttacatcacaataccaaacatacaattagtaattggttcatagtagtacatttgatcttttatgctcaatttgatctgtattaatataagacctagttgacaaggccttgttttcctaaagataagttgatacctattcagtccttagggtcgatatccttgattgcatgcaagtcagtgaccaatctgttggccctcttgacatccctaaaatatactttttttggtcaggcttttg

SEQ ID NO: 53052 - DNA, 899 bp, Populus trichocarpa
  Intron number 2 from transcript POPTR_0017s13600.1 (locus POPTR_0017s13600) derived from phytozome v7.0 (chr-ID scaf fold_17; pos 13714282 to 13715180)
ctggttagctttcatgccaaggattttgtaattaacaaaaatgtgatactgcaatgttatgacttaaactaggttgcctgggttttctaattacgaatgcaatataaattcactgcaatatcatattgctacttctagtttatctcggttttgtaactctttaaggactgcaaagttattattgatattggtgccataacctaaatttgtttctttggagatttggtaggttctgcctagaaacacagtctgagatctttcaagtttttgagagtttaaactttggagtaggtttctatacactggaatcagtattataaacctaactggtaatggaacttaaagagcttgtatgatcctggagacgggaattgctatctgatggtttttggaactgaaacagctcgaaatggaacaggaaccaagctgttttcttttcttttgcacttggatatgaatttgcagtggataaatgtcacaagtgaaatttggccaagaacatgttgtgtgtatgacttaattgctttacctggttgtggctccatgtacaattcattctttttgtgtaatggcagtcaatcccgtgttgctgtatataggacaccctttagtttaatattgagttggcatttcttatgatgtgtctatccctgcataacatgttgcctttccatttttctctatatggatagagttggattatatgatcttctaatcagaatctctgatgttgtgacacgacacaaaagttgttgatgagtaaactagggaattgttgttcttagtcaattattttatgctatgatttttgttttgtttgttcaagtttatatcatttgccgcgtgagctcctaactttaatatgcatacaacagatccccgatcagaatcaagtgggt

SEQ ID NO: 53053 - DNA, 657 bp, Populus trichocarpa
  Intron number 1 from transcript POPTR_0017s02500.1 (locus POPTR_0017s02500) derived from phytozome v7.0 (chr-ID scaf fold_17; pos 1809426 to 1810082)
gtcgattaattccagattttatttgtaagtacagtactttgcaatttttcttctcccttttaatttctgctcttttctttctgttttgaatttctatattgatcactagttaattaatagattcttttctcataagccaattattaactggtttgatttgtgaaaaaatactctaaaaattgtaggagaaaaaatgaagctgaatgtattatggagaataagtagatattgagggaaagatttgatcaaggaacatattgaggattcgtactgtctctcttatcatactgaaacttggcatcatagtgttttagacagaggaagaacaaaataaatgggggcccgtgagaaaattacaaggatttatacattaggtcaaggtaaaataactggagttttgggtgccctgtttgtatttttagtttaaagactcccaaatctaagactcaaattcagctttatgaaaaatttggagggccaaggttccttcaaagcaagtctacatgccacgcccaattcctaccgcatccttcaaatctagttcgtttttgtttgttctttacaacttattattactgacacgatatgtttctggcaaaatgattcttgaactttgttgcagctgaatttgcaaagctaccattaattccactatat

SEQ ID NO: 53054 - DNA, 562 bp, Populus trichocarpa
  Intron number 1 from transcript POPTR_0005s22140.1 (locus POPTR_0005s22140) derived from phytozome v7.0 (chr-ID scaf fold_5; pos 21111717 to 21112278 reverse strand)
gaatcaatgtgctgcttctcctatatcataggagccaacccttctgacctatggtttgtttggttgtttccatctccatgtttttgtcccagctaacataaaattatatgcaatagtcaaatttgataatatcattactcatggtctaaggaaggtcaatctggaaacaaatgcagaaaaagaaaattaaatctgtggaagacttctcttgaatgattaaatcctgttgggaaaataagtaatcctgttgggaaaataagattattatttataatttgaggagttatatgtagaatggagcgcggtggtactgatctggttgctctaaccaatgggcaaagctcaatagattttgttacacttgattgcctgcaaaaatgtattgcttttgtttgatgtcattttgtattgtgagtatgcagacataaatctaatgaaatgctgctgactagtttgttatgtgcggtatttgtggtaaaatttgtatgttaagtttatggtttcttatgtttattgcttctgctttgtacattcaacttttcagccgacatccttcagtgaa

SEQ ID NO: 53055 - DNA, 881 bp, Populus trichocarpa
  Intron number 1 from transcript POPTR_0005s01760.1 (locus POPTR_0005s01760) derived from phytozome v7.0 (chr-ID scaf fold_5; pos 1179455 to 1180335)
tacctactaatcctagaccagaggattatttaacggtaagtgtaataaagttttgaacttttttggggttttgggttttatttggatgccgagaaagtgtggagaagttagagaaagtgaaggaaaatggtgggttttatgtgttatttaggggtttggagttcaatttagtttttttaggaagggactgaaatgggcttttcattttgttaatgatgagtagagtttgattatgataatgttttatagcattttcaggtttaaaattgtgcgttggtttaccaaagttactttctttttggcatttgtggtgatattatgtgattgttttgagtttttgaagaagaggatacaatagggtagataggagtaagctatacttgttgaatcgtattggtgttatagaaactgttttggcttgtcagagagggaggctttatttgtttggtaatgaattggagtctaaacattagattttttttttttaaatttccatttagaaactgtttagcaatataaatggagtgtgaagttttggttttggaagtgtcaaaaacgggtttttgatttatgtggttaatgaggtaattatgctgtttagtatctgaggtttataattgtgcattggtttgccaacgttactttctttttggaatttgtgatatatctatgtgattgttttgagtttttgaagaagagtaaacgatagggtggatacgagtaagctatacttgctgaattgcattgatgtaatagaaactgttttggctaattttgtgaattttctgagattgattgattctttttttcatgtgagttaatgtcttgtgatttttcttttggcaggtgttggcattgccattaccacacagacctctttt

SEQ ID NO: 53056 - DNA, 961 bp, Populus trichocarpa
  Intron number 1 from transcript POPTR_0017s13890.1 (locus POPTR_0017s13890) derived from phytozome v7.0 (chr-ID scaf fold_17; pos 14079544 to 14080504)
agttctctcttgctaaggtgtttctcttcttgcttttttttttttttcttggaattgatttttcttcattaaattttgttgtaaaaatttaaatgaaatagacccatttcacgtttgtgtcaattgcttctaaagttgaggtctttactgttgtttgtgatgatgattaattggtttttgattcactaagcgaatatattggctgtcaaaggattaatttaggtgtttatggattagaagttgttcttgttgtcggtaatttttttatggaggcttgacaattttatgaatttaaagtaatgggattaccaaaattcaacctgttcctttgaaaattgtatgagaaaataaaatgctgagaaaaatgatgttatcgaggcatggtgttgggtttaaagtttgcaattgtcgagtcatgattaattggttaggtgcttgttgactaattcttattccaactgttgcactttgttgtttgttaccctacgtgctagggctgttgggctaatctcatttgttgtagctgtcaagtatgtgaaatgtagtcttgctaataggtgaacaggggttttgtgtaatgccacatttgtaaggataagcattggttagcttttgggttagattcttagatactaacgcactgacttcttttgtcacttatgttgttcctagttgtttgaataagtgatgaaactgtcttcaaaggtttcaagttaatgggatgcattatatagttttgtgggcaaatttccagtgataaccaatagccaagcagttcctcatcttcttcagtcttatcacttctctgaacctgctttggctaagacttgatgcaagcctgcttactgcataaagttttagtaaacctggtgtcatcatttgtatgttctgatgaatgaaattatggtgttttctattgtttgcaggtctcatttggtgtcattggactgggtttagggat

SEQ ID NO: 53057 - DNA, 829 bp, Populus trichocarpa; identical to SEQ ID NO: 52763
  Intron number 1 from transcript POPTR_0005s04590.1 (locus POPTR_0005s04590) derived from phytozome v7.0 (chr-ID scaf fold_5; pos 3087173 to 3088001 reverse strand)

SEQ ID NO: 53058 - DNA, 928 bp, Populus trichocarpa
  Intron number 1 from transcript POPTR_0017s05300.1 (locus POPTR_0017s05300) derived from phytozome v7.0 (chr-ID scaf fold_17; pos 4175061 to 4175988)
tatatatagagatacagtcgtctgatctccctcaggtcagcactaacttgttttgttctctgaaatgtctagttttttgagattttacgttttggaactgtttcaagctctgcagacattacgtggttcaatatatgtataagcattccaagctgacttcatctttctctctttttttgagatagtgccaacatcattttcaattcaataacgaaacacaaatatcaagttagcttttagttaatccattttaaaaaaaaaaaacttaatttataagagagataaaatataatacatattaggagggagcatcgttcaataaatcctaaattatccaaaatagggtataaaattgtatgtttaagtgataaaaggagagaaaagaatgagttacattggtgaaagatatagagtcgtcaaaaaggacatgaaagttgagttatatgtagaatataaagattattgatagattgtaaacgagaaaaataaaataaaaatgtatcctttaaaatgtaaagacatctctggtttgaattctatcttctgtatttttaactcacatgcaagtgatgacgagttttcctcaatgatttggttcttgggagtagttgttcaccaattgatggcgtccaaaagtttgtgcgcaatataaaaaaaaattgaaattttgatgtaaatttaaataaaaaagatgtaacttggaattttaaaattttaaatttctgtgattggtgctactaaattcaggaacataaaatgtcatgaataaaaaagtgccttaattttgtgaaataacacagaaattactatattagtacatatatctcaaaaaaaataatcaaaattgagctatatatataccccttccgttcattcttggtttgtttcaccgaacctgcagaccggaaatagtcaaactcagtactgc

SEQ ID NO: 53059 - DNA, 815 bp, Populus trichocarpa
  Intron number 1 from transcript POPTR_0005s16360.1 (locus POPTR_0005s16360) derived from phytozome v7.0 (chr-ID scaf fold_5; pos 13062886 to 13063700)
gctcacattagcgggcttgtggcagctaaggtttggaattttgatttttcgtaacttgtttatttaccatttttatttcgaatctatggatattgtttttgaatttggagttagggtacaatgttaccacctaaaggcagaagtgcttgattgatcagcttgtgcttttagtatcatgaattgcttcttgtttaacaacttctaaattgttttgcgtgcatgatattgagatgcatttagaaatatatgctgtgatataacacatgacatatcattaacacatagatacacgcctctctctttatgtggccattgtgtggtagagcatatttcaaataatctctctacattgctggtttgtgctattgagaaggaaatgtgactgttttctaacatcttgcaagaaggtaattgtagggaaaagatgtgcatctccttctgttctgatttttttgtgaaagcttaaaattgcaacatgcagaatccttttcggatcgatcattttttttttatgaaatggaattttatagcttagaattgcctggtttcttatcttcaccacttgcctactgctgtaaatacctaaactaaacattaacacgtttattagaatatagaagatctaatgtgcattaggatttagattttaatatggatttatttgctgaaagcatactttagaagaaccactcctattgagtccatatttgtatttagaagaacaagtttgtagaacagcaattacacattgatctataattatcacaatatatatatttttttccttactgttgttttatctgtctttcacagga

SEQ ID NO: 53060 - DNA, 466 bp, Populus trichocarpa
  Intron number 1 from transcript POPTR_0005s08240.1 (locus POPTR_0005s08240) derived from phytozome v7.0 (chr-ID scaf fold_5; pos 5676003 to 5676468)
ttccaagctcaacggcacccagcagtgtatcgagtgtatccttctttttcttgtatttttaattaatgaattccgcatcttctttttagtttctttgtacagctaacaaatcggaaaacttttgtgaatgattttgtactttatgctgtttctggacagcccattatttatattacaaaaaaaggacagtacatactacatagagtctattttgattttctaatctattccaaggtcactgtttgatgtactttgtattgattctttttcatttggtatttctgctttaatgttcatgatgaagttagaggaatggttctgacatgtctcagtctatctctgactattcctgtttcttaccaaaattatcgagtaattgttttgattatgtgttgacttggtatgcgtgctcccttaactttattgcatagctttgtctcggtggtgcatacatcaccgtagcgaa

SEQ ID NO: 53061 - DNA, 829 bp, Populus trichocarpa
  Intron number 2 from transcript POPTR_0005s02110.1 (locus POPTR_0005s02110) derived from phytozome v7.0 (chr-ID scaf fold_5; pos 1387673 to 1388501)
tttcaaccgtgagtgccttttcttttctgggtttgttttttaatgctcttggctttcactttttaatatacattttgtgtttaagtgcttaaagttgtgttttttggcttaattcagtgaccctttgtggttctttttgtttttgggtactcaagtttggttcttgatggaaaataaggaagacccatttcttgagatttgagtaattttggtgggtgatgaataatttggtgaagttttgttgaaggagtgtagtgggtttgttttgatggaaaataatgaagacccatttgttgggatttgcactttttgggtttggtcatttgatttgttcttatttgagtgaaaattagataaaatcgtggagaattggggtggttgatgaattatgtactgaagtcttgtttgagtggggttgaagaaataaggttttagcattaattttttttactagtgtaaagactgagactttcatagttgcattaactatttctagctttagtttacttgcagatgcattgttttgtactgaattgatttataaaattttaaatttagttcagatactcgtgtgaaattatatgaaatagatggcattttactcaaaagctttctttttcgttttcacggtgaagatattcctggaaaaaaagagagattcttttagggattttagtgtttgttgaactacattgtcatgtaaaggttttatgattcagtcagatacgcatctttaatgtgcttcatgaaagattgaatagggttttggcactggggttatggaaatgttgacacgtaaactgccatgagccaggacgaagtatcaagg

SEQ ID NO: 53062 - DNA, 329 bp, Populus trichocarpa
  Intron number 1 from transcript POPTR_0017s04730.1 (locus POPTR_0017s04730) derived from phytozome v7.0 (chr-ID scaf fold_17; pos 3641504 to 3641832)
gctcattgggtgagtccatttacttctttttgcttttcttaattcttttgctaaaacataagaatttcaagaattcttggagtgtgtgtgtgtgtattcatttcatataatataatgtaataattaaaaaaaaaatagggtggtttgacttatgattgatttggagaaaacccatatcataatattacatatcttcatattctatatagttttttcttctgtttattttctaataaataattttttagttgattgactaaattaaatttttcttttaaaaaaatttgttttgtgatggaatgcagggctatattgagttgcttgtgccc

SEQ ID NO: 53063 - DNA, 698 bp, Populus trichocarpa
  Intron number 1 from transcript POPTR_0017s14220.1 (locus POPTR_0017s14220) derived from phytozome v7.0 (chr-ID scaf fold_17; pos 14361998 to 14362695 reverse strand)
tctcatttcaagcccatcaagaatctccatcagaggtaaaagttcttttttcatctttcttttcttgcgatcttctttttcttttatgatcttgtacttgttaggttgttgtgtttgagcttctatggatatttgacttgatacagaccaaatttgcagtttctttaatcatgtgaaaacttttgattactggattgtctgctgaagaatttggtaacctgaagttaacttgcctgcatctttcttgaacttggaaagttcaagaaaattggtcaatgaagcttttatctaactcaaaaaccaccactgtgtcatgtatagcatataaggcagctcaattttcgtgcaaaatgttggtggttgcggtaataactgtagatgttccctgtccagaggtgttcagaacagtttcccttaatactttctgcgaaggattaggcaaaaggctcctgctactgcataagattgcatatgtgaattagtagttacagaattgttcacttttccatttctgcatctttttatttgtcaaggctactcagactgaagcagttctccattacttgccaaatactctcctgtattgatttgtagtggacagatttattcacaacacgaaattcctaaatattgattgctcaatatgttgtcaatgacttgtcttccttgtttttgtttctctcaaaaggttgggagca

SEQ ID NO: 53064 - DNA, 872 bp, Populus trichocarpa
  Intron number 2 from transcript POPTR_0005s15030.1 (locus POPTR_0005s15030) derived from phytozome v7.0 (chr-ID scaf fold_5; pos 11847541 to 11848412)
gacccggcttggctcggcaaattatcaggtaacttgttaactcagtggtgtcattttagttatatatattttaaaaaatccataatttgagctgagtcaactcttggttgactgttataactatgatattaattctgtctagagatcatgaccgcaatatatatttagctggccaccttttgacaaaaaagaaaaagaaaaaccattttctgaaaacaaaaacggtaggtggtgtgacaaggtgatgaaccttggtagtcacagatggaaaatcatgacattgacaacgctacggcgctcaaaatactcaaagaagaagaagaagcatgtttcggtagttgattaacatatcgttattggaccagacaatttaacaaatcgagatattttatttttattaaaaatataataaaataatattttttatttttaatattaacagattaaaataataataataaaaaaaatctaaaaaaatattaatttaatattttttagataaaaaaaattaaaaacattttaaaaaaatattagtttaaaaggttacatatcaagatataatgtgattggaatctgacctttcaaacttccaaatctcaactagggtttttcatatatccacgagtcattgataagaaagttacatattagttttttctcgaattgaaattcccagaaccataagaaagtcaaggcccatttgaattgagctttgtaatgtttcatatctcatcacaattctcaagtttcgagaattttcttcctgtaaattaacaaggaggagccaccttaattaagagattgaaagtgaaatactcccccattaattgcttatttaaaaggttatgttatttgcatcaggagggttgtgg

SEQ ID NO: 53065 - DNA, 442 bp, Populus trichocarpa
  Intron number 1 from transcript POPTR_0006s03580.1 (locus POPTR_0006s03580) derived from phytozome v7.0 (chr-ID scaf fold_6; pos 2339192 to 2339633)
tggtttcttcacagcaacgtaatcctgctccgtgggttggctccaaaaagcaacgtccttctcgcgaagataaaagtacttttttttgctttgcatcttttcttgttagttgttgagagttatttattagctttcaagtgtactttttggatctcatctgttaaaccctagcctaaacccttggttctaatgctgaattgatgtgaagttatgagtttatgcagcagagtgattttgtttttgaaattagtttacaatttatgcagttttgggttcgaaatcaatgagggcttttttttttaattgtctgagaagtgaataaactgcggtagtgagatttttttcaaaagatattggcaaattattaatgacaaggattttctgttgctgtgttttttgttttgttgttaggattatcagcaaaagatagagttggttcagg

SEQ ID NO: 53066 - DNA, 980 bp, Populus trichocarpa
  Intron number 2 from transcript POPTR_0005s15740.1 (locus POPTR_0005s15740) derived from phytozome v7.0 (chr-ID scaf fold_5; pos 12339627 to 12340606)
ttaagcaaggtgagttttcttgctttcgttcctaattttagtgataaaaggaagctttctaagtggaaggaaatgctgcgaattttgaatatacataacagcataaagccaacaattagtccttgttttgaaagttcggttatgttcaataaatgcacttagagaattttgatatttatacactaaaaatactattgcttgtttgtttcattctctatttcccatgtcaagatgatgaaaattttcccggactggctctatatgcggcggggtttgtctggtaggggtttttcgttatttctcattttgcatagaaacaaaaatagttaagaggggtgctggcagggtttgttttgtgacttatgcatattttagtttattgcttatgaagaaatatgggaagcttaataatattattaatattttgttgctattcttatagtgcatttgttaaggctgtattgttgtacctcaagggttgggttcattagcccttcgttgaaaatagccaacgttgtaatgctgacattcatttactcagctttttcttataaagtaagttgctgtggctttgctgcttctgtgctgcaaatgtatttttctgaacttatttaatggcgtatatgaattccttagtgatgtttgaaattttatagctcgtgaaatggaattttaagtatcaatgtggtacaataatagtagacagctggacacggggctgcctaaggctgtctttctatatatgaatatttatacatggtaaatttcgttatcacagtgatgaaaaatgatggtagatttaccattttaagtccaatgtagtttattttagtcatgctgtcagatttgtaaaatcaataacattattgcacttttatttagagtgatgccagaaattttataaattatgcttactgatccatgcatatgtccaaacatgtgtagagtaaggtatcatcaggcggaccctcaactgcaac

SEQ ID NO: 53067 - DNA, 1035 bp, Populus trichocarpa
  Intron number 2 from transcript POPTR_0005s02430.1 (locus POPTR_0005s02430) derived from phytozome v7.0 (chr-ID scaf fold_5; pos 1563431 to 1564465 reverse strand)
attactgtcacttctgacagtaacttctccaaaaggtaaacccttttgttgttttgctgtatttgttatttttgggtttcctggtttgcttgagttgatattaagttgttagcagtactttttgtgattccagaattatgggatttgttgctttctttagtcgatcagggaccgtttggtactgttactgttttgttgtttctagttttagtgaatggtttctttgttgtctagttgatttgattctgttggatgttaatcatataaatggtcggaaatagtggggatggcttgttttatagcagaagaagtcttaggtactctagaagtgaaaccagagtttcgtaggagaaaggaggtggttccagcttgttgtggcattcagggattatgatgattaggtgttttgtcttgctacacattctattttatgaacgagtttagtacagagcacagtgctttttttggctctgataagattgcttgtatttttcttggacgagtgttgtattgtacgacctgggccggtttagtggagtggaaaacttgacaactaaacaccctgaaacctatgagatctctcacttttaatatgtaacaatacatcattgagaaggttgtttcttgtttgttgttaaaaggatgaattctttgacccaaacatgacttctctggtgcttattccacaacttgcatgcatcagaaacccatgctggtttgatagatgattctctatttccctaattgtgttacatagttattcctattctgttcttcacaactagcatttgattttgcatgaagcctgtttgtttcactagaacatggacttttgagtttctattccttctctattcgccttgcttgttgaggttgccataaatcaatcaattttttctctgaacttctaaccgaagttgtcacaatctgtgccagcaagcactatcatggctatgtgccctatctcacatgattcctgattttgttctgtgtataataggtatctgaagtacttgacaaagaagtatttgaaga

SEQ ID NO: 53068 - DNA, 840 bp, Populus trichocarpa
  Intron number 1 from transcript POPTR_0005s25300.2 (locus POPTR_0005s25300) derived from phytozome v7.0 (chr-ID scaf fold_5; pos 23607336 to 23608175 reverse strand)
agctccatttcaagtagttcaaatttcaacccaaggtaattttttttctctgaaatctaactccttacctccctatattagctcaaatagcgtgctttgaattttgtttttttatatatatagttttagtgactactggaaatgggaaaaaatataataattgcttggattttgaggaattgagaaatggtgcaagggatattaaagaaatggtttttttttattaatcatttctcatttttgttagattaaagttttgtaatttctctattattttagctgggattttgtttttcacttcaatattgttgctttgttgaagaagtggacatgtttattaattaactggaatgtagtttgtttttgtaattttaaatgctctctatctgtttgatggaatgtcaaagtgttgttctaattactgggacaaggggagaatgatcttgtcgaggtttagcaacttattttatgtgtgtttgatgagttgatgatgagggtaacttttttataaaggggcagattggttacttttttttttttttttttttgggggggggggggggttataagttttgctttatactgcttattgctctaaatcttcttgattattgtttgaaaataatttatcatgctttctctaatacaattgaatcttgcaggaccttaaaaggttataacattaaattttgtagcgaaaaggttctgaaaattggaggatttatctttattttgtcacctagattctgttgctatgtttgatggcggagtgtatggatgacattttgtttctttttctaagttctcttgtcactgctgtattcaaccaggtacccagtg

SEQ ID NO: 53069 - DNA, 500 bp, Populus trichocarpa
  Intron number 4 from transcript POPTR_0005s27560.1 (locus POPTR_0005s27560) derived from phytozome v7.0 (chr-ID scaf fold_5; pos 25163362 to 25163861 reverse strand)
aagaaaaagctctggaggtgtgctttagttcttgattctctctgttcgtaatcaatttttggcattttaacactttagattcaaccttgccttgtgatttttcggttcttttatgtcgctttttgctatccccgtttctttattcattaatgatctttgggatccggactcacttcctatttacctttcaagtcgttgctactctatgaaagtatttgttgatcgttgtcccggaaaatttacttttcagctcattgctgccatgtcatagcatttgctgatcattgtcccaaaatagttatgaagattagattccttaggagtttgattatttttgcttttgtctctggtttgacatacaatgcgtaattgattccttggcaccatcacattgagtgcgttgcgtgcctgacattttatgatcagcataatgacagacagtgtttgtaatttcttgatttccagaaaactcgaaaaatattagctgagaagattgaaca

SEQ ID NO: 53070 - DNA, 610 bp, Populus trichocarpa
  Intron number 4 from transcript POPTR_0005s27340.1 (locus POPTR_0005s27340) derived from phytozome v7.0 (chr-ID scaf fold_5; pos 25055241 to 25055850 reverse strand)
ggtagtttggaagatcatcttttcggtaaatttcttttgcatcttatgcatagatttttaatgttctgcaatcttcttctgatttgttattcaatgaacttagtctgaatttgtttagtttctgatttattttttgtgtcagataattcattgctactaaactccctgccccatcttgccaccctctatttatccccttgatactgaaaatttgattattcaaccaaaacacatgattgccaccctctatttatccccttgatattgaaaatttgattatacaaccaaaacagatgattaagcaagttattttgatcttacaagtttgtcttgttgatgttccgatggatatcaatgataatcctaagtctatgttgtggaaagtttactttctggaatctcattcacctgtatgatttatctttttcttgataggtagatatgctttctcattgctcgttattcttgattccgcgcatgatttcatgtttttggcataggagaaaagtagatgattgctacataattttcagctagcatgctttttgataattgatactgtaattgtttctcagatctagaacctggtaaagagccattaagttggagc

SEQ ID NO: 53071 - DNA, 376 bp, Populus trichocarpa
  Intron number 1 from transcript POPTR_0017s01100.1 (locus POPTR_0017s01100) derived from phytozome v7.0 (chr-ID scaf fold_17; pos 794083 to 794458 reverse strand)
gaaattaaggtgagaatcatctctctctctctctctctctctctctctctctatatatatatatatatatatatatatatatatatatatatattcttttagatgatctgtatgcatgcatgaagaatcatgagccaagttttattttctttcccttttcctttatgttgatttacttattttgaggaaaaacttgcttctttttcataattcagtgagttttggtagctccagtttgatttagttattgtttctatgagattatttggtattgatttcaagtgattactgtttcttgatcatcttgatattgattcataacaaaatttacatgaacttattttgttgcagaaagctgtgttgaaattggagttgc

SEQ ID NO: 53072 - DNA, 412 bp, Populus trichocarpa
  Intron number 3 from transcript POPTR_0017s06360.1 (locus POPTR_0017s06360) derived from phytozome v7.0 (chr-ID scaf fold_17; pos 4879381 to 4879792)
tggttgttggcgattgtgtcctagttggtttacaggtgattagttgccttcatgatctctctctctctctctctctctctctctcttctaatatgagttcatttgaatatagtttgttggaaattgggatgggtaagctatcttatagatctgtttgctacttttctatgtttacatttagaattgtgctttgctgactgactaagtgaatatgagtgactccgttgttgatatagttcattcaaatatctgttgtggtattgttttgtttaggtgtgcaataataactaatttgatttttgcctcaactgtcttcttgtttctctgattccttgacatgtttttgtcctcttgtttctttgatttcttaacatgtttgatttgcttttattgccagccaattttggtttat

SEQ ID NO: 53073 - DNA, 560 bp, Populus trichocarpa
  Intron number 4 from transcript POPTR_0017s06360.1 (locus POPTR_0017s06360) derived from phytozome v7.0 (chr-ID scaf fold_17; pos 4879883 to 4880442)
cttttgctccaggtacattttatgttcttttctagtcatttaagtgtatgcctgattccatttttttctttgtcatcttaccatggcctaatgtaaagcaaatggacattgcatagtgcagtaattatagttttatgcttgtggcttcaaagtgtttaggtttgaatgctgagatagtcactatatataactaacattgccaaagaattggattttctccaattgtcatgcctaatacatgttatatttgatctccaactgagtattgatatgtaaatcaatcttcataagtggaatggagcttggaaataaggagagatcttgacttcgatgatttatactctgtagttatttttcacgttttagtttttatcccgatttgtttttgtgtttgcttatagcatttcattaaatgttagttttttcatgaaaactagaaagactcttgaacaaaagattcttgttatgcctcttatgtgtattcattttctagctgatgatgtaaagttttggttaattatgcaggcgaggcatcagaaagttggagagaagccccttct

SEQ ID NO: 53074 - DNA, 766 bp, Populus trichocarpa
  Intron number 1 from transcript POPTR_0006s24700.1 (locus POPTR_0006s24700) derived from phytozome v7.0 (chr-ID scaf fold_6; pos 23282119 to 23282884 reverse strand)
ataagtgcttttcggagttattattttgtcggtgagaatggatttctgttatttagattttatcaggttttgttgatcattgaatttgttcattggcagtattgttatgcttacatttatgaaatatatagatcgtggcatgttgtatatttatctaaattttcagcgttagcaatggtgaaatgatgtctcaaggagttctttcacatttagattttggacttgtcttcccaggggatattttgcaagctaatgtgaaatccattgttgttaaacctagccgggacttggccgcccggcttgggctgggtgtaagaaaaagtcaacctggagttgacttggtttgacccgtccaacatggtgggtcaacccgtgacttggcttacctagtcaaaaaatcgattgagttttttataaaaaaaaatatcaaaactaaatccttttgaccttttaaaaaaaattgattgacattggttaggccttaaactgtggtaatttctaagctattttgttttgtgaagttatgtttctattttatgagatgcaaaagtatttaaacaaagaaaaaaaaatgaggcagtgaaactaataaaagtatttaaacaaaggaaaaaaaaatgaggcagtgaaacttaaagccattgaagtgattgcgcgtttttttgtcgttctatatatatatatatattatttttattttttcattttttcgattgatccttgagttccttaaggattgtttttgttagcagatatcctgcttagg

SEQ ID NO: 53075 - DNA, 621 bp, Populus trichocarpa
  Intron number 1 from transcript POPTR_0017s13120.1 (locus POPTR_0017s13120) derived from phytozome v7.0 (chr-ID scaf fold_17; pos 13283293 to 13283913 reverse strand)
caatcctcataaaccagtgtttggtggcggccgaggtaatcgatacaacttgggtaagggttctcctaaaccgcctagggggccgcactatcgcggctgatagtagtttctctcatctactagcagttattcaatgcccatgatatgtacctatttttagggagcttgttaattccctttctagtttctactactgtcattattatctattggaatcgagtgggtgtagctaatttataagatcgaatataaggataagagaagaacgagagaaatgataatttattaaaagtaattttaaaagatacaattttatatacagctcttctttatatctctttcaacttgtatttaatgattaagattacaaatctatctcaaacactaaataagtaaataatgaagaaattaaattttataccctaatttataggccccaacttgagttttctcaaaagaagcagtaccctatgtcaaattttgtccgccaccgacattagaatacagtacagtgcctttcgttagtcaagagaaattaattgtatagtgctgttgatccactcaattcattcgagcattaaagggatctcttgtgatgtaatttttgatatataggaaaat

SEQ ID NO: 53076 - DNA, 522 bp, Populus trichocarpa
  Intron number 1 from transcript POPTR_0017s01930.1 (locus POPTR_0017s01930) derived from phytozome v7.0 (chr-ID scaf fold_17; pos 1415264 to 1415785)
aacagtggatttttccggttgtcctctacacggtatgttcaaaaacacgtttggagaactttgatttttgagtttggatcaaacaccctctttgtcaagaacaagctctgataccagttgttgggatgtttccagaactcaaacacacacaatttatgtggttcggcaacttgcctactccacggagctactggtttgtattaatgaagcttacaaacaatacaaccaaagaggaggagaatcttctcaactcaactctacactcaagctctctctactcttctctgttctctcttctctctgtgttttcaatctctgcaacttctctgtgttctctcgatacacatacaagaaacttcacaggggggcacattaatatacaattaatgggagtgagggggagtcctccaccatgtgctaaatgggagattaggtaatcccacttgcacatggtggggcttgcttgtctccaataattaacaacatcgggactcctaaagctagttacagactctcttgaat

SEQ ID NO: 53077 - DNA, 564 bp, Populus trichocarpa
  Intron number 3 from transcript POPTR_0017s13810.2 (locus POPTR_0017s13810) derived from phytozome v7.0 (chr-ID scaf fold_17; pos 14034873 to 14035436)
aaggttagtgatgttctttagtttgaactagctgtgttacttgttgtggctctctttcttgagtcacatacttctgagttttctgttttagtttgagctagcaatcttctaacacttttttctattcttgatacgcttattgtttcaaatgtttcgaactgaataaagaaattcatgttgtgacatgataggatagtaaacagtgttagaagattctaatgccttaaagttcaaacaagttggtgttgttcaagggttgcatctgtgttgtgcatgcgtgttgcacaggaaataatagaaattttcatattcttgtgtatttgacctttggctaataaaatatttattgcactagaatttatcatcaaggacattggttctgtttttataccttctctgatgaaaaaacagtcgtattatggtggttcttttaatttttttattctggatacttggtgtgcagtcatgagtttcatgtcagaaaatcttgaacatgctcatttggtgttttagtgcttggcagggtaacttgttttattcatgggagtacttttttcttcaggg

SEQ ID NO: 53078 - DNA, 749 bp, Populus trichocarpa
  Intron number 2 from transcript POPTR_0017s10070.1 (locus POPTR_0017s10070) derived from phytozome v7.0 (chr-ID scaf fold_17; pos 9061296 to 9062044 reverse strand)
tcctaggaagctctttttttgccgagcaaaatttggtaaggaattccatcttagaatttctttttcttttctttttatcaagcattgctttgtgttcgtgtttccattttaaatcgagttgaagccaatactgcgcacaatttgctagtttcctattgtctttggttgcactgaccagttttttttttttttttttatctgtagagaaattgagcattttgtttaggatccatgtggacaaaacttgacatattatttttggcatgaatgcgaattttggtgtatttgtttgctctgacaattaaaaaaaatgcctgcagcaaaaagaattaaagtttattaataaattttaaatagtgtaaggggatgactaaaagggtggaaatttctcgaagttggtgaaaaatacagtctgggaatgcatgaaacttaattagcagtaatataatcaatgatgaacaatcacgagaagccttattaacagtttgtggagagcaaatgagcttataatagatgacttgtaagtaaaccttgaaggctgcacattttttttgctctcgatttcttctggaaaggtttcattctggactatataacgatctacagggaagttcctggcggttcttcaatttttgactttatgttgtgttattgttattgccatttacttcttttagtagtgttttgtactggttctattccaggagtgagttataaagctattataataaatgctgattctgggatag

SEQ ID NO: 53079 - DNA, 476 bp, Populus trichocarpa
  Intron number 1 from transcript POPTR_0017s10070.1 (locus POPTR_0017s10070) derived from phytozome v7.0 (chr-ID scaf fold_17; pos 9062025 to 9062500 reverse strand)
acttctctctctagaggacctgtcgacatttcgcggtacttcttcttcttcttctactattaaagaaaagtatacatgtctctcctaatcaaattttccagtatttcactaatgtgtagttagtcttcattttaagcaagacatgatggcaacatttttcttttgtaatatgtttagcacttttcacttgccatcaaggtaacattgagttataataatatcttatctagagcttgtttcatcctctgaatttcggtttctaaattttttttgaggtttcagtttcttgtcagataccgtcttttcgtcggagggttaattaggggatcggtgggtaaatacatttaatttttttttaaaaaaaaataaaaaaatgcttttacccttctatacttgtgggttagtattatattgtatttactagggtttacattgccacaggtctcaactttctattcctaggaagctcttttttt

SEQ ID NO: 53080 - DNA, 746 bp, Populus trichocarpa
  Intron number 2 from transcript POPTR_0017s02970.3 (locus POPTR_0017s02970) derived from phytozome v7.0 (chr-ID scaf fold_17; pos 2137569 to 2138314 reverse strand)
actagaccatacagtgacagttctgattcatccaggtctgattacataattacttgtgtttcaccacttgaaatctaccagacatgtcatagacatccttacttttatcattggactttgtctttctgccattatcatttcggttaatggcttcaatttcactgtggcactaagtaatttaatcctccttgcaacgttgcttacagtgctaatcagtagctcttacaatgcatatttcgtatgatttaaggtgaataacaacccatgcttctaacatggaatgtcggtgttagaagtacaaatcttagcatctaggcttgcggaatctgattatttatgtcaatgtttatgtgaagatattgtattgtcagcatggtctgatgtacatcgcaggtttgatcttaccagtcatcaaaaagataaatgctgaagaatacatgatttcactgcacttcctttaaaaggaatttcgtattgtagctcggccgtatctttttcctgattcatgttccacatgttctatcactctgaaagaaaattctctttgttaagttagcaaaccagggtcacttgtcagtgtttcttttgttctttggatcaactttccagttttgtgtaatttgagtgtaatagatcgccctattatttttctatttgaatctatttagcctttggattattgcaactttgaatttacagtacaaataaattgttgggtatcagggcacaagttggagaaaaggaag

SEQ ID NO: 53081 - DNA, 955 bp, Populus trichocarpa
  Intron number 1 from transcript POPTR_0017s02970.3 (locus POPTR_0017s02970) derived from phytozome v7.0 (chr-ID scaf fold_17; pos 2138645 to 2139599 reverse strand)
ccattgccctctctcttcaggttagttccactcggtttctcttacttttcttgctttcaagactccagctttgagttgccttttgcttatgttatttaatagtgtttcacactgttcagcatctgggtttcttttatttcttctctggaatttgccatttaagtttatacaattgaagatatcacttgtcaccatgtttcatgttatgggattgggaatgcttttcaagctctgaacttaaagcccttggtaagaaattgtaaagctacattcctaaagaaaaaattgcatgcctaaatgaattaaccaagtagctttgttgcaaaataagatgaatggcatgtgtgtaactacgatgagaactgaattgtggctttctaatcttagttctggtgcaaaagtttactgtaatatcctaaactttttaatccaagttttaggaacaatcagttcttaaagttgaaccaaaataaaaggtggtagttcctcagaagttatggatttgagattatgggatttgtgagatgtgttcaattactcatgtttggagatccaaggtatcaatcatttgacactttgaatgttttaagattttaataatgcatttggtaatcctgttggtaaaatgtggagaagacattcgcccagacatgtccattgatttaaattttgtgctggaaattgcatttttattatctatcagatcataaacacatatgatttgttggatcgatgcagactgaattcattgttttgtatgttcatgattttgaccatgtgtctattaagcaatttgaaatgacggggatcataatgttttgatatctcatgattcacatctatttgatatgaattttgacagttatgaagaataatccctttttaagattgttctaatagtgttcttgttctcacttaagcattgagctgttgtgagggaaattctggctggtat

SEQ ID NO: 53082 - DNA, 334 bp, Populus trichocarpa
  Intron number 1 from transcript POPTR_0005s25220.1 (locus POPTR_0005s25220) derived from phytozome v7.0 (chr-ID scaf fold_5; pos 23525674 to 23526007 reverse strand)
gttttactgtttacacgtgacccgttgtttttcaggtgcgttcccgttctggatattttttgattttcagtttcgtgattcttcgtttgatttgtggagaagatgatcatataaaattttgaacagtgtggattttcttttataaatttaaaattatttaattattatgttttttgtttctaattttggaaaagatacggtttcttcctttgatcataaattgtaaattatatatatatatcttcaatttcacctcggttttgctgttaattacatttttaacctctcgtgtatatgtttgttttagttgatttgttttttcggaggcggagac

SEQ ID NO: 53083 - DNA, 882 bp, Populus trichocarpa
  Intron number 2 from transcript POPTR_0006s24940.1 (locus POPTR_0006s24940) derived from phytozome v7.0 (chr-ID scaf fold_6; pos 23435618 to 23436499 reverse strand)
aatttgattttgagaaggtaaattctcagttattggttctactttctacaaatcggatcttttattttgcataaattttcaaattttgaggatcatagagatataattatcatttttgatgagttctatgctacaattattggtagttacaacttctaaagaggaaaaagggtgtgaagacattcatcaaaaaatcattatatacatgtgtgatactttagaatattttgttagttcaaatttaaaccacaatgagaaacaagggtggtatttcttgattttgttgaacccagaattttgattttaagtgtttgtggcttgagcttggagcaactattgccctgtgccagtttagacctcaaaccttaaaataagtacaggatatgtttgaaaggtgtctttggatcccttttgttttgataattattgttataatttttccaaagaaaaggaagattttttcttttttcttttgtcttcagaaataaaaagaactattgttagtacatagacaattataaagctaataagctttatatttatctgggaaaaaactaagatctcatcagatggaatacctagaagtagattaatgagataaaagcagatttaatgtggatgtttatttaaggataacttaacttgctagatgatagtttatgataaagcaatagactatgattctgcatgtaaaattcttcgacttgtttttctctgtgaagtataagatatgtacattttattcatgtactttatgtgacctgtaaaccatgtgatgcttttgagccatagatactagtttttttctgtaattttcattgctcatagtagggtccttctctgtgattatcattttatcctgatttatatgcaattctgcag

SEQ ID NO: 53084 - DNA, 698 bp, Populus trichocarpa
  Intron number 3 from transcript POPTR_0005s22790.1 (locus POPTR_0005s22790) derived from phytozome v7.0 (chr-ID scaf fold_5; pos 21689023 to 21689720)
ttccaagcgcaaagaccctaggagagtgggctggtgtgagtatctcttccgcttcctgtttttaatcttacatctcttttgattaactaacatgtctgcaaactctgtattgagattactgttcttaatgttagttttgactacttgaagtcatagttgtaatagttcaactcgagaatagaaatcactatctgaaacgttagagatgaaaatgtaagtttcttacaaagagggggttaaaatcgaggaaagggaaacattaatggcatgtgtgattactgtctgaaattaaatggtcagatggtagattgtacaagctcttttgtgtgctcttttatgtttattcaattagcttcatttggagctctaaagaaacagtatttgctctgttggtttgtttaattttaatgcggtgaagtccatattattgtaatgctctgtagaatgttctttaatacttcaaacttgtttctagctttgttgataatggcattctaattgtagatcccctcaggtttcaactcaataaaaattgtgccatggtctgttagggtaattgtcatttggattgatgggtcatgttgctttctcttgtgaaaatttgcaatgtttctccttgtatagtagttattgatttatctaatatgggctcttggtatccagttgtgcaagattgattcagaggggaaggccaggaa

SEQ ID NO: 53085 - DNA, 761 bp, Populus trichocarpa
  Intron number 2 from transcript POPTR_0005s13820.1 (locus POPTR_0005s13820) derived from phytozome v7.0 (chr-ID scaf fold_5; pos 10832649 to 10833409)
ttgaaagtgactactagacacaagcgttcaaagaggtaagctattaattcaatcttttgtaagcttgcaattattgttctcattgctcatttctgttcattgctattctacttgatgggttttttttaactggaatggcttctgtggtgggcttcacgagtaaaatggaaacttggggcattcatcacacctgctaaaaagtgttgttttataagtaaaaacaacgagactacagttatataaaaccccatgaaagttttggttttattctccgagctattttccaagcagaaaagactatgaaatttttgtcgtccagatgaaattttagagaggaacagtgggagagcttttcctaaatcataaagaactccttgaagatgggattttagagtatgtttcccagcttggaatttggggatttttcttttgatttctcccaagttccttctctgataaagctagcaattaatgagtaatagatgcggtgaatgaaactgaaaactgtttcaagttgggtcatgggaaaattattgcaaagtggatctttgataggaggtaaccgttaacatctctagccacctcctccttcccagttaaaaagaaaatccagtaattgtgttgcagtagctgtgctcattatatagaggcagccaagccttttaatcttttttttccttcttcattatatatccacttccgtttttatgtttgctatttgtgctgtggcagcttcccagataagaaaagagtcgaggaag

SEQ ID NO: 53086 - DNA, 523 bp, Populus trichocarpa
  Intron number 3 from transcript POPTR_0005s13820.1 (locus POPTR_0005s13820) derived from phytozome v7.0 (chr-ID scaf fold_5; pos 10833419 to 10833941)
atagttcctttgaagcatccagccacataaagctggtaagactacacctttttttatgcccttttgcataaaaaaaaatgaaaagaaaaagaaccagctcagtatcttatttcttctgtacagtatccaacctttcatccccatggtttataaagacctcgagcataaggccagccaaaactcaactgtaaaatgacttctttaaatctcctcatctgcataaggttgtttcttcgccttcgaattattattctatttgtttaggttgggggaatgggatgaataattagcttaatacatttgagtcaaattttagttatggtccccactgcggtggtttagttgaatggaataaattattcttgtgatttaaataaagaataactcatataattaactcaaaagctaagctgatttggtagcttttcccaacacattaattcattaggtgaatcctcctggatcataacataagaagcaattactaagtatatgatttttggatacaatctgattacagaat

SEQ ID NO: 53087 - DNA, 697 bp, Populus trichocarpa
  Intron number 3 from transcript POPTR_0006s12570.1 (locus POPTR_0006s12570) derived from phytozome v7.0 (chr-ID scaf fold_6; pos 9721902 to 9722598 reverse strand)
cctcaaataacagcaagccctttctggtatgatataatgttgcaatgtacgaatttttttaagcgatccacatgtcaatgtggtactactttatcgtgatttgagcaatgtagttgtagttgaacttatgatgagcatgtagggtggttcataatttgcttgcttgtccatcacagtctagaaaatcttagtggcttctctgtagctgttaagttcaaaattgtgatgatcaagttgagttggtgctttaaattcctttttgcttgtaaatttctccatccgcagtgaaggagattgattgagtcttgttggaagaatcccttactaactctactagctggctagtgtgtgcctggagctatattaggcattgattacccttgagcctaaaagaaacaaaaaatcaaacatgaagttactgattttcttgtctgctaataatttgggggtcttataattctgaaggtataaaagacacctttatttgagatatactatccatgtaacaaagacttttgttggtacaacataatgttgctatgtatattcatggcaactatgacattggatgataggatcttaggataaatgtgtgttttgaagtttaaagaattgattgttctggcatagcttactgccagcaagcacaattgcgcaattacttatttttggatataggtgctttttggactggaat

SEQ ID NO: 53088 - DNA, 641 bp, Populus trichocarpa
  Intron number 1 from transcript POPTR_0005s22530.1 (locus POPTR_0005s22530) derived from phytozome v7.0 (chr-ID scaf fold_5; pos 21458445 to 21459085 reverse strand)
gtgctcttgcctctattgcattctctcaggttttgtcttgcttttcttcttctttcttgtgtatacccctttactttgtatcattcttgatggcattggaattcacaatctgggattggtagataactggaataagcaatgatgagttattgattctgtttgattgaatgtacttagaattgggtttgggttgaattagtgaaaaggggagattttatgttgtgttggaatttgagggatagataaaaaaaaaatacttagaatattactagtgcttggtatcggaatttatattttctttcaagcttcccaatttgtgattcttgcatgttatattctgggcaaatagataccagtcaaaaggagatgttagagtggagctttgttcactaaggtttgaaatatgagcgtgcatttaaatgctggaaatcgttgttgaatatatgctctgaattgctagaaatttgtctatgaactgtctgacttctacgtcctcagtatgtttataacaaatttgtattaaattcctttgcatgttaatattgttgattgccgcccccccccccccttatttgatttttctgacatttactagctatgtaccagcttatcaggatttttctgcgaaatcaacaatctgg

SEQ ID NO: 53089 - DNA, 717 bp, Populus trichocarpa
  Intron number 1 from transcript POPTR_0017s10620.1 (locus POPTR_0017s10620) derived from phytozome v7.0 (chr-ID scaf fold_17; pos 10106552 to 10107268 reverse strand)
acacaagaaagaccaaattgtgtgtaactttatctgtaagtatagatgaaaatcacctttcctcttttgtctactctgattcgctacttccccccttttgccatgtttgctgtatctgctggtttttaatgtgagtttaatgtttaatttgttttctttttgtgtgttttatgtatgctgtcttgcttgagagtgtttgttttgctttcttagaccaaacccagatcttgttagcttctgacctagctgaattcttagtctatcatggaggagctgaagtaaacagagggagtggttttgtgtctgtttgagagagagaggtgaataggattatctcttactttttttttatttttttatataagtcaactgctatggaatttgatcaaaatccaactaattgttgctttgttaaaatgcatctgggtttcttactagaactcaaaaggttgtttacatcttcttttttcttttgggtttagaagtggaaaatgcactattaatagcttgagataaaaaaagaaggcgttcatttgatttgacctaagtaatagtatctctatctaggaatggctttttaatgttccaaattttttgcacgctcaagttagttcaatctttgttttgagatcaggaagggattttcccagttggattgaaacattttttgaaattgaatgttgttctgtgacagtggcgaagattggacacttaagg

SEQ ID NO: 53090 - DNA, 555 bp, Populus trichocarpa
  Intron number 1 from transcript POPTR_0005s21380.1 (locus POPTR_0005s21380) derived from phytozome v7.0 (chr-ID scaf fold_5; pos 20484735 to 20485289 reverse strand)
tccgctctgatcgtgagcttcgcggcaaacttcacgtatgtgcctctactctcttctacatgtgcttttgtaaaccctatctctttttatttatataaacaaatgtcattttggcgaattcaatcccaagaaacacagagtgtcaactctatgttttttttttctgtgttattattgtcttgaatgagttcttacaaaaacaacattgacactaactttatgttttaaatcaaatggtaaagagatgatgatgatttttttttggttatttaaaaaaaaaaaaattcgtcggaggatcaatgaagtgataatttgtttgaagagataaaagtaagggtaaagaggtgggggtttaattatataggtgtatgtttttcacgcaattccatcgttttccccattggctgtacatgctaggttaaaagtaatgatttaatacagcagtgtatctaggctgagatagtttctgatttttccaaaaacaaacaagttgtagctcgtgaatttatcagcactgagttttcgtttggattggaaatctggttttgcaggctt

SEQ ID NO: 53091 - DNA, 684 bp, Populus trichocarpa
  Intron number 1 from transcript POPTR_0017s05190.1 (locus POPTR_0017s05190) derived from phytozome v7.0 (chr-ID scaf fold_17; pos 3985895 to 3986578)
gagaggactgaaacaggtaaagtaacaagcccagtagagctcaaagattgtatagaagagttagtaaagttcactcctggggttcaatttaggcccctcaagggagtcctcttcttacctgctcaaagaagatcaaaatgatcaccaccccatttcacatactacttctggtaagaaagttttgaactttatgcattagaaatgaacttttttgattggttgtttctggttctttttctttttgtgtttggtttctgggagagtggcatgctttgactcatttgggctagtttgttgactttggtttttgatgatattattgatggttgctgagaaattcaatgataagaaaaggattgagaaaggaaaacagatttctccttttgaagttataattttaattggtttaatgtagggttttttttaagttgtatatacttgcattgggatttattcctttggccattgattggttgctgagaatttatagaaagaaaaaacatgaaaaggaaatagagagggagagaaggttcgtgactttattgtgctttgattgttgttttcttaattaatgttaattaaaagacaatttgatattgctttatgtgctaatttttcttttttcagtcattgagttaaactgttgcagattgcttgagacaagttcctccacagcctctatac

SEQ ID NO: 53092 - DNA, 1012 bp, Populus trichocarpa
  Intron number 2 from transcript POPTR_0017s05190.1 (locus POPTR_0017s05190) derived from phytozome v7.0 (chr-ID scaf fold_17; pos 3986703 to 3987714)
aaggaactgaattggtaaatatatgttttttgtggtgctagtttttgctttctattggtatcttcacaattcttaactgattgtttcaagttttatgatcataaataattgttgaatcctatcagatattaaagactttaaactttgaacttcatgttcaggagcctttcttcacataactgaaaagtacaggctgttttcttgcttataatttctgtaccttactatgaatgacattcaccttctatgttgtatccttgtcatttctggggtacttaaaattagattcagttaaaggccaattatggtgatttggtactttttgtagatggctgaaaacaattgaagggaggtgtgctgtaggcgactataatcggtagagttggcctgtttactttctattccccttcgtttgcttataatgtctgtttacttttatgtagttggtacacatttctttctggtgcaatttaggtttcttgtttgactttttatgtgtctatttttgttattccccttcgtttggttccagaatggcatcaggagcagtaatccttttcagtaagtgtgttgcttcaggttcaggtgataataattccattcaaacttcctatgctttctttttgcaatttggttttctaataacctcttctcagcaagattttcatcgccatgcttcattttttgagatgttggaagcagggccttgaaaagtccttcccggagtaaacaccatagctgaaggtaacaaccttcactttactggaaaaaacaactcgttttggaagggctaagatagtttttttttttaaatatgtgggccaaaaaaaatgcctttatgcttagtgtctatagctccgtgtctcattttcatatctttatacctcaagtttatatcttggtattttatgttcataccttatggttcaaatttatatttagtccaataatgctgtcttttcaggggttagagtttactgaaagttttacacagaagagaaggaaagatcca

SEQ ID NO: 53093 - DNA, 579 bp, Populus trichocarpa
  Intron number 2 from transcript POPTR_0005s07070.1 (locus POPTR_0005s07070) derived from phytozome v7.0 (chr-ID scaf fold_5; pos 4736021 to 4736599 reverse strand)
cacagaggtaaaaatcattataacaggttttctctgtttcgttcaaccaatttatgaaaaaaaaaaccatttagcattcatttcttgttgttggtcatataatcaaatggtccaacctgcatggtcagtactacgatgtctagaagattgtatgtatcttgtccttgaggcttaagttaaacctgaagaacggaattattgtatgatgctgccactcggatatgactccctaattgtttttccaattttcattaacatataaatggatggtagcatgcgataacttgaactccttgattcttgagctttctcggatgtggttagtttcagcataattttgtcacttgttttatggtaaatctgtaaacctctgctgctttgttaaacgcaattatgctccttccagctcagttaatcttgaattatcactgtctgtcaaacttgcatgtgattctaattagttttcaatattctatgctgtgtgttaaacaaatgaagttatgttcttagtatagcagataccttaattatttttcatttacaggctcctcatccatattaccgaccccgtaacaatct

SEQ ID NO: 53094 - DNA, 304 bp, Populus trichocarpa
  Intron number 1 from transcript POPTR_0005s07070.1 (locus POPTR_0005s07070) derived from phytozome v7.0 (chr-ID scaf fold_5; pos 4736703 to 4737006 reverse strand)
ggtaagggcataactgaactgggttttgacttcttgttgttttccttgtttctttgccaagtaagtgataatcgcatgttctgtgtgttatcatgtaatgatattaggacttttgtctctgattcttcgtaatttatcgactgaaatttgaaaaccttgcttgatagctatgcagtaattcatggagtccttcagttgtgttcctctggattctggactgtaactacataaggctttgtttggagcttcttgaactcaatcgtttgttactgaaatcacagagttccattttgtaggtactata

SEQ ID NO: 53095 - DNA, 732 bp, Populus trichocarpa
  Intron number 3 from transcript POPTR_0017s12700.3 (locus POPTR_0017s12700) derived from phytozome v7.0 (chr-ID scaf fold_17; pos 12888890 to 12889621)
gctatcagcaagcgcttggtatgtacgggtttaagattatgttaggacattcatttttctcctttctgcatttttgtttgataacattgttttgtttcattttcctcatagaatttcttcgacgacctccaatagacgagacttctcagctaataaagaatattatcaaagcaaatgaaacaaaaagggttaaatcttatattgaagctggttgtattaatgttcatgatagcatacaaaatacaaacaagtgtaagtgcaaatgtaatcaatattttacacttccttctctagagtttagtattttatgtttgttggttctgtttttctgcaaaactttttgggctaattgctatgcactttgacacacagaagtgcatacatgcctactcggacttcataaccatttaagcaaaggtaatcttttcttctcaatgttaagtaatatctaaacaaaacagtctttgagcttggaatatgtataaatcttctgattttccttctcagtaatttcttttggaagggtggactgttatgccattacatgtttggcttgctatctgcatctatatgttcagcatttatgtggatgtgtgcgccacatttaccagaaattgttgtgcaactagtagcttgtttaatttgcctaccattatagtactattagttgccactctctgcacctacttgtttctcagattgaaatgtgaattgcagccaagagcttactaa

SEQ ID NO: 53096 - DNA, 538 bp, Populus trichocarpa
  Intron number 1 from transcript POPTR_0005s27380.1 (locus POPTR_0005s27380) derived from phytozome v7.0 (chr-ID scaf fold_5; pos 25084188 to 25084725 reverse strand)
tcttacacttgatctctgaacttcaggtaagttcacttgttgacaagctctttactgatgcccatgttcttgtcctttattctggtccttcatctctttcgaaggtgcaaggctactgtaattgctccaagaaaaggccaaaaaatgaagaagtaggctgaagggttactttgttaatccgttgtgatgttttgagtttgaacagataagttttaaacttgtgtattctggtttgataaaacaactgctgtaaactaaagaacgagcttggagaatttttttgattttgttcttcttacactgctatcttgcaactacaggtctttggtatggaattattttaaattttttattgccactgagtgatttgttaaagaacatgataattttgaaatcaatatagaaattctttgcaaaggttcatatctatgttttttattttggttattgatggtaggtctctgtgcctggagttgaatgtgaatttgcttgccgttgctgtttatatgatgcctttgtccattttcaggcaagagaa

SEQ ID NO: 53097 - DNA, 1003 bp, Populus trichocarpa
  Intron number 1 from transcript POPTR_0017s13430.1 (locus POPTR_0017s13430) derived from phytozome v7.0 (chr-ID scaf fold_17; pos 13594797 to 13595799)
ctcttgagaaggtcacagctccttcattcttccaggtacacgcgttttctctctttcagaaaccaaacctcacttccatttttgtcaattctttctttatttccaattttagtaattcatgttgtaatagattttaccaagtcttgttcttcttccttgttggctgtcaagtttttgttctttgagttaccctagttgattgaaatgattctttgtcatcattgttattattgtttttggcgatgttagtgtcatctctgaactgggttggcaatcctattcttgcttttgggggaaaaaattatgaaataaagcaaacccttctattattatgcggttttctttgagtttttaatgtgatcataaatgaagaacttgtgaatttggttattctgcttcattacttggcttagcatttggttttgttcctagcttttaattgatccagaaaggataaacatttgataaagggatggtagttgctatgagtgaaaattggatgaggctagtctgggattgttccttcaaaagacttcaaaaagctttaaccattccattttgtgtcgaaataggaatgatataatagtataatagttcgtcaatccaacaagtcagtttctctgtggaacagaattaagaggaaatggtggggtgggcttgaagcaccagtttaggaagtagagaagaaaaggtagacattattgcctcttttaggcaactaaatagaataccataagaaactaacaagcttattcattgtcacagactgtaatagttacaatcgatcttacattagttcactgctgaaagacattggaaggatttttttttcccttgcagcgttttgttcctggtcttctaatgaatttgtattaggtttcgatgtgttgggacgtagaaccagaagaaatacaaccttagtcttttcgaatctttaaaatatgtgaacctgactctatgtttgtactttgtatagtttaaagatcgcagatacttaagcatc

SEQ ID NO: 53098 - DNA, 796 bp, Populus trichocarpa
  Intron number 1 from transcript POPTR_0030s00330.1 (locus POPTR_0030s00330) derived from phytozome v7.0 (chr-ID scaf fold_30; pos 127817 to 128612 reverse strand)
ccattttaaaggtacacattcgaattcaaactaaaaaatcacacacatttgttaacaattactactgatttctttatgtcggtcaaagtgtattggtatttcttttatcttgaattgttgcaaatgtagcttctttaagctcacgcaatcgcctgtaatttagcgtttgataatttaatgccgtttgatataaacagatgtgtttagtaggatttttttaaaagaaaccagtgccgggaaactgagcttaaaatagtgactggagttaattacgtgttgttattttttttggaaccgaagtcgtttgaatttggcatttttaacttctgaaatagaataatttagttttgagattatttttacatacacaaatacgaattttaagtttattttcggaatgatgacttggttgaatagagcttttagtttgcttgtgcatttgaatcgcaatttagattttttcttaggaaaaaaaaatttgtaacaattctgcagagttcaaaatgttgatgggcagagttgcatgaagaatttggggtcctgttgtattatcgttagtttttgtattagtccaagttatgtttcatacttggaattttaggttaaataatagtgcatacagatttttagtagtttttttttttcaaatctatatgacgggaatgcagccatgggttttgaaagtcaatgtgttatttattgccattgatatggaagctgagcttgagtctttttttctttcttgggtgttgttcttgcagcttcgatcgctatcaagtcctagtgaaattgcaga

SEQ ID NO: 53099 - DNA, 616 bp, Populus trichocarpa
  Intron number 1 from transcript POPTR_0006s12490.3 (locus POPTR_0006s12490) derived from phytozome v7.0 (chr-ID scaf fold_6; pos 9651727 to 9652342)
gtagcctcagtcattgctgtgggggaagagattctgtaagtccctcattggtagatgcatgttttttgtatccctgctagtttctgcaattgtatattagtttttgtatcttcctcataatctcgggattttcctcatttggtactggcaattcatctaacaattaagtggtggttggtttctgaatttttaccaattttattcaactattaagacattttcttgggtacgataacctttccgctcactctagtttgatttgctaatttttatttataattcattagattatgattttcgtgatctgtggtcaagtttgcattagctcataatccctcaaattgtcttaatgtcttttcttagactgcacacaagcgtaacaaatttgacaattgtgggctatatttattgtgcaaacatttagtggtcatgcatgtaatggagacatgaacaagaatctcactatttgactaaaatatttgggtgtgtttgcatattttaggccctttatattttattatttctactgccagctgttattgctgaagtttctggtacttgttatctgttccatagctcaggttcggcactgttgaggatcaactgggaccttcat

SEQ ID NO: 53100 - DNA, 757 bp, Populus trichocarpa
  Intron number 1 from transcript POPTR_0005s07160.1 (locus POPTR_0005s07160) derived from phytozome v7.0 (chr-ID scaf fold_5; pos 4816045 to 4816801)
ccattgtctctcagtctccctcacgttaactacaggtctctttcttgctctcatttatactatcttttgtattcctattcttggttgactgatgataaaaaaatatatattggcagtccattgatggatgatactggtgtctaaatcttttgtcatgaaaaaacttaaagttaaatcaagaatgaaatttttatgacgtttgcaattgtgggtttggacttcttttttcctctttcttgagttgatgtttttgtctttgagctatttagtctgaaccaacccagcaacaattccgttcaatacatgttctttaaaatgtggctgctagcctgcttctgctgctgttattgaattggttcaagaaagttttcaagatggaatcatggattgggtttagatgtgtgcttgaaatagtgtgttcatttcttcgaaaaagaaagaaaaggttacttgccttggaaaataatttgaatgctaagacatgatcttcttaactagacatcattcagcagaaagtttctaaatcagcatttgtgacccactcaagcttgacaaggattttgtttgttcttcaaacatatctctgtatgatggctgcttctgcttctttcttcttcttttttaatgttatagtcttttaattttagtattagagctggaacaaaaccagtagcagagatgtagatactaaattccagtggttttactttgttcttttgcagctgcggttcttgtgggtatcagttaaacttgaact

SEQ ID NO: 53101 - DNA, 619 bp, Populus trichocarpa
  Intron number 1 from transcript POPTR_0005s15650.1 (locus POPTR_0005s15650) derived from phytozome v7.0 (chr-ID scaf fold_5; pos 12257172 to 12257790)
caccccccttttctcccctcccccctcttcttcaggtacccgtctctctctctgcctctattcataccgtatatacttacgtttatacggttgtaaattaagcagatctggccatgctaatgtaagttttgatcggatctggttttggcttactcagctgttttttatttttttaataattcttatatatccttgtggaatcggtatttaccttttttataaatggaattttgttaatttttcattttttttagggggaataagagggatttctgggttttttgttcattttggtcttgattttattggtttttttctattggttttcgtctagatctgtgattccttcttgtttggtcgcttagaaagtagaagaaaattaaagaattttaaacggatttggaaattcttcttgtttttttttcttgtcaaaattttatttttaattaattttatttgcggttctgattagatcagagttatttgatttatggtgatttagatggggattaattgattttttatctggaaaaatatgatttttgagtctaaaattattgtgttgtggttgttgtggtttttttaaggactgttgtggatattttgtacaaatttgagg

SEQ ID NO: 53102 - DNA, 809 bp, Populus trichocarpa
  Intron number 1 from transcript POPTR_0017s05700.1 (locus POPTR_0017s05700) derived from phytozome v7.0 (chr-ID scaf fold_17; pos 4467688 to 4468496)
ccaagtacttttctttatcacctttggtattattatttaattctcgactattaggtgaacctattgcatttgtgatctatctatggctaattgttttgtgtttgcaaaatatggaattcgagcatgtatatttatttatttacttgtactccttctgagttccaagaagacataagaaggggaaagccctaaggaatcattgctgaaggttgagatcttgaatgatgattgtagaatcaatttcttgtgttgtgttttggcagatatttgagcattaacttattgaggacttttatcctaagatttattctattgttgatccactctgataccttgttcaaatcaagaaattcgttgtagatttgtatggatcttgagatgtttatggtgattcatagtagaaaaaaaagttaaattgaaagagatagagtttcacagggttagtctatggaaaagggaccagctaggaatgtgtagttgaggcattcatcttgaattcaattacaaaagacacctaggcggcctacattagccgatgagaagatgaggccttgcaggttctgtccacttattaagggttaatctatgaggggttcttttatgttttttgaataacagatgaagttacttgatatgtaaaatgctcaattttagttttaattatcaaatgacaggcttaatgctcttcgttgagttttcgtatgtccatgaatttctattcttatgattgggaggtgtttctcatctgtctctctaatttatttgatttttcaggagaaggcagctttcattttctgtgttgaagacag

SEQ ID NO: 53103 - DNA, 614 bp, Populus trichocarpa
  Intron number 2 from transcript POPTR_0005s04110.1 (locus POPTR_0005s04110) derived from phytozome v7.0 (chr-ID scaf fold_5; pos 2717436 to 2718049 reverse strand)
gacaggtatgtaagatttggttgatgatttcatctgtgtatttgctaatatgagtttctttttgtttattttcctccatgtgttattaagtattgagatttattagattagaatctgaagtgattggtaaaagctgtgagaggagataatgtctttttgtgtatgaagttatttctacagatcttattttgtgtagacaatgaagttgagttaagcaatgtaaagtttgattatgctgataatcttcaagttggcgttaaatggtttatgtagttagattttggaagtttgttgcactttactgaaaacatggtttaagatcctcggaatcgtcataccagaaattcacacgagcaattcgggtcaccaattgagtactaatttccgttcaagtttacttcaagcatagaatatttatgcattagatgaaattgatcggatatgattcaactgatttcatcattcagaggcaagggcttacagatagattgatgagttgtttgtcgtaatttctgtgctatatttagatgtattttttattctgtcttaaactgacaaatttattgtgtttgttaatagactggagctgggaagacatatagcgtggaggtaaa

SEQ ID NO: 53104 - DNA, 1029 bp, Populus trichocarpa
  Intron number 1 from transcript POPTR_0017s12470.2 (locus POPTR_0017s12470) derived from phytozome v7.0 (chr-ID scaf fold_17; pos 12636057 to 12637085 reverse strand)
gggtaaagaaacagtgatccttttgcttaaattagtttacttggtcttgttgattagtagtttcatgttttcttctggttttgattttgcccttttttgttgctatttttcttgttcgtttcctgttttctgggattgtttttttggctgttttgttcaagaatcttcaagttttgagggtgcgaatagatgatatttatcacagattggactatgtatgtttttgccgttgaatttcttgcttttggatttgggttggtggcactgtatctttatagtatgtaagttggcattatttcttatgatctatggattcacaagttaatttccaccacctatatattactttgtattgtgtttccgttctgaattatatatttttttaaccagcattctaaattcttgttgattcggtgaacaaatcaatatttttttttaatgtgtagtattaatattgttattattgtgttagttgctaaacataccaaaaaagaattctcttattgatttgggtttaagaaactgaggctagaatatttgcgcgcttgcaaatacaagcatgtgtgtagattacaaaatcaatattgaaagtaagctgaatggttagcttaggtaatcgaacgagctccattcttctgataaaagttggagagttggagaaatttcatgtatattttctcattaaaagtagataaactgatgctttggtttttattttttttgataactcactgatgcgcgcaaatgtaacaaacagtgcaaagtgcaaacttgcacgatttttctctttcttcagtttttttccccatcaaagtatagggttaagatttcctgtgattgaacctgaatatttcacagcactgctttctaaagctagaattgtttctgttttggacacatattgttgctttatattgaagggcctgatgcttatcaacttccaacttgttatttgccagtcaagttttgaaagtagttttcatcatttctgtaggctgacagagaagaaaagggtggacataagcgaga

SEQ ID NO: 53105 - DNA, 497 bp, Populus trichocarpa
  Intron number 1 from transcript POPTR_0006s07560.1 (locus POPTR_0006s07560) derived from phytozome v7.0 (chr-ID scaf fold_6; pos 5480232 to 5480728 reverse strand)
gatcttcgtagagttactgctaattctagaagaaggtaaagtcttggcctttttctgttgaaaaaaagagtggatttttttggtcatgttttggctttttataaattagtggaatattggctaatgaaagcagaaggggttttgtacttgtttttttttttttttttatcattttaaatttagtttaaattagaatttaaagatgacactttttttttttgttatgtttccattttgaagataattagttgattatccttgaaagttataatataatcctccgttgttttccagggtttgatgaatggaaccaagtagtagtggttttggttgtgatcagttgttttttatttttttctcttatttttggttcatcaaaagtcaatcaattaggagggagtttccagttggatgtcaaggttgaaagtctgtttttgtatgcattgctggtttgtttgttgtgttgatggaaatcaaaatgtttgtctttgccaggt

SEQ ID NO: 53106 - DNA, 906 bp, Populus trichocarpa
  Intron number 4 from transcript POPTR_0017s10560.3 (locus POPTR_0017s10560) derived from phytozome v7.0 (chr-ID scaf fold_17; pos 9997899 to 9998804 reverse strand)
cctctcctttacttcccagatacaacgagactgaggtatatagtctatttaagctaatcctgatgtgtaaaaattggttaagtgctggttgtgcatttaagcaaaatagaaacctgatactatttgtgaatgggcccagagtttgtgctgcaatggtgaacctgaacacctgaaggcattagctcctctttattatgaaactgtgattctcaactcaaatagccttgtcttaatataactattatcctacttatgctgatgctggtaggttagtatgcagcttggtcatgagtgtagatgatatctgattgtggggataactgtgtgaaaatatatgaaagaataaggagatacgagttcattctaagtaaaaatggaggtggtgccctttgaggatgagtatgaggaagattgtctgaaaagattgacatatagaatgtagatttatggatgcatctatgcggcatagtgattggattcaaacaattggagagaacagaggatagatagaccaaaaactgacaaggtttgaagtgctaaaaatgatttatggttcacgacagttgagggaaagatggaagcttgctcttttgaaattagagtgacatcaatttgagaattgtggaatactgataccttttgcagctaccttttgcctgtttcagaatttgatttcttttgctttgataagtgtgataaaggaccaaggtcaattaccttatgttatttgattacttgcgttttaccttaaggaactaattaactttgacttgcaattatctgtaactaatgatgatgaattttcaataaaaaatgtatcagcatggattctcagcaggcacaattttttaccattgtgtttctaatgtagatctgggttccaacaaatcctcgaggtgctgaaag

SEQ ID NO: 53107 - DNA, 719 bp, Populus trichocarpa
  Intron number 1 from transcript POPTR_0005s23000.2 (locus POPTR_0005s23000) derived from phytozome v7.0 (chr-ID scaf fold_5; pos 21832923 to 21833641 reverse strand)
cccttttgtcgttggtgtttctgtctttatttttggtaaggttttcatccttcccaggattcaagatcaataaaaaattccaaaacaacaaaaaaatgatgaatattgctacaacaatcaacattgcttttcttctttaaccatgaagttttcgaggccaatacaattataaacgttcctcgccattcttcagcaacatcccagtttcttgtaaaaacaaatcccagtttctttgtgctccatagtcaaatacgttgttcattaattgcttctagaatgaaaatattttattctgatctcttaattagttaatgaatattccttgtgtgtgcattccattccatgcgacagcgaacagtaaagtgatatgctatcacgacatctaaaacttaatttcaaacactaactttatcggtttaatactttaattatcatacatactatgcctaagccccctgtgtcagctttgttctttattaatttctgccctcgcttttaaatgtacgtttaaaaaaataggcctccggttcactcaaattaatcttgcttttaattattatcttaagaacagaaaatacaacgatatattttgcatatacatgcatatgtccatagaatgtttgatcaatctcgttcactgatttcgatactcatatataattgacaatactgattgtggatcaggtggggcagcaacatacgctagactgaatccaaac

SEQ ID NO: 53108 - DNA, 811 bp, Populus trichocarpa
  Intron number 1 from transcript POPTR_0005s11720.1 (locus POPTR_0005s11720) derived from phytozome v7.0 (chr-ID scaf fold_5; pos 8538737 to 8539547 reverse strand)
gctccctcgtattggtgattggatctgcactggttagttaccctttatctacgtttgctttataaatatcagcctctttatgttggttgcatgtcttgaagatctgtaccttttaaaataggtgtttattgtcatttttcttgctatggggtgttgggatatttatcaagcattttttttttatggatatggtgttttaaagatttgaacatctgattattggtgttagttgggactttatttttctgttatagggtattgatctttttgggttttgaggttttttcttcgtggatagtttggttttggggacttgagttggtgtgttggggttcaggtttcaagggattgctaggtagttgaattgttttctcgcgtttcttaatcaggggtaagtagctagacaatttaaattagtctatatgattaacctgtcgatggagaaatagggttgatattttagactcgctttttgaagttttgggactcgattcaaatatattttctgtgtgctatttgctcgttctctcatcttcttttgtgatacctttgtcttttcttttcccctttctagcgattgttgataaaaagtaatgattaagtggttgttatgttttgtgtgattgagatgaagaatttgctatcaattaggttgagtggtttttgttttgtgtgtgtttttctttttttttggtatattgggatggactggttggtgtgcgtatacatggcttcatttccatcttcatggctgcaatgtgggttgcgtgtgtgttgggcaatggatcaataggttgcactaacaacaatt

SEQ ID NO: 53109 - DNA, 1013 bp, Populus trichocarpa
  Intron number 1 from transcript POPTR_0005s26950.1 (locus POPTR_0005s26950) derived from phytozome v7.0 (chr-ID scaf fold_5; pos 24783126 to 24784138)
aaggtggaaggttgttttccggtgagctttggtggtccttgaggtcgggtttttggcgaggagtcgtaggagacgacatggtgtgcgttatcggaggggtcttgaggaggctcggcggttttttccatctagcttatggtgtcttattagtgcactgcgctttttttaaactttgcctggaagtcaaaggatcctaagctgggcttcttgacagaacaggcccatttattttttaattttcgctatttatttattttcttaatgctaatcactactaaaagaaagaaagaaaattcctggaccatatctttgtaagatctattattagattttatatactatatatatattttttaaaaatctttaatatactatgtgagtagtttaaatattaactcattattacatgaaggagagaatcttgtttatcgacttaaatcaaataattaaaatgttaaaaatataatatttaaatataaataacaaaataaaagatcaattaaaattaatagtaagaataatttaaataaaaaatacagaacatgaaatacaaatttataaaacaaaatataaaaaattgaacatattccgaacaatccaaaaacacatggaacgaaattggaaaaaagttatcatcatttttttttgaaaaaattgtattaatcagaaaataaaaggaatgagttatgaaaactataatatttaaatattttaaaaatttatgtctaataaatcttaaaaaaaggcggtcaaggagtgaggaagaagtcaaggcatggaaatcatcagacccttagaaatataccataacctttaaattttaaaaataacaaaagaattatcaatattaattcccagcaaagttactaatttcttctaaaaaagaaaagtaaaaacaaaaatctctaattcagtacagcccatcgagcggaagcccatttgcacatattgagcccaaacaatagagaatttttatagggacagaggcacgcaactaacccgagccagaccga

SEQ ID NO: 53110 - DNA, 791 bp, Populus trichocarpa
  Intron number 1 from transcript POPTR_0005s01900.1 (locus POPTR_0005s01900) derived from phytozome v7.0 (chr-ID scaf fold_5; pos 1244645 to 1245435)
aggtacttttttcatttaatttttggtatattttactttctgggtcctgttagtttgctgataaattgcttgcatattgaatttttaggcttaaagattgaagctttaattgtttttagtaaatttatggctactttggattaaaatacgaactgggtttttgttaaattttgttcagattgaataaaatgagatatttattttatttcattttattttcattgaattattggttttttttattatgtttatgattttttttcaatctgtgttttgtttggttgctgagaaattgcaggaacattgaataaaggctggaactttaattgttttttaagttgtttttatgctaagaagacaatataaactgtatttttttgttaattttttttttcaagatgggaaaagatggaactttggttgttactaaagttttttggctaattgggtttttgattgattttgtctctatagttgaaataaaaaatataaagaaagtttgattttttaataaatcactgcctttatgtgaaaactttggctctcattgtttatttaaagttcttcaacttgaaaaaaaaaaaataacaactgatgttcaatttctttatttgttatatttaatttctaggtcacaaaaatgaaaaatgaaatgggttttgttcggagtgtaaaatcttgattctataattggaagtttgaagaaatgaattaactttttaaatggttttcgttattgaatttgtgtgtgagcagagattggtgcaacatcagccaacacagtatccaac

SEQ ID NO: 53111 - DNA, 807 bp, Populus trichocarpa
  Intron number 1 from transcript POPTR_0005s18170.1 (locus POPTR_0005s18170) derived from phytozome v7.0 (chr-ID scaf fold_5; pos 16281411 to 16282217)
tttggcgagcgaaccttcatcttccagctctcaaggtatggcattaattgtgcttttgtgcattcgaaaagtagattttgacaatttacaatgataatcatgaatccattgaaggaatgtcacataattatcactacccctatcgaacaaggaactgagacattaagaatttacaataagctaggtcttccaagaccactggattctggtttaagacccatattaatgctggtggtacgatcacacatcgacaaataacttgcagcactgtataattacttctttgatgactctggttagaccttgttgtattggttttcaaaaggaaatgttatgggcagcaaactgcttctagaatatttgatttaccttgtcatctgagttggttgtctatgttgaaatgaaaattgggttgggatgaataattgccgttttctggttctgacttacatttgagaagaaaataataggccaagatgaccaggtggaaatggtttcttgtatctgttaagtgcaaagagaaaaaaaaaattgcagatacagacaggctaaatactactgaataagaatgcatctgccagatgtctggaaatctaatcagttgtctgtgtatatagtgatatagcaaacatgtcatttgaaaagctcttgccatgcattttgtctgaggaacagttataggaaaaaccaatgtgcttgttcagaggctatcttgtgcagaacgttctcatggttgctatattcctgtggtgttgagatgttgcatgattgtctcctcacatactacttttctgattaaatgttcag

SEQ ID NO: 53112 - DNA, 758 bp, Populus trichocarpa
  Intron number 1 from transcript POPTR_0005s20210.1 (locus POPTR_0005s20210) derived from phytozome v7.0 (chr-ID scaf fold_5; pos 19249363 to 19250120)
tttatcctactgggtgtgtgttttcttgattcttcgcagaaataaaatgaaaatgttggattcatattggaattttatactctgtttcttggtactttttttttaaaaaaaaaatttttagtttgttttataaaaagtatttttaggtattttgtgtttagtttggattaattttcttgttagtctggtaagaattgcttggccattcatcaactctgaatccatcgcctctacgatcattttgtttttccactactatatttgcagctttattttattttcttatttgactgccgcaactggatctttctcctgtttgtgtaacatttccactagcattctcctgattcaatcccacttgatggagtcttctaggaacaatcgagacccctttgtagtcctacgtagtttctttagcatttcttgagattttccttttctctttctctggaaagtgttgactagaccagtttctcacaaaacaattctatatcaagtgtttttttttttggagaaataattctatatttgagtttccttggcaaaagaaagacatggcttagaaaaatgaattcctgccttaataattcctgattgaacccatttcccagaattccttatgattgatatttcaagtttgtaacttgatttacctcttctttttaaaagctttaattgtagtggagtgatgatgatgatgatgattctccttacaatttgcaggtactactctgtgattctcaacataggcaacccac

SEQ ID NO: 53113 - DNA, 1042 bp, Populus trichocarpa
  Intron number 1 from transcript POPTR_0017s13840.2 (locus POPTR_0017s13840) derived from phytozome v7.0 (chr-ID scaf fold_17; pos 14053153 to 14054194)
agagagagatccgtctctgcaaatctctttccacggtaaagttttttttttttttttgattttttaatcagcctttttttttggtttttagggctagatctgtggtttgtatttggttattttcgtggatttatgttatttgtggtttttaatccatctgcttgagattgtgtgtttctaattttttatttattatattttctcaattttaatgtgtttcggtacccgagatttggtgaagttttttttttttaaaaaaaaaattgattgatttgggtaaatagagcagattttgtgtttaatttttttgggagatgctaaaaatagagagtcagatttggttttacgatttgctgaggaaataagaatcaataacttgaattaggtcttgtaatttgaggctaagaggtcagtttctgacaaatgaaacgtttttgcaagatacagtgtgattttgttgtttccacatggatggatatgatctgttttggtaacgagaaaataatggagaagttgaggaataggtgtttgattgttattaatttggttttttttttttttctgggggggggggtttgtggaagtttggtttttatttgttgagtgactgatttgtgattttgatcaatttggggctttattttttttctgttaaagcaatgatgagacttctcttcttaaatgacttttagaaatctgttttctaacttgaattggggctttggttttgttaatgtagcgaagatcattgttgggaatatgtgttttttcgaagtaatgcctctggctaaactttattcaatcttgaggtgtaaaaggtcgggaagttttgtaaattatcactaactcaaggatgaaaagttaggagtcaacggattgagacgtgttattaagtggttgatggaagagttgattcatgactgtggaagctagttatgtaataaaatgtaagcattaaagtttgatgttgttcaggtctttctaatgatacttgtgtttggaatcaccttgcagaagtaacttttagtttgatatataaagg

SEQ ID NO: 53114 - DNA, 734 bp, Populus trichocarpa
  Intron number 1 from transcript POPTR_0005s10270.1 (locus POPTR_0005s10270) derived from phytozome v7.0 (chr-ID scaf fold_5; pos 7354463 to 7355196)
ctgttagagaagaggctaagatagaggtaacccccccccccccccggtttattcataatactcgtttcttttgattcttcaacgattttttcttggcgggttattgacgttcagtttcaaaggtatttcttttttattattattaattatgttaaattcttgtgtggctggatagtggattagactggaaaatgcttaatcttgatactggcttgttaagtctgaaaatggatattgaactttcacatatccttagtaaaagcttgagctttggtatttctaagtgggagagtctttaatttttggtttctaagctgtctaaattattgttaagtgcaatgatgatttagttgcttcataagatcggtggaagaaattgagagaacacgagagattgccttaaagattaatgattgaaacaattttaatcaattttgggaaattgtgtttgtttcagtttatctttgcgttattttagaattcaatggagccttggagaatatgccaagtaaagattttatttttgtgattattcatggagacaaggaattcctcgccgctgctgtttgtgctgtactcaagaattttttgttggatgaatatgtaatatgttttattttgaggtccagcaatagcattttcttcccgaaagtaaaagctcctactgagtacttatatatatgcaataaaacactgcaggcggaaaaagaaccgattttgagtagctttttgta

SEQ ID NO: 53115 - DNA, 765 bp, Populus trichocarpa
  Intron number 1 from transcript POPTR_0005s18010.1 (locus POPTR_0005s18010) derived from phytozome v7.0 (chr-ID scaf fold_5; pos 15943788 to 15944552 reverse strand)
ttccacctcccgtaactctatctcctactctctttccctttttttttttttttaatgttttcaattaccagtttttggttatcatcgctttatttttctatttctattgttgccttttctctttttatttttatatattttttaaaacattttattgccgttttttgtaagctgattgctttttttacgtttctgttttcagtattctctacttttttttttcctatttgttctaaaaaaagtttccttttcagtgttactgggctgcaaagtttgtggctttgaggtataaagattaaagtatttggtgattgtgtttttgtaagtaacttatagagaatataatagaatagatttttaagcctgttttagtagtaatagctgctatgaggttattactatcaatttttggttgaatatttactgggataagagtagcttccaaatttgtgttagatatcgactatcatctttatttatggtgcattttttttagttggattaatgtttcatttgaaaattatgagttggtgtaataaatatgggtttttttcttcttcttgatatatatgttttgtaatagtatgaacaaattgagttttgtatttttgttgttttagtgctctcttactttcatatccttttttcttaatgttttttagtttgaaattactgatttatagttatttattgaattgctaatgacatttgatttggtggttgatttcaggggattggttcaccaggtcaaagcattccatatta

SEQ ID NO: 53116 - DNA, 238 bp, Populus trichocarpa
  Intron number 1 from transcript POPTR_0020s00240.1 (locus POPTR_0020s00240) derived from phytozome v7.0 (chr-ID scaf fold_20; pos 214641 to 214878 reverse strand)
gtgcaagaacatcaatcgccatccgtagtccggtaacttagcatttggctcgatcaatctttaatttgtttatttcgagtataaattattaaatgtttctaatactctgttttttttttcttctttcagaaaatggtttgatctcaaattatgataactaactagtatgtgtagattaatgaattgtatatgattggacccatgttcatgcttgcagattcacattctatcgagggag

SEQ ID NO: 53117 - DNA, 724 bp, Populus trichocarpa
  Intron number 2 from transcript POPTR_0005s27790.2 (locus POPTR_0005s27790) derived from phytozome v7.0 (chr-ID scaf fold_5; pos 25285451 to 25286174 reverse strand)
ctctgggtaatgactactgactgctatatttatctttttttaataaatctaataatataattataacatagtgtgtgtgtgtagtttttattaaaatcaaatctatcatgctggtctggtcctgcttcggtgattattattattattgttgttgttgtttttgttgttttttttgacagctgagatgcaacaggtaaaagtaagagaataatattaaggattgatcaagggatattggaggttaattaaaacttaataataccaaagggaaggtgatgtgggttgtgctggtcttgagatccatttcatgatctgacacgtggttgattcttattggcttctcaatattacttgtctaccccttatttattatttcttatattgggaaaatccaattatttcttttaattttattctcctacacaatttattggtggtggatttttttttattgaaataaaaacaataaaattcctttaattttttttctcatgatttttttttcttaacaatatcttcatgctatatctatcagagtaagaataaatttttttgttaatgccaattgcagaatgctgccagcatatttttttttcctcccctctttctgtgtatatgtctcgaatttaagatattttcattttcatatgaatactgtgctgtaattatttgctcgcataaatttttctttttgcaggatcagctgggtttggattcactccac

SEQ ID NO: 53118 - DNA, 684 bp, Populus trichocarpa
  Intron number 2 from transcript POPTR_0017s05620.1 (locus POPTR_0017s05620) derived from phytozome v7.0 (chr-ID scaf fold_17; pos 4411532 to 4412215 reverse strand)
ttataaggtaattaatgtgatgtcctcctgttttgcctggaatatttgtgtgatgatgcaaatctgattttatacgattctgaatggtttcaaatcctgtttctttaagattttgtctttgtttccttcgcatcatgaatgaattcttgagaatttatgcaatttaccttagaacagttttacaaatagtcaaactgagcacttgataatcttttatgtatatgaagtttctctgttgggcagggccttatactgttcatgccattgtcataaagtttttttttttttctgactttctgaacaattttattaaagtttgattatcagtctatggtggagtcattgcagcctaattgacacactgcatgtgattgtgacaccagaaaggaggttgtaattctgtggagtaaccacttcttgacttgaaattgaaattgattctgtttgcattgttggttcacttctttggaaaggcagctggtcatgtaatagagtcttactggcttgcgagaacttttaggtcatcttaacactttgcatcttaagatatctgactaaactgtctcttcctttgtcaatattttacaacaattagtacttgctctgcaactcttctttttttactctgtcagttcattgtcattgtgggtcctctgatgcagtttaagtcaattagtgcgttgg

SEQ ID NO: 53119 - DNA, 501 bp, Populus trichocarpa
  Intron number 1 from transcript POPTR_0017s05620.1 (locus POPTR_0017s05620) derived from phytozome v7.0 (chr-ID scaf fold_17; pos 4412306 to 4412806 reverse strand)
aacttctaccgcattggaaagaggaagaggtaatttttcattgattgtctatggcattcgttgcaattcttgccatttttttgaaggttatgtgataaaagatttgtaatcaagaatacatacaagaatcatacagttaacgatgggaatatagaatgaagcctcatcctgctaatgtttcttaccggttcttcattgattaaatgtagttgatttgtgtttcaagttggatgaaggattcaattagcaataaactttcattgaatatgtaatatttctagcagactttattttggttccagatatatttatgattcctttttattttcttaaaaaatttgcttggtgtataaaggcagtaattgtgtagtaaagcttttagctgttgctaaaaaagtacactgaagtagaatcaatgcattgcaaaatgtatcaccaccacatacctcttttgattcttgtatgcattctttgccaatctgggtttgcaggcaccaatca

SEQ ID NO: 53120 - DNA, 817 bp, Populus trichocarpa
  Intron number 1 from transcript POPTR_0030s00230.1 (locus POPTR_0030s00230) derived from phytozome v7.0 (chr-ID scaf fold_30; pos 45809 to 46625 reverse strand)
cgtactagagctcaacaattacaagatctcattcagtaagtaactctcttttatgtttttatatggttttttgagttctgggttctctttgttttgaatggttgtgtattgggtgttgataaagtttggattttgcgtggtttttttggatgatgttgtattgtttggtggaaaagatggaatttctaaggatgtcatatgtgttaatgtgtttgggctgtggtaccaagttgggtgcttaatttgagttgcacatttttaacaaggaaaggtgttcattttttttaaaatctgtttaatcttgcaaaatcacaaccatgtgtgtttgtgtgcgtgatttcgtgagtgagtttttcttcctggggtttggacattatgtcggtgctccattgctatcctgcaaatgttattgtcaatatctctgcacttgatctatgtttgatagaatggagtgagaggtaattaatgtattggaaggagatgacggtattctggcgaaatgcagtgtcatggaaagaagtaagaatcatttgaaaacatacacagtaacacatttgacttgatttgatttgatttgattttgggagttgagtttttcttcacgcacactctaagtgcaatgtcataacttctagtagttaatgttaccggtttctcttatattggttgtccccaaaaaattgagcatgtctttgtatgtttctgcatatacactcaaacttagaaattggtattttgtacattttaatttcagggtacaggaatgatttttaattgatttgagtcctttttttcaggttcaagggcatatcacatt

SEQ ID NO: 53121 - DNA, 1035 bp, Populus trichocarpa
  Intron number 5 from transcript POPTR_0006s26710.1 (locus POPTR_0006s26710) derived from phytozome v7.0 (chr-ID scaf fold_6; pos 24838125 to 24839159)
aatcttgcagggcggtgatattttgaaacgaggtatgtaattctttttctggccattaatcttttttttttgtttcatgcagtttatgatttttcatgatgcatgaatttgaaattataaccttaattgttttaacaattcttaagttattcatctaattatagaatttctgctaccccttaattttttttccttcaaatctagggaaaatcaaccaatttgcccttatacttagaagctaatctccaattaatcatggaacttttaattgcatctattttacacttgaaccgccataaaatcgcaatgatgaacttttgctagtgaaatctgttaaacttggttttgtgtcctgtacgtgcttcttccctgataattaattggtttagttgcctttaataaaggggctctgccacatgcattgggtgagaaagtttttctttagccacttgattgtttaatctaaatgggtttctgtcagtttctgttttattcttggataaaaaacctttctatctcaaaaactcaaatctccatttccacgtctctgttggaattgagattgggatggtagaatttaataaacttctctaatagaagtctgtatggatatttcctctatgccctagatgtatcatggatgcaattgatagtttagagggtagtttgaagggtaggtccaaagtatgagggtagattgatagaattttttctgaaatttataatattttatagatttaaagatgtaaaatcttgtttgttgtagtgattaccaattgtaagacagtaagttttggcctagggatgatactatggtctataacataactcctatgatttgcccctaatacattgtctgaaatcaaagttctcttataattaacgtgtttaagcttttatgcaagataaacaagcaatcagaatgaaacatgagtttagattttcaggggatagaacatcctgaaatgtttttgctcttcaaattcttaactattttgttttcctctcatgcagggacctttggggagagcatat

SEQ ID NO: 53122 - DNA, 731 bp, Populus trichocarpa
  Intron number 2 from transcript POPTR_0005s09690.1 (locus POPTR_0005s09690) derived from phytozome v7.0 (chr-ID scaf fold_5; pos 6780517 to 6781247)
aaggtgagatcccaaatacgaggaatccactctgatgagggctaccgcctgactgtacactttgaaatgccttgcttgacagttacaagggatgtacacgaacaaagaattgtctcagcctatgacaggtttctgttctagttttcttcaattttgtccagttggcttattgagatgggggaacagttgttttaggttgtcgataaaacaaatgtttgttgggattaagctcagttaagttatttactcctcgatggactggaaattaagatttggattcttttggatcctgctgcactacatcacaattggataactctatcactttggacctcatgcttagtttctcgtggctttgcctgtgaaagctactgatgtattctagattaggatttaggctacttgcatatgtttctgggtatagttcttcagctagatgttagacatattggtacacgatgcaggtgaaatttgattcttcaactaagtgacgcactaaggcttccaaactctaagcggttgcttttcaaataactttttatgccgaaatgcatgccaatgatgtttttttattttttaaaaatcatttttgacatcagcacatcaaaacgatccaaaacgtacaaaccatattaaattttagcaaaacaaaaaaatttgaattttttggaaacgcggtgcccaaacatgttctaagttgtagagaaatttaaagaaaattctttgatatt

SEQ ID NO: 53123 - DNA, 529 bp, Populus trichocarpa
  Intron number 1 from transcript POPTR_0005s14760.1 (locus POPTR_0005s14760) derived from phytozome v7.0 (chr-ID scaf fold_5; pos 11719418 to 11719946 reverse strand)
tcaatctcaaagaccgttggcaaaggactgtaagcaccccatatgcatttgtcccttgtttccatatatttgttttttggtgatttgaattcataaaagaaaattgattttcacatttctataatattgcatgctatgttagcaatagatatgggatttgtatggaatttcagtccatccacaaaagttaatattctctgctttagctatctcatgatcaatcttaggcctcctgacataaaaactcagtgcattaaattttttaatttttccttcataccatcttcactaatagcacgttcgtgctttgtctactaaccagtactgtctcgaaggaatttggtttagcaggattgatttgtcccattaaccttgtcctgttgaagacactctcatattagctcccttttcggattagtttggtgaatccagttttattctgtataacagaaacagctaatctaattaggtagaaaagtgatcatgatattgattctatctctttactgtaatgtcaagcccttgacag

SEQ ID NO: 53124 - DNA, 714 bp, Populus trichocarpa
  Intron number 1 from transcript POPTR_0005s19950.1 (locus POPTR_0005s19950) derived from phytozome v7.0 (chr-ID scaf fold_5; pos 18944726 to 18945439)
ctcacaatcttcgaacctgccagcagaaattttctgtgcgtagctgagttgcctttgcctaggctccattattgaattttgaaaactggaacactagtagttgcaggaaaatatatcaaaaacattttttcttttaaaatttatttttaatataaacacagtaaaacaatttaaatttttacaaaagcactttctttctaaccgagcggctgtacaacttggaggaactagaagataggaagtaaaggtattcactccatggaaatggacccctacctcccatatcatgtgccccttgtgggatgaaaaatacctaacataagataaaaagatgtgggtttcatactatcatataagacaacgaacatgagatctggaaaaaaaaattgtacaaaagaatctgatacagagacataaaaaatggtggtacaaggaatcaatcctctctcaagcggagcctctctcttattcacggtgtcccgtgactcttaacttgttgcctgcacaagagatagaaatcaatcaaatcatgatcttacatcatcatcaccagccccacgagaccttctctagcctcagctccaatctcacccgtcattttcttttctgtcacataatctttttttttctttctagtttatatacttgtattgaaaccaatctcacggtctaatggcagctgtctctctccttttcctttgctagctagagcct

SEQ ID NO: 53125 - DNA, 1002 bp, Populus trichocarpa
  Intron number 2 from transcript POPTR_0017s04470.1 (locus POPTR_0017s04470) derived from phytozome v7.0 (chr-ID scaf fold_17; pos 3445770 to 3446771)
aggaaaagcctgagtatgctttctttcttacacgtttcttgccttttgtttctgtaatttagtcaagtgcatctttttggctgtgtttcttatatgggtttttgagatttttgggtttgatttggtgcttgatggggttttagttacaaggggatttgctttcttgttttggaggttgatgggatttttttggaggtttagtttcggagtgattaaatgcgttaaaggttggttggtgcatgctcacgatctatgtttcttggtggggttgaagtcaaaggttaaatttttacgaggaatttgcaccaatttgataacatttgcagtattgctggtttgctagtgtcttttagtggtattggtggttcctaagttggtgactgaacaatgagaaatgtagttaccttcacatttttgaaacatttatgtaagatgatgagttaggggtcgagtttagctcaactgtattcaccgtctatacatgtctgtgatcttagtgaagcttttctgttttggagtgtttgtggaatgaatttgcatctgcgagcagtatgtatcgtgatgcacagtgttggaatcttctaagtaacgtagccttgtatgtgtaacttggctatgaagatcaaagccagcagtgtattgctggttggcctccataagcagttgtcaggggaaatttctatccacaatttttctttctttgggctaacatttacttactcatctgcctgtaaagatgtgcatatgcacatttactgcatatcttgatgtactccgaagtccatatcttttcaaagttattttcatctctatgaaaagaaaagaaatgaaataggtatgtatattcttcctggaaacaaatagcatatgctctattccaacagctagcttatgtttgtgttctactgtactagtatatataaatgagcgtgtttagagggccactctcatcttattttgtttgcagatttgtctttgtggaacttccggacattcgtaaag

SEQ ID NO: 53126 - DNA, 793 bp, Populus trichocarpa
  Intron number 1 from transcript POPTR_0006s07520.1 (locus POPTR_0006s07520) derived from phytozome v7.0 (chr-ID scaf fold_6; pos 5453238 to 5454030 reverse strand)
cttactctggagaaggctggaaaggtcaaaggtaaaaagattttcttacatatcattcctttggaaaaataaagaactcttcctagcaaagttaagcttgtgattgcaaactgtgatttaagaattccatctaaagtctagcactccttaatctgtgaaatggatatatgtgaaagagaaaaaaaggtgaaataattgtcttcaaactattgatcagagatggttcgttttcttaaaccatatcttgtagaagcaagtttagtctaggaagaagttggatgcggaatgaatattgtttgcccttctttctcttagtccttatcatgaattattaggagcatatatttgaacatgttaccagatttgaagctatctgaaatatttcaaggaagttctgatcatatattgcatgagatggaatatttccctactgaagttgggacttaggattggctcaaagacattttcgttgtaagttcggccgaaggaatctggatacattaaccttgtttaattttttttatctgcttatgcttctagattaattttccttttcaatcatttattcttcaaaattttgaaattttttacctgatctgttctcggaactaatgaatgattcccattttactacatgcatgatacaaaacaaaacaaaacacaaagaactccgctgactggaagttcgaaattgatagaagcttcaaatgataaaagaactatgtttgttcttatcttttactgaatttctgccacagtcgagagaagatcaggccagaaaaggaactactgc

SEQ ID NO: 53127 - DNA, 719 bp, Populus trichocarpa
  Intron number 1 from transcript POPTR_0005s02100.1 (locus POPTR_0005s02100) derived from phytozome v7.0 (chr-ID scaf fold_5; pos 1376934 to 1377652)
tgatttggtggcttcaagaaaagctgaagaagcttgtatgacatcaatcttctccttcatttatttctttgttgcacattttgattgaatttgatcatgccttttagtttttagatctttgattattggaggatgcttgagaagcttctggtctgtgttttgatttcatttttgtggaatcttgaatgatctataaggagtttgtaggctgttgaattttatggattaggtggctggttcacagaagttggattaatgcacaacatggaaatggaatttgtagtattttagggtcatatttcatgaattgtgtgatcctatattgatatcaatacagttttttcctaacattcttggatttttatggtaattttgtgaaagttcattccctaggcatgaaaaattgagctattgttgttcatctttttcttagtgatgatcattgaatcagtatgtagatgaaacttttgccaagttagagagttctcataattacttctttcatggtgcttattctttgtatttttattttttgaggaattcccgtcatgtggtcagatggaattgttgtcgtaaaattggaatcggaataggggggcttcaacttgaaaaagttacttctttgtacgccttatattttcctgtaaaagaagaaaaagaaaaaaaagaggggcatggtgattttacatctctgtgttggtttacagccttgagaaggt

SEQ ID NO: 53128 - DNA, 985 bp, Populus trichocarpa
  Intron number 1 from transcript POPTR_0005s28120.3 (locus POPTR_0005s28120) derived from phytozome v7.0 (chr-ID scaf fold_5; pos 25481972 to 25482956 reverse strand)
gattccctcagcagcaacagcagcaggaacaacaggtacgtctttctttttctttctttcaatttccagtagatctggatctgatgcctctataccatctttctcataaatgccctttgcttttctttttgtttcaatcttctttttccttcattccttcctcagatgaatagatagatctgtaatcttattttatttgttactcaatgcttatcgtcttcttaatcatcgagcaaatgaaattttgcaaatcatatgtatcgaatgaaaaaaagagcacagatctgatggtaaggaccatctttatctactaattgttttcattattgtatttccagatcaaacaaacaacacatgctatcactatatcactaacgtcataggatagccttcctttctctcggattattttgtttaattaccctcagaaaccatgtatgattaatttattacgttctatatatatacaccaagtttctccatttgacattgtggtgcgtgcggttggagatgctactccactccacttcatgtttttttttggttttcattgcttgaacatgaatttcatctcaaattatggaataaacttgtatttgaaaatgctacaacttgtaactttttttaaacccacctttttttctcttcaaattaatgaaactgtagtaccaagttgtgatgaagctctttttcccgcatcttttaattttctgggtaataatgtataatagaattggatcaattagaaaaatttatcttttgattttttattttatttttcatttagtgatgtgataaatactattcatgtatgtatgtgtgtgtacaaggtgattctatatctatttcatttgaattttccttttgaattactcgctacacaagctcttgatttctagcatttggatttgattttcatttttcacatttgcaatttgccatctagttataatttgtcttgactgtatatttagcagagcaagag

SEQ ID NO: 53129 - DNA, 575 bp, Populus trichocarpa
  Intron number 3 from transcript POPTR_0006s28380.1 (locus POPTR_0006s28380) derived from phytozome v7.0 (chr-ID scaf fold_6; pos 26078756 to 26079330)
gtagaccgtggcttaacagttgctagcctcagcaggtatggtgacccttcaaagttgtaaatttggtctttgatagttggtgattctcgtttgatgtctgcttattcatgtaccctttgatgctaaagagtttttgaatgattgttggttaatcaaaacatatagcaatcatagtctccggggtttatatagggaatatggtgtcttacctgactcatgtattttttttcttcaaaaatgtgattgtattgcattttatattagtggtgtttgttgttctcggtagcttttgctttgcggaagctttattctcttttacactgaccaaattttcttttcccttttctttctctattctgtaataatgctatcagtgtctgttagaaggatttttctcactttttaggagtgtcccaacctttgaaattctggatcatgtgcattgctggtttatggagtgatttcttgtgtttttgtgcagtttttggcctctcattatatatagattctttcttgtttctgttaaaattattggcttttcctttcaggtctggtaggccatcgatacaggaatc

SEQ ID NO: 53130 - DNA, 714 bp, Populus trichocarpa
  Intron number 2 from transcript POPTR_0017s10180.2 (locus POPTR_0017s10180) derived from phytozome v7.0 (chr-ID scaf fold_17; pos 9437488 to 9438201 reverse strand)
agactcttggtaaggtgtagtgttttcagcacttttttgattgtgtattgtgctggggatttagctgtggtgaatgttcattgttgatttcatgtagtcaattagtgtgttgtgaacttagaaaggttaaaatgggttgatatagtaaatttcattcatactagatagattataatcttgctattctgctcttgcacttgttaccatttatccgtacagttttctgatgcatagtgcatgcggaagttatcctcattcgttatttcaaatggtgcaagtctttttgtgcaagctgttttaagctttcaattctcaatcataggagaaactccataaaacaacaaagatattgtgtttggaatcatgtttgttcatgcagtcggtttctggtaatgctttgaatctgcactgtcaactttatgggagtgttggtggggagggatttgcctcttctatgccatcttattcagttttgagagtattagcaaacaggtagggaatgtatgtgtttgtgtaaactgtttctttgcttgactagatagtgaaacccctcagcatgctataagtgaaaccatgataaatgtcagtgtgactaatttaggtgttcagcttccatgaaaaacttaccttgaaccaattgtaagatattttttttctgtctgcttgatctttcatatagcggaactcttaaccacaaacaaattatcggaattg

SEQ ID NO: 53131 - DNA, 319 bp, Populus trichocarpa
  Intron number 1 from transcript POPTR_0005s16130.1 (locus POPTR_0005s16130) derived from phytozome v7.0 (chr-ID scaf fold_5; pos 12774830 to 12775148)
ataggcgtaagcctgttggtgaaattcaccttaaggtttttcattggttatccaatcaactttcaatatatgacttttttcttaatcatcatcatcatcatttgccttttggatttgaattgtcaattattcttactgggaaaatcctactttcaatgaaaattgagtggaattttgggtgtttagtattagattactggattttactttcaatagaaattgcgactatgattgtctttttttttttatggtttcttcctttaaggaatcatttttgattgatgttgttaggtatcttcgatccgggagagcagatcgg

SEQ ID NO: 53132 - DNA, 368 bp, Populus trichocarpa
  Intron number 1 from transcript POPTR_0005s14970.1 (locus POPTR_0005s14970) derived from phytozome v7.0 (chr-ID scaf fold_5; pos 11819045 to 11819412 reverse strand)
ggtggaagtgaaattctcacttgccttgatgaattaaagatcagaaaatgccccaagttggtccagttaccaattattccgtcggtgatatgtttaactattaaggactgtactgtaactttgatgaggtcagttgtgaatttctatgatctgccttgaaattgggggcctcgatgaattgacagttcttcctgatggactgttgcaaaaccatacatgtcttcaatccttgataattacgaagatgagaagccgaaggtcgctgtcaaatcagctaaataacctatcttctctaaagcttttgttttttattgtttgtgataaacttgaaagcttgccagaaggtgtccagaacctcaattccttgg

SEQ ID NO: 53133 - DNA, 536 bp, Populus trichocarpa
  Intron number 1 from transcript POPTR_0337s00230.1 (locus POPTR_0337s00230) derived from phytozome v7.0 (chr-ID scaf fold_337; pos 13463 to 13998)
tataatttccaccctgaactttctttaaggtttccattcgatggactccgtccattaagcaaagctagtggtgatttcacattgtttatgttacaattgaccccttaaagttataaggaaattcaatcaagcacccattcctcaaacatgctaacaatcttgttttttgaattatgtttatactttctttcctttttcctttcaagcattggactgcccgacttgcttatataacaagtactgttcttaattgatagcttggtaaaatccatagttctcgtcccaaggatttaaaatcaaatcttgttttctcccaataagggagaggattaggaatgcgaaggctataatctagttgtattagtgtttaacctctaaataagaaccgaaaatatgaataacttgataaccattactacttctgtagtttttatacatccatcatccgaattttgaatcatttacatcttctcttttttttaaaaaaaaatccctgaaacaccgtaggtaatccattaggttgttgaactgcatcg

SEQ ID NO: 53134 - DNA, 760 bp, Populus trichocarpa
  Intron number 2 from transcript POPTR_0005s07250.1 (locus POPTR_0005s07250) derived from phytozome v7.0 (chr-ID scaf fold_5; pos 4907345 to 4908104 reverse strand)
gtcaaagtaagttacttcattcaaattagcagccaccttatgaatatgtctctttgcattttgtgcaacactaaattcaaactcaactttctagatctagtgttcttacacggtggtcaactaaaattcaacagttaagaagaggattagagatgtgctcatgctttgtttgggtggctgttgtttttcttttcttgtcttttatactgtctatgatatattagttctgcatacgttgttgttgacttggatcagcatttcatacaatgcttcaccttcgctcaaccaagcttcagcgtcaaagaagtgtgcacatgcccactgtgtatcggggcatgtttaatgaaattatttcaagtttgtcccccctttgatttgaaatcaaatttcaagctgatggaacatccaaaaagttagcaatctattttaaaagtgctgatggaacatgctgatatttagaatattatcattggctgttcacaccagtatcatctgtcgatatttagaatattatcattggctgttcacaccagtatcatctgtcccatttaagggggaaagcttgcaaatatctatttgactttcttgtcatcatttgggagtaaaactattaccaccagacatttgattgacaaacactgtttatttcttctatgtttttcgttcatttggtgaggtggagtgtcctggtaccatgattaataatggcattctgacatacacagggtgaaattgggggtgggaaagatattctggtgca

SEQ ID NO: 53135 - DNA, 565 bp, Populus trichocarpa
  Intron number 1 from transcript POPTR_0005s07250.1 (locus POPTR_0005s07250) derived from phytozome v7.0 (chr-ID scaf fold_5; pos 4908194 to 4908758 reverse strand)
aacttaaaaatcatttcaattgctgatctaatcaggttttgtctccacacacagttgaaaattctcttttctctctattagctgtcaaactctgctccacatttctaaaaatcattgactagcatggatggtgaaatgtgctctacatctgaactttatgcatcaatatatcttcagaacaacctacctcttcctacagaggttcaagtgaatatttttacctgttctattcgttatcaaactttcctccacataactcaaaatcagtgacgagcattgatggtgcatttgccatcgaaatgtgaactttgtgaattcgtatatcttctgaacaaccaacctccttctaaaacggttgtaatttgttcctcatggtgattgatatcgggcatgacctagttctgcagagccctgccattaatccctcaccccccaaaaatgaaaaaaacaggagcatattttaaaaagaatgaacagaaataatgaaagcatcaattgttttggtgatatttgtattttttaagtgaaagatataggaggagaagagatagattggtggagctgg

SEQ ID NO: 53136 - DNA, 967 bp, Populus trichocarpa
  Intron number 3 from transcript POPTR_0005s11280.1 (locus POPTR_0005s11280) derived from phytozome v7.0 (chr-ID scaf fold_5; pos 8170179 to 8171145)
ctggtaacatcttgccgagattgtaagtgtcaatgtcacaattgatctgcttttgtatttttggttagtttttgattgatgaactgtcattgaaagcttagggtttcagatgttacttgctaaagttacgctgtttaaattgaatctgttgctgaaacgatcagagagaattgaatctgttgcttaaaccatcagagagaagcgatgtagtttaaacattaagtcaaggagtttcagtagtagcttgttgctagtatgtgctcgatacatgggtgtcatgcaaacatgaatttcaaaccagagggttatgcatttttaataggttcctcgatgcctttaaggtttattctgttatcctccatgaatgagtatattagccaacaacaaactcattaatagcttccccacaatgtgaaaatacttgagagctataatttgatagatttgcctgatgtagttatattgtcgatttagttaggaggggaagtccttaagcagaaaattatgcaattcctttaagtctttaacaactaaattgatatctttagatgaagaccatttgttctgtctgtgctgtttctttagtttgcgtgtctgatatttttgaagtagaaaatgtatttagtaagtttgaacatgaaggtagcagatattttgcaagtgagaacttagaagactgaaaatgtttactgaaaatgacaatgaagcttctcaattgtaacttcataatttctctttttgtgtctgtgtgcttattggtttctgctagcaatgagtatctttgatcatatcagatcgtcctcttgttaatgaactctgccaagctatttggagtctgctgcaaggatacttttttttcatttctgctctcactatagagatgtcagtcagtcacgtaaattatcagtgtttgtgtatgcatttttttgagctttactgcaatattttgtccttccaggtatctcct

SEQ ID NO: 53137 - DNA, 419 bp, Populus trichocarpa
  Intron number 1 from transcript POPTR_0005s18290.1 (locus POPTR_0005s18290) derived from phytozome v7.0 (chr-ID scaf fold_5; pos 16422722 to 16423140)
gccccggttttcgttctcattatcaattccttttggtaagttgcaatgactgttgtttggaaaaatcaaaacattccatgtaaatgttactttcatagtttcatgagctaatattctgtgttacgtaatttaatgttcctccaaaagcaacatttgcagtcaattgaacgctgcaacatgtgcatggaagcattacttcttaatctcatatgagggccgagggccgtctctgctctatgtgaattgctttcctgacgtaatttgatttattcatccattagtccaggaactatttttccatggtcttctccattaaatcctaagtctagtagggtgatgccaatatagaaagaaaatgaaaaggtgaaggtgaaactgagtttatttctgatttgcctcaatgatgtttcctgttccag

SEQ ID NO: 53138 - DNA, 310 bp, Populus trichocarpa
  Intron number 2 from transcript POPTR_0017s10660.1 (locus POPTR_0017s10660) derived from phytozome v7.0 (chr-ID scaf fold_17; pos 10132711 to 10133020 reverse strand)
aaccactcctggctgtggctcatctccatctttaagtaagttgctcttttgactttcttaatctgtgtgaataaagaagtaatgcttaacttggtgttgcaccctgttccttcagaaaccatgttctttgtttttggcttgctgatattgtgcaaattttgtcaattcatagctggttccagatccttttcttcgatctgtctgtcaccctctctaatttatatctctttccagcgagcgtatgatgttcaaaacataatagaaaaactctatgtattatatattttagaatttttgcagcaagggagtg

SEQ ID NO: 53139 - DNA, 818 bp, Populus trichocarpa
  Intron number 1 from transcript POPTR_0005s24660.1 (locus POPTR_0005s24660) derived from phytozome v7.0 (chr-ID scaf fold_5; pos 23122399 to 23123216)
acaaactcgactactctgtttctctcagctataaggttccctctctctctccgcctattttttttctcgcattttctaatgatttcatttcttgctttaacgagtgtttgtgagtattctcatttatactttgttttgatgattttctaccttgtatttggtttctgggtttgggtggctcatttgcttgtgtaaatgctttaactttgttagaaagatttctttttgcttgatgggtttttgttttgttgatcttgatcaggggtttactggtgatgggatatttcaatgccatttctcttttatttttttatgatttgcacttctttggagactaagctttgtttcttggctattatttcattcagatttacgtgctccatgtcttttacttataagaaatatttgctctggacttgtttatttggtgcctatgagtatgtatgtgggaacaatgctttgactgggaagcttaattatgatattgtgttgcagtgacgagaattgtgcttgatttttgttgttaaacgaaaaagtcctcaaattgggaaagatttgtatctagttttataaggttcctcggagttgttgccacatgctctattcattgtattttccgattcttctattgctatgttttgttttggtttttgaattgtcaaactcatcagatgatatccacgcacacttcttcattactttgctgctgtttctacacccatatttgtcgttaaagtaaggatctttgaactatttttatattgattgttctgacataaccttcaacttgttgcagagctataagggtggcttaatca

SEQ ID NO: 53140 - DNA, 806 bp, Populus trichocarpa
  Intron number 1 from transcript POPTR_0017s07720.1 (locus POPTR_0017s07720) derived from phytozome v7.0 (chr-ID scaf fold_17; pos 6010193 to 6010998)
agctcggttcttatttagttcagtcacaatttcaggttatcttctgtttacatggtgcatcttgttttctttttatatcatgttggttttgctatttgtgtggatgtgtaggtgcagttaatttttctgtcggtggatggaatgttcaatctgtgatattatctgtgtgtgagtggttgtttcaattggagtgaataaatgttgaggatattgtttcttaaaagaatgataatttatttgtggattttgctagttgacaagctcttttctttattacgaatttagaagattcatcagtgaatccgaaaaatatgggtggttggattgtttttccatgggaaactgccttcttttggttgaactgagatggattattaattaggttgatgtaaatgtcttgaagacaggttgactcttgccatcgccctgttgaggctttaccacctgtcttggtggcatcttgtaaagaatttgcgggattaattgtgaagggagatgcatactagttgaatttctgacgtctcctcattattactatctggaaagttcagagaggtcctgcatgaggttttgattggattgttattttcaagacctttccatctctgtaccatgttatcaaccataagcagggtttctttgttgtatttcttatattgttttcttatgtggaacattactggtttctagtagtttgttcccaaattttagctccttttaattttctagtgtcggtcacctaaagcatcattcttttgcaatgtcttacagtgttctagcagctccagtgctctttttcttacagc

SEQ ID NO: 53141 - DNA, 385 bp, Populus trichocarpa
  Intron number 1 from transcript POPTR_0005s00240.2 (locus POPTR_0005s00240) derived from phytozome v7.0 (chr-ID scaf fold_5; pos 28092 to 28476 reverse strand)
agaatcgaggaatcactcacctttttcccattcaagtctgtacttccctcttttccttttatcttgttcttgtttgttactgctatttctatcctctggtttttattatcactatcattatttttgtcacgttccattacattgcgctccacatttcttagtttactctttttctttgctttttactgcattaataatacatgctgttatttgagatatcatcaatgtcccgtccctaattttcctaggacatcacttgtttgggatatttagttagtttactttcctgtacaatgttattatcccttttctaaccacttaacttatccttttgattttcaatgatttagagagctgttttaattccggctctggaaggtcgaga

SEQ ID NO: 53142 - DNA, 845 bp, Populus trichocarpa
  Intron number 5 from transcript POPTR_0017s08430.1 (locus POPTR_0017s08430) derived from phytozome v7.0 (chr-ID scaf fold_17; pos 6958850 to 6959694)
aaacatctattaattcgttgcgtattagcctcaaggtgaagtgtttatctcaacttttagattaatgtgcctggcagagctgtatagtgaaaataggactttcttatagaacagtatgtgtcattgtgaacaatgtttttctgctcattttggttactcgtaacatatgaaaatggttgcttgtgggctactttttaatcttttaattctttctaataggctagttggtatgttgtgtcattttcaggattgcacatctataagttttaatggatattgtttggtgttgaatatgtcatggtttgatcaaagggaaacattccattttgctgctgcagagagttttccaattcacctataaaagattgtgttttagaaacttctgtcctcctatttctttccctgtgttcgtcaaatctagattatacattacatatgcagcatggttcagggatcccatgaagattatcaaagaagtgtcaggcacgtaggcttaataatttggtgttaatagtctaagctgctaaagcagaatcattgaagtactcatcctagaataacagtcaggtgcatagttatacagtataagaatagccgcaaaacttcaaagataagttgattttgctgctaaacttagtcatactcattctgttcatgttagctttttgagaccaaagatactatgttctcttcttctttttcctttggtgttgtatctcttttttcatttggatttcttgtgtttatttattaacttgacacaatataaattgcatccaattcctattctcaaattttttccttatatgcatatttatttcctcttgtacaggtaaagcaggcag

SEQ ID NO: 53143 - DNA, 858 bp, Populus trichocarpa
  Intron number 1 from transcript POPTR_0005s01750.1 (locus POPTR_0005s01750) derived from phytozome v7.0 (chr-ID scaf fold_5; pos 1177428 to 1178285 reverse strand)
tgcctactaatcctagaccagaggattgtttaacggtaagtgtaataaagttttgaactttttatgattttgggggttttgggttttgtttggatgctgagaaagtgtggagaagttagagaaagtgaaggaaaatggtgggttttatgtgttatttagggttttagagttcaatttagtttttctacgaggggactgaaatgggcttttcgttttgttaatgatgactagagtttgattatgataatgttgtgtagcattttcaggtttaaaattgtgcattggtttaccaaagttactttctttttggcatttgtggtgatattatgtgattgttttgagtttttgaagagaggatataatagggtggataggagtaagctatacttgttgaatcgtattggtgttatagaaactgttttggcttttcagagagggaggctttattagtttggtaatgaattggagtctaaacatgagatttttttatttttttttccatttagaaactgtttagcaatataaatggagtgtgatgttttggtttgggaagtgacaaaaacgggtttttgatttgtgtggttaatgagaggtaattatcctgtttagtatttgaggtttataattgtgcattggtttgccaaagttaatttctttttggaatttgtgatatgaatatgtgattgttttgagtttttgaagaagagtgaatgctagggtggataggagtaagctatacttgctgaatcgcattggtgtaatagaaactgttttggctagttttgagttttgatgtgtgatttactagtgaacattttctgctgacatttattttgctattctgctataggtgtataa

SEQ ID NO: 53144 - DNA, 664 bp, Populus trichocarpa
  Intron number 1 from transcript POPTR_0005s04240.1 (locus POPTR_0005s04240) derived from phytozome v7.0 (chr-ID scaf fold_5; pos 2848893 to 2849556 reverse strand)
aaagcaaggtaccttttttttaaacatttttgtactcttttggtgaccaaagttggtgtcttttgatggtttttttgtgatgtttgtgttttggtgactcggagttggaaatcagctggatttgaagcgaaatttatatttttttggtggggtttttggttttggttttgttggtgagggaaattgggtctggggactatgtttaagcagtttggattctgtaggttgtgttgtttgagattttggggttttatgttcttttttttggaaagatggaagcttgttgaatagtatttgggttctcaggctgctgtgttttgaagttgttttgggttttgagatcatataacagtagtttgttgataggttgctcttgcttgttgtacgcatgattgctggttttgaagtcttattttggtcatcaaaatgttgaacttggttccttttcgtttcaattccggatcaatttagtttggggaatatgatttggttttatggataaatgtgttacttgtcagtgtgtttttcatggttctgtacttgcttgctcgtttgtgaaaaactatcactattaatggtttatggcctgctattttgctattcggaatgaaaaaaattgaagatttccttcattttttgcttagagggtggtacccctgaatac

SEQ ID NO: 53145 - DNA, 714 bp, Populus trichocarpa
  Intron number 1 from transcript POPTR_0005s16540.1 (locus POPTR_0005s16540) derived from phytozome v7.0 (chr-ID scaf fold_5; pos 13415320 to 13416033 reverse strand)
gcttgaattgagtttcatttcatcccagcttcctggtttgtttccgtttttccttacttgggttacttgtttttggcttgaaatgtctacttggtgaggtttacttgaaatacaatcatatcatgatctcgttctattttggtttacaagaaatgtcaacttagtggggtttaatgggtggttttgtttgatatgtgaatttgggggctctaattatctactttttgtgcgtttaatgaggtttttttttaagcatcttttgtttgtcatcattgcttctaagatcttgtatccgtgaatgtgatactatgtactattagaccgtgtttggttgcttataactagaattcgaacatgatgggaactaggtccagttttacttgcttagacatgaacaggtgttcatgccgacacataatggaatggaagcatagtcttactataattgggctgtttagttcatgtgttcatatttattttcaaattcactgtttttttttttctcttctgatttgtcaactgttgttcattcaatttgaagagagcctagagtgaattaatgtttgaagagattatactatcaagaaagttttagctcaattaaaatttaaagcttgttcaagaattaaaatgaagtgaataagagcaactttctgtgatcggactatcaatcaattccacgagctaccggtaacgtcatttcttctatgcagc

SEQ ID NO: 53146 - DNA, 1002 bp, Populus trichocarpa
  Intron number 3 from transcript POPTR_0005s00740.2 (locus POPTR_0005s00740) derived from phytozome v7.0 (chr-ID scaf fold_5; pos 331738 to 332739 reverse strand)
gaagccacaggttagacaaatcattaaggtcttttcttttagtgattttgagtttttaaatttttttgtgtttttagagttccattattttggtttgcagaaagtacccatcattccttcagatggtggaatttcacgagttcgagaggtatatttgggtttgaatttaccttttcttttcctctatctttcaaaaagttgatgctatgtcggctggcaaatagaattaatcaatttgttagtgctttttttattgcatcttattatgatttaggtttttttaaatcattaaggtattaggtggcgtaaagcctctatgctattgatttggtgctcaatagaagctgctttttcttctttcattggaagcctctgtgctactttcttcagtttgaaagctgacatgacttgaaaccacgcaatttatgctaacaggaagtatctgaactatacgattgattttttaggtgcacttttttgttgtccatctgtttcttgggaccatcacatctaaaacttttcagatgctaattcaccgtccaattgtcaaaggcaaagtaaacatcaagaaatttcgtgacagtaatttggattatgtcacccattaatggttatggatcccaatatttctttctttgcaacttctttgccattaagaagagaaattggatcaggggaagctaataactataccatttagactatgtaaactagaatctattttattatgtgggagttaccctttcagagccaggctaagcaaatgaaatgaagagaaaactatcctctctgcttgtagcgtcttttgcttttctttgtccagaacattttgttgtgaaaaatactgtactaggttctaattctgttttttaggtaggatgtagagatatctttggatgcattttgtttttgttacctttgttctgttgcactttataaaagggtttcttcttctcaatgcacacagaccactcttcccgtccaggagctcacaaagatctt

SEQ ID NO: 53147 - DNA, 915 bp, Populus trichocarpa
  Intron number 1 from transcript POPTR_0017s03330.1 (locus POPTR_0017s03330) derived from phytozome v7.0 (chr-ID scaf fold_17; pos 2418650 to 2419564 reverse strand)
ttgtgtggttgcatcctctggcattgcctttagtggtatactttctgtacttcttactgccattaattttcatttcatctctcttactttttgggttgagaagatatgcaggcttctttgatcaagatattaaaatttctgtgcatttggttttgtttctgttcttaaaggttggaaacttacagtagttactaaaactcaatgtcaagatttgcttcttcttattgctatattacatgataaggcaaccctttttttctctctggatcccttttatctcagttgtgagtagatttacataatccttgaagacaagaattaattccttactgcctaaagtgtttgggaggcaaatcaagattgaggttttatgactatcagttctgctattgcttcagccacttgtgaaattttactaaactaatcaacacttgaacttgctgtttgagacatgaacaaatatactttagtaaaaaagtttaattaaatggtctgtaaattttctttactagcttttccctgtctcatggagtgtgataatggtggcgttttgtttttctattcaattcatatgagctggatatggatgattcgctaacttcaaagttatacaagtcttgtaagaatattctgattagcggaaaaagaagtcttccccattagcgagaaaagaaaatatgattaattaatttgtttgtactgttaatccatcatgtaaaattaatttgaatacactacatttccagcttttcatccaagcggtttcgaaactgaaattgttgtaacgaaagaaataatttgtgattatgctatagatgaaattaagcttgttgattttttgtactaatagtttccattctataatttgtttcttgtttccttacaataggaggctttgggagttatctgtttgga

SEQ ID NO: 53148 - DNA, 372 bp, Populus trichocarpa
  Intron number 1 from transcript POPTR_0005s22080.2 (locus POPTR_0005s22080) derived from phytozome v7.0 (chr-ID scaf fold_5; pos 21078341 to 21078712)
gtttctcgaagaggtttttgaagaatcagcgagtaaatcatcatgattctagcgctctctctctctcccttttctttttttaatttttgaattgctaatttgttagtcggtattgtagatccatctcgtgttttttttttcttttcatttttaatttgatgtcgaatacatacataaaatccattgtttgattttcataatttattatatttgtgtttatattgaagaaaattaggattaatatttcggtaattcaacacgggatccacccatgaggagatttttcttgatactgttgttttgtattatgatcttatgctggtctgtcttgctaaaatatttgtaattggtgttttgtaggatactaagaga

SEQ ID NO: 53149 - DNA, 504 bp, Populus trichocarpa
  Intron number 2 from transcript POPTR_0005s22080.2 (locus POPTR_0005s22080) derived from phytozome v7.0 (chr-ID scaf fold_5; pos 21078817 to 21079320)
tgatcctcaaattatcactcaagcatcatctctaagtactttcgttaatctctttgttgttgtttctttgttagtttgatttcattcccaattgtgtttgcaagtcatgctttgcaatgtgcatctttcaaaatgagctgtgatgttgtattgaccatgttcttcataagttcttaggaggactgaggtgattatttaagtgagacaattttgattggatgtattttaaagtttgcagagaaaaagaggttgctcaataggtggataggacattgcactttagcatgggtacatattttggaaacaatgatgagttacagagttcacaatcaatggatcagttctcagtagcatatacaagcaatgctgttaaattccatgcttgcacaacttgttccttgtttattgaataaggtttatacatgctaggttgcgtcctggtttaacatctgttgatgaattatgacaggtaagctgccattggagccttcctccgtggatatt

SEQ ID NO: 53150 - DNA, 738 bp, Populus trichocarpa
  Intron number 1 from transcript POPTR_0005s22060.1 (locus POPTR_0005s22060) derived from phytozome v7.0 (chr-ID scaf fold_5; pos 21065535 to 21066272)
gcgacaccatcgacaacgtcaaagccaagattcttgtattttttttcttcttaactcacttttcttttgattaaattgtttttcgctaatattgcatctaaatttctattgggtctctctattttgacgggaagattgtttcttgattaatactcttttttttttctctggtttcgtttttgcggttgtgattatctgtaggatcccaataatggttgttgtttctcatgagttaaaaccaaggctttggtttttgtgtattggactaattttggccttgtatttaatgggttttgctctctagtaaaagcttgcactaatcatattctttaagtgaaagttgttttaggattagcgatcatataactgatagattagaacagttgtgaactggaaaattcaatggaaattatctcaagctgtacttaatagctgtctgctccggttgtttttgtaatttttcatagagtgtgttagttgtgatattatttacctgcaaacatgaaaaattaaatccattttgtattgtttgaaaccaataaatcgataaaggttgggccaaaaatattcaattagtgtcagcagtagcttgttagtgttatttttggttaagttgctttgggacttcagtggtttgtgtcatgttcctttattatgagttgctgaactcatgtctgactgttggtggatgtacctttttcaggacaaggaaggcatccctcctgatcagcaaagatt

SEQ ID NO: 53151 - DNA, 748 bp, Populus trichocarpa
  Intron number 1 from transcript POPTR_0017s14410.1 (locus POPTR_0017s14410) derived from phytozome v7.0 (chr-ID scaf fold_17; pos 14475893 to 14476640)
ctgcttacagctacgacggttcagtcagtcaaggtgtaagtacaactcactgtaggatttaccaaaagttctgatactctcagaaattttatcatagtatcttctcttgaacagttttgagctctaataaggtcatgttaagatcattgggaaatttctttagtccacaacctatttcaacgaagtgttttctcaaaatttcatctcatttttactatcggcagctttatacatatgttgaattagtatctatctttgttgacaattaggttgctaaactagccgaaccagtctgcgtactccttttagtatcacttaggtatcttcctatagctagttgtagactggatattagaatcttttgtgtgtcaagattaaagagcttagaagtatcatattctaccactcacactgcttgtactggtaaaaatccgaaggggatatctctctgcactttaagagctctcttttccttttacctttatctttctcctttaatggatggaatctgagggtacaagtgtttgagcgcttttgtttttcatccccttttcttccaagtgattgatttaggattgacatcattaacttccaagtaatccattaacagcatagtgagtatgatcttatatgcaacagaaaaatatacgttacagatagtgataatccaattagttcccgacaacttggtgaaattatcttatggttctcaacatttgcttttctttactcatctaattaggtctcc

SEQ ID NO: 53152 - DNA, 926 bp, Populus trichocarpa
  Intron number 1 from transcript POPTR_0017s08600.1 (locus POPTR_0017s08600) derived from phytozome v7.0 (chr-ID scaf fold_17; pos 7214118 to 7215043 reverse strand)
gctcacatcagtggccttgttgctgctcaggtatgcattgctttttcgatttttggctgttgaatctgtattttcatgtgactgatctgtcgtgctagatttgatcgtgttttgttcctggttatttggagaagcttaagttctgaaagatctgttctgagtttggtgtttcttgagctgcattttaaaattctgatccgggttcttttgtggtgattcagcatgatttaatgtaaattcagctttagatctggctttggcatgatgtggtgccacatgtgttcaatgaatttactagattggctggtttatgggattgattttgtagattttttacttgcccgtcatttctttgcagtttgttaaatgcatgcaaagctgaaagcttttaaaagatcagagtttaaaatctaattgatttgcatctgcatgcagaagatgttaaaggaaatatgttcttaatgatcatggagtcaattcctatctaattaatcatctaatttgattaaaggaattagattcgagcctgttctttatttaggtgacgagagctattttgaactagtggaattcttggatatggagatgtgtatgcatgtataaatgcttgaagcttaacatgaaatgttaaagctaatggcatgcaatgtttatccattcaattgatgttacgatgaagtctctctatgtaattatcattcgagtttaaaatgtgctgcagaattttaggttctactctgataatccaagaaataagcttgcattatttatatgcaagcaattctgttgcagttgaaagattggcgctgtcacttttttttttcttttaacatattcaatgtaaaatgtctagatccggtctaaatctttactgttcatttttggttgtaggaagctgccaacccgtttgagtactgtgacatagt

SEQ ID NO: 53153 - DNA, 850 bp, Populus trichocarpa
  Intron number 3 from transcript POPTR_0006s02640.2 (locus POPTR_0006s02640) derived from phytozome v7.0 (chr-ID scaf fold_6; pos 1686077 to 1686926 reverse strand)
gatttcgaacaggtttaagaacttcttttgcattgtaacaactgctagtctggaacataccgaagttgagatagaaatttgatagaatttggacagtcttttgccatagctgattttacttgggagtttgctgggttaaaatcaccctttatgtgcggaactgaaccttcataaagaatttcagcagtaattaaaagatctttttttatgttcaaactggagcatttggtttcatggcattcttctggatgattggatgtgcctttagtttttagataggattcccaaaaaaggatggtgaatgtgaaaaattaatgacaaaatagaattaataagagatttgtcccagtagtgagaatgagctaaggtttgctggtgtctttaagcaaagctgagattattgtttgtatctacccttcacagtttggatatcgatcctgttagcactttcactgtttatggcatggaaatgaacattcctaaagaacttcactgataatcagagatcttttccatttttatttcttcaaatgtaataaggggccatttggttaggatgttggacatgcctttgagttttagtaaggactttaagggattaagatggtaaaaattaaatgatgaccatcgaaatcaattgatccataacaggttagtcaaagcgttgaggtaaaggttcactggagcgctaagcaaaaatgagattttatgtataatcttttatgaattgattatattatcctttgatactgtaactagctctgggcccacttatcagctataggctctgtctggttttgaccaaaatcctattgttcttctatctcccctcttgcagttttggatattg

SEQ ID NO: 53154 - DNA, 658 bp, Populus trichocarpa
  Intron number 3 from transcript POPTR_0017s11520.1 (locus POPTR_0017s11520) derived from phytozome v7.0 (chr-ID scaf fold_17; pos 11261704 to 11262361 reverse strand)
aggttagactttctgatgggctttcttttgccatttctaaacttgttcctgggtacatttaaggagctgttttaagtatgctgggcagctaaaaaaaaatactagggaatagaagagaaattaaaatgaggaaatcaagtatcttttggttgatttaagagaagatagagaaatcgagttttctttgtctggatatattgatggaaaagaaaagaaaacaattttttagaggatataatgagcaaaattctttcaaagatttattttctcctcgtttcccttcctttcctttgttttctttacaattcataattttagcatccaaacaaaggaaggtgacttaatttcctttactttactctcctttccattccttttcctcaaaacataaacagagctagaatctgtattgttgggtgggctgaaatgtttcttcggacccgaccgatgcaaggaatattagtgtgtgacgaggaatttagtttgtgggtgtaaatagagaggagtgagtttggatagttgtaatgcttacttggaaattttattgttatgctatcgttcattttaacagaactggagttttgtgcaattgttttttgagatatgaagaatgatatgtgcagattgtttccccttagtgaaacctctctctttcgaa

SEQ ID NO: 53155 - DNA, 806 bp, Populus trichocarpa
  Intron number 2 from transcript POPTR_0005s26100.1 (locus POPTR_0005s26100) derived from phytozome v7.0 (chr-ID scaf fold_5; pos 24206769 to 24207574)
gcagagagaggcatctcttcacaaatcgagattaggtcagtggctttttcaagggttttatgcactctttttgtgatttgttttgattaatgtgaaaagaaacggaatttggagaattagtatcaggttgcaagttctaattttgagataacactaattaggactgaatgataaaggattgctcctttctttttctcccttatgtgcaatgcattatgtcattttaatggtggagtctgtggtaggaacaaagggggaaattaggtgatagttttttttttttcaagtgtttttatgccttctttgtgtgatatgtagaatataaatgggaaaaaaaaaagcaattttggaatttagagtttgttggatgatttttttaatttaagatgaagcaagggttagattatttaatttttccccttgttatattaagaaaatgaatgctttctatgattttggcgatggcacaaacaaaatgggtaatagaatatggtaagacactctagtactttggatatcttattggtgtaggagtgattctccattgaaaactgtggttgaattcaagttttatgtctaactgcatattaaaacacttcacaggtttcatccttgctgctaactttcttgtttgattctcttgactcagaattattagtttgttatttggtgttaacgcatggtgaatttcacctagattatgttgttgggaatgcacttgttcatggatggctttgtaacaactcctttacgtatttaattatgctacatttgattggtgtttgtaattgcagaggaaaccgaag

SEQ ID NO: 53156 - DNA, 1062 bp, Populus trichocarpa
  Intron number 1 from transcript POPTR_0005s02070.1 (locus POPTR_0005s02070) derived from phytozome v7.0 (chr-ID scaf fold_5; pos 1340619 to 1341680 reverse strand)
actcctcttagtactgaagatcccggtaattcaaggtacaaaatacacatacactttcgtacgtatattatagagatttgcttgttatttttattgttaattaattatttagtttggatttaagtaaattttggattttttatttttatttttgagtgttgaattttgagaggggtttaattaattaattatattttattgactttagtaatgtgagatgcataattgagagttctatctaaaaagagatgagaaataagatatttttgtagtgtgattttgtggagatttgtagtgtgctttattgttagattgaaagtggaaaatgcgtgtaaaattgaaaattgttggtgggtttttagtttttgaagtgaatgtgagtggatttggagggttatgatagttaaaagtggtgtagatggagttaattatggggtgtaggatcatgggagggtttcgaaaagcattgcgattgagaattgtaaaagtttactgctgtgtatgtggtttgggatttgttggtagctgtaggtgaagaatgaatggtgggttacctatagttagattgaaatggatggaggaaatgtgtttgatgatgaaagaatgagatatttttcttgaaggtagtgcaagagtgttgtagaagaaagatataatttgagacttgggaataatgaatgatcaggcatgtaggtttatgattttatatgcaggcatgtgtgaatccccatggttttgttggtatttcttataaaaagatttatcaaagttgcaaggagcagtgagatggtagcctttgggaggtgatgtatgtcggcatggggagggctgtacttcaagccacgatattcgaaagattctgttagatatgagtatatgtatcaagcactgcatgggtttctcttctaaattctggactctcatagctttttgactaatgtactattgctgtcttaatgggtgagtattttctgtaaaattttatgctagcctggtaggactcttacaaattgctgtcttgatgcagtaaaggtgcacttacagtaggtttgccaccagctt

SEQ ID NO: 53157 - DNA, 327 bp, Populus trichocarpa
  Intron number 2 from transcript POPTR_0005s18570.1 (locus POPTR_0005s18570) derived from phytozome v7.0 (chr-ID scaf fold_5; pos 16812922 to 16813248 reverse strand)
gcttggagagattgttactaccatacctacaataggtaatcgataatccactaatacgacaagttattctatcatttctagcaatcagactaacattagactaacagaatttcgattcctgccttttcagttgaatttgattttcgatttaatggatttaatcaataaacaaacatctttcttgcaaaatattgttcttcatcatttcaatggatgatgaagaacataaccagagaacgaaaattttaacaggaaatctaacttgttttattgactggtttttgatgaccagggttcaacgtggaaactgttgaatacaaaaacgtt

SEQ ID NO: 53158 - DNA, 559 bp, Populus trichocarpa
  Intron number 1 from transcript POPTR_0017s02040.1 (locus POPTR_0017s02040) derived from phytozome v7.0 (chr-ID scaf fold_17; pos 1495139 to 1495697 reverse strand)
tgctgtttctgccaaaaagaacaagaaacccaactgtatgtaaaacccatctttcttttcttttttataatttgatgtgttccaatttatgatttttgtggtttctctattgacttggtttgaattatcactaccatttatgtaaatcttgttggtgtttgggaaagtctgaatcttttttattttcttgaaatgggtttttgtttgtttatgtaaaggtgattgctttagggaggttatgattgtgtttttgatggcaaatctgggaaatagtttttttttttggtaaataacaaatggtttttgttaaaattttcgtcctttacatatataattacctgcattgcctttttaatctggtaaatttgatgttttcacctgttgaaatgctggtgttttaattttaatctggggtgctggattttgaatatcaaattatgggctgaattgtgttgttttattcaatgagttttatgagtggagaattttctgagcatatgtttgtttggccttggtggatgcagattctagattcacacagcaagagcttcctgcttgt

SEQ ID NO: 53159 - DNA, 407 bp, Populus trichocarpa
  Intron number 3 from transcript POPTR_0005s10300.2 (locus POPTR_0005s10300) derived from phytozome v7.0 (chr-ID scaf fold_5; pos 7377828 to 7378234 reverse strand)
cgtggtgtttgtgaagaacatcgacccgttacaaggttagaaacaacaactcttttcgtttcatttttcttctgtgttgtttggttggtgagaaaatgtaggaaagagaaaagaaacacaaatttgaatactggatcttataagagaaaacaacactgcacgtacagtacgagctctgttttttaataagctacttacagctagagctactactttttttggttgagttttagactaatagtaacagattaaaacaaccaaaaacatcagatttaaaccctttttgttagtttttccagagtttagcaacccagtagaggatctaatatttactcggaaaactttgatcttgacattttgaccactttacaggaagttcgctgctcaattgtcaggtacacagcagt

SEQ ID NO: 53160 - DNA, 731 bp, Populus trichocarpa
  Intron number 4 from transcript POPTR_0006s15470.3 (locus POPTR_0006s15470) derived from phytozome v7.0 (chr-ID scaf fold_6; pos 12855812 to 12856542)
ccaggatttgaaatacaaggttcattttcctgctaattttttaatctcatttgtcaccaaaattatatttgtgaagcaatattcattatttatgaagcatttttctagacatttagtgatcttcaactttttttatttggggctactttttttgtgtatacatctatcttttgcttagtagttatgattatggatatgcctgtatattacattacatgtacaaactatgatcttattctttatttagaaatactctttgctggataaaacttccttgttgctacaatgtttatgttattatgaatgaccttatcctttagctattctctgtctcctttgcttgcggatcaaaaagctgtcatacaattctgtcaacgctgattgttatggaaattttatgtcatgattattgtgtcttgtttctttttaaggaaaaaagaagaagaagctcaatcacttggattgataaagcaattttgtaataatgaacttttgtatattggcatctatgtattatatatcctatctttttatttggcgtttgatcttgataacttttgagttagattagactgctatggcactgctgtcttattcagacaaaattgcacatacacatggatatacttgcacatatatagaagctcaaatttgaattttaaatgggctttcgctgttttttgaacaagacagttaattcttttttttttttttatggatttagccagggg

SEQ ID NO: 53161 - DNA, 854 bp, Populus trichocarpa
  Intron number 2 from transcript POPTR_0005s10230.3 (locus POPTR_0005s10230) derived from phytozome v7.0 (chr-ID scaf fold_5; pos 7328213 to 7329066)
agattaattgtgttatttgaggaagaatatataaggtgattgattattcattgaggaaacaagaaaaaccacactaaaataattcacaccaaggaacatgctttgtcactttttccagcactaagatccgtgagtcgattgtttaaccaaaagaaatggaaaaaaatatataagaaaggtgattaggtaggattctagccgaatgatcttgagtgtttaggaagtgcgcacgcccttctatgtgtggtgtcagctgatctcacccagtgaccccagataattatgcaaggggaccccaaatgattgagacggcgagtaggtttttttttttaatgttcggaagtataataattatttcatccattacagtttgtttctatgttatctatctttggttcatgttaaaaaaataaagggagaaaagagagagagagagatagatttttcataatcctatcattttgaatgtgaatagccaccataaaatgcgaaattcaactcaaattactttgatcatcaaaattagagagggaaaactggtttctacagggaccctgtgacatggtggtgctatatctgtaccctctaatgaagacaaagggttgttaccttcttggttctttcctcccttggctaggcgccttttagattcacatgcacaattttttgtttttgaaagctcgatatatagcttttcataattctgtcacaacaaatttctgttgttgcattttgaatgtgttttgctagtcttaactttgctttctcttgtcttttcctcacgttccttctcgtgattttccttccttttctctttagtatataaaatacaaggaagggcagaagtagcaaga

SEQ ID NO: 53162 - DNA, 396 bp, Populus trichocarpa
  Intron number 1 from transcript POPTR_0005s02360.1 (locus POPTR_0005s02360) derived from phytozome v7.0 (chr-ID scaf fold_5; pos 1529031 to 1529426 reverse strand)
ttcatctagctgatttccttcctgcgttgttccaggtcaagaaccttctctcttccttctcttttctttaataataatcagcattgttagaaagattactgatttcccatgttaattttctgtaaattttgttcagttaagaattggaaatgaaatgggaatttctttttctttataaaaaaacaagaattggaatcatacaagaaatggggtgggctattttctgttcgggcaacattatgttgttatcgtagtagatttgatttcatgtaaattgaatgcttatttggattgaatcggaaagagaatggtgttaatgaccctaagtgaagcatattttgatggagtttacggattgtttcttgcagtaggaagaagaaaggtgcaaagtgaatt

SEQ ID NO: 53163 - DNA, 270 bp, Populus trichocarpa
  Intron number 5 from transcript POPTR_0006s27400.1 (locus POPTR_0006s27400) derived from phytozome v7.0 (chr-ID scaf fold_6; pos 25308389 to 25308658 reverse strand)
cttatcaaccaaaggtcagtaggattttaataaaatgatagagagattttcttctgtctttaatggttgctctgtccctattcttttcttttgatatgtggcttttaagatgtcacttccttagtttttattcttctgttcaatgaatacagttgctgcaatcttattctttgtaatttctagcacccttgtttgccgtagagaataaactgatctttggtgtgcaatatgacagcttgaattggcagcattcgctttgtggtaatccag

SEQ ID NO: 53164 - DNA, 546 bp, Populus trichocarpa
  Intron number 1 from transcript POPTR_0006s27400.1 (locus POPTR_0006s27400) derived from phytozome v7.0 (chr-ID scaf fold_6; pos 25309467 to 25310012 reverse strand)
tcctttagttccctgttcttaagactgtttcaaaggtgagcttatgctgtgtttttacctttaatagtatagtaaatgattcccttttgtttcgtcttttttttggcttaaactctttagtctactttagggcatctttaattttactgggttaaagctactttactgtttcaaacatgtgaaaaccctaattttctccaattttcagaattcagttttacttgaaaaacttgcaattctgtgttgctctttcatgttattgaggttgttgtgcttggtaacttcaaattcttctggtttttttcttaattttgtattccatgtaagcccttgtttcaattaaattctgataaattctatttgtttggttgtaaatgttgagaacttctttttgggctgaaaatgaggccattttcttgcttctctctctgtttcttctttctttttgtcattttattcgtataattcaatttgattgtgtaattatgttgtttttttatattgattggtttttggtggttgtgtagataagaactggctgctgta

SEQ ID NO: 53165 - DNA, 843 bp, Populus trichocarpa
  Intron number 2 from transcript POPTR_0005s10430.3 (locus POPTR_0005s10430) derived from phytozome v7.0 (chr-ID scaf fold_5; pos 7484807 to 7485649 reverse strand)
ccagcgccttgtctcagtgcgtgttatattattattattattattattttaaaaaagatttcgatgcaaactctacgcaataatatagctttgatatgtacaatttatgtcatgatatgtcaatggcaatgggttttaatttgatttgcttcgacatgtaggctgtaattcgatatgttcattgactgcaaatgctttgtgaattaccatgactcataaaattcgaggctgttgttttcgtgtgattggattttgcttattcaaaatcttcattcacttgatattagataggaagaatttgccttggtggttattgtccaattgtcctagaattcgtcactacaactagaagaagctattgggctaagaagagctctaatgttaggcctttatttgacttttggcaatggcaacttgttgtattcgagaatctagatatggcaatttatgataagaaagtgtggtgtttaaaactgtcacagtatttgctgcaccttgttttttcgttgtgtttttctttctaaaagattttctagtttttctgtagctggaagggaaaaaaaaggcgtaacattgctgttctaaagttggattaaattataggaagcaactggaactcaatgcaggcagagtacttcttataatctagtacatttaaaagcttgtcaggttttatgagtatgcttaatatttcatgaagtttgagttccaaaagtatgtctagatagttttgttttattgaagtgaggctgtactatctaagaatgtcagttatgcaatttttcattggtatctttcttggttacaggccatcaacatttgctcaggcagcaaaacttagaa

SEQ ID NO: 53166 - DNA, 978 bp, Populus trichocarpa
  Intron number 4 from transcript POPTR_0005s27130.1 (locus POPTR_0005s27130) derived from phytozome v7.0 (chr-ID scaf fold_5; pos 24921915 to 24922892 reverse strand)
ctaccagtggaggcttaaatcagcaaaggactggggtgagttgattattttgagatttttgttcctctgttccaagggttcagtttatagtttgatcatgtaactgagcttgcttgaatgtttgcagccttttgcttaccgggtatatgatgccgtaatccccactagttttaacgttatgccttccaccattttatttgaggcgcatgctggtttatttcattgatttagtacttgttggacctcttgagaaaaaagagaagcaaaatggtggcctcatagaggggagagtctttcaattatacaaacaaatcccaacacaagataggagtacatgtgctttaaaacctacaaacttagagcattctgtcactcatgggtatactagactaacaatgcactcctcttaatatttttgcgtactaatcacataccaaagacaagctcctttttgtccacaccttaatcactcatgagtgcactacgctaaacgtacattcacttcgaggctgtgttttgcaccaagtatgctagatcctcttatagctgttgtctctgagttaccaacttcgaatgcgtagggtgtttttagaaggttagcaatagatggaaccaaaaaatgtggcagaagacagtaaaatcccagaggaaaaaagactcgagggatgtgagaaattgggagagctgtagagggagatcagtgaactttaaacagtggctattactagattgacattccttgaaaggcctctttacaaatatgtttgtgtatgttcgtgtattaatatagcattagggaaacagtctgagttgcttagtctctgtaaggcatttattttcatttacactaactgcaatatcaggattgagtgatactcttacgtggatgtttgttttctcaactgacttgcaggtcatattttgatgaatatttgctgttagcattgatgtttcaccaaacacgtttgcagattacag

SEQ ID NO: 53167 - DNA, 577 bp, Populus trichocarpa
  Intron number 2 from transcript POPTR_0006s02290.1 (locus POPTR_0006s02290) derived from phytozome v7.0 (chr-ID scaf fold_6; pos 1513807 to 1514383 reverse strand)
agtttgggaagactgtgtctgtcaatcagtttcaggtaaatttaatttaattggtattcggtgattatttagaatgttatgtttgttatatggtggccgttctgatgttactccaaaaaaaaaagttctgatgttcattttgtgtgttttaggatgttttgctttccataaattatgggatgtactgcatgttagctcattattttgtcataggtttctctgtctagaaaatggtttggttcaatatatggtattatgtgcaaaggaagaggaaaaaaaagaagaaggatacaaagtgggtatggatattaaaatagagggaactgcaaagtggatactgaaaagaaatatattactgaaatgctgcgctgtggtcattcttcgtagtttaagattgtggttgctcattctaatctgaatcatgatgtgtgttggatgctcatcactgctattttatagtagcctgaatatttttcatttccatccttgttctatatagtttgttgtgcttcttatggatgccttgttcagtactcctagcaatcttgttactttttgatatatttccaggttaagg

SEQ ID NO: 53168 - DNA, 700 bp, Populus trichocarpa
  Intron number 5 from transcript POPTR_0005s10350.1 (locus POPTR_0005s10350) derived from phytozome v7.0 (chr-ID scaf fold_5; pos 7420776 to 7421475)
actccaatttaacgctgaggtgaattacttttccatttggttcatgtatgtctatttttaattaaagaaagtgcatgctctcatacacattcaaagttgttgtggagaccttaggcgactctcttagttggctttcttcctgatgcactggtggttaaatttggtttaaatttactagatcatcctatggtttgtatatttcagaatatggatatgtagacaatatttacgagcttgaaattttgcaaggaaaaagtggttgtaggctttaactcttcaagattatcttcaataagaagtgcaagttgaaattgttaattatgcataaggacaatgaacttatgaaaagaaaaaaaatggcagttttcttgttgaaattttcatgagaatcatggcaaactcaaaactccaaattcaatgggtaatgaatattgaaaacagagttaattattgaattttaaacaagatgctaattgttaaacaaaggtaaaacacttcatatgaatgtttcaattgagcaaaaggccattgaatttggacatgtaatatttataccatttttactcaatcaatttaattaatcttagttgtctgtttcataaaagaaatatatttatctgtgttttcatatgcatgcatgtacatttttgaaattgtaaacgtttatatgttttgttgtgtgacagtgctcagcgattgc

SEQ ID NO: 53169 - DNA, 768 bp, Populus trichocarpa
  Intron number 2 from transcript POPTR_0006s11600.1 (locus POPTR_0006s11600) derived from phytozome v7.0 (chr-ID scaf fold_6; pos 8811112 to 8811879)
gcaacgcttcagaagatcctctggtttgtcttctccttgtccacgtgctgcatactacttttatgacgcaagctgttgattctcagtttagagtgttttgcatttgaaaacagatcatgttctagcatttgatttttaaagaaaatgagatcctcacagggaaaagcacaaaaaaaaaaaaggaagcaaaatgatgtggagcaaaacccttgtgttcaagactcctacaaattgagaactggagtcgactcccaccttttattttctaaagttttttttttcttttttattaccaccacctaaattaggagccaataccattcctttatggtggacctttaatcccttgcctcattttgaacgagtaatctctccacgagccattgagctgtacgagctattatatattctaatcaaaatgaagggcacggatgaattttctatggatattttccacttgtttctatgtacatattcccaagtctttttcttttttttgttttaccctttagatttcgattacctcattcttattatatgcttctgggaaattctcatcctcagaaagcgtaggctacattaacatgaaaagctgttctttggttcaacaatttctttatctgtatcctctttttttttttatttcttatcccctgctagatggcaagaggtggcttcttgtatatggacatgtaatgttcaaagtaaccaaacaatgcaattcattactaacacgaggatctgtgaggcaccagtggtgacttgaga

SEQ ID NO: 53170 - DNA, 709 bp, Populus trichocarpa
  Intron number 2 from transcript POPTR_0006s09070.1 (locus POPTR_0006s09070) derived from phytozome v7.0 (chr-ID scaf fold_6; pos 6698765 to 6699473)
ggaagctcaatatccttgtaagttcactgtccaccagctattccatatttttcaatcatattatactcaattttcagtaaggttttaaattcgagcatctcctatgtgagagagaaaaaagaagaaaacttaccaaatatctggaggccaagcttggtgggaggtgcataaccaatgagtactctcatgtttcttgagacatgagacatgacaagttaacatggttaattaaaatttgatttatactagactgtggatggttaaagtgtttttgacgtaccgaagatattctcttaatttagggttgttcgtgactcatcaaggtcattttctgcttcctaccatgcaactttactgcgtctttgtcatagtaagaccatagtgaatactgatgactacagttaccaaaagttttaagttgaaggaccagacatgagcaggaaataatcttgcatactcgtgtcaattctgaaggttatcgatgatctaaaaacaagataaaatggttccaggctaaaaggtttacatgattttatttctgatctgtgggtttgtaatttgattttgtcaaaaaattggacacaaagtttcggaatcttgttataccagatcttcttcatcttctttttttcttctctaattttccatgtaccattctaaattttcccgtgcttgtaacaatatcgttctctgaatgattaggtgaaca

SEQ ID NO: 53171 - DNA, 271 bp, Populus trichocarpa
  Intron number 1 from transcript POPTR_0005s20120.1 (locus POPTR_0005s20120) derived from phytozome v7.0 (chr-ID scaf fold_5; pos 19161607 to 19161877 reverse strand)
cacgatttcgtcgtcgtcgagttctacgctccttggtaccttacacactacacttcaattccttatgttcttttcttttcatctttttagttctttcacttaatttgatttcagtttttcttaattattatttttgttttgctgttgatattttgttaaaagacctatgtttatatcaaattttgaaaaatcttctaacttgggttagagttctaatctcttgtgttttagcacaggtgtggccactgtcagaatctagcaccagaggtaa

SEQ ID NO: 53172 - DNA, 728 bp, Populus trichocarpa
  Intron number 2 from transcript POPTR_0005s21940.1 (locus POPTR_0005s21940) derived from phytozome v7.0 (chr-ID scaf fold_5; pos 20977919 to 20978646)
ctagagtaagcgaaatttgaacctcttccttaagttaatggtgattttgaagtttaattatatccaccattttattaccagttgacaaatataaagtatctccttcataatcttacatgttcaagtttgttgaagtatatttctgctcccattatgttgggactaaatcagaggacacaaattgagttaaagagccccagggctgtggaatattgaccttctttcgcaaaagtaaacagttggattagaagttaaacccaggcgcttatgtgtgtacagttctgttggtgcatagttttttcatcttgcatgaatttggggattttccctttttttacttgtactttttgcagcaaacatttcacatttccaggatgggatcagagtcaaatggatactgctgcagcagtatttattgtagctcgattgaattcgggagctatagctatgtgttactgggtttaataaaaacaaactctgtcagttgacaagcaaattgaataattggtttttacataatgatttgtgaaaagcttatctttagcttgatagattgaaccatggctaggaatctcgcattgacctctttagatcagattttatccgaggaaaccagcgctgagggagaaggtatcagtacttgttatgaatcaactaatcttctctttcattttcctccttttcttgggtggatgtccagacactatcagctgctgatcttcgtgacc

SEQ ID NO: 53173 - DNA, 477 bp, Populus trichocarpa
  Intron number 1 from transcript POPTR_0017s08620.1 (locus POPTR_0017s08620) derived from phytozome v7.0 (chr-ID scaf fold_17; pos 7243602 to 7244078 reverse strand)
taattggtaatgtgttactgcatttcttgattctgtatccttttgggattttcttggttgcatctgtaaatttaagagaatcatgttttgatctgctttgagaacgaaaatcttagcctagtttttgagagatctggactgtccttttatacaatatatagttgatacttgttttggtgagtagaggatgtcacgccttggaaatctcagcattcttttagggaagatttgaggttatcttttcttttcattaatgtgaaagacctagttgatgttacacactcttagcgcatcactttcatatcaattaaagaaatcacaggccgtggaagcaaaagcttaattttagaagtgatcataaacaaaacccttcttctttttttccagatatgcttatggaggcaaagcaaatgcaatttctatatttcaatctcaatatccctccaccttatttgacagattgtgagaacttaagga

SEQ ID NO: 53174 - DNA, 422 bp, Populus trichocarpa
  Intron number 1 from transcript POPTR_0006s09620.1 (locus POPTR_0006s09620) derived from phytozome v7.0 (chr-ID scaf fold_6; pos 7065613 to 7066034 reverse strand)
ccacatctgggatttgaaattgaaaggtatgtttgaagctctttgctttggtttattctctatctgtcaacattttaattttctctctctgaagtttaggaccttcatttgagttttattttcttattgaagacttcactcactttaatagtatttatcttctagcatatccatattggtgctccagtttcatgagagaattaccaagttctggctcatggcactgcttgccatttcccctgttcaatttctgggcaataggaaatcattctgtccaaattaaggagcaaatatttaatacaatttattatctacataaatcgctgttctaatacaataaatacataaagattactaaaacaaaaacattattttggtatcctaattttaattttgttgtgatggcagcatcatcacgcagc

SEQ ID NO: 53175 - DNA, 871 bp, Populus trichocarpa
  Intron number 1 from transcript POPTR_0005s19200.1 (locus POPTR_0005s19200) derived from phytozome v7.0 (chr-ID scaf fold_5; pos 17815856 to 17816726)
gaaagagagaaagagattgatacaagagaaagcaggtgataaattttttatattgtttccagtttagattttggaattcaatgccattacttctaatcattccgtttttcctttttaatatcttcagctgaatacaaacaatgaactcattgtgtatatagttccaagcgtaatctctactaaaaactttgttcactcgaagtgttaattaatgctaaagtcctttagaaattgagtttagaagtttatgggcgaagcaaataccttctaactaggatttgtttttgagttggattgttaactgatattattgtcccctgcgaacccaaggctaaatgatttctctaggtttttgatgaagaaattgctgtttctaaaagtatttttatgagatttctattcttacccatttgcgttccatttgaaaaggggtgtgaattgaattagggacattgtataatatgaaaaatgaaatagcgttaattttttaatgaagctagagattggccgttgctatgttttgaatgatcttgttgtatgtgtctaagtatacattgctaactttgaaagagtaaaatgtttaattggtgattgcacaaaaattcgaaacaacatttgctatccttgttagaaataatgtggcaaaaaggttgacagcggtgtcactattgctccttgtctatgataccatacagttggttagacatttggatttttctaacagcttaatactggttcttttttttcagtcataagaatgtctatgcctgttaattaatctcatgaattttcatcttttgtgaaaattgaaactttaaaagtgttttggttggcaggagatttaaagataagaaagaaggtgtggagcctg

SEQ ID NO: 53176 - DNA, 621 bp, Populus trichocarpa
  Intron number 1 from transcript POPTR_0005s17720.1 (locus POPTR_0005s17720) derived from phytozome v7.0 (chr-ID scaf fold_5; pos 15418567 to 15419187 reverse strand)
gggctagaaaagaggctgttgattggattgcaaaggtgggttcttttctctttctttttattttttcgctgcagtttgatgttatattagatgttcttaaatgatgattttgcttgattggtttctcgaatatatgagatttggttctctgaaagggggttttgtttttcagtgcgggtgtataggacttcttttcattttttggattggtatattttccattcactggggatgtatttgcattttctatatattttgattaatgtaaagccttttgttctagtgttgtgtgaccgctcttcaatatcggtgtcgtacgtgactttgaggtgtttgatgaaatgggttgcggttttgttctttttgtttgatgttcattttccacatccatccactcaatctgaagtgggtttggtgggttcccttctttttctctatatttcctcgaagatttttttgtgcatttgtttttgtcttcccttccctgttcctttcctttgatcagcctcgcacgagtgctgtttattgtttatgaggtggtagtttcttttttgttacacgattccacaattgagcttttgttgatggtcaatactaatggccttgttgctcaacaggtta

SEQ ID NO: 53177 - DNA, 376 bp, Populus trichocarpa
  Intron number 1 from transcript POPTR_0005s01710.2 (locus POPTR_0005s01710) derived from phytozome v7.0 (chr-ID scaf fold_5; pos 1136894 to 1137269)
gacgtgatcaagccctggtacatttcttggtttttttttttactttcgtaaccctgtttgtttaccaagaaaactgcaataagcaagaaaatggaagaaactgaaagctcaagtcttttcaatcatttccctttcaaaatttcatcttcactatccttttgcttttgattatcttttccatgtgtttattctttgtgctctccgattatcatttctaaaagtcaagtctttgtgcatgtttcttcttcttcttcttcttctcttagaaatggaagcttttgttaaatgggattgtatttaataagggattttatttatttatatgtattttgggtgaaaacccatttttgtttccaggatttccaggggtttttga

SEQ ID NO: 53178 - DNA, 623 bp, Populus trichocarpa
  Intron number 2 from transcript POPTR_0005s01710.2 (locus POPTR_0005s01710) derived from phytozome v7.0 (chr-ID scaf fold_5; pos 1137342 to 1137964)
tggtaaagtttcaattttgattatggtttcagttgctttcaacgcttttttgtgtaatattggaaatgagaaatgggttgttgaaagaaaaccatctttattatgagaatcttgcagcttggataagagacttcaatgtagcatttgcatgttgcttttttaactttagcttgctgttttaggtggctcagtgagttatgcatgtgtcttgtgggtttatgtttctgatggctgctttacagaatttattggtttgcttttagaatgaaattacgtggaacaattaatttgttcttggtttcttttagtgtggaaattgagaggaggtgttgggactagcaagtttgaataatccaatgcttaatattggatagttcttgtctgaatggaaacttgaatggtgattgtcaacattcttgtgcattttcagtaagctatagtggtgctcaatttaaggagcattgatcagtaaactatatgtttaaatatgctcttatttccatatgaaaagtcatggcatacctgtgtgtttgcacccacacatatgtttagagtaattatatgggctatgatagttgcttgctgaattatcaatttttcgtgtattcagaagattggtgagg

SEQ ID NO: 53179 - DNA, 645 bp, Populus trichocarpa
  Intron number 1 from transcript POPTR_0006s12030.2 (locus POPTR_0006s12030) derived from phytozome v7.0 (chr-ID scaf fold_6; pos 9201462 to 9202106 reverse strand)
tctgtccaaggttcctccgatccttacctcgtcgggtaattttttcgccacccctctttcctagttctaaggttcctttctatgattgaattgcattcttggaggtaaaaactctcatttcagtgctatttaatgaactcacagtgatgagttttgtttagagttggtaaatttgtatttatgcatttcttgctcacaggcacacacttaaaatgagattgtggtggatattgcttgtgattctttctaaaagtggaagaaaaggaaacgaaatgggatttctgtgcatgttggtttaattatatttagtaaagattgattctttgcttttgtttgtatccaaaaagattgatttttgttgttatttatattgtgtgcttaaattattatactattggctaattttgctgttctttccttttgggtttccattgcaatcagggtcacaggaacttcagagaccttgtaatatatctgtcttggttctcttcagttttgtgtgctgttccacattctctttaggatggaatttgataactagtaattttttagcacttgatgattatacgccttgatattctttgattcttgtcttttttcttttgcttagactttattttacaaaagtgaaattgggctctcctc

SEQ ID NO: 53180 - DNA, 653 bp, Populus trichocarpa
  Intron number 3 from transcript POPTR_0005s02020.1 (locus POPTR_0005s02020) derived from phytozome v7.0 (chr-ID scaf fold_5; pos 1315884 to 1316536)
ctgggctttacgatcctctagaggaagaagacgaggtctgtttaaaaatatcttctcttttttagaggccgaacaaacggtgtcgtttttagtttatggtttgtggtggttaatgattgactttgcatattcactttcctgtttgtgtggggtaattgaggtcctaaaggcaatttcctgtggcactttggtaaatatggtgcttgctaaatattttattaaaaaaatgttagcaatacgtgaaagggtgcaatgtataatgctttcttaagaaagaatattaaaagaacataatctcattttatggtaaaaaaattgggtttaagaaaattacagtgtttggaagtatgttagttttttttagttacgtttcacattaataaaatatacaattttttttgtctttttctcattggtaatgctttgattatctaaaaaatagagaaaaaatctaaaaaaatattttgatgtattaaaaaaaaacatttttaaaaagtatatacatcgtataccaaacatataaatttatagattttgttaaacttgttctctattaattgttgatattacttggtttaggttcattaattccaatacctttgaccgtatgtccgaatttttttaatttctcaaaccaggaattttgtgatttt

SEQ ID NO: 53181 - DNA, 897 bp, Populus trichocarpa
  Intron number 4 from transcript POPTR_0006s00280.2 (locus POPTR_0006s00280) derived from phytozome v7.0 (chr-ID scaf fold_6; pos 56233 to 57129)
gaaacaggtaggcaacaatcattctgacagttccatgtagttttgcttctatatagtctcgtcactcagcttaaataagccttagttccaaactaattaggtaggctacatggatctccttttttggttcgttatattctgtatatgatcaaattttctataaaaatgttgtaattagttttcatttttggccaaatctattatttgcttctgtttcaaatcaaatcactgatgcattcatagataattttctagaccattaccttatcgctattcatttcagtataatatatttttaagtctataatctggttttccattctacatacatttctttcagtgacttcattgaccagaggcaagccatgttggctctcttcccagccatcatatccactgactttgttcactttcttgtcgaagatctggtatttcatgtcctgaaaccaatcctactctccagctaggttccttacccgcacctctccactaataaatgagaaccattttctatttctcaccacattcaccaatgtggcttctttttttttgttaacacccagcaccatagcctacttttcacaacatcaggagtctgatacaatgcatcactagggttctgtgacatctacatccatatgttgaaagtggttttacatttgctgtcattgtattaaaagtcttctcctttatcctggtttgggattaaggtgctcgatttcaacatcaaagtcagcttgggcttagttataaaatctagatctgcagtgaaatgtactatatgtgtatataacagtgcattgtgtttcctcgtcctttccctaaattagtaattgttagatagtgcacaagggcagaaaacttactcaattagcaacttgcacaaaaatgcagcgg

SEQ ID NO: 53182 - DNA, 812 bp, Populus trichocarpa
  Intron number 1 from transcript POPTR_0017s12620.1 (locus POPTR_0017s12620) derived from phytozome v7.0 (chr-ID scaf fold_17; pos 12822923 to 12823734)
catgtaaaataaataaataaactttagaagcagaaataaaactataaacaatttccaaaaaaagaaaaaagaaaatgaaccttacccatcaactaaacttctttacgcaaagaaaaagactgaaccttttttcttgcaattgattctctcttttctactatggccaaatatagggttttgctttgttttgttaacaaaggagtccctgcagtaaaaagcaagctgctttttcaaaggtgaaatacaaagaggcacaaaacgatgacgtttaacatggttattgaatattccttctataaaacggcttcgtttgcctctttatacaataatctttcccttcagataatcctatatatctcctccctctcctcctcctctctccctctctccctctctaaagctattttcacttttcacttgtcacttttcgttgtttctacagagatagtgctttaaaagatcaggatttgtgactgaactgggtcttctccattcggttgtttctgaaaactacatagctgtttcatttctcactcttgttgaactattgtaagtgcccaagtagtttaacttttgtgggtttgatgttattttcgaaactttctagtattttacacgaaagtagtttccagttgcaggtggtttagtcttttgaagcaaagatagttccttttcttttttttatgaaaaggattgtatagtgtgtgtgtgtgtgtgtgtgtgtgtgtaatgcaattgggatgcttccaagttgggttgttcttgttatagaggatttagattgaagtgaatatttgcatatttcttttttt

SEQ ID NO: 53183 - DNA, 808 bp, Populus trichocarpa
  Intron number 2 from transcript POPTR_0006s09540.1 (locus POPTR_0006s09540) derived from phytozome v7.0 (chr-ID scaf fold_6; pos 7016641 to 7017448 reverse strand)
tgtagacctttatttcaatttggctgctggagaaggtatgatcttacgatacgtgcatgtgtttattcggagaattttgtttcttcaattcctttttcaaaggaatattatttgctcatgattaaaaacaaaaggaataatgttaaatactggtctggggttttgaaacgtaaaattggtgaatgccatgttcaattcttggttgcggctatccattttgtttttgaatttcctttctttttcctttttttttttcatttatttgggtctcttttcgcatctgaggtcagatttgatagcaataagcatacatatttttagaaaatcaaaatccgccttggtttcttcgaaaatccggcctgtttgattatttcttaccttacaattaaatatcgttctgtgggatgcataaaataagaccaggtcaaaaggacaaaccattgatggttatgacatttcatctctcagaatagctgtggagcagaatgttatcttgggcttaattaaatttacagtaacgtcttcctatgtctcatattcgaaattcctttcccttttgtgcataaggttgtgcataagggatatatattagagtacttgttcatgttcttgtttgatctttccttttcaactaactaaagcattttggtggtttgcttacttcacctttaatcaaagaattatccttccttgtgtaaagccaaggaactcttaattttattacagcatccatcaatattctccccaatggctattttttcataatgtcttttgacacgtgcaggtgcatttttgcctgacctctgtg

SEQ ID NO: 53184 - DNA, 1026 bp, Populus trichocarpa
  Intron number 3 from transcript POPTR_0005s21460.2 (locus POPTR_0005s21460) derived from phytozome v7.0 (chr-ID scaf fold_5; pos 20587800 to 20588825)
cttaacttaccatcttttcctttgccttagccctggtgagcttttctcttgacattttggcatttgactgtcatcacttttatgtgacctgttttgtaaatagtggtcttatattgatgtatgcagttaacttaccaaccctaatctccttctctctagtttcttgtggtcttcatggatggaagtaatgaatgttttttacctccatgcatttggttgtgtcatgatgctgtggtttctacagtgatgcatagctgcgctgcttgtccttgttaatgacatttaatcatgtttctaaagttgcattaatggtgccttcttattactgtgccaaaactagaagttgcttctgtcagttgtttaaccagctagacacaattttttttttctgattagttgcaattcattttctatgttgcaaagagaccaatttgattgcggcaagttgttttcatgatccagatgcctgattgatatgcatctgatgtgttctctctctctcacacacaattgtggcttttgttttcttgaatgtttattttaaagtaacattactctatattatctgttcagttttctttctattaagtttgtcctactggcctggaaagacagttattcaatgattcacctttttttttttaattcgtttgtgcaagtgacttgcattatgattttattgaaaaggaaatttcttctttccaaaagtcagttgtgtaaatgggtagcaaattctttttaatggctatgcatacgaagttcttctgtaaaatatctatcaagcaaacttttggaaactgtctaccgaatctgctgttctaagatatcctcttgatcttctttgaattgttgctccagttctattttatcaatctaagttattactccccaaagataacaaaaatcactataatactctcattcagcaactaaactgtttgatacaaagtttcctcaatctactatagtattctaaattaatatgctgtttattaatttaatgctttgcagctttgcttgttgaaa

SEQ ID NO: 53185 - DNA, 849 bp, Populus trichocarpa
  Intron number 1 from transcript POPTR_0005s12430.1 (locus POPTR_0005s12430) derived from phytozome v7.0 (chr-ID scaf fold_5; pos 9187227 to 9188075 reverse strand)
ggttcccaaataggcttcacaaagactaccttgaggtttgttaatttgcatcttcaacgggacttgattggattttctatccattactattattttttctttttggcacttgttacatacaattattggaccgaaagtctttattttaatgaacaattttgctagcgagcttttgcaggactccaatcatatatacatgcatgcacacacacccacacacagaggaccgaaacaagacgggaggtagagattgcaagttgcaggccactagatccacacacgaatttaccttgtgctttcttttttaatgcttcggcagattttttttcttgtgttgcccacgattgctgtagaattttcaactatactttaattaggaaattataagaattttaacgtgatttccttaattgtgaggccaaatcactaaagttaccttatcccttcaatttccctggtttttttgcgggagaataatgtcgtcagggacatttgtctcagccccaaccacggacaccttagttatgtgtttcgttctaccaactcaacctaaatactgtgctcgctaggtaggtggtaacagcagtacttgccatctctaactatgcagcttttagatggcccttttatttatgcataagaattcaaggtcgatggaattgtcaaagcacagcttttgtctgtctcaaaaccattttggcttccaaactagagagtttcggcttgctaaaaataacactcgcacattcagccttccgtgcactgttttctccctacaatttggttgctttgattaattagtagcagtgactttttagctaacaagcactaactgaagacttacaggtg

SEQ ID NO: 53186 - DNA, 973 bp, Populus trichocarpa
  Intron number 2 from transcript POPTR_0017s00840.1 (locus POPTR_0017s00840) derived from phytozome v7.0 (chr-ID scaf fold_17; pos 627213 to 628185)
ttgcgtggtttcctcctctggcattgcctttagtggtatactttctgtactgtttactgccattaattttcatttcatctctcttaattattttgaaattcaattttttttttctcttttctttcgaagttgaggagatatctaggtttctttgatcaagatattaatatttctgtgcatttggttttgtttctgttcttaaaggttgcaaacttacaatagttactaaaattcaatgtcaagatttccatcttctaattgctagattacattgctctctctggatccgtttgatctcagatgcgagtagatttgcatgatccttgaagacaaagaatctcttactgcctaaagtctttgagagacaaatcaaaattgaggctttatgactaccacatgtgaagttttactaaactaatcaacacttgaacttaccattagagacatgaacaaatctatctctttctcctggagtgtgataatgttaggggtgcagctggtatgtcacttgacagatacttttttgacaattcaattcatatgctctggatatggatgacttgctaagttcagatttatatcaggaagtcttataacaatattctgatttgtggaaaaagaagtcttctccatcagtaaaagaaaggaaaatgtgaataatatctgtttctagaatgctagttgtgagcttgcgttattaatcaaacctcttctctaactgtgaatcattaacataatgtcaagatgaatacattatatttctaacttatccaaatagtcaagaaaagtctgattacttgccaaacttgtttcgaaactgaattaattattgtaatgaaacggctaatttgtgattatgcttatgatgctattaaacttgttgatttttgtgctaatggtttccattctataattttttccttgtttccttataataggaggctttgggagttatctgtttggaataagtgaa

SEQ ID NO: 53187 - DNA, 631 bp, Populus trichocarpa
  Intron number 1 from transcript POPTR_0005s22760.1 (locus POPTR_0005s22760) derived from phytozome v7.0 (chr-ID scaf fold_5; pos 21666009 to 21666639 reverse strand)
ttctcccgcaacatccggtgagatttccgattcaggtaaaaacatcaacaacacaaaggaaagtcgtccttccttgttcttctcttctctttatattcacaaacacctgtccttttctgtttctttttttatgtctacttccttgttcaacacactcgtgactgcgtgataatcttcttacgtgctctgtgtttggagtgattgaggatgttcatattttctttttttaactattatttgctggaaaaaaattaagcataagtgatcaatgagaagcagtagtagtagtagtagtgaggcaacaataggattactctgttttgttttgtttttttttaatcattattaatcaggctgaacaagaaaattgcctgctgatatatgatttattgactctttttacttgtctcaagtgtttgattgacacgtttaattaggctgaacaagaaaattgccttctgatatatgatttgttgactctttttacttgtctgaaatgtttgattgacacgttctcacgagtttcgtgaattttctgtttgcataatgtaatttgtgtttttttaattaatttctaatgttaatcggtgttttaggcggaggaagtggaattgcattgaggattttgctt

SEQ ID NO: 53188 - DNA, 659 bp, Populus trichocarpa
  Intron number 1 from transcript POPTR_0017s04740.1 (locus POPTR_0017s04740) derived from phytozome v7.0 (chr-ID scaf fold_17; pos 3644191 to 3644849)
aggtatgtacctgtcatttaacacttcaagattaaattttgtgatctgggtttgctgtaagattgtgcaatcttaatgaaatttgtggtttttgttcatgtttagagaaaaagaagtctcttttttttgggattttgtggttaaaattctgggatttgttgttcgttttttttttttactgctatgatgaggaattttctgtttgttatttgaaaatatatgaatttgatggcttctgttcatgttagatgaattaaagtttctatctttattgggatttactggctaaattaccgggatttgtagtttattttgttaattactgttatgatgaggaatcctctgtttcctatctgaagatatgtgaatttgattgattttgttcatgttagatggaaaggggttcatttttgttgggatttgtagtttattgtgtttgttactgttttcatgaggaattctctggttcttaatgactcaatgactttttaattttgtttatcaacatagaaactttgttgcgttaactatatttttcagtctttaatggcataaggaattttctgtagaattggatttgatagtcctttgatggattttgtgttgaaattcaatgttttggatgcaggttctcagtgatccacagaaaaaagcagtat

SEQ ID NO: 53189 - DNA, 345 bp, Populus trichocarpa
  Intron number 1 from transcript POPTR_0005s24520.1 (locus POPTR_0005s24520) derived from phytozome v7.0 (chr-ID scaf fold_5; pos 23052895 to 23053239 reverse strand)
aatttcagaggtgcaagtcgggtaagccccatctctgtctctgtttatttctacaagggcttgttttcttttgttaaaatgagattgttttgactgtttgtgttgatgcatgcatggtttttcttctcttgttaaccaacgatgttgtccggcaaaatttgtccccttttttctattttgttagtaaaagatttgatcttttggggtaaagaagaggaaactcgttgttgtttgaacccatttgtgattaatcttaaaagaacggatttttttatacttagaaattgcgttttaatttgacagcaagttattgatgtgattaattcactgtaaatttccaggcca

SEQ ID NO: 53190 - DNA, 239 bp, Populus trichocarpa
  Intron number 1 from transcript POPTR_0017s02220.1 (locus POPTR_0017s02220) derived from phytozome v7.0 (chr-ID scaf fold_17; pos 1632821 to 1633059 reverse strand)
aaagtaaagaaatcaaaattttcctgtgctcctccttttcttttcttctttttccttatttttttcctacaataatttgtgtgtgaacgattggtttttgagttttggacaaatcctttgaattttagacatttcttaatgttttggcatgttttgttttgacttttagcacttttttttttgtttcactgattggcttgttgttaataggagctactcccaagtcagttcttgaactc

SEQ ID NO: 53191 - DNA, 350 bp, Populus trichocarpa
  Intron number 1 from transcript POPTR_0005s22750.1 (locus POPTR_0005s22750) derived from phytozome v7.0 (chr-ID scaf fold_5; pos 21654459 to 21654808)
tgttgaagctgttgaacgcctcggtggaaaatacagtaagttcttctggtctgcagtgtctctaaggcttcttaaagccatgaagacgacactgctgcttaatcttcttaaaataaaattgcaagggaagatcaaagggttctttgcaccattttgattctaaacagatcatataaagaccatttaaattatggtcaacccttttttatggtgccctaaaaactgagaaaactgaatctggcacaatcatgcatatacagttaagcatcgatctgtactttttctccagtgtacgctgataagtttattgatgattttgcacagaagcaacacctaggcgaattctgcag

SEQ ID NO: 53192 - DNA, 769 bp, Populus trichocarpa
  Intron number 1 from transcript POPTR_0005s20000.1 (locus POPTR_0005s20000) derived from phytozome v7.0 (chr-ID scaf fold_5; pos 19001191 to 19001959)
ctgaacccaccagtcaagaaggtataatttttgctgcaaatgttttctgctgttgtttggcactttgattgtcagtgctattattattacaagagtcccagttctttgctgttcttgaactccttccagcacgagggtagtctgtctatgcaaaattattgtttgtgtagtgacaaaagtataggcagtcagagtacatatacataccatcctgatcagtctttagaatctttttaattattaatatcattgtgtttcattatttctaattgttttgctactgtaaatcaagcacgtaaaaaaataaaaggaaaaaacttgtaattcacgaacctacatagcccacattactgaggaaaaaactagcccacaacattattgtaggaaaagagttaatgaaaagatgaataatgacagatagcgctaatcatatggatatataatttcatcagtgtaatattcaacagatcatgctaatattcatcacacagttaggtcatgcaaacaaaacctaacgacggaccccttaggatgtcttttcttgcagatcatgttttatatggttaatactctgcatgagtctccgcttatttgtatttaaaaattactgatgcaattaaaacgcaacatgcatctgtgcttccaagtagatagtatacaaaataagttacttttttcatatcttttgatcccttttctctttgtaactcgttatctcaatttaatttaataagcttttgcagactcctttatatcaatcaagtttgaa

SEQ ID NO: 53193 - DNA, 484 bp, Populus trichocarpa
  Intron number 2 from transcript POPTR_0006s10100.1 (locus POPTR_0006s10100) derived from phytozome v7.0 (chr-ID scaf fold_6; pos 7512025 to 7512508)
gattgtgtgtggtcttgtgctcggcattttatacggtatagttgatatctatatatatatatatatataaatttatttgattttaattaataattttttattgaagaaaaccaaaatgtatgttgaggcgtggttgagatggtttgttttaaacagttagctaaagaatggtgtatgaagtatttttttggagttcatgaattgatgcggtacagttagaaatgtgagtaattgagctaataaatgatgatttaaatcagctagatgaaattcttatggttagatgatgttcgggtgaggattttgtttaatgggcgtgtgtgcttagttgttgagtctgtgtgttacatgattagatgaaggtttagtaggttagtgttgtgtttgtgttgattgatttagatgtaatgtacatgctattggtttaattccttttgtggttatattaggggttattggaaaagttgacttcactgttaggcat

SEQ ID NO: 53194 - DNA, 1043 bp, Populus trichocarpa
  Intron number 1 from transcript POPTR_0017s09600.1 (locus POPTR_0017s09600) derived from phytozome v7.0 (chr-ID scaf fold_17; pos 8224670 to 8225712 reverse strand)
atttacgggtttatcaaacttggaaaggcagtaacgtaagcaactgatttatcttttctttctttctttcttttctcttttgtgcatttttgaaagcttttattgattgattgataccaatattgtcaacaaaaatttacactgtttctgtttcttttcaatgggaatctgaatcagcgaaaaaagaaaaaaaagaagaagaagcaaacttaaagctactttgactgtatctgttgaattaaaaaagtttaacaagtagtaatagtgttacatgattaatggtgacagtaacacaaaaaaaaaaaaaaccccaaatttgatgagccctcttagtaaaatattgagtgtatcaaacatcagctatttttggcaagattaaaactagttgtgtagttattggcgtttaattaaatggaaagagattggctgtcaggatcatgtcaataagatttaaagcaactaacaagaagttggaagaggttgatggaaagaactgagatgtcttttgattttgacgtttgcagcttaagtttcaagattgtttgaatggggtgatttgcctattttgtgagtcaagggtcttgtgaccgcctagtggaagtacagttattttttgtgtttttttaatatttatgttatatctcaaattgaaatgattgtgttgggcaatgcatgaacttattcttctgcattcaacagatgccatattgagtatttttttcattgcacactatataactatgctacttctttttgaatttgtagaaatttgtcattgacagcagaattctgtagagaaagatgtaataggaaaatcacatatataattgattgtttgaccaagaggtttaattcctgaactagaactggtagagttcttacattatgtgagagcttcttaaccctgtttcgcattagtgatagtgatattatgttagtggagcttatattgcttgaattgtggttgattgtggtaaaccatgtgaaaatgagattgatggactttaagtgtagtattcagcttccgaagtgctagtggtcag

SEQ ID NO: 53195 - DNA, 1021 bp, Populus trichocarpa
  Intron number 1 from transcript POPTR_0005s06050.1 (locus POPTR_0005s06050) derived from phytozome v7.0 (chr-ID scaf fold_5; pos 3981562 to 3982582 reverse strand)
tgcatttagctgaggctcgaaacagtggaggtatgtaccatattgtatttttgttgaaacatgaccatctcaaagtcacaacatgtttaattgttctggcatatgtaatagtttgatgtgtgtagtagcgtctaaaactggtcttacaaattgtggcaaagatagttctgattctaggagggtttcaaggtgtgaggcaaaacacatgattttggaacaaatctttcagaatttgcgtgtataataactgaagtgtgtgggaaatcagttaaaatatgtattcctatatatttttagcccatcatacatgtatatgtgtacctattttccaatgattttaggctgtggatgggaaatctgttaacatttgcactcctatattttttcatttctcaaatatgttaggtgttgtggaaccatttttgtagcttttgaaagatcattttgtaatctgtgctgcaaatttattaagtttctttccttttgaaatttatctgtaaccattaaggattgttattatttgtgtatgtaagctgggctgctatatgttatttggtgctttttttttaagaggggggggggttacttcaaaaaaattccctactcccccccttcccccttctctctctctctctctctctccccttcttctgtctatcctttttgaattacaaaaattatggccttgtttaaattgctgatgtgagtggtctagtcaatgtttattcttgcaattgggccagaatatgaatacgttatgatcttatgctttgctgactagagttcactatttaataaacaatattttaagtttcattgaagttctctatatggatgtggattttaaacgtgaaaactttaaccatcaagaaactaaagattctgctgctaagtaatttcactccttccacacatcatcctagttgaccagcattcttgttccggttttatacatctgatcattgggtatattctcacaatcttaatattgctctttatacttttaggagtttgctttcca

SEQ ID NO: 53196 - DNA, 663 bp, Populus trichocarpa
  Intron number 2 from transcript POPTR_0005s04630.1 (locus POPTR_0005s04630) derived from phytozome v7.0 (chr-ID scaf fold_5; pos 3103113 to 3103775 reverse strand)
tgctgtatgtttctttgttgacattgctttagcatttttatggttttctcttgtgctgtattgttcctgggaaatgattggtttgttataattttttctggaaaatcaaactggattgacatgttgtaatttggatgttcttcatggtttttttctgcttgtttacttttgtgggaattctaaaaagttctgattttggaaatatgctgtaaacctagtgaaggtgaacatattggtttaagtgttttttgttatgccttgtagctagggattttattcagcatatgcttcttgtaaattagaggggtgcagaattgcctaaagctagattcctgattaaaacatgaatgtgccttttatttatctgctccctggttagcatatgagttggccaggaagaaatgctatatgtatatgtgatatatttacctgtcattcatcttcttggctttggaaaataatatgctacactgatttctataaccttctaaggtcttctacaaatatttgtttacaaggtttcctataacgtggtttgtcaatctgatcaaatgcagaattgtttgcaattgtgcttcttgtatttcttcattcatattcattgatgactttaaatgtctttgagcaggccaaaccagaaacagttgaaaaggtgtgtgagat

SEQ ID NO: 53197 - DNA, 596 bp, Populus trichocarpa
  Intron number 1 from transcript POPTR_0005s04630.1 (locus POPTR_0005s04630) derived from phytozome v7.0 (chr-ID scaf fold_5; pos 3103851 to 3104446 reverse strand)
gagtataaagttcacttctttaatgtttgtttttgctctttggcgtacaactgttttctttttttgtttgttttgttagatctgttgttaaatttaagctcttgatttgatccgggaagcttttgatttgatgtttactttgcatgtgattagatatgtttatctaatgatagcgctgtttttctttgttcttggcgtagttttagtgtggtttcactgtgttgttttcatgaatatctcgatcaatttgtaatctagtgaattttagtttggatgcaaagcttagatctttttaaccagagtgacatgcatttggaaatatagctatcattgagataccctcttaatgatgggtatgatgtctcttgtcattctgtatgggatatatggtaagacacaatgcaattgctttgttcctcaagctgaaatctcttgggagctgagggtgatctttgttattttttgtttgaaagattcttttttggttgttttataatgccccctttcttgtttttgttattgatgattctctaaagcttatgtttggatccgtattaacaggccacatccaggatctgtagtttgaagccagtttc

SEQ ID NO: 53198 - DNA, 821 bp, Populus trichocarpa
  Intron number 1 from transcript POPTR_0005s12470.1 (locus POPTR_0005s12470) derived from phytozome v7.0 (chr-ID scaf fold_5; pos 9240203 to 9241023 reverse strand)
acggtaattagttcaaaatttggtgtattttcttttgttgttgtaaatgatcatgaaagacatataaaaaaactaggaggatttatcctttgttaaattactcgaaaatttaatgttattttggctaattatagtgtaaatgttagtgaaagcaatggaaactaggataatttagtgattcttggagttaatataacttctttaaaatttgatatttttttatatgattatattgctacttagataattaaggttttagtaatggttctaattgatttgagttgcagcctaatagttttttagatcgtaaattgaatcacattatttttttttatagcggttatcaactttgattttgattgttgatattaaggtggtagttagttaatttgattgtacttttttccaagtaaggtgctaaatgtcttcaattgatagttttaagtagacattaggttacttggattggaaatcgagtcacatgattctctttatttctttcatttctcattaactgatgggatgttttttcattagctttcattttgaaagtatatcttgtgatgttaaaccagtgttttgtctcaagtggagctcattgtagtgctgaatgattggaactaatgtttctttgttaataaatgataggaaaaataaatttataaagttaatattaggttatttggattgtaaatcgagctgtgataccaaatttgattttgctaatgtgataatggggtgataattttctctttggtggagctgaattctgagtttatttttcaggtggaaggggatttgtggaggtgaaagattttgga

SEQ ID NO: 53199 - DNA, 765 bp, Populus trichocarpa
  Intron number 2 from transcript POPTR_0005s10680.1 (locus POPTR_0005s10680) derived from phytozome v7.0 (chr-ID scaf fold_5; pos 7681851 to 7682615 reverse strand)
agtgatttaatagagaaaacaaaacaagagccgtatgttgtttctttctttctttttttgagagtaatgatcgagttaaaaagtgaaagtttgttaccttttggttttgttgattgaattggattgctggagtgtaacttgtaatgggttattgaattattgaaaatttagttgaaggtggcttgttatgatcatattagtgatgttggattagcaagttaattggtcaaaagaatttaatgaattgagtttttgaggtaaaatgaattaattacagtcaacagctaccattgattactgtttcagcaagataatttgcaagtttgcgcaaaaaaaggtgaaattataaaattggttgggaaatgctaggtgaattaggcctttttttcttttgacaatgagaggaaatttatgaatttcaagattcttaattattcactgtgaacatgttcacaaacctttgatgtttatttatgctagcaaggtaatcaaagggtgttttttatatttactttgtgatgggaactttaggtaaatattatggtaaatagagtgcataattatgtgattgttagtggatgttatcgaatctatgcaaggagggtgtaactactgatgtgtttttaaaatttgttaaaatttctttgatatggttctcatctttgctttaacttgagtgtgcaatgtagcataacgctgaagaatttaattgccatttttcccccttcaggtcctacacgggattatatctgttgctgtttgttg

SEQ ID NO: 53200 - DNA, 603 bp, Populus trichocarpa
  Intron number 2 from transcript POPTR_0005s25450.1 (locus POPTR_0005s25450) derived from phytozome v7.0 (chr-ID scaf fold_5; pos 23705528 to 23706130)
gagaaaagaaaaggtatgcaaatcttttcagtttttgatagaaaagtgggatttgtaactttaaagcatgaccacttgcttttttcaatgttttcagtcacaatgcttgtagctttaaagttttgaacttctttagttacgagatatgtaggtcgagcttgttaaatttgttaatattcaaagaaaaggaatttatgcagtcttttttgcgtgtgttttggggactggctacctagctccaatttggtgtaaaaagcactatttaccatgcttaattgctgcacttaccagtttccattgtaacttcttttcatacattcttctttctggtgacgttggttgttttcatgaagattattggaagaatcgagcagatattgcttcgctactgctatgcaatgatatatattgtttaaacatcagtagcgataaaccatagatcctgttctttttaccacagtagtttgcttctactttttcttggatataaatgatctgacaatgattttcagttttgttcctttgctgatctctgttcttttttatactggtgctaatcgtaagctatttgctcagggatattctgttgtgtcctagagggga

SEQ ID NO: 53201 - DNA, 974 bp, Populus trichocarpa
  Intron number 1 from transcript POPTR_0017s13870.1 (locus POPTR_0017s13870) derived from phytozome v7.0 (chr-ID scaf fold_17; pos 14072002 to 14072975 reverse strand)
gcagttggcggtgcattaactgccatccttttgttctcctccattcctttaccctccttttttctggtttggctatcttgcttctgtgatcattttctttctctctgaactatgaagttttttaataaacgattgctattcacttcaatgaactgggaagtaagcaagaaaaaggaggagaattccttctcctttctcttctttcaatatattaatgttgcactctgaagttcttgttcaaaacaagagattttgtgtttttggtgaataccatcgtgccagttcacacacttcttcaattttagttcaggcttggcatatccaaacctgtactagtcatgaattggtgtgtttgggttcttccaaaagaagttggcttccttaaactgagcaggtgctggggtagattgtagcacagagggacttccaagaacacattttttgacatgaaacttgaatttattgcattagacacctgactttatcatttcagtggttactgtgcaaacaaagcactatagagtgtgttgaacgctagttgtggcttaaaaacatcatttataagcatacgagatagcttcttaattatctagaagatatttttaagaaagcagtttttgtcaattttcacttgggaatagcaatgttttccataacaaaaactccctcaaaatatttataatcgagtgattatgttgtttgaaatttcttctctcaacgtagtgaaataaaatctttaccgtgcaataggtctgtcggatcggattcttgtccctttggattgactagctgatgtgaagagtagcatttctgctgtatttatgtattttcttgaaactgaaaatgatattgattgtagctgtttagaacagatttctaagtacaatcgtaattcgacagacagttttttttcttctctcttccagagttctagttgctgatatcattttgttcggttgattttgcaggtttac

SEQ ID NO: 53202 - DNA, 767 bp, Populus trichocarpa
  Intron number 1 from transcript POPTR_0005s15850.1 (locus POPTR_0005s15850) derived from phytozome v7.0 (chr-ID scaf fold_5; pos 12482585 to 12483351 reverse strand)
gccttggtgtttaccatttcaggtgatttttgtcttcttgaattcaaatttatttatttgaattttattttaggttgttgtatcttggggttactgttttaaaaatcctcttgcagctaggatttttctttttgttttcggggttcaccattgtacgaattattttttcttagttgttttcggggttcaccattgtattttctgagttccaattcagctttctagtgtgaagttgggtttctgggatttaaaacgatggttgaaagatggaatcttcggtaatttttcaggtggattcttgaattgaactatagtttctgtttttctcccctaattatgtggctgtgttttgacttttctcatttggtttaacttttcttagcgtgtgatgttcaattatcatgggggttcctattttagatctgttcatgatttgataaaacagtagaaatttggtgtatgaggtaaatgtgtgatatatttagtattccatttatgattattttgacttgtatctctgtaactgataatgattaacagcagagtgcaagctgattattgtttgtgatcagttatatttacggattaaagtcgatttgaaatggttgttcctaattttatttttctaatggatttattgttccagttggtttgtgcttttgtgtttcttaaattctacgcttcaaagcaactttatgttgttggttttttatttggttacacagtaggagctcaatactgacgaagaaattgattgttttgcagga

SEQ ID NO: 53203 - DNA, 608 bp, Populus trichocarpa
  Intron number 1 from transcript POPTR_0005s09800.2 (locus POPTR_0005s09800) derived from phytozome v7.0 (chr-ID scaf fold_5; pos 6866745 to 6867352 reverse strand)
ctttgagttagataccctttctccttatatttcaggtatttatgttataaggcaagttcttttcttttctctttaattgtttctttttgggttttagttgttgatctgagagaaataaagttttgggttttttttgtgaattatttgatttttatttttggttttttttgggttagatttttagctattcgataattaatttagaattttgttggttgggaatttggatagttaatttatgctgatatatcatatcaccactttcagtttgtgtagtttctaactttatgaggtggtagttgaattttgagtctggatgggttactttgtaaccacttctatctgtaactttttggaggttttattgtgtttatctatgtttgaagttcagttggattctcctaactttgataatatttgatgactgcatgtggtttgaatgaatcccagtttgtaaattgttttgtttgccttgctgtgtggatttctgttctattacttgtaatgtatcatttttcttaagatctgagggttcttgacgcgtttgcatgtgtttgctgttctttttttcaggaaatttagcaaatcattgtgatcataaaccttgt

SEQ ID NO: 53204 - DNA, 925 bp, Populus trichocarpa
  Intron number 2 from transcript POPTR_0030s00210.1 (locus POPTR_0030s00210) derived from phytozome v7.0 (chr-ID scaf fold_30; pos 29207 to 30131 reverse strand)
acacaaaggtgaagtgatcttgtagttctatttttatcatcaattttcgctcaacattttagtattttaaagtgaacaagttgccttttctgatgtatatatgggattgatttatatgtatttattattttccactttgatgtcatataagtgcttaacacttaacttgcttgattggtattctagcgaaatctactttatgtagttgatcatatttaccatgcatgggacttgatgctggttattaatactgctaaatgttataatgaatattcaagtccttgcattacatccttttatggtgttgcgatttataacaatgttatcaatgtgtatttttttcatgttgaatgctgggtgaatgatcctattctgctcatgtactttgtgctcaaattcttttgctatatgtttgctctgattgcttaatgttgctattgtgctttcatttttattttcgcattttttggagctgggagtggaactatgattattatttttctacaaacgaatgaaaatcattgttttttggaagaccactgtctattgtaggttggttttatgcatgatttgatgtttttatgggccagagtaaactataagagtacaatgtgcatgctttccatgattaagttgaatggtacttcatcttttctaaaatttcaattcagctgagtaacactcataaatgtttgaagcatctttaagggcatacaatgttaatagttacctataaaagaagaaaagaaggcatggtctgtttaaatatactccctctccacttgtatgctgtgtgattttcttcaaacagatcaaattttgctgaacttgtttcttttaatggagtcatggatccttatactacttgttttgggatatctcttttgcagcattgtgctggcataaactgtctaaaagtgttaaa

SEQ ID NO: 53205 - DNA, 697 bp, Populus trichocarpa
  Intron number 3 from transcript POPTR_0017s14530.1 (locus POPTR_0017s14530) derived from phytozome v7.0 (chr-ID scaf fold_17; pos 14554530 to 14555226)
tgtattttctccactggcttgctttaagcgaattggtaagttgtcatgtacttggtcagaaagagttaatgtgttagctgctttctccctttttttttttcgcgtgtatcttcttcaactccgaaggaaaaaaaatgatttagcaatttttgacgctgaactacgggttacatctacttacttttggcactttgaacagattctggtgatttggagtggtctgatggcattctttactagtatttccctttttcctcctcttattagtgaaagagcaattatttactggaaactttcaatgtacaaggagctacaggaagagcataaattgtaaaatggattatacatgcctttcctcttttcaagtttctttttatgttggaagggttaggattaatatttttcgttctagccttttgttctttgacttgtaaactatgcttgatatggatgcttttaacttccatatagcatatgttattcatagacttgttctgctattttgcttgctttgttatgtggaatctgaaaattatatcttttccagcacaattttatcccatattaacatttagttgcttgtacaagtaattgcatcattgttttgcccttaatatttgtttcttcattatggagaatgattgtgccatttatctttgcagattctttaagttatacatctgccttgtcagtcgct

SEQ ID NO: 53206 - DNA, 514 bp, Populus trichocarpa
  Intron number 1 from transcript POPTR_0005s02470.1 (locus POPTR_0005s02470) derived from phytozome v7.0 (chr-ID scaf fold_5; pos 1589266 to 1589779)
ttggtctatcaagatcttcttactggtaattcaaagactctttctttctttgtttctttcttctgaaactcgtttgatgatctaggttctgttttttatactgttattgattatttttgttgttggtttgtttgtttttataatcttgttattgggatttgttgctttaactttgtactgctgtctttggatgataaaaggtactgggaatttattattattattattattattattattatgagttattgagtaagatttatctagaactttgaatttgattttaagatgtgttttgaacaagtttatgagcttgaggtattttgcctttaatatcagtctatcagggaaaacaaaaggaacttgttagtatagttatggcttgaagcttaatttgggtgatgattttgatttgttcaaggacacgaggacaatttgtataaggatttgttatgacttgaaaattgttattggtttgtgcccggaagcttaatttcgttattaatttcaggtg

SEQ ID NO: 53207 - DNA, 771 bp, Populus trichocarpa
  Intron number 2 from transcript POPTR_0005s27070.1 (locus POPTR_0005s27070) derived from phytozome v7.0 (chr-ID scaf fold_5; pos 24872722 to 24873492 reverse strand)
ataccctttcaaagcatctgtttcactgtatgtaccttcctgcattatatgcaattttttttacatttttattcacctttcatttccgtggctctttagtttattaatgttcattgaatttgtttgaaattctaatgtaatttttttgaagtgagttggataatgtggtaagaaacttgaataccttaagattaggctgcaatttgctgtaataataacgggaatttgttctcggtgtagctaatgtgcttgagctttgtttttgtgttattgatgagtatgttgcgtttttatcacccgtatggatatgtggaatatgaaacctaatggaaaatcatgattgatggcaggggatgggtttcctttttcttctgtaggaatatattaaggaattgtttgtgtttgaggcaatgatgcagctaatggcattttgatcatgcaagatgattccttcatggatacctcaaattaattgcgaggtgaaaggaatttagattagaaacaaggaaaaaataagctggaattagttcttactcataaactactgtgacttgaaggtatgagctgggagggttgtcaaatttaatatcagtctgtaacaacgtctcttgctattgtttatttgaagcattggtatcttgtaaactgaattggaaaattattcagaagtcactggcaaatttgtctaccagaatattgctatttttctgtccatgaatatgattttactttactttcttgacaggggaaaatcaaactattgagtgggcc

SEQ ID NO: 53208 - DNA, 686 bp, Populus trichocarpa
  Intron number 1 from transcript POPTR_0005s24150.1 (locus POPTR_0005s24150) derived from phytozome v7.0 (chr-ID scaf fold_5; pos 22778780 to 22779465)
tggttacttaagaaattttgattaatgggttgtgttgaactggaaatacgagtgttgctcttaagttacatgaataaatgcttagtgggaatggttaagttggtatttattgtggcctaatttagtttgtcatggcagtacgattgatggtctttgtaaggatgacttattggagaagcaaaagagctttttccgcaaatgaagggtagagggatttgtcctgatgtggtcgtgtaaagctctctgatgcattatttgtgttctatggatgagcgggaggataaaggtttgtttgttgagatgatggattaaggtgtgtggcctaatgtggtgacattcaatgtgctggcagatatgctttgcaagcccatgaagatgaaagaagtacatgaattgtttgaacttatggttcagagaggtacagaacctgatgattgtgcttattccatctactttttggctggcatgattgatgatgggagggattctttgtttctgttgtaaataaggggcgtaaacgtaatgttgtcagcaataattctttgataaatgggtactgcaaaaatcggaaggtagatgaagctatgcgcctttaaagggaaatgcgtgatgaagggattagaccaataattatcaaatacaatactttgcaggtaaggtttgaaatgctctgaagctgcgacttc

SEQ ID NO: 53209 - DNA, 528 bp, Populus trichocarpa
  Intron number 2 from transcript POPTR_0005s02810.1 (locus POPTR_0005s02810) derived from phytozome v7.0 (chr-ID scaf fold_5; pos 1804861 to 1805388)
caagcatattttcctatcctctactactcgcacaggtgagttttatgatttctttggattttgttcaaaagtattgaaattatttgtgttctacagggtttttaaccaatccaaggcaaagcactcatagcatgggaaggatgtgtaaggattaattatagaatatatcacgtgaggtgcaaagaacctgttacctttaagtattcgaagacaaattcacttgagtcaacacgcatatctaaattcagctaagaagttattacacaagattttctttatttatcttgttttttttattcctttttatttagactatgactttcaatttatttagaattttatttattagcatttttttttgtatttagacagtagttttataggctactcagaggagagaatttttactatcttgaaaatgaaaaaaactagttttttagtttttttgatttatattgagtttgaaaaatgtgttttctttttatgatttacgtgctgtgtatgttgctaacaggcaaccttcttcaa

SEQ ID NO: 53210 - DNA, 815 bp, Populus trichocarpa
  Intron number 1 from transcript POPTR_0006s11010.1 (locus POPTR_0006s11010) derived from phytozome v7.0 (chr-ID scaf fold_6; pos 8354701 to 8355515)
cccattatttctctctccctcggcatcctccccaggtaatccaaattccctctctttattttttctatcttttaattcggagttttaagattttcttgttaattttatatattttttgaggattgcatttctgctgctgctgttttatttcccaagctagtctctttctttaggtctgagtatgggttttggcatttgtttgctttgttttattgaaattaatatttgagttatgtatgaaaacatgcaggttcttatctcaaagtgtccgtaaattttgttgttttggatctgagttgggttgctcacttgatttaatttacttctgtttataaagcccagaatttaaatctttttcctttcctgatttggtatgaaagttacagtctttgtttgttttggatttaatatcttgatctgttttggaaaagttttgaagtaataattgtagaggaatttacctttggtttcaattcattaatttgttattagtttctagttattccgtttttggattcttgttttataattactaagtgtagattttcggtttcaagttgattttttgatttctttttattaagagaaattagtatttgaataatgggtggatataattgaagttttctttaagcttctcatctttgcttattaattttttctatttgaactatctgttaacaaaccctcgatttaaattttgtgttttttttttgtagaaatgatggtgaattgtgggtattttggcattgatgggtaatttttcctgtgctcttttttgtgttgaattttgcagatttgacggactgatcttc

SEQ ID NO: 53211 - DNA, 564 bp, Populus trichocarpa
  Intron number 1 from transcript POPTR_0017s08310.1 (locus POPTR_0017s08310) derived from phytozome v7.0 (chr-ID scaf fold_17; pos 6771247 to 6771810 reverse strand)
actctgtttggatttcttggattacaggtacttttttttcccatcatttcattggtttggttcttgttctatctctttaagcttcagacttttttattttttatttttggttttgtttgaatagaaggtaaggttttgaagatacgtatgtcgtaatagtaattaatttggcttgacgttatgtgttaggatgtcatgcatagtgatggatttttgtctttgttaggaattatttagtgaagaagtcaattggtagggtgttgatgcttcaaggagtttagtcgatgtctccatgtgatttcaatcaaatcaagtttacagtttaaaatccaattcaaatgatctcatatgattaataagcaactgggatttttttttccttttaactttagctttttgttctgtaaacatggaaggcattaaaatttactggaatggtttgaaattaatctatatttaggctttaaaatggtcttctcttcagctatgttaaagcttgttgattgatgttttttggattaatttgcaggggattttcaaattggggatagaataaaaccattg

SEQ ID NO: 53212 - DNA, 973 bp, Populus trichocarpa
  Intron number 1 from transcript POPTR_0005s02840.1 (locus POPTR_0005s02840) derived from phytozome v7.0 (chr-ID scaf fold_5; pos 1828324 to 1829296)
tggctctctcttaccttgtaagggtttcagtaatattttgataaaaagttttgatttttttcttttggggttttgtaatacaattgattttgctaaaattgtgatcgccgttttgaaagtgtccttatatatatataatgggtcctgtaattttaaactaaatgggcagttggtgctgtatgaatggttgtctacttggctttggagctcttaacaatttgttaatagttttttggtcagtgtagttcctgagaatattcaggagaaaagaaaaaaaaaatcttggacttctaattttgttgtctttggtcagagaatgaacattggtgtttcgtgttttctcgttcatctcatgcaatttgtctggaaattcatggaacccttgtaagtagtgtgaaagagatgaacaataagtagctctgtgagttagcttttacttctctgtcaagtgctatgaaattgcgtagcttggtaatcaatgtgttagttgctgaactgattttgctggacctggattgtgctgtttactactgtaaaattctactatctcgttcctgttcctgctgaagagctggttagtgtcttaactcttaagttaacttgatgaaactaataaacctttgttgaatttaataaaccatttgtatagaatggaagtttatttagaacatggctatttgatatgccttaacatatattgtgtttaaaagaacataagtagaactgtgcattggaaaattttctctactgacaatgggctgagaaggaaaattctattttatatgaatggttaacattttggaacttttgtgactagcattatgccaatttatctgtgtaatgttttgtaatagcctttctgctgttttaaactttttttttctttttgttcttgcaattgctggttgtcttaatttctttttgtcattgccttatattttgagttacattaagcagttggtgtttttatagg

SEQ ID NO: 53213 - DNA, 735 bp, Populus trichocarpa
  Intron number 2 from transcript POPTR_0017s13030.1 (locus POPTR_0017s13030) derived from phytozome v7.0 (chr-ID scaf fold_17; pos 13186883 to 13187617 reverse strand)
caagtgagtttcttggtgtagtagtctttccattagcagatacatatcctcatagatttgctgttgatacttttcggttgttaatgatccacaatgtacatgatcttcatctcatatcaaggtggctgtttgagggctagcaaatggtttaaaatgattttacaaaaagtgatgtggcagacacgagaagattgatgtatctcttgattatttgtgtctgctgtcagcctcaaatctgtctaattgctatatgtttacgttgcctcttatttctatcatacatgtaaagttacatctgatctgctgataaattgcaatgatgttgccagtattaattgctatgagaaaaaaattgaccttctacattgggtagattctaacaaatttctttactgcaatcttcggctattacacgattgtaatactcaggcactttcaagatttcattttgttggattattgtcacctcatacaaacttgtaaaagttttcctgtctgaaatgtaatgagacccatgaggagtcagctgcataatagtgatgggttggagtttgttccctttttcttattgtcagattcatctaatctcacaatcattgcttgtaatttatttttaactgatctgttgtattctttttctaagaatgtatggatgaaaaatgtttgaattttttacttcttgagaactaacagcgttatctgaaaagagattattttccttggaacagggtatca

SEQ ID NO: 53214 - DNA, 854 bp, Populus trichocarpa
  Intron number 4 from transcript POPTR_0005s22050.1 (locus POPTR_0005s22050) derived from phytozome v7.0 (chr-ID scaf fold_5; pos 21056279 to 21057132)
aaagcaagtatgtgattcgaatttctggtttctagaattatgcactaatgctggaatattattaaaataatgtagtaaggttgtagcccatataggacttcgaagttattcaagtttccattttgctcctttcagttgctcaaagcttgtgtcttgtgtgtgtgtgtgttgcttttgtagaagcagagaaccatgcgcataaccacttttgatcacattggcttccctaaatcagtagcctttgaaatggtaaaaagtacgctccaaagtttaaaattctactccaacattttaattctgtatctggcatctgttgccatgatgcgaagaatgctgcaagttttttttaattttttgtgcacacccctttatctgatcttgaatgcttcaattcgtaagtaaaaacttggtttcaagtggaaaaacacgcatgtctatgttgatgtgtgaaatttataattgtcttgaagggtggggaatttttcatagacactggagatttttcttcttagacattaatagcggaagtctgggtgggtgctttactgtttaaaaaggttgaacatcttctttcattaaccgccattttatagttttgttgctctgatttgtaatcctgttttaacatgacacaattctggttaggaatcttttagaaggaagagaatatcttccatagcaccaggaacacgattctttgcttttcttttggtggttattctgttttacaagtccattgatacctcatctaaaacagactcaacaagctatacagatttctccgtctctccctttatgtaatagttgctcatgcattgacgaacaaacttacttttaggggcgtggaacaaaag

SEQ ID NO: 53215 - DNA, 404 bp, Populus trichocarpa
  Intron number 3 from transcript POPTR_0005s08850.1 (locus POPTR_0005s08850) derived from phytozome v7.0 (chr-ID scaf fold_5; pos 6168917 to 6169320)
gcttcaaccctgtaaagttaacaggtaatcaaagcttccattttcattgaattgttccgtactcacaatctctaagaaaatctctcccctttacttctcagatgattacatctgatctgtcccctcactctctaataacacccaccaggctcaggagcacgttcttatataatcaaaaccccacaacacccacattagctcacttttatttgccttcctcttttgcctagtttctatctattattataccccaatttgatcgaacaagttgtttgttccagtcccttctcgaatgtcgtttcttgcttgagtgcttaaccactaggtattaggaagaagacattttatagctgttaagagacacaaactgcatattcagacatttgctccgtctctctcaccta

SEQ ID NO: 53216 - DNA, 634 bp, Populus trichocarpa
  Intron number 1 from transcript POPTR_0005s18450.1 (locus POPTR_0005s18450) derived from phytozome v7.0 (chr-ID scaf fold_5; pos 16660159 to 16660792 reverse strand)
aagtaccaacaataccatctattccaccaccaacggtgtcacctattccacatttacctccacctccaccttcatattatctcccttagagcatctccaacggagctgctgaatgaatagccaaaaataaaataaagtaatattttagtttttctttgcttgtttttcatactccaagagaaaagtcaaataaaatgctaaaataccttttcttttccacaaatgatattcctatatatctctcaaaagagccaaaactaacaaagtggggccaacaaaagaataagtcaattaaatatagccatgtggaaaaaaaaataacatcaaaatcattaaaaaaaataaaacacttatttattccactctaataaaattagcttttcaaatggttttttttattggagtatacataataataaaaaaaaagctatatttatactattcaaatccttttaatatattaatataaaatataaataaaaaatattttaaaaaacaacctcacttttaatcatcccaacaacatcctaagtaaccgttcctattttaatcatcccaacgacatcctaagtaaccgttcctacttatgtctcatatgatcaggtccgtatactctttgttgcaggccttcctg

SEQ ID NO: 53217 - DNA, 719 bp, Populus trichocarpa
  Intron number 3 from transcript POPTR_0006s01660.1 (locus POPTR_0006s01660) derived from phytozome v7.0 (chr-ID scaf fold_6; pos 1019398 to 1020116)
gtacttcttgccagcaaattttaggttggaaatatgtgagtattttttaattcatgttcattttattttatttatatttcactaggctgtgattaagctgttgatcagtattaatttatggattcttagttgattgattttaatggaatcaagagagatacttgccagcagcatttgatcatggggaggttgatgcaggaacagtctgtcagttgcttccaaaagcttagacggatggtcttgggcaaatttattctcatatcccactagatcttagttggaaattaaatgggcgttttgtgtgggttatcttatcgtggatccttagtggttttgtgcgggctgcctattatgggttatcttattgtggatccttaacgcctttgtgcgggctgcctatcgtttgtcccaacacctaggatttccataccaagaggaagaggatgctcaggcataagaagtaatggcctaggtttgttttgattttcaaaataaaatcttctttaatagcaatccccatcacctccatggataggtagcaatgcatgataaaatgtggtttgatagagaatgtatgtatttatatatctttgtaagacaatttctcatttggttgatgataatgcacctcagaattcagattccgcgagttatgtttcgggagccctgtttttcttgcattgatccttgctgatggtaatgattgtaggagaaagctt

SEQ ID NO: 53218 - DNA, 677 bp, Populus trichocarpa
  Intron number 1 from transcript POPTR_0005s21810.2 (locus POPTR_0005s21810) derived from phytozome v7.0 (chr-ID scaf fold_5; pos 20884065 to 20884741 reverse strand)
cagattctctcgtagatctatcgcgtcgctatcaggtactcaaaagattttctgtttggttcccgagaaataaagagaaaggaaatatccactttgtgacaaccaaaagggagtaaaattagcagctgaattgctcttgttttcccctctgctttttttttttttttttaaaaagtgaattgatgcatgccagccatctttctctcgttgaacagttgaatcctgtttgggatgcgttcaagtcattttttttttaagcatctcatgatcgatacctgttttttttttttaatggtcaaaattgggattgaccatgtttgttagatgactttgtattaaatgggctgttgtatctttgatcagattgctgatgttggcgatctaactctttatattaatgccattttctttgccacttttggatagctttttttgtttttttttcgtgtgtggttctgggatttaaagtttgtagatcaccgtgataaatctaaccattcattggtcggaaacgaatataatttgcacaattctcattttcataatcactaacatatggctgtttttgtttttgttaatatttgattttttgtggtgttttgatggcaacctatctgaccatgaaataattgctctatgaagggctggtgtctttgttagtagcaagggggcgttgt

SEQ ID NO: 53219 - DNA, 685 bp, Populus trichocarpa
  Intron number 2 from transcript POPTR_0017s02400.1 (locus POPTR_0017s02400) derived from phytozome v7.0 (chr-ID scaf fold_17; pos 1735661 to 1736345 reverse strand)
caggtaattaagatttagttctcccattgtttgcatttttctttctgaaagtgatagccatttaatgtatccataatttcatttgagtttgtctaattaagaatataaccctaccagcctgggacaaacgggaaaggttaatctaatcacggtcttgcagtgcagcagtgcaatgatcaattttttgtcctttatcttttgctgtagcagtgtcttttttgtctggacagtacactagcaatgtttctatgtaatattcatgtttccgggtattgcttttgtttttcaaagaaaatatgaaatgctgattgctagtccagatgagcatgattgatgcacatcctacagatcaacggggatcaaataactagcaattaggacttctcgacaaaacacagcatcgatcatatatatgcctctatttctgagaggttgttgcttggtataagagtctggaaaaataaagaactaattcaaggttgataaagatttggaagataaatttatcactgcaaaactggagaattataactctcagtgaccttgatgttggctcaagtctatcgaccttttcaggatgtggctatctgcctatctctgcatgcatctatatcttattctgctagaaattgtcctttttagtgcaaggactaatgttgtttcttctttctgtagctcatcacca

SEQ ID NO: 53220 - DNA, 768 bp, Populus trichocarpa
  Intron number 2 from transcript POPTR_0006s02540.1 (locus POPTR_0006s02540) derived from phytozome v7.0 (chr-ID scaf fold_6; pos 1648249 to 1649016 reverse strand)
aactcaactttgctcaactagaggagatagacgtatgctttgttagtttatcatgtatctatgtaatttttttctgggatttgtttgttttagacaattgcttaggatttgctgttcatttgacttgctttactatgttttgttattttaagattagagctttagttgaaatgaaaaatttgataaacacagggaagtgtgatttttggtgaagtttatgttggttgtaacttactagtagtaatagtttccaaaagttttgaacttggttcttctttgtcatattgctagagaatgagagattatcgtagagttcaatgtacaacataggaaaaggtaatcaaggagttgtttctacctcaaatgattcatttgaatggttggacagtatcagatacgttaatgtttaggtcatttgtctgattatatgctttgggatggggacatgaattattgaaaaagaatgataaaccaagctgttttgaagcttttggccaactggatcaggaagtagtaaacaattcttacataaatttgtgtggaattggctcatgcaaccgtggaattctagtgtcgggaagttggattctttgatgatggaccatgaaaaagaagtggcttcagtctggcttatatgctaactgatattcttataagagcaagatgttgtcgtgaaccatgcgaagaatgtatttcatttctgctgctcgtgacagcattttgttgttaacagaaaactgaagcagttgctggaagatcagttgacaa

SEQ ID NO: 53221 - DNA, 368 bp, Populus trichocarpa
  Intron number 1 from transcript POPTR_0020s00220.1 (locus POPTR_0020s00220) derived from phytozome v7.0 (chr-ID scaf fold_20; pos 203189 to 203556)
agagacgcccttcttctaatcgagatagagaacttgtaaaaccataatctatctctctctctcccccttctttcttttcattttttgcatttataaataaataaacgcactttcagtactggattagaatcataatcgactgtcattttagtcaaaaccctaggaattctaattagttgaacaaattcagctctctaagtcataaataggaactatctctgctttaacacagctagaattgatatttttttttcttttaaaaaagaagaaaggtcaaaattatcctgtttaaccgattattttgtgaaatcttggtttggttgtgtttagaaggaaggtgtttcacagaagaaatcttcgaggaaatc

SEQ ID NO: 53222 - DNA, 235 bp, Populus trichocarpa
  Intron number 1 from transcript POPTR_0017s11880.1 (locus POPTR_0017s11880) derived from phytozome v7.0 (chr-ID scaf fold_17; pos 11818909 to 11819143)
tcctgggaattggagagctgtgccaactagtacaggtgagttaattatttcacttgtaatatttattgttttctggttttaaattgttcattttggagctatttagttggtgttatgctgttttggtttatggactattagggaaatgcaattaaaaatttacatatttgatttttgttttgttatgtagtatttttgtgacctaattagttatcttcttctcaggactgcttag

SEQ ID NO: 53223 - DNA, 453 bp, Populus trichocarpa
  Intron number 2 from transcript POPTR_0006s03740.1 (locus POPTR_0006s03740) derived from phytozome v7.0 (chr-ID scaf fold_6; pos 2503944 to 2504396)
attcggaacgatcgaaagagaaggctgtcgaagaggtgatatatacattgatatcccgccctcttgggttttttgcttatcggatcagcattgaagttttatattgctcattgtattgccaactgctttgattttggaggtcacagtcattttgggttccttcactgttagtagttagctaaaattttatgttttgaaaacattgaaaatgttattgtttcatcaattagtatattgccatgccaatgttcttctcatttcctttaatgcttatatataatatatatgctgttgggaattggagttttatgatcgcagatgatggaaatgtcaactggttggagtttgacgtgtaaaaaagatattagttgcattagcattgcgaggaaagaagatgcttattcctttctttggttttgtgatgtcagcttaccgacgagctagataaagtgg

SEQ ID NO: 53224 - DNA, 446 bp, Populus trichocarpa
  Intron number 1 from transcript POPTR_0006s24010.1 (locus POPTR_0006s24010) derived from phytozome v7.0 (chr-ID scaf fold_6; pos 22717058 to 22717503)
tcctacacctagcagtagctgatagagaaattgaggtatgagaaagaataacttttcgaactgccgtagcatttaggctcaaatgctttgacctcttattttctcagcaccttgaaccatgacccattatagtttcacctccaattaggaattagtcattttgtttaagattacttgtcttccagtcctgttctgtttgccaaattggaaagcacggtgatccgcaatcggcatcagaggcgaacaaaggttttgtaccagaaaactgttaggcatttttttttttaattaaaccagctctaataacaggagcttgattaagaaacaaatgtaatctttcccgatcctcttctggtgtgctaaaacttgtttatctgctccttctgacttggtagcaaaatcaattttcaggtcataaattatctcatctccgaaagtccaataca

SEQ ID NO: 53225 - DNA, 805 bp, Populus trichocarpa
  Intron number 1 from transcript POPTR_0017s09790.1 (locus POPTR_0017s09790) derived from phytozome v7.0 (chr-ID scaf fold_17; pos 8410758 to 8411562 reverse strand)
caggctgtaagtactagcacgtcttgaccttccaaaaatatagaacatgtagatgatagcatttggtttacttcaagtatagatagctgactatggcaccattaatcatttgttacaatatgcatagatgaataaaatgttaaacattttaattccttatccatgaactcaaaacccatttatttacaagcaaaagaagttcataaaaactgcattaatgggaacaagatatgccaaaagcagcaataatgaaagagtcaaattatttacacatatggtcatattaagaatatctgacacaaacaagtaggaagctcactactgagcttgcaataaatgtccaccagaatgtcaccattcatttatttattttaacatccaagtacaacaccatttttcaaaaacaaaagttaatacaataactcagactctcaactggtcattcaatttcaagatgccgagtacaccatcattgttcgtaaacaaaatttaattcaataactctctaaactggtcattcaatttctagatgctatatcatcaataatttccacctgaactcaactaagcatttttcttcattctgtcctatctacggccacatacttcatcagttacgaacataggatcacctacatatccacctatacataaaaccaatgtacatttatttattgacagcatatttatattgattgtaaaagaaaacagattctacattcttatcgaatattcagatacataatcttgttttctcacaatattttcagttgaaacgtcttaactcttttgaatacattctact

SEQ ID NO: 53226 - DNA, 733 bp, Populus trichocarpa
  Intron number 2 from transcript POPTR_0006s00460.1 (locus POPTR_0006s00460) derived from phytozome v7.0 (chr-ID scaf fold_6; pos 220887 to 221619 reverse strand)
ttcctcttccctgaggctagctactgccaaatccagttatgttctagcctcttacatcatttatattcccttcgcttctatttataccatcatatgattgtttgagtctatgtttgtttattttcttgagttgatttctaatttcctgtattagaattcttaataccaatgagatagagtctaaatgatgcattctcacttaagagcaagtcttaatgcgaagaacacgagagccccctcattaatttttgccacatggaataactatttgcatttgattccctcttcttgagggcccagttatgttctcttgctcactcttccctttcagtttcgtgttcctttgtccacgattatttgagctagtctcttcattgtttctttcattgtgtttctgttctctcaagggaaacattaaacttttcttattttagtgtaggagttctctttaacatctgatggacattctaactaggttgaaactgagtaaaagaggtggggtttgaccaaatatttcataatgattcattcatgcataagatcaaatttgaatgggaagaactggagaactgtctgccgaaaggatgtgttgaaattgctgaatgtctgtatgctttcatgtctgtctagagatctttatgctgtaatatcaaaattggaaacattaactgatgaaaaatatggtgggattgaaataggttgaacaagagactgataaagggttatttaagca

SEQ ID NO: 53227 - DNA, 711 bp, Populus trichocarpa
  Intron number 1 from transcript POPTR_0006s26790.1 (locus POPTR_0006s26790) derived from phytozome v7.0 (chr-ID scaf fold_6; pos 24882499 to 24883209)
actccacagtcacttcctcttcaaagaaaaagaaggtaaatgcgtgtttacaatactagctgttaacagctcttggtcttcgcttatagttgttattattattacagctttggtagattcccatgctctttttgtgtgtgttcgtgcttatagtgaggtttgttgaataatttgtttaggatattgatagttaagttgaaatggcagaaaaaaatgaaaactatgacgacatttgagtaaaattgtaatcttttgataccccatttgagttttttccactttataatagataataacaagattgaaagaaatggttcatggtgaaagtgtgtgtttggttactgggaaaattggaggagaagaagagtaaaggaaagtggtgtttaatttttcttgcaattgaatagagttatttattgtttcttgagaaaatgcgatgtttatcttttaattaattcaattgtatttattccgttcgagtgagtttaataatttatctgtctgattaatgttagtataaattttcacttcacgagataaataaataaaaagaagaaatgattttttgcattttttaataaactgtgaaattttgaaaagcttaaagtgatttttagtggaaaattgtttgtttatattttgtgtcacttgtcaaaaagattttttttttctttagaaaagtgtatctaagaaggaagtgagggaagaaga

SEQ ID NO: 53228 - DNA, 990 bp, Populus trichocarpa
  Intron number 1 from transcript POPTR_0005s07730.1 (locus POPTR_0005s07730) derived from phytozome v7.0 (chr-ID scaf fold_5; pos 5296206 to 5297195 reverse strand)
tatctctgataaaccctccaagcattcgactcctcgtcctcatccacttcctgtaagcccatctctgttcttctctcttattttttcttttttcatgttttggttttaaagtttgagacttatgatcaagttgtcttatatatatagaaggcaacttgatcgtatatatataattggttcaatacccacttctaattttatgataggttggaagatttagtttgtttttgttattgggactttggcatttgatcttataaatctgtctttttgtttcttttgtgagttatttttgccattaaattgaggtttggttaataattttcaagaattactgtaactgaaatactttttactaggattttgatcaaggaaagctcaatgcattttactatcggggtttaacttaaagggtttatgaaattatctgtttgttttcttcttggttttttagttaacagaagagaaaaggaactcccttggaaagtaaaagtaagtttttttttaaccaagactgaattgagttcaacgatggatagttgataaacttaacagtgaatagttgataatcttaccaaagtagatgttttttctttactgcgttcagcagcttaatttaacgatgataagttccaactctatgttgtaatcatttgcctaaagaggttggatggatatttggttgttactgtgattggacttttctagctacaattttgaccgtggaagctcattgtgcttctctactgtgctttctcatgggatttaggagaatcaaattctgtttcttcttgcttgttttagctaacagagcataaaaggaacttcactgaatattaaaagggtgactgatgttagaaatcttaacagtgatagctgacatgctttaagtcatatccgaataggtatttgataacatagcaatgttatgtttagactctaaaacggtttgcgaagttgtaattatttgctttctgttttggtaggaag

SEQ ID NO: 53229 - DNA, 798 bp, Populus trichocarpa
  Intron number 1 from transcript POPTR_0017s08570.1 (locus POPTR_0017s08570) derived from phytozome v7.0 (chr-ID scaf fold_17; pos 7154718 to 7155515)
ccgaaacccgcccttcccctcatttttcttcaaaggtacaatctttaccctctttgcttaaacccaaaatttcgatttctctcttgtttccctttctcctcatttattgaatgtactgttatgttggtgtttttatgtgaaaagttatgttttttatgatgttttgtggatcatagtttggtgaagtaaagttttgctctttctgttttggtcttagatattgtttatgtgtttaccaaagtgggtttcactttactggggttgttttcttaaagggttttttttttttagattttgtttgtgttttttgggttttgggttctgttctgttttgttttcttagccacatgattggttctttatcgtgttcatataattgtttttttctgtttcgagttgtatggtattaattctgtagattattaatgatagcttttagagttctttgttgttctctgtttttcactggtgctgcttatggagtgtgtgtggtgtgagtgtagggtcaaacaatcttttagagttttaatcctctactctatctttctgagggatttttgtgttctgaacaatatgttttgtgcaggcttaggttttgagttttctttaatcaaagctatctatttgatctcttaataaacaaggaatctaaaaattgaccccattttttttagattaatttttgaatgttgcatgattgtgattggtttgttatgttttgagttttttgtttttggttgaatattgttaatgctcgatactgatgcaatgatgggttttggtttagttcatagttga

SEQ ID NO: 53230 - DNA, 378 bp, Populus trichocarpa
  Intron number 1 from transcript POPTR_0005s20450.2 (locus POPTR_0005s20450) derived from phytozome v7.0 (chr-ID scaf fold_5; pos 19499371 to 19499748)
aaaaacccaataactctgacagtcttctcttcttggtaagtcagtctcagtcaaccgtttcttctttctttctcacttgtcattaattctttcttgttaggtccattctttcagtttcttggttttcttgattttgattgttatgttttttctctttttttttggctttaagccttaactcatcctttattgctatttgagctcttagtttcctttttcttctaatttgttttttattgtcttcccactgtaaaacctctagactgcgattccttggactttgcatggtatacttgatatgggttgtttgctggctgacgaatttagttggaaaaactgcaagtgctaagttaggttgaagtggacagttacagtttt

SEQ ID NO: 53231 - DNA, 576 bp, Populus trichocarpa
  Intron number 2 from transcript POPTR_0005s20450.2 (locus POPTR_0005s20450) derived from phytozome v7.0 (chr-ID scaf fold_5; pos 19499767 to 19500342)
gccaaaaacgttcttttttctacaggtttcctgtaattcctgtcgtgggaaactcaagccatggcttcttcttttgaatcatcaacagtaaacaatacatatctgggttgcttgaagaacatggattatttatgattttcaatttattcagaaatttacggatgcctgcgcttgtgcaaatgagcacatccctgattcttgaatttaaagtttggtttcagaaaatgaatacttatattcctctttattacatgcctctctgcttgtatacatgcaactacatgtctcaattaagtgttttccacaagtctcggttcacttcctttgaatgaatttatcggatccaattcccatagtacagggttcacataagaattatccagtgtaacagtcataaaaaccctgttatttgattgcttgataaaaatattattgctggagtgttgtttagttttctaatgggttatgagagtggtatttatccattcgagtttcttttagtacacaaagtgaatgatgttaagctgatctcttgatgcagttcaagcccagaccttgacataactctctgttgct

SEQ ID NO: 53232 - DNA, 680 bp, Populus trichocarpa
  Intron number 1 from transcript POPTR_0030s00380.1 (locus POPTR_0030s00380) derived from phytozome v7.0 (chr-ID scaf fold_30; pos 140129 to 140808 reverse strand)
ctgggaaactcattgttgtaattagttaattttcccttcctcaagttaggtttcgaagtatatcctacttcgctactctcataaagcaatctctgtttgaccataaaaattataactacatgttctaaatccacctctgctaagactttgattttcttgctgcgcatacatgttttttactagcgcaggagagcgttatctatcctcagctgttcgactccattaggtgttgaggcaggcatcatgactgtcagttgagccacataagccatgcttcaaaatttaagaagttgaaattctctctcttccaattcagaaatcaaactaatggcggctcttttttcttataatcatttggtaaaggtaaaaacaaattgttgattgcatgcatcccttgcacttgaacagtcagctgccccttttcaatcaaagataagattataattgctgccaactgtaatgacatataatggccagaacgtacgacgaaagagtgcataaacctcgaggagaagtaatccaaaagtaattgatgtttaagactagaattaggcagaagtaatccgaaagtaaatgatgtttaagactagaattaggcaggggccgcgactcgcgcagccccctcaaccacaaattttgacgcaggctctccctcttggggagaccttaggccagcaccc

SEQ ID NO: 53233 - DNA, 523 bp, Populus trichocarpa
  Intron number 1 from transcript POPTR_0017s09620.1 (locus POPTR_0017s09620) derived from phytozome v7.0 (chr-ID scaf fold_17; pos 8270309 to 8270831 reverse strand)
gagcaattgttgaaagacaggatccctcttctaaggtgatctttttactcactcttgcttcatttttcgtcatttttatttgcagccgttgatgttcttgttcttcttcctagctagtatgctgtttttgctattttataatatttgtcgatttttgacaatatttcttatctatgcacggagcaacatagctactagacatcctaagaggcggcaatgaccatcctctatatttttcaagccaagcttactcaaattatgttactgtctcagtttttttgagctctgcagtctttcaccattcttggtggtgataacagtactggaagctgcagtggtctgtgaacgttgctttaatttgttcttgtaattatcgaactccctgttgctgtcataatttgtgacaggtggcggtaacgaggtttatatatataatatgtttgatttttctcagagctgatctctttattcaattgacaatgatcttggaatttcttatttaaaatcgaggtgcaggaagtag

SEQ ID NO: 53234 - DNA, 846 bp, Populus trichocarpa
  Intron number 3 from transcript POPTR_0017s14580.1 (locus POPTR_0017s14580) derived from phytozome v7.0 (chr-ID scaf fold_17; pos 14582502 to 14583347)
ttttgtgcaaagagaattgcttaaaactattattagtagtgtttgttggacaatagtagtgtttgtttatagctgtcaacactcttgtcagtcttacctcctcagaaattatgcttttttagcaatccagaaaaagaaaaaagataatcattgagaatttgtcgtttcaatcccacctaggaacttgaagaccaactagtttacgtactcgtgtcaaatttacctccaggtctatttcattttttggcattatcttgtataccagaacttctataaatcctaaattagactctttcgcatgataaaaagctgatactcttctctgtgtttttatgttgttttggataagtaggatgatggtgatgaagtagcatggcacacctacaaagggcagcttacagagaagcaggagaaaacccgtgacaaaataataaaaaggtaagtggttttacgtttcatacttcgagttcctcatttctagatatttgatgtcaaatacaattgtgatttcggttaccttgaacacgagaccaatctgcatccagtttttcaatccccttcagatttatgttctagtgtcatttaaaatgttcatttacctgtactccaaatcgaagggctatttttagtgatgacttctttccttttctctttcttctcactgtcatgccttgctttttcgctagtattagaagtgttaaatctaaatggttgtatgctttattgatggagaagaaacaaacatttcatcatcgctgcattaatcgctcatttcctgattttcttgtcagtgctgaataaaactgtgcagctcggaaaggaactatcctctctacaatctgaact

SEQ ID NO: 53235 - DNA, 780 bp, Populus trichocarpa
  Intron number 1 from transcript POPTR_0005s11400.1 (locus POPTR_0005s11400) derived from phytozome v7.0 (chr-ID scaf fold_5; pos 8244134 to 8244913)
aggtacgcagtatttttctctgcttcagattcctctttttttttttttttccctctacttctatttaatttcatgtttatctcttgattatctctaaatcagttatcttttccttaatcattaggtactttgaattctgatcgaaatgataccaaaactttggctgcttatctatcttgttatatgcatcttcttactttaagaaattagttgattatctatgattttgatgttaattaatttcctaatgatctaggctctgttccgtttccagttagggtttcgaataatttgttaattcaatgattttatgtcgactgaaagtcaaaatctttaattttaccgatttatttcgtctactaacatgatgcgtagtttgatggccgtacataatgctctttctgctccgtgtttagaacatatgtagttggagtgctggtttactttatctgtaatcaaaattacaaagcagaggaaaatagtgtgccctagctgcgcagatatgtgtagattatcgatgcaagctgcctttatttaacctaaggttacctctgtctgttttactggaagttgaataccttgtcgaatttgtaaaaaatgccgtttgtgttcctgcttcttaataacaatttttttttatgtagttgcgtttgtaattgtgtcaatattggaaatttagaataatccctaaaatcttcccagctgttggctgctttctttatttcaagtctaattgtaatgatgttttgcagattgaagagaaaaagcaagctgctgctg

SEQ ID NO: 53236 - DNA, 958 bp, Populus trichocarpa
  Intron number 3 from transcript POPTR_0005s17220.1 (locus POPTR_0005s17220) derived from phytozome v7.0 (chr-ID scaf fold_5; pos 14448135 to 14449092)
tttgtatgagttcatcacattacataaagttcaaatcttattttttgatttgtttgaaatgtattatgcatccgaacatcatagtacatatcctttcacatctacaaagcatgcatatcccataacatctagaaataaaactcttgtttaggaacttgctagtggtccttcagttgagtatgaacatccatgcttaagaaacctcaaaatcaacacaaagaccagacagttgaagctgctccttataaaattcccggtgaagacattattaccaataccaaccttaacactttaagaaaacaattaaccctgattgttcttgacacccctcaagtcagtaacaatcatttaacctttacaagccaaattaacaccattcaaaataaccaaagagctcatagtcaaacttctgatgaagacgccttcagagaataaactcctgggattgataaacgcgtttgtaaaaaccacaaatcacccgtttccccagacatatccattcaaaatgaacctaacattatcaatcaacacaaatttcatacctcctccctctatgaatggaacatagatggaatgtcagaataccacatcctaaacacactacagcaaattatcatggcagccaacgcctacaaaacctatactgatacctaagataaagccatagccgaacttcatatagttggtttctctggccagttaaaaggatggtgggattatcatctcactgaagctgaacatcttcaaatcctaaattccatccacatgactgaagaacaaacacctattcttgactcttctggaaaatataatccaagatattgtatcaaccttcatcttaaccatctctttatattttgttggagatccttcccatctgaaagataaaaatattaaactcatttcaaacctcagatgtatagcttagtgattttcagtggtataaaaacatcttcct

SEQ ID NO: 53237 - DNA, 537 bp, Populus trichocarpa
  Intron number 2 from transcript POPTR_0005s10390.1 (locus POPTR_0005s10390) derived from phytozome v7.0 (chr-ID scaf fold_5; pos 7455213 to 7455749 reverse strand)
caaggacttgaagagtggcaggtattttcaattctaaatttcaactgtcttaatattcaagaaagttatatttgggcattttaatagccattccgttatcaagtttcttgtttttgttgagtttgtgaccaatccatgaatggatggggagaaggataatgggaaagcaactatggtttttaaatatttttctataacgggtcccacctagcatgactttgtgtatgctatcgaatagaatttcaatggtatgatagttggtagaagatgcccttgtcataaggtagcaattgcggtccaatcattacaattacgagctgtctttagatcaaaataccaggaaatacacctccttgcattgagggtgtggtttggggcacaagcctctagttcttagccacagaccaatgcttcattggccacattttggcatggtgtttattgaaatgtagcccctattgttgatgctaaacatctgttccatttttcattgggtatgcagtcagaggtgaactttctaggaaggctatcgcatcc

SEQ ID NO: 53238 - DNA, 694 bp, Populus trichocarpa
  Intron number 1 from transcript POPTR_2193s00200.1 (locus POPTR_2193s00200) derived from phytozome v7.0 (chr-ID scaf fold_2193; pos 434 to 1127)
tgctgtcaagaaattgggaagcaaggacttagacagtggcaggtgattgtattttattgttgatcttgcaatttgggagtcttcagttagccaaatatgcatgattagtatcagaatgagaggtttcgttggatgagcctcctgtcttgatttaatatttattttctggtggctgctgaacttgtacatttcattctagatatttagctgtattgtctgcaattaaaaaaggataataatttgttgagatgtggcatgaattcaaatctttattgtataaggacttcaattttaactcacacagtacaatgaaagacttgtgattgttttgtctagaaaaatattaggattatgactaagatattttctcaatttattaggcctagttttttgttttttttaaggatgatctggtatgctcttatgttctagaagagagctagcatgagaaactcgtagtgtgccatgaggattagatgtatctgagattcgggttcgatagttcttcaaaacttgtactggttccgattatagtaaaatttctcttcaattatgaatataggcatagacgaaccatgtaaaatctttgtgatattctctatatttttatgtttgatccttcattgtgtacttcctttatatgtcactggtacagacagaggttggtttcttggcaaagctttctcatcccaac

SEQ ID NO: 53239 - DNA, 488 bp, Populus trichocarpa
  Intron number 2 from transcript POPTR_0006s08630.1 (locus POPTR_0006s08630) derived from phytozome v7.0 (chr-ID scaf fold_6; pos 6312266 to 6312753 reverse strand)
taccgcgctggtattgtccctgtcgctcatcgccggtgagtaatctgcttttctgtcctttatttcttttcttaatggtttgcgtggcccagattctgttcttttcttgatgtgtcattttcttgtttttacgttgaagcggcaggagtaaagttactttttcttttggattattattatttgatttaaacccgcatcggcggtctgccgttgcccgttctgtaggtttttaaaagactttgatagccttccatcataaatggcattattttcccggaaaatcagggtagaagcgacaatacacctcctcatagccaacaccaccaccactaatagaaaaaaataaccccatgccgtatttgtatttgtcttatctttataaataaaaacatctatctaccttatcgtattctggcgggggtaaattatatttggatttgtttttgttttcagggtaccgtgcaggaagcaaggaggcatcagattca

SEQ ID NO: 53240 - DNA, 752 bp, Populus trichocarpa
  Intron number 1 from transcript POPTR_0005s12880.1 (locus POPTR_0005s12880) derived from phytozome v7.0 (chr-ID scaf fold_5; pos 9687822 to 9688573)
gagcatcttgttgttactggtgagtgagatttaattgcgccctttgtgtttgttcttttgtctgtgtgagtgtgttgtttttctggttggtgggtttgatgatatgaaggcttctttagatggaaaacttggaatctagttttggtcaattatgatgttttgtgcaaaaattagtataattgttgatggttttgaagatatttattttgcgttggaggcttatgacttgctttcattcgatgatggaacagtaagtctgccatagcaaaagcttaaataagcttgacggaagtttgtgaaatttttgctatggctaaaatctaaaaagaatcgcccatgaacttttagtgatgtttggaaatgatcctcaacttctagacaattgattgtgcctcctcaacaagtatttctgttacattacaaccatgaactaatggagaaagctaatgtgggtgatgcatggcatgacctgcgtcggccacaccaaacgtgattaccaaaaaacaaaattgtaggataaaaacatggaatttcagttcagaacaaattcaatagtttttttagcagttcaggagatggtttttcattttagcatttcgttactggtgctttaaacttacaacttttaccacgcattgctttttccagtatcgggctatatcttgttggagtattgtatttttaggagtttaatttcctttttgtgatggattccaggcaaataccaagaaacccttgagatttttagcaaa

SEQ ID NO: 53241 - DNA, 1068 bp, Populus trichocarpa
  Intron number 1 from transcript POPTR_0017s03660.2 (locus POPTR_0017s03660) derived from phytozome v7.0 (chr-ID scaf fold_17; pos 2715266 to 2716333)
cttctttcagaactgggtttgcagctcgttatacggttgtttctgtttcagtcattgttagttatgtgtcctgctgagttcaaataaaaaataggtagttttgcttattaaaaaaatctaaatcagaataaggatgctcacagattaagagttgagatagctagctaaatcagtagtgagaggttaatttgtgaaaacatgtggggggttgtgctgtttgtttcaattcttttttttctcactgtaattttttcagtatatatcgagaaaatatttccattaatgtttactgattaatacaacaagagaatagtctatcggtaaagttcatcagaattcttccgatggaaaaattctcctagtgttttcatttgtatttactattttttttttgatagtgctagaaaaatattttaaattcaaaacagtaacttctaggtgggaatcaaccctggacttattggtaggccttcaaaaccctgccgaggacacaaaagaattttgttcctcgttcaaaagtggatttgtggttggttatgcatcatctactgtttcaatcgtaattgtttttgtatcctattgttttccttcgatccatctaaaataagggtaacgcaatgccaatgatgagtaaagaagataactgataaatcaagagatttataggaatgttatgtcgtcggtgatatgatagtctaggtgcttcttagatactcttctaatttggacaaggatgagcagattttttagaggaaagttctcaagacattttcatgaggtttctagatctagggagaaaggcagtgataatagaaaaatctggattgtaacttttaacattaccagctgtggggctcagatatggaggcagcaaactgataaatctgtgcatgcaaactgttgagatcattttgcactttgttatggctcattgacaaatgataatcttatgaataattctaattagcaatttttttgtgtaaaatagcgttgttcatctttcactaattctcattggtgatttcatcaacagaattcggagttggagaagttggtcacaagaataag

SEQ ID NO: 53242 - DNA, 791 bp, Populus trichocarpa
  Intron number 1 from transcript POPTR_0005s11470.1 (locus POPTR_0005s11470) derived from phytozome v7.0 (chr-ID scaf fold_5; pos 8277323 to 8278113)
ataagttaggttaacttggtaagatatgatgtgggaagtttagatggttgaatcttttctaaacctaaggcagtggcgtgctattgtctgattggggttattcattgaataagagtcataagaagatttcatgtctgtaccacattgaaaaattaacatgtcaattggaagcatgtacatagattgtggaattgaagtctgtttgcattatcttctgagaatttcaagttgcccatgattcaatatatacttgtttagatttcagttaatgttaagctctaagtttctgaaattgttagtgatgagcctagaattggtttcaaggcctgctctagtaatcagaatatgaatcaggttggacggtcttcatcctgggctagcccttgcttgcatcttctttaagatttgaagttattgtaaacatttactttctgtcattgagattcaagatgtcttacattgttttgtattttctcatttataaaaagaaaggttattttgaagataacaatagtgcttttgaataaagtttaaatatgtttgtttttggtgtgtcaattagagatataaggatgcataagtcatcacatagccatatcagaggcttagctctttggttgttgccggtcattagctttgcaatgggaacatcagtttagaactaaatttttgttgggttgctgggttatgattcaaaacttttatattcactttgagtatgagcgtggcattgctccactttctctttctcttttatgttctttgacatccagacattcagcatagcatag

SEQ ID NO: 53243 - DNA, 565 bp, Populus trichocarpa
  Intron number 2 from transcript POPTR_0005s11470.1 (locus POPTR_0005s11470) derived from phytozome v7.0 (chr-ID scaf fold_5; pos 8278210 to 8278774)
tcatagttgcctgtgacttgttagttatgtttctgttaactttctgtttcaattatttatgctgcatgtcttaccttcccatttttttaagtcaagaatcactaaatttggatcagtaaatcttatactcaatggccaccaaattttttgcaactgtaatgtattcttggatacatttctaccttgacaaaactagagtggcagtcataatttatccaaattatttatccaaattgtgtcaatacctcaattcacatcctgttatccacctgaccagtgttttttttcccaacaacaaagtttaaatcaaatgcttgatgcaatctgatgaggaattcttgtgtcattgacaatttgttatcagtccgaggctgtctagattcataagttttcttcaccagttggcaaaaggtgcctgcaaccatttctaaatgcacttatactaatatatggctagcacacactgatgtgttttctccttttcctgctaaactcgtctcgtcttcttctatactcagtaaatggatgtgccatttgacagcacctttttttgaagagttccaca

SEQ ID NO: 53244 - DNA, 710 bp, Populus trichocarpa
  Intron number 1 from transcript POPTR_0017s12840.1 (locus POPTR_0017s12840) derived from phytozome v7.0 (chr-ID scaf fold_17; pos 13026044 to 13026753 reverse strand)
ttttcgatctcaattttgcaatcttcacaatccaggtttttctctctttatttatgttcttgtgaatgtaataaatttgatgggatatgctactgattcattaatgagtttatgattcttgggtttttggaatccatgtcttgatctttttaattgggtttttgtaattttggttgttgtttaatagcattttttgagggattcatttgattttgttgtttttaggtgcagaaaatagtggggttatgcatagccatgagggtaaattacacatttttggggtcaatttatagagtatttgttatatctgaattgggttttgtttttgagttttagagcagcaaagggtcaatgattggatagaaattctttgtatgatgtattttgagaaactttgctaagttccgatgttggttatgagtattatgactgtatcaaatggactagttgttatttctagtgattgaggagttgagagtgtggagaacctaaattagtggtgtaaggtgtttgtttttggatgtggaatttgagtttgagataagtttttttttggtgtaatattgtgctgcattttttgtgttctatggtatatgcaacaatgtgattgtttctgtgtgattttttctcaggtaaatcttccaggcattgaaatgctccaattgagtgctgaagcatatcttctttgaattgtgccttccctgctgaaa

SEQ ID NO: 53245 - DNA, 855 bp, Populus trichocarpa
  Intron number 1 from transcript POPTR_0005s05000.1 (locus POPTR_0005s05000) derived from phytozome v7.0 (chr-ID scaf fold_5; pos 3334608 to 3335462 reverse strand)
caagtcttgcatctttgtactgctattgatattgggtagtttgctatgcttgtgctgattgtctcttgatattgtgctattgggttgtcagaacctgcatcattgaactgtttctagtgctggtactggttagctgaccttttgctggtcattactttgctccctgttctgttattctgttgacttttgagttcttgatgttactctgcataactcttactcagaagaacttgaaacttcgaaacttcttagctcttgctctggtttgcactccatttatgctcgtagttattgatttttttcaacaaaattaacccagtgtctgtattatttgactgattttttgttgttgggcgttttatgggttgttcacttgatgatttttctgtggttttattgggaactttgcatactgtttcttgatccattcctttacggattttttttgtttcaataatccatggcaatttttccataaatcttggtcaccactagctgtgttgtaagaagttgtttatagaaaaatgtctttgagatattgcttcatgtggcaactgtgacacttggtgggtcttagtgaaatatctgtttttttttatccgtgctgatgcttagctgaagttttgaacatgaaaacacagaacgaagatctcaagtaattcctttattgtttgggaacaattattgcctctttaagtttttgttgctaggaagcaatatgaaaccatctttttagcgtgaagtttgaggggattacggtatttttttcaattcttggaccggtttgccgtttgtgcacaatcacttgacgatgtgtttatcttgactagttgctttcagattttctataaagga

SEQ ID NO: 53246 - DNA, 953 bp, Populus trichocarpa
  Intron number 3 from transcript POPTR_0005s01500.1 (locus POPTR_0005s01500) derived from phytozome v7.0 (chr-ID scaf fold_5; pos 987258 to 988210 reverse strand)
cggagttgacttcagtagcaccctacctgctgaaggtaattctacaaaagaacaattataagagtattgaaatccaaataacagttgttcattacatattaatttgtgttttatccaactaatgttacgtatagaaaaggataaaatctagagtttctcaatctctaaaatttctcagacttaaatttagggtagctggcagatgcatggacacgtgttagaagttgttaagagatggttagagttagttaacaatagaataaaccgtgtaatgcatgtggggaagtatatatatataatggtaggaggattacgcacgcaagaaataacagagttattctcctctcatttatttctctgttttccttctgcttaacagatgattatattacaatacacaaaatggatacttccaatctatccttcttaacaaaaacgcaatcttaattaataatattgaaaggaatggttactctgtaccaccactattttcatcgtaccttttcttctttaacttaattaaggcatacaaccatccctctgtaccaatttaagtcaatattgaaaggaatggctactctgtaccaccactattttcatcgtataggcataaaaatttctaggcctaattagagaacaaaacctagctatagaacattgttaaaatatcagtttgatataaccgatcggataaaagattataaccataacaagaagttttctacgaaataatggacaactgcctgctcacagaattttgtctctggaaagctagtatatatgctaaatggcaccctgcctcaccaaagtaaattaaatcactaataaacttgtattgttgaatagatctctcaataaatagtacatcattgatatattcctattcccttaacatgaacattttgatatattctgcaggctggtgtgaactgaagaatcttgaacaactatct

SEQ ID NO: 53247 - DNA, 565 bp, Populus trichocarpa
  Intron number 2 from transcript POPTR_0006s12240.1 (locus POPTR_0006s12240) derived from phytozome v7.0 (chr-ID scaf fold_6; pos 9400401 to 9400965 reverse strand)
gagcagctggcaactcagattttgacagtaagcatcccttatctttgattaggcagaccatttactacaatagttagtgaagatgcgaaggaaaactttgctcgtactctctgtattcggctcgcaatttcaggacaaacagacaaaatttctttgagatttgataggtttgggaatggttggttactctgcacatgtttctagcttttaataaagagttcaaatgttctttgttattcaatgtcgactttttttttccatttgctatcgagttttgtgttctaagcagttttgacaatttgtggaatgaagagtaaatttggaagtaaagacaaggggattgtaaatgattgtttttttgttgtggtcaaaatacaaaagaaggaattcatttgtatatatataggatcattgaactactggtattgtaatgtttaggctagaagggttttgccattctttaaattgttgcttattttgacattctttaatgaaggaatatctgctttacttctcctttgtacctgcaggtcctttgttatttggcacctctcttcccgaagaa

SEQ ID NO: 53248 - DNA, 481 bp, Populus trichocarpa
  Intron number 3 from transcript POPTR_0005s03890.1 (locus POPTR_0005s03890) derived from phytozome v7.0 (chr-ID scaf fold_5; pos 2580277 to 2580757 reverse strand)
tgctctttatctaaggttcgaccttcctctccttctgtcctgtttctcattgcaaatgtatgaatttgagttcttggctgctttttaattatttgatttttaacttgttactatactggtttgaaggtaaagctagaaaattgttcttattctttaaaatagctgccttgatgatgctgatttttattattctccatactgacgtaagtactgagatctagtctagttcccaagttagttacagattttctataggctttactcttttgatatctatatcccatttaccattttcaagtgtgagatagacaacaacaccagaatatattcttgagcataaccaaatttgtaactctattaaccattaatgtattgcatgtcttcgtcattgtttattcctaccacaagctaactttgagaatttgcaattggatgatttgatgcagtcttcgatatcatttactccatccagactacctat

SEQ ID NO: 53249 - DNA, 688 bp, Populus trichocarpa
  Intron number 2 from transcript POPTR_0005s25240.3 (locus POPTR_0005s25240) derived from phytozome v7.0 (chr-ID scaf fold_5; pos 23544167 to 23544854 reverse strand)
tagccctagtaaagtaaggtttcttcttccctcaatatccttttctttttcttcatctttgtaccagcagcaagcagtttctgtaaccatggcatggctgaatggttatgattgcatactagattgtagctttttttgcgattatttagtattgtacgtgcatcatgtatatctgcagctatacgtccttgaatttgctagttcattaaatggattggcaaattcaaatttatcaggcaaaataatcatgtaccatttgaacttgtactagtactgcagcagctaggttagctaggctagcttattatgctcatcaagaaaccctaattgtgtattatcaaaaatagtaaatcttatgagttaactaacaagattaaaagataaaacaaatttcaattatgctttctccccaagttaatagtaaaattgaaaagttaaaaccctttattatatttttttttcggctttaacaagccatggcaccaaaagattagccatttagctagataagtacccttctctttttgctacatgagggatacttactttcagctttaaacattgtgtgaatctctttaccaggagaatcgctctttactatcttcttttcttaaaatgacttttgagcgatcattgaactgatttttattagtacgtgctctttgtatttcaaagatatcctccacca

SEQ ID NO: 53250 - DNA, 915 bp, Populus trichocarpa
  Intron number 1 from transcript POPTR_0005s13000.1 (locus POPTR_0005s13000) derived from phytozome v7.0 (chr-ID scaf fold_5; pos 9834541 to 9835455)
ggttagcctctcatgttggtcaatgacacacgccagaggcctcttatatcattatatcattgtataatattcaattctcctccactgtcaaaaatatttcataaaaattgatataattaaatgtttttcattatgaaagtgcttatgcaaaaatataattctaattaaaaaaataaaattttattttttaaaattttaattgttgagtaattataaacttttttatttatttttaaaagcattttcagcaatttttttattatatacttacataacagagcattttttaaataaaatatatactttctatcacatttgatgaaaaaacttgataaaataacatattgaagaattggatattatacaagaatataatatagacacaattagaaatgtattgatgtattaaaaacttgactaattatataaagataaattgaaccacctatcaaacattaattaaaaggacctttctaccttgtaagtagtgaaattttatatttattttatgtgacatgtttttttaacattttattataatatatatatttttatttttttaaatttatttttgatattaacctatcaaaacaattcaaaaatatataaaaaattaatttaaaataaaaaaatttcaattttttttttaacctaaaaaacaaacatactaatagaaaaaacccctacaaaaaatcactaacaggaaagcactctcgtttcttggcaattaggactccacaacttacataaatcccatgcaaaaacccaccttgctttctcaaaattttaaaattaacccccgatttgtattcaagccaagtctcgttctcaggggtctgataaggagaagcttctgatttttgtggggcacaccggctagtatctacacgtcccagaattataacgtaccaaaca

SEQ ID NO: 53251 - DNA, 414 bp, Populus trichocarpa
  Intron number 2 from transcript POPTR_0017s08150.2 (locus POPTR_0017s08150) derived from phytozome v7.0 (chr-ID scaf fold_17; pos 6593473 to 6593886)
atcagaggcaacttgccgcattgcttgtttctaaggtattgactttctttttccttgtgttccttctccatctctcagtccttcccctgtatgtcacatagaaagaagaggaaaaagaagagaatggattgtagaatttaacaatgtcaaaccatccaaagtccacctccttatccgtacatattttaggaagttgtatacttgtatcttattaggaacccttgtttgcaacatttaaaaacaaaaatgcctcaaataaaaatgcctagattaaagtaggcaaataaactgataaacccttgtttaaaactgattaaagtaggcatttgagtttttggacaatgaccaccttagtcctgtattaaaatgaattagtgtttcatcttcaggttttctattacttgggtgaactta

SEQ ID NO: 53252 - DNA, 830 bp, Populus trichocarpa
  Intron number 1 from transcript POPTR_0005s21610.1 (locus POPTR_0005s21610) derived from phytozome v7.0 (chr-ID scaf fold_5; pos 20720707 to 20721536 reverse strand)
gtgagccccagctaccactactgttggtccatgaagcaccgacaaattcctctgtattttgggtcctgcataatgttaagttacaattattttttttctttcgaaaatgacagtgacagactgacagtaattgatcacagatttcaacaaactccccaagaacatccatgcatcattccatatgtcatattaggcagccgtgcaatcacgaaaaaaacatcacaaacgaaataataccatcatgtgttcgtgaacatttttcaatacgagggaagggagagaggagagttaagaaaagaaacagaaacctcgatgttttctgtctaccaaactagggaaattgtgctaattaactgcaggtcaatcgacactaggtattagtgtttttaaagaagtttctaattcaaaccttcatttacaattgcatctattaaaaaaaaactaaaagaggtctgaggtaattcaccgtggattcaagcaagcagtgaatatcattgattttcttcaatttctcaaatcattttcttgatttctcacacttttgtcgccttggatcacgttgtctgcagctcccttaatcatatcctaaccttcatcacatttaccagaaggaaaatatgtacatgcatggatataccaagttgcacttctagacatacataatggactcgagttttcttttggattcacgcagccgatccttgtaatatacatccaagctcttatgacccgacatatatatcactttcaatggtaattcgtaacgtacaggatggccagcagagactccaagtttcttttccatgactgtctgaccgtgagcttttgca

SEQ ID NO: 53253 - DNA, 460 bp, Populus trichocarpa
  Intron number 2 from transcript POPTR_0006s00800.1 (locus POPTR_0006s00800) derived from phytozome v7.0 (chr-ID scaf fold_6; pos 445348 to 445807 reverse strand)
ccctcttcttctcactgtttgattggttcatagaggtactcagctactttccgtttcatgagattgtctgtggatgattcttcaatttgaatattgatcctttaatgagccaagaaaaaaataattgcgatcttttctcatgtttctgttattggctgctggtaatacttgtttctcactatatgattggttcatagaggtactcgactactttccatttcatgagcatgtttgtggatggttcttcaatttgaatattaattctttaattagccaaggaaaaagaattttgatcttttctgatgtttctgttattgggcttccggtaatacttgtagccgcacaatgactgcattgttcaatgagacaacagcacattgttaaggattttttgtctttggtcatgcattgcttattcatatctgatgtcctaacttattattctaattcatgtggcagc

SEQ ID NO: 53254 - DNA, 687 bp, Populus trichocarpa
  Intron number 1 from transcript POPTR_0006s06490.1 (locus POPTR_0006s06490) derived from phytozome v7.0 (chr-ID scaf fold_6; pos 4661567 to 4662253 reverse strand)
gacaagcaggtttgctccttttgttttattacaaaacacaaaatgattgattaattttttattgctgattgaatctttgtaatttaatagttgattggttgggtttttgtttaatttggattgtgaatccatctaattaaagtgtttgggagattggaaatgataatcaatcaattcttctaatagcgggacatgagaaagtgtttgtttttatggttttgtggatccatctgattaaaccgtttttatactgtaattgatgatagaaagttctgggaatttataaacaattgattttgattgttgtttttgttatggtctgttaaaaatggtttgggtcttgtttggagtgagttgtgaatgaaggtggatgtgtacccgtatcagtttccgattaaaatgagcttgttttgtggctgatttactggtgttttaatcaaaatgaaagcaattttctttggatgttatttgtttatattaataacagtaatgcttaattgtcgatgatatactgtatgtaatttgttctactattttccgtgtgagagggtcattttttttttagaaatcagatggttcggctgtaatgattgcttattggatttcagtgatacatctgttatgggtattttgttgacttttttcttactctttatcattctagcttcttgagaaagcgcttgaaga

SEQ ID NO: 53255 - DNA, 743 bp, Populus trichocarpa
  Intron number 1 from transcript POPTR_0017s11490.1 (locus POPTR_0017s11490) derived from phytozome v7.0 (chr-ID scaf fold_17; pos 11233770 to 11234512 reverse strand)
gtgttgctactgtcaaacaggaggtatgattgcatctcacattcatcttcattattgtaacatctctgctctcaatgtccttctgttagttgctggggcataggatcaaagagaagctggaaaacttgagatgaaaagaatagtcataataaagaaaaaacccacattgatagtttacttagggttttgtcttatggtaatttataattaaatcttccttctatatttattcagtttatctctactgcatattcctggttgtctcacaacataaattatatttgtttttacagtgtttcatggttggaaaattaatagaactttaggggaaaatcttttctgatttacactcaaaatcataggtgaaaatctattcctggtctgtatcttagccctttcttttgtgtgaaattgtgaggctgcatttatgctcatagtttatgatttatgctactttatatatttttttttttgagtttaaaagaatggcacatggcattagagagctgtggaaaatttgttagaaagttttgatgtggtttatggaatgaagtggcaatgaactacttagcaaccttttactttattggaactgtatctagttttttgttaaatgaatgaaaaatgataaatatgtctagcaagtatggcttcaaaacagaattatctttcttttcctactttagaagtatttaaaacgttttgttgcttttgcagagtggggggctcttgggagtacacag

SEQ ID NO: 53256 - DNA, 154 bp, Populus trichocarpa
  Intron number 2 from transcript POPTR_0017s08350.1 (locus POPTR_0017s08350) derived from phytozome v7.0 (chr-ID scaf fold_17; pos 6862040 to 6862193)
acgaagaaggtttttgttttcttcttgttatttggaaaatttggccttttttcaattatttgatgtttgttagtgcctaccttgtttcaatagtgctaaaatcaaacttaaagtgatgattttacataatgtattggggtgctgcagtgacaga

SEQ ID NO: 53257 - DNA, 910 bp, Populus trichocarpa
  Intron number 2 from transcript POPTR_0005s19340.1 (locus POPTR_0005s19340) derived from phytozome v7.0 (chr-ID scaf fold_5; pos 18078648 to 18079557 reverse strand)
ggaacttgtttccatctgcacaaggtcagttgattcatttggtttattgtttgatctagtaatattacctaccggtgcattattgttcatatttgaagttggatttaccaatatatatatattttactttatttttccaatgaattatttagtgctcatgaaaacaataaccagaaattgaagttagtgagaaagacttggaagataattcaagtaatttcaacaggaaattaaataatgagcatgagtatttgttgcgaggtgttgcaagaagacaagattggatcctatgccactatgattagaatggtctgtctgtagctaaaactaagatgcaatttggccaatgaggtataagatcgataatgtttagaacatattcaatgtgaatattctatcgcatgggagtgggaaatgattaaaaaaaaaactacccaagattttgccaccccttccgaagagagggtctaggttcaaagcccttagaattttcattgatttacaaatccctcgatcgatcttgaaccacgaatgtgtctgttactgtaattttaaggtagattttttaaataataaacaagacaatagtaagtagatactagatactatggttgtgtaataatcagatacatttcttccatgcaaattaagttttcccacaaaatttcaattgccccattaatgaatctatggagtttgccctctaggaaaaccagttgttgcttattttattttaaagatggtggcttgttgtgcgcttgaagcaactttcttttggatctcttcatttttgtccaaaaatcatgaatagtagcaattaatgaaaagtcatggtgccgtacagtagtaaacatttatcgaaatctttttcataggatccgctgacatcaaggagctcttatttaagacg

SEQ ID NO: 53258 - DNA, 931 bp, Populus trichocarpa
  Intron number 1 from transcript POPTR_0006s00950.1 (locus POPTR_0006s00950) derived from phytozome v7.0 (chr-ID scaf fold_6; pos 535465 to 536395 reverse strand)
gggaaaaattgttacagtaagaaaggagaataatacattattctttctgtttctgtttttttatgaacaaggaggatgttgattagcttttatttgtccttttcatttccaaaaagaaagagacgcaatcaatattttaagactgtgatgcatattctttatgcaagtgcgctagttttgaccgcggcatatgtcatctggatttgcagaatatgaagaaatcgtgtacagctcatggcctagcacttccagtctaggaaccagtcctcctgcattgttcgtcactcaagcactatcaacttcagggcacatgacatacagtgacagagaagactgtgtcatgcactcccatttttttccactacacatccactttgtctttcatgaaaagaaaagagggaagagcttccagaaaaggatgacgggatgtctttaatcctgatccaataggtacttaccattcttcttatgccttaacagatcccaatatgccatgttttgcctctttattccttgtctatttcaagatgggccatagtccagaaaaaaaaaaagtagtgatgcattttactccgcaagtcttacctccgttttcttcggctgtgtttagaatttttcagtggtttaaaatatttttttgtttaaaaatatattaaaataatttaaaataattttttttattttttaaaaattatttttaacatcaaaacaatcaaaaatcataaaaaaatttcattttaaaaaaaataaaatttaagcaccgcattcttaagcataaccacaactcacgcagtctgatcatcaataaactcttttagagatgatacaaactaaaaattacataattgctctcatgttgctgatgtgcagaggagacattattgaagaaatcaaagcttgtttttgtctcttccaggtgttggcctccttc

SEQ ID NO: 53259 - DNA, 855 bp, Populus trichocarpa
  Intron number 2 from transcript POPTR_0017s06410.1 (locus POPTR_0017s06410) derived from phytozome v7.0 (chr-ID scaf fold_17; pos 4914652 to 4915506)
cgagcgcttaagaagcccgagaaactacggaggtaaactactctgaaccatagattatcttcagtttaacagttgccggtgataagggacgcgaaggggagggaaaaaagaatttgcattcacgttgattttgataattatgatgggattctaaagaaagttgagggtttggtctatttaaggtttcttatttcttattgtcagggagtgcagtggttggattaacatttttgaatggttaagttcaatgatatagacggaaactatattattgcatggaaaattttgtgttgtttgccaatctggtctttgtagttttgtgcagactatgtgttcacatctttggtaacagcatgtaaatttgattcttagaattgagagacttaaagatgatggttttgatcctacaacttagattctgtctctttcagaatacaatttggttatgctctctctagatagcagctttctctaaaatgttaatgggggcacatagcacatagagattatcacttttattattgatttcagttttcatattgaatgctgtacttaattgtgctattttttttataatttcattagagcaagtttttatctgcttgattttttttgttctctaaggctctgacatatgctatctttgagcaatcatgaattttgaatttggtgccaattacatgttacacatgcatctacaagaagttttattcattacgtctgcttccaagtcctgctcagtcatttctggggtttatttgattgtgcatggttgctctttttgaactttctattttgctttccttttgcggaactttagggtatcctaaaggctcaaaagtagcagctcctgtc

SEQ ID NO: 53260 - DNA, 167 bp, Populus trichocarpa
  Intron number 1 from transcript POPTR_0005s24650.1 (locus POPTR_0005s24650) derived from phytozome v7.0 (chr-ID scaf fold_5; pos 23120619 to 23120785 reverse strand)
aagaaccagggttttacgatagcatctgacctcaggttggccagttgttttcctcttaattctgtgtttaatcccatgctgtccttgagacaagaaaatcaaagaaaaagcttaaccgattttttgtttcttataaattgaatcaaggttgtgtattttagctgttg

SEQ ID NO: 53261 - DNA, 312 bp, Populus trichocarpa
  Intron number 1 from transcript POPTR_0017s03510.1 (locus POPTR_0017s03510) derived from phytozome v7.0 (chr-ID scaf fold_17; pos 2549094 to 2549405)
ggtggtgagatcagtactggcagcccattttccaggttattttttctctgtttctttctttctttttaattatttctttaataataataattaaaaaaaaaacacatgatgccatataaacacgctttgagtacctagcccgtttatttatttatttttatgctaccatcgatttccaagtttctttagaaataatatttcttttcacatagagatcaaaacactcttatttcatttttttaattaaaatatatagatttttttatcaaaatgcatggtttttttagtgggagttcgctagaccttcctgat

SEQ ID NO: 53262 - DNA, 471 bp, Populus trichocarpa
  Intron number 1 from transcript POPTR_0005s25070.1 (locus POPTR_0005s25070) derived from phytozome v7.0 (chr-ID scaf fold_5; pos 23417884 to 23418354)
cctgtactctctctttcttcaatctcctaacgttttaacttgattttggattctcattgttttattggccttaattttgtcttgtctagcttgtttcatgtacaattctgtactttttataaaaaagattgcatcttttcttgatttgtgtccatggccttttggcttttgatgtattttgtgtgtcagattctgtctttgttttttcaatttaatctatgttactactagacacattcagggggtttagatcaattttctcattgagtatttttgctagcagtttctccttacttgaagtaagactccttgtcagtacattaaacaactcgcattagtcttttccttgtgttagcaatattggtaaaaaaaggatagtgatgttgttagttgggtgattaatggggatttagtatttgtgttttggattgtgtaggttgcaattgaagagcttgaccatatactagaagc

SEQ ID NO: 53263 - DNA, 593 bp, Populus trichocarpa
  Intron number 1 from transcript POPTR_0017s14280.2 (locus POPTR_0017s14280) derived from phytozome v7.0 (chr-ID scaf fold_17; pos 14398505 to 14399097)
gagactagcttttcaagaattgatatattttattggtaagttttttttttccgttttttggtaatagttgcatggattcttggtgtagatgttgatttggacttgtttttgtattgttgtcctttatgttttatgtgtatgttaattgttctgatccttgatataatgtaaatctgaggcttttatttttatggattcgttaaggtgtatggacttggtttatggttttggtcttgaaaaaaaaattaggcttagcaagttttcttctgagaataacttattttattttattatttaaaattaaatggtgtttgggaatttgaattctttctctttggtattttttctatccttgtgaatctgtttagtcttttaaattcaatattttattttattttacttatgatttggtgattgattagttatttttgtagcttgtattgtctgttgatttttaatctccaatatgtcttacttctcagtttttttcaatttgctattggaattttgctattatttttaagattgtagactagtttgctttgagttttgtgctaattgcaatccttcttgtgtgattcttacaggactga

SEQ ID NO: 53264 - DNA, 614 bp, Populus trichocarpa
  Intron number 2 from transcript POPTR_0005s05280.1 (locus POPTR_0005s05280) derived from phytozome v7.0 (chr-ID scaf fold_5; pos 3496122 to 3496735 reverse strand)
gcagaacccttgtcaccagaacacaaggaactaaggtctcttgtcttttattttccttttatctttacatatttcatttgctattgcttaactgaattttttattaaatgatattgttccccttgttattacttttggttcgaaagaggggagaatgcatattcttgtcaaatctttttgcttgtgcatctgttgtagtgtttttgaagcactgagtttgctttaatttcttggaaaatataaggattaataaaaatagaatgatgtgctatctggaaattgtaatggacgaccaatgtgactgtcttatgatgcttagtgctaatctgatctatttgtaagagagtcgagtgatggatgtgttgcatgtattctggatccttgctttaatattagagtgatgcatagaatgatctatggatatccatacaataagattttattggggttgcttatttgctgctgcgttgttgtatcaggaatagctggttgaaagttctactgtatatagaattctggtatattttcaggtgtttgttttgttgtttgttcaaattggatttggcttgtttttaacagattgcttccgaggggttgaaacatcgagtttttga

SEQ ID NO: 53265 - DNA, 988 bp, Populus trichocarpa
  Intron number 1 from transcript POPTR_0017s13770.1 (locus POPTR_0017s13770) derived from phytozome v7.0 (chr-ID scaf fold_17; pos 13936419 to 13937406)
caattgagctggaggtatgtaatttttaatgttttatttgcttatttttacttgcggtttgatttgtagacaggataatgagtgcccatataaaaatattgaaagataagggaaaacataaagtttcttaaatttacttttagacaaccttcatctgaggtgatgaactaggacgaaagatgaaagttactttgtacaattatgagataaaaatcagctatggagctagtagcgcctggaaaattagattttgaagttccgttccgtaaagttttgttgaatgttgaatggggtttttctggatttcttttttatatatctatagtttttactctcagtccaagttcttctgctgttcatcgttccagggaggacactaaatgtaggtaggaaaaacaatgtagtgtaagatcctttagataccaagtttttacaattttttcattatgtattaaacttttcatatcacgggccttattaggctgaatattctattacgcctttcttttttgatctaaaatttcttcaaagcatggacatggtggactcataagagtgacatttcaactttcctttgtcagagctcatctcatgtttcgacattgtttcactatggatttatacttttgcatttccctgttggggacagcaattatctttatcatttcaattatgtgtgttcttgtttgtgcctttgttttgtaagttgtttaagtttttctcttagttagactttaaaggcacgcgtgacactttgctctactgtctcttctgactatgggaggtgcttcctcttttcttttccttttttttttttaaaaaaagaactatacaatgaagagatatttaggtgtaccattcttaatccattttttggaactcctaactcttcagtcttgttctctttctttgaaccgaggactgaatctgtaacagtttctgtgatgaaacagattagaatacacaatatcttggagaaaacaaggaa

SEQ ID NO: 53266 - DNA, 861 bp, Populus trichocarpa
  Intron number 1 from transcript POPTR_0005s19050.1 (locus POPTR_0005s19050) derived from phytozome v7.0 (chr-ID scaf fold_5; pos 17636829 to 17637689)
acaagaagctttacatgttagttataactttggagacttaacaacatagttatggttgaaagagtttgttatccatacaaagcatgaatcattgaagcacttgaaaagacaagttcagttgaatagaaaacatgctcaattggtggagttcattgagaccttttcatgtcattaagtaaaagcaaggtaaagatgatattgtggttgatgctctatctagaagtcttgatgtaaataaaaaggttgaaatgatgaagaaactccataagagtgtgtgacatcaaataggaaagaaaaatgagcaatatgcatttatagccaataaaagtcatagggatgttatctttgaacctagtgatttggtttgggtgcatataaaaaaagaatgatttaccacttataagcgatctaagctgcatcataaaaggatggcccattctaagtccttaaacggattaatgacaatacaaacactttaaaattttcagatgaattatatttaatgttttttatctatttttttttataagtgataattcaaagtcaaattcttttaaaaaaggaagaataatgagaatcaataaaaaatactatatgatccattatatcctgaatagattaattacaaaaataaaagtaaataagatcaaagagtctttcaattggctaatttgagactcttggtcaagcacgctagtagaattgggctaaattatccatatagcttgtaaagttgggtatatttcgggtctattttccacatagcttgtgaattgggcttcaatttatagctttgtattttattttacctgttctttttagttagttggttatttgggaacttttcagaacatatcaagg

SEQ ID NO: 53267 - DNA, 613 bp, Populus trichocarpa
  Intron number 3 from transcript POPTR_0017s13690.1 (locus POPTR_0017s13690) derived from phytozome v7.0 (chr-ID scaf fold_17; pos 13780868 to 13781480)
gacagtcaactggaaaggtacattattttgattagatttttttttttttaaaaaaaactgctttggttggtgtcgttgcgtttggttactgagagaatatagggagaagagaaaatttgttcttgtttttatgggattggtttggtcaccgggaaaaggggaggaaatgaaattttggaatttgattttttcttgttggtattgacttgtttggttattgagaaaatggtgggtagaaaataaaaaatcctcctttttcttgagagatttgtttttttggattgtttggcagatgatggaaagagataaaatggaagggaatgaaattggagaattttatgggttttttttttttttttttttgaatcttggtttgagaagttggacaagtcatataaaatataatagtaaaccaaattattgtttcctcttagttgattgacaattgtgggactgccaaaatgacagtcggatttagttgttaaggtttcttgaagctaaatggggtcttggttttttttggaaatatttttagtctggcgctcttttgaagacagctgaactgtttgttgtgtcactgttctttttggacagccaactgagcagaatacat

SEQ ID NO: 53268 - DNA, 709 bp, Populus trichocarpa
  Intron number 2 from transcript POPTR_0017s13440.2 (locus POPTR_0017s13440) derived from phytozome v7.0 (chr-ID scaf fold_17; pos 13602452 to 13603160 reverse strand)
tggtatgcttcccctcctgcatttcctcatggcaataggattagaggtcttatgcggtgtatcatatattactatatttttttatggctgttgactgggttttttatttaacctgtgaggtataaaatggatgagtgaaagagtgtgaaggaaagaatgatgcctaaagatgaaaggcatctgcattgttttgctcttgaatgttggttcttaatggttgacaaattaatgattgttaaaggcatagatatcttagtgatctaaaggacgagctaaatacacccattagctggttaaggtactattttttttacttgtaacattgttgctgccacttttgagcacatgactcctctatattgctattggtatttaccaccatggtaatgcaatgggtggtagaagttggaaagaaatgaaagcatattggttggtgcgcttcttaccatggagagtcctccagattattagttttagctaaagtgaatttttgattgcaatgcatttgtttgattttatttgtacgagcatcacgtttatatgaaaaagtgtttattcagaacttccaagttgatttgcatggaattagaaatgcaattcaatattagttcatattccttctaatggagttctaaatattatctttcttctttcttttccctcaatgtttgtagtatacctcaatatttcgtagagggcaagtgcattc

SEQ ID NO: 53269 - DNA, 691 bp, Populus trichocarpa
  Intron number 1 from transcript POPTR_0017s04530.1 (locus POPTR_0017s04530) derived from phytozome v7.0 (chr-ID scaf fold_17; pos 3490540 to 3491230)
gacagcaagagcagtggcagatttgtggtcccggcaccgagggagcctgggaagaagatcgagatgtactaacctgctttctatgctgcttgcaatgctcgtggttcggttactgtgtttgtttgtgattttgataattgaatctttaattacagttaacgaataaggatccaaacaaggttgtttccctatcatgggctgctatcaatgctggggatcgggttaatagttccttgaaagacatggcagtggtgatgaagcaattggatggggctgatgaggcgatcaaatcttttcgtcatctctacccctatgattctcgggaatctattgagaatgtgctagttgaactctacaaggtgaaatggtgctttttctatctttgcaaactgtagtattttggcaataattgactctgatgatttggtagtgtggtttgtccattagcatattgacttttctttaggaaaatctacgtaaagaaccatcgtgtagttcattcatgagttgttgaaggaatcatctgttgcggtggtgcttttttaaacaaaatggaactcattcagtttgaaatgtagctaaagtctgaaaattagctagagttagaaatgtgcttttttaaatgacatcatttattttttctatcgtaagattgaatctggtttcgtatgatctcaatcttcaggggaac

SEQ ID NO: 53270 - DNA, 286 bp, Populus trichocarpa
  Intron number 1 from transcript POPTR_0005s21040.1 (locus POPTR_0005s21040) derived from phytozome v7.0 (chr-ID scaf fold_5; pos 20156689 to 20156974)
aaggttctcattctcgattcccaaacggtaatttctttttctcacttaatcactgaattatatctttatttttcccatcatttcgtttaatgcactcaaaatctgtataattactgctgatttctcgttaatcaaagcaattgctaggcacaaaaaaaaaaaacagaacaatttttttaggatcgaaaaccctagctcgtattaagctaaagaagatgagaaatgtgagttatgttaataatgtgtttcaggttagtattgtaagtgttgtgtattcacaatcaga

SEQ ID NO: 53271 - DNA, 661 bp, Populus trichocarpa
  Intron number 1 from transcript POPTR_0337s00210.1 (locus POPTR_0337s00210) derived from phytozome v7.0 (chr-ID scaf fold_337; pos 5481 to 6141)
gaagagctgatcaaagctagtgatttagagagaaggtaagctactattttctccctttctctttcaaaaaagtttacttctttttgtgtttcaatggctattagttgttgaacgtacggtttttttgctatacagtttgttggctgattcactttttgtgtattttcaatgctgttaataattgaatgggagaactaggcttaatggagcattgtaatgttgattatctgagtgctaaaatagctgagttttaaatcaggaggttaatttggaggtgttgattttatagtaaagtgtgattagatttgagtttttgagtaccatttgatgaaaaaacaaaatttaaatctttgttacgaagggttaatggatatatgggttatgtgaacttggtggagttttggtatcgtattgggttgtatcagtcttcaagttatgcaaattgatatttggttttacatgtttttgtgtgatgaagctatcaatctctggttctggattttgtgattattgcttttattttatgaacccgagtttaacatgactgttgtgtcaaccatcgtgttctagttatactgtcaaatttctgggttgtttattagtgtgattgttttttatgttcttggtttgtccagtggagaagatagtggcagcgaggaag

SEQ ID NO: 53272 - DNA, 961 bp, Populus trichocarpa
  Intron number 2 from transcript POPTR_0017s14630.1 (locus POPTR_0017s14630) derived from phytozome v7.0 (chr-ID scaf fold_17; pos 14659053 to 14660013 reverse strand)
tccaggtttcaggtactttttcttcagctttcatgtatagctttgcttgtgtatcgtttaaaacacaagataaaatcatcttattgttaaaattgaattgctgaatagactaagctcactctagtcatacaaagcaatggttaatgtacttgatacaaagaataggaagcaaacaaactgaactatgaagtacaaaattccaaagttagcacaaaaataaagaaaaaaaattagggatgtatcccagttcaattggttgagtaacataatctattgatttaaaaaaaaaaaaaaacataaagcattgcgctactcaccatagcataacctctaagaattaaaatctcaaaaagttgtgctaggagtagcgcgctcaacctttaaattttttatgctagaggttttgatatatatatatttctaaacaaaaaaaaatttaaaatatattggttaagaaaaaaatttaaaattgttcaatgactgtctacattacataacagaacatcaaatctttgatgggatttaatcaagtaacctgaaaaggtagcctcactggtgtcataataacattcacagacttagctttcatggtagtagctatctctcaagcaactttatttattatttatttcttaatttcctttcctcaagtgatcacttgaaaagatagctatgtgttttgattgatgtataattgtctttaagaacataccatccttttcaatcttcatagctcaagctcaagtattcattgctgccccaaaatggaaatcgaattcttgtacaaatatagtttgataaaaaaaaaaggttatctttgttcgttgcttcttcatcatcattgtcattaaatgtttctatcttgagtcttagattttggaaatgtaaacaaaattccaagattaatttttgtattgttatttcaggaagagtcaagccaagaaggtagtttgtattccag

SEQ ID NO: 53273 - DNA, 682 bp, Populus trichocarpa
  Intron number 1 from transcript POPTR_0005s05450.1 (locus POPTR_0005s05450) derived from phytozome v7.0 (chr-ID scaf fold_5; pos 3608734 to 3609415 reverse strand)
caaagcgacgaagcctcaaatttccaagaactcaggtaagaaaatctgaacttgatctttgttgctctgttttctcactcaaaatgccatatttttttgtgattcagatgcttgtcagtttattatttctcttgtgctttttcttctacactctaccataagtcatattgtaggatagtctgatattgtttagtcaagtaaaacacatgaccattttcgaaggatttttttacttgtcctgtgagaagtatgattccttgttaatgggattagaattggttggctgggattcccttttgtcttttaggggataggttttagcattaagcctcgtcattatttatatcttcacttggttaattatacaaatttcgacaatatcaatgagatctgggcttacttaaatgttaaatgttaagtttttgtaattttggtgtagctttttacatttgcgaatatgtcggttagcactaccaatttgtttttcttttccttttctttttaggaatggctttactatgaattaagttatcgttttgtgtttttatgtaattgtttctttaggttttccagtaacgaagcatttaatttagaatctttggttctgtgttagtttaaagttattctagtaatcattgttaacttttttctgtctccttttgatgatttgatcaaattcaga

SEQ ID NO: 53274 - DNA, 825 bp, Populus trichocarpa
  Intron number 1 from transcript POPTR_0005s07600.1 (locus POPTR_0005s07600) derived from phytozome v7.0 (chr-ID scaf fold_5; pos 5203862 to 5204686 reverse strand)
gggaagcatagaaagtccgagtttagatgtattgggtagaaacttaacagagcaagcaatttagttgtttagctgacacaactatgatgttttataaatcgtaattaaaaataattactaactttaggtgacatcactcacgttctaaattctatatgaaacctgcttctttaatttctatgtgaggagggtggtccacccgacaaggaaccctagttgaagaagcaatctccctcccctcccctctctttgtgaaaaaaaaaatctttaacaagctttcgtgagggaggtggcaatggggtgtctttaattttctctcttaaaatctaagtagatggagaatctttttatttcttttaggagtaataaaatccctgccgacagtaatatatacgaggcaagtgaaggaaaaaaggagaatcgaaaagaaaatttaatgaattctcacttctcgtcgtgttgctttgactctatgtggccattgatttgatgcttttgtatatgtttagtcttttctttttcaatttattttaagagaacgtgtttaggttaaaagatatcgcttagttatgtagtagtattcttatacagatttttttattgttttttgagaaattaatattcaaactttaaagaaacctatatacgtatatatttttctcttattgccacttaaaattgtgattgtagacacacagtagtaggaaacttaattaatttattcaatcatacaccgagagcaaagaaaaacatatttattatataattaaaatgcttttaattgtttactgcagattgggaagtttttgtgccgaattgttttcc

SEQ ID NO: 53275 - DNA, 707 bp, Populus trichocarpa
  Intron number 1 from transcript POPTR_0005s00730.1 (locus POPTR_0005s00730) derived from phytozome v7.0 (chr-ID scaf fold_5; pos 327889 to 328595)
aaggtaagaatggagttcaggaaatcataaagttgatgaaacgaggactgctactccatcttgaggaaaagcagcatttctcgctggcacaagattccaattcaggacgcgacattgtaccgaaaatcctcagtatgaacatgttaaatctcaaaatcgaggctgcgcatgggatatatagcatcatagtctctctgaaagaattggctctaggattcaatgtggagtttcatttcgtactgcaagatagcgccaaagaaaagaatagaagctcccttgttagttgtcttcaacaccttgcctagagaataaaaatcatatcctaatggcactctttttctctggaaaaaaaaacacattattttttatgttttttttatggcaaaacacatgattgatcatataaacaaaagggactaaaaacataaaacaccatgtaacctcaatgtaacacatagaagaagaaaccacgaataaatctttacagataactaattaaatgctattaaatatataatttgtagttttgtcaactgggtctgtgatctttatcaaactatatataactctgtttcacagttgaagtgatactacaatcaaaatcacaggcacaaagattaattcatgaaaacaatttcttctctttcccgccaattttcaactgctaaacagacaaaacccttttctttaacaacccaaaaacctca

SEQ ID NO: 53276 - DNA, 830 bp, Populus trichocarpa
  Intron number 2 from transcript POPTR_0005s14470.1 (locus POPTR_0005s14470) derived from phytozome v7.0 (chr-ID scaf fold_5; pos 11510684 to 11511513 reverse strand)
ctacacaagctacttggcaacaggcaagtgaaaatgtcttaaccaatctagattttgtttttgacaagacagtactcactcacaatgagaaaaaaagaaatacgaaagatagaaaagaaagcttgagaacaatacaaaaggaatcaaaagcatagagatgatgataaagtctactaattaagaacccccgccttggaagccatgcatgtaagcatgaattcccgatctgagattgttgaagacgaagaggtaaaaaccaaggaatgaagaagtggtactgtttctagtggtttaagaaaaatcaccaatggcagctaagagcaaagccaaaaaagtctcagaaagagagggagggacttcaactgattgaagaggattattttttctataaataaaatgctatgtctcatatatttaatgagaaatttaagaggaaaacttgaactgatatggaagccttactccctttttttctataaataaagctgtctgtgcagaccttgctttgtcagtccatcttctaaatagttcctttccctattgacatgctgagaagtactgattaaattactaaggaaaatcttaatagtattttttttgtttggagaattttaatgctattaaacaagccttgaagtctccatagtaggtcctgacgagtgtcttccatctatttaacaacgttgcccgactcacactctattacccatgccacttccgttttgtttagaaaggaagaagtagatcgaaaccttaattaactctacggaaaatttattattttttgttacacaggtggtcattgattgccggtagacttccaggaagaa

SEQ ID NO: 53277 - DNA, 867 bp, Populus trichocarpa
  Intron number 1 from transcript POPTR_0017s02300.1 (locus POPTR_0017s02300) derived from phytozome v7.0 (chr-ID scaf fold_17; pos 1702962 to 1703828)
ggtataaagattttattgtaatttccttccccacatattttcttttggtgaaattgcatttagctaaagattacatgaaccacgctacgcaaattggaaaaacggacccgcccttgtcttgacccaatgattaccaaaagaccaagaaaaaaaattacgagtaaccttaagaccacagttaaaatatatttgttttaaagggcaacaaagttaattcattatgtttttttaattaaaaaattaaaatcacccctcaattgaagccatttttattgcatatcaagggcatccaagtcattacactatataatatatatataaattctagatcctaatcaaattcataatgatagacatgtccaattacaattggaccccgaaaataatgtaaatgagttttttaaggttaaaataataaatacactattatcgtccacatttctctgagtttgtgtgcgcagtgaattcaaaatttgttttagttttttttatgtaactttttgttttgttaatttttaaatatttttgaattcacacctcttttatttaatgaaacaggccgcattctattttcagagatccgtttaagaggggcaatagcatccttgtgagtgcaattttgttcccttatatctttccacttgatatcgccaccacagcttgatgtcattctctccgatgttgatgtttattggattagtcatatgagaagcttgaactccagatgttgttgctgaagggctctggtattttatttaaattctatcctaatccacccttactttcttcattcttttttcttataagataactgcaaagtgtcttataattatgattaatgagcaatatgataaaaaaaaaccagga

SEQ ID NO: 53278 - DNA, 909 bp, Populus trichocarpa
  Intron number 1 from transcript POPTR_0005s18160.1 (locus POPTR_0005s18160) derived from phytozome v7.0 (chr-ID scaf fold_5; pos 16267555 to 16268463 reverse strand)
gggtttctggtacttggtatgttgtttccaacctttaatcctatatgcatgtccttgcttgttttcccttcatttggtatttgttttcatttttagtttatagctttgtggttggccctctcaatcttacgtttatggtccttttggttatgtttaaagaaattgaaccttggtagttatggtttgctgcatccatggtgatggaatttgatgaaattacttggtttgtttttcttgctgctggcattgttttatagttgcagttgaagtttatgggcatggcgattagcaagttaagttttgaacacttcaaaaatgtgaaactgatatatgaggatgaattttgcatcttttgactcacaatttcacttgtatgcggattttagataatcgtgaaggttgaaagatatgattattcacgctcacataatccaaaaacagtgatagtgaatgaatttcatttactgatacacaaactattgagattgatttggctatatcccaagtttgttctgtttgtatttgttttggtgttatgaatttccttttaatcaactagaattggatagttagcttaaaaaaacaatccaacctttattttatttccagcttaatgcttctgaaactgaaaattctttttctttctttggtacgctagggaagtttgccaataatacttatgtgatcatcgtattttggcgtcaactgacgatgtgaatttctaagcaaagtcttgtgctattaaaaaaatgattattggtagacatggaccacttgcagtttatagaattgaagaaaagtcttgtgttattaacaaaaattgccgtttcagaaatttattgtttttggatgccctgtctgatgtaagtgttagcttcaattgacattgaatgaagaatggtatcaggt

SEQ ID NO: 53279 - DNA, 600 bp, Populus trichocarpa
  Intron number 3 from transcript POPTR_0005s15590.1 (locus POPTR_0005s15590) derived from phytozome v7.0 (chr-ID scaf fold_5; pos 12217563 to 12218162)
ccacagggtaagaacctttgcacaagtttaattttgattataattcatgcatgtattaatattgaataactcttaaaaacatgtactcctgcatatttggagttcaagtttaaataagtttaaattagttgattaaaatcataagtgttaaaaaataatataaattatatcttgaagtgttagctaataacttgacacgagggatgttagaatctcacattaaataagaacacaaataccaagattcttataagccctaggaaaaaaagaaaaagagaaagtaaaaaacagatttttaatatcatttttcctacattagattagctgaaatttcaaaagacttttagattaaaaaaaaaagattaaaaaaggtttaatttcttaataacttttcaataatatgttatggattcatttagattagataatgaagatatggttttagattatacaggtccatttaatctggacttttcaataaaatctaatattattaaagctttaactagctggtcacgagtttgaatctcatcattctattttattcatatcattttattcggtaaaattagctgatatgagtccatgaatgtacagtca

SEQ ID NO: 53280 - DNA, 446 bp, Populus trichocarpa
  Intron number 1 from transcript POPTR_0005s22860.1 (locus POPTR_0005s22860) derived from phytozome v7.0 (chr-ID scaf fold_5; pos 21745371 to 21745816)
tgacaccggctactggaacaactccgagtggggtaattattatgaatcaagattttagatcaaactagatgaaataagaaattcagtctggtacttcaaaatctaagtattttattggcttgtagacagaattacagtacttttttttgagataattactgattactatatctaataacaaattctgtccttgtagaaacaattatggaagtattgtgctggtttttgttagcaaattgatggcattgtgttcaatcaagctatagaaacatatagaaattctttgttttcatttatttgccgatttcaaactgatgatcccggtttggtatcttatacatgacgcctacttttatttataacttcacaaaatcaattttgttctccttttctttcctcttgctgaacaatgttaagagttctcttccgctttgcaacaatggcag

SEQ ID NO: 53281 - DNA, 296 bp, Populus trichocarpa
  Intron number 1 from transcript POPTR_0005s28170.1 (locus POPTR_0005s28170) derived from phytozome v7.0 (chr-ID scaf fold_5; pos 25521307 to 25521602 reverse strand)
ccgaggctgagataaagaaagcctattacatcagggtaattactaatttcaatttcaattcacttttgctttctctctcagtacaaacgagtagatctccttttctcacttacccatccaactcaactgtctggatccgttacgatgataaggatttgattaaatgaactcatacaatgatctgattgcttacttttctattctataattcttcactagagattcatttctttgttttttgtttttgttaaattttactctgcaggctcggcaggtccatccagataaaaacccta

SEQ ID NO: 53282 - DNA, 662 bp, Populus trichocarpa
  Intron number 1 from transcript POPTR_0005s15970.1 (locus POPTR_0005s15970) derived from phytozome v7.0 (chr-ID scaf fold_5; pos 12630176 to 12630837 reverse strand)
ttttctcggctctcgcccgtctctttctccacaaggtgacacttctcaactttccctgtgtttcttttttgccttttgctgttccatttggattgaaatgaatggtctagtaaagttagctttctctcgtgatttgatttcacaattgcttttcttggctggctatgcttaggtatgctcggagggcaagcagtcataactaatctctagtttactttaatgtcaaaaaggcccttgacagaaagcaagctgttctttttggggataaattatttgcaaaaactcatttactgtttagaacttaagctgagtccaatcagattgaacaacgtggtggttaggtatattatatatatatatatatatgttgatgctaacagaagaacagcccacttaaattattgaagcccgtgtggctgatactcataaagtcacaatcccctctctcttctcttttgggacttggaaagtagctataacattgatagaaaataaatttagttttttattttattttattattattattatgctgccatttgaatatgccgtagctgcgcttcaagtttgtattttttcttataaaaaagttcaaatcaaagaagtaacttgtaaaaagttatttattttgcagcaaaaccagtgctctgcttcttttttat

SEQ ID NO: 53283 - DNA, 859 bp, Populus trichocarpa
  Intron number 1 from transcript POPTR_0017s05640.1 (locus POPTR_0017s05640) derived from phytozome v7.0 (chr-ID scaf fold_17; pos 4421629 to 4422487)
ttctttgagtgaccctttgtcttctccacaaaaaggttagaactttgtggttttaattgttttttagcttaatttctttggtgtttctgttttttttttggcttgtggggattttagttattgagtgatttatgtttttggttgcaaatctggtaggattttgtagctaccctttgtgggtttcttgctaaatttgcacttgtgtagatgatagcatgtttatttgtgtgggttttttttttgtttaaaggtggttcctttggttttgattttgataatttgttgattttttttgcggttttagttggaattggtgtagtgtagtttactttcttggcaaatgctgtggattttggtttggtggggtttctttgctggttttaaacatgttgttgtgtgtttggttcatgtgaagttgttttcatgaaagcgaggtagacttggaaacatttttccatgaaaactgtgttcatataactatatgcaccaaagcgtatcacttatacgtgttgatgtatacgatgaattattagttcttgatgataagatttttagtcaggtcaattaaagctcatagaacaaccctttaaagaaaattttgcagtgattaatggagattctcgactctgaaaatagcaatctctttatctggttaatgttatgatgggtttgagagagtaatgtttagtcatttcaatgcatgttttgttttatgacgtgagggtgctttttatcttcatagagttggcaggagcatgtatagaactgtgccacagattgcacatgtctgatctttcccattattggttttgttttgtcacgtttggttaattgatatgtttggtccaaacagagtcat

SEQ ID NO: 53284 - DNA, 750 bp, Populus trichocarpa
  Intron number 1 from transcript POPTR_0005s09200.1 (locus POPTR_0005s09200) derived from phytozome v7.0 (chr-ID scaf fold_5; pos 6428913 to 6429662)
aaactgctcctaaaattcctcatttctcaaagaaggtaactttttttttaatcttttttaacatttctggttatagtatgagagattcgattgatagcaaaaatgggttcttttcggattgttttagtgtttttggttgtattaaggtttttcagaactggtttggttcagttgagcttttgttttattgtttttttgggttttaatcattgatgaacgtgtgaatgtagatattcttagggtctaagttgaggttttgttttgagattatagtttcatttttttaatattctgttatggttttatgctgcaagactcaaagcaggaggctttttagttgttaaattaccgtttcaatatgctgcagtgattgatgttgtgatactcgaggataaagtgccattggacacacagattttttgtgatattaataaattcttgtttattgaatgaattaatgcttgttgttctgtttgttttccctgcaaaccttttgcgtaaatccattccttttgccaattttccatttttgttgatgttataagtctctttagtatgctgctttagcatgcagtaacgaatattagtggcttttggcgcctgttttttgttgttcatattgcacaaatttcctattgagctccagtgagattcatgaacagaaatgtttctgtccgattctgaagtgtaaatctccttttgttttccactataggggaggttgttaacaggtgcgaccataggactggt

SEQ ID NO: 53285 - DNA, 858 bp, Populus trichocarpa
  Intron number 2 from transcript POPTR_1645s00200.2 (locus POPTR_1645s00200) derived from phytozome v7.0 (chr-ID scaf fold_1645; pos 530 to 1387)
gagatctcaaatccattaaatttaaattccatcaggtcattcttttgcttatatttcttcaagcatgcttcatttgttgaagatctcaaatttctagtgatttccaattattgttaatctttggattctttgttttgctagaggtatttgtgttttttttcgccccactgctaaagttattcacagtgcagatcctcagaatgtcaacacactttccttttacttttaaccaagactgaacttaatgccattccacattcttatcatcctatcttgggatcaaggtcaaggacaattctgcaaatgtgacaagagttctataatacatgaggcatcctagagatcataggatatttccaactatattactaagctagaacttgacaagcagaatggaattgcatcctattggttattgagttctaaatcttttagagcaaagagacttagcccttatttttcttttgttttttcacatgcatgtgcactagactagatatacttctatggtttcactactcctcttaagaagttggatttaagttactgatgttgagatactaatccttcatcatggaatacatttttaatgcaagtagtatatagtttctccattagtgatgataacaactgcaagttccataatttgttctcaaagttgcaatctcgctcttagtgccctggatatttcaatttgatcattgtgatacgtgtttgctttcatgctgcagaacaaagtatttgagctggtattcatcatatttgagttgttgatgcggacaatttgctaataattttgccttgtgcatttcaaaatgaactgcagatacacttttcggtgtcaccctaagacaaagg

SEQ ID NO: 53286 - DNA, 587 bp, Populus trichocarpa
  Intron number 1 from transcript POPTR_0005s12700.1 (locus POPTR_0005s12700) derived from phytozome v7.0 (chr-ID scaf fold_5; pos 9447839 to 9448425 reverse strand)
atcacagcgattccaagtctcaggtataagcagatgcaaatcaattcgattagacagaaaaactgctaaagaacggaatttacttagggtttatgtttgtttttgtttgagaatatgagctatgtgatgttattgccttggattttactattgatagaaagcttgtagctgctgcatttactgatttagggttttaattggaagaaataaggagccttggaaataacatgaattagtttctgttggcctttttggtcatcccctacgattatttagtcgaattaactgtgaatattgttggtctatcccagtagttatggatttggtgtttgcacttgctgaatacactggcggatgcttctttcgttatgttctaattttgtttaagtcttcattttgacatgtctagctttgtgcagtgcttgaatttagagatttaagtctctgttagtcttgtattttgattcttgatgtagatagccactctgttaagggtttttgtttttggttggtactgtgtaacgcttttcttttcttttattcttttctttatttgaatcaagctgttacaatgcatgaatttcagc

SEQ ID NO: 53287 - DNA, 558 bp, Populus trichocarpa
  Intron number 1 from transcript POPTR_0005s25310.1 (locus POPTR_0005s25310) derived from phytozome v7.0 (chr-ID scaf fold_5; pos 23611600 to 23612157)
aaacgacgaagctttttctgcatcgataactttcggttagaattccttcctgtaactatttagccttgttttttgatttagggatttttcttctgaaacaaaagagttcataaaccctagtttcaatttttttcttggattattaggtttgtttatttaagtttctaattcaacgagttgatattttattgtttattttattctcttctcttttttacatttaatccatgttcctgctttcctgcacaatgtgttttttttccttattttccccaaataatgatggaatttttctggcttgcggattaatcagagattgatgtgtttggtgaatatttgattgtgttgaattgattaacgtgcttaatggatctctaagtgttggatttagagatttaatttaataaatggaagaaaaagaacccttcatttgtctttctggacaaaatatgtttttagtcgatgattgctgtcggtgaagtgggttataagtttgcacatttgaatgttagattgtaagaaatttatgttccgacatgtttttattcaggaaggtag

SEQ ID NO: 53288 - DNA, 699 bp, Populus trichocarpa
  Intron number 1 from transcript POPTR_0017s05710.1 (locus POPTR_0017s05710) derived from phytozome v7.0 (chr-ID scaf fold_17; pos 4469744 to 4470442)
tgtatatctgtgtgccaggatattactagctgcaagtatatggattgtttctcgctagggttactctttccctggaaatgcatatcagtcgaaatgataaattaagcaagcattgccatttaatgggggaggattgggagccatattaatttgattgtgggagggttataactctcaaaacagagtcaaatttcgggttgtgcttgcaaatataaaattgaacatgaagctaatgtttggtgcagttcaatggatgacaatggcaccatgtttgctaaattacctctagtgggtcagagtctttgaatttcttccttgaaagaacatttctcatgctgttttttatttaaaattgaggatcacaatcttgtttttctaaagaagggtagttgaaatggtttcaagtggaatgaccaccttgaaatcattctttaaaggtttctaaatcactttcttggcatggctagccactttcttgcaatgaaatagtcatgaatcatctattatcagaatgccattataagtgtgcgaagtctttgatagccaagcaaaccatcgaaagtttagatcgcctgccttcccttgaaccaatggccaaacaactgcactccctcctttcttcttgcttgctttctgtcactgtatccatagttctactccatataccaactcgagtacattcagtaacattgaaatcag

SEQ ID NO: 53289 - DNA, 917 bp, Populus trichocarpa
  Intron number 2 from transcript POPTR_0017s01450.1 (locus POPTR_0017s01450) derived from phytozome v7.0 (chr-ID scaf fold_17; pos 1007886 to 1008802)
acttagtgttaaacggtaatcctgtgcttagcttggcatcttttgtgaccacatgaatggaacctgaaagtgataaactcgtcgcggcttctgttaacaagacaatgttgacatggatgaatatcctgtcaccactgaattacaggcaagagatttaattatttacacataattaagagtaagactccactttgttatgcaatgatatttatttttcttgatattcaattataatcttgtgttgcaatcataaattatctttacgcatggattgcacaaataattatttttaaaatggatgttgcatttagatcagcaacttgtttcagctatttggatctgtaatcttctaattctgaattattgtcatcttctatataaaaagaaatgaaattaaggcaatggacctcaccttttttattcctatacaagcagaatagatgtgttaacatgatagcacttctgcaaatgagctagtagctcggctggcaatagtcatagcacttctggtgagaatatttctggttcaaattctactcatccacatgtaaatatgtgatagactaaggatatcgagttggcgagttctccctcaatgtttggcttttaggagtggctgccacccgtggatcgtatccacaagtgtgtccatgacacacacacacacacacacataagaaaaaagaaaaagaacaaaaaaaaaaaaaaacatgatagcacttctctttaatccccctattggagagtcagagactgctgttggagtagggactgtaggatctttctgaggcaataatgttggttggtttagaattcaaaaggaaatggaaaacaggagaaaagagggaaatccatatgatcaacccaacattgttactggagtcccattggtagctttttctctgaaggacaggagc

SEQ ID NO: 53290 - DNA, 541 bp, Populus trichocarpa
  Intron number 2 from transcript POPTR_0005s14560.1 (locus POPTR_0005s14560) derived from phytozome v7.0 (chr-ID scaf fold_5; pos 11604501 to 11605041)
tcagctgctgaggtggttcaagactctgctgacaggttagattccatcatttatttccattttcctttggtttctatttaaagttaggaactttggcttgatttttgaatgtgcttgattagagggctaacgaaaagatttcatttttattgattattaagctgtttttgaagatttagtttctgggttctttgtaaactttatctttgatggattggatttcttttagttgtgtttttttagccttacttctattgttagtacatcatgttatgtaagattaggtttggcctatccttttattgctagttcaaagcacatagcacattgtggtaatattaccgatgtctagaaaaatttaaaataaccattttgctagcatttcgttgattattaaacttaattgtggtactgcctgtgttaggctctcgttcggggttgaattattttgttctaacgtgttaacgtgggaagatgcatatgtagggtagattttaatgttgctttgaacttaagattgctgttgctgttaatgtttagg

SEQ ID NO: 53291 - DNA, 963 bp, Populus trichocarpa
  Intron number 3 from transcript POPTR_0005s19030.1 (locus POPTR_0005s19030) derived from phytozome v7.0 (chr-ID scaf fold_5; pos 17620428 to 17621390)
gagagagtggtgagcttttttcttgtgaatctttccttctggatgtcatattagttatatttatggaaccctgcagaacatgctatatcagtttttggttatttggtttctctgtgtgtacctgcagatattaccctgtatgttttagattgctttccatgatattgtgaaactaaatcgtcgttacttctaagaataacagttgggtttagagtacacagttatccgtcaaggtagttctagcacgtcgctgtggcgtttatgctgctcttatttgttcactttcagtcatttaattgcatccgcaaggtgactcttcttagaagcaaggttttcaagactgttcaattggagtaccactccttatgcagtttgaagtcagaaatctataatgctagtttagatgcataatagcttgaataagcttgttcttagctggaaatccaggtacgaattcttagcaagttgggctacttctggctaaaccacttttttttctttttggtggattatcttatagttgcatagttcaggaaaaatgttctgtcttttcctgctttgcattgcccagttgatctgtgtctttcaaaactttgtttttatgcctcaagattggactcagatgatagaaactgaaaggtggtctttgtatatggcctagcatggttctctttaccagcaaaacttctagatcttctagacctaagaaatcttgtcatcctattactctctctctctctttctgttgggtccatttcaattttgtttataaatcatgtaggttgaatttctttatacgcgccatatcacagtgataagcctagttctttctctgaagctgtcaaatatcaattatcttgctctgattttgaggtgtctagcaggctcttttccttgattgtatttgcatgcaattatgatgtgctaatgttgtatttttgtttgcaggagcgtataaggcgt

SEQ ID NO: 53292 - DNA, 960 bp, Populus trichocarpa
  Intron number 1 from transcript POPTR_0005s09110.1 (locus POPTR_0005s09110) derived from phytozome v7.0 (chr-ID scaf fold_5; pos 6380411 to 6381370 reverse strand)
cttaaaggtcctgaatttgcagaattgtaaaggtaaaatcacttatcttgtttatgtttttgtttctttaaatttggatgcaaaaagggtttgtttatttcgtttccatggagttttgaggattcattttgtggagagactttggtgctttagtgggtttttgtgtgttaatgtggctatgatgaaaagagttttttttttttttaattggattgagctgcatgattttgagggtaaaggtaactgttttggtgatcttcatggtatatttagagggtttaggagtttctttttttttttttaatatttgatggaaaacatgatcatcggagaaacttcgaagttattcttttgtgtctttaacatggtgatttgattgaaaataggttaagcttctttgaaaacgattagattcctataataggcttactgataaagactcaatattgctgaattcgaaacatggttgtcttttctttttctcttgatggctctgcattttcatgtatttgtgattgatgtaacaattggagattgatttacaatattgagaagctgaaaagccagtaaattttctgtttgctgagtcttctctattttctgtttgtgaaatcataaaaaaaaaatgattaatactattaaagaggtatttttaggttttgtacttactcatatggtgttattttggtcctttgctgaaccttcaccatgatgcaatactaatattgccatggattcccttgcaaataagcatgacaagatgctctcttttcattccaactcgctttgattgaacaaggatgagagtttttgtccataaacatcagcattgcatggtgaaatatttggtgcattttttaaatcgtcttcatttttatacaatttttgttttgaacacgctcactctgcatactggcttagctgttttagcaatgtgatacaggtatctcagataaggga

SEQ ID NO: 53293 - DNA, 503 bp, Populus trichocarpa
  Intron number 2 from transcript POPTR_0005s03110.1 (locus POPTR_0005s03110) derived from phytozome v7.0 (chr-ID scaf fold_5; pos 2052494 to 2052996 reverse strand)
attgagagttccaaccaaccgcctaaaaagttagtttcctcttttattgctactgtattgatctgataatcaaaatatagtcatttatgtcaaattttttggttgcaaaaattttgtattaacaatattctgtagcactgatttatatcattttgctacttgatgagggaaattaactattggttagtacaaacatcatgcgtgtggctatttgacaagaaaagtggatcgtggaagttctgtattagcccaattttcatttgagcactcgatagctaatgataataaataccttgctcctctctagtgtagataagcatgacatctaattgggtttagggtttaaaagattatgtaaagactcctatttggaagcccactggtatgaaagatttatagtctaacgttaagaaattgagttacatgaatgaagtttgatgaaattttagttttcttacatgcatgaaggttggagataaaacaaactactgaaggaacacaag

SEQ ID NO: 53294 - DNA, 643 bp, Populus trichocarpa
  Intron number 1 from transcript POPTR_0017s11370.2 (locus POPTR_0017s11370) derived from phytozome v7.0 (chr-ID scaf fold_17; pos 11129487 to 11130129)
tgatagctctttaagtggcatctcaactcattgtaaaagtctctctctgtttctctgagtgtttttctttaatttttgatcatctgatatttttatgcagaaccatatgtctataggcttgtggggatattgtttctgatatattttttaatgttttggtgatttgtttcatggcaaatcaagtaaacagaaggcacaagttcttgttaggacttctgaatatgttgttagatttactggtttcagtgattgagagtataagaagttgaaaaccgttcctgaattttgatccatttaggtagtactgttaattaaagtccccgttcagattgatggacccttttgaagattgtcatctcatgataattttggagtggcatgttgtttcttaacaaacaggtctatcatgatcatttgctatattatccatgcattgataaacatgatagcaactagtttgtctactacttcttcattgaacttgattataattcagtaatttgtcttttttccaattagttctcttgagaaatgttgttaataagttgctacatataaatattaagagacagatgctactggatttgaatattagcaagtaatttcccgttgctttggttttcagcgcaaagtaaatctacaa

SEQ ID NO: 53295 - DNA, 735 bp, Populus trichocarpa
  Intron number 1 from transcript POPTR_0005s10500.1 (locus POPTR_0005s10500) derived from phytozome v7.0 (chr-ID scaf fold_5; pos 7549168 to 7549902)
tcatctcttctcttacaataaattgaagtgatcaggtacttaaccattctaatcaagcacatcccatctgataacaatcaaagctttttgtgtttttgtaattgaatcaatgcacatggaattgtactctattagattttgcataattcaattgaatcaagcttctaacattgtgaattacctcttatcttgctttgattctctgttttttttatcatggttagtatacagattgaagaattcatgtgttctcattaatggattcttgaaagcttgtgactttcttgtgcatggtgtgtgatttttaatcccttttgtgttatagtagcttgctgatcggctgtgtttggttgctgagaaagatgagaattcgaaaaatattttgagcttttgtgctctatggattgctgattagctatattgttgtctaagattgttgcattaggttcggttgaagtagataacctttaatttttgcgtgtgttgtttaaagatgaattgaattaatggaaaacattttggtggattcgttttatagtttcatttctgtttagaaaaaaatggtggattgatgaattgtgatctggtttcaaaagggtttgagctgattttgattttgaggatgatgtgctttgatttttcacaatttgtttcatctagggtttaggttaatgtggttgatgcttgataatgaatctataatctggttttatatttttttttcttcaagcagga

SEQ ID NO: 53296 - DNA, 400 bp, Populus trichocarpa
  Intron number 1 from transcript POPTR_0006s10710.1 (locus POPTR_0006s10710) derived from phytozome v7.0 (chr-ID scaf fold_6; pos 8048034 to 8048433)
attgatatttgtgactccgttaattctcatcactggtaattcctttttttttcttttttaactcttttatgtttttattcagaattttacgttttgataacaggtgggtttttttatcctgtgcatttgtatacgtatgtttatacgtatacgtacgtgttaaagatcctgcttcttaattctcttaggtgttgtaactgaaattgaagcttacttctttgttaactgttaatcagtatgctttgtttttccggaaagaattttaattttataagaaataatttataagaagaaatggtgtttttttttttcaagtgggttttttttagacactatgttgtgttgtttggtgagttatttatttatttatttatttatatatatatcaggcaagccaaag

SEQ ID NO: 53297 - DNA, 295 bp, Populus trichocarpa
  Intron number 2 from transcript POPTR_0006s10710.1 (locus POPTR_0006s10710) derived from phytozome v7.0 (chr-ID scaf fold_6; pos 8048467 to 8048761)
acaagagccctaaagtccaactactcgctttgacggtagccttttgttttcttgaattcactaatttttctatgtttttttttaagcttttatttcgattatggttttgtcgaattcaaatgtgtgttttggaatgtgaaattcttttgatttttgcaccaaaatatggatttgaattatctatttggcattcgaggaagctctgctgtttataaagttttctttcttcttttttttttggttttttaggtttgcttaattgagtgcaaaattttctctgtagcttttggagaca

SEQ ID NO: 53298 - DNA, 740 bp, Populus trichocarpa
  Intron number 3 from transcript POPTR_0006s10710.1 (locus POPTR_0006s10710) derived from phytozome v7.0 (chr-ID scaf fold_6; pos 8048828 to 8049567)
gtgaaaatcataaagaagaaggtaactccttgaattcttgctagaagtaattatccacaattttaccatctctgtagagattttttttcttttttaatatgtgttagaaatcagtatatatgattcccttctttagaatcctttgtaattgtaattctgtagccattctgttttcaagatgttaaattctgaactccagcaaccaaaaggataaatgtcagcagaatgtctaatagtcaaatggagttttgcatatacattaaagaggtggaaccatttgtgttttgcaattgatacattgttatgctgtgtgttttatggaaattccagcaatggttgtttatctcaaaccttttaactaggccagccaaaatatttcaggagaaatcataatcgggtttatttaagagtagtataagcaaaagtttcggcccatcttaactaggataacagataaattgttttgatatgattgccacttattggtgcctttgccataaaaaccacagtgctcaatgagctatttggttttgatgtcaaaaattccatgttatgttgtccgaggcctccattgatctcaaataagattgaacgtggttgatttttcatgagaaagtcgaaaccttgatgtttgtatttttctcatctaatcactcttcatcaaaaaccaaaaaggggctacgctggggggagcctcaatcttaacttaacacatattttaaatggttgtgcagacagat

SEQ ID NO: 53299 - DNA, 625 bp, Populus trichocarpa
  Intron number 3 from transcript POPTR_0005s12710.1 (locus POPTR_0005s12710) derived from phytozome v7.0 (chr-ID scaf fold_5; pos 9468895 to 9469519)
actaccaccaccagtggccccagatttaggtcccggtctgagtcaggctccactagggctagctcagtcaactgggatgacaccatctccagtcttggcaattcagagtccaggtaaaaaaatttggagctaaatttttaaactttcaaatattctgtaacttttgtcggttttggagttttgtcttaatcaaacaagaaaatccttgtgttgtttgttgtcatctctctttgtcgttctttagatcttggagtttagtagttttttgtcttctactgatgtttgttgttatgttaagttaaatggcactgaatagatttgtagcgctaagaaaggaagaaaaataaggtattgaaaataattttgagattcagcttgtgcaatctctggcaaagaactcaagtgattcaaaagctaaaaaggaaagagatttgggtttagtttagataaagggaacaattattgactctttgccttttcttctaaagttcttcataaagaaaggctttactttccatgtttgtatgtaagtgccccccatttaatgtcttctttatttcctttaatcttttcaatttgacatcatacagagttaccagataatcctacacaaattatagaagaa

SEQ ID NO: 53300 - DNA, 664 bp, Populus trichocarpa
  Intron number 1 from transcript POPTR_0005s05780.1 (locus POPTR_0005s05780) derived from phytozome v7.0 (chr-ID scaf fold_5; pos 3780152 to 3780815)
tcaatctggctaaggttccactttttccatactgggtctttcttcttctttttcttctttttttgtaatgatgttttgggtagtagaaattttgatatttccttgtgtcatttgatagtttctatgtttacaagttcgtacttttttgaaagttttttttataggatctttggaagttaattagtttttaattgctatatatagagttgtttttttcttttcttgcaggaattattgctattgctctctggtcacagatctctttaattatatgaaagaagggtgttacattctctttaagtagagctaaaactttcccttctttggtaggttaggattaattttgtggtcattatgtatctggtacatctctttgaaatgggatagtagacatccattaaatactagattttttctatgaattaaaatgatatttatgtgtcattatttcccttttcttctttgatgtggaattaatgtacattgatcttacaagaaaatcgtgcctacaatgtgattagaaggaaattttaaggtttgctaatgatgtgatcattataacgatgagactcgtatatgtgcttctgcagattgcacagcacctggatctgtgtccatgatttttttatcttgatcatgctttgcccttttctttcagagatat

SEQ ID NO: 53301 - DNA, 780 bp, Populus trichocarpa
  Intron number 2 from transcript POPTR_0005s26780.2 (locus POPTR_0005s26780) derived from phytozome v7.0 (chr-ID scaf fold_5; pos 24658814 to 24659593)
ctactcggccggcaattgaagtgcgacttgttcaggtaggaagacgaagattcggctatggattccttactgtcttttaattattttcttttggcttgtgtgatactctttgatattcttctattattaattggtagggtagacgtgttttatttcataaaagttgcctaaaaaataatgattatccttttttgcacgtttgttgctgctctattttgattttatgttccaagtcttaaaattacagtaaaacggtaaacggaaaagttttgaataattttctgaataatcaagtctcaaatattaaataatttgctacgagaaataatatagaaattgtttaaatagtagctaaaatcaacctaaataatgaaacctaaaccaaataaaattctgaaatctaattaaaaaagaatttgaaaataacatcttctaatttgagatgaataaatttctgaataatctgctatgaaaaataatagacaaaccatttagatagtggttaaaaccgatttagataataaaacttaaaccaaacaaaattcaagaaagtaatatgaaaagatctaggaaaataaagaaaattctaaacatttttcatgcttaattcgagcatgataccgacctcatctaattactactagctaaaccactgtagaactaggtctgtagaatgcgttgataaaatttcagcatgatcaataataggattaaaaattatgccctgtttttttcataatgctagctcaacgcgtccagactaattcttggacttttgat

SEQ ID NO: 53302 - DNA, 1043 bp, Populus trichocarpa
  Intron number 1 from transcript POPTR_0017s01710.2 (locus POPTR_0017s01710) derived from phytozome v7.0 (chr-ID scaf fold_17; pos 1233796 to 1234838 reverse strand)
aaaagaaaaggattatttataaaacgaaaaaaaaggtattattttgattaatttatacgatttgcttgttttattactggagattaatttctctggttttggtcttgctcgtgacggatttgagtaaagaggagattagatcaggaggtgcggaaggcagatctactgtatagagtgcaagattgcgggaaagaagggttcttaaattagggtttgttttgttgttgcagtgatttatggagtgatatgagcaagaattgatgttttgtatgtcctggaatgattgcgtaaactcgctggattttttgaatctgctggcgaaagttgatattttttgctggattttggaatctgccggcgaaagtgagattttttgttgttgtgatgtgtgttttctagagctactgatgatgggctcttctgtccgtgttgatttcttatctcttgttttctatgttattggatctgtccaatctccttgtttttcgcaaatcaatcaatcccagtgttatccagctttggaaggagcgaaggatatatgggtttgttcttgtagggtaggtatttgtctaaatctgacaaacaacaggatctgaagaagtgagcactgttgtttttggttgagattagaagatgggttcttcattttttggatgctatttggaccaggcacaagttgattagtgtttctagcaagtagatttactgtcttgttttgttgtcacatgttttagatacattaaggatgaaatactgctgtctcatgtcctgttatgtgtgacttcttctacttgattatcttattacatacaaagaagacctgcagcaaagctatatagaatctgagctgagggagtctttgcaatccttcaaaactgtttaacacgatctgcctgaaggtctcgttatcagctttgaactacatggcagtgtgttgaaatagctgttctgttcttgctgaaatccgtattgatttgagttgctgatgttgttttccttgttttgcaggtaagaagggcagaaacatattagaggtttagatc

SEQ ID NO: 53303 - DNA, 849 bp, Populus trichocarpa
  Intron number 1 from transcript POPTR_0017s14110.1 (locus POPTR_0017s14110) derived from phytozome v7.0 (chr-ID scaf fold_17; pos 14286490 to 14287338 reverse strand)
actcgcctcaccatcactcttctccgatacctcgggtaacatttcgtctctttgagtatcatttagcagtactagcagtttttttcttgcttgcttatgtatgcatttatctatacgtgtatttgttactgtataggaatattttgcttgaatttgtatttatttatgtaaattagagtattcttattgaaggttaattctccttgtttgatgatataaaaaaggaaaagatccatattaaaaggaaaaggaatttttttttcctgatgttcatttaaacagaaataaaagaaaaaaaactaatttttttcttgcttgcttatgtatgcatttatggtatgatcattttatggtaatttgtgttgagatcaatttggagagctctatttgtgttattcatggtggagccatagtggcctggttctcctggcttctttttttatttagctactgctttgtttttagctcatggtgatgtgtgaaagggtggtgattcctttctaacaactgctgtggatagctagcgtgagtttgttttgagcgagaaacatgaaatcttggaaaactagggcatgggaatctgatgattttcttgtttctatagccaccctttctgcctccatctggttaacttgcttggacagatttttgttgtcgcatgtgctggatcttatcttggtcatgattggtttggttaaaattgttagtatttcaagaagaggagatggggaataaagaagatttatttatttattttatagttgcttaatttcatttgccttatgtcatggtttaatcatttgttttcattcagggtaggctaccggtggatcacgagattagcagcac

SEQ ID NO: 53304 - DNA, 787 bp, Populus trichocarpa
  Intron number 1 from transcript POPTR_0005s06680.2 (locus POPTR_0005s06680) derived from phytozome v7.0 (chr-ID scaf fold_5; pos 4481656 to 4482442)
ccccccccctctcctctcacctctgttgataacaggtgactctctctttctaaaagtctttttttttatctttctttgtatgtgctctcgtggtttattttgtttgactttaatttacagcctttgatgttttttcttttttcttttcatgcaaagttttggattttgatatgtttttgttgatgggttttgggtttttggtgctttgttggcattcgtttggtggttaagtgagaagcagcaaggtgtttaagttttagcttaatctgtatggttttttatgtctttgataagttgatagatggaaagttcttcctttagttggataggcgatgtggagatatagatttcgggttagtcttgtgggaaaaatcgggtttataattaagaagaagagagaaatatgattatgatggaaattatgtgtgtagtgctcttggcaattctgagttgaatctaatctatttgtttgtgataattggtttggtgaaattagctatataattagtgttagtttggtgaactttctagttttgaatttagaatttggtcacactcccaccactgagttgctgaaatggtggtacatgaaacaaattatgttgtactaacttgagttgatgcaaaaccatctggagtatgcaattctttgcaagttgttctgttctttttaaaggacctgttcttgcagcttcagaatgctgatgtctctgtgacataactaaaattaacctcatctttgagggtttttctttttttggtaatataggtaaagaagttgttaagc

SEQ ID NO: 53305 - DNA, 1012 bp, Populus trichocarpa
  Intron number 2 from transcript POPTR_0005s06680.2 (locus POPTR_0005s06680) derived from phytozome v7.0 (chr-ID scaf fold_5; pos 4482615 to 4483626)
cttatatagctgataatttcaactcgttggatcaggtatggttcttggttcatttattgaattgtagaagacaacggatatcattaaatattgttataagattatacgctacacaacaaaatatgactggaactttgatagtgcatgatagttcgtgatcaaaacatctgcttctaaaggtgttataagcaatgattttcatttaactacgaaaagtgtgtgaaatttgtatattgatttcatatattgctttggtggataagggaatataaacttctggggatggttttaacagcaagccaagtatttctttgtttatgagcgttattgtccaaatagaacatgaatgaagcctaatttcagcacctagctcagcacataacaatgagtggcgacatcagcctgggtactctcttattgagagtattgcacgaaatataggactttagctgaccgatgtttggcaattcatatcaacacaagcaagatgaccattgaccactggacaatctcatcatcaatctgctaaagctgacaggttttgaaatatccagtcttgcagccattgggacgtattttactaagaactttccacagtcgaatagttataagttattgaagtctttaatccaaagcagattatatgacaagctgatcattgctactgtacagtacatgacaatgcagctatctttttgtacagtaaacatactcttcactggtttataaggagcttgaagaaaaagttatataaataacaaatcagtaaaaaatcaaggatatcagatagctgaaagatgttatgataattggtgggaaaattgtcacacaaacatcttcgtagttgcacattgctaagtataaatcttaagaaaaagggttaaaaaaatagagaccgagtagcataccgctcagcttatttattacctgtctcaatggaaaaaaaattaagcaaaacaagttttgtgtattctcaggttatttcttccctgagagaagctggtcttgaatc

SEQ ID NO: 53306 - DNA, 549 bp, Populus trichocarpa
  Intron number 1 from transcript POPTR_0017s08610.1 (locus POPTR_0017s08610) derived from phytozome v7.0 (chr-ID scaf fold_17; pos 7232980 to 7233528)
ttaacgactctgtgaccaagagcaaggtactgttttttctgccttttagatctgggtttttgttgcttagatctgttatgtcttttgtgttttatgtttcagatctcatatgattcatattggtgttttcaaaatgataattgagttttagatctgatatttacttgatttttttagtttgattcaattgtggtgtggatttttctaaggaaattttttagaggtttgtggcgaaagaatcctttgaagatctaatattttgtcttcttgaagaagcaaaaatgacagttttggaatgtttgtgtgattctaactccattggaactaaaggcactgttaatcagtcgatttgactattagtgctcagctgtttgtgtcatgcagtatgaagtttctagatgaatattatgagttcattttatttttttgtaagaatcagctgttgatggcatgattgcagaattggttaatcgggctttccatgatttcatttcctgttttggtcaaacagtttctcataatctttgtggatgcagtttgataacttgt

SEQ ID NO: 53307 - DNA, 321 bp, Populus trichocarpa
  Intron number 1 from transcript POPTR_0005s25640.1 (locus POPTR_0005s25640) derived from phytozome v7.0 (chr-ID scaf fold_5; pos 23862537 to 23862857)
ccatgtaatcgaacaattcatcaactcattcactcaaagaggtcaccattcctcctgccagggtggtgctatcaaacccctcgtgataagagtccacaagcagattaatgatcaaccccatgagaattgagaagtagctgaagtgcaaaaaagtctcctcagttaataaccctaattctttaaaaagggcatgcacctttttgggaagagagaatgtagcaaaagaaaaagaaaccaaagcaaagcaattatatatggcttcgtttctgtcctccactctttccagcccctctctccttgcacacacgctcctcctcctcc

SEQ ID NO: 53308 - DNA, 956 bp, Populus trichocarpa
  Intron number 2 from transcript POPTR_0005s04720.1 (locus POPTR_0005s04720) derived from phytozome v7.0 (chr-ID scaf fold_5; pos 3166497 to 3167452 reverse strand)
gaggcccttctaaagcattaattgctggagttctggtaagcactggtctatatatctatcttcttctattggattaaaaaaatagtcttagttcagtttgaaattacagtgcttagttatctctctttctcaccagcctcaaacccacatacaagggctttagaccacaacactatacccaaaagttacagtagtctccagcattttctggattctgatcaatgcggctacattttgtgctctataattttgcatttttagatccattatagcagtgtagatgttgtcaactggaatatgtcatgaattgatatatctgcattgtttatgtatgctaacattgtaagcttgggtccaccaccgacaagccaccacttagagagtcatgggtctatttgaattgaactttcactaaatgatcatgctgtccctattttaaaattaactgtcttattcaaaacatcaattactctataataaccacatctggagaatttctgggacaataatacttgtaatccatcacagaactgaaatagaacactgtaggttttttttttttttgaaaatgactatccgggattgaaattataatttttcttcttttgacaattttgcaccctttattcttttctcccaggaacatcctactcatgaacacaatatccagtacaattgtaaatattagttatggtaaagagaaggttaaggttgatatgcagcaagaatgagagaaataaacaaaatacaggacaagctattcatggcttaaagaaaatgtttttggatcttctttgtttaaattgacttatagccttcttcatatttgcatcttcatagcacatcattctctaatatactcttttgttagtttctgtaacttatccattgtttacctcaaaagttaaacattttacagtccagacaatatgtttttatgctttcttctgctcagg

SEQ ID NO: 53309 - DNA, 881 bp, Populus trichocarpa
  Intron number 2 from transcript POPTR_0005s06330.1 (locus POPTR_0005s06330) derived from phytozome v7.0 (chr-ID scaf fold_5; pos 4196295 to 4197175)
ataataatcagagtagtagtctgtttgatggttacaggttagtgtttttatagaattatgggttcggtttttatattttggtgggatttggaattctgggttaaattctgatttgtgaaatggagttgtttttggatatgaagaatagacttgagctatttttaggggtttttgtttgagttccgaaaaaggggtatttttaaatcttttctctatgtttttgtgtcagagtatggtttgtcgtctgaggttgctgtctcttctgttttctcagcttttttgatttctgaacttccaaataccttgtccttaaatcccctgctctctctctttaccgagttttcctgtcagagtttgattgctttggatgggagctttctctttccaatcaaatattactgatttggatttttcttacctgtttggacagtcttatgatttattggacttgtccttaaccatttcagttttcattcgggcataagatcaggggtgaacgtttttgttaaggttttaatcttaaaatgatgtgtgaattaaagatgtttactttattgtaaaagtatcagctttgttcttttgctttaattgttagttttaagcaatggattttctgctccatttgcaatatctagagacggggtttgttgtatgtcacaatcagcttgctgatttgaaaatctaattggctaagctttacaaatctgtaattctgtatgtttctcaagtgcatctgccaactgcaacccaggttatctgtagatcataaaggacacggtgggggttcaaggagtcctggtccaggttcgaggagtcctgttccaggttcgaggagtcctgttccaggttcgagaagtcctgctccaggctcgagagcagca

SEQ ID NO: 53310 - DNA, 586 bp, Populus trichocarpa
  Intron number 2 from transcript POPTR_0006s07760.1 (locus POPTR_0006s07760) derived from phytozome v7.0 (chr-ID scaf fold_6; pos 5676081 to 5676666)
cttcagggggttctgacatatacaaaattgtcaaggtttgccctcttatttgtgcattctttcttgattgtagtatcatgaggtgccttcatttattgcttcattgagcattgaatgggtgtttattattctttctctctccaatgatcgcttctctatcaccatatgtagtttttgagtttccatttttctgatgccatcaataaactgaacttttcttcataacaattgactgagaagaaactgttttgtgaaataaatgaatattcttagatggctcctcagactcttcaaatacatttgtaataagcaacttctcatttttttttcctattctcaattatctcattaaatttgctacagacaacacgctctgttaaaagaaaagaagtttactgtttgttgacgtagtactggtgcgtcttattatatgctccaagttagtgatttttaatttttaatgtgagtgctattatctgttcgtgcattttctggatttttaagtggggaattgtagtttgccctgttcatcttgtacagcttgttgataaaactgctcaatcattgctttcacatgtaatttcag

SEQ ID NO: 53311 - DNA, 1029 bp, Populus trichocarpa
  Intron number 1 from transcript POPTR_0005s03870.1 (locus POPTR_0005s03870) derived from phytozome v7.0 (chr-ID scaf fold_5; pos 2569486 to 2570514)
aaggctgaggccagttcatcttccatcaaaacaaggtaacttaaactcaaaaacccattttttcttgttttcatttcattagtatttgcatatttgctgatcaatgtaacgatttaaactttgcattgacagtgagcaaaacacagaaacccagttgctgttatcatcatctgcatccatatcaatctgccttttgttttctgaagccaaactttgctgtctaattagtaattgaattcaatgtgaaaggatacgtggggataaaattagattattgctcatggtttcaaattgtgggttttgctagatatatagtgtgttttgtcaattagattgaaattccatttggtggattttagtttgttgtaatataaaacaacatattaaactgtaaagtaggaaactttaacatagaaaaaagcataaatttgcaatttttaaggaagtagtagtttgggttctaacttgtaatccggcagcattgttaattaaatgtgatttttattctgcaatgaagttgttttgtgttgttctgtcatatagaacaatgtgttttgtgtggagtgtgtatttgaacttcgaagttactgtttggtgatttttatgagaatggacttctctgttagtgatggttggtgattaagatactgttttgtaaagtgtggtgcagcattatctgaattttatgcttaataatatggtacaaagtttgtttaggaattttcttgtcatatatttagtttcatttgtttcctttacatagtttgaataatctatttatttattatttgatgatcttataatattatttttttatgaagaatgaaataagatgtgagattacaacataatacaagtttaatgtttagataggaacacgaatgtgagtgtgcaggtaaaggaatgagaagatgaataaacaaacaccttatgttagaatcatactagttttgtaatatgtttttggtttgtttgtgatttttgtgttttgtagttggttaggattttgaagaatcagacgcaggtaaa

SEQ ID NO: 53312 - DNA, 778 bp, Populus trichocarpa
  Intron number 1 from transcript POPTR_0483s00210.1 (locus POPTR_0483s00210) derived from phytozome v7.0 (chr-ID scaf fold_483; pos 5710 to 6487)
ggttgggcgcggacgtgtcgaggcccaacctgaaggtgttaatattaaaatactattatttgtgttataaatattactatttctattatagttcagagcattaatataaaaaatattattatttgcggtacaaatatttttatttttattataattaaaagtaataatatttatttttattgtagttcaaagtattaatatcaaaaatattattatttgtggcacaaagattaaaaaatattataatttgcgttgtaaatattattatttttcttataatacaaaatattcatataaaaaatattattatttgtgtactaaatattattattatttttataattcaactcttcatatcaaagatattattatttgtgttctaatattattatttttataataattcaaagttttaatataaaaaatatattattatttatgttctaaatattattggaattaaaaatagtattatttgtgttatgaatattattatttatactataatcaaaagtattaatattaaaaatattatcttttgtgttataaatattattatttttataataatgaatattattaataaaataattactaaactagaaaaaacaattattgctaatattgaaaaacaaccatagatttgatttaaaaggtaaaattaattaattattattattattattattattattattattattattatcattaataaatttttaaaaactgttattaccattgaagaaaaactacgtggggacttgggttgctgcct

SEQ ID NO: 53313 - DNA, 943 bp, Populus trichocarpa
  Intron number 1 from transcript POPTR_0005s06380.1 (locus POPTR_0005s06380) derived from phytozome v7.0 (chr-ID scaf fold_5; pos 4238496 to 4239438)
ggtacaaggtgatccctccattttcccttcttctttggtttacttttgctgtttgttctgattgcgctctattggatatgaaatgggaattattttgttgatggttgttttaatttgtaaaaagagttagtttctttatatattcttatgtatttgacaatggtacttgaagtaatagtttttgcttttaagttacagtttggttgcctagaaacctatggaaaatgaaagatgttagaatctattgatgggtacacctatattggctctcaatgatctcgaattgaaaccagaagtgtcaacttggcttcttcttctttttccatgtatccttgatcctgttgtacagtagctgatcatgccgttcttttaagggttatgttgttaatgttgatagtgatacgtgcatgcagcagaaactcaaatgcttcaaagctttttgttgcgaggccttttccttacaaagtaggaataaaatgcagttttgaagttggtcacttgattttatttgttagccttgtatagactggtgcattttgcacaactgagacaattcatattctttagctctccctttttttgaggactagaaattacattttagctaaaggaatgggagggctagttggtctttgttatatttttttattccttctaaatgctcgagtagttgagcctgatagtataaagaactgaactttccacgctagaatttttcaaattctcaatagacaatgctaatatagttacttaatgattgttgttgagatgatatgtttcgttccctttttactatgcatatcatgtactattcattttgtaatctgtggtttccaacttttttttcattggatgaacctatggtttccaacttcggggaaatggaagtaatgttgtgttctatattgaaggtctatttctttggattctcccgattctcttt

SEQ ID NO: 53314 - DNA, 579 bp, Populus trichocarpa
  Intron number 1 from transcript POPTR_0005s16340.1 (locus POPTR_0005s16340) derived from phytozome v7.0 (chr-ID scaf fold_5; pos 13057782 to 13058360)
accaatcctcccattagatttcataatttactaaggtaatgtttggagtgcattggactgaacaatttatcctattgtctggtagacattgaacaagatagaacaacaaattgtaatgacaatgacagtaatacctctcttgtctaatgttttaagtgaagattataacacatattttaatccaaaaaattaatatatatttttttttaactatcaaagcatacataaacatgctgttgttttcaaccaaagatcccacatttcagcatttaattttttttaataagtagcatgaaagataaacaaaaacacaaacattcaacaattttcctttcttttcttgctgaactttctcagcaaccaaacaagaaaatcaaacttaaaccttggcttctactatgatcctaataatttgaagagcatcctgctgcccacgaagatgagcacacagcaactgatgttgaagccattgatgatgtctcagaatttgtcgttcacggtgatttgacaccatttcagattgatgatcatgaggagcatgagtttgctgatgattttgatgtttcagaagtaaggaaa

SEQ ID NO: 53315 - DNA, 965 bp, Populus trichocarpa
  Intron number 1 from transcript POPTR_0017s11560.1 (locus POPTR_0017s11560) derived from phytozome v7.0 (chr-ID scaf fold_17; pos 11302380 to 11303344)
tcccgataatatccaaaagctaaaggcagttttgggtatgtttctttgtgatattaattctctttcttcagtgccttgaatttgattctttagagttggaaaattgggtagcataataattgaggggttttagagtttggttttgataatactaatgcctgttttatctcaattcttattgttgtgatgttgttgaacttggcatgattttactttctccagtacattgtatgcttggttatcttcgttaccctcttcctttaatcagatttcgtttaattaatattttcttactgtctgagaaaggcccattggtatctgctttttattattattatttttttgttagtttttgtacctatggcaatttttctatgattttttaattgaaataaaaaaatactgatgaaatgtacgatgtttctcagcaagaatgtagatgcgatttcttttttgtcttttcaatattttttatggtcttgaccctcaaggccttttagttactagatttataatccttgggggaatgagaagccttacaaagatgaatgaaggcttgagccagcatgaatagcacgactacgcaacctcttctcaatttcctctagttcgctatttcaacttccattactgctattcccttcatggacgtgctttcatttcttctgtggttcagcctttcttattttaatagcattcggttaatgcacttcgcatgattgctcacacacatatggatacatatgcaggcacacaagtaatatttgacattgatgtatacggtctacttcaaggttttgtttttttgatgcatttcaataaaatgaggatagtgataggaatgaaacacgcaagtataaaactgaagaagtgccacctcttcgttgctgctgatgaaaaagtactattagctatattttgtttttgggtttgatattaatttgtccttgattctttttatttag

SEQ ID NO: 53316 - DNA, 510 bp, Populus trichocarpa
  Intron number 1 from transcript POPTR_0005s01530.1 (locus POPTR_0005s01530) derived from phytozome v7.0 (chr-ID scaf fold_5; pos 1001021 to 1001530)
tagattcttctccaaatcctcctctccttacctcggtgacattttcgtttgagttctttctttttgtgtaatcgttaactaagttcatgttcttcaattaatttcttaatctattttagttgtttggatcgaaaatgggaatagattggtgggttttgctttaattttcatgtctcccttttgttgctcataaagttttcattttttatggcgtgcatgtgtaaaatgaagaaaatttgattttcatgtaaatagtaactggaaaaggatatttctttttgtatgattttctgtaagagattaaaatggatttgagttttgaaagattgaatctttggtggatgcattgtttttcattgttggaacaatgatgttcttacagattttctgttgtaagtttctttttctttgattttaatctttgcaaataataagaggctgagcttgaagaatgttgttacttttttgttatttttgttgcagtgaaagttggaattccagagtttctaa

SEQ ID NO: 53317 - DNA, 605 bp, Populus trichocarpa
  Intron number 1 from transcript POPTR_0005s00295.1 (locus POPTR_0005s00295) derived from phytozome v7.0 (chr-ID scaf fold_5; pos 54036 to 54640)
caacccccactctttataacatacttctactttctgattccacctacctcatcattttatgttcatccatcttgtcacccaacaccaccaccactactgttactactactgttttcatcttctttacctgctagcttctaaaagactgcagattgatcatatgggtccacctcttttgtgacactcttttaaaagctttgctctttgatttcattcactggcaattctgctgtgccttaagaatatatattaatctcctttcttattcttgagttttccctcaaaggtccagagtatactctgcttgccatcaacttgaacaaattactattgctgaactcggtcttgtctgcttcttgctgctatgttaactgtttacctcttggatggagaattggagttggaagcagctctatgatataatattaaggtactttctagagtacacacacacacacacacacacacacacacacacacacatatatatatatatatatagagagagagagagagagacaaaactatatattgggaatcttacacaattcaatatcaattgtttctcaggatacaaatttcaggcacaattattggtgaaggct

SEQ ID NO: 53318 - DNA, 610 bp, Populus trichocarpa
  Intron number 2 from transcript POPTR_0005s02540.1 (locus POPTR_0005s02540) derived from phytozome v7.0 (chr-ID scaf fold_5; pos 1629251 to 1629860 reverse strand)
tcatttgccttgaattacctgatcgaagcggagaagtaagtctctccattttattttattttgctttattgcagtgtaatgtgtgtgttttaattaaattatagtgtattagagatttttgttcctttttaggctgttaattttgttgattgaattttatgatttttaattaattacttgatttgccttcaattacctaatagatgaagaaatagaagctttgtatttatttttctttccttattttgctatcactttgattttgtgctaatttcttttttatttatcatagatttgctaggttttaacttgctgattttgagcttaatatgtaattagaggtttcatttagcttacatttggatattttgttgctaattactgttttaaaatttggagggctcattagctatattacatgttacgttgtgtggcagagacttgtttatctatttggaggattaaactttgaaattatttggttttagactgtattttagggtttaattgtgattctagatgtgttttatttgtattcagttagttatggtagttattttctgtctcatgttttttaaattgtgtttacaggtgttggttacatcatata

SEQ ID NO: 53319 - DNA, 1053 bp, Populus trichocarpa
  Intron number 1 from transcript POPTR_0005s12900.1 (locus POPTR_0005s12900) derived from phytozome v7.0 (chr-ID scaf fold_5; pos 9725965 to 9727017)
tccttggaaatcttgttttgctaaaaccagagcaggtaaaaatattaactttttattgtttcgttagaattttaattaattcataatgtttggttttttggttaataaatttgttttacagatttaaaaatggcaatattggtcctgtgaaggttaaattgagtacagtttaaccgataattaacagataaatacaatttttgttttggtattttctttaatttgtggaaagctgaaaactgatatgttctttatgcatattttgtgttttctttcggcaggaaaatgaaacttttgttgttacactccagatctaagggccattcagtttcttcagtgacaagatttgattcacacttctggtgcatttagatattcccaaatgaaaaaaaaaaaaaggattatctaattaaaaaaactaaaatcagaaattgggagtgaaaaaaaataaaaattgaagtgggtatttttgtttttttagtggggaatataaaaaaaaatagaagtaaaccagtgagagagattaattttttaaatagttttgatgtctcaatattaaaaatgaatttaaaaagtaaaataaatattattttaatatatttttaattaaaaaatactttaaaaaacttcaaataccctcttacttggttgttgatggatggcttgagttaaatttagaagtctaaaaatggtggtggcggtggttatggaggtggttgtggaggtggaggaattatgatttttatacttgatgatcagagcttataattcataataatctggacatgaaccttagaatcagtgacatggtttaacaagagacccatcaacatgaatttacctggaaaatttctttcgctgaaagataaaagatatgtcctgacaatggagttctcttttggtttttaataatagaaattgtagttattgagttggtgtgacagaaaagtaaaggaaagaaaaatgctggaggataagaatttctgttatttatttatttattttcctattaattcttttttgatcagctgattttgaaaaagcctagcaagc

SEQ ID NO: 53320 - DNA, 915 bp, Populus trichocarpa
  Intron number 2 from transcript POPTR_0005s17550.1 (locus POPTR_0005s17550) derived from phytozome v7.0 (chr-ID scaf fold_5; pos 15125353 to 15126267 reverse strand)
ctggcctccgtagccaagttaggcaattaagaaacgtaagctctttttcgttgagattgttgagcttgcttaattatggaaaagcagttcctctgtaaaaggtggatatgttgcaattttatttgtttggggctgttaatggggtaatttattagggattaggttttctaatacttaattgctaaaataagcctgattgtgttgcaaaattgggcagttccacttgctgttggaattatgcacaggaattttctccttgtttgtaagattttgtattggggtttacttcaatgaaatctattcctactcgttttatatcggattggagggaaaaactggcttttctttaacaactagtgcaattgaaatgttaactttgaatgccaggaagatgagttgtggagtgaataaaatgaccatcaaggttgtattggagaccctaggctctggatggattatcctctataatctttatcaaagctgaagatacatgtgatttatcaactctggatttgtgaaatttagagatgttcttttatgggatttaacaaaattatcgtcaattttggtttttggattttggatattgtattgtttttttattaagaacagaaacaaaacaaggtttcacttgaggttgttccagcaatggaaggattatggtggattgattgctttaaaggctctgggggagtgctttcagtttgaaatttgagcacatttcctgcaaaaataaaaactgctgttgatgattttgctaatgatgaagtgctttcagtttaaaactaaaacagaaggtcgccagtttgactgcagaatggtttgaagtttcccttccattgttatgttctgttagatttaatttaataatgtggtgcaggttgctcaagagatagaatcagaagcaaagtatca

SEQ ID NO: 53321 - DNA, 1033 bp, Populus trichocarpa
  Intron number 3 from transcript POPTR_0005s17860.1 (locus POPTR_0005s17860) derived from phytozome v7.0 (chr-ID scaf fold_5; pos 15615533 to 15616565 reverse strand)
gacaatacttggttgcggttatcaccttcacttaagtaagttcatgcatgtactttttaaggattgtgattgatagaaactaatgctttttaatatattaatgatttaacgccttggttatccactgcttaattaagtgttttactatatggctttagctacctatcagttttgaatgaagtgttcttgttctctaaataatgaatataacaatgactaggcctgttaattaacttaaaattagaaaacgaaacccaagtttctgaagttttccttagggttttagcaattgggacttttgtttttacttcaattatttgcatttagcttctggtagacaattttgtcagctttctttacccccaaaaaaacaaaaaacaaaacttgtcagctttctacaaatgccagtaaggaatcttagttattctgttaggtgtttcacttgtttactttaaccaggatttaactcattttgtcctgctccttcacactatcacatatcaaactaattgtttgtccatttttcctcctcttctaccccccaaatggtagggttaatttccccctggttgctgatattgattctcggtgcttgtgaccatacaaggttatagattcccttctttctgctttaaaatgaattttttttatgaaacaaccatcatatgctttcacaaaactcttgaatgttgaaggtattcttggtcagagtaatcttatgacattttgaagaatatctacaacttaagagtaaatagtacacctgcaatttacagataatgtatagattaagcaagcgtaacctttgctggtgatgctaaagttagtgatgcctccatgttccttcgataaactgcgttgagtttgttattgtggattctaacatttatggcacattctttgtgttgaaaaaccaattcaacccaaaaatttaagctattgagtgaggcctgcgaattgttttatattactctttcgctatttcaatgatcacttttcttaattgtcagggagaaatcagttctgagattgg

SEQ ID NO: 53322 - DNA, 387 bp, Populus trichocarpa
  Intron number 1 from transcript POPTR_0006s29090.1 (locus POPTR_0006s29090) derived from phytozome v7.0 (chr-ID scaf fold_6; pos 26576286 to 26576672)
ttgttccgtcaaaaggagacagacatcaattaaaagtaggttttttcattggcagctggaaaagaataaaaaagctccaattggcatagagagagagagagagatacacatcacatgaaataagaactgccaagagaaatggaaagtttcaccaggaactcagttcactgaaagtaaaatttccaatattattgaattaatgcatcatgaaagctttacattacgcgttgctatgatcttttccaaaatctttcttatctcaagacattaactaaatgtaaaactaatgagttaaactacatatgatttcgatggagtacaagagaaatgcaaacatatgttttgatttcgggtcgttgttttcatagcacaaaactacggacatag

SEQ ID NO: 53323 - DNA, 926 bp, Populus trichocarpa
  Intron number 1 from transcript POPTR_0017s12940.1 (locus POPTR_0017s12940) derived from phytozome v7.0 (chr-ID scaf fold_17; pos 13105681 to 13106606 reverse strand)
cccatcacataagtagtaagctcaatatgtacagcaatttacaaaatcgcttattgcatctctttgaaggctcaaaattacgataatttgtcaacccccacaggtgatgacagaaagaatggaacagaatggaactttcttgtctattatttccatgttaccttgttcctccttctctcccttcaaatttgtattttgatatgctaattataaaaacataacaagcttgtattttgatttatgaacatgctggctttgccacagaactacaaccagccaattgcaatctctgttagttcccaatatgtaatcgaaaaatctcttcggcattactcactggtagtatgaactattcagggtaggattaatgaatccatgtcagtggcttgactttgactctgttagccattattttctctagaggacaagttttattcatatctatcttaataaatcttaattcctctcatttccactctcggatccccatacctactacaacatctcgtgaagaaaactcaataactctattataataactattataaagagttttttttattattattcacgtggtatgtccggatcagtttgcgcgcacctcgactaatccccacggcttctgaagttaacaaccaggtaaatatccggtgaccatcaatattagcaaccacgagacttgaacctgagattataaaaaaaaaaaatctcttgatcccaagcttttactattagctttctattgcaaagagtttcatatgagatgttgtgtaatataatgtagtttttagaaaaatcatgtagataaaaacattatatgcgcttatattttatgcgtgtgtgagttacaaaatctcaaggcaaaaaggagtatccatccgaatacagaagggttaaaaggcaaagacaaatggacaccaaaatag

SEQ ID NO: 53324 - DNA, 1002 bp, Populus trichocarpa
  Intron number 3 from transcript POPTR_0005s03690.1 (locus POPTR_0005s03690) derived from phytozome v7.0 (chr-ID scaf fold_5; pos 2461521 to 2462522)
ctggtatgctatgttacgttttttttattcgagttggtttttgtataattagccatgtgagcttatacattgagtgatttaggaaaaatgtgatagtttggtcatttgctcgatttcgtgttgaaaaccaaataatggagttagtctttgactataagttgtaaaaatttccctgttttttaagctgagaagtcttaactagcatatgcacctttgagtgcttgtcaaaaataggttggtagcttaagttttgtgatcttttttcctatcatggcttgttgatctctgttatttatgaggttttagattttataaacataaaaaaggcgtagattccattttatgaacattaattgaagaagagtgatgtgaagtgaaggaccaatagttctgatgtggaaaaactatttcaaggtggatttgactgagtgcaacttgatgatggaagctgtagttagaagatgttgtgactgtcctttttttccgcacccctcttatatgaacagttaaatcactggacaattgagaaatgcttttcaagggaaaggctataacaattgggtttctgagtgtcaaggggtttgagtgagagtgatttggtagaagttgtagttagatgttatgaatgcccttttcttttcacaccctttgtatttgaatagtttgactgctaaacaatgttggaaatggccttccggggaatgacttggcaaactggatttgttgctatgaccaatcccgaggaactaagtgaaggctggtgaatgagggcactaatgttaatttccaaatgtgtggtatttcttttctggcttggtctggtgaaatcttggaaattgtgttgttgcaagttggtaagtctgttttaaaagtcatagaatattcactgttttgaagccagtcttaatggtgtagcatttgacttcatgttaatgataaatggcaaaatttctttctgttgatgcagatacgttttcaaaacctatttctggttctgacgaa

SEQ ID NO: 53325 - DNA, 1002 bp, Populus trichocarpa
  Intron number 1 from transcript POPTR_0252s00220.1 (locus POPTR_0252s00220) derived from phytozome v7.0 (chr-ID scaf fold_252; pos 21885 to 22886 reverse strand)
agagttttggaggtgagagagaatttagtattgattttttttccttacaaaatcattaccgtttcttagtgctggagtggagtcagttggatgtgcttgatactcatggttgcattccaaaacggcaaccatttgttatggaaacaataggttttcctctctaaattgacaggcatgaaaacaggttatatacacagcatctagaattcttttagctaaatcagttgtctctatggcgtcaaaagattaaccaacctcctttaaaaaaaaaaagaaattgttcgtattcagcttttgagaaaaatgaaaggaactaatactaaccataaccacatggctgtgctgccatatataacagagtttatgaaaattcttgattgttgaagatgggttagatcgtgaatcttgctttccagccatacttgtggtgaatggactcttccccatgcccaaatctcaacaaatagagctacataacttctcttttaagatgctactaagcttgctctgataacttttctcctgtctatttcccttgtgtctcattcaatactttttttgggaatatagaatggaggaaaacataagaatttctacttcaattgttctatcagtctttattttgtttattattgttattgtattttctctgtactcagttgtgcctcgcttggctgttgagaatctgctgcctgcaatcaaaatcattgttttgtaattgggtaatttaattcatttggtagcttataggtttgaattttatagtataaaaggggaaaggagggacttttatatttaacgcactgttggttgccaagttattgcagcaaatgagaaactgaattctgattgaagaacgtagtagcatcaactaaccatggaaacttgatattgaatcaccttattttgtgctttcatgacaagtcagtatttgacatatgcgtctgaattttctcctggcttacaggtattctgcacttgtttaaaaaccagctgcaaacc

SEQ ID NO: 53326 - DNA, 881 bp, Populus trichocarpa
  Intron number 1 from transcript POPTR_0006s13750.1 (locus POPTR_0006s13750) derived from phytozome v7.0 (chr-ID scaf fold_6; pos 10971849 to 10972729)
ggcctttccctgttgaacagcttcaggtaactaaatgtctccaagactcaatcttttctttcactatcaatcatctcttcaattctactaatggattaggaaaaattaaggggtttaaccaaatgggttccttccttttttaaaaaaaattgcataaaaatggtttatttttcgcttttcttaataaccttgccaaggttccattgtgtgccaaatggggtcttattgcccaagattctgtagtttagttgagtttagcatcttagtttgcttttagcttctgtacattgttgctccagcgtgggttatcttgattatgggtatttcaatcttgagttggttcttgacctaaattagacaaaactaggggtttgcccatatgggtttcccttaaattttctcaaggagggttctttgtcagttttcttgatttgattggtttgttttcattgtatatcgaaattggtttgtttggttttatgcataaatttaacaggcaataatgtattttcatcctttcaaaatgtggactcttgtatgatgtccaactttgggttttcagatgttgattgttgattttgtaactgaacttggtttcacttctaagcatggctttcaagtgtgggccttttctttttctgatggcaataaattctagaggagtaatgttgttttgaatcaaatttcctattcttaaaggtggttttgtcttggatttttttttttacttcaattccaagaatactgcattttttcagatgatagtcttgagatgttatgttaatcatttacagtatgaaggttaagttttagttgtattctgacatatataacccttaactcaaggcgtcaggcatagcttcccttgacgtaaagaagct

SEQ ID NO: 53327 - DNA, 667 bp, Populus trichocarpa
  Intron number 1 from transcript POPTR_0006s00880.1 (locus POPTR_0006s00880) derived from phytozome v7.0 (chr-ID scaf fold_6; pos 486012 to 486678 reverse strand)
gaggtaattcattttcaagctctatttttccatgtgtgcatggacatttttatattccataaagctaaaaaaaccaatgttttaccatcagttgtttttggataatcttactatcatttcttgtttgtcccaaaatacttgtttgaatttacttataattatcaaatctagtcctgcaggttgactcaatatctaaatcatcataaaaaaatcctcataaattgggccaggtttttttataagaaaatatcatttcaaagttgacccatgacttgatcaaaactggaattcattattaaaataattttaaaataattaaaataatatcactttgattgacttgagtcaatccaggttaacatagtcaacttgtgaaccaagtcatgtaccagactgagtttaaagaataaatcatttgagttatttatttatttttaaaatagaattaatttatttttttcaattctataaagataattttgaagaatttagataaaatatagatggtgagacaaaatatgtattaacttcttgcttgtttttctataaacatcaccataattatattcaatctttggattgaaatcaaataagaatccaactaagagtcctctttattgttctgaatgaagaggtcagagttggtgtttataccttcaccgggtat

SEQ ID NO: 53328 - DNA, 635 bp, Populus trichocarpa
  Intron number 1 from transcript POPTR_0005s07640.1 (locus POPTR_0005s07640) derived from phytozome v7.0 (chr-ID scaf fold_5; pos 5228355 to 5228989)
tcggcaacacttgttactgtaatagcgttttacaggtctcttattctctcttcaatttcaatcatcatctgtcgatttttattttctctcgatttaatcattttctaccttagtttattttacctagctactcttgtattgtgtcgattatttgacttttttttcccgtctttgaattgatattttgatttctaatttagtgtttcagtcaggttagacgcgaagcatttttgttttagccttaaattttattcaataatattaaattggttttttatttttgaggtttgggattgaaaatttaaatgcataattttttttgatagaaatgatattttgtatgctttctgctgcaagtggttgcgtttatcaagttgaaaaattgaacttgttgctgataattagtacgttgttagcttgattctttggagaatcatggctacattttattgtaatccatgcaggtcttcttgaaaagtgtatttgaatgtgattttaaggcattgtatttggtttataatgatagcggagggggatgtactgttgtgctttatagctctccgttggtgtcttatctgtgtttgtttctttgttatgcaggcgctttacttctgtgtaccatttcgagaacactt

SEQ ID NO: 53329 - DNA, 561 bp, Populus trichocarpa
  Intron number 1 from transcript POPTR_0005s21660.1 (locus POPTR_0005s21660) derived from phytozome v7.0 (chr-ID scaf fold_5; pos 20764784 to 20765344)
tgtaggggcctgtttggtaactgagaaaatccgataaagcggacagctttgtattttactgcacgatgattttgtttttagattcgatattcttgctttattttttttaactatttatcagcttccaaacggaccgttagctagggtttcgaatttcatgacctttgcttgcagctatgatagtccttcagtgacatggggtttaggcgttttattgtacttggatgattaggttcttaaataaatgcattgtttaagatttgcacatgaattgaagtggaaaaatagtaaatatttaacgagttttgtgtttctcaagcaagttgttagcatttcatgatttagtactgctttgtgtgtggtaaggttgcattattttttgtttgttttgaattgaacttagaatgttgtttgattatactgtgagcattttccatgttgaaggaagaagtgattgttttttcctttgtttcgtgtgaggaactttgaatgcaatttttcttttgaggatggaaaatatggattaactcctgtgttggtttgttgtagactggttcgaaa

SEQ ID NO: 53330 - DNA, 978 bp, Populus trichocarpa
  Intron number 1 from transcript POPTR_0017s03320.1 (locus POPTR_0017s03320) derived from phytozome v7.0 (chr-ID scaf fold_17; pos 2413736 to 2414713 reverse strand)
ttgcgtggttgcctcctctggcattgcctttagtggtatactttctatactgtttactgccattaattttcatttcatctttcttaattattttgaaattcaattttctttctcttttctttcgaagttgaggagatatctaggtttctttgatcaagatattaatatttctgtgcatttggttttgtttctgttcttaaaggttgcaaacttacagtagttactaaaattcaatgtcaagatttccatcttctaattgctagattacatgataaggcaaccatttttctctctctggatcccttttatctcagatgggagtagatttgcatgatccttgaagacaaagaatctcttactgcctaaagtctttgagagacaaatcaaaattgaggctttatgactaccacttgtgaagttttgctaaactaatcaacacttgaacttaccattagagacatgaacaaatctatctctgtctcctggagtgtgataatgttaggggtgcagctggtatgtcacttgacagatacttttttgacagttcaattcatatgcgctggatatggatgacttactaagttcagatttatgtcaggaagtcttataacaatattctgatttgtggaaaaagaagtcttctccattagtaaaagaaaggaaaatgtgaataatatctgtttctagaatgctagttgtgagcttgagttattaatcaaaccttttctttaactgtgaatcattaacataatgtcaagatgaatacattatgtttctaacttatccaaatagtcaagaaaagcctgattacttgccaaacttgtttcgaaactgaattaattattgtaatgaaacggctaatttgtgattatgcttatgatgatattaaacttgttgatttttgtaccaatggtttccattctataattttttccttgtttccttataataggaggctttgggagttatctgtttgga

SEQ ID NO: 53331 - DNA, 767 bp, Populus trichocarpa
  Intron number 5 from transcript POPTR_0017s10970.1 (locus POPTR_0017s10970) derived from phytozome v7.0 (chr-ID scaf fold_17; pos 10552489 to 10553255)
gtggatttggtggcggacctggacaggcaagttccattatttcgcaagatgaattttttcttttgatacaccgccactgtgtatgatagtgttacagaactcaccaaaccataatccaacccagcctcctctttcctccacaatccctatgcttgtttgccttttagtctatgtttttttggatagcaaggtaagggaaggacaaggctcaatccatccaaattgagatgattgaaaactacaaatttaaagagggcaaggatgaaacttgtccttccaatgcttcattgggtctccatcttctttgccaaacaaaatgaacaccaaatccttcatttctcatccatcccttttgcaaaccctcctgtcaaacacatgcaaaagtcagagattggatattctttttcaaagcttataataaattcatacccccatttactttttgctatagttgtgtgaaagtgtttcctgctgaaaaaaggggctgcaactgtggttttaagctatcctaagttagtctaatgtgagaagttatggcgataatagagaagccaatcaatcttagttgtgatcttgcctatcttacagtggtctccctgaacaaatgttaaatattgtttgcgtttatttttgtggtaggagaatgctagaggcattcctcttttgtatatatgcatgatttcttacatgctgttttgtttttttctttttttagaaaactatcaattgtcaacttgactgtattagtttgttatttttgtctttag

SEQ ID NO: 53332 - DNA, 932 bp, Populus trichocarpa
  Intron number 2 from transcript POPTR_0005s21150.1 (locus POPTR_0005s21150) derived from phytozome v7.0 (chr-ID scaf fold_5; pos 20288702 to 20289633)
tacaataaaccttacaactagcacatttatattttgtaaatcacattgacggatacaaataaaatagataaaaaaaaaatccaaacaggtccaaaaatactccataggcttgggtatacaccccgagccaagcactcatcagagaatttttttaggacatcatgtgagttctttaatatttaatatttatctaatacgtattattttgagtaaaatacaacttaaaatattacaaaaataaaattacactccagctctttctttgtaaaataacaaaattcatgagctataaatataccataaattcttcaagtcaaatgttcacaatctcttcattctcaacattttcatcattcatattttcagaccatatctctctaaaatattattacattttttctctttacaaagttactaactttactatcaaaaaatctccacatccattaaaggagatattttacaggtaccagctaccagttacttgacttaccagacaccacctattactaccatagctaccgataacccgacttatcaggcaccacctgctgctaccataaatatcggtcaccttagcttaccagcaccacttgctattagctaccacctttcaagagttttcatattaaattatcagatacatgactaaaaaaaataaatcaaattatttaaattaaaaaattaattaattatcaactacatcaatcttgttgttaattatcttgaattttgtaacccatcacttataagaacctgcaatgtttattccttctgccagtttgtcgtattctgtagtacaaatattgatagcacactgtcaatatttgcagggtaaatttggtgttaggtcaatcaggaacaaccattaccagcatgcatcagctgtatacctacagctacaagtgagtattgttagtcaggcaccattc

SEQ ID NO: 53333 - DNA, 865 bp, Populus trichocarpa
  Intron number 1 from transcript POPTR_0005s01700.1 (locus POPTR_0005s01700) derived from phytozome v7.0 (chr-ID scaf fold_5; pos 1132051 to 1132915)
agggttttcaggcattgttgtcgcgacccagataggtaaattgcttgttctcggtctttatgtagtttcttacgtgtttttagaggatttgcgtttgggtttcttgatttgttttgtgggtgtttgcttcaaagaatctgcacttctttcggttttcttggctgatttcgtttctatgaatctggatttgtctgttttggtgggttgatgttggatagggtgaatctgtgattgaatggtgatgttaatttggccttgttgagctggtttatgcatcaaaatggcaatttttaatgactttaaattttctctttttgtgtattgtttgatgtttagattcttttccaattgtcttgcagggaactgtggtgttgatttctttttgtttatgaataagtacctaacactctaatgtgttaattgttgttacatagctatctgtgttaaaaaaaaattgctggtagaatccacaatctataaatgaaattaagttttttctttttcggtataggcgacaaaggttatgtgacttatagcattcactttctcaattatcagacaggtatttgctgctatattttaccctttccaattgattaatatgaagtaaatgagaatctgttctgtggttattgtatcgatgtggaattgggttgcgacttttttttgtgttgtgttctgttgtgttatgtgggacttccttcactgtctggcatgagttgcaccttgcagttttgtgcctaatctgctcagttgtgatgcaattaagaaactttaccttgaaatgtttgtgtttctcgtgacttatttcaacttcctctctctggcagataacagcagaactaggcttctgccttcttacttt

SEQ ID NO: 53334 - DNA, 675 bp, Populus trichocarpa
  Intron number 2 from transcript POPTR_0017s14470.1 (locus POPTR_0017s14470) derived from phytozome v7.0 (chr-ID scaf fold_17; pos 14506472 to 14507146 reverse strand)
ggttttcctttgtttctccagaatccatttccaaggtgtgtgctttttattttttgttttataaagatgggatttttttagtgggtttttgtcttctatttgtttgctttagagatcttagtgagaaaagacaaatcattagggtttctatagctgtcaagatttagttcataacaactcatattaggctccagtattttataatgtttccggggtttattaaggaattggtgatctgggatttgtacgtctctgtatgatcttgcaagtgaatctggttttgttgtgatcgtagtacagtttgaaaagtctaacttttcatggtttctttggtgatgagcttatcagattcttgtcgaactgcttagcatttgtgtaaagttgattgctttcatattaatctgattgattaattgttttattggtaatcacgaccttctgagtatcagcttgaatttaagtttcatgtgaagatcttcttgttattaagttgtgatctttaactttaggtcttccaatatgccccaaaattgaaacaatattcaaaggaatgtgaagggaatatatttgctagcctttgtttaagaatctaatctgttaaattgttttttcagtaaatttgttttcagtttttcacaaaatatctcattagtgatcattttggacagggtaact

SEQ ID NO: 53335 - DNA, 976 bp, Populus trichocarpa
  Intron number 3 from transcript POPTR_0005s11200.1 (locus POPTR_0005s11200) derived from phytozome v7.0 (chr-ID scaf fold_5; pos 8123043 to 8124018 reverse strand)
ctctcattactcttgtggataattctcgagtccgggtatcatttattgttcttattcttttttttttgctgccgtgttccttattgttgtgatatctgtaactgtctccatcttttgttgctttgattatatatgtctggcttgcctactcgtcattcttcaaactccttggttatttattgacatctagcctctaatgatgggagaatgaattcatgaaacttgcttgttccttttctaccatgcttgcttgtgatccctagctttacagctctattaatcaatggacctatttatctgtcttcttcccagtgcatgtatttttggttcactgtacattgtatcgctaaaacacgagtcattatcttgttgcaagtggtgggaattttggattattgaaatggcttcaaaatttggaaatctgttttatagagatggaaatttgaaattaaattcacagtatgtgctagtgttttctggtaagctaacctgcaatgagtattttatgcattttctgtgggtatccatgtttctgtttgggaatgattgagagaatgaggattggatttccacaaaatggttccacttgtagtgcgagggagtctttgagttgaaaatgcaaggccttccttgttgaaacttggttggcatgtagttttcccgtctggctctattttgactggtccaaacaacaacttcccctgcacccaatcacatgcacactgaacaaaaactctctgtctccctcacaaacacacacaaaaaaaaagcaactgcatttattcttgcttcccctagaatttatgataatccactctctgtctcatatccataaaggaatgggttaatattttcatttgctcaatgtttcatgttcctttataaaatatgctataaccacaaaagctctactaagcggattttttttcacttgtatgcaggagagactggaagatattgaaagggatcaacgtga

SEQ ID NO: 53336 - DNA, 1012 bp, Populus trichocarpa
  Intron number 2 from transcript POPTR_0005s11200.1 (locus POPTR_0005s11200) derived from phytozome v7.0 (chr-ID scaf fold_5; pos 8124391 to 8125402 reverse strand)
aaattagaagaagaaaagagagagttcgaaaaaaggtgggtcaatggagatttgaacattcttttttgttttgaaaaagaagaagaaattgatgtgttattgaatttttatttatttatttcagcttttatttcttttttacttcctttgaaaagtgactcaagaagcttaatgtataataatgctcttttctctctctctgctttatctttatttatttatgtatttatctttgctgtttttgcttaattttgtggcggttgaaacggtcagttacaccgttactctcagcttttaaagatcttgaacggtcatgctgtttgtttctaaaattgaagatctagtaaacaagtctagtatttgatcttgatctggctcgaaaccagatactctctgcataagaattctttgaagttgaagtaagcgttatataagcgatgcaagcgaaaaacattactgcaatattgaagaagttggcttacaaaaggtgaaatgaattaataatgcttttagtttctcgacattggctgcatttttctaagaatttttttatttgaaagctcacctatttttgctttggttttgtaattttggcatgttagtcaagcagcttcaatttggtataaaacttgagattgtaaaaaacaaaaaagaagctgattaatgtgactctttgtacgagcacgattagatttggggtggttgagtggtgaaaatgaatttgttgacccattacgaggagattgatttcatttttctcattagcattttcatgtaaagtttggtttttttcttaaaaagaaaatttaaatttgaaaaaaaatgggggtgaaagaaaaaacttggtagcttcaatttggtaataatggcgttgagaaaatgcagtcaagtaatttcattttggtaacagttttgagtactgtagctgaagaatgaaagaaatatatttggagtggtgatagtgaatttttctacaggtaaggtaggatttaggttgcctgagtggtgaaaa

SEQ ID NO: 53337 - DNA, 465 bp, Populus trichocarpa
  Intron number 2 from transcript POPTR_0017s08810.1 (locus POPTR_0017s08810) derived from phytozome v7.0 (chr-ID scaf fold_17; pos 7390759 to 7391223 reverse strand)
atctcgtcagggtaatttttgttttcttttttatactatcagtgatcctgatttatgaaatcaattcttcttttttactaattgattttttttttcattttaatctgaattctgcaattgactactatttattattgaaatgtgaacgaatcgagatttaacaatttgtttcattttgaattgtgtttgcttaatttttcagttccgatttgcatttttatatacatggtaatgtgaaatcaagatttagcactttggtcaatctcagacattgaaatcggttttttacactaattcatattttaaatgcctgatttttaaattattttttttggattgtggggtggtggtaagtgatttgatttttcatgttttttttactcctgaatgtatatatatatttttttggttgattggatggaatgtgcagtcaaatagctttatagaaggagtggcacagaagat

SEQ ID NO: 53338 - DNA, 927 bp, Populus trichocarpa
  Intron number 3 from transcript POPTR_0017s01880.1 (locus POPTR_0017s01880) derived from phytozome v7.0 (chr-ID scaf fold_17; pos 1381731 to 1382657 reverse strand)
acaatttcgttcggcatcagtcttcttcgaggaaagtccttgtctgttgtttacttatcttgtggttttgctttccttaattttccatgttcatccatctttagtgtgtttatgttttgtgtttaacaagctgtactttctttgaatattgaggtgatattcttctaagatcatttctcctttgtctttgaattccttccaattcagaggcaccaatagaacatctctcatagcctccaaccgggtggtcaaaaaatatgatcacaagagtcaccaccaccgctgtgcatttggtggcatgggatttttccaaagacatacaaggcaatgcctttatgttgaaaggaaaatgaacccttgatttgtctctgtcagatatggcaattatatatctcaactagcaataacgttttccaacacaatttgtttttgtcaaagcaagtttacattgaatccaatagttagatatagaatgataatggcattggtgctagactttcttaggtggaaaacagaaaatactggaaggtcctggtatcggtgctaaaacaatcaaggacctttggtcatagttgtcaactcatttcggagattgacgtggaataaggctcaggctgcaaaatagagattagcagtggcaactctcccacgttgtaaattgtgtaagatgaaactttagaccttctgtctttgtccttcgaaccatgtcagtttggtgtgtgcctcaagctggtttggtgcctggatgtccttacagccacagaacagggctttaatgatactctgtcaaatgagattggaccaagtctgcgtttagccataatttagcatagataccgggttgttttgtataaaatgggatgtttatgttgttcattgtgattttttacagggccctgtgacggaaaaaccagtagcggctcctcc

SEQ ID NO: 53339 - DNA, 882 bp, Populus trichocarpa
  Intron number 3 from transcript POPTR_0017s01470.1 (locus POPTR_0017s01470) derived from phytozome v7.0 (chr-ID scaf fold_17; pos 1011625 to 1012506 reverse strand)
gttattggaagtaggggtttaggtgctatcaagaggtatttttcttcaccactaactactttatttctgaattctttccctcgttttaatttcatgagtcaagtttagctcttcttcttttcaatatcaagttggattctcttgttattttctacttcttctcaacatcatccacaagccatgtgctccaatggatatagtttatgttctaattgattggtgcccaaattctaggactctacttgggaacaaaataaagagaggaaagaaaatgaaggcaaacaaattaaacagagcaatttcttgtctccattatagtaattaaacccggcttagcagttgattagataaacttgttgggtgtcaatttcaccgacttaagagactgtttggctgtgcgttttaatctgcatttcgttaaattttgaatttttttttgctaaaattgagtgcggtttgtactttttggatcgttttgatgtgctgatgttaaaaataatttttaaaaaataaaaaaacatcattgacatgtatttcagcacgaaaagctatttgaaaagcaaccgctaccacactgccaaacacaactaaatttggataaatgttgatgggttgactcagaaaagtcagcataaatttgtttttttttttatataaataaaataatattgttttggataaaaatattgatataaattaacccaataacttgtgaattgattcgatgatatataagttaacctaacctgtaattcaatgatccaaatccaaatctaggcacgacctcggccaatctgacatctatatgttctcaatcaaactaattaacactcattttcaactatgatgattgcagggttttgcttgggagtgttagctacc

SEQ ID NO: 53340 - DNA, 627 bp, Populus trichocarpa
  Intron number 3 from transcript POPTR_0073s00250.1 (locus POPTR_0073s00250) derived from phytozome v7.0 (chr-ID scaf fold_73; pos 54062 to 54688 reverse strand)
aggttttaattgaccagtatagtcagcaaataaaggttggtattacagtccatttcactttctagtttgattcgaataattattagagaaattttatgatgctaaaattatataactattaatactttcttatagacatattggaaaaacaagtaagctagtagttcaactagtaatagtaaagtggtaagaaatgaattagggaaagaaacatcattggtttgaatcctactacttgtattttttaatctacatgtaagtgtgcgatcaattaaggatctcgagttgacgaactctgttccattgcttggcttttaggacctgggagtcgcgtccgtgaatatgtcattggtgataagaaaaaataaacatgagaaaaaatcacatctcatcgatcttacaaaaaaaagtataagaatattttcagctattcaaaattctttttttatttctttttttcgtttttctctcctggaacattataattttttttttaataattgtattatgtacatttgtttatgcatgatagcccacatatatttcattctgtttgtgatttttatatctttttgtttctatttttcatcagcgtttgtacctcttcggagccaggaaaattgcctt

SEQ ID NO: 53341 - DNA, 429 bp, Populus trichocarpa
  Intron number 1 from transcript POPTR_0005s25240.1 (locus POPTR_0005s25240) derived from phytozome v7.0 (chr-ID scaf fold_5; pos 23545501 to 23545929 reverse strand)
ggaagcgcccgtgcttggacccaaaccatcactttgtgagtgcttattctcagctctatctctctctcttttctctctccctaaactacaagctttccacaatggatgtttagtatattttacagtgccagcatagattaactttagattttggaatctcctttttctattttagctttctttcttttctttactcgtgatttgatgtacatcaatcaaactgcctagaaatgaaaaccagcagtatgttgggttaagtttgttctctccttttcatttgtagagagtaatatcatggtttcacgctactaattttcatgtttggaatggtgatttttagggcttgttgggttttctttgatatattaatatttatttttataccttactctttatgcaggaattctgacaactcaaatccaagctata

SEQ ID NO: 53342 - DNA, 456 bp, Populus trichocarpa
  Intron number 1 from transcript POPTR_0005s22120.1 (locus POPTR_0005s22120) derived from phytozome v7.0 (chr-ID scaf fold_5; pos 21098354 to 21098809)
caagctgggcctctatctaaaagtctaggagaaaagtttcccgacccacgaagattagggaatttcagaaaatttataatacttgggcccacattagcccaacagaaaacttgaaaaggttttctccaaaatcgttataaattataagcaagaaaagcaaatcctcagactatatggacagtcgtagtggcgtcgtggtgcagagtagagcgaggacagagtgaacaagctgaagcatgtctgaagaaccagaagaagaagtcgtctatttaaaatcacaactaacttatcttcaagatagaatcaaattattatgattctttctttcttaacagcaagcagctatgtgtttctttctttcttcttcttctttttttcgttggcatcatacactgtttagagtgatggtggaagaatgaagagttttttaaccttgattgcaatgttccagatttt

SEQ ID NO: 53343 - DNA, 513 bp, Populus trichocarpa
  Intron number 1 from transcript POPTR_0005s10030.1 (locus POPTR_0005s10030) derived from phytozome v7.0 (chr-ID scaf fold_5; pos 7117498 to 7118010)
aaaatgtgagtagacacggtgtttttgaaggattaaatgatagaaagtttgtgaacttttttttgttgggttttgtcaatttgcttttttttaatgtgtaatttgattgattttgatagtgggtttttgaaaatgattggtgggtgctgtattttgtaggggaatgaggataaaagattgattttttttttttttttggggggggggggggggttgcatttattgggaaaagaaaggacataactactttttttttttcggtttttgatatatatattttcaaatggtgttttgaaaaatattttgtttaattagtttgattttagtgatgggtttttttaaatgaattgtgggttatttgttaattggggaatgaaatagaaaatattgtttctgttttttttttaatgttatttggtgaatattagtatggatgaacataattgaatttgatagttgttttgatatcaaaatgaaggtgaaactttcaaaggaaagggattcactggcaat

SEQ ID NO: 53344 - DNA, 162 bp, Populus trichocarpa
  Intron number 3 from transcript POPTR_0005s10440.1 (locus POPTR_0005s10440) derived from phytozome v7.0 (chr-ID scaf fold_5; pos 7497256 to 7497417)
cctaaaagacctgctagtgctttcttcgttttcatgtaagcaactctgtaattcattttttttaatgactttttttcttggcctttgagttattgtgtactgattttttttgtttttaatattgaagggaggattttaggaagcagtataaggagtctcatc

SEQ ID NO: 53345 - DNA, 662 bp, Populus trichocarpa
  Intron number 1 from transcript POPTR_0017s02800.1 (locus POPTR_0017s02800) derived from phytozome v7.0 (chr-ID scaf fold_17; pos 2005792 to 2006453)
cttattccaaggctcatagtggtaatccatgctttcaaattgtgatgaatttgttaattttttttttcctaattagagtgatggatttgtttatagtacttaatttttgttaataattattttcatgtaaattagtacaagaattctcccaaaaagtgttaatcgttttttctatgcctcaaatgctggtgtgatagaaatttacattaaatcttcccatctcaagaaaatatcattaaatcaagaactaaataatgatcacgtatggttattattttggaatataagaggaaaagataatcggagtagagattatatcttttttattttaaaattataaaaaattatttcaaatttattttagagttaatatatttttaatcaaacatgttaattcttttttattaatttttctgcataaaacactcaccaaacataatttttcttcaccaatttattataaaatattgatttattaattattattatttttttgccaatgatgtacataggatttggaggaaagggtacaaaaacttatctaaaaatagtaaaaagttttaacattagaatgttttgaaacaagagaaataattgggttgccatttcatgataagttgttcttgctaactctctctctccaaaagcagataaatatacca

SEQ ID NO: 53346 - DNA, 799 bp, Populus trichocarpa
  Intron number 1 from transcript POPTR_0017s03000.2 (locus POPTR_0017s03000) derived from phytozome v7.0 (chr-ID scaf fold_17; pos 2176276 to 2177074)
ttggtagcattacggagagtttcaagacaactaaggtgtgtgttagttgttttttaatttaattaattttcatgtgctgcatgtgcattgccattgctttggtgctattaattgatcatgtgaatctcttataattacatctaaattttgtagttgctaggcagatttgcttcagaaatcgcactcatgattacatctgaattaaagctgattgttttttatacggctttgaattaattagttttaagagagtcatacggcaaatcagggagaatgcagagcaatatttagaaacaatatatttttaaattaaatctttattccaataaaataacttggataattgtgatcttgtcgacctatgattcacaaggaacatatttttgttatttccttccattttttcttcatttttctttttataatttaaaagtgggttcttcttattcaataactgagctacaagctacgaagtgcatgattattcatctcttccgaacattttaatttaggatatacgttaaaattcactcaagtttttcaaaaccaaagaaatgacatttaacgttgataatctttcttgaaatccagcttctctgaaaaattgcccccaatggacaccggcaattagaagtgaacggaagaaaacaaaagaaaaggaaaatgaaaactctgaaattagaatatcagtgggtcatctttgatgaatattgcttataatttatctgtgattctttcttatatacactaaatttataatctaggagaaagaagggtagtggacaacgaacaaagagat

SEQ ID NO: 53347 - DNA, 478 bp, Populus trichocarpa
  Intron number 1 from transcript POPTR_0006s06860.1 (locus POPTR_0006s06860) derived from phytozome v7.0 (chr-ID scaf fold_6; pos 4965821 to 4966298 reverse strand)
aggtcagagcgtggaatgttctttctttattttcttctttaatttaatgtagggttttaggtttgaagttgaatttttggaaaactcttttatggtttagtgaggtttaggtttttggggagtgtttggtttcttagaaaatggtggcaaaagggaagaaatgtatgtgtggactgtgatgttcaattacgcttgatttattcattgggacaaaaatagtttaattaaaggtaagaatttattgggtttgcattcttgaaatctaatttgtgaaaattttcagaaataactttctaattggcatccttttcctgcattttggccgcaacaaaatgggatgctagggttttgttgtttatgccatttttggttttaggaccaagttactttttggctttgtttgttaattgattgtatatctttccattttgttttgtggctagttctctcaaaaggagataaatttggaaaaggtgaa

SEQ ID NO: 53348 - DNA, 918 bp, Populus trichocarpa
  Intron number 1 from transcript POPTR_0030s00460.1 (locus POPTR_0030s00460) derived from phytozome v7.0 (chr-ID scaf fold_30; pos 199425 to 200342 reverse strand)
atagtaatcaacttttcttttgtcgtttcttgaattataatgaagggtttttgttttgaaggtgtttttttgcatcgatgttttttgtcatggtttaagctggctcatgttgtgcttacatgctttatgttttgaaagttttgttattttcttttaatgggattctgagtttgattaattttcttgtattttcttttggttctatgtttatggttggtaatttggtatatttggaattaaagcttgaactttttttggctgccatgaatttagatttttgtttttcttgtatttctttttttaattaggaaacgaagagttaaagttcttccctttaacattttggctgtgtaatgttggaattttaatctttaatatattgaaaagatacctggatgtcttaaaatggcagactttccaagaatttcagctatatgtcctgttttggacatttacagagtgagctttcttttttctgtgtttctacagattgatttgtagaatttgaggcttaatatatagacgtataatgatagcaacaatagtccttacggtctgtctttgagaaacattttcatgtcttgtgatgtttaaactagcaaagataatggatgggttcatttctgagaaagcaattactgattgtaaatctaagaattataccatttattcaaactttagagctggtctttaatctttaccatgactgtctcataaaatcggctaagtgaatgctagtatgattgaatgctgtagatcactggttaaatttgtttaaaacagatgtttttggattctacaagttagttaaagtcatcatgtatataagaaatcttagataattatatatcattttcatcaattatagatcagtggtaacatttttgttttgttttaccctcttgcttttcaatagtg

SEQ ID NO: 53349 - DNA, 500 bp, Populus trichocarpa
  Intron number 1 from transcript POPTR_0017s13360.1 (locus POPTR_0017s13360) derived from phytozome v7.0 (chr-ID scaf fold_17; pos 13546738 to 13547237 reverse strand)
ttaaaaaccaagtgttttacaacaaaacccaggtgcctaaatcttgtcttctgttcttttgttggttgttttatagtaaatttgtctaaatgagatgtaaagttcgaatctttgatttgctggatagtcaaatccggttttttgagttggagttttgatggggtattggttttagttggagagctctggttactgtttaatggaaatatcttaggtagaggaactaaggtgtaattggtcaaagagaaaattctcaaagaactagtgaagaagccttatatcataaatcaatatgcggggttttgattttctcttcagtgactgatttacaactgctattttcacatgataatgtagtctcctaatttttcttttccggcgttcaaagattttgttgtggttgctttactgcttctttaattgtgcaattagaggatcctcatgatttgactctataattgccaggttaacaacagagacttgtctattgctgtcctgag

SEQ ID NO: 53350 - DNA, 682 bp, Populus trichocarpa
  Intron number 1 from transcript POPTR_0005s07300.1 (locus POPTR_0005s07300) derived from phytozome v7.0 (chr-ID scaf fold_5; pos 4972058 to 4972739)
aaaggttgtattaagaggggtataattttatgtatgaaattaagcttcttcttctccttttatttcttttgtgagagaatttgaggctattacaaaataattaattaattaggagctatgtgtataagtttgtctatgattacaaagttaattatgcaacgggtttaatttgtttttgttatgacatgttgagctctacttccaatggttttaacttttaattagttgaagaattgtgaagtttctttgcacattctatgtgaatgctaccctctctgatctttttctttttcatagaggtatttgattgatgttattatgttatttttagttaaatccttaaaatatagtaaacagatataagaaaatacataaaaagaatttatcgataaaataaatgtatttgaaaataattttttatataaaaaatacaagaaacatgtcttatgctttcgttatctctgtcttgtatatttttatgttggtaataagcaaagaagtgtttagttttttaaagtgtttttacttgtaaatattttaaaataatattttttattttttaaaatttaattttcatcgagtaaattaaaaacacaaaaataatcaaaaattcataaaactctaatttgacggctgtccaaacgagaatttgtcgattcgagtctgtgattttttttagatc

SEQ ID NO: 53351 - DNA, 512 bp, Populus trichocarpa
  Intron number 4 from transcript POPTR_1403s00200.1 (locus POPTR_1403s00200) derived from phytozome v7.0 (chr-ID scaf fold_1403; pos 1491 to 2002 reverse strand)
ggcttgctgaaggtaagttttcgagaaaaagactaacgattgcctctcgtgggaatttagctacagtactgaagaattcttttgataactcaggcattggtgccatcagtattgatgagcatttatgtggtgggattgaatcaattatttgatgctgaaatagacaaggtatgtatgcaagtgacttaaatcatcaatttggatgatctcttatgaacatttataggttttttgatggtactcttgttacaattttacggtttcgaggccaatgctgtgttattggcttcattttttactgctttaatgttctcaggtaaacaaaccttaactcccacttgcttctggcaatttctcaatggcaactggtgtcgcaatcgtttcggcatgtttattgacagtaagtaggatttcttgttagcaacagaaaagaatagtggatttgtaattcattgtgctgattgattttcctccaatgttgattgtaatgattcatatatcagagttttgca

SEQ ID NO: 53352 - DNA, 283 bp, Populus trichocarpa
  Intron number 2 from transcript POPTR_0006s29320.1 (locus POPTR_0006s29320) derived from phytozome v7.0 (chr-ID scaf fold_6; pos 26730811 to 26731093 reverse strand)
ttttacctgtggagaacaagaaagtctcaggcaaggtctgttctatacctcaatgtttcactgctgtattgaagtcctaattttttacttctttaatcttagcaatcatttaattttcttatgaactcaagttttggtcggtgccgtttgtgtgcgcgtgtgctgtttggttaaattcaataaacatgcaatgatatatgtttatattttcttcgtggtgattttgattcttgtatcgtaaacagcatccaatgtaatgggttctttttaatccaggttctac

SEQ ID NO: 53353 - DNA, 561 bp, Populus trichocarpa
  Intron number 1 from transcript POPTR_0005s17760.1 (locus POPTR_0005s17760) derived from phytozome v7.0 (chr-ID scaf fold_5; pos 15492694 to 15493254 reverse strand)
catcaacttcccttggcgatcaagaagccgacgaggtagagtttttggctaatggccttgttttctaattgatgttacataggttttcgattacaataaaactttatttagctaataactatccttagataattaatatttggatgaatttagaaggaaaaagaaggaaaacaaactggatgctgtgaattattggagttaaacaaataaaatgtagaagagagagtgttgaagtttgctcctgagatgttgtcttttttcttttatctctctctccctttcttaaactgcataattcaaggatacggttagtatttcatagacaactgatttatttggataatatggacataactgataatgtggaagaagctagaacttagtatttcctggatggaatttgtttggctgttttatttggttaatttgcaaaattgagtgttatttaagctatctgtggttcaatgcaatcacttcgttttccaagttttttttttcttttcatattttgatctagttatgatttcgggggccaaatattttttttttcctgatgcagtt

SEQ ID NO: 53354 - DNA, 756 bp, Populus trichocarpa
  Intron number 1 from transcript POPTR_0006s07110.1 (locus POPTR_0006s07110) derived from phytozome v7.0 (chr-ID scaf fold_6; pos 5110637 to 5111392)
ctcgagcccatgtattttagtagcaattgggctagggcatggtagctcgggtttaaaaggaatgtttttttagctttttaggtgattgtttgagcttggttgaagggttttttagattaattttatttgtatccatcactagtaagatcaattttgtaggttaattgttgttttttccctttatttttttaatggttaaaatcttaatgacaagcaaatattagcaaaagttgtttcctggaggcagaaagaaaaatacagcaaattcatgattcatgttgatatgccttgtaaagatggtgtgtaggagagagaatagcaaatacagcaaaaggatgatgacataaccaaatcgagtccttactggtgaggacaaaacacggatcaatggttcaaacacacttggttttgtttgacattgaacacactcatgaaaggaattccttgctttaccagccttcaaaaaaaaaaaaacaccatgattccactgtcaaatcctacaagggaaaatggtgtaaatttgggcaataatagcatcgaggagagtctgcaaagttagtcctggcatggtctatggtatttttcaatctcacaagcaacagaatcacaggcatgggctcaaacatgtcccccctgcccctctaccaataattgactctctctctatctctaggcattgccttcagtgctcttctgtgtatatttatttgctcttccacagctttctttcatcctggagagagcgcaaaagtcctc

SEQ ID NO: 53355 - DNA, 579 bp, Populus trichocarpa
  Intron number 1 from transcript POPTR_0005s14940.1 (locus POPTR_0005s14940) derived from phytozome v7.0 (chr-ID scaf fold_5; pos 11810471 to 11811049 reverse strand)
gacctcaaagctatactcaaaattcctcctatcaggtgcatattcttccccttgtaataataataataataataatagcaataataaaacactttggcttgtgacgcaaaatagccttttttttttttttgtacttcggttttttttttagttttattatttgatgttgagttgatttgagtttcatgttaataatttgtttttatttgtattttatatggtcattacaatttttaaaaactatattgacatcatgataatattccatttcatgaaaaaggtataatttggttgtttgtaaataattgaatgccgtttaaaaaaaaaatcaatatcaagtatcaactctagtctttctttttagtttttaatcatcaattttttttcttttcaattggatccttcaaaattgtgttgattggaaaataagattaatggtttgttttagtttaaaaagttcctcgcaactttaattttttttttctgctcatttttttttggtgtagctcgcgccaaagcgtaaacaacctatcgaatgcatataatgcatctgcttattgcaacagaaaggagtggtag

SEQ ID NO: 53356 - DNA, 880 bp, Populus trichocarpa
  Intron number 1 from transcript POPTR_0005s01990.1 (locus POPTR_0005s01990) derived from phytozome v7.0 (chr-ID scaf fold_5; pos 1294818 to 1295697 reverse strand)
gagagccgaaaaatctagaaatctcacgaataccggtaagtttgttttcctgctacactcacccgctcaccgtttggttacggagaaaacgagagagagagtgaaagaaaacgaaggaaaatggaaacatttttttccaatccctttcccgtaattgttttcttatagaaagtgagaacttcggctcttgcattactcggcgttaggcttcgttattttgtattatttttttacctttttggtgattaaagaggttaatagtgtgtgaagagaggaagaaagtgtcagaatttgatttaatgcgatgtttttattggttttcgctgtgattgttgttttgattattttgtgatatctgtttggttgctgagaaagaagaggaaaataaataaaagttgagtgttcatgtatataaaatgaagaatgatgaaagactcaaaattggagtttaattaagttgtatgagcctcaaaactttgttgaactgattgagattttactgatatatatatatatatatatatatatatattaatggatttagtatctgtttgttcgttgagaaaatttagaaaaattataaagtgaaaattgaaaattttaaaataatataataatgttaattccaatttgtaactatttttagttttggtacaggaggctttttttttttctcacccagctttattgtaaatgatacattttgattttttatgcttgtaatagaataattcaaccatgaataaattgtttgaccttagctccattattgggcttggtgaatggaaatgattagttaatttatatgtttttgtttatcattttccatcgttacgccaatttatgtgttttttatttttgtgtgtaggattattggcat

SEQ ID NO: 53357 - DNA, 839 bp, Populus trichocarpa
  Intron number 1 from transcript POPTR_0017s08680.1 (locus POPTR_0017s08680) derived from phytozome v7.0 (chr-ID scaf fold_17; pos 7313322 to 7314160 reverse strand)
tcacttgtgtttactctggtaattattattaataacttgctttatttctttctctttcccatcatgttctttttacttatttgatgaggaatatatttatatgatttgtttatatgggctttttaggatggagtaggcttcaccgttgtgtttgtgttgtgatttgattcttggggcttcttgagatttctgccttggtttctttctgatgaaaaactttttgtgacttcagatctttattgccagtgtttatcttcaaaatttctgttctttgggatttttttgtcaactttctggttacattcacgatttgaaaaaagaaagaaagaactttctggcgatgtgatctctgaatctctgatctttaatttgaggagttcatgtataactggtgcagctgcttaaagtttaaatttggtggggctaaaagagtgctattgtgagcctttctttttcacgggtgcttgactattcatagacaaagaggatttggcaatagaaatactaggaattcatgtgctgctttttcattttgatcaaagcatccagttggattccttgacatgtttttttttccagcaagtagtacctaggcaatatgctgggccatcataaaatggagacataaatatgttcaacttgaatttttagaaaacacttcaagttccttccttcgttgatggactaatttcaaatgagtagatgttcttgaattatatcctgactcctagatatcatcactttggacaagcttatgaaaattaagtgatgagaaggaatgtaattctttcaatatctatacaggaacgggaatagagaagcctgattatctagccaca

SEQ ID NO: 53358 - DNA, 639 bp, Populus trichocarpa
  Intron number 2 from transcript POPTR_0017s04630.3 (locus POPTR_0017s04630) derived from phytozome v7.0 (chr-ID scaf fold_17; pos 3542795 to 3543433 reverse strand)
catttctcgctgcagttgtggctggcttcttgaaggtatagaaaagatttgatctttttggtttatatgtttctgttttatgattgattgtttcttgattgcgttttatgttggtgatgttgcataagtttgaattgttttacttgatgattatgctatactttttggtagttttgtgttaatcttttgagaaactgttatggaaattggaattgtggtataaagggatggagcttgtggtggtaaaggtaattaagaaatggggtaacggtaaattttatgtgtctgacatgtgtggtcattccgttttcttgtgttctaggtagttttcgtattctatgtctaaccagtgggttttattcttgaattaggtatctaacaacgtttgtaatcctccttgatgttctttttcttccttttaattttctggtaagttagtgtttgctggattaggctagtagtgaatgctaggccatgtggttaagataaatcgcttaagtttatttgcaaagccctctcaatcttgcattatcacataaaaaaaaataagaagaaaataagcctctcgttttagtgctttgttttgataaagaggtgcaaactcctctcttttcatgttgtaggacgagtcaagactag

SEQ ID NO: 53359 - DNA, 597 bp, Populus trichocarpa
  Intron number 4 from transcript POPTR_0005s10760.1 (locus POPTR_0005s10760) derived from phytozome v7.0 (chr-ID scaf fold_5; pos 7717343 to 7717939 reverse strand)
gcttcggtggcggtacccttcaaggtcacttgctggttagtgattctttgctgacgttgaaatttgatgactcgaaccttgatagtcaccatgtcaatatataggaatcaagaatttggcatacatcatttcattcagttgacacgtcatgcttgcaatgaggtgcttgatttttctttcttcttttttcctggtctttaggtagttgagctatcatgatctactgatgttatcaaaatggatacaatcaataaatcaactaattaataacttgatgtagcatagcaaccgcgaacgatcatggttgcttgactatgggttggcttgacatcctactgcagaatgttgctacagcttgtttgctttgtctgttgagtgttgagctttccttttatttattttttgtttttttctgctgactcttctttttaatggatgaagtaatattagaaaagcatttgcatgttttgtttcatactgtctagtcatttccacattcaagttttagcctgctaagcctctttggcatacataaacacaggccattactaacattttactggggaacaggctggggaagagcgtttttcaattgaa

SEQ ID NO: 53360 - DNA, 553 bp, Populus trichocarpa
  Intron number 2 from transcript POPTR_0005s25520.1 (locus POPTR_0005s25520) derived from phytozome v7.0 (chr-ID scaf fold_5; pos 23764157 to 23764709 reverse strand)
tgcgtcttttccgagacacctcaaggtgaggatccagtttgtatctactggatgatttttcacattatttttttttgtggaagaaattttgtgattcttttgattggtgagtcatgattcaaacaattcttgaggatctcgctggccctttattggtttttgtggatgtttgtattttcaattctttatgattcaactcaatttcaataattatctgtctcctgtcatttgttattattgactcaagtacaatacttgacatgaagattgatgtcgaacattgcaacttgcagaaatataaataagggacttctcattcacgagtatgcatgtttattgtatatgagcatcatactcctgaaggcacttgttcattactcatgagtatgccatttggatgtttcaaacagatgcaatctacatgtttttgatctaatccatgatagtatgctctgcactgatatttacttttctttgtacactaatattagttacttgttttggatttctactatttgcaaaatcttttcaattatttatagggaaggtcgcc

SEQ ID NO: 53361 - DNA, 570 bp, Populus trichocarpa
  Intron number 2 from transcript POPTR_0017s07950.1 (locus POPTR_0017s07950) derived from phytozome v7.0 (chr-ID scaf fold_17; pos 6335170 to 6335739)
aactctttaaagagttcaaggtaagaaccaacactaattgccatattcttttttttgctctgtttataatattcttgtaatttgtttgtgattgggttcaaaaggaaatatattcactctttcattgagactactttattgatgtgttggggtattgatttttgaacctgcatgtgaaatggaaaatcttgtcaggattcacttgctttatattccttttcttttctctgtggggtgtttagtttatgtagtttgccgaatcaataagatatggattaaggagttgtcatattcctctccttttttatttatggataaccataaatatgcatctcttctccaacacaggtattgtagcagggattgatctgtgctctaatttgttcttatttcttatttactttttaatatcatttaatttctttagttattacataatcttgcaaattctaaacaagataacacaatatgattaatcatttccatactttgaaattttgtgcactctttttacttggtatatatatatatatattatttggtagaaaaaatattccttccctgaggaag

SEQ ID NO: 53362 - DNA, 1039 bp, Populus trichocarpa
  Intron number 2 from transcript POPTR_0005s10130.1 (locus POPTR_0005s10130) derived from phytozome v7.0 (chr-ID scaf fold_5; pos 7236727 to 7237765 reverse strand)
cccttttatctgtcaaaacggtaagctgttttctgtttttgaattttatttttgatagttaatgataagtagtttaaggagaaattgtttaaattggttttgcttgaaactttgatcccttttctggtaagaaacagtagagttgaattcacattgctataggaattgtatataggcggggatgttgagtggcttggtttgattgattaaaccaagctaacttggtgaccctgtagttatgaactgtttcagggttatggtgggttggggattcacactgtacttcatcttttgtattctcagtctaggagaggtgcttcatcgtttgaaagaactgggattcgttgtttaaataatttaggattcgaataggaatggaagttagattgagagagaagtgttgtgtttgtaattggttgtggagttgcagagacaaaggcttgtctagatttatggtgcatgctgcaccatttttgtatttcacttgactatgcacctgcctccctactttcttgggctgatcattttttttttttttacattttcttgaaggttcatcttttactttttgcttgaaattattcttttgaatactaaaaaaaattgagcgaactagaagctctcgggttgaccgatccatttgttcactctttgagcaggagtcctcaaccctaatacaaaaacaaactaaactgatatttttcagtttggttttcattttggtctttcttgaagaacagtccggttccagtcctcaaagttatttggttttgggttcgactctgaccttactcaaaaccaaccagtgaacactagtaagggtcagaaggtagtttttctagctagttgtttccaaaataataataataatgataattttctcacacaggcttgcttgaattcttattcaattcatctgttcattcaagcatgttgttttccaattctttgttgcatttttgtaagcaagtaatagaatgctgatttattttgggtgtgctcagggtgacaggagcagttaccaccagcttgttggggt

SEQ ID NO: 53363 - DNA, 660 bp, Populus trichocarpa
  Intron number 3 from transcript POPTR_0005s15090.1 (locus POPTR_0005s15090) derived from phytozome v7.0 (chr-ID scaf fold_5; pos 11906317 to 11906976 reverse strand)
tcaaggtttgcatatcttttatttcttagttgatgacttaccttcgtttttcttttggttaaaaaaacaatttgttgcatgagttcttttttattttattttattttttgatggctgggatcttatttcaatccgaggagggatgatatatatatatatatatatatatatgatcgattagaaggattttaagacaagaaaataattaagagattgcaagtagccttcagaatttatgtaaaattaaccaaaagaagaaactcactattcttctagaaaataacgaaaaaagtaaatgttttaattaaagaggtttcaaattagagagttttgaaaacaaatatgtaaaaacattttaaaaatccttaaaaatgacaaatttgtataaaagtattgtcgatgatcactatgtttcattataccatatttgaaggttattcgatatatatggttaagtttagtacaattataatcacatccaataatttgttcaacaaaaatcaccataattaaattagattttcgtacatattttcttaattttctttgacttatatatatatatatatatatatatatatatatatatatatatatatatatatatatatatataagatcttcactatcttgcttatgtttttgctgtgtcattactag

SEQ ID NO: 53364 - DNA, 875 bp, Populus trichocarpa
  Intron number 3 from transcript POPTR_0017s14180.1 (locus POPTR_0017s14180) derived from phytozome v7.0 (chr-ID scaf fold_17; pos 14333020 to 14333894 reverse strand)
agaagaaggctgtggtgaagaaggaaacccctgaggtattattgtatatgctttaccagaataatgcttcttttctgtttcttttatatttgatttttgatttcacgttgaggatgtttgctggatgcccatgatcgttattaacatgattttcccaagtgtaagaatgccacttctatgggatctactgaatttctccaacgttgtttatgaataggataagagaagttgatctgttttttagctttatggaatcaatatgaaccctcctcgcttcaatgtttcgctgctcctgtaaagccttcaaaactatctaaagcatgaattttgattcagtgactttgacccatccgtatattctccagaataagatttcttgtactaagggctgtgtggtgtgtgtgtgctcaatgtcattcctcattttgattttttcttcttctcttgtatcctgaatattctggtgaaccatttttcctccgaagtttctcttcaataaatttgataattaacataacttcaatgcaaatattgaatgctgtggatcgccctgtttgtttatagaatataacaatactgcctctctttttttctctttttatttaagattagcagaatgcttattgatgatgtttttctatggctcatttgtgtgctagggtcattagtgttgttcatgttgccaacaagatagaaaccatactatattttaataattgtttttgcatggtaatcggctgttttatcttctgcttgtttcctgattttgtttgacatattagtatcttttagtttctttgtgtggtgttcttaattaaaatgttctgtcttgtatatcagcaggaaggagaagcaactacagaagaaacaaagaa

SEQ ID NO: 53365 - DNA, 711 bp, Populus trichocarpa
  Intron number 1 from transcript POPTR_0005s24880.1 (locus POPTR_0005s24880) derived from phytozome v7.0 (chr-ID scaf fold_5; pos 23300171 to 23300881)
ctcagtggctttcgctttctgacaccacccgattggtactactacttttattttatttttctttctataattactactataatctggcaattgaattatattaagttgtaacttgtagtcacaaattgatgttgatagcatagattaggagtgtatatggtgtgaaatcggtatgagattaattgatgatgaggccatgatttatttagctcgcgaactggatttttttaatgttattatggcacaatttaacagtattatatagttttttttgttctttctgataacggcatccatccttacccataggtagaaacaagcgcaccatgtcccctctttctccatcattatgtaggagcccactgtgtcctatctctatcagagatatccagccttgaagctgggacacctttatggcggaattgggtggttaccaattttctttttaggttattgcacatgtattgttattgaatctatgactggaaggcatgatgtagcattttttcattatgaagaagtataaattgggttgtcagccaaaacgtaagaaatattctctagctatcatggaatctgatttatgatgattcatttttggtccgttggtttttctttcccacaacctgcttctagatcaaagtatggaatttgttttatctgatttttgtttaaatcttttgaattgagtgcaggtgaaaactttaattg

SEQ ID NO: 53366 - DNA, 694 bp, Populus trichocarpa
  Intron number 1 from transcript POPTR_0017s13710.1 (locus POPTR_0017s13710) derived from phytozome v7.0 (chr-ID scaf fold_17; pos 13789995 to 13790688)
ctacatttgaaatcggagcacgaagctaataatcggtaatactaaaatctctcgtcttgtatttcgctatgttatttgataatatacatctctcttcttttcggctctttataaaaattccgcgttaaatagagtatttaatagagagtggtaattttttttctatatttgtttcttcattcaattattctgttgttcaaattattatgcgtttgatgttgtggttaatcagtttttgtaattccttaaaaggttcttgaatcaattaattcattaaatattgtcgatttttttacgattttctctttttgtttatgcgagtggagcaaagtaattaaagaaaattcgattataagaatgtgatttagcagtgattttccggaattattgttgaatttggcacgtgtgggcataggagtttggaatgtttagacgagtctttgttgattttattttgtggttttgaaggaatgtttggaatgcataacaaaaggttagattcggaagtgctgtgtttgattagtatagcagtagcaagcatcttgttaagcagttctcaagcttgctaagatttgttctctccggatttggttaaagtttgtatgcgtgaacggaggatttgtgatacttgattgatgtgaggaaaatgtctgtttatgatgacaactgttatactgttgtggtaggttcaggt

SEQ ID NO: 53367 - DNA, 768 bp, Populus trichocarpa
  Intron number 1 from transcript POPTR_0005s16990.1 (locus POPTR_0005s16990) derived from phytozome v7.0 (chr-ID scaf fold_5; pos 14025492 to 14026259 reverse strand)
cctttggccacagaatttttcaggtgtgaataaaatagttgttgcgatattcatgagtaagatagtgtttgaggaaatggttcttgttgcaaatttgggacctggataatgttcatacatgttcgcactaagaccgttgcagagtacaagtaagaagatttgtgtccatcctgaggcaattcaaatacaggatagggtcaattatcaactacagttattaatttttattagatagattccggacccatcatgctttacaatgatgtttttcatttccaaaactagaaattgcctccaagatgacaagctagtctttttaaaccatctattctgtcatgctaacgaaaggtcaagtttcttgccgctaaactttcagcctggtatttttttggattctattgcatgctctagatggtggtgccccaattctgtcattgtaaatttcattttgaagggactggtgtctgttgattcccacaaccaatctgggcttcgttaatcttggctaaatccatttacagccccagacaacctattctggaatttctttggggaaattgcatctgttgcctagataagaaggaaattttgtagaacattgtggattgacttggtttccatgcattgaatgaatacaaatttcagtaggaatatataatcatcagcctgatgcatttcatgctatcccgcatgatcagtatgagtgcctctcattaaaatcttggtcatgccctccttgtcttgtttttctgaatcagaactccattc

SEQ ID NO: 53368 - DNA, 828 bp, Populus trichocarpa
  Intron number 2 from transcript POPTR_0005s15480.1 (locus POPTR_0005s15480) derived from phytozome v7.0 (chr-ID scaf fold_5; pos 12144242 to 12145069)
attggtactggcaagactgttttggggtatagacagttttgagtttgatcaatcttgttgcagtttcttaattattgtgagacttgttgatctctaaattgggtttcgttcttttcttttcctagttggatttgatttgatgaagtttttatcactgctactgctatttctgtaagttgtattctttgattggttgttgattagggatctgtgattgtaaagctctggatataatcatgttttacatatgattataataagtaatactggagatactttgtctttctacgataaaattgcttgttattatttgcacagcaactgggtttcttcttttgttttctttcttccttccctttttggctgtaaagccatggggaagaagacactctttaatggaacggccaacaagcatcctaagagagagttcactgcataaaatggaaccttgagttcattttccaaactttgcctcgatgtcctgtatgttttctaatgattgctgcttataactagcaattgatgaatatggaagcacacaattgcatgaaaaacaagcaggtctgctaccaataccatttcaggtttgaatccaaaagagagaatttctaacagatgcatttgtgaaggtgtaaatggcatgcctgtgactttaccatgaagcaacttggtctcggtatgccttgtatagggaaaataacgttcggtaattgatctggagaagaacgcaggaaaagtggttgttttgtgtgaaacctaattataaacagtgcttttttttcatgggtttcacaaagtgatcaaatcttacaggatagcaactactaa

SEQ ID NO: 53369 - DNA, 511 bp, Populus trichocarpa
  Intron number 1 from transcript POPTR_0005s18270.1 (locus POPTR_0005s18270) derived from phytozome v7.0 (chr-ID scaf fold_5; pos 16416323 to 16416833 reverse strand)
aagggaaggtgagagtttttcatatttcctttaaaaaccttgaaaaaatctcacctaaacacatggattgaaggatgaaaaagggttggaagaatatctaagctaagaaaataaagaaattccaagggcttttcttgggagaggtggcagtttggaaggaaaactaggagggaaggagaaaactagtttttcttaccttttcttccaaatttcttgtgtttaaaagatgagaagctttgattcaagcttgttttaagtttattttgtgtattgatgcattttgattacaatatgcattatagagaattgagtttgaatgattggttgttagaatagatgatgatgtgtttaaatgatgcttatgatcatgaattatgaatgggtattgtttcaatttggaaaaaactttttgaaaagagaattcaccccaccaatgctagggtttcaaccaaggaatgaaaatggacaatgggattaattgatgaaatctattgtatgggtgctagcggag

SEQ ID NO: 53370 - DNA, 1053 bp, Populus trichocarpa
  Intron number 1 from transcript POPTR_0017s08860.1 (locus POPTR_0017s08860) derived from phytozome v7.0 (chr-ID scaf fold_17; pos 7506951 to 7508003)
gccttgctgctattgcttctaattgtaggtaagaaatgctttgctttgtgggtttttgtttttgtcttgtttgattacctatctggcttgtattttgctattactgctgatttttcatttataatttttttaagcttgatacaagaaaactaggcttcttaacatagttttggtggttgctatttgtggagtactaatgcaagtgctaactctgttctggccatggtggttgttaatttttgaatactagtgctagtgtcaagtctgtttgggttcttactagcaatttggttttggaatgcctttgatttgactagagagaaggaatattgagactagtattcttagatttgggatttgttttgcagtacgggttttggtttgcattgcatggggttctgtggctgtcaaattgacggtagatatatggttattaagcaattaatgcttgtatctgcttgccagctgctgaatatagagtaaaattacaccgtaaaaggcttaggaatctataatggagtggtggatgtagcttggtataactgtacagtgaaaagtgttggatgatttgatgattcttttgttttttgatcttgaagggcatgtgattcagctctgtacttattgttagttataatgttctgtaggcatttctgtggtgttggtgttgctatttgtaaatgttactgcattggtccctcgttcccaaaaaaaaaacaaaagaacctccctttatgatttctgaagtctctttctaattcccaattgagtcttaagtggcgttcattgttagtccagatggttatttcacgtttgaggcttcaattatttgtgaaaattggtatccaatttgatctctttaaaagcctctgaaagatacaatgctgactaaacaaggagcaataatcatttcgttgacttaatatgaatagaaggaaatgacgtgaggggtttcaggagattggtttcaggagataattagctatgttctaactagtttgaatgtctttcttcaacccaggtttcttagggagctggacctgcaagaaaacg

SEQ ID NO: 53371 - DNA, 762 bp, Populus trichocarpa
  Intron number 1 from transcript POPTR_0005s00510.1 (locus POPTR_0005s00510) derived from phytozome v7.0 (chr-ID scaf fold_5; pos 183276 to 184037)
ggtcttccaggccaggtgacaatgtcattctttaggtttttgcttttgctttgaacgaaaagaagtgagtttctccagttttcccagaattattgcttggtgagatcatgcttttttttctgggacttttctgtgacaataaatattagtcagttccggcttctaaggcctgttgtatgcgtgatttggtgattctttactcagccaaacttttgaggccatttggatgcctcatttgaagattctttaccagatttctttttctaatttcatttgaatttatgtgctattttgggagttttaacctatgctttttaattacttaagtaatgttcttatgggtttgaaggaggctttgaaggtcccattttctcgttggttgttttttagtcatttgattgttttggcttcttcaattcttactaccacttttttcctattctcattgctccatcttttctcctctcctgtgcctctatatgcaagtctttttccatttttaaaatgctttctaggctttatggtcattttattttgtaattgccttgcctctttctctccattatcatgccgttattaagatgtgttagtgattgagaggaaggtgattgtttaaatttttattaaacaaattatatattcatttgcctgtatatgcgtgtttctttccggtgcatgtttgactaactaattttgttttcatggctcaggttgttaggtgcatcactgttgtgattttgctggctctgtcaacagaggtac

SEQ ID NO: 53372 - DNA, 923 bp, Populus trichocarpa
  Intron number 4 from transcript POPTR_0005s08790.1 (locus POPTR_0005s08790) derived from phytozome v7.0 (chr-ID scaf fold_5; pos 6127403 to 6128325)
tctggattggctggaaatctagctggtgtcttaccgtaagtactttttgcagcatgaaagttccctagttcattgttctaatatacgcgtatacatgagcatgctagccatctcccactgtgttaagtattcttgtactgatcatgcacattggagaattagtgctccagcacgctagcaggctttcaagttcaaaagcttgacatgttcctggctgattttgcgattattcatgattcattaaaaaactaattccactagttcagtaggaaagttgatgaaatctgaaatacctgtgtggtggggtgggtgtgactctgtgcacatgctgtctccctctatccatgtctgcctctggtagtgtcgttgtttagtatttacaattgaaaattagaaaagctcacattctaatttttgttatggttaaaaactgctaatcaaaatgaatgaataagcttatagtctcatgcttcaattttctgatgaactcaaaaagttttagggcgcaggaagtagtaaactcttccacgcagagtgttcattttccaattggagtagtatttttcttctttacgggcaggttaaggaattgagtttagacactagtcttgttaaattttgataattaaactttcagtttcctctcttccaaatctaatcaactgcagacaagaagtggaaaacataattataatttcataggaggttctcaactgttattgtcttgtgaatgatcaacaaaataactctggatgaagttacatgacccgatcaattaaaatttaatatctggttaccatgaagttcttttcttccctgtatccatgcctgcttttggttcccagttagttggtaatgtttctctctctactttttattttcttttctattcttcagagcttctgcattatttgttggagtat

SEQ ID NO: 53373 - DNA, 503 bp, Populus trichocarpa
  Intron number 1 from transcript POPTR_0006s13400.1 (locus POPTR_0006s13400) derived from phytozome v7.0 (chr-ID scaf fold_6; pos 10605565 to 10606067)
gcaatactcctcctggtgaggatctcgcttctcaggtccctctctatgtctttcctttgatttgtataattagcactatattatgagaaattgttcttgaactagctttggcttcctagaaattggaaatctaaaagctgtttaattattaatttctttatagaatcgtagaaggcgttcattaattgtaaggatataggcacatattatagaatgatggtgactagttaagtggaaaagggaggtttattgcgattaatttaatatttaaatgatttaaataaaagaaaaatgaggaagaaaataaggtttttacttttttaggctgctgcttttgtttttgttttgacattcttagctagtattaaatgtatttttttgtctattatataagtttgaacctctcgttaggtttttgagttgcagtggtcggatttgtttatggattatcagtaaatttaggaatttgatgtttgaattacgtgaacaggtaaaggataaaa

SEQ ID NO: 53374 - DNA, 973 bp, Populus trichocarpa
  Intron number 1 from transcript POPTR_0017s01650.1 (locus POPTR_0017s01650) derived from phytozome v7.0 (chr-ID scaf fold_17; pos 1180015 to 1180987 reverse strand)
ttggtctcggcggcatcttccacagcgccgttcaggtctctccctccctctctattgtttgtttaattgcagttgttacggtggagttagtgtaagattagagagatccagggttaattaagtatttactgaaatggtttgatttaatgtttttccagtggaaagtgagatctgtggttctggttctggttctggttccggttccagtacttaaataagtcactgatttatggattgaattattgtgtggtaaaataagccaaaagttttaaactttgttggaatttttatttttaattgagagaggtagttactgttttctggtccctgccatttatatggtggattattggtgttttgaggtctctgtgttgatagaactagaagtcttgtcattcaagatctggaagtttcaactgtgctgtaaattgggttttccctgaacaataattacttgactgtgttgaagagattaaagtcaagctgggatggagggaggggatttgttttgacatgcaatatgtggaggggacattttttcataatcatgaattttatgttttttgctgcttccttttgatgtagttcagttttctgactcagcattgtaaaaggatttgttgtgtgattaagttttaggtaaagtttcctagtatcagtggagttgtttatggaaaaccacaagcttgtgcacagactgagtccattgatgtcttgtgcgtgcagtgtgacgaagctctgttatctatagttagttcccaagtactgaattatgcagtaaggtgactagatatagacaaatgaattcatgtcttaaactagacactgagctcttatattttaatactatgttgcaccttttactttcttgttggtattttttattttcaggctgtttccattattctcttcagatgaagtgaatatatgacttgagggtaataggtctgtttcctttatgcatgtcaggtat

SEQ ID NO: 53375 - DNA, 705 bp, Populus trichocarpa
  Intron number 1 from transcript POPTR_0017s14590.1 (locus POPTR_0017s14590) derived from phytozome v7.0 (chr-ID scaf fold_17; pos 14592492 to 14593196 reverse strand)
caattgagcaggaggtaagtaatttttaatgttttatttgcttatttttactttcggtttgatttgtagacagaggataatgagtgcccatataaaactattgaaagataagggaaaacataaagtttcttaaatttacttttagacaaccttcatctgaggtgatgaactaggaagaaagatgaaagttactatgtacaattatgagataaaaatcagctatggagctagtagtgcctggaaaattagattttgaagttacgttccgtaaagttttgtcgaatgttgaatggggtttttctggatttcttttttatatatctatagtttttactttcagtccaagttcttctgctgttcatggttccagggaggacactaaatgtaggtacgaaaaacaatgtagtgtaagatcctttagatactaagtttttacaattttttcattatgtgttaaacttttcatatcacgggccttattaggctgaatattctattacgcctttcttttttgagctacaatttcttcaaagcatgggcatggtggactcataagagtgacattcaactttccattcttaatccattttttggacctcctacctcttcagtcttgttctctttctttgaactgaggactgaatctgtaacagtttctgtgatgaaacagattagaatacacaatatcttggagaaaacaaggaa

SEQ ID NO: 53376 - DNA, 863 bp, Populus trichocarpa
  Intron number 1 from transcript POPTR_0005s05120.1 (locus POPTR_0005s05120) derived from phytozome v7.0 (chr-ID scaf fold_5; pos 3407130 to 3407992 reverse strand)
acaaatcgtcttctttcaaggaagcaatttgtaagctctgaccctcacattctctctgtttccttcattttgcaggtacccaaaaaaaggtttagtaaagatagttggttagttgttggtcttgctcaactgggtcatatagatcttgaactgtaagaaagaaagtttagaactttttgagggtgttgtttttgaacgtttgctgtttgtttgttactgttactgttagtgtttgctgtctttggaattactagttacgacttgattgggttaccatcctaattggaaatataagagattgttttcataagttttaattagcgaatttgaatggttttggtttgtttggttgaataataaagaaacattgtttagattagacaaggtctgtgcatgtttgtttttatgttagttattgatgtttttgtatggatcatgaaatgaataaagtgttgtatttttggttttgagaagttgggtgtgctagtttatgtgggccagtgatatgatcaaatatttgctactcttgatgggtttcaaggaatccatctgatgatagtataccaccaagatttgaggccacgaatccttttggtttcaattcattttcttttgttttttagttattttttcttttggagattttatagattagtaaaatgatggttgggttagaataaatacacttttggtgtcaaattggctatgttagagcgctgcattgcctgctgatgttagtttttgtagtaggttatagatcttcagcggagatgtgtaatccaatgcatgtgttatctttttcatgtaagatcttcaagtgtttttggttttcattcttctcttttgattaatgcagatcattg

SEQ ID NO: 53377 - DNA, 718 bp, Populus trichocarpa
  Intron number 1 from transcript POPTR_0005s10960.1 (locus POPTR_0005s10960) derived from phytozome v7.0 (chr-ID scaf fold_5; pos 7877914 to 7878631)
aggctgctgcacgtatcagagctagaaatctctctgtaagatcatataattgacatttgaaacatttcattcgtaagttcctgggcatctaaaatataagaggaggaaaagatatcaatgattattccaattgtgagagtattttggttaacttgaacaaaataaatcaatcttaagacatgttttaactcctagctaagaagctaatattgtttgagattcaatctaataaattcctgttctcaagctacctgcctatgaccagcggctgattgtcaacttattagatggacaagaaatctcagtgagggagcaaacgtttcagatttttaaggctaattcaaatagccttcagggatgaactcatagaggttgcaaaacctcaattttgagttgatgccctttcatagagatcaagtgtagcaatgaatttatcgacatgggtgtcttgctatttttgttacccactggtgaaaaaaccaaaaagccaccaatacatttcacttggttaaaacttggaaactgtgatatgtaaaactaatatgattaccaaacactttgctgctgctgctgctacaattttatgacttcaagttatggacaacaggattagcctgtcgattgatatgctataaattcgtagacttcaattattggcattttaattttcttatgcttgattaacacgttgagagtttgttccatctgatataggagg

SEQ ID NO: 53378 - DNA, 457 bp, Populus trichocarpa
  Intron number 1 from transcript POPTR_0017s02380.1 (locus POPTR_0017s02380) derived from phytozome v7.0 (chr-ID scaf fold_17; pos 1731475 to 1731931 reverse strand)
gattgatgtcccctctgcagggagctcttctaataaatataggggacttaatggccgcaggtacgtaatagtttatgcagcaatagttttatttgagtttctcagagggaggcaacctgcctgtctcgggcaagctcgaaaggtcgaattcaagcactatctttcaatgaaacaaaacattgatcatacgatactctctcttgagaggttgtacatgacataaatgtctgcaattaagtcctcaagattgatagaaatggatcgaaaatcataactcactaaaacttgatgttgtctaaagtttgatgaccttttcaggacgtggctatctttgtctcagaaatagaatcattctaaatgtaatgacctaaaagtgttgttttcttcaatttttagcttatcaccaatgacaagttcactagatagcttgtaacactaataacattctcattacctt

SEQ ID NO: 53379 - DNA, 288 bp, Populus trichocarpa
  Intron number 3 from transcript POPTR_0006s28720.1 (locus POPTR_0006s28720) derived from phytozome v7.0 (chr-ID scaf fold_6; pos 26326123 to 26326410 reverse strand)
aattgggtatgtgtttttttccctaagtttagttttataattgtaagttttttgtttgaatctttggttatttaactgcaagacatggtaaaggcgtagaaaacatttcacgttttctacttgccttttcttttgagtaggttgaagatccacccctgttgtgtatcaattttattcatctctatctttctgcaaattgcttgtatattttgtattacacaagctatttggtttattttgctgagtttcattttagctgttaatcaattgtttctggagcaggaaaaa

SEQ ID NO: 53380 - DNA, 505 bp, Populus trichocarpa
  Intron number 1 from transcript POPTR_0005s14040.1 (locus POPTR_0005s14040) derived from phytozome v7.0 (chr-ID scaf fold_5; pos 11064302 to 11064806 reverse strand)
ttagaaaaggtacctctctgttcttattattattattattaagacccctttttccctttctaattaagatgatcatgcacgaaaatgggttgatctattttgtttggtttctccattccagtaaatgctatgaataaccctaggtttgaagaaatctgattttgaaaatagaataattttaaggtcttgagactctcttttttttcataaaagtatttcttagttcactgatgaaatcaattcgaacagtatcaaatcagatggaatcacaaccctcacattagttattgaacagtatgatctaatgaaagatccaaaaggctaaaagtgataattggtattcgaaatgcttgattagcttcagtctgttgtttaattcaagataaagttttaatgcacccgcatgcaaatgtgaaagtcattatcaatcatgttctaacatcaaaatgatattttggcctctttgttagtttgctgaaatcggtcccaagggagaagagtggca

SEQ ID NO: 53381 - DNA, 463 bp, Populus trichocarpa
  Intron number 1 from transcript POPTR_0006s11850.1 (locus POPTR_0006s11850) derived from phytozome v7.0 (chr-ID scaf fold_6; pos 9040284 to 9040746 reverse strand)
gcttcttctgctagcgtatctaggcaatccaagaggtatatttttctatgctaatgctatgctactactgtttttagtaagttttaatgttgaaacaagaattgtgttagatgttctttccgatgaattagttctgagattattcaacgtagtttcttaagttgtatcacaaatctttgtttttgtttgtggtagctgcgccagcaaggaaaatcattaactaacaatattattactattaaactgagtgagatatgcagctatatagttaatggttacttgccctatttgattcaagtgaaaatggtgttttgggtttggaacaactgagcaagttattatcttcttctgttgcttgaagatgcgcctcaacagttgttatttttggtagctattccattctttataatgtgttcttgttgcaatcttcttatatatttatttacatttgtttttggcagat

SEQ ID NO: 53382 - DNA, 859 bp, Populus trichocarpa
  Intron number 1 from transcript POPTR_0005s18300.1 (locus POPTR_0005s18300) derived from phytozome v7.0 (chr-ID scaf fold_5; pos 16433891 to 16434749)
tattggaaagccaataaacatcaagagcgagctgtgtaagtgctttgcttttgttcttcttttcttttcctttccatagattctcttttagttatttatttattatttggtggttgagggaattggagttttagctgttttttttccttaatcctactaaattaatattccatcggttagttaattacattgtataattggtttatttatttatcaaagcagtagtattaaatttgactgaagaattaatttgcctgattactttcgagttttcaactggagttttgctttaaacttgaaattctttcgctttttttaataaaaagaaaaattgctaagataatttaatttctttggggtttttcatttgaatttggaagtctttgtcaagtttccatttttaatggataaataaataaataattaattagaatttgacaccttgtaattagttggaagaagatatcatgctaagggcggccattcttttttaaaattcaaggatatcctagaatgtgactttagattattaaagtataagaaggtaattatctcataattcatcgacctgaatttaacctcgaaacgaaacaattaaggcagtaaggaaggccttggtcaaatactagtaagtcttcctgaaagcactttcaaagtgtttatgtcagtcttatagcttgccgggtgctttattttatctttgggcttctggttatgcagatccccttgtgggtatgcagtcgtttccagattgcaaagctaatacttatggttgaatgtactgatcaaggagctcgttaatgtttgtgttatgcggttctcaggttcgatctatattttcggaagaatccatttggtg

SEQ ID NO: 53383 - DNA, 178 bp, Populus trichocarpa
  Intron number 2 from transcript POPTR_0005s16680.1 (locus POPTR_0005s16680) derived from phytozome v7.0 (chr-ID scaf fold_5; pos 13676910 to 13677087)
agaacctctctcgccctcgcttcgagcttcacaaggtttgtcaaattttattgtgattttaaagactattagtttttgaatggaagatgtatatcttttgtttttatcttcttgattaaagaaacttgtagagaaaattgattcgattattgctgattagtatatttctttgacagga

SEQ ID NO: 53384 - DNA, 532 bp, Populus trichocarpa
  Intron number 1 from transcript POPTR_0017s07230.1 (locus POPTR_0017s07230) derived from phytozome v7.0 (chr-ID scaf fold_17; pos 5624921 to 5625452)
ccccaggggcatcaacccatctcactcaactactagtccttgatgatcaacataccatctagaaaatgttttatgttatggtaaacttcatccagtttgcttggtctactattatctgctgtggtgatttactgttctctactatctcttcatgtaattttttctatctgttacagaaatatgcaattacatttacaatcaagctttaatgtaattgcaaattgaatgtcgtagtcccaatatcatggtttttctttaatcaaagcggagaagtagatttaatcttgatatacaaaaactaatacgaaaaaaatcaacttaaggttaatttgcttaattttgctaatcatttaagatgaagagtataatgagagtggtgtatttctaaattgtacaaagcataagtgaatgtctctaaggtgtattcctcctatcggagaaggacttcataccacacaaaagataattgcagagcagtagctcattattcttgtaactcacagaaggtgtaagagaactgcaagagagtgag

SEQ ID NO: 53385 - DNA, 721 bp, Populus trichocarpa
  Intron number 2 from transcript POPTR_0005s10640.1 (locus POPTR_0005s10640) derived from phytozome v7.0 (chr-ID scaf fold_5; pos 7656026 to 7656746)
caaagtgctgaaaggtattcaaggtacgtagtttgttctcttcttctccttttcggctctctctcccttttatttttttaaagatttctctctctttttcgagaaagagtttctttagttttaatttttttttaataaaaactaaaaaaagaggccaacgagaggtagggtgattttgatatcatacaggtatgaatcttcacatgttaaattaaatacaagtgctatttcatagtagatcgaatttaagtattgatatttttatttaataaaatgtgtttcaagaacacaggttgagaagacattaatattttaaaatcttaatgttaaatcactacctacccttttagaaagcatccgttagattctaataagtgatgatccccttaaatgtgattcaacgaaacaaaaacgttgacatatgtcttaaaattctctgctagacaaaccctaaatgtttcaatcatgtttcctatcaggctctatgagcatcttcacttgcatgtcagataagttcatactagattatcatgctacggcctgcctcattctatgtatattaagacgactccaaccgaatccatatagtgtttaaattcttaatagttgagtattgagttataatgttgatctttttgtttccatgataatcatatttattttctccatatttgattttgtgttaggggtgtctttcaccatcgacgccagccgggggcgt

SEQ ID NO: 53386 - DNA, 902 bp, Populus trichocarpa
  Intron number 1 from transcript POPTR_0113s00220.1 (locus POPTR_0113s00220) derived from phytozome v7.0 (chr-ID scaf fold_113; pos 15860 to 16761)
agaccttacacccaagtgaaaggagtagtgggtacttgaatgttaatggttcaaaggccttcaagtcttttctttctaatcgtgacttcattgagtatcctctttgggcatcgttatacatggttttggggaagatcaatgagcagaatagacagaacttttgcctctccatcttgtctcttagaatatcctttactgtctttgactagatacccctagaggatccgatcactgtcatttagttcttggccagattcgtgagaattgggggtggaggcaaccaaattcacgcaattataaatattccagattcgtgatgatccgatcactatcacgcaattaaatattccatctcgagtcgaagtaaagttataaatattgttagtgagaaacaattttctggcttcaatcaaaacgttatcactaaaggagtcgagttttgatttaataaaaagtcaacttgtaaattatactaacttattataatactttcatcatcaaaacaaattgatttgatttgagtagattattaccaaacacacttctaatttatttcctgttagtttccgatgatgccgcttcttcccaactctttgaatcatagacgagtccagtcagtaatatttgaagactgtttagcagatatactaacagaaaaacctcaagtaaaatcttcaacaagtcacttgacaagttgagtgttgaaaatacctacacgccaatttatcagttagagatctcctatacaagatggaaatgaatatacacccaaaggaaaaccgatgaaaagtattgcatctttactgaatgatccttacgcaaagcatatgaatgttatttgacagtcacctctatttgtggggttaggttcatatcctacaaactgttccggaaacataatt

SEQ ID NO: 53387 - DNA, 366 bp, Populus trichocarpa
  Intron number 2 from transcript POPTR_0017s11730.1 (locus POPTR_0017s11730) derived from phytozome v7.0 (chr-ID scaf fold_17; pos 11494178 to 11494543)
tcaattaaggttcgtttttgcttcttattgtctttgtgatttctttcttattcgttctttttggtgtagagcatgtaatgatgagtgtttcttgaagctcttgcctgtgattctgttttgatgctcaagtgttgcgttcttgagagttaaaaatgagggaaatctaactgttcttcgagagggaaattgtgtgatgagagataatttgggttataagctcgcgaattgcttcaattctttttactcttagtggcaaaactacagtcatcggggaatgttttgagacccccattttatggacataatggtttggaaattactgatttaagtgtgatttattgtttgatttggcaggatttattatta

SEQ ID NO: 53388 - DNA, 1006 bp, Populus trichocarpa
  Intron number 1 from transcript POPTR_0017s09740.1 (locus POPTR_0017s09740) derived from phytozome v7.0 (chr-ID scaf fold_17; pos 8376408 to 8377413)
cactggctcgaagaagaaactgccgccgcttccaagtaacctctcaccttcccctccctctctctgtatgactaaaagtgattatgatgtttctgctatctgtaataaattgtgatgataatcattataatttttatcgaattgaatgatttctgattgtgatgggcttatttagttctttttttttcttaataaattttttagattcttcgcattgtcgatgtttagattggatgttgttctgctacaaatttgatgaactgaaacaaattattttcatttttttgttctaagaacttgaatatacttgttcttgttagtgtttaattttcaagatatacaatgggttttcttgacaaaaatttctgtctagttttggggttttataacttggaacaagttttggatagtgaattagctgatgcttacgggttcgaagcagggtttggctatcaactgcaataagccttgtcaggtctattccttaactcttggctttcatttgtcgaaggcttggaatttggcataaattatggaattataccagattctaatgatcccagttgcagatgcattgccattttagcctcttgtgatagatcaattttgtctttgaatctaaacgttgtgcttattgccattttagcctcttgtgatagatccattttagcctcttgtgatagatcaattggttcgccagaaaggagtttaaaacgttgatatgaattcatgaccaaaagcaaaacccatttataggatttgtttataagaaatctggacaactacaaaattgtagtattaaatcaggtggtgttgtttttttattaatgaagaatatcttgctttgatattatccacctgtttactctttatgtgcttattgcttggcttatatgtatactatgttgataggagtcttttcctccatgttttagtacttaagagtaggttgttgatgtatcttatttcagggcttcaaaagaggcatcacctaaggaactggaat

SEQ ID NO: 53389 - DNA, 426 bp, Populus trichocarpa
  Intron number 1 from transcript POPTR_0006s21080.1 (locus POPTR_0006s21080) derived from phytozome v7.0 (chr-ID scaf fold_6; pos 20179216 to 20179641)
cagtgcaagcccctctctgaacctcaggttttgctcaattcaatttctgcttgatttaggaaaaattgaatcgaattccctaatttaacagttgataacttggtttagtgtttttaattgttttttagtagttggattcaactgtatttagtaattttgaaatttactagtttcttttattttttattttagttttttttggcttctggtagagagaaaatatagtgataaaaatagaaatgatttgcaaaataattactactttcttttactgacggggtcacgataggatttttggcagtcaatgcgggaagatttaggatttttttaaaaaaatttggttaatgcatgttttttttttctttatcgtaaaaaatggtgagttaatatttttttttgatctgtttcgatgtaggttaggacatt

SEQ ID NO: 53390 - DNA, 294 bp, Populus trichocarpa
  Intron number 2 from transcript POPTR_0005s26030.1 (locus POPTR_0005s26030) derived from phytozome v7.0 (chr-ID scaf fold_5; pos 24170566 to 24170859 reverse strand)
aaatctggctgcgagttcccctcctacgaaaattggtaatctcaatcttcataatataattaactggccaggttcaatgtttaaaatatgatctatcagttgtacctccccacaatttgttttttaaaaaaactcggtttaattgcaattattttttgtttaaacatgcaattatgaatattttgattagtgagagataaaattgaaaacaaaaaagaacattaatacttaatgatgctcgtctggtttcgtttctcagattgtggtagcgcttgcgaggcgaggtgccagtta

SEQ ID NO: 53391 - DNA, 448 bp, Populus trichocarpa
  Intron number 2 from transcript POPTR_0006s10760.1 (locus POPTR_0006s10760) derived from phytozome v7.0 (chr-ID scaf fold_6; pos 8138400 to 8138847)
tcttagcagtagcagctcgtgattccgtggttgcggtatgtacttaatttatcatttctagtcttccatgtaattaatttagacaaattgtcatacgtagtcaacaaatattgttttgatgagcatgtctcgtaccggcccgtattctacattcaaagacataaggcttttttcctactgtatatcatgattcggttcagtatccattagggttatattatatatttgatgtcgttcatttctaaaaatatagaattgtcattcacatcgaagtactttggtttagggttgagaattctccaaattattccgattacagtgaattcattcgccatattaaacattgtatttgtttgtgattatttcttttttgtttcacgtgattttctccccatctgtctatgggatcttaacagccatgttatattgtgcagctaggagggccaac

SEQ ID NO: 53392 - DNA, 622 bp, Populus trichocarpa
  Intron number 2 from transcript POPTR_0017s13420.1 (locus POPTR_0017s13420) derived from phytozome v7.0 (chr-ID scaf fold_17; pos 13591976 to 13592597 reverse strand)
ggtcacttttcacttggggtttgttcccttctaacttttttatggtattgtttattgtattatctatcctttaatcgctgttcatagtggatttttgtgttcaatttattatgctgcactgataaaaaaaaaagcatggataataggactttttcttctcaatgaagctgtaattccttgttgccgggagcatactttggctatcacttgtgacctttgttctttacctggggtttgggaataatatcctcattttgttcaattccttggtgatgattgtgccttggaattcttctaacatgtaattgaaaatgttagtgatttacttattccagtgttttttactgttattggttggatagcggattttaatattttagcagaatagctgtataatagtttttctttatggatttagatgtttatcttctcaaatttgtttttgtgcctatatctattttcttttttcttgcattagcaatgtaccctggttttgggtgcttgttcaatatatcgtatcaaggatcacatttgatagtgtacgtgtatttcctatgaagaaagacattatatacctctctgtgaattcaatcaggggctaacgaatttggtcaactgggag

SEQ ID NO: 53393 - DNA, 724 bp, Populus trichocarpa
  Intron number 1 from transcript POPTR_0005s25360.1 (locus POPTR_0005s25360) derived from phytozome v7.0 (chr-ID scaf fold_5; pos 23632732 to 23633455)
gtggaattattaccacatttaggtgggtttttcagggggagaacggcaaatttaggactcttatgtgttctgctcgcattggcatgcacacagaaccgaaatccaaaacaaactgttatctgaccatttatctgccgagaaatgagcagcacttgcagataaatatgctccattcgagactatagatcaccaatcactgttattaaattgtaccaaaactagaggaaaaaattatgttttttttttaaaaaaaaactttgtatcatcttcatgttttcttttcatgataaatatgatttttttattagtctactgaccacctgactcttaacataaaatgcgaggtaaagcttaaaaacacaaaaccttaatcaaacatgaaaattatgattagttttctcaatctttcagtttatccattagtctcggaaaaagaacttaatacttatatgattccacgaacctcatcaggtaatatttgacaggaaaaaaaagcaaataattatagaaatttaaaaaaaaatgttcgaccgagaaatggcaccaggacaaaaaaaattaataaaaggattaaaataatacaaaacccatcatccggggaccaaaatacaacattactcccactccataacgagacaaagtagatttcatgaatttggcctcacatttataaacgacaacacacacagacagacactcctctctctctctctctctctctctc

SEQ ID NO: 53394 - DNA, 1028 bp, Populus trichocarpa
  Intron number 1 from transcript POPTR_0005s10080.1 (locus POPTR_0005s10080) derived from phytozome v7.0 (chr-ID scaf fold_5; pos 7181611 to 7182638)
acccttgggatctaccaagtaagttatttgtttcagctcttaaattgtttttcataaaatatctcctttcctttttcacatgagtttttttaatcaaaataaaaggaaatattagggtttgagaaaacaaatccataagaattttgtgcatggatttattgatataatatatattttaagtaatcattttcattaattttaatgaagttatagtgcatggctatctctaggtagctaatatatatacttttaatttcttggcatatgttgatatgaagagatataaatgatcggttgggatttctagccatatccatggctaaatataacacgcacacttgtaagagagagagaggagatcactcgagaaaaatgaaacaacaaaacaaaaggtgtttatcactgtctttgcaagaaagcaatgtaacaaagtggtggtggttatagaggatattttcaatacttgttttatgcatttttttcatgtgaattttacatagatttatagagaaagaaactacatagcaaatcattcggccacacacagagttcattaattaattaagaagttaatctggtttcttggttatattcctcttttataaatttatatttcgcttaatttgtctttttttattaagttaataggaaagttagttcaatttgttggattcatgtttaaattataatttttttacttcatcttcgataattttcttttcgtgtttagccatgccatattttcaatacctaaatcagttgcttaataaaaacatcttcttccataagaaaaatggtaaaataccagggccttttacgaatgaaaaaaactaagaaataacgagagagaataatttcatttcctgatcttgaagaaaaataatagctggcaaaactatttttgtataaaccacttgtttcagccagcatgccaacttcttacatattttgttgcaaatctctctctaatttctttggtgtatattcatgtagagtcaagctgtgtgggagataaggaagggtacttc

SEQ ID NO: 53395 - DNA, 548 bp, Populus trichocarpa
  Intron number 1 from transcript POPTR_0005s06240.1 (locus POPTR_0005s06240) derived from phytozome v7.0 (chr-ID scaf fold_5; pos 4102457 to 4103004 reverse strand)
aatataaaagattaagaaggtttggttatttgctcagcatgcttactgatacagctattagcattcttgtcaatgtcctattttttagtcaactattgctaaatctatctggcacctacacgcaatgagatctacatgtaatggaatagtaatggtagccttaaaatatcttctatatcgctaaagagtcaagaatcacacgcttttagttctgtagagattttcattggacatgcaatgccatcctaaccactagaaagtttagatttattcaagtttcagcaactttgcttgttagtttatggttttgggtgtttctgtttcatgcttttaatgaaccaggtagtgctcttcacactatgtaataagttcattgcctgttataaactgctttacctcaatttgactctgcattcaacatttctaaaggtcgtcttgttttttctttcgaagttgattcagttggttggcattggttgacttgtcctgtctctggtttgtctgcaaaagcaggagcctgagtcaaagtcggagccggagccagagcc

SEQ ID NO: 53396 - DNA, 478 bp, Populus trichocarpa
  Intron number 1 from transcript POPTR_0017s09000.1 (locus POPTR_0017s09000) derived from phytozome v7.0 (chr-ID scaf fold_17; pos 7665721 to 7666198 reverse strand)
agctcgctcaagctgctcgggtattctctccctctctttctgacgcttttggagttcatctttttttttttagctcgattagttactgccctttctttaagctctcttaactgttgttaatcttattttccaattttcttaaaacattattaactcaggttttttcgtccaatttgcaagaaaaaattacaccggaagacgtggtgtcttttgtttttgggttttttttttttgaaacatagaacttaattaattgaaatatctgattttttttggaaattagaattttagatcgttctagctgttagatgattaaaattttaactgtttcttttgtattaaaagttgtggattgaattttcctactcaatcagtgagttttgactaatttttgttagctgtctctgattcagttaatttgatagagaatcttgattttaattttttgtttggtatgattatggtatttttgcaggac

SEQ ID NO: 53397 - DNA, 768 bp, Populus trichocarpa
  Intron number 4 from transcript POPTR_0006s08100.1 (locus POPTR_0006s08100) derived from phytozome v7.0 (chr-ID scaf fold_6; pos 5892491 to 5893258)
gtcatttgagagagtatgtcgttctaactcccatttatcacttgaaaaaagcttgaaacatccgcagtatagatcatatgatcatcaattgccaatgcattcacgttgtatatagttatttcctttgtttctacgttcatggtgtactataatgttgttttcttgtcattttcttggatcctgtctttggtcttgtaatcttgcgtttaagcccacatttttattctttcaaacagaaataatcccatttgtgatggacatcaattagtcagagttaaacaaccatgaccagttctctagaaaaggttttggattgaatagaattaaaacagaacatttgcatttctttattagctacaccaaggataaagaagacacctaggttccatcatgcaaaaaaaaaaaagatggacattcaagaagatatacccctagagtcaaagtagtttgattgaaatggagaaaagggactagcacagtccctgttaggctgaaaggatgaaattcgatgataaaacaatcattaggaatgaaaaaccagcttgtgcttcttgaaaatgcatgtttggaatacatttctgaagtaatgtgattatgaatgatgatactaagtttctataatcatggcttttttatgtctcaatggacttccaccatctgatttgaaactgtctggcaagttttgttcctttcttttgattttgaggatgcattggactgagcttttccttttgtctgtatgcagtggcccttgtgacattattggtg

SEQ ID NO: 53398 - DNA, 621 bp, Populus trichocarpa
  Intron number 1 from transcript POPTR_0017s02780.1 (locus POPTR_0017s02780) derived from phytozome v7.0 (chr-ID scaf fold_17; pos 1993439 to 1994059)
ataaaggtcgtcgtcaagttgtagggtgggttggttttcccttatccttctctctactgatttttttttctcattagttaactagctgcgttttcttgattttgcctagtggggcatgattgtttttcttattaggcctgcagatttgatggactaaataatcattagttgattgaggttttgttaagttttgctttgtcttttaataaaacaggattcgtcataaatgatttcttgacatgttagaaaagcagaacttgattctggtttgcgaggttggtctagtacaaaatctttaatgaatgtgatgaatggttgcttacgggcgcttgaggccacttgctagtccatcatggtgggcttatccatgatgggtggacaggattggcccacgtgcatggataattgtccatatcttttcctaaatcttcttgtggagcagggaaaatacagtttctgtcctgctctctgattgattggccatctttgttggaactgaaaacatggaagcaataattcaattgatgatttgattccaagtagtccagtttgtgcccgatttgattacttttaagtttcttggttgctaaattttctgtattcttgtttcacatattgcag

SEQ ID NO: 53399 - DNA, 322 bp, Populus trichocarpa
  Intron number 2 from transcript POPTR_0017s09450.1 (locus POPTR_0017s09450) derived from phytozome v7.0 (chr-ID scaf fold_17; pos 8068906 to 8069227)
aggttttgctttctgggttatttctgtcgaaacaggtaaaaggttaggtttttcatgtgtaattattgagttttttttagttattcaaaaacaaaacaaaaaaggctaaagagaggaaattgagctgttctgttttgcgggtagataaaaatctgagcagaaaaagtgaaactttgaaagatttgaagttatgcaagtgagggaagatattaggaaacgaagaattgagttctttgtatggtattctgattgaaaagaggggagagtattttggttagttatataactaaccaaaatgcagaaccgcttctcgtcgaaagaa

SEQ ID NO: 53400 - DNA, 653 bp, Populus trichocarpa
  Intron number 2 from transcript POPTR_0006s25770.1 (locus POPTR_0006s25770) derived from phytozome v7.0 (chr-ID scaf fold_6; pos 24148831 to 24149483 reverse strand)
gcaggaattcaaaagttcaactacttgccctaacagtaagcttggcatctcttggtttcttttttcactggatgaatatatctgtttactttattcagtttatgtgatacgagtgcaatatagttttcagcatgcttgttacattagggttctatttacttttttttttctttttcttaaaggtaaattgaatcagtgttaggttttattaggagagtgtcgtgtgtataagagaatgagcaagcaggtgcagtggaatacttggcacaaattggccaatttctgaagtagagtattatggtgtgtttgattgaggtagaaaggtgagatctgattgtgttaggcgaatttgggtttggtccgagatcctttttttcttttgcctcggtatggtattggaaaatgaagtcaaattagtttgtactgtaattctctttttgagagagtgatggtatgattaggtgtagaaggtagtaaatttgtcggggatgctgttaatttagtattaattggatcaccagttttctcagtgtaacattgccactcttctggtcattttttaacaaccctgtttccagaggactaagtttgtttcaattttggtctgggcgcttctagctgttagagacaatcataaagaactgtggggacat

SEQ ID NO: 53401 - DNA, 376 bp, Populus trichocarpa
  Intron number 1 from transcript POPTR_0006s25770.1 (locus POPTR_0006s25770) derived from phytozome v7.0 (chr-ID scaf fold_6; pos 24149517 to 24149892 reverse strand)
tgcaatcgcgaccctacgtatgcgccgcagcacttgattcttctctcttgatttcgtgtttaagctttttttttcatatataattttgtaactcattactttgtaatttaaattgatttgttttttaatttgtaaatgttttggataaacttctttcttaataatttgatcgaacagttgattctgattagctgaggagaaaatttcaatattttgaaccgtgttatattctcgtggctagttattttttttcttttatttgcattttgaataaattataaagcttgcttcttgtcgatctaaagactaggaacttttttagattgcttacgttttaaattttttggtttgatttggattaccaggcaagcgaagg

SEQ ID NO: 53402 - DNA, 300 bp, Populus trichocarpa
  Intron number 2 from transcript POPTR_0005s04940.1 (locus POPTR_0005s04940) derived from phytozome v7.0 (chr-ID scaf fold_5; pos 3305374 to 3305673 reverse strand)
gcagcattgaagaggtaatcccttattctttatagcattgcagtcttcttctgtttctaagtacatgcattgttatggtgagtaaaatttttgtagatgatacttcaaaaactcacccatataggtccaactgcctttgataatggttttgtttgttctggtaccaatttaatgaagcttgaaccatgtagggttattttgcaggggcaacgaatttctttgcattctcttttcttaaatgaaactggttttgtatatgaaggatgaaatagttttttttttcaggtagcagaaaaatta

SEQ ID NO: 53403 - DNA, 927 bp, Populus trichocarpa
  Intron number 2 from transcript POPTR_0017s11000.1 (locus POPTR_0017s11000) derived from phytozome v7.0 (chr-ID scaf fold_17; pos 10651939 to 10652865 reverse strand)
tctcttgtcccaggtcagttgtttagtttttccttttcttttttctttccccgttgatggcaagacttgaaattctgtattttgttttctttggaattgtgataaatttgatgaaagacagctgttactttcaaggcaccgcattctctatttagaacatggaattacattacctggttatctcttttaggaagagttaaaaatacaagtaattcactgcccgttttgatatacacagtaaactttggggctaccatgattttccatcacgactctcttttttgaagaaattgtcaaaagaaggtcgagtttaggaaaattttcgaataattgaatcggaactttggtttaaagctgtaatcttcatataaagtgaatgccaaaaggtagggccagtggttggaatgaaatcctaatagaaggtaatactgatatttgagttttcattttgaccaatcgtgacaagtcaattgcttcatttttacctagagttgccttatcttctgctcatcaattaccagttgcttcctctgtagtctcttttcatgcatggagcatcgtcccctgcagatagaaggggagtgtcgggtgctctaatttgacatagatatcatgattagatttgagaactcattattatagtggaatataaatcaataaaaggtcttgatcactgaggcgatgaaaagggaaagagctcatccatggtttttctgttgacataaaattagcagctgagcgaggttacaaatattggtgtcattttaagttcctgtttgtacatgtaaccaatgaatacgaaacctcatatcataaacttaaaaatcttggatctaaaacagggtgtggaaaagttttaaaataaatctttgcgttgaatctgacaaaaacaaaacttgtaaatcttgcagaaggaagttcctgtag

SEQ ID NO: 53404 - DNA, 783 bp, Populus trichocarpa
  Intron number 1 from transcript POPTR_0005s03160.1 (locus POPTR_0005s03160) derived from phytozome v7.0 (chr-ID scaf fold_5; pos 2073682 to 2074464 reverse strand)
ttaaagatcaacaagctgcccttgattaataactggtaaaactttcttcctgttcgtccattaatttctctctgttttgggttagattccacttgtttggccattgctgtagcatcattcatgctgtttatatatgtttttgagttttcccttttagctcaaaatgactctgtaattaattaagatctcagctaatttcccactggctcctctctttataactttcattgctcttctttgctgggctcatatttttcttcttaaatattcctgctctgttctttctatctcattatcttctgacagttattattcacttctatctccttctttctgattttccacctgttttgggctagaacctctgagctttagaccactattattgtctgatcattctaatacactcttgtttgatcatatttagcctttatttatgagatataagaactcaaataatctcccaactgtcctccatccgctagcttctctctttatttatcaggtgtaagatctcaactagtctttgactaatagtgaatctgaaagaataaaaatatggattgtcaatcaatttttgccgtctgccttctgatttcacttcaccatttgaattttccagtcgatgttaaataatatggttttggttttttctttggttttaacgaatattcatcgacatggcttttactagttatattactgatcattataattatatcgtttgttttcttattgcttgttacagggaataattatcacaagtagagcttacttctacat

SEQ ID NO: 53405 - DNA, 524 bp, Populus trichocarpa
  Intron number 1 from transcript POPTR_0005s16160.1 (locus POPTR_0005s16160) derived from phytozome v7.0 (chr-ID scaf fold_5; pos 12829881 to 12830404 reverse strand)
gctccatctctccccctgtctcaaaccctcctaaggtagcactcccatttttgtttttattgtagtttcagttttttattttgattttttctagagaagtatgtgtgaaaggggagtgattatgttttttctctcttcaattttcttcactcagttgttacaggtgtgccaattaattagtgtcatatgaacttgggtgagctaagtaattgtcgttcgtccctttctaattggaggcatcaagcatagattgggcaggtcatttatattgaagaaatataacttctatgttgtaattatgtaattcaacacttaatttctctcgttgcagtagtgattagcttaatctcatctgggttttttcccctccttgcaatgtcctgtataataaaaaaaatcgaagaattaaaagcaatttttccctttatgttttgctgaggaatcaaatgtgagctattgcctggtgatttatgtgttgctttatttctctcctgttatgtctaggtttgcagcctcagcatacg

SEQ ID NO: 53406 - DNA, 773 bp, Populus trichocarpa
  Intron number 1 from transcript POPTR_0005s17810.1 (locus POPTR_0005s17810) derived from phytozome v7.0 (chr-ID scaf fold_5; pos 15562614 to 15563386)
tctccgtgctggcctcacctactccatcagtataagtttgtttctgcatatacgaatatacatacctatatattcacaactcttcgttttgttttgtttgtccagtttatttttctaggttttttcatttaattaatataagtatttggtctaacttgcgtgtatcttgactaatctcacggatcctgaaattaacaatgatgtaaactttcagtggccatcatattagcaaccacaagctagaacataagaccacaggaaaaacaaaccttttagtcttaagctcttattattgtatcacctactagatagttattttttcaagtttttaaaggactatctactagatagttattttttcaagtttttaaaggacgggaagttaatattttttgaaccacttgagattttcatttggatttattttaattctctcatttttgtttgcttttggcaaatccatgcgctaatcaagtcttttttgttttttttaagtgttttaaaaagaggttttttccttttccttttatgcgcttggtaagatggaggttctcttaagtaaatattttttttttttggttgtagacctggttttttagtgttaggtagaaatattttttcattgcttaatctggagttaattacctttcattggattgggagattcggatggaacaattcaggtagacaggagaagtgttgggaagtttaaaggctctgatggtattgaattttcaggtttccaaaacacaaaatctgaacccgaacaagct

SEQ ID NO: 53407 - DNA, 571 bp, Populus trichocarpa
  Intron number 1 from transcript POPTR_0005s05500.1 (locus POPTR_0005s05500) derived from phytozome v7.0 (chr-ID scaf fold_5; pos 3641131 to 3641701)
cttctcctttttctatcacttctgctggattcttggtaagttctatcctttctttccttctctagttgcttttattctgtttctttgtttataaactgttgtttatgttgacttataatctagtttgtttttttctgtgtctagcttggtggttttctaagtggatttgtctgtttgtttgttagtacttttgagttggttttagtgtctgtatttttgcatttgtgctgtcaattttctggattttgctatggtaaagattgtagtatacatagggggtgtcagctttggattccttcgagtgaagaacatgataatactaacatgttattttgctttccaattcaagaaacatcttgatttactgctaagctagcttggaaaaacactgatatggcttgctatatttttctcatgagctaaaatttagatatattaccaacccattaaagtctgaaaagagaaaaatggagacttaatttgagaggtatttgcttatggtaaatttggtccaaatggttgatttattataacttggtaattgtggtagcaggggagagattctgtacac

SEQ ID NO: 53408 - DNA, 527 bp, Populus trichocarpa
  Intron number 3 from transcript POPTR_0005s25610.1 (locus POPTR_0005s25610) derived from phytozome v7.0 (chr-ID scaf fold_5; pos 23846159 to 23846685)
aacaatttgatttggtgagactcttcttgccgagtagtttatttctaattatgtttttcatttttatcttgactcgatcttttttaaatctaattttcaagcacatagttcataaaattatattctgttttatgctatatgtgtgcaatgccagagagacatcaaatcgtaattgtttgacctgttattttttaaatatcatttgggatatcattcttttgagattggcatgaccatattaatcacatagatttgatcggaggcattgaatctagacatggtgctattttagttaaatttttgtgaccatttcatctagtcagttatctatgccttgagcaagtatttaggcacccctggtgtaggtgaagcttcttgcacatttatttgtggtccatagctaaattgcaagtatgtccggatggcgtgcatgcacctagagtactgaataattcatcacatttataagattcctttgtctcataagaaatctctattttgcacatttcagcttgaaagtcaagaat

SEQ ID NO: 53409 - DNA, 585 bp, Populus trichocarpa
  Intron number 1 from transcript POPTR_0006s23540.1 (locus POPTR_0006s23540) derived from phytozome v7.0 (chr-ID scaf fold_6; pos 22251995 to 22252579)
tggtcttgtcatttgtgttaccggtctatccaaaggtatttactttgtggtactgagtaatattttttgcttgtttttaatttttaagatgttgaattgttgatttattgatcaagaaaaacataaagaagtcatgaaagattgtgatattgtgtttgaaatttgtattatatattgtagatttgtgtttatcacataaaagtaacgtttttttttatttgtatgaagtcacgaacaataactatacagttgcagctgtttgtgttattgtcatgataacagcaacatttttaacagcaacattttttctttgaattgttaggtattaggtacatatttgagctatatgttttatgtaattttctctcctttaaaagaaaatatgatgctaactaaggtagaattatggctatcttgagtatgatgtgttgcttcatctttttgattctctcttctaattatttgatatgttaaatttgtgttcttttttaacagataaaacaattcaattttctcgtttaatttgctaaataagtagttgttcaggtttgaaattcttcttatgcagaagccaggaaacaagtc

SEQ ID NO: 53410 - DNA, 659 bp, Populus trichocarpa
  Intron number 1 from transcript POPTR_0017s09660.1 (locus POPTR_0017s09660) derived from phytozome v7.0 (chr-ID scaf fold_17; pos 8327552 to 8328210 reverse strand)
aaaaaaaatttggtgtgacccgacgggttgacctggtaagacccagtaaaaaacccggttgcaacctgttgacttttgtttttttactaaaacgacgttgttttgatttttaaaaaaattgacccgggcaacccggtcaaaacccggaatccgggccttggatcaggccgggtctaaaaactatggttctaatagaaaataagtaaccattttctatttttttaattataaaatattttttcataaaaattagatttttgtctaaatatctaaagaaaaaaaatgaagaaaaccattgatgcaagtgataaataattttgattgcataataaagaattatttataaaacttagaaaaaataggagttcattcgtgtatattttcaggtatctctttcttatctctctctctctctcttttttatttatcacatatatagcttttgaaaattagcaaagcttatttggtaaatttagtcaaaagcacaatcatatgtgttggtcatagatgatttttttgataataaaaagtagattttatttgaataaaaagtaaaattcaatcaaaatctcaccacttccattttcttatatttctttatggaagcctctctaattattcttttatttttttgcaatgggaaatctttatttcttaga

SEQ ID NO: 53411 - DNA, 651 bp, Populus trichocarpa
  Intron number 1 from transcript POPTR_0006s29180.1 (locus POPTR_0006s29180) derived from phytozome v7.0 (chr-ID scaf fold_6; pos 26634519 to 26635169 reverse strand)
ggatcttccaggtagttataacttgaaatctagtttccatggcactcgtaaccagcttgaaattggctcgatctgtcaatttgtttttcaacttttgagtttttcgaagtagaaatcaaggcacaaacattcaaaaatcatttcttttgttgataatggaaaatttgatttgtcaaaatcgatcctataagaactctttattcatgcaaatcatgatggccaggaatcttagtttatctacaaggaattaggcagttgctattcatcttatcttttagtagtgtggctagattttaattttttttgtcactttcttcaccacttactatgatttagggtttaccacatgttccttgaaggaaatataaaaaggtatcgttaacaataaattgcactttgggcgtttagccccgatttcaacctctctttcgtatgatctaaaagaagaatcaaattgctttaattcactacatttgttttttgttacatctcatgagattactttagatacatatgaagccataatttttttgtgatttcttgtttttcgtaatttctcaccaaaacataagtaaattacataattatatataaagcttgactagatccttgatagtttcaatctttgcctcttaatcagggaaagcaaag

SEQ ID NO: 53412 - DNA, 946 bp, Populus trichocarpa
  Intron number 2 from transcript POPTR_0005s14550.1 (locus POPTR_0005s14550) derived from phytozome v7.0 (chr-ID scaf fold_5; pos 11598309 to 11599254)
aagtttgttgatttggggaacaaacctgagtaagttactttaagccatttgcccgtgttcttttctacaatgccttgaagaaattacgatattaatgcgcttttcataaaatgtttcacggtgtttcgacttcttgactcagttgacatgaatccagctcctttgttagaattctgtaaacaaaatatcgtactatagttccataaatttactagtatgttttatggttgataatttcgtggatttctactgtaatgttagggaaggctggagcaaagtcgcaaaatgttatgtaaaaaacactgtccatattgtaaacaaggcattgtagagggcactggcgaaattgtgggtgctatccaaaagtttttggattatacagaaaactcctagaagtttccaatttttaactgaatgttggcggagctcccatgtgagaattgaatagcgagtagataatgattttgttcatctatttggaaatttttatagatcttccaatttgggccaaccctttacgtgcttggtgttatttacacttatttcagaatataagttgattgtattggactttgaatagatatcctgatggaaaaaaatacttcttgctgctgtagcaaatagtcgaattctataatgactttgggtgaaaaacgaatgcactgagcatgatttgatcaacatttttgtctaatcataatagtgtcgactatactaaccatcaagaaagaaccgcagtactgcctattgatggaattttgaattcaacccacattggtcaaaataaaggcagttccatggttttaatcaaaggcattgaagaagaagaaaagcaagtgatggtggataactatattactctgttttgtctacttggtttgtatttgaccatttgttttatcagttatgtttcttctttgatataggttcttgaaactaaacccag

SEQ ID NO: 53413 - DNA, 724 bp, Populus trichocarpa
  Intron number 1 from transcript POPTR_0017s14210.1 (locus POPTR_0017s14210) derived from phytozome v7.0 (chr-ID scaf fold_17; pos 14355082 to 14355805 reverse strand)
atccgttatcgcgcaattgcagcctctcctttcaggtaatcctcagcaacttcaccgtcttgtttcatttatcttcgattttcatcttcttgtttttctttttttatttatttcgtttcagtttatgttttaataatatagcacaccagtaaattctttttaaaaaaaatgattactggataattagctcaattccatcgaattaaaaaaatgggattttgttttaacattttaattttttgatggtattaaatttaatgattatagattatgaaccgggattaattttaagaggtgggttttgcagataaatacattttattctgaaatttgaggtcttgaattgcatgggactgttattgcttctgtataaaatgggtactgattgaatttgaataaatatgatgtaacatggaatttatgattctagaaggaggtttttttttggttttgctgtcacacgaattctatatgctgtgttattccagcttttgatgtgtttttaaccatgatgcttgatcgtgaatagaattgaggaactgattttaaatggaaattttatgatttcactttggcgcattgctcttcctataattatttactgtttttgagtgcagaatgtggagaaagtaactctagtgtttcttggtaatgctgctttgattatttcatatgattttatcagtatggtttcttgatacaggtcagagttagttaagctaaa

SEQ ID NO: 53414 - DNA, 608 bp, Populus trichocarpa
  Intron number 1 from transcript POPTR_0005s08410.1 (locus POPTR_0005s08410) derived from phytozome v7.0 (chr-ID scaf fold_5; pos 5809991 to 5810598)
ccttgaggtttttgtgctttttggctccttgtattgaatctttgtgtgttcttagcttgtgggtcctcgatattaatgggtttttatttttgttttgtttaaatttcttttccttgtacatgtatgatctgggtttggttcgttttttgatttagttgttattggatgagtaaaaaattggtttttaagtgagttttttttcttttcttgactctgttttctttgtccttcgagctctgcatagacccaaagtttccaaaccatatagtatcaagctgtaattaaagagtggaacttcttatgtcatattctttatgtaattagacatcatgggttatcattttaacctaagatagttcagaggtttggcaatgttagtgtaattaaattcaattgtgttaactaacagtaatgcacttaagtagaggaaagttttgaattgcagtgagtttgttgcgatcctgtatcatttcaaatacttgttaaacattagtcagactctgagtcgtggcgtttctagaagttagaatataaccatctagttgtacacacgacctgaaatgagatgaaaggttgtttacttacaaggtgcatgctcaggtgttcag

SEQ ID NO: 53415 - DNA, 1014 bp, Populus trichocarpa
  Intron number 3 from transcript POPTR_0017s11290.1 (locus POPTR_0017s11290) derived from phytozome v7.0 (chr-ID scaf fold_17; pos 11045070 to 11046083 reverse strand)
gatagttctgcagcttcctctacatcgaaacccgggtatgtttgcttccatttctcgacccacatatatatgcaatgctatgcttgatttggtgtaatctatttgttattttagctcaatattcatgtcactctctttaatatagcattccaatccgtacgacgacaacaataattcctattctgtggttactgttatagggtgcaatagtaaccctgctggacattactaatctgtggactctttggtatatagcaaatattgattctcaatacaacttatatatattctggatcggatatttgggtagattttgaggatacttaactgtagtattaacaacaaacggttccttttattgagttttggtttcttaagaatatgataaagattagagtaggaaaaagaataatctgaatggatgttgtatgaaagaaataatgtcgattagaaattagtagtttcattttatctgaattaactgaaaggatagttgaaaatttctgcaattttcacaaaagactaattccttaatttgctctcatctttaaacaggatagtttcatttgcatttctgcattttgaatgacaaaccatgtttgtaggtgtttgttttcttttcaacaattatctaggagtcgtaggatatgggttatcgaggtcccaagctacgcaaataccaccaccacaatatctagacagatttgttttgctttcaagtttctctctttgagtaagaaactacaaaaagtgggccaattagcccagccctggccatgattgttgtggtaggctgccctgcattagttagagaggctgtctggctcactgccacttatagtaataaactaatatctctgttgcacatcttgcctctatgtgtgctttatctcttttaagttttctattttgatgtgcatatgataagcaccttgtcacctgcttgtgggtaaataatattttcatattgcacattataaatctgcttaacaaatctgcattttatatgaaggc

SEQ ID NO: 53416 - DNA, 1008 bp, Populus trichocarpa
  Intron number 1 from transcript POPTR_0046s00260.1 (locus POPTR_0046s00260) derived from phytozome v7.0 (chr-ID scaf fold_46; pos 54545 to 55552)
ggtttactacagatcgtgagttcttcctcttgaaacaagtgctgcatttgtgtagtctttttatgtagtgacttgctagaatgtgtttttatgtaaggctatgtttgtttttttaaaaatgatttttgggaaaccatttttaaattttcctgtatttgtttgtcattataaaagttagtcaacgaaaaacactttccagtcaaaggaaaatttggtttggattccaggaaagtgttttcctgaaaaattttgggaagaaaacactttccggaaattgtgaaaaatttagaaatgtcatattatttgctaattatatcaaatttagtcctcaaacttttgatttctatatatattttgttttgaatatttatttttcaatttcatctcttaaaatttaatttttatattaactttggtccttatttttataattgttatttgtttttcccttatcatttttttattgaaattttttatgtatcaaatttgatcctcattcttttgattgttacttattttatttgaaataatttatgaaatattaattattattattttaatttcttcatcttttattttttaaattttatctctattattttgattattatttattttatttgtgataatttatgaaattatattttttttcaatttcattctcattcaactttttaatttgtaagatttgttcctcattattttaataaacttgagaaaaataaaacattaataagttattttccagctcattttccatgatataactaaacactggaaagtgttttccaacttattttccattacactaacaaacattagaaaataatttacttttctagaattcactttccaaaagaaaactactttccaacaaacaaacgggccttagatttgtgaaagtgtgatttattcatgggcctggcctgagtggactcggtgatactattcttacagagaacgcacaagagatgttacttgctgcaaccaactgaccttaagaactcg

SEQ ID NO: 53417 - DNA, 452 bp, Populus trichocarpa
  Intron number 1 from transcript POPTR_0005s22970.1 (locus POPTR_0005s22970) derived from phytozome v7.0 (chr-ID scaf fold_5; pos 21819211 to 21819662)
cctgcttgttaatctacaaggtgcgttgttaactcagcgtcctcttcctctctatctcttctttctcattgaagtgctggttttgatttggtatttaattgatcacggctatcattttatcattgcttaagcatgcctttgagtggattgttgatactgtttataagtgacgggtttgtttgtagtctcttttatgttgtttgttactataatcgggaaaacttaagatgatccttttttttttctctacaaatctcactgaactgtgatttttctcatattagtgattcttgtagggataagttgaatgattcgaaaaccatttcctcaaaacttcatcatggattgctaattttctgtgattaccaagagaacttatgttgaattactgtctttatatgcatgcagtaattttatcttttttgtttctgctatgttcagagttcctgtct

SEQ ID NO: 53418 - DNA, 890 bp, Populus trichocarpa
  Intron number 1 from transcript POPTR_0006s19335.1 (locus POPTR_0006s19335) derived from phytozome v7.0 (chr-ID scaf fold_6; pos 18390934 to 18391823 reverse strand)
tcatctctgaaaagttttggcacacatacttggtggtaagatcccatttacttgattaatttgctcatataattgcatcaatatgtgcatgttaaagcaccatgcatgctttggtttcggatttttcttgagaaagagtgaatgatcattaccttttctattttaaatatgcatcataagtttcttaaatttgtctgaaatatgtatttggtatttctcaaatacgttttgggtttgttattgtcactgctgaattccgtgatcagtagttttagctaaactgatggcgttagagtatgaatattgaaatagtttgatgacgttacttgagattctaatgtaaattttagctcatagcaaagtttgtacagttttactagtctacaaacataggatctgaacaattcacttcaaaattgagttgaagatatgatatattttgctagttcattgccgcattttgtgatttatcctacctgcattgttgattcgttgcatactttgacgaaatgtgcaactctttatgtaaagggaagttgctattttaaagggtcatttagaagaatagactccctgtaaattcagccatcggctttccaattgggaacagctgctggctggccctcactttccttttttttccagggggtatggaagggtaagtgaattggggtttgttgtgagtttttgacaagaatgatgtcaaactagggcccgcggtaagagatacctatttctgttttagagatgttttcgaagatatatacggagataacttttacaattatgtacacggtgagatgttggttccatatcgaagtatctactgaataccatccttggatgaggcaatgcacatgcacaagttactctttcatgtttctttccag

SEQ ID NO: 53419 - DNA, 835 bp, Populus trichocarpa
  Intron number 2 from transcript POPTR_0006s22530.1 (locus POPTR_0006s22530) derived from phytozome v7.0 (chr-ID scaf fold_6; pos 21519494 to 21520328)
agggtcgtctgttagaggctgctgaagtaagctcatgaccatcaattcatcttcatcacatcagtaaataagatgtttgttgtaattagaagtcacagtttgcaagtaaacttgtattgcaattttatttacaggttggatttaattgcttgctattcgaattgttaagtatgctagtgcagattagaagtcccatttcccttttttttttgtgatgctttactagcattcctacgcatatagactggcttgatcgtgcttgtggatcttatgcatctaaaaaaaaggggatcggtgattggtgattgctgatactgataactagttcctacgttctttgcatgataaattggaattgagagaatttgtagtcgatatactcatcgctcagctgtccgtgcatgtgtatggactcagatggatgcttcatcctgcatttgttgaaaataaagctaaaagtaaatattgttcaatttctttttcaaaaataacttagtgttttcacttttccttcttagctctcattttgagcttctgtatttgctcgtaaggaatgttctgggtagctatgaaattctgtctatcaatgtcagcctgatacctgctatgcataagggcatgtttaccaccttttgctgtaattttttttgtgaattgcattctacaatgtactgaaactatgtcattgctaattatatatgtttatatatgagttgatcatgctttgggttttggttttgcaactatatattatatgcaaaagttgatttataagattttagtgattttttcttgtgtagtcgtatcacaaggctttgaaagctgatccttcata

SEQ ID NO: 53420 - DNA, 880 bp, Populus trichocarpa
  Intron number 1 from transcript POPTR_0005s16280.1 (locus POPTR_0005s16280) derived from phytozome v7.0 (chr-ID scaf fold_5; pos 12994262 to 12995141)
caacgattacgagtattacgtgcattatacagagtgtaagtgtcggttttaattgcgcattttcaatggttagagttagggtttttgtatttgaatttaggaatttaggtgcttgtttaattgatgcgggagtcatttttggcctttgattcttctgatttatgcaagtgaaacttagaacgtgaattaacttggtttatcaacttgtaatgtctaattatatttctatgagagtatgatttggggcaaattctggtacggaagagaatggttgctgcatttgagggaaaatgtcttttcctaaaaaggaactgattctttggagttttcttcagaataacacctgttaagagttgtgtgtgaagaatctgtgaataccagctacatccatcctcttttttttcccctctcaagtggagggaaaatgtcatgatattcagatctgagatgtgtgattttgcttgcaaaatattatgtacggtggaagattctagcttttacaccttgagttcttcggtgtgcgtgttcaaagtcgtattgctcacaccttcaagggtagaactgtgtcacacgattccataggaagacagtaactgcaaaaagttgatgcacatgaacctatgcgctcagactggcatgtgcatttgcatgcgatttccagtagtattgggatataatttcattttcttgtctctgtttagctagtaaatagatgtgaattggaattccatcaatgcaaatattgttacagtgataaattatttggtgtgcctactttctcattttctacatgtttatttaccatacactgtagtgattttgggagttgtatttattcaagtcaatcttttttactctttgacagtcaataggaggcttg

SEQ ID NO: 53421 - DNA, 679 bp, Populus trichocarpa
  Intron number 1 from transcript POPTR_0017s03560.1 (locus POPTR_0017s03560) derived from phytozome v7.0 (chr-ID scaf fold_17; pos 2584565 to 2585243 reverse strand)
cccataacaagaaggtatctctctctggtatctttcaattactaacgtctaggttttttacgttttcttccttgaattcttgtcaaaatggtatcttttatttatttatttatttgttgcgaaagaatgatgctttcttgttatattatcttcttttgatttgggtattgattgctgccagatggggcggtggggttttggttctttctctaattgaatcaaattctctggttttgggtgttactctttgtgattaactaaggcatgagaaatttttttttctttaactgggtctcaaagagaatgattgttcaactagcttactctatttcatatcaatactgaattgctcatacatctctaattctctactatattttgattttttgattatgccaacaaaataatccctattcaactttctaattgcatgcccttttatccaacaattgtatggattgttgtcttgatgctgccctagaaagtgcacatgtctatcagaatcatacaaactttgtctttgaaggaccttctaaagaaatgttcatccaccatgcatagataaagaaatgcatgttcacaccacaatcatgcacatttaaactcattgttgattgtgtcttttagtagttaaagggtttttttttcattcgctgatttgcttctgtgactcagggat

SEQ ID NO: 53422 - DNA, 874 bp, Populus trichocarpa
  Intron number 2 from transcript POPTR_0006s07260.1 (locus POPTR_0006s07260) derived from phytozome v7.0 (chr-ID scaf fold_6; pos 5229943 to 5230816)
tgataaatcagttgaaagctacttcgaaacttagtgttagtgatttttcttttaagtttaatgatattgtggcggaatttgagtgttaatgatttgtttgcttgttgagtgctgaatttgtgtttgtgtacgtgtgtgtgtgtgtttgaaagaataatgctaatctaactgaaagattcttcctgaaatcgagaaatccatcctttggatttgtgcggtccaccagtcaagctattagattaataaatgggatttttggggagtgatttaggaattacttttgttgttatggaattgatgtatgcttgcactttgtacattgtggcaggtgtgtttacttggtcattaacagattgtgtttcatttattgaaatttttttgagttacttttggatgtttcttccagaaaccctattttcgaagttttgcaatgttatggacattttcgaggatctcgtgctgggtggcatctgtacaatcttctgcttcttattcattgattttattttcagtttttagtagattatcttctatgatattcattatgctgtggcatttcagcctcttgttgggattttaaaagcacagcatctagtatgtaacttattaagttataatgcccatgtgtttgctcggtggcaccagtattaaggtagaagatcaagtttcctctctggggataatgatgtcaatttgattatgttggttaaatcacatatgacacgtgcaatccaatgtgtagaacattgagtgtagtgtatacctagatttccacgtgtttttttctcctactaaacctccacaaagatatctcatgtggatttatatgtatcctgcagatcttgaggccgcatttggaggaggttaagcaaag

SEQ ID NO: 53423 - DNA, 698 bp, Populus trichocarpa
  Intron number 1 from transcript POPTR_0005s23020.1 (locus POPTR_0005s23020) derived from phytozome v7.0 (chr-ID scaf fold_5; pos 21868138 to 21868835)
ttgagtacgtgaagggttgactatattttattgaactttcacaagatcaagataaaagttttttgaatttgatgatgagttatctcccacccggggaagctggtgcaataagatttttatgataaattatttgttttcttagtttttttaattcctatataatttaggcaaatattttcttttatgatgttttttttttctatgtagtctaggctgtcaaatattgtgctttgtaattctattttatctatttaattcagaaatcccttgaataaacccattattatttattagagtttatttctcttcgagatagactatatatagaattatttagattgtatttgagaaaaaaaaatcagttacaaaatttttatgtgatgatattatataacaaaattatatattgtttgtactttttttttttttacttttttttagttgtgttgttgtttccgtgtgctttgagcaagctgcttacgtctgtttgactgccatttctttaaagttggaacatatttttgggtggcgccaccagcgaagtttcaagtagccaatgcaaaaccgaaattcactgtgtattgacatttccttgacccatatcatcagcgcaatccaacaaaagtgctactgtacttaaaataattagctttatttttgcaggaccacctccactagaagacttggcgcaagaggac

SEQ ID NO: 53424 - DNA, 651 bp, Populus trichocarpa
  Intron number 1 from transcript POPTR_0379s00200.1 (locus POPTR_0379s00200) derived from phytozome v7.0 (chr-ID scaf fold_379; pos 3198 to 3848 reverse strand)
gaaaaggttttattgtcttctttatcattccaaaatccatctttatcatttctttaatatgagattctgttatcttgaatcatgatgtgcaacaaaaacattgccactatgaaggagatggaagcaaatcgatgtggattaaagtcggtgcaggcctatccgcagttattgctgtgctatttttcagtgcttgcacttacaccatgaggagaaggacgaatctgagaacaggtatgcatgtgatatgtaccgaaagtcttggaactaaaaattttatattatatatatgaactacctagttagtttctatatacgtgcaggtgatttccaaatatttttgagatataatcttgacaagaaattaaaattccgaacacctttgaatttgcaaatatgttgtggttaagcttgaaaagaagacgaaattaggcagagattgagtaattggctttaattccgtaaatttttctctagtcaggtcatcatctgaaaaaatgctagtaggtagaaggttaaaaacagaacaaaattttgaagtgtcgaaacaagatgtacatttacatgatgttcgaaacctatataatcaattaatagcacttcacaatatctcctgcagaggaaaaaggaaatatccaagaggatcaattactc

SEQ ID NO: 53425 - DNA, 989 bp, Populus trichocarpa
  Intron number 1 from transcript POPTR_0005s15410.1 (locus POPTR_0005s15410) derived from phytozome v7.0 (chr-ID scaf fold_5; pos 12094035 to 12095023)
caactacttgcaagaaaggtatgtcgtgtaaccttttatttttgtgaaagaagattaactgtcctgatgtagacaaaaattggcccaaacaagatttattggatttctttcccttatcgcaaaattgagaagtgataatgcactattttcatttcctctattttgctggaaagaaaattcataacaatttccttattctttatttaattaagatgaccttatatgataagtgattgcatgtaaaatatagaacaagtctgtacttaaaataaggttgctttcccttgcaagtttcctatttttaacgaagataattaatatttaagaattttctttgttttaaatttccatttccagggaaagagtacttgacaaaaaccttttgagttaagaaattaatcaatttgttcttgttttggtcaatggttggattttgcaaccaaaagaggtctcttgttcacctaacattttggataagagggatccttaataaattgacaagaccagatgaccccgttaatattctacttggcacctgaaatttgatttcaagaagctgaattttcatgttttaacgtactgctgtagcagtaacaagatacttctgctctgtcgtgcgtgactgtaatttggcttgggaaagtaaatgtatttaattctgtcttcttggggctactgagtgttgatatgatttgatatcttgtcatagatagaaaaagataactagacacttcaaatataaatcaagggtaatttcatgcttaatatgtcaggaaactgagttatttgctgtttgtcttgcagagtcttatagatgggaatataagcttattaaaggtaagaaaaccatcaaatacccttcttttctccaatcattgcatgaatatttagttatgacatgctgtgaatatctatgcttcttgttagcacataacatacaactcacatgactcaactgtgatactcttatttcagttgtaacgttagct

SEQ ID NO: 53426 - DNA, 877 bp, Populus trichocarpa
  Intron number 4 from transcript POPTR_0005s00740.1 (locus POPTR_0005s00740) derived from phytozome v7.0 (chr-ID scaf fold_5; pos 331738 to 332614 reverse strand)
gtggaatttcacgagttcgagaggtatatttgggtttgaatttaccttttcttttcctctatctttcaaaaagttgatgctatgtcggctggcaaatagaattaatcaatttgttagtgctttttttattgcatcttattatgatttaggtttttttaaatcattaaggtattaggtggcgtaaagcctctatgctattgatttggtgctcaatagaagctgctttttcttctttcattggaagcctctgtgctactttcttcagtttgaaagctgacatgacttgaaaccacgcaatttatgctaacaggaagtatctgaactatacgattgattttttaggtgcacttttttgttgtccatctgtttcttgggaccatcacatctaaaacttttcagatgctaattcaccgtccaattgtcaaaggcaaagtaaacatcaagaaatttcgtgacagtaatttggattatgtcacccattaatggttatggatcccaatatttctttctttgcaacttctttgccattaagaagagaaattggatcaggggaagctaataactataccatttagactatgtaaactagaatctattttattatgtgggagttaccctttcagagccaggctaagcaaatgaaatgaagagaaaactatcctctctgcttgtagcgtcttttgcttttctttgtccagaacattttgttgtgaaaaatactgtactaggttctaattctgttttttaggtaggatgtagagatatctttggatgcattttgtttttgttacctttgttctgttgcactttataaaagggtttcttcttctcaatgcacacagaccactcttcccgtccaggagctcacaaagatctt

SEQ ID NO: 53427 - DNA, 856 bp, Populus trichocarpa
  Intron number 1 from transcript POPTR_0005s00740.1 (locus POPTR_0005s00740) derived from phytozome v7.0 (chr-ID scaf fold_5; pos 333274 to 334129 reverse strand)
ttcctctcttactttccttcttttgaagattacaggtaagaaaatttaggaaaggtcttatctttttcttctttttgaatttcaagatagatgcttttggtcccgtttgtttttatcgatttctgggttttgattgtttttctgatatatatggtcatctgggtggtccttgatcagttgttttctgattgtgtaccaacttgaattttgagtacagctggatttacggtggtttatttcatctggggttgtgttttttctttcaaaggtgtgatcttttttagctgtgtacttaaatgattttggattagattatcagattcatttgcagaatcttaagatatgttattagtccacaattttttttttttttaattctgatggttttctttgtttattgttcttttgatcaacaaagatgtaaactttactcctttgttgtgttttatcttgaattgaggctattggttctgtcagtatagtacttggattgtcaatttctccatataaagtcgtgaaattttgtttcatcaagagtagaattgctcaggttccagtcatttagtgtttctattattgaaattcattgccatgatagctaaattatgtctgcagatgtattttcagtaatttttaagccaaatttgataggattttaggtttaaggagtgagtttgtttttgttttctcactgactataacatggtataagggcattgtaatttgttttagaatgttaatgattggaaatgtagtagttctatgttctattatcgctagctgattctaattgcgtggctgatgagcctgattttttgttgaatcatgcaggtgcttggatttcaatctaattttc

SEQ ID NO: 53428 - DNA, 943 bp, Populus trichocarpa
  Intron number 1 from transcript POPTR_0005s09960.1 (locus POPTR_0005s09960) derived from phytozome v7.0 (chr-ID scaf fold_5; pos 7056878 to 7057820)
tgccaagtgggtgggaaaagcgcctagacttgaaggtaaattggtgttctcatctgggttccgtttgtttcttgagaaaatattaaggaaaagagcatcgaagggtctcaaaatcttatgatgatcatcctagtcttttaatgtttcatgagatcatgtagtttttatgtttgtttaatctcctaggaatatcttcttagatattccaagaaaaatgattttgtcataagaaacagagcttttgatgctcaaaaagagattttatatgcttttcacgcctgtttaaaattatgatttttttcttcttttcgttttctttgaattgaaatctaagggctttgcaatttctttctgttggtgcgaagatatctttttattaaatgattggtacttaaatgtttcctgatttactttgaaatcctctgctctgttgatatcctcagtttggtttctgagaaaatgtagaattaggagatgagagtccaatcaatttattttcttgtacaacagtgcagctcttggttttgatggatgcttcatagatatgcagagcagaagggtctctttttaaattccctgacttttctagcaaccaaacagtccttattatttaattgtataacgttagattactcctatttttcgtaagaaacaataaaaggcttaatgttctgtatattttcagccctagtaatccattgctatatatagtgccattaatgctcttcaatgctcagcaacttgtttcctctaccctctctttaataaattatgatttatctcttcaatttccagaattaaacgggtcattaatgtcatggccggtaaaaaaatcatattttgtttttttttttttgtaatttttaattttactaaaactactgcaatggttttgccttgtgtattttcattggatgcagtcaggaaaggtttacttgcaaag

SEQ ID NO: 53429 - DNA, 436 bp, Populus trichocarpa
  Intron number 1 from transcript POPTR_0005s23990.1 (locus POPTR_0005s23990) derived from phytozome v7.0 (chr-ID scaf fold_5; pos 22664275 to 22664710 reverse strand)
attggactcagtagactcagtcttagatcggaaaggttagggtttgttttcgagagggttctctttcttcagatctacatttcatgaagtggatcggttggggattatcgacatttgggatttaataacgaaaacgggttaaatttacatgatctaaacaaaatgcgatgaagtttttaaaggattattaaaaaaatataattaaattgtaatttgatttatgaagagaaatgctaaaatgataattaaccgtttaatctatgattaacaatgaattaatataatcaaagcactgcttgtttgagttttttaagaacaaaagtttaaacgagtgtgattttcgattttagctggccaaattttaagaaattgtagatgctgtgagtagttaaatcgattctatatcgttgattgtcgcagtgatctggacgcgacg

SEQ ID NO: 53430 - DNA, 676 bp, Populus trichocarpa
  Intron number 1 from transcript POPTR_0005s18320.1 (locus POPTR_0005s18320) derived from phytozome v7.0 (chr-ID scaf fold_5; pos 16472460 to 16473135)
gtacgccttgcttacaacctcaaagaacttgacatgtatgtctctgttcctctttccctctgtccgtacctagctatttcaaataatgatcgagacactatttatttttattaatgaactcagtggtggtttttgtttgatgggtctttctttgattgttaattaaaccattaaaaaatcggaactttgttcagtagaagaaaccaatgtttgcaagagatcatgaaagttggtttcttttttcgtttatgattttgggttttatgagattaggcgaggatatctgagactgattttcagtttttccatgtgtgatcatttgctttggtagttgcatgacatgattccaataaatttgagcatttcttgaaagactcgagcataagcagttaggtctctagcttcgatgtcttttgagatcgtagatattgtgaatggctggagaagtgcccggtgaacaataatgcatagaacagcctgagccttttatagtagtgggaattttaatccttccaatcctataaagtattcaagggctatttaaatgttgatgattaattgtgttgaatatatatatgtaatggttgaattcgttatctggagcttgaaaatattttctcattttcctattctattttcagttctaggagccgttgggattgccagataactgaca

SEQ ID NO: 53431 - DNA, 791 bp, Populus trichocarpa
  Intron number 2 from transcript POPTR_0005s01670.1 (locus POPTR_0005s01670) derived from phytozome v7.0 (chr-ID scaf fold_5; pos 1120977 to 1121767)
gtgggaggagtgctgtgttattccaagggaattcggtatttattttctcatgttttgtgtcagccttggattcaattttttgtcagttgagatgtctgttgctgagggatggtcgtatagtgaaattcaggcgtacatgtttcccctcgacaattctgttttcttcttttcatcatgaccgcatcaattttctgagacggcaaaggtgaaattacgacatcccactttcgactactttataaactcaatgcttacactcaatggagcttaatggcaatggtgaagtcttaaacattttaaatttgaatggatatcagtaacgatcaattttcaggcatgcttccaacgtggatgggcaacaattcaggtcttgcagcaattgatttgtcagaaaaatcattttgagggtccagttccaagtgatttctgcaaccttgtggaccttgaatacttggacatgtctgagaacaatttgtctggttctataccatcttgcttcaacccgccaaatatcaaacatgtccatttatccaaaaatcaattgagtggtccattaacaaacgaatttataacagctcttcgttggtgacattggatctcacatacaacaacttcatgggcccaatttcaaactggattggcaatctttcggcactaagtgttcttcttctctgaaagctaatcattttgctggtcagattcctcctcagttatgcttgcttgctagaacaatttagcatttttgatgtttcacagaataagctcactggtggtctaccctcctgtctaag

SEQ ID NO: 53432 - DNA, 1065 bp, Populus trichocarpa
  Intron number 1 from transcript POPTR_0005s17330.1 (locus POPTR_0005s17330) derived from phytozome v7.0 (chr-ID scaf fold_5; pos 14650715 to 14651779)
ctgttgcaaccaccgaagccccaaccctatctgaggttcctcatctctctctcactgttcaaatgtttacttcgagtttctaaatttttaagctcggcttaaagttttttttttttttttttgcattttctttattcggatcgttagtatgttttcgtttcatgtagaaaatgattggcgaaaatgaggataattatgcgcttttttctttgactggatcttcttttgctgtaaatcatgaaggaaaacgttgatggtgatattttgattggttgattcttttttttttcccttttttgggtggaagagtgagaatctcgatttgtagttgctacagattgtgcaaaaaacatatgttttgcataagagatgtgcaattacagatgtactgccggctgctgttaattttttttgtctcaatctgtgttaatgctgtcatattaacttgcatttttggaaacaagttctgtctctgttttccttttctttttaaagcgaatgcttcttcaaatgaacctgtggctatatgtttcaattaccaaaggataagtatttgtgggatcgggacccaatagattgatgcctttccctcgctgttgtgttttgttatgcccattaaacttgagcttgatcaacagatcaacccaagctttaacagttaaggggcactcttgttggcgtcaagataggctactatttcagtataaaatcagctgctgtttgacctgttcatatgctctgaactcagctgcaaattggtttgtaagagattgatttttttcacaacatttacttgctatgtctgcacatttagaatttgagacaaatttgattttgtgctcactaacgaacgttgcctttcaccaatgtaaatgtctttattgttaacctgcacaagtgaaaaatttgaagtgtgataagatgttaaacctccagccctttggtcattttgcatgttcaagaaatgttttctgcattggcgtgctactagtattaaccaacccatttgctcacatgctatggcatgcagcaatatttattgaagggagaagaagagaagaccaa

SEQ ID NO: 53433 - DNA, 300 bp, Populus trichocarpa
  Intron number 1 from transcript POPTR_0005s23580.1 (locus POPTR_0005s23580) derived from phytozome v7.0 (chr-ID scaf fold_5; pos 22304901 to 22305200)
gatacatagtggtcgcaccgcaggtactcctttttccatgtcctttcttaatacatccaaacatactgtacaaatcgattcattcttcatgagtttcatgtctaacttttaataaatccaatctcatatcgcatttgttgggtttgtaaagttaatgacttctttgtttttttttactttggcgagattgatttttctttactttcattatttgatattaggttattgaaccttgagtcttgtgatttttttttgttttttttttttttttagagttgtcttgatctcataactcgaatc

SEQ ID NO: 53434 - DNA, 647 bp, Populus trichocarpa
  Intron number 1 from transcript POPTR_0017s01200.1 (locus POPTR_0017s01200) derived from phytozome v7.0 (chr-ID scaf fold_17; pos 850115 to 850761)
atcccagtgccttcactcaggtaaatccttttctgggttttctttgtttttgcttgatttggctttattgtctttaatataattgtttggatctttttgcaagtcttgcagccttcgtttctgtttctaatttagctcaataaaacactataaaatctaattaaattttatcattggaaatgtcttgactcttcgttttgttttagtttaatttagctttatgctagagctacacctagcaaaatgggagactagtcattcagtttgagtgaggtcaaaaggattcgtttaattcattgttagactgaaattaggtattttgtaggatccagctcgtgttcagattccagttgatgatgacactaccagaagtttttgttgactgtcaactcatttagcttacagcattgtcatatttgtttacttggcatgaaagagttgatgccattcatgtagctcagtcttgttcgtttgcttcattataatttttttttgttgtttcctcaacaatctgattgagacccctaagcacacattttcagatagctattccaaattattgagagttttcttcactgagtatgatttgcttattatttgttaatagcttattgacttgcaataatcttgatttcagggtcttcttt

SEQ ID NO: 53435 - DNA, 941 bp, Populus trichocarpa
  Intron number 2 from transcript POPTR_0017s06640.1 (locus POPTR_0017s06640) derived from phytozome v7.0 (chr-ID scaf fold_17; pos 5042753 to 5043693)
tgtcgtgcccttgacttggaccattctttattggggtaaggacatgtacatgctatttactgttaccttgtgcttcacttcttaagacgtgaataattaatgatacaaagcaacaatttcttgatgtctaaaaacacatgttcaagaaggacaacagggtgctgcaccctggaactgaggcagtatacttgaaaatgccttgacgaagacaaagtatagaaaacaggaatataatcaaattagccaatgaaatctagaagatatttaaactgtgtcaagaagcttgaataaccacagctttttgtcattgatggattcaatatgggtgcaatggatgcaagtatcatacttccatgccttatagcacaagggtttatgaagtttttagcttgccattgctaattgcccctttatgtaaagacaaaaaggcttacatcctataaaactgaagaaaccattactagtaggtatttaagtatgagcatatgccatgaatcttaacgttgatttttactctcaacgttgaaaagttctacctggaaaattaaatttgttgtactcttgcatatttttagaatgatgagttcatatcgataacaccccccgcatgacgtaattatggccttgccatagacaagttttgattcaagtgttccatataactcatacagattttgccatcatttccctcacgtacaagattaaccttttcacctgaatatccgtgtaattattctgctcgaaccttttctgaatctgctgaagtggattgtgttggtgctgcagtgctgttgtaaacttacacctaaagaactgtttgatatatgatatggttgctaatttgagacttgcagtgctcttttagttatgctggtttttgagatacagacatggtacttggtgcaggtctgtcacaacttactttaagtttgctccgcctc

SEQ ID NO: 53436 - DNA, 536 bp, Populus trichocarpa
  Intron number 3 from transcript POPTR_0005s10310.1 (locus POPTR_0005s10310) derived from phytozome v7.0 (chr-ID scaf fold_5; pos 7386965 to 7387500 reverse strand)
gacggttttgaaacttttgcgtgttggaggtaatccatgtttctttaagcttttgtctagctttaatgttcttattttgcctccagttcatgtttaagtagtttttatgatgctttgactgatgtggtttggtggttggtaactgaaaatgatcattgttgaaataaatggatttttgggttaattacgctgttcaaaatttactttctcaatgctgaagaacgctccatatcactagctatgccaagggagagatttttcactgcataggctgttgtgcttaccctcttgttttcttgttggaatgaaggtaggtactgtaagcgtgcctcatttgaatgtaagaggagtgagcattgcactggctgtacagaataatttatcatgatgctggtgctatttgattctggtttttgttgtttagcctgtgtcttcatcatactgatcttgcttcatatgaatgttatacatccttcatgaacatgtggtttgattaccttgtcatatgcaggatttgaagcatacttagtgggtgg

SEQ ID NO: 53437 - DNA, 907 bp, Populus trichocarpa
  Intron number 2 from transcript POPTR_0005s08450.1 (locus POPTR_0005s08450) derived from phytozome v7.0 (chr-ID scaf fold_5; pos 5841728 to 5842634)
caagcttctgaggtactgaggattctgacaagtctttcctagaatatatgtgatgaccatcttgagtacaaaatatcgacaccaataaagggaaaacatgcatgttacaatttggcacatcaacaaatgaatagtaacaggtttttccttcattttttttcattgatttggcagtattttggagtatggcgattccttcctctctccatcgtgttcttcccaataaaccagtagtgttttcagaacattcggagtcaatatatatgtgtgtgtgtgtgtgtgtgtgtgtgtgtgtgtgtagtaatttagtttacctcacttgcattagctgctgtccaagtaatattgctgattggtaattgccactgttttaagtcttgttttgttgatagatgcacatccactttgtagagagcttccactggaggcaaacggaatttttcatttgaaagatccagcaagggctgaatgtcgccatctgccatgcttttcagtccttttattgaaaattcaaccatttattgtctggcatttctcgatttatcccccaagaatacaatttctccatatggttcaaatcttctgcatatgctttcacattcaggccatgcatcttgatatggtgtgcatcgatttatcaccaaggaaattgggggcacgacgcagcctattgtccatatatttttgaattgcttctaatattgattttgcaaatgcaatgtgccttgtgctaaaaccaagacacttctagaaactatatctaataacttttttgttgcaaatatacttttctgctttcatgttttcattttgttttatttgttgggaaaactgatagtttctagattgataggtttctgtactgtgctatgttctaaataatttgttcaaccattttttgcagaat

SEQ ID NO: 53438 - DNA, 989 bp, Populus trichocarpa
  Intron number 1 from transcript POPTR_0017s04450.1 (locus POPTR_0017s04450) derived from phytozome v7.0 (chr-ID scaf fold_17; pos 3426568 to 3427556 reverse strand)
gttactgttttcactcaggtttttctgcctctttcttttcttttctgtttggttactgagaaactgaaagaaaatttgaagtatttgttttatgttttagcagtttttcttatctgtttagattggatttttttttgcctttttttatgttgacttgttagtagcattagattatgttagaaatggcttaggttttgacactcaaattgtaggttttggttgttttagttgtcactaacgttggattatgttggaaatgaggtgagttttgacattcaaattgtggtttttagctgttttagtcgttactaacgttggattatgttggaaatgagatgggttttgacatccaaattgtgggttttagctgttttagtcgtttctaagattggattatgttggaaatgagatggtttttgacattcaaattgtaggttttagctgtattggtcgtttctaagattgggttatgttggaaataatgaacacccaaaacttggaggtctcacatgctttaggaagttccctacttcagtctagttcaatagctccaatagacgaaacagggtatgaaaaaggtgtcttcgacaatgatagtggcccattctacataggcactacccaaagcttccgtctaaactaaggcatcctcgatagcgagaaatgattgctaactttggattatgttggaaatgaggtctttgttgacactcaaattgtgagtaaggcaactgcttgttttcttgtgtttgaatggttgtagttcctgattcatgtgttatggttttatttttttgatgctttgtgttgttgttaggtgaaagttaagtagatttgtaatggcgatcatgtttctctgttggattaacatgtacttgtgtaggttcatatttttgcattgtgaaaatgtgctaagaaagctgcttttgaagcctaacaattttttttgttttttttaccttatgttcagatcaccatcttgagtaaac

SEQ ID NO: 53439 - DNA, 552 bp, Populus trichocarpa
  Intron number 3 from transcript POPTR_0005s09810.1 (locus POPTR_0005s09810) derived from phytozome v7.0 (chr-ID scaf fold_5; pos 6886967 to 6887518)
tagcactttcagctgttgttcccggcctaaagaaggtaccaacaaaattcctattcgggtagaaggaatcaggtttttctttacacgtcttcactagtgtaaatcatatgcgtaaatataacttattatggctcgctttctctttggttcgtgagctgaattatgggattcttaatgttttacttgcaagcttcaatatgggattcaagttatgatatttttttttgttatggtaattaattaatcttctcatattaatccacttgattgtagatgtggaaactataaaatttgtcaaaggccactatccaaaagcttaaactgttggtgtgatcgttagagaattgggtggataggattcaaagataccatattgaaaaactgatcaactgataaaaaccaaaagaataatttatatcaagtctctttgattttctagtgaaactgttaaaataatttattcgataaaacttcccttatgatgtagaaatgtggacaatttttttctggacatggtgttttgcttaccaacattcgattggctattgacag

SEQ ID NO: 53440 - DNA, 911 bp, Populus trichocarpa
  Intron number 2 from transcript POPTR_0006s28210.1 (locus POPTR_0006s28210) derived from phytozome v7.0 (chr-ID scaf fold_6; pos 25978306 to 25979216 reverse strand)
ctgaagctaattggaaagctcaggttttttttgtccaaatttttatctttttttttaagaaaaattttgggtttttgctattgatttattggcttgtaggaattaattgatatgcatagaggaaatgaaaatcatgtcatttgttaattaatgctgtatttagtagatttagaaacatgtagggattgaatgtaaaagttgttctattcatgggtagtggtggataaaaggtaaaaagaaaaaagggttactttgagaattcttttttgggttggtgattttgactgtgttaatagttgtgttgatgataacaatgacttggaaggatgtcttatgagtttatggatgtggttaatgtataagtgcatggtcataaaaggattgactgaaggtacagtaagttgatatggtgtagatttttaatttgtggcaaaatgggattgttgaattaacaaatttgttttgaatctcgtataatgtttatatagtcagtcaatggttgtaaaaaactaaatttgatggcttatacacagagtggggggctgggggggggggattgggtggatgtgggaaaggtgagagatttcgttgtgaatgatggaaagggaaagggatttcatgagctgaatggttgcaattacactgttttgaatcttgaaacatgcaaaacaaatatttcatacttggctgctcaaagaaatttgacttggactgaaggagaagagtgatgtttttcctgcatgctgttaagagttctatcagctctgttttcttagtcaatcatatgttaccttggtttacttgtttctgaattttctttgaagttttcaaatatgtatattgttaacaacgtaatcatctttatattgtgaacagaaagcttgggaagtggcacaagcccccttcaagaa

SEQ ID NO: 53441 - DNA, 296 bp, Populus trichocarpa
  Intron number 1 from transcript POPTR_0005s06510.1 (locus POPTR_0005s06510) derived from phytozome v7.0 (chr-ID scaf fold_5; pos 4348647 to 4348942 reverse strand)
tggtctttatcctcaggatccttggcagcttgaaggtaataattattttatccctgtaaatattgattgttcttctttttttctcaaccttttccttctctctcctttgatttttctccccgtaagttatgtattgcattctagatcaagcggaggtttgttttcattttcttagacataaagaggaaacaaaaaacaagagagttgcataaattggttcaaagaaatagctaactagttgctatctttttgagtggacaggcagggctctgtggagtgaaaaccagtggtactac

SEQ ID NO: 53442 - DNA, 382 bp, Populus trichocarpa
  Intron number 2 from transcript POPTR_0017s09060.1 (locus POPTR_0017s09060) derived from phytozome v7.0 (chr-ID scaf fold_17; pos 7739209 to 7739590 reverse strand)
gtctcagattctcagaagacaatcaagcgcaaacagtatgtcctcatttttttttccttcttttctttctcactagtagatttgaatttggaactgccaataaaagtttgtatttgaagttagctttctgaaaattgacccctgtggcttaagctttgagatattgcatgattatgaattagtttatatgagttgaaacatgaaacatagtctgacaaagatggattagccgattgctgggaaaatagttttcaaatctctttgagtgtggcttggaagggtgaatttctgaagaaactcatgctatgctttgtgtctttgcttatcaaaagaaatgatttcatgtaaactgtgctttattggttgtttatctccttcagcg

SEQ ID NO: 53443 - DNA, 831 bp, Populus trichocarpa
  Intron number 1 from transcript POPTR_0006s03160.1 (locus POPTR_0006s03160) derived from phytozome v7.0 (chr-ID scaf fold_6; pos 1992874 to 1993704)
cagttgatcttgaggcaattggttgtaaggtatgatggcattagagagatgacgaagacaaactcaacaaaacaaatatacagccaccattaagcagaggccttaattgaaaacgttgatgaagaaagaaaggtcatccttgaggttttaagaattaaagctgttaatgttctaagaaaaaggaaaaaaaaaatgtggttgttcatggcaattcaaaaaatatcatatttgatctttgttttttactattaatattcgatttttaagttgtatttaaaataatgaattacaatttcccattaaaaccaattgtgcaataagttttaggctgtaaaataggataaatagtgtcaatttagataatgtttaattattattttaggataaaaggataaaaataaagacattaaaaattctgtttaaaagtatataaattcacaaatttattttatgtttttaaatgtatttttaataaaaacacgtttctgtttttattatctctattgtttttcaccccaaaataataactaaacactaccttgaatctcttctcatcctttacaggatttttatcaaaacattaagtaaaaatatacaaatttccaggtcaaattttctattaatatacaaattaaaacctaattccacccggattttgatttgaagtactcacacaatcctgaatagggttggattccttaaccaacacagctcaaagaaattgccgacttacctctctttataaaaacacatgcacttctcttttctcaatcaatcaaccaaggggaaaaaaaaaccaaaacttttctcttactgtatttcaaaaccaga

SEQ ID NO: 53444 - DNA, 951 bp, Populus trichocarpa
  Intron number 1 from transcript POPTR_0006s07010.1 (locus POPTR_0006s07010) derived from phytozome v7.0 (chr-ID scaf fold_6; pos 5054682 to 5055632)
ctctttgcttgatttcactctctgatttgcctgaggttgattgatattcaaaacccttttttggttttcggtagtagctttgttgtttgtctaaagttcatatttttagcagagttgaagatccattttagtttttgattgtagctttctcattgggtttaaagttcacgtttttatgaagttgaattgattcttgattgtagctctatcatatgctttatagtttccatttttatggagttggaaaccacccatttgatccttgattgcttttttgttttgaagttcacgatttttaatgagttttttctgtgaatgaatagtagaggctattttataacagtgaagaatgattgtagtagagtcttgttgtttgtttaaagttcttactttttgttggagttgaaacccatttcgattcttgattataggtttatcgtttactttgaagttcacatttttatggaataggaaacgcccttttgatcctcgattgctttcttggtttgaagttcacgtttttaatgagtttttgctgtaaatgaatagtagaggctatattataatggtgaagaatgattgtagtagtagttttgttgtttgtttaagttcatactttttgatggagttgaagacccatttcgattcttgattataggtttattgtttactttgaagttcacatttttatggaataggagacgctcatttgatcgtcgactgctttcttggtttaaggttaacgtttttaagagtttttgctgtgaataaatagtggagggtatattataatggtgaagaatgattgtggttgtcatttttcttttagttgttttgtctggtagtttcatgcttaataagtttctcatttgagggtacctcgaatgattatttttatggccatttgctgatgcagaatagagtgactgagcagatttttcttgatccttt

SEQ ID NO: 53445 - DNA, 703 bp, Populus trichocarpa
  Intron number 2 from transcript POPTR_0005s23900.1 (locus POPTR_0005s23900) derived from phytozome v7.0 (chr-ID scaf fold_5; pos 22610132 to 22610834 reverse strand)
tttctttgggaacgcaagcttttcgtaagatttttgcctgcatcttcttgaattgtttatgtcaattgctgattgcacttagcacgtttgtaatcaatactgctcaactgataatttttaaaaagaacagaacagcaagaactgttaataatattctttcaaagatcatacatactcttaattttaattgacagcggtaaaaaagccccttggattgtaacatgcttgactggtgagaattgtttgagctatttgtgttttggcggatatggtatgcacctttaggagataagcatgtagttggaatcaagttccttgcacttgaagggcgtcttgctaactacataagctcagaaactagaatagaacacactttatattgcatccacaaaacccctgatttgtgcgatgtacatttatcagataacttgatcaaagttgcgaaatgcctttctctctgctcactttcatccttgtttgttcccttgtactcttaaatgttcttcacctaatttctacgaagtcatataaattagaattgttgtatgtggtgctctcatcttatgcaagatttgcgttttaattgctgcaaatctctgaattgcacccagagggatttcatgcttcaattttcttttcattcctccgaaattcaggtcgcggcaatatcttgtttgacttttaaccattataggcactggtc

SEQ ID NO: 53446 - DNA, 421 bp, Populus trichocarpa
  Intron number 4 from transcript POPTR_0017s08040.1 (locus POPTR_0017s08040) derived from phytozome v7.0 (chr-ID scaf fold_17; pos 6447011 to 6447431 reverse strand)
atcgaaatctttctgatctaccaaagatcacacaggttccttactgttcttggcacatctagttcaaatcgtttatttcgtgccattcttttagcctatgagactttgacatcgtaggaggcattggtgctaaggaatctttgaaaaagcagtcagttcatgatagagtactcctggtcttaatgttttttttttttttggaaaagcagccaacattaacgatatggtgagagcaagatcaaattttcccactggaattggggcacagattgaaaaggtcaacttgaaatcctctgttgattctggcttctgatgctctgaaaatttgagtgtattttgtctgtagtaactattccctgacagcttacattctttgtacgcatgtgggagaaacttctcagttagtgatgattaatcaaga

SEQ ID NO: 53447 - DNA, 928 bp, Populus trichocarpa
  Intron number 2 from transcript POPTR_0017s03060.1 (locus POPTR_0017s03060) derived from phytozome v7.0 (chr-ID scaf fold_17; pos 2221003 to 2221930 reverse strand)
gcaggttagtgttcttcttctgggattataatggttttgacctacttttatacgggaacgaaattaattatatttgggtttagggttttttttttctagctcttcaagttttttaggaaattagagtactattctccatagatatcaaacatgttcttctccatagttatcaaacatggccagggtgaggcgggattgagtaaattaacttttttttttgtgaagatgaaaatgacagtcttaagttgatggtttttgactgaataaaaagaattatcattgattaactttacatgcttataataggttaattttctttatttattttaaaacctagttgagttaggttctaagttaatccatcaaatttagctaagctgaccagcaaatcggggttagaaatttaaattataggattgaattagttaactaattttattttattttttataagggtgaaaatagcacacttaatttaagggtttttgacataacagacaaaattttctattataaagttttttttaactaagttatattagattaattttttttatttattttaaaacttaacttgagttagattttgaatcgatccatcaagtctggccggacggatcagcaaatattgttttttttaatagtttttataattttttttaatgaacttgaaagtaatatacgataaatcccgctatttgtgcatatggactaaacaatacaaattatcctctctccttcttacaatatatacatgtatgcaagtaacctgtggtctgtggacattgttaggcaagtttctgagagcatgcttgtacttttcttggatgtgtatattacatatataggaacgaacaaagagatctcactgcttgatatatttcatggttgttctttgaaggttccattgtacatcatagctcagcta

SEQ ID NO: 53448 - DNA, 650 bp, Populus trichocarpa
  Intron number 3 from transcript POPTR_0005s23200.1 (locus POPTR_0005s23200) derived from phytozome v7.0 (chr-ID scaf fold_5; pos 22039729 to 22040378 reverse strand)
aatctcttggaagaaattagtgacaagatgtaagactagccttccatacttgcaattatgtttttttttagttgctattttaataggagatatgaatttgatttgatttgatttttcagaaattaatcatagttttcatggaaaatttttgtttcttatgttttagacattctatagaactgttgtgggacttagaaaactcagagaggttgattcaaatttagttttagcttatggtttccagttctattagtattagtttcttcaacaagactttgcagctttacaaggtgctttgaattatggtttttggaaggagcaatagtccctcctgcaatttatgccacattgttatttcttccttgctaaatatcattctatttaagttgactagcatcttgacacaaacagattgtctgaatgatatgtttctcttcttctaattgttgccctgttggccacttctgcaatattgtataatttggatgcaattaattgaaagtttgtttggttggttgtgtctgcatcttcttgaattgcagattgtctctcggctagtatttgtttaaaataagtctcctcagcttctttctaacatgagaaacctttttgcagtgataaggcttattttgtagatctttttgtgagag

SEQ ID NO: 53449 - DNA, 478 bp, Populus trichocarpa
  Intron number 1 from transcript POPTR_0005s18070.1 (locus POPTR_0005s18070) derived from phytozome v7.0 (chr-ID scaf fold_5; pos 16091319 to 16091796)
acagccagtttctcgtctctttctctacaaaccaggtcccttttcactttcttctgtttatcccgctattcagttattgtagtaagtccttgtctttcttttggctgcagtcttttttacactgagtggttgtcgaacctgcaaaattttaatgctttcttgaaattattgaatactcagttggagattttgatgttaggtgctgttgtattcatattttatattgatttgcatcaacttaggtgatttatgaaatgaacagttacctgtgagttgtgagacaaagaaagataatttattgtgaagttttaaagttccaatgggctaaattcagtttctatctaaatggtttggttttccattgaatgttattttatgctagctggttttagaccttgttgtttgcagctcatggcattttttacctcaccagaacagtatgtttttgttttttccaattttcttacaggaaacaaac

SEQ ID NO: 53450 - DNA, 727 bp, Populus trichocarpa
  Intron number 1 from transcript POPTR_0017s14280.3 (locus POPTR_0017s14280) derived from phytozome v7.0 (chr-ID scaf fold_17; pos 14398371 to 14399097)
ctttttgaataggtaatatatacattgtttgttttgcttgctttggttttgtaatctggtgatcttgtttaattctttttggctttggtttgtaggtttttttttttaacttgagaaagagggggttttcaaaggagactagcttttcaagaattgatatattttattggtaagttttttttttccgttttttggtaatagttgcatggattcttggtgtagatgttgatttggacttgtttttgtattgttgtcctttatgttttatgtgtatgttaattgttctgatccttgatataatgtaaatctgaggcttttatttttatggattcgttaaggtgtatggacttggtttatggttttggtcttgaaaaaaaaattaggcttagcaagttttcttctgagaataacttattttattttattatttaaaattaaatggtgtttgggaatttgaattctttctctttggtattttttctatccttgtgaatctgtttagtcttttaaattcaatattttattttattttacttatgatttggtgattgattagttatttttgtagcttgtattgtctgttgatttttaatctccaatatgtcttacttctcagtttttttcaatttgctattggaattttgctattatttttaagattgtagactagtttgctttgagttttgtgctaattgcaatccttcttgtgtgattcttacaggactga

SEQ ID NO: 53451 - DNA, 274 bp, Populus trichocarpa
  Intron number 3 from transcript POPTR_0005s27280.1 (locus POPTR_0005s27280) derived from phytozome v7.0 (chr-ID scaf fold_5; pos 24994297 to 24994570 reverse strand)
tacccctgtgctgtcaacaaaagagggttatcagagtaagtcttcttaaaccctaattactgtcttaatcttaatcttttatatcttgtttggttcctgagaaaatgaaggaaaagagaagaaagtaggcacttggtggtgtggagttttttaatcaattttcttcgtctttgattacctacttttgatgtttttttttctttgttttttgtcttctctgtttttttattttattttagaagagaagctttttgtaataagaacccaccaattc

SEQ ID NO: 53452 - DNA, 418 bp, Populus trichocarpa
  Intron number 3 from transcript POPTR_0006s25550.1 (locus POPTR_0006s25550) derived from phytozome v7.0 (chr-ID scaf fold_6; pos 23938568 to 23938985)
tgaagttatttggaagcctaaaacaggacaaattggttagtttttttgcctgtttttttttccggggggggggggggttaaaatttgtcatgggatattgaatgttgtgtgctgacatgtacatgggatttattcttgaatagagtaaaataggaagaattttggatggaaattttgattttagtatcttataccttatgaaacagagtgaattcaattgaattctgaaacatcgttgctttattttttgtattggcaaagcatttcaattgcggcttgctttgctatgtcgtttggatttaatcatttttgtttcaattgtattttttgggctaaactgtggctcatttgattttttttttttttttactactgctgcctaaaattaccaattatataggaaaactggaaagggaat

SEQ ID NO: 53453 - DNA, 837 bp, Populus trichocarpa
  Intron number 1 from transcript POPTR_0005s23140.1 (locus POPTR_0005s23140) derived from phytozome v7.0 (chr-ID scaf fold_5; pos 21956173 to 21957009)
tctgcagagaaacatctcctcaagaattctgtaaggtttctatttgatttctttcttttctctttctgctttgattttatttcttgttttctgatttgggcatttgatgaatatgtgtatttttttcttctctgttgctttatttgactacacacacagtgcttaactttatctgttaattaattgtaacggttctttctgattaagtacttaaatcaaggcatcaggcataaagttttttcctttaccgccaaaaacagtgttcatattccatatcttgggaaaaaggtgtactgggtggccctgagatctggacttggttcatgaagtattgatctggcttgcacccaatcattaattatggtctcaacttgtgtaaaaattgggattttctaaatgttagaaaatcattttgctatgttttatacttgcaattccaaaatattttagtatcgtagtatgtagatttctggactgaatataggttgtttgcctatgattgagaggagtacaaaggagagatgttaatgaactataattatcttatcctgtttggtcgccaggagaagaaatgaggggaaatgcacacatgggatgcaaggattaattggtttctctactagaaatcctgaaagctcaagagctgttgtctttactttacatgacaatcaaatgattatgaattccttcacttatcttattttccttccctttcctttagttcttctgtacctgcttcttcaaaaagtaaattgaaagacttctaagtttgatgcatctggtaatttcaatgataatgaacttctgggtcttaattcaatgcagttcatttcagac

SEQ ID NO: 53454 - DNA, 728 bp, Populus trichocarpa
  Intron number 1 from transcript POPTR_0006s06390.1 (locus POPTR_0006s06390) derived from phytozome v7.0 (chr-ID scaf fold_6; pos 4553676 to 4554403)
ctctctctctctctctctctggtattcagtttcaggtaggtgattattaccagctcttttttcctggatttttttaaaatttgagttttgatgatgtaataatatattctcttgaatttgcaaagttttctttctttttctagttttggtttagatcttttggcgatgataagtcaaagggtgtcttccttttccattcttttcttctttagctaagcatggatgctattttgcttctgctgattgttgatgtcttttaacttgtttgtgttagttgatattgtatttaatgttttcttggacatcatttttcgtttcttgatttttttgttctttcattgaatttggtggatttcacagctttttgttttttatgttgatttcttgcctatcttttctttctcttttgtgtttttattttgattttgtgggattttggtgattatggtggtggcagtacagattcttttttttaaaaaaaaaattagtaaatgttgctgatattttactgttactgatggaagctttatcttttatctatctggatctaattactttaatgtaatgtaaacggtaattgtgagcttattaaagtcagttcaggggtctaaaactttgatcagattttgactctctaaattaagtgctaattgaattagagagttagtgtgaggagaattgacttgatgagtttgtttgtagaattctgtatttgagagggagagaga

SEQ ID NO: 53455 - DNA, 874 bp, Populus trichocarpa
  Intron number 1 from transcript POPTR_0006s15950.1 (locus POPTR_0006s15950) derived from phytozome v7.0 (chr-ID scaf fold_6; pos 13717970 to 13718843)
accgtcgttacaggtgatgacatattccctggttttctcttcttggtttcaagattttgacgagtttcttcttcttgtgtgtgtgtgtgggtggttttgaatcttcattgaaagctctttctttgttttcttttggtatctggaaaagtaccatgttgttggttttaccactacgtaagagaatatacatataattttgttctgcttagaatcccaagtccaatctggtaaatattttcagttcggggatggcagtttgttggatccatcattctggcaactaaatatctttaatttcttgccttttccatgacacttgttatttttgtgatctgtgtttggagtgttggaattgtattctaaaagtgagggatgctaatatctaaccttcaattcttttcattagttagtttgcttttgtctttgagccagaacaaaatcaaaggtgttcctaaaactgagaatcttctgctttgacttgtgtagtctacaacactcttcaggttttttacaaccccttgctgttttacccattaagaatgagcttggaagctaatttaagtgttcaacctcgcaaaaattaaaatctaaaacttttgaacaatagtcaacagtttgcggccaagttttagtttgttacttgccttttcagtttgtttaaaatctctcaacattgaagtggatttggtgcagaatggcgcaaaaagatccatatagctgaccccaactagtttgggagcgaggcttggttgttgttgttgtagtgtagcagtacatatgtcgataactcgtaaacattcctaaaggaagaaaaacaactcgtatgcttgctaaacaatcagcctaagccttaaaatggttaaccttgcagaat

SEQ ID NO: 53456 - DNA, 703 bp, Populus trichocarpa
  Intron number 1 from transcript POPTR_0017s04020.1 (locus POPTR_0017s04020) derived from phytozome v7.0 (chr-ID scaf fold_17; pos 3025460 to 3026162 reverse strand)
aataagctgttgaatcaggttagttgaatttgtatctatttgtttttctttcatcgaatttagggtttagtagattagtgaatagtgacaaattatcggtgatgtaattaagttgagtgagcttagagcatgtgttaaaggaaattcaagttaatcttgatggttattagaaataatggggaacttaagatgtactgctaatgataatggatttggtagaagtctttgaatactgtgcctatagtggtgattgcgatacactagaggaatggaagaacaggattgtcgcaaacctgcatttctgatatagtggagtctctggcttgagaatgcaagtggagtctctggcttgagaatgcattcggactgcatttgaaattgcttttgatctggattctggaaaaggcatcaaaactatcaaaaagcacataaaaaggcattgaataatccagttgggattgttgatgaattgggtttgtttgatagtgactaatagatgcattgatgtggagagcttgttaaatttagtacaagggaataatgagagaggtagtagaatgacaatagggtgaattgaagtgaaacatgatttaagatacctttggttccatgttggattatgaaatcaactgccatgttttttggcatgtgctcttaactgtttgcaggtggagtattatttcagtgatttgaacttggccac

SEQ ID NO: 53457 - DNA, 421 bp, Populus trichocarpa
  Intron number 1 from transcript POPTR_0017s00240.1 (locus POPTR_0017s00240) derived from phytozome v7.0 (chr-ID scaf fold_17; pos 40717 to 41137 reverse strand)
tcaactttgagtggtttgcttttgaaattgattgcaggactttttgcttttctttttgtcctgttattagacatttctaattatctcttatgagttttgaggtaactattcatctgcagttacatgatgtcttaatttacagatagtcctaaattctttaacctgcttcaatttcaagggaaatacttgtgtttcttcaacaattagtgagtaatggattgggaatctctgtcctcagatttctatgttggagaagaaggttcctagaatgagctatacagatcttaaagatgcaacaaataatttcagcgaaaacaatgtcatcgggcaggggaagattgggatgctgtaaaaagcagcgttgcctagtggttatctctttgcagtgaagaaattacacaactgtcgaatcctcgaggag

SEQ ID NO: 53458 - DNA, 721 bp, Populus trichocarpa
  Intron number 1 from transcript POPTR_0006s16060.2 (locus POPTR_0006s16060) derived from phytozome v7.0 (chr-ID scaf fold_6; pos 13886221 to 13886941 reverse strand)
tgagctgctcttcctctctcagcctcctctccgaggtacgtacggtcttgggagattttccttcctcttctctcattttcttgtttgatctggtaacaggtttttttttttttttttgtgtttggttgctaagaaagtttatgcaatgagagggtaatgaggtttttgatatgtaattaagagatctgattttaaaaaactagttgttattatttcggttatgcgcttagaatctgaatgtcttttttatggtcagatctaaatacgtgtaaaaccagatttttttttttaaaattcctttttaactctggtaaattccattctagaatgaagcatgttggcactttgattctttttgtttaagattttcacaggaatgaaaaaaattctagaggtctgtttggttttttggttattttgtttcttaattccaatgggaaagaaaaaaaatgcactaacttttcaacattgaggaaaaagggaacatttgaagacggggaaacccatttctagaaataagaattatgcttttgcttattcatgaaaataagacttgtctattttatttctctttttacttatttgggacacgatttgtactgttgttctttcatagttttttttttcattctacaatgtgctgcttctaatcagttgtaatggaataatctatgtacatgttgcaggaaggtgttgtcggaagattgcgtgtcctttttgt

SEQ ID NO: 53459 - DNA, 466 bp, Populus trichocarpa
  Intron number 1 from transcript POPTR_0006s06470.4 (locus POPTR_0006s06470) derived from phytozome v7.0 (chr-ID scaf fold_6; pos 4618744 to 4619209 reverse strand)
tgaaaaacattcaattagggacagtaaccagtaaggtaaaaaacactccacatgagaaaattagcatcgtcgtttgaaacaatctaaaaccaaagcaccacaaaaaccttctcttcttttctttcttttttatggtttctctctgttttaattttgtttttttgggttaacatagaaagaaagattattcaaataaagataggacctttatggccaaaaaatcctcttttttgatcctttctaaaagtgtatttcagtgcttgctcagtcgaagatattgcttattcaattcttaacatgggtttgttcttgttcaattagagatatgaatttagtccctttcttgctttctttctccgtttaaaatcttgaaattgaactcaatggttacttaggttcttatttttcttgttgatattgtttttccaaagggttactggaattaatattgtccttgtgttttaat

SEQ ID NO: 53460 - DNA, 837 bp, Populus trichocarpa
  Intron number 1 from transcript POPTR_0005s19480.1 (locus POPTR_0005s19480) derived from phytozome v7.0 (chr-ID scaf fold_5; pos 18342363 to 18343199)
tggtaggttttgcagatttttgcatttacagagcactatagttgcactgatgaatttatgattttgttttggatttgattgggcctttgtgagaaaaaaagaactgaagtcctagtgattaccgtaagatggtgcattttttaattaatcttttgtggtcagcagtggttgttggcatagccttcagaacaaattgaatctgcatagcaaaaggagcatcatggttgaatgtttaagtatcgcatgtggcaactttaacagtgacttggtggtagagtgaggcaattgaatgatgggtgaggttgtgcagtgagaagacaatttaaagaatgacttgctttatgctgctctgatcatgatacttcatttttgggagggagggatatcttggtgattgttgctaattgcatttccgaattagttttggagattttcacaagttaggcaggtggctgggaattgaatgtcatgtctatttgaagttttttgccttcacctttttccggaacttgttcttatattccctcaatggtgaaagttcggtgaggatcctttttatggatttgcgtggggaaaaaagaaaaaacgaattctgtaccattttggttgttgactttggactttatagtcgtattcttcctttccactttaggtttaatggaggagttcatatttataatctgtgggagttgggctctttaaccagggaactcctgtcgtaattttcctggatcaagattgtattttatgtgttagggtagcaactgaaaggactcatattatttttctggttttgggtgctacagggacatctgcatacctacagattctgcgaca

SEQ ID NO: 53461 - DNA, 769 bp, Populus trichocarpa
  Intron number 1 from transcript POPTR_0017s12930.1 (locus POPTR_0017s12930) derived from phytozome v7.0 (chr-ID scaf fold_17; pos 13104317 to 13105085 reverse strand)
attgcatcaaaggccataaaagaaccgaaacaaaggtcagtttatgtttgatctttgtatcttaggatgctactcggatatatatgtatgtttgtttgttgacctgcaaaatctaaaatctgttcactatttattcttggccttccatatttctgcttaatttgattgtctttagcttgttttaaactttgttcttacaaaatctttggaactccatttctgatatgctacacatgtttatcgagctactattatgaacttgttctttcgtgtttaatggctgctaattaaagactggatatacagaatcctctcagaaagagtgaaaaatgaagaagatatatatatgtatatacaagtgaactggcttttaatgttgtctgatgaatttggagctggttactattactattaattgtagtgattctaactagtatattggaagtttaagcttataatacaatcacattggttttctttccttcaatcagttctcgactcgcgggcctttttcgaaagcactcaaagtacccttcatcgtgtattttcatgatatctcaagcaaagcatttatattttggtttggattaaagtgttctcagttttcggaatgaaagtctgtgagtctgagtttagaagctaattcagctgggcgggaaggtgttctcaggggtgtaattgaagcttctgggtccagtattcttattattgaacattgagatagtgattgctggtgatcttgaagttccagtatacgagaggcagtgac

SEQ ID NO: 53462 - DNA, 835 bp, Populus trichocarpa
  Intron number 5 from transcript POPTR_0017s10740.1 (locus POPTR_0017s10740) derived from phytozome v7.0 (chr-ID scaf fold_17; pos 10253956 to 10254790)
aagatctttgttgacacaggttctttaccattatcttattcaaacattttgtcgatggtccttgtcaagaaagcaataaagattttaaacatcctttgattgtgttggactgcttgtaaaactgatcttgacaacagaaactagctaacgttgaattgattatatagtttcaatgacaacaacatatacgtgaagaataagttcagcaaaaaaactaatctagcattgataaagaaaaggatcaaaatggtgataaattcatgaatctttgaacattccctaataacatcatttactatatgatcagtttcaaatctcttcacagttcacaccacagcctagtcatacttttaaagatattgtgaaagaagtttttccctcggaaaagcttctatattcttaagacaactgtgggcttggtttactaaaaacatgcattcaatcgggtttcctctggcccaagtgttgacttcggtacttgtgataagtaatctccaggtaaaagtgatttcccttttattacaaggatgaatgctccttcctaccatattcttttgtatttcttatatacagaaattcagtaaaatactcggattctctttgggggtaaacatgcgagtgattcttagtttatagggtaggctatgtaatcacaagaaatattactgataaaatgcatattatgtgcgaggatccagaattttataccacgtaactaaatgtacatgatgcatgttcatctgttttttcgcagagaatgatcacctacaaataaccatcaccataatttcacagtgcagattctgacctgcgacttgcacggagaattcagcgc

SEQ ID NO: 53463 - DNA, 559 bp, Populus trichocarpa
  Intron number 3 from transcript POPTR_0005s13980.1 (locus POPTR_0005s13980) derived from phytozome v7.0 (chr-ID scaf fold_5; pos 10995547 to 10996105 reverse strand)
cccgcgaccggtggcatcatcttcatatcctttaggttctgttttgtaatagataatgaaacaatggattgtccccataggcttatcaatgttcttaatctatttgttcctatggaaatgttattcttaacttctttgaactcttagaaggcctcccactacaaacaaaactaaagcgacaacaaaagactcaaaagtttcaaaactattagctccaaagccagatccctcgaatgtttatgctgctcctagatccagccacttgaaacgtaatcagattcctcatccaggtggtctttgtgtatatttgtgtatttaatctgtaaagcggtttagatttttatgtctttactgtaagtttcaaacctattttttcatctgcatgactttcaaaagaatactaagatttcataattagttcatgggtgacaaattttgcttacagagggttttcttgttcaatttatagtttcttttctgttatatctgaatttgaatagtcaatttcacatagaaaagcaaattgatatttctattttctgttgatttatagtaggtg

SEQ ID NO: 53464 - DNA, 888 bp, Populus trichocarpa
  Intron number 2 from transcript POPTR_0005s15790.1 (locus POPTR_0005s15790) derived from phytozome v7.0 (chr-ID scaf fold_5; pos 12388977 to 12389864)
tgcataagagatttgtcaagcagtgtttgtttgaggtgtgtgtgtatatatatatatatatatttttaatcttcagactgtctttggtaattggtaattttgcttatgttcatcccaatatatgccacttatttgaattttatttttacttttaaaatgtaattattaccattagtttcttttgttcccgagctattctatgtcggtttactattaaagaaaagttagttatgctgtgttgtttgtctgcattgctcaggcggcccagtaagttaacaaccgtgtataaagataaaaaccttttctggaaatcggggaatccgaaaattttggtgaagtgtttgatgtatcggtaattttataattgttcatgatattggtagttttgaattagagcactgtgtgcgcgtttttcaattatattgtacttattttggatgttttactgtctaatttgcttatgactgattctagcagaatgtttaactgttaatccatgtctatcttaggaattaacttttaactctttcacttgctgatactgatctcaaccatgtcgtggactgttttattaacacttccaatcttaagaagtaagggatgtagagggtgcattggaatcatgacgtggactttagctgttcattgcttttgggaatttgaattagagatgtgtgttaatttgacaaactattttctagagctgggattcccagaaacggtttttgttattgttgctgccactgctggtatcattcccatacatgctttctgatttgcagtactagttttgattgttgataaaaggtttctgaactctgaaatgttcactcgtttttgctgtttgtttctgacttgatacttgtgtctgtccatgttagtgcttag

SEQ ID NO: 53465 - DNA, 947 bp, Populus trichocarpa
  Intron number 1 from transcript POPTR_0005s07780.1 (locus POPTR_0005s07780) derived from phytozome v7.0 (chr-ID scaf fold_5; pos 5327791 to 5328737 reverse strand)
gtcgaggcattttggcctctagaaggtactcattttattccatccatttattcggattcttgaacagagtagagattatttagattctttaaaattttatttattaatcaacaatattagtagtagcttaaattagataatcaaatagagtttatattttcggtttcatcatatttggagggaagatttttgtggtgggtaggttttttagttaagcagttattgtattattatttcggcttgttttttgataaacagtattgaaaaatcattctgttgttttttttaaatttattttttaattgaggatgatgctagatttctgatccttggttataatttaattaattaataattgataaatcttgtgaagccatgctgttttcctttgaaggttatggggggggggggttatttacagtttcgcaattgaaagtaaaaggaaggatgtgctttattggcgccattgtgtgtcattagttccactagactagaaacctttcgtagtcggtaatccaagtgtgtgaaattttgggtcagtcaccttagcattatttcgtgtcttgtggaaacactgaaactaaagagcgtattctctgggattttctgttaaagttatataatttttggcatttaggatttttttttagttacctgtttgctttctaaacaggtggtagtttttccttactgtgttgatagtttacgcttttaaacaacgaatgaaaagaaaaaaggccagtgtgagaagttgcctgcttaaaagataaaataatttggaaagaaagatggtcagaaaaatcataaacccattctggaactgttcatacttgctgttgctcttgatacagtttaacgaagtacttttgtagcaatgaagcttcattcaggtaaccttttttgtccatgcaggaaatctctacttttcgcggctggtatcttagctg

SEQ ID NO: 53466 - DNA, 848 bp, Populus trichocarpa
  Intron number 4 from transcript POPTR_0017s02900.2 (locus POPTR_0017s02900) derived from phytozome v7.0 (chr-ID scaf fold_17; pos 2097269 to 2098116)
tacaggtggctacacggttaaaggtgagttcttgtctcctgcaaggtacaaatgtctgtgtgttttgctgaattttctggtcttcttgctgagcaactatgcaatggaatgatgggggttggtgctttcttttgtaggtggataattagtacttcagagttgttctagtttctcaacccagtgttttcttctaacttgtctttgtcaatgatttgctctaatttgtagtttcaaatttttgagtaattaaatttgacttgattcaattttcatggataagtgaagcttctggtgagttagtttttttctagcacctactgcctgctatagaaatcatgtgtctcagttcctagaggagagatgttataaaaataactgcatcttacgggatctccttttcaaaaactagaggacctttgacctcaatgcgggcatttccattgaaactggtggtacactttgacctcagttagaggaccttcacattctaccttcgacctcaattctactagtggcatgctttacattctaccttcacttgttcctttctaaacttctttggcttatttcaagacaactgctccttccctgtatacacaacattttggcttagcatatatcatttccaggcaaacagtatcatctttgcaactcaatcaattaactttgcaaataatttaactagtcattctaatctattttgcatgcatctttatcagtccaagtttcacctctttgtttagagatagctataaacattccatatttaacttaagttatttctttatgctcgtcttttctttcagaattatgccatgcaacaagctttcaaatctttgacagagcag

SEQ ID NO: 53467 - DNA, 809 bp, Populus trichocarpa
  Intron number 1 from transcript POPTR_0005s00330.1 (locus POPTR_0005s00330) derived from phytozome v7.0 (chr-ID scaf fold_5; pos 83537 to 84345)
tactcttatcaaatcagctgctgctaaaggagcaggtaagtttttactcgtaaagattccttcttttccttttgagaatgccattaagattcctttcttcttcttcttcttcttcttcttcttatcatttcctgcaaaaccaagagaaagtgttaaatgctgctctttattttcccacgtcttattactgatattgctttgactgaactctctgtagattgtcagattccattttattgatttcttgcttttggttcctgtgttcttcaattatttggatttgtttctttcttccttacacacacacacacacataacagagaggcatctattatgttttctttgttattctcagtttctgtgggcagaaggagacatttttgttccatcctctgttgttttattccattttttaatttattttcacaacaatagcaaggaaataatcagtttattttttcaaacttttaattgattcatttaatttttttatcagcttacttgtctgcctcaattactgtatatctgtttgttttttcaaacttttaattgattcaattaattttgtatcagtttatttgactcaattaatgtgtctcaattttattttatttttcatttttatttggtcttttttgttgatattccctcaatcttgcattcaaatttattcaagaaaagttgctgtcagtttttaatagctgtgacttttttttgttggtattgttgttgtttcaatgtatcttgcaatgatgttttgtctcatatcctgtcctaattagcatttgtcaatcttgcagtctgtttgg

SEQ ID NO: 53468 - DNA, 846 bp, Populus trichocarpa
  Intron number 1 from transcript POPTR_0017s10930.1 (locus POPTR_0017s10930) derived from phytozome v7.0 (chr-ID scaf fold_17; pos 10519696 to 10520541 reverse strand)
ttgctggtacgtttccatgtgtgtgtgtgtgtgtgtattcatatttgtacatgtgttccctttcttattcttcagatgcctttcttactccgccacacctcctcctccgctacatcaatataatttgaacgtgttttagtttgtgaaattaatgttatgtatcttgatgtaatttggtttctaatttgctatcagaagctagggtgtgccctttggctttgttaaaaagttaaaaatattaattaattttacgaggaggcgtaattatatagtttacccttggctttatatgcatcaaaagcgataaaatcctttgaaatcataaacatgttgatcattagagcttgtttttccttggttgctgaggaatgctcgtacattaaagaaggtaaattcaaataatttacattagccatctcatcagttgggtaaaagaggaaaaggaaaggtgttttgctttctttaacttgttcctggatccttgcagaaatccgtgatttcacgagattttttgatttggcagttggacgcagcagcatctccgttagccttttctttttctaacctcaactctcatgtgtccgaatttattattgttattgtttaattatttttctgtcatgttttggcttactttctggaaaaaaaaaggtttgagaattaattaagctcaactccagtgaaatctaccttggatatggaactgccaagtgctccacctaaacacctaagaaaagccttgccccactatcattatttttcttttttcctattttctcgtgttgagttttatattcttcctctggcttagttaagcttctcgactggggggaggaaggccaccgg

SEQ ID NO: 53469 - DNA, 497 bp, Populus trichocarpa
  Intron number 1 from transcript POPTR_0006s20350.1 (locus POPTR_0006s20350) derived from phytozome v7.0 (chr-ID scaf fold_6; pos 19405369 to 19405865 reverse strand)
gcaaaggcactcagtgtgaactaattgttaagaaagtaaactatcccatcatttttactcttttgatttatggtcactgcttggttatttgaagcactaaaatttgagttatttggattatgagggttcacatggcattgaacttagaaattcggcgcgggggtgttgaatttgaattgcacgaaaggggttttaattatttgcaatgggatgaattgaacgaaaggagagggttagttttcgatgtgcaatcgttgaattaaaatgaagaagattgtcatatatctaaatgatatatattggcttcattaaacatgaactggagagggttttcccctttgattagaaattgtgtttggctacttgatttcatttcattctgaaagtagtttgtttaggccgcattctcttcagcctaagtgatgattacatgtcatcttttctctgtattgatttttacagtttggatcggtacacatctcaactggagatcttct

SEQ ID NO: 53470 - DNA, 775 bp, Populus trichocarpa
  Intron number 1 from transcript POPTR_0005s17100.1 (locus POPTR_0005s17100) derived from phytozome v7.0 (chr-ID scaf fold_5; pos 14212769 to 14213543)
cggtgctactcagcttttattcaaccacttatgttggtctctttttagatttccttttaaattattacttttgttgcatggggtttgatgatcatgagatttgattgacacttcctgatataatattctcttaggaaatcctttttgggtttcgatctttttacttttttattattttttatttattgttttccttttcccttgtcttcgtaaagtttaatttctaatatttttgggattgttgtgctgtaaatgattaataattccatgattttttcttgaagtttgtgtgaattttatcgaaattgtgattttacatttctttttctcgttggctcgttgactgttgagtaattgtttctatggtgatatgaattgtcatgcacattttcctttcagcagtttgattatgacttcttccttgttgctcctatttagatcgattagtttctactttaaactcggcacaatataccgtaattcaaatcaattaagtagggaaggcctttgctaatcttgttatgttgcagctgcaagtctttctttagtttaggtctcatgcatccaagttgcaatttactgcttttcattcgaacataaggtggcacttcatcgttcggtaatctatttttcattccaacatatggcggaaatcccagaacatcaagtggcaatttactgtttttcatttcaactctcggtgccgattcatcatttacttccaatttactgtttttcagaccccttgtcactggttagggatcaccgggcaaag

SEQ ID NO: 53471 - DNA, 845 bp, Populus trichocarpa
  Intron number 1 from transcript POPTR_0006s25060.1 (locus POPTR_0006s25060) derived from phytozome v7.0 (chr-ID scaf fold_6; pos 23514458 to 23515302 reverse strand)
tggtggtaactggattgctttgcctcaaaaagctggtaatctctctctctctcgaacacaaacacacatgttggttttgcctgacaacaattttcattttcttttcatttaggattttagcttaattactaaatatcagtcgagtcagatgctgagaggcctagagggattgtgttcatttaatttccatatatattttcatctacaatattgcaaatgcatcaaaagataatacaggaagacgtcttgcttgcttcccccactcctctcttccatcttatcaaattaacattcttgttctccagtgctaattgcagacattttgaccatcaacaattagtgctgtgttttttttcctgtttgctcaaacattttcagtaaaaaacaagcctttccggtgctactgatttcttttcttggacttgtgtactgtggctgtgtcagaaaaggcagactgtggtttgactccttgttgtagtactgatcttggttcctggttccagggtattactcatattttcctacatcatttcaagtttgaatagagcagcttttcctaggtttgatcagcccaattattagggccatttgctcaatttatttagtagttaattggtctttagcccatatataatttcttttgtattacacataattgaaataattttacaatattgaattgcttttctttgcatatgtttgatttgcacgcaaggcaatgcgccaattgtccatgctttcttgctttgtagtgtagccaagtaagtagtcgaaccccttcaatttcctacctattcaagagctaaaccttgatttatgatcttatcggtcgcaggccttaagcg

SEQ ID NO: 53472 - DNA, 873 bp, Populus trichocarpa
  Intron number 1 from transcript POPTR_0017s12130.2 (locus POPTR_0017s12130) derived from phytozome v7.0 (chr-ID scaf fold_17; pos 12298026 to 12298898)
ggcttgtctgggtaaaagacttcttaactcccatctccttttctttttgctgactgaataggggtatctatattagttggttgttgtcatttggaatctcagctgaattttgggtaatcttagccctagttagagattgcttacccactctttaaatagtcttttttttattattgttattattattcgacactaagggatatcctcaagtctgcttgcgcgtcgacccccactaagttttgtactctttagttatcgatggattcaatgagactcttcatagctgtggttttttcctttggtagagagttggtaaaattagcagtttcaaggttatatttggtgttatcctttgttttatagaagatttcagataaatgtggttcatccaatcctttcccaccatatggccgttttagacagccataatctgggaaagtttaatgtccttgttttccactgtcttgctccttcctttcgtacccaaatgatgatgatgataaaataaaataaaagattagggagagtttctttaagagcgactgattggatgctccacagtgagatttacttgttgtgagtctcacacatggacatgcttctgtatttcacctgaattgtgatctagagtttgttcagaaagttgatcttaaaagtgttgtgcttagttgctcttgaattaataaaatgacatgtctcatgaaattttccatttttgacttgttatttgaataaatgagcaagcatctgtagatgcctggatttttttatttctatccttgtttcattttcttgggatacgcatactgatagatgtgaatgctttgcgtaggaaagcttcagaacttcttgaacttgggtttgttttacgag

SEQ ID NO: 53473 - DNA, 267 bp, Populus trichocarpa
  Intron number 1 from transcript POPTR_0006s24590.1 (locus POPTR_0006s24590) derived from phytozome v7.0 (chr-ID scaf fold_6; pos 23189898 to 23190164)
tgttgggaatcgactgctcagtgccactgttgaatgtaattcctctctttcctctgtcttctcttgttttattcggttgcttagaaaccttaaaaaaaacttaagggatagtcataattttgaattttgagttaatgtttttgtttttctgttttgagagagaagggttgatgtcaagttagttaaggttactattttaggcatatcatgttgttgtttttggtatatttgactgatagggtggtttttaatctctattttttgcag

SEQ ID NO: 53474 - DNA, 614 bp, Populus trichocarpa
  Intron number 1 from transcript POPTR_0017s04430.1 (locus POPTR_0017s04430) derived from phytozome v7.0 (chr-ID scaf fold_17; pos 3408825 to 3409438)
aggtttgtattggaatttgatgtttttgttttgattgattgtgggttggatttagattttgattggagtttgttagcaagaatgtgaatttggattctaaagaatgtaactctgattggtgaagtttgttgttgcttgtgctttcatgggattttcaatgagattgagtgatgatatttgtgtttagctttgtcgaagttagctcaattgctttcttgacgtgtaattttgatggggtttgacttgtgaattctattgtgctgcgtttaggtgtttgtggtagtgtatccttgaaaatgatctaaggcagtgaaaacaggaagtgacatgtttgatagcttataatgtaacgttgtagtgttgatcatcaaaaaccaatgagtttttcacagtgaaagatggtaaataagaactaaggtcatgttgcgtgagtaggattggcacttgatgtctcagtaattcgttgagtagaatttattacttagcatgaaatttagttcaatttgattgccaaggatgctgaaatgcaattattttatattatgactataattggtcctaatttttttcttgtcaatgtttttgcttctcacagtggttatttattagaaaag

SEQ ID NO: 53475 - DNA, 786 bp, Populus trichocarpa
  Intron number 1 from transcript POPTR_0006s09970.1 (locus POPTR_0006s09970) derived from phytozome v7.0 (chr-ID scaf fold_6; pos 7417928 to 7418713)
atttgtggtaaaatattctgaaatcagataaatgtaaccttagttcttttctagttcacgaaaagaaagaaaagatgataaccttggtgatgcaaatcaggagacaggggaagagaccctataactcacaaagcctactggataacagaaacgtgggaaattcaaagaatcttgagagctgttataagcttattagctgttagttattattatcctagttagcaggtagtttcctagtcagattagtattaggtattaattacatattagattgtaattccttagccggagggtatttaagagaggaacagaacaaaagatatgcagtttttgtattcttggcaattgcttttctttaaacataaattggagtgattcttctacggagagattctgtgttaattgcttattgttcttattagggtcaacgagaggttgcactcgagggcatttacattaatttggtattagagttattcatgactgtaacccagagtagtaactcgtatattatgtcaaaccctcatgttcccaacaattccccatgccaacataccaaattctaacagcaaatcatccatatcaccactatgttggaacagctttctaaccaaatagatgctatggatgaacgtcgagctcgagagagggtaagatctcctaatagaagggggcgtgaccaacttcgtgaggagtcactggagggaaatcacataattggtggggaaaacttggaaactgaattcggcagagatttttgagccccatcaccaccgagttcagcat

SEQ ID NO: 53476 - DNA, 584 bp, Populus trichocarpa
  Intron number 3 from transcript POPTR_0017s11120.1 (locus POPTR_0017s11120) derived from phytozome v7.0 (chr-ID scaf fold_17; pos 10792285 to 10792868)
ttactaatccgaccttaggtgagtgttgctatatttccatgccttcttttcttatatctcattgttcttatggttttgaatgttgattgttgtttaaactcaatttgagttcctgtgagctctggtttagttaatcttgaccttgattaaggacttgaaaaacgtatgttttatgtaccttttttgtagtggcattgcatcccgctaatgctttactaatgtttttattgtatgaatttgttctgggaaataaatttactggagtgtctgctgtatagctctcgaagtaatgaacaattatcttaaattcaattctctttataaatatatctccgcacaatcggttgtgaccaaattgcagaagttggggtgaaaaagcttttgcttttccaatatataatacttgccgtgttctgaatttatgaaacttattatctcattttctttacttgatactttgatgctctcccctttttgtctcatccccttttatcatctgctatatgtcttagacttgcatctcatgtcaccatcctccttttatttcagtttcacccaaggcatttgtgcgaagacctattgct

SEQ ID NO: 53477 - DNA, 701 bp, Populus trichocarpa
  Intron number 1 from transcript POPTR_0005s08200.1 (locus POPTR_0005s08200) derived from phytozome v7.0 (chr-ID scaf fold_5; pos 5652980 to 5653680 reverse strand)
tcactactgaaaacagatcagaggtattcttgatagtaattgcttatattaatttttacttcatgttgttttgtatatgtgttgggagcatactgtagaaggtcccagcacaagattttttaccagtcctctctgtattagctgcctggagttttggcagtctcttgtattcattttccgggaaaagaaaaaagttaaaattcacagtagggagaaagatatcaaaaatcatatcagaatattctggtgctttaggatattctggtgcttaaggatagcaaaaatcattttatttccattttatgcacacaggggtctttcaaaggttggctccttcaatagggaaaccagctaaactgatattagatttgtatttgcatccttggtgacatattgaagtggatttggtgtatgatcgtgcgaagtgacacaaaaggatctgtatgaccccatatactttggtattgaggctgtgtagctgctgctatatccttggtaacacattgggaagtcattcactaggcatatgatggtggtgctggttttacatgctgttatacttattctgtgtaccatacaaaggaattttagaatttattttgctctttatgtttgttgtgctgttgttcacagctttaaaatcttttttgatttctctttgagcaggctgccttcagtgaacattcaggaatatcaagtct

SEQ ID NO: 53478 - DNA, 464 bp, Populus trichocarpa
  Intron number 2 from transcript POPTR_0017s04400.1 (locus POPTR_0017s04400) derived from phytozome v7.0 (chr-ID scaf fold_17; pos 3395818 to 3396281)
tcctttctttgcttggagaggttcctgtcatacgggtaattgataattatgcattttatgcttcgaattgttttgacccagttgtttatttcttttgtaattgcagtttctgggttcaagttttgtttttgtgttggaaagtatgtgtctttttgttgtttgaattagaaagttcacttttttctatgttaaggagttgtttcttcttttagaagtatgttatgtgtagtgcaattgttacagaatttgattaactttggagaagagtaaattttgaattgtaatagcaaaattggattatagaagttaagaacacgtaaaaaacttgcttaatttacatttaagaaacacacacacacagaatagagagttctttaatttttgggaatctgtggatgatttttttttttctgctaattttgattgcaggttcctgcttctattaactgcaggttgcttgaaca

SEQ ID NO: 53479 - DNA, 369 bp, Populus trichocarpa
  Intron number 3 from transcript POPTR_0017s04400.1 (locus POPTR_0017s04400) derived from phytozome v7.0 (chr-ID scaf fold_17; pos 3396350 to 3396718)
acatgtcagtatatttgttgtgttgaaatatgtgatttcttgataagttttgtatttcatatgtgacaattttactctcagatgattatgcatgacccattttgacaacaatttacagttcttgtcagacactgaaagtgttttcttgcttgagtcgtttatcacttgtagatatttgaccaacaataatggcattttcttgttaagctaattttgagtttatgcatttatggagtatgcatttacgaatttacatattattccttgtatgaatactcctgaattttctggtgggctgatatctgttggctttgtttttgaaaaaatggatcaggggactaggcaagaccattcagacaattgctttcc

SEQ ID NO: 53480 - DNA, 809 bp, Populus trichocarpa
  Intron number 1 from transcript POPTR_0005s02400.2 (locus POPTR_0005s02400) derived from phytozome v7.0 (chr-ID scaf fold_5; pos 1547501 to 1548309 reverse strand)
acttttatttcacttgcaaatccacttctcctccggtagagattctttctttgtcaattctccattacggtttttttttcttctcaattttgtcactaactgttatttgcgttgattttgataaacccatttgtaatctattgattttggtacagaaattcacttgtggggtctcggttttagggcgtggcttgccctttagaaagttaaaagataagaaatttgtgtttttttgctttgttttgatgaagggaatcactgtatttgaagccattcagtttaattaggttctttagacttttttttttgtaggacacttgaaaagtttgagacttgttttgttaaataatgggtggcaattggttgagataacgatgaattggggtgcttgaattatggacaaaatcttgtttaagttattgcaagttaatcccttcaactttaaggatattaacttggtgattgaaacatgttctttgtccaaatatttatgtgtttttttatggatttggtattggaacatggtctttgtccgagaatttacatgttttttgggggagtagagaggtagtttctctttgaaaattgagaacatgttatttatgtgtccattaaagcctgtttggaatctgctggcgtgtaagaattgaattttaacaagttaaagaagctcagtgtttgtatctggaaagctaaaattcaattaatttatctcatttctgtttgagaacgatcctgagctcaaacgatcagattccaattgcaaattctgattgttgcaagggttcaatttgttaatgcaggaaaaa

SEQ ID NO: 53481 - DNA, 686 bp, Populus trichocarpa
  Intron number 1 from transcript POPTR_0005s12890.1 (locus POPTR_0005s12890) derived from phytozome v7.0 (chr-ID scaf fold_5; pos 9690344 to 9691029 reverse strand)
ttgcaaataatctaagatatatatctcatttcaaggtaacaacattatagtttttgaatatgttattctatgaattactaattttgataattttaggctacatcttatttcccttattcttattcgtcttacttttttgttctagaattgtgtaggagttgcacacatgtgcgagcatgtgtttctccagaaaatcaaataccatttatcggtagaaaagatgtacctacataaaatattatggttgcatgtagctttgacatgcaattcatttttgtttagactggatgggaaggtagtgcacatgatacacgaatatttctagaggcactttacaatcctaacatcaaatttcctaagtcaccagaaggtattaacaaactaaaatatgtaatattatttatttcaagaagaggtaattttatttatattattgataagtaattaacaaagtttatagatgttatgttattccaggaaagtactatttagttaattctggatatccaaatgaatatggatttttaggtccatatagaggttagaggtatcatttccaagaatttcgtaggcgaggccaaccacaaacacaagaagaaattttcaatcgtgctcactttttagtacgttatgtcattgaacgtacatttggagtgtggaaaaaaaggtgaagaattttacagaat

SEQ ID NO: 53482 - DNA, 808 bp, Populus trichocarpa
  Intron number 1 from transcript POPTR_0006s05140.1 (locus POPTR_0006s05140) derived from phytozome v7.0 (chr-ID scaf fold_6; pos 3589548 to 3590355 reverse strand)
caggtgttacaaagaccattgtggaggttgttcaggtaaagagatactcttgtggttattatttatttatcttttttttgaagttttcatgattgaatctttgtgagtagatgttgctttttttgtgttttaattttaaatgcttgtacataaatttagcttttggatcttgaattcatggttggtggctagcgctatttgtgtgccgaggaaatatggtttttttatttggtgtctaggaccataagcacttgataaaaatgcaatctcttgcaagtgattagtgaatattatccggcagaaaataggagatagtttgtcttgatgagtagatgtggcagatattgattctggcaatctgaaaatcttatagtttttactgtggattctctttatgttgatttcctccttttgccgttgcttcttgtgcttactgcttgctttgaataacctctattgttcattaaatcttgattcctctcttggtatacttgtgagtaactgtgccgttactatagaaatgtttggttcctacctcttggttttatcggtttcctttattcttcatttgatttctcactgctgtttttaaactcttttgctgacaatgggatttgcttcacagtgataaccttttggtaataacttctatgctgtccaaaatcagttaaagggccaaatagggttcccttcctttctaacttacagcatatgttctcaattgacattactgcttccaaattgcacgcattatattcagttagcagagtcctaatgcttttgggatatgttttgtcatgatccagat

SEQ ID NO: 53483 - DNA, 940 bp, Populus trichocarpa
  Intron number 3 from transcript POPTR_0017s04520.1 (locus POPTR_0017s04520) derived from phytozome v7.0 (chr-ID scaf fold_17; pos 3488034 to 3488973 reverse strand)
gtacatcagatcctcaagggctttgttatatagaggtaaatggttgtttgtattaatcagtgttgttaaaattttgtagtgatcgttgtttcattgttgcatctgcagggaagtatggataacatatgttaacaaatgtcgggatattcacagctttagagctgtgttgataatttaacatctacattttctagctgggatatgacttcctgtatattagattgcatacaatttttggtctctttcaagattgaaatagtttgactgcgtaaggttaaggaagatgaattaggctataacaacaacaacaaggtgttatacaaatggtttcttaatttcaataaagtatttagaacattcctgtgattaagccttctaagcagctgcgggatggatgttctcgagtcatgaaaccatctttctccctttgtaggagcttcaacttaccaaagttctttgtttgtcacttttcttgaattgatttcttgctttcctctgacattattgttaatatatatgttaaaggttcttttgtttatattggagtgatgggtggaagctccattgttggagagatatctttttctgtatgaagcttctttcacacccattgttagattttttttaatgtatatgtatgccttaattcatctaaagtgtaagctttcagtttttgtataaatatccttgcacgttctagctaagcctgtggactgggatccaatttcctatagcatattctaactcttgtcccccccccccccatcaaatatctagacctgacccttgattagaaactcaaaattaccccttcccctgtccaaatggtaactgcaatgttcaatatggtgaaagattgtagtatgacttttgaagtattctttttccaaacatttcaggatcctgataatataacatactttgcagacagccgctctag

SEQ ID NO: 53484 - DNA, 1010 bp, Populus trichocarpa
  Intron number 1 from transcript POPTR_0017s07870.1 (locus POPTR_0017s07870) derived from phytozome v7.0 (chr-ID scaf fold_17; pos 6180908 to 6181917)
ctggtgggcttggtttgcttagagctcctgattgggtatgtttcttcttttgttttgtaatcactgttatcaagaaatgtgttctatgatcgatcaatggtgtttagtgaatggcgttctttaattttgttgcttctgatatttgctgatcattccctgaacgatgtttcgaaaattttcttttaagctatgaaagtgcaaaattagagagtataaagctgggttttcattggatagcgagtgaacaggcactaacacttagcctggcaatggactgtggttggttatctaggttgattcatcctggcattggaatacactcttggtctaaaattatgaactttgatgaatacttgtataaaggagcttatcaattaaaaaaaaaggaaaggaaggaaagctaggaaatttatatacatctaatggccttaagtttttcgcgcagaaaaacaactacaagactatttcatagttgtatacaaataggacaattatctttcatgaagaaaggaagattgaggtttgagacctggaaattattgtagggttattaacttttagatggctaaactgctgattaaatgtaaaaagttgtactatttgggatgtctctacttttacaacaaattggaagagtttatagtggctatgcagtgtatgtctagaagatgttctagcatgcatcctgtttttctaaatttccatatcctacaaataacagcactgcagataatgtaatctgtatctcatttgccacgggcccctattcgtaatgggggaagtgagttaaggtccagcttcaaattctttatgtattttgaaaaaaaagttacgttcttagagttacacgcagaatagatgtttgaatattgcagattacttgctatgtattctaattgttggcacagaatctatcaccaaaaagaaaaaaaatcaaatcacagtagatgatagtctcaaatttctttttatcaggaatcacctgattacttacgggaactgataaggaa

SEQ ID NO: 53485 - DNA, 649 bp, Populus trichocarpa
  Intron number 1 from transcript POPTR_0017s13290.1 (locus POPTR_0017s13290) derived from phytozome v7.0 (chr-ID scaf fold_17; pos 13454419 to 13455067 reverse strand)
tcgcttggacagaccaccgagatcaactgggacaagtaattcccttctcttttcttcttcactcatttatattatcatggatttatcatattgtctttttatcttgttttttgaaccggaaaatgaagatccttgtacgcttggtttttatgattatttcttggaaaagcagaaattttgactcgggtaacagtaattacatgaaaatggcttgacgggtttcttaatttatttgttttttgttgttgttttatatatattgtaaatggatactttggaatagacagacccacatgaggtttttgcttcattcgcttatggctccaatatatattcatgtttttgcatcagtactgtatttattatggatggtttaaggaatccaagaaaccagcttgatgagcgtggtttctgtttttatttttgaaacgaattgtaaggtcacttgaatgtctttcctttcctttttctttaattgggtttaggagcgtttgtgattataatgaatattttcatgatgggaaatacaagacttgagaaggttgttgtttttttttttacattatatctcatttgaatcctaaatttgcatcgtcattggcttattttcgctacctgttatcttgcaggctcgataagactaagtttt

SEQ ID NO: 53486 - DNA, 527 bp, Populus trichocarpa
  Intron number 3 from transcript POPTR_0017s03050.1 (locus POPTR_0017s03050) derived from phytozome v7.0 (chr-ID scaf fold_17; pos 2213556 to 2214082 reverse strand)
atagtggcgagaaggtaattggttgtatgtttgttatttatttttacttgtttggtgttttgttgcatttgcaatggaagaatggactaggattcgtacttttttttgtttaatcagtatgttttggttgactcaattcgaatttagggaattttgatgtgacttttattctgaatttttggttttcttggattggaagttagaatttgaattttgagatataaaagtatatgcttagatttattgataaaaacaagaaaatacatagaggagaactgagaaatcattgaaattatagagagggaaggaaaaaatgtttttttgcagtcgacctcttacatatattagtgttgatgacttgtttctcttcatcatgtctgatttctgttgtggaggccatattatctttggtttcactgaattctgatgggtttttgttggatttccttctgtggtcaatgttcgcttactgatttgaagatgacattgtaggtttccattttggcggggactcttgctcgcttgga

SEQ ID NO: 53487 - DNA, 753 bp, Populus trichocarpa
  Intron number 1 from transcript POPTR_0017s07980.1 (locus POPTR_0017s07980) derived from phytozome v7.0 (chr-ID scaf fold_17; pos 6390533 to 6391285)
tggcttcaaggaggagaacattctggttctgacaggtattataattgttattccttctcttattttctgctctcactttcttttcattgccttactaatgagtgaaaatcttcctttcgatacgcatatgctagtgcatgggatgcaatcaaatttatgagggatctaccgtgggactcccataacccaaatgaatatcagggaaggaatatcttcggattggaattgtcatttttttgtgctggaaatgaagaaaggaaggaataaccataaattggatgtggaagaacaacggtcaaaataaaaaatattatctggaccgcaccactttctaaagtttagtccactcattttttattttttctagcctagctttctcctcttatataataattaaaataaacataagtcattaaaaatcgaatttacttgaatgaagaaaactgtcaaatgcataaccatattgtctgcgtgtgtccacctatggatgatttcaactatcacacaagatgactgcccatctggatttattttttctttattaggaggttcgttgaatcttgggttccataatgacgatagtctcctataaaaattcatttgaatctttggtatcttagtactctatgtaattaacttggttgtctggaaatttatttatcgcaaaatacgtgaagaatagttaatgctttgttatttcttgcgctacaaaatacagagcaggagatagaaccagaactaattccaacaaag

SEQ ID NO: 53488 - DNA, 691 bp, Populus trichocarpa
  Intron number 1 from transcript POPTR_0017s12760.1 (locus POPTR_0017s12760) derived from phytozome v7.0 (chr-ID scaf fold_17; pos 12928301 to 12928991 reverse strand)
aattactctcttgatctctctctttacattccgaggtaccattccaatttcatttctctctttcttctaatttaattgtgaaattcctttaggtctgatgatattcagcacaattttactcctcgatctgttgtttaaaaaatggatctgattggttggaaagtcataagatctgccgacttttttagctttgaattctactggatctgcttccaaactgattctagctcttaatttctgttcggatcttagcattctaggctgtggtagtaagttgtagttcgctgtgttagatttttttatttgtttcatttttttatttaatttattatcgaaaatccaagcaaatgagtcaaaacgtatgagaagtgcaacattttctaagatccaggacggactaggacttgattcaaagtctggatctagttcaacatattgaaaagggttgaaatggtatcgattgtgttgtgggaaatggactcaattttgctgtttgacgttgtcatgtgctgatttgatacatcattgtgcgcgtgtgtgtgtgatttgtgaatttacaagcgttattgttgcttatccattgatctgctagagtaggttagagtttgcttattcgttttttatttgttttccttcataatgatggattaataaatttaccttcttcaggttgtaaacttagaggaggaaa

SEQ ID NO: 53489 - DNA, 800 bp, Populus trichocarpa
  Intron number 1 from transcript POPTR_0005s22030.1 (locus POPTR_0005s22030) derived from phytozome v7.0 (chr-ID scaf fold_5; pos 21040474 to 21041273 reverse strand)
ttaaagagaaacacgtcattctggtacctctcctccttcgactcgtacaacttactattcctcacgtctcgaggtttttttttttttgatattcttagcaataaattaatgtattggatgttaattttgaccacagtcgtgtaggatttcatttctgaacggatattccgcctaacccccaaaattattgttctacaagtattcaactggtagaaaatcaagttgaaaaggaatcggaattgagtttaatgagactaaaagaattaacaccatggattaaaccttggaagagatattttatcaaatgaagcgttatcatgatctttccaagaaagtatggttcttttgaattaattgattcaatcacatggtatggaaagtgatcctctcatgtcttaactccggaacagattggctttattaaaatcaagttgcaggatgttttctcttggtggacatgtgcaatgatccatgttttagattaatcactgctgttcaatgacacattgtttctgtgaaaaaaaaaaaacactcgggatatgggatgttctcatttccctccatacgcatatgactgatctgtagttagacaaaacatgaatagtaaatgacacgtatattttaatggaaaaattattaaaatcattttacatttccaagattttttcattaatgattttttttcctgttataatttatcagggattgttgattaaggcaatgctgttttctgctacttaaagctttactatgttgttgtctcaggttgaggacattgtagacacaggaaacactttatc

SEQ ID NO: 53490 - DNA, 507 bp, Populus trichocarpa
  Intron number 1 from transcript POPTR_0005s28010.1 (locus POPTR_0005s28010) derived from phytozome v7.0 (chr-ID scaf fold_5; pos 25415782 to 25416288)
ctgcttcaccattatttgaagaagaacagggtaaggtatgtgagtagcagattagattttgattctttcatttcattctattttgctgctttaactaattaatttaattatatgtctgactgagtgaccctctctgttttcgtttaaactcaaaattaactatttttatctcttctatttataacaatttcactatttttatcgcacccctatttcttacaatttcatttttttttaaattatttgatataggaaatacttatacataaatcacacaactgatgactttgctttttttttttttaattttaattttaattttctgtctggagagagagaaagaagtttttgctttattttcattttgtggtgatctttatttgctagcagtagtctgtgtttttttttttttaatattttctgtgtaattctaattctgactgtgggttttgggttttgtttattaaattaggtgttattatctgtgagggtgaggaatttccgaag

SEQ ID NO: 53491 - DNA, 675 bp, Populus trichocarpa
  Intron number 1 from transcript POPTR_0005s22730.1 (locus POPTR_0005s22730) derived from phytozome v7.0 (chr-ID scaf fold_5; pos 21624916 to 21625590 reverse strand)
tctcctcagattctcttcgatccgaacctgctcttgtattctttcttttcttccattttctgtttgattgctcataattttatgttttaactggaaacgaaactgagttttaagaaaggaagcgaatcgtgatttgcaccattccttcttagtctgatatttaggagtttctgcgttttcttagtttgatatctgtttggctggctagaaaatgaagcaaagtaactgaaaaaaagtagaaaaggctgctttaatatctgttttttttttttttatttggaaacgaaaagttccctttctctgtttctcgaaactgagtttttaatatatgttttggttggaaagaaaatgacaaatgaaaacaagtggaaatgactgtttaatttcttggtgttcatgcttgttagagattaaacaggggattattggattataagatatttactatttactgcttccttttttttttttatgggaagcaggaacctggggtatctaaaaatcgtttatcgtctctatttttgtctgaaggtaaatagttgtttttattttctttagttaagtttcgctctaatttttgcagatttttttttttggtttctaaattgtttttaattgcatttgtttccctttgaaagagaaagaagaatctttgcgtggcgacgttgagaatcc

SEQ ID NO: 53492 - DNA, 205 bp, Populus trichocarpa
  Intron number 1 from transcript POPTR_0005s12130.1 (locus POPTR_0005s12130) derived from phytozome v7.0 (chr-ID scaf fold_5; pos 8897575 to 8897779 reverse strand)
gttatgtactgaaattttttatgtgggaatgtggctgtacttgatgctgtttatgtttttatcccttttcttttcttttgatgttgtgtttgtgctggccatgatgaatagaagatgtaaaggttgtagcaggatctaattttgaaaagattgtaactggtcatggtgaattgattaatgtaatgatcggagagataacctctta

SEQ ID NO: 53493 - DNA, 495 bp, Populus trichocarpa
  Intron number 2 from transcript POPTR_0005s08020.1 (locus POPTR_0005s08020) derived from phytozome v7.0 (chr-ID scaf fold_5; pos 5516088 to 5516582)
tcaattcccaaatcaaaacttggccgactcctgcagcgccaggattgaactggacacaaaattaaaaacccttaacccaaaagatgaaaaaagaatacaaaagtccactttgacagcaacaaagctccacaaatcctaaattccctattttcgctcacacataacagtgactaaaaatctaaaatgaaagcaaaaaaatacgatgcaaacagctacggactacaaattcagtaactaataacaagataaaattatgggataagcttataacataccaactgattaagcaaaatcgagtgagaaatcaaaaattgtttatttcatttagttttggcaatcaatacttaaaccagatgagcaatcattagattttacagtttgcttgcttcttcatttccaacaggcatccagtaacagtaattgataaggctctgaggcaaagagagggggaaagagagagtacctgaggctgtggggatccaagaagagaacaag

SEQ ID NO: 53494 - DNA, 389 bp, Populus trichocarpa
  Intron number 3 from transcript POPTR_0017s12870.1 (locus POPTR_0017s12870) derived from phytozome v7.0 (chr-ID scaf fold_17; pos 13055734 to 13056122 reverse strand)
atcggaagtcgagaaccgttgttttttcaactgtggtaagcatgcatgcatccatcgattggttttatatgtttttgctgttttgatgtgtgcacaagatagtatttcttttatgtggagagtggtttgtagatacatgatgggtctatgtatttggttgagagaatttgagtgggacattggaattgttatgaaatgcgtttggagttgatgggctcatttgctgaagaaaattgacaaaattggcttgtgcaagtattcaattgtttttttagtatgaagtctttgctattatattattgaatgatttgatgtgaaagtggagagggtatgttctgagggatagaaaagagactcatagtggttggttgctatatgtctgtggcagg

SEQ ID NO: 53495 - DNA, 771 bp, Populus trichocarpa
  Intron number 1 from transcript POPTR_0005s00530.1 (locus POPTR_0005s00530) derived from phytozome v7.0 (chr-ID scaf fold_5; pos 203803 to 204573)
aaacgtgtcagttggaatcgctcactttctacgaggttaattcagctcaattcaattccctgtttttaatgaattgtaagttgtgggttttgcttgttgattgtggttcggtttgatctttaagttggtgggtttttcatttgattagttggtgattgtaatgaaagctttcaacttttgggtgcatctcactttcaccaggttaattaattcgtttcgatggaattcatgttctggtttttgattgttaattgtgtttctgtttggtttctaattggtgggttttgtgttttgtttgtttgtttcagtttgactagttggtgattgtggtggaacctttgaacttttggatttttctcatttgtgtgtgttgcacttttcagttttcaaggggttgattaatagtgataataataattatacaaaaacaaagagataaacaaaagaagagttatatggattttcgtaggatacgagaaatgataaaaacaagaaaaaaattcaagccatttgatggcttgatgtgaggtcacctaatgctagggaaattcatggccagtgcattttcagcttttgagaatggagatgcactcatataagctataatttttttttctcaaacttattaaggatgcccattttgttttctttctttctttccttttcctttcttttttctttttctttttgattttgattctgcttttcctatgggattattttgtgcttgactcagagggaggataagtatagctgttgctgcttgtgtgg

SEQ ID NO: 53496 - DNA, 1000 bp, Populus trichocarpa
  Intron number 2 from transcript POPTR_0005s02850.1 (locus POPTR_0005s02850) derived from phytozome v7.0 (chr-ID scaf fold_5; pos 1841959 to 1842958)
aaattgttgttagcttagtgcctggattgcatcaggtatgttaaaccaactcagttagtaaagcatgtttaacagttatgcctgtgatgatgactttgtagttggcatttgtgggaatcttttgttgcattatataattatgtaagtttttagggttgaaaggaaagtaacttgaatttatgttaatcactaatcaatgtgcttatgctatacaaagatattttataactttgttagttatctataataatttacgagccttttgatctcgtaagccatcaaaattgagtaatagaaatgtaaggcaataaattatttttaaaatgtaacaatggaacatggcaatgaaagctatagtggagttggccttaggctatcactcagaaaggagccatctttgaagagaatcatcccaatggaacgtaaatgattcatgactatggagttttctcagcatttcccttcacaaggttaagcttttgggacataatccattggcttttacattgacatcaagattattgtcataatagaaaactgagcttgttcaagtttttacggccaccaacatatgcattctgcattagcatgtggtttttgactggctctatctgttgctttctcagaatgtttttagacgattaatctgattcgattgacatctcatattcaaattgctctcgattttagaagtcagttaagttagtaatgttatttttttagtcttttaagagattgaatctgctttaggctaagctaagaaggaaccatacaaactactggctttctgtaacctttgcagggtcttcattctcctttttaatatgttaatggttgtaggaatgagatagaatgttaaagtgctctctgtttggtgcatctatgtgtgctatttttcctaactaatgttctcatcaacaattaaggaatgtgtatttctaacatctctgctaccttcaaaatcattgtcatttttgcacacagttcaagttccgtgtag

SEQ ID NO: 53497 - DNA, 483 bp, Populus trichocarpa
  Intron number 1 from transcript POPTR_0005s26320.1 (locus POPTR_0005s26320) derived from phytozome v7.0 (chr-ID scaf fold_5; pos 24402844 to 24403326)
cagataatctccggcgacttttacgtctccggtgaagtgaagttatttcctcttgttactatgtggtgggtgataatgcaggttgatcttttaatatctgtaaataaaaagcacagccgagaggcatgtgcttgcctggttgtggctttcttcttttctctttgttgtttctcaaggaagtttgtgttcaccacctgcgtttttgaattggggtgcacaaacaagttacaagcagaaagaagcttggtagttttctttttttttttccttttctttttccatatttagagggggaaaaacaaagaaaaatatgcattgcatctgtaccctagtttttaatctgaaagagcatttattttgtttccccccctagtgtttccaggaaattgaatgttcagaggcattggtctgaaacttaattggagattgcaagtggaagattggatagtggtaatcttgttattttttttatctagaaacact

SEQ ID NO: 53498 - DNA, 664 bp, Populus trichocarpa
  Intron number 3 from transcript POPTR_0005s27110.1 (locus POPTR_0005s27110) derived from phytozome v7.0 (chr-ID scaf fold_5; pos 24907602 to 24908265 reverse strand)
ggaagaaacggtataatctcttcttttgtttcctaatcacatgatgttttgctttgtttgagcatctgatttgatatgtgagtgaatcgaaatcggtaccggaatcaatttttttaccaattcattactaaaatggttatcaggatgttacttttttttttttttttacgggtgatggcaatgaacttgttctgattttgaatccagattctaggtggtaaccagttttacatccttttttgtactatccgatgtgattatagtcccagtatccaaaattcattaagctaggacttgatcgtcctcaaggttttgattttataactaatcaccccctttaagttgaattacaccgtagtaaaggttgttgatgatgccgacgcaatttcttatgaaaggttgcatcttgtctttgctcccttcttttcttttccagtatctggtaggaatggtgataaaggttatggacgcgagctttctgaaatgttcagctcgatgtaactagtcaattgtcatgatttgtttttttttttttttcaatttattcaactttgtcattgattttataaccccactaagtatcatcccaggtggatgcatttaattggatttattgatctccttgacagtggtgggagaaaagtgactggacaggatacaaaga

SEQ ID NO: 53499 - DNA, 764 bp, Populus trichocarpa
  Intron number 1 from transcript POPTR_0005s22370.1 (locus POPTR_0005s22370) derived from phytozome v7.0 (chr-ID scaf fold_5; pos 21327999 to 21328762)
cttaactgctctctctccctccctctcaaaataaggtactctttctctccctttttttaatcataggtaattcgtagtttaatctcttagagtttgatctttgattgttttattttctttctggttagggagttaatgatgctgtttggagtttttgtttttttgggcatgctaaatttgattttataataataataataataattattattattattattatttttcgttttgtctaatttctggtttttggagctcagggttgactcgaaattgagtgaactgtggagtgagctttatgagctgctgcagacctgatatatattttattttgtttggttgcatgatttgaattaaatcaaattttgctatttttggtgttgctgggttttttttttctagtgttgactgggtgcctaccgctagtgtttttgtgtgctaattttttgttcacacgcctgtttttagcctctataagatttaacatgtgattgagagtgtaattttgcagaattagaacatggaatttctttaattgatagattgggagtaatgtatctggattagggattgttttttctttttatattttgtctgctgaaaatataggaaattgcttgttgaactcaattaaagtcttctgatcagtaccgaattgatcttaccttatttcgttgcacgataaatttatgttcatgtctaccctttcaatggttgagtgtctgttcttttccaattgctgtgttagtgagaagagaataaaa

SEQ ID NO: 53500 - DNA, 756 bp, Populus trichocarpa
  Intron number 4 from transcript POPTR_0005s22370.1 (locus POPTR_0005s22370) derived from phytozome v7.0 (chr-ID scaf fold_5; pos 21329598 to 21330353)
acgtggaggactctgaattgagatctctctttgaggtatgttcacaattgttagaatgccagatgtcactcatctaaaaatgattgttccctgttgctttactgtttattgcttgcttaaagaatagccatgttgatcatgctaaatcctttctgaaaatttgtccatatttggatcaccacatgcttgattggttcatacatcgtgaatatggttatttgtcataaatgactttttcccgaaacactgtcaaagttatcgaagccttttagatgatagaacaattactttgcatcgactctacttacctgctttctttctcttctgcaatttctgattgagaatgtgctcttgttttttagtattttcaagcaacctatttctctggttttaaatcaatatataaaatttgtgatagttggtgcaactcgcatcagtatttagctaatgtgataaacttttataatgatctctaatgactgtttttttggattcatctgattaaatttaaattaaattcctgacctctttattgtatttgtttatattttgatgtcaggatgtatatagtgttgctttttgttaattgcaaattagatatgaaatttgttgtttcacattgctgttgatgaaatcaatttagttaaaatacgtgtcaattaagcttgggggtagccataagcttaattatatagatgtgaagtttttctcaatagctagtgcttactctcaaaccttttcaattcttgtagcaat

SEQ ID NO: 53501 - DNA, 574 bp, Populus trichocarpa
  Intron number 1 from transcript POPTR_0017s10590.1 (locus POPTR_0017s10590) derived from phytozome v7.0 (chr-ID scaf fold_17; pos 10014115 to 10014688 reverse strand)
gagctagcactgggtaatctgtgttttttttcccatagaaaataatctgtaaatgtttaacttttagcttgataacactgtaattgaggcctctattttgtcgggcatatgtgggatttgaaagtaaataaatttcttttataatttctctgtgtctttcacaggaaccaaacagggaattaaagtcttttttttttaaaaaaaaaaaattagttcaattgctcttaagtggtgttgggttcttttattaattgcttgcttgaatttcatagaggagagagccccttatattatatatataatgaatggcaaactagtaggatttggtttggcttggcttggcttggcttaataattaagcccttttgttctagtaatcttcttattataaaatggtaataaaaaagaaaaataaaaagatccattctggtagtcataggaatgtgcttatatgttctttgagatgttatatatgaaccttttggaaaagatttagcagtgaagtttgattggattttactctttaacatgtgttgcagaaagattttcattggaggtttagcaagagagagac

SEQ ID NO: 53502 - DNA, 523 bp, Populus trichocarpa
  Intron number 3 from transcript POPTR_0005s20600.1 (locus POPTR_0005s20600) derived from phytozome v7.0 (chr-ID scaf fold_5; pos 19637592 to 19638114)
tttgtgactcaaatcaccccattgctctacgatcagtaattaatctctacacttctatctagtattatttaatgtggatatcagatcttttgtcatcaagatctcaaaaatattatctagggggcatttggtatgcagattcttagatgacttcctataacgtgattgttggaaatataaaagatgggtgtacatgaaacacatatttgacttgtgtgttgaccaaatagatgtgtaaagctaggataaacacactgttagattcccattttgttgcctcttttattttatttattattttcttttcctaaaacttgtaatgtcaggactttattatggcttactatgatcagtggaaaattttgatttctgactgtttgggactcgttttggcgtttgtctctcattatattacatggtgactgttgtatgggtgctctatctcatatattggaagtaattgaaacgtgtcttttattaatttgaaggttttgcaacattaaagctcttcctggtgccaatc

SEQ ID NO: 53503 - DNA, 967 bp, Populus trichocarpa
  Intron number 2 from transcript POPTR_0017s12160.1 (locus POPTR_0017s12160) derived from phytozome v7.0 (chr-ID scaf fold_17; pos 12329267 to 12330233 reverse strand)
tcattcacttggtaattgcttttctatctttcttttttctttttaattgtttttcaacttttcttttccttttgatatatttcaatttcaatttggttaaatgtgctgaaatcatgataataaggttttttttttcctttcctttttggggtggtggagcttcaagattgttgattagttattgccatgtagtcctacctgaggctagtggttgtggaaatggtttctagatgatggaggcattgtgaatctgtatgtgtgttcactagtcctttgctagtgacaacaagtttctgactatataatgcaatgaaaaagaagatatcattgtcttgtctatctccttttcttttcagtgcaatttttttcaatagttgaggaaaaagtttaacgttaattttattcactgtaattatgctagttatgttatgtatcatacttaacatgcagatgatgggtacttgtctaacgacctcgtgtttagttgttttgaaaattttatctatcttaaaattggtattctcaatgctttggtttgagttgactttctactgtttttaattggacaatttgggttatagatttggtgaaagatgcttctcattgttttattactttttacgtagaaatagtgccatgattggattatgtagtaaataatgtgttaattttaattcaagtcagttgaatcacagatgatggtgccacttatttagattcatttgttggagacagtttggaaatattatcatacgtcattctcctttctaaggtctatcttgacgcattcatgtacaggtgtcattctgcacttatttcttaaatatttggaaaatttgttgtgccttttcatcaatgattggggtagtcccaaatggtgtatagttgaaattctcattctatcatctttatagaatctgatgcatgtgtcattgaaacttgtcgcaggtgttttctgcttttggct

SEQ ID NO: 53504 - DNA, 605 bp, Populus trichocarpa
  Intron number 2 from transcript POPTR_0005s09470.1 (locus POPTR_0005s09470) derived from phytozome v7.0 (chr-ID scaf fold_5; pos 6598807 to 6599411 reverse strand)
aatcgtctctttctttttaccaggttagtgtgtttctttattttccaagttgtgattgggtgtatcttgctaccttagtgtagattttgcaggcctgaacaagggttctttcaatatattgtgggcattagattggctcctgaaatctttgctagagattatctgatttacctttttccttcttttttttaaatatttaagtctttgttttcaagaagcaatattatcagaaagtcttaaaattcataatggaagttgaagttcaaaaaattcaaaattagtgcatctccttgctttttcttactctcaggtttcataattgttttgatcttattctttggtggactttctttctttgaaatgttggagaagttttctgctgaattttatgtttgagatttctttgctttttcttactctcaggtttcatatgctttgattctctttttgtatcgaatcgctgcattctcaagaccatgtagctttatgtttactaagtgcgaccaacatcacctattatatctaaacctggaattgcttgttctattgagtaccttgagttgttaatgaagttaaaattttcagctacaatcgtttggggaaaa

SEQ ID NO: 53505 - DNA, 791 bp, Populus trichocarpa
  Intron number 1 from transcript POPTR_0005s14210.1 (locus POPTR_0005s14210) derived from phytozome v7.0 (chr-ID scaf fold_5; pos 11321659 to 11322449)
ttggacccaacactggtgtccctcttcattacaaggtcagactcagactcttccctgttttcactccctgctgtttttcttttccttccctgaacgtcctttgtatttgccctttgcttttcttttgacttaattcttgatatttatgtttaaagaaaatgacatttcttcttcaaatttctactctttctttcttttactttcgttttcttttgaagtaacattttcttgtttctctgtcttgcttgttgctaaaagaaatggttttttcttgattatactatcttgttatcatgtttattgctttaatatttctagctttgtttgtgcattgtgtatcgagagaaagtgagctgtggttcttagtgtgaagggattttttcttttctttttttgcggatgacaataaaaaagtgtctttgttgtctatgtaattttgttcaccagtaaagcattagcttcctggggcgttgtggattttgtcaaacttgtaaatttggatgtgtttggatatctgttaatacattttgatgtggagaaagttattgtcacctgtgtttggtgttttttctttgaaagttcatatctttgagcagtaacctagtttattaattgatatatctactttggagatgacttcctaactttggctgctggcttatagcagatgtgcttaattatgaagctctgctttagtcagattgtttgtgattccatgtcttgttttgctgatggaggcttattgtttaatttcaggggggtcgttttcatcgtgttgtcagaggttttat

SEQ ID NO: 53506 - DNA, 775 bp, Populus trichocarpa
  Intron number 1 from transcript POPTR_0005s20380.1 (locus POPTR_0005s20380) derived from phytozome v7.0 (chr-ID scaf fold_5; pos 19427110 to 19427884)
aagggtcaagaaccttaattccatcatctactttggtgggttgttttttttttttttttatttcttgttttcgtttcttttctctttctaaattatgagaaacatttaatgggttttctgtatcattttcttctgggtatttcttgttgcatgcggactttcttgggtcttttgttatttattcttgttagcccaggaaggttttgattatttttagggtttgtttattgcattttattaaaaaaaaaagatagtaaatgctaaaagaatgcataattatttgttaacaagaaaaggagagaataatttgcttacttgtaggtgcattaaagatatccaattaagtcactgtttggatacttggtaacataagattctggtgatcagaatcttgacaaaaactgcttctgtgttatgatctgtatagagtgcagtgttatcgtcagtgttgaaattaatgcttttttgcatacttagaaactgcattataatctgattttgataatgttatcctcaaggtggcatgatcaaagcattaccaactatgaaagttttgatcccttgatggctctgattttcctgagaaagcagcatttcgttgagtcaccatggacactggatttatgattaacttctcaagttctaattaactccctctattgtgatgttcagattaagcttgtgagtttgttctagtattcagagaattagttgatcctaactgaatttcataaatgcaggcaccattctcaaataaatttgccaaggtgaagaa

SEQ ID NO: 53507 - DNA, 756 bp, Populus trichocarpa
  Intron number 1 from transcript POPTR_0017s04050.1 (locus POPTR_0017s04050) derived from phytozome v7.0 (chr-ID scaf fold_17; pos 3044169 to 3044924)
cgccagcgctgatttccaccgccatttctccaccggtactcctctttctttttctttcactcccagtttttaaatcccaagttttcttattattagattcagtttatttctttgttttttgaatttcttctggtaatcgtctttgactgatgagaaggaaatgtgggtttttttttggggggtggggggagatggagaaaggagtagactttgtgttgtcgaaatggttgacatggtgagctaaggcattgaaaaagattaggtttctgaggtttggttgctgaagaattgagaaggaaaatgggggtggaattggtttgcatttaattgttgctttttgttgtttcggaaacgtgaaaggggaaaaaagagagaagaaaacaccccattttgatgaagtctttattaagctaagagaagagtttcttttcttttcttttttgcagataatttttttgggagggaaatgaatgggggattgaaaaagaagcaaactgtgtggtgtaaaatggtgactttgatttggtgatttaagacatggataaggatttgttaactaagaaagatttcttaaaaacatatagagggataaagggaagaggaaagtttggattttgtcattgctttttgtgttctgcttctctgcataaaaaggagacattcattaagttattcatgatgggttgatcagtttctttcttatgatgtattattgttagcagagatgagattgctcttatttgttgcttaccatag

SEQ ID NO: 53508 - DNA, 611 bp, Populus trichocarpa
  Intron number 2 from transcript POPTR_0005s24180.1 (locus POPTR_0005s24180) derived from phytozome v7.0 (chr-ID scaf fold_5; pos 22799761 to 22800371 reverse strand)
tggtaaaggtggcgttggcaaatccaccactgcgggtactttgtttttgggtttacttctcttttttcgtttcttttttattttatagtcttaggggcagttaagttgaagggtttgtttcattttgagctttctaacaagtttgttttcattgttcttcttaaaatggagtctcttggggttttgggacggttctaaatgtcagcatcaaggaaaaatttccattctttttgtctgttttgctgagctaatgaggcaattaggtgattgcaatgttctaacttccgggtcaatgattatatgctgattttgagaaatgactgcgttattagttttcattttgaaatatttgctttttctgtgatgttttaagtgggggtggtttaaagaggagtggaaagtggaaactaacttcaaattatgagcaatattgattgtttctctgaattcaaatgcgtttgattaccatgtcatatgtcttctctttgtacatgagatccacgaggcacttaccattgcccttttccttaatgttgtttgatttgattcatatccgcaaactggttggacctgcagttaacttggctgttgcacttgctattaagtgccaa

SEQ ID NO: 53509 - DNA, 437 bp, Populus trichocarpa
  Intron number 1 from transcript POPTR_0005s21060.1 (locus POPTR_0005s21060) derived from phytozome v7.0 (chr-ID scaf fold_5; pos 20178917 to 20179353)
ttgggatttcgttcttgatttttgtgtctgccaacgtaggttttgtttttattaatgtgtgtgtattctagggtttcggttttctcgattctgttatgatattgaggcttcaatttgttttgtgtgattcaaattagaaacctagttcctgtttagttttcttaaacattatgtttttcttttcccttttctttatatttgagtttttttaatcaaaagtaattagtataatataatggttttataggctaattaagaagataattcaatgaactcaattcatagcacttgataaatctcacgagaacctcttggatatagataatggggtctctggtgcattttaatcgagtcttaactattggactgatatttggtgtgataattcttggtgatttttgtggcttgtcgtggtcgcagggcttctttctgatacg

SEQ ID NO: 53510 - DNA, 708 bp, Populus trichocarpa
  Intron number 3 from transcript POPTR_0005s21060.1 (locus POPTR_0005s21060) derived from phytozome v7.0 (chr-ID scaf fold_5; pos 20179965 to 20180672)
gttcctgtttattctctagaatcggtatgaaagaagaacctaccattgtcttcttcttcaatttacagatgttaacttgaatgcttgaaagtaatgtatttgcactgactatttatttattgaaaaacttctaatttggaagttgctcctctgctgttaatccttgtagtatcggggagataactggacaaaagtttaggaagtgttagcctacttttctagcatatcctaaaatctattggacaagttaagtatgctaaactctgctttgtctgcactctatccgaaattcaacccatagagtcgatgtaccttatcatcctgggaaggatactatatcaccacacttacacattccctaaaagggcagacaccattttagcataaactagtaacatcattatttcattctaattaaacattggggctgcttaatgctgctttacttgatctctttgagttgtacttaccattttttccattttgaaaggtcaaatcctatgagcttgagttgactagcactggtttgctgcaaaagattagcaccttgacttggcatctgtttgatagcagttactaaaaaatgaagcacccatgttgtgaaaatttgttaatttttgttttaggtgtggacgatccatgaactttttacctataatgttttcttgggcagttcttatctttgttggattccagtgctgcattcaa

SEQ ID NO: 53511 - DNA, 605 bp, Populus trichocarpa
  Intron number 1 from transcript POPTR_0005s21780.1 (locus POPTR_0005s21780) derived from phytozome v7.0 (chr-ID scaf fold_5; pos 20873056 to 20873660)
aagttcttagcttcggtatggtttgctaagtttagctaaagtaaaacataacattctcatttgacagaaacggactgggcaatggcatatgtcattagtttgaagggagataaagaatgttattctaatgaatgaacgtttgcgggttgctgtgaagcccgtttaacgcttcatcaattgaatcttcaaaatttgcatatgaagagctgggtattttttagctaaccctgatattacacattattgactggagataattttggtttgggagccattctagctgtattttgtgtgctttatgctaaaaatttaggagatcctactttgtttccatgagtgggtttatagtagaattctttttattgttgcttgatacagatgaacatgagtccgagatcagtttggttagagtcacttttgataaacagaacatgagaaatggtcgtttcttaatatcatcttgatgagagaagttttaaagatctattttataagcaggtttaaacactttgggatgtcatgatgtattgcattgataacaaactggcaaattttcatctctcgttgcagtaaactccatgaattgaaatgtgtcagtatcgacc

SEQ ID NO: 53512 - DNA, 895 bp, Populus trichocarpa
  Intron number 1 from transcript POPTR_0005s07560.1 (locus POPTR_0005s07560) derived from phytozome v7.0 (chr-ID scaf fold_5; pos 5153883 to 5154777)
aatctggtatgtttttttttttcttttttgggtttgtttttctgggtctagattcttttgttttggttcctaagcttgaagctttgtttggttcatgagaatatgtcagcacatataaaaattgtgattttgaattcaatagaatggttaggcttaatttgaaagacccaagagtgtcttgtattatgtcatgttcatgcttctctttttattgttttcttttctgtttaattgtcttgtattaagtgctaaaatccttagttaattgatttagagttctatttggatgattctttgcatcttcttctggagtttgagatagttttcatcagaaatggaaattatactttgcttgattttctctggcactagttatattccatcaatactatgttatgacatgagagaagaatcgttggcttaattgtaatcttgagttcttacgtgaaaaatgatttcttaaattagtcaactcctgtttatttctagatagatattacttgaagtcataagccccccaaccctgttgtgattgcctccttgtttttgttttgactgaatgacacttttctctctcctggcaatggcttcaaaaaattccgtctaacaattagaatgattgcgtggaaatattactgttacatacacctagtttttggtgacaatttaagtgtaaacatctgtttatggaaggaccaaggcagttaagctcattcattatcatcttatgaactcgaggacctctccttgttagcaaaagatctgcccatgctagtgtgtatgctgcttgatctgcttaattttttccttgtgtatgaatgaactttccccccagtgcattcactatcttgtaatccaaacatttatgactcaaaccgatgccattttttcacag

SEQ ID NO: 53513 - DNA, 1015 bp, Populus trichocarpa
  Intron number 1 from transcript POPTR_0005s27250.1 (locus POPTR_0005s27250) derived from phytozome v7.0 (chr-ID scaf fold_5; pos 24982634 to 24983648)
actgccagctcgagagcatcacttacactgctaaggcactactgctttttcactcttttcttgattatttttgtttgtgaaaccctatattttgcgattgtggagtgaaattatgagttgaaagggttttaggttattgttttgaaaaaccctaggatctaatgcgtgagattgggaaaatcttcatggacattttaatattctgctaacaagtgatgttttattgtggagaaggggaaagggaagttgtggccgtaaaaccctaaattaagaagcctttttctttacagaatttttattttaaaaaatgatccgggattctttgtattcgtgtatagttgctgatggtcttgagtttagctgtccattttgttcagcaaatcagtaggatagttcaagagaaagacacttccttttgatgtatagttggttaaggaatatgagttaaaaattttgtgtcaatgtttgtgaaaagtcacactatagttaatgaatgatttctagtataatgtatttcttatgttatttatgccgcgcaaaattggaagatacgtgctttgagttgttttagattaatgtaatggttatatgaggtgaaataatgatttgcctaatgaaaagatatccaatccaaaatgatggtttattagaaatattcaatttataaagtagggacaggagaatttaaagaaattatatgtgcttgtaattttagtccgtgttatagcggttttaaatgaaaacattcagttttgagatgcatggatgcatctgtggatgaatgccaaaaagattttagagagagcttattttatatcttttccacttagttgtttatattgtctatatctattatgtttataatgtctaatcattgtgtctttgacttactgatgctaatcgaaagagattattcgatgcagtggctatcagcttggataattagtgtatctttctttcatttgtatcttggtttttttatctggtttctgattctggtctgccacttgacagg

SEQ ID NO: 53514 - DNA, 614 bp, Populus trichocarpa
  Intron number 1 from transcript POPTR_0005s20870.1 (locus POPTR_0005s20870) derived from phytozome v7.0 (chr-ID scaf fold_5; pos 20004448 to 20005061 reverse strand)
gaattctattgcagagaagctccaaggaagatcaggtaaattatatgcaattttaaaattattttttgataaatcaggtgaatatcattaagataaacacgttagaatcaatctgaaatcgattcttaatttaaagataacatatatatataaggaaaaatattgcaaggatcattaaactcaaacagtatacgcatatcttaatttaattttattttgttacatgaagacttccaatttctaaaaaattaagatcgagatggattctttgcttaagtaactaacagatatcaatgacacgtctctctgaatgtgtgtaggacttctggatcatgctagatgtaattttaccttttttttttctttgatagaggtaattttaccagcttatgattgaattaataatgtctcatatgtatgccagcttgagaaactcccgaaattcctatctcgtgacatgggagataaaattctaccaagcataatgatggctctctctctctctacacacacacggacacacacatgcacacacttaattacttggttcctgaatttctctctgtttttttttttcagggaagagttgcagattgaggtggtttaatcaactt

SEQ ID NO: 53515 - DNA, 778 bp, Populus trichocarpa
  Intron number 3 from transcript POPTR_0005s19290.1 (locus POPTR_0005s19290) derived from phytozome v7.0 (chr-ID scaf fold_5; pos 18011509 to 18012286 reverse strand)
tcttataccactcaatttccataagaattctgaaggtgcggattttcttgctttatagtattcgaaaacttaatctgatcactgaaagaagtaagatgattttgtgaatgtatacaggtggtagaagcttatctaaattttaattcgatttcattgttattcaatcttgagatcatgctgatttaagttaggaggaagagaaaagagaattaatgctgagaaggatggtattttgtggagaaaacttgtgaatttagtactgtgtaagaaatttaagatgttctatgtgttttttgaggaagacttaagtaggcggtggcatcttttgagtttggagttgaataatcacatcattaagttatgtatgttgatctttgctgtgttagtcgctaggagggcctaacattggcatgtccttttgggttaacctaaatgtggctacattagttcaaccaattctattgcttagtttacttgtttccttgaaattaagctcaaatgtctgataaatacatttttccttttaatttcattacttttgttgtatttttcttccgtggtctacttgtaggaaaactttcctcatacccactgtattactaaagccttccaatctcttccaaatggttgtttgatgcaaaacttgccatttgtttgatgattctttcgtatctggatgtctacgcaacttagtttacacccatgtgctaaccatattactatattttgtattttcttcataggagagtatcattgccctgtgctgaacaaagttttt

SEQ ID NO: 53516 - DNA, 443 bp, Populus trichocarpa
  Intron number 1 from transcript POPTR_0005s01630.1 (locus POPTR_0005s01630) derived from phytozome v7.0 (chr-ID scaf fold_5; pos 1084122 to 1084564)
gattagttggttgctttgagaatcaaggttggttcaatctttctgctcttataatcataaaataattattttgctttgatgtttctcttccaggctccgaagtcctatcatcaagtaatgcatggacacgtgttagaagttgttaagagacggttaatagaataaatcgtgtaatgcatgtggggaagtatatatataatggtaggaggattacgtaagagtcacgcaagaaataacagaatcattcctctctcatttattactctgttttccttcttctcctcccctgcttctcacccttctgcttcattttgttaagacaagcttaacagatgattatatttcaagtaactttacatatttgattctttatggttaatatttttgcttctgacaatcttctttcaggttttcaagtgctagcttcaggattgaggaatttg

SEQ ID NO: 53517 - DNA, 924 bp, Populus trichocarpa
  Intron number 1 from transcript POPTR_0006s14370.1 (locus POPTR_0006s14370) derived from phytozome v7.0 (chr-ID scaf fold_6; pos 11729205 to 11730128)
agctaactagagacaacatcaaggggctgacacaggttttttttttatatatatatatatatatatatatttttttcttttaattgtctctctccactcttttctatcttttccacttctttttgttttgttttcctataattcataattcaaagtaacctcgttttctaaaaaagagagaaaatccttcacttttttaatcacattgtcgtctcaatttcatacaagttatgatttgatggggataagcaggaatctacctaatcttcctgccctcttactgtttctgtgtcgatttttcatacacgaatgagtttcaagactgtagagtgagcaataaatttagggcaaatttcaaataagtcctccaattatatagggattcttgattaagtttcaaataatttttttttgtctcaattaggctctcaaagtattaggaaatttcagttgaatcacccatccaagcgtaattttttcgtaagaaatactaacgttattttgtatggagattgatgttttgtgtcgaaacacttctgaagagtacatgcacaagatgagaattttttaaaatctaaacgagagaattttttttaagaactcaatgagagattggttagagattgcgagcttaattaatttggggtttgcacatcaattgatcctcaaagaagcagcatcttgacagctattggcacccgcgcgaactaaagtggaatatagatagcagtaattgtttaccactagccaattatttatagaccatatgtcttaaaaacatcgaattagctttcaaagacttgctttattgccaaaaaaagaagaaaaaaaacgatgtcagaaacaaaaaaacaaaatatttatggttgttgttcatgttgttggctaggacctgattgctggaggaacagataccgctgctac

SEQ ID NO: 53518 - DNA, 838 bp, Populus trichocarpa
  Intron number 1 from transcript POPTR_0005s06500.1 (locus POPTR_0005s06500) derived from phytozome v7.0 (chr-ID scaf fold_5; pos 4338827 to 4339664 reverse strand)
gggcctacagtcaggtattatagaccataattgttatgtgattgttgtgtttgttagttatgatggatttgtagaaagagtaaatttttgggagataattattggaatgcatggatttgatgctcatttatgtcttgcttttgtttgttgttgaattactagatttatctgggagttgattatgagtgatgatatgtaaggaaatgtaatgtgattgatgatattgtgcaaaatggtctcaaaattgtgaggggggcattggttttatgagaaaggatagggtactcaatttcttagctaattctgatactatcttattggttatgattttaatttttgatgactgctgggttttgtagcacaacaattgccaagaaagaaaataaaaaaatattaatatttacatttaataaccagcagtaattaatgattcatcatctttgttggagatcattttcatcaaatctccacgtgtttttgctattaagtttcaaaataatcattgttagactactgcctcatgggtgatgattattgttagatgccctgcagcaggagaaaatgaagtggcatttgattgacgtaagatgcatcggttaaaattttattactgcaataactttcatatagaactcttaacatatattttagaacagactgagaacaataatgatgtaaattacttagaattaggaggtgtctatgtagtgcttcgaattaggctgctggctgggatgagtatgattgtgtgtttgtgagcacgaacatgtatatatactcatgaaagctcccttttattgtagtttttggatttcccagggggacaggttgcattcac

SEQ ID NO: 53519 - DNA, 706 bp, Populus trichocarpa
  Intron number 2 from transcript POPTR_0005s14720.1 (locus POPTR_0005s14720) derived from phytozome v7.0 (chr-ID scaf fold_5; pos 11702266 to 11702971 reverse strand)
aaaggttttgctttctagctctctcctcttgtttcattcattgaagttgattcactttttggtccgagtgaatcatgggtctgaacaaccttgtaatcagagaaagcaatcacataatgaaaagggcatataagctttccaagtaaaaacaaaggcatcttttgtttagatatctacaatcatcgaaatcggaaacaaatgactctgttgtgaccttgagagaatctatatatctttctttctttgttttttggctcaaattatattttctttgaattttgacagtgacagttcaatctaactacacagcttatgttatgacaggatcaaaccaaagaatgcatgtacatatggatagagggttattgtcttagaagattaattaaaaatcagataaagtctaaactgaaaaaaggggagaaagagcaaaaagaaaatgccattaaattttaagttcttgatatgagatatatactgaaagaaggaggggaaacaaaggcaacctaaccccagtacaaaacttaaagagcatagcaaaattagtaaatatcccatccgatctctccttgcttcacccacctgcaataatattgtagttctcgatttatttcactcctttttttttttagcaaacacttgcaagtatatataattttgcaatacatatacaggagtaaagacggtggaagtgatcagaaaacaaagc

SEQ ID NO: 53520 - DNA, 801 bp, Populus trichocarpa
  Intron number 2 from transcript POPTR_0005s06110.1 (locus POPTR_0005s06110) derived from phytozome v7.0 (chr-ID scaf fold_5; pos 4020730 to 4021530)
tttcaggttggaaagttgttctttttaatctttgctgctgttatatttttttttctgggttttagttcttttaactgtttttagtggttaatgaatagttagtgctttttatatgtacttgcgtttgttgggattgtttttgcagcaactgggtccagtacattgcttcgtgcattctcttagtccatttattacagacattataggaaatgattttcttctttttaaaataattgattagtgtgcaaatggaattctcaatgagattaagaatgttggcagaaaaatatctgattaaacttatctcagtcaagcctcaaatgcaagcctaatcaggttggccacatgagttgtttttcgaattccattacaaaaactaatgtttcgcataattgagtagaagttaatatattagaatcattatctttataaatatctccttggatttcatcatgtaacatacgatgcagccttttcttttttctggcccctggattaaggcaatgatgttccgtttatttattccttatgaacaaatgtgttccccattgcaaatttctttctcatattgcagtccctgctattgatgctaaagttcagatgcctcaaagatgtcttttgtaatgttgattttattgttatttaatcgtagacttcttgaaggcatagtttgccttttgcctcgtcaccttataatagatctatattctgaaagatgcctacaacttactcatcgtgtgttcatttgaattgctcatatgaacagtgattcttccatactacaaagaggcaaaaaagaaa

SEQ ID NO: 53521 - DNA, 898 bp, Populus trichocarpa; identical to SEQ ID NO: 52948
  Intron number 1 from transcript POPTR_0005s00710.3 (locus POPTR_0005s00710) derived from phytozome v7.0 (chr-ID scaf fold_5; pos 313518 to 314415 reverse strand)

SEQ ID NO: 53522 - DNA, 739 bp, Populus trichocarpa
  Intron number 1 from transcript POPTR_0005s08350.1 (locus POPTR_0005s08350) derived from phytozome v7.0 (chr-ID scaf fold_5; pos 5757914 to 5758652 reverse strand)
gatctgctctctctgtgctcagatcttcattcctggtacgcttcacctctctaattctcttccttgtgttttaatttctctgttttgatcacttctctgcttggttcgcttccttttgagctcggttctgtacttttcctctgagaatgaaagtttttttctgttgatttcttgtttacttgccgttttgagcttttgtgagcgctttgagtcaaatttagctgtctttgccccaattttcttgtttacagtgaaaaccgagtaattcatcgtgttttattcgccctttttgtgaagctttgctcgtttttgcttccaattctctggttccgttgaattttgatgctttctctatgagaatttgcttgttttgcttcaaacttcaggtgtttgtctgcttctgttacgatttccgatatagtttaacttgactttgtgctggtttttcaattttgaatatctctgtcgaagaccgtcgccggcaagggtttatcctcgcagaaagctgttttttgtctagttctgtgttgaaaaaaactctttttctttaaaatacgttctcatctctctgtttaactttttttcactgtcaaacgaacattcttgaaaacaagatttttatttgtttttgtttatataattatgagtttcatttatttttatttatttggatttttttgtcttttgcgcggtgcgagatctgacagctgatacggtttttggaacagatctaacggtc

SEQ ID NO: 53523 - DNA, 1000 bp, Populus trichocarpa
  Intron number 1 from transcript POPTR_1526s00200.1 (locus POPTR_1526s00200) derived from phytozome v7.0 (chr-ID scaf fold_1526; pos 389 to 1388 reverse strand)
gcgttgtttgccgccctactctacaccaccagtaggtaataacactagaagaacaaaaaaaaacctatttttttccaaaatatttaagagaaagtgtgaaattataaagtagatgaaaactctaaaacgaagtccaacgtcgccgtcttcgtcaaattcatcttctcctccgtcgtcgtcgtcaagtttgtcgtcttcgtcgtggattcatttgcgttcgattctctttgttgttaattcctcctcaccggcttattgttcctcctctacctcttctgatcggtgagttctctctctgaaaaatactctctttcactcttccttggtgattctagtgattttgctttctatctctgctttttccagatccgatcttgaagaaatagtagctgtagatcgtgttttcagtctctactactacttcttaacccgcttgttcttatctcttcatttttttctaagtttttgcgttcttagatggaatttgcgtgggtttggcttggtcaatttagggttgctattgaaaaaaatgggttgattttgttatttttatggatttttttttccagttttttttaatctcttttgatatggattgttgtttatttaatgcgtaacttggtttataataacaatggtgcggattttcgagttgaaaattgaatgtttgtatgcttttgcattacatttttgggaattaggttagggtatcggtataatcatatatttttgcaagctaccacatctgtcgcaaaaatctaatttatttggattagagatgagtgctattacaaaatcttttctatctttttcttgggtgatgggtatttaaagaaactaccaaaaagtgagctgcttgatagtgccctttcgctttcaatggagtatttttattcagacatttaactttccttgttggattgtttgtagtcgtgttgattttgtttttgttggaatttgatcattgttgcttttattgcaggggtcgactgaagtcacc

SEQ ID NO: 53524 - DNA, 909 bp, Populus trichocarpa
  Intron number 2 from transcript POPTR_0017s01300.1 (locus POPTR_0017s01300) derived from phytozome v7.0 (chr-ID scaf fold_17; pos 911086 to 911994)
cattcgtaagtcgctctattttatatatatatataaaagcttgatctttcactctaatattcttatacttgaatttgtatccagtttgtttcatataaatttaataccctttaaaaaaaatcaatagaaaatattgaaaacctgatctagcttattcaagaaaatctagtcaatggaaatcatgttatatgtggaatatttcttttatgttgtcaactattttatagagcagtccatctttatcatttagggtgaatacgaccatggtatgctacaggtgaaataattttttttaatataattaaaatttttcaagttataaaaattatttgatacttatattgaattcagattaatatatttatcttgaaatctttctattagactatgttggttaaagttaaaaatcaaattatataaaaattatttcaatttaacttaatcgacttcatcagcttaaaaataactcaaataactagttaaaaaaatcaaaaaaaaaaatacctaacaaaaaaggggcccacacagagaaggaggagtgagtcgcgccccaacttttttagtatagtaatccttgtaactttacataagttattgagttcatattatcaaaaagaaaaagaaaaaaagaaagagttattgagttcatatattatttgagtttctagcttaaaaaattcttgtaaatgctaaaaagttgatattctctgtcaacactagcaattatatgacaaatttaggctaatagtatataaattagcttttatttgtttggttttcaaattaaaacatctataacagaattttttttaatattcctattcttttcgatcgattttttggtgcttcaatttatagtcatcaatttgcaactaaataaacgtccattttcctgcagggactgttgct

SEQ ID NO: 53525 - DNA, 511 bp, Populus trichocarpa
  Intron number 1 from transcript POPTR_0005s03250.1 (locus POPTR_0005s03250) derived from phytozome v7.0 (chr-ID scaf fold_5; pos 2135868 to 2136378 reverse strand)
ggtaaaaatgaactctgctttcttttcttggtttattctttctaagaatatactttatggtatatcacatttaatagcaactaaatagttttttggatctgtgaatccaaactattcaaggaatatactgattaattaaagtggtagtactaatgaccacaacattgttggtctgtagttttttgcgagtaacagtgaaaggggagaatttggacaaaagacaaggagtcacctatggatggtcgatttggctggaagtgaacgtgtggtgaaagatggaaggaatcgcaattcattaataattctctttcagcacttggtgatgttatatctgccctcgcatctaaaactggccacattccttacaggtctttctctcacacagtcactcttgtaacatgctatccaattaccatattaatgaagatatttgttttcttccgatcaggaactcaaagctaacccatatgctacagagctctctcggtgagtattaagtttactatttttt

SEQ ID NO: 53526 - DNA, 184 bp, Populus trichocarpa
  Intron number 3 from transcript POPTR_0006s18320.1 (locus POPTR_0006s18320) derived from phytozome v7.0 (chr-ID scaf fold_6; pos 16676750 to 16676933)
tacccagtgaatttcttttcatttttcttgattcctttttaatccgggtcagggaagtgcatttgtgggtttatttaatgttcaatttgattaaggtttgtttggtgtttaaattatattattatgacaataatgcaattgtttcatgttgtacagggttcaagaaagcttagatacagaacaa

SEQ ID NO: 53527 - DNA, 424 bp, Populus trichocarpa
  Intron number 4 from transcript POPTR_0006s18320.1 (locus POPTR_0006s18320) derived from phytozome v7.0 (chr-ID scaf fold_6; pos 16676937 to 16677360)
ggggaaatcttgtatgtttttgtactgttctcatacagtgcctccttgccctttcttaaaattctagttgcttattgcttaattgatcagtctatttttctttcgcttgaatataattttcactacatctttgtttgccactgaaaagattgtgtatgttggattgttggggttctgtgaggaaatcaaaagggaagcttggaaaattactacatgttttcttgggaaggaaatttctggtgttaggatgccaagttttctttcagtgtactatcctcagcaaccaagatgagcatgaagggtttagattcttcatgaaatagtttcttaacaccaaaatagttattcaagtaaccacagtttttacctttaaattaatttgtttgatactattttaattaccattttttgctatagagttggc

SEQ ID NO: 53528 - DNA, 440 bp, Populus trichocarpa
  Intron number 1 from transcript POPTR_0005s10180.1 (locus POPTR_0005s10180) derived from phytozome v7.0 (chr-ID scaf fold_5; pos 7269768 to 7270207)
ggataattcaaccattgcaggtatttacatgccagtataccattatttaatttcatataatatagaaatcaaatatcttttttgttcattgcattatttattgtcaaagttgcattctggtcgtttgcattccatgctgtgattcttgattcatgagcaagctggtatttttggtttttcttatcctcaactctttcttcggttgctgagaatatgaagatattaaaggacatagaagttttgagtccatagagttaatggaaatctcaactttaggtgcatcacaaggcttttgatttacagtaatgaaattaaagtctatataagattcggaagaagggaaaaaaacatggcttcgtatcaatttgcgttgtggaactaaatattgtggccttctgttttcaggatccattccttacatcaaggaggagttaaatttg

SEQ ID NO: 53529 - DNA, 524 bp, Populus trichocarpa
  Intron number 3 from transcript POPTR_0017s12300.1 (locus POPTR_0017s12300) derived from phytozome v7.0 (chr-ID scaf fold_17; pos 12523389 to 12523912)
ctttaggtgtgggactgtgattgtggaaggagagggttttattactgagactatcacttttgagaaattttctcctgaggtaatgtactaatctttatgcttaatgtaggctctctcttttctcctgttgtcaatttcgtggtggcttcttgtgatggaataagatttttggatttttattgtgtttgaggttttgggaccttttgtttttataccagtatttgttggtgtgatgagtaattgcgatttttgttaattgaaaaattgatttttttttctatccatactttgaaattaagtcttagttgtgtgaacaatggaggtgaatacagtacttgataattgttttcttttagccattggttgtgtcagaatgtatgattcgaggtgttatctacattgttcaaaatgaaccatctttaattgtttaataaattatttgaagctgtcaaataattgatctgtgtttttgatcttcttttaccccaggttcaggtcaagctgtggcaattagagtgacagct

SEQ ID NO: 53530 - DNA, 919 bp, Populus trichocarpa
  Intron number 1 from transcript POPTR_0005s21790.1 (locus POPTR_0005s21790) derived from phytozome v7.0 (chr-ID scaf fold_5; pos 20875520 to 20876438 reverse strand)
ggaggtaataagttttgtttttgtttttctgtagttttccctgtgcaatttggattttttgaaagtttaggttatctgggtttacgtggatacttcatctaactggatagattcgtgggtgtttccccaagttgatggttacatggtcctgaatagtgaaattgaacgactaggccaatcaaaatgatacattgttcgtagagaaaagagaagtgatgatatggcttcttcccactaaaactggcttaaaagtagttagtttcttgccaaattagtttcagtcgtcttcatagttagaacaaataataagagcctatgcaggagaaccttggaatgatcatattagcaagaatgcctccttgaatagataactgaaagtatttcaaacccattgttctggagcctttgaaaggaaaagggtgcacatatttcctttgtagattgtgcttaaatatagtctccttcaaggtaatgcttctcacgacgttgtgacccctgtaatgttcactatcttggtgattttctatgcttaaccaatcagtagtgctcaaggcaaggcagtgcgggtggtacgcatccattgcaccacagacttgcaaaagcttcttttgaagcgagaaagatgtttcttcactctcatgtttacccctagtttttcttgatttttgttctgcaagtgtttcttttctttttccctttcaaaaaccagctcttccctttaaattgtaatctattcgttttgagttccagcataatccttcataaggtttctgcagactgtttgtaatttatcctgcgctgacaaataaaaaaaaaatccctcctttcccaaatgaatgagaaaatgcgttcacatatcttttcatgaaaaattaaagctctacgtgatctgatgccgcttgcatttctggttgagcag

SEQ ID NO: 53531 - DNA, 687 bp, Populus trichocarpa
  Intron number 2 from transcript POPTR_0005s08690.1 (locus POPTR_0005s08690) derived from phytozome v7.0 (chr-ID scaf fold_5; pos 6051682 to 6052368 reverse strand)
aatcaagtatcccagtaagtaatacagctatattgttctgaaattactgtgctgtgcatctttcaagtctgcgttgccgtacttgtgtgtttgtgttcgtgtgtgtgatatgtggctgtattggttgagtagcttttgacttgttttgagtttagcatattcacagacgggctttctggtttctgtttagttgggtggcataaattgattctagaggggagatgatacaaaaatcatgcaaagcgtcttcttcttttctttttttttgtttgattaagctaattgagcatagatttttcaatctcttcttctcgtgttgaggttgtctaaatcatcttaatgacagtgagaagcttatggtcacacagctgctaatcccatctttcctctttccccaattatgatgtgtctgttgattactttgataaataggtttagtttaaatcatgaatgtaggaactgggaggtctttgatgcaatgttttggaggtaacttcattgtaaaaattaaatgataccaataaagttttcccctgctggggaaaaaaaatctgcccctaatggtttgtcaaacaagggtgaaaactgacgaggttttgcatgccttaaatatacgttttctcttttcaaatgtgcttaagtattgtttgtcactgcattgcagagtatttgagaaatcactgcagt

SEQ ID NO: 53532 - DNA, 768 bp, Populus trichocarpa
  Intron number 4 from transcript POPTR_0005s05320.1 (locus POPTR_0005s05320) derived from phytozome v7.0 (chr-ID scaf fold_5; pos 3519633 to 3520400 reverse strand)
ttattgtagagtacaaggattcctgggtagaaaaggtatattgtacctgttgatatttactagtctttgccttttcttcattgtctcttgatctctcatggttttacatggttggatgttaatttttcatttggagattcttgttgtttaatgttccacattttctgtgaggttttaaaaacctcatttcgtaacttaactcctatagattgctgcttttgcaatctgatatggtcatgtcccattagtctgtactacatttcatggacatgccttaaacttgttgcatgcctaaaattctttttccccatctggttggtatccttaaaccttaatagtaaacacatgaaaattagcctcatggggtgctttatatcattaacatataccattgacatcacctgaaactcagcatgtttttgcctcctgttttagtcaattctgcatataaagttacattttacatcacagaggttcaatatgcttgattaaatctggcaaaagcttcactttttctgctatattgcaaaagatatactactttttcataatactacttcattctactttcaatattcaaagccttctcctcgtaattgggacaaggtcatgtttttttgagctaagatagggtttctaagtcattcagctaggttaataaaaaatgttatagttatctatggataagcctaagaatacaagcagttgaaaattttgtataaatagtctaatattggttcattttgatgctttcgagtcagggttgct

SEQ ID NO: 53533 - DNA, 560 bp, Populus trichocarpa
  Intron number 1 from transcript POPTR_0005s02520.1 (locus POPTR_0005s02520) derived from phytozome v7.0 (chr-ID scaf fold_5; pos 1615869 to 1616428 reverse strand)
ctcgtcttgtcgataacgagattcgcattctcaaggtctgatatttgacaataacaataataatgtttgatttgattgttttcttctttggttttaggattgttgtctgtttagggttctggttttagtaagaaaaggattggttttgttgatgttggtggattttaatggtgattttactaaaaataagtgaaaacccagaatttttgtgtgtgtgatgagctgctatttgtggaaatttgtgggggttttgtagcttctgatttgttctgaactgggtttaattatggttctgtgttttttgtgattttgatttaaggctgtgtactgggattgattggcttattgtttatggaagtaatagtgttgttagtgattgtttttgtgtgtgtaaagcgtgggaaagtaatgggtttttgtttgaattgggtgttttagaatgtaatgatttgttcgagttatgaggtttaggatttttttttggtgggcggtgttttcacgggtgtgtgattgtggggattgtaggaagaggtgcagagaacaaatctggagctggattc

SEQ ID NO: 53534 - DNA, 690 bp, Populus trichocarpa
  Intron number 2 from transcript POPTR_0269s00200.1 (locus POPTR_0269s00200) derived from phytozome v7.0 (chr-ID scaf fold_269; pos 407 to 1096)
atcaaggtaaataatcttctttcatatgaattggcatcatttatgcaggctgttacatcattgaaattgcaataaacaccattttgacccttccagacccagacaaatggcaattatgatttatataaaaatgatggaatagtgttttttccttgcttctagcttcatcacatctgtgccatctaatttcttttttcactcagctgcacagcaagcagtttattgagctctctacaacatgtactggaaatctgctcatgtgtgtgtatgtgggtgcatgtgcatgcatacagaagtaagctaaaacacactccaattaaccttgcacagtagtgccaagcattaaaactgcaatcaaataaaattttcttagaatcattaataatcgggattctttgaaaatgatcacttggatcgtattttgaaattacatgtttgtgtcagtaataagctatcctcaattgtatatttcaccatttctccatttggtttctgaagaatatatagaacgaaaattgtgaaatttcatgacaatagggggggtctggactggctattatgagattgagatttcttcttccagttctaacttctaataccatgcaaatgaacataaattgagaagcatagaaacttctactaaaaaaaatctatgttcttaaggcaacggcaggtggtggaggacgtgga

SEQ ID NO: 53535 - DNA, 887 bp, Populus trichocarpa
  Intron number 1 from transcript POPTR_0006s00750.1 (locus POPTR_0006s00750) derived from phytozome v7.0 (chr-ID scaf fold_6; pos 392040 to 392926 reverse strand)
aactctaaagccagtatccgcgggcacaaaatctcgtgagtaagcagttcctgctttgtttcttctttttaaaattactggtagttactatgttcttcttactcgttaaagtgtatgtcttttttaatttcatgagccatgtcttttacttgaatctgggtacttgatagattattttgtcagaatttgttgctttgccgttaagtgtttttttaaacttagatttgacaagaaaaaacccagaaagtgtgtgaatcaatacatgtaggaattatgtttgcatgagatttgttcttgtgtagctttccactgtggtttcatggtcaattttgaatgtgatatcatgcatttacctatggataatgtctttttctgaaagttgtaagctttgaatgattttgacagattttgctctcttgggcctttgttctgttcagtttttggctacaatgcgaaggtttcccttttgtaagacttgtgtgatttagagctacatgattttgctcttgctagtagtgcaaattactgaattatgacgaacaatcattgaaagctcaaaaaactttatggggtttcttttaaattgtggatgcatgtatttatttgtaaatcctggccttagtgccttcttttcacactagacatgttactggtttgcatatagttgattaaaatttagctccttctagccaggatgctacgtacagttctggtttgttgaaagaatgttccctattgattatacaagtgtgtttttgaaatttggttgttgttcagctgtcattcgcatgcatatatgctgtcttggcagttggcattgattttatgtgatttgatttgcacattctgattcggaagacttatgttgattttcagctcgtgtcgaa

SEQ ID NO: 53536 - DNA, 479 bp, Populus trichocarpa
  Intron number 2 from transcript POPTR_0017s13560.1 (locus POPTR_0017s13560) derived from phytozome v7.0 (chr-ID scaf fold_17; pos 13681361 to 13681839 reverse strand)
actgacgtgcttttggagaagctgtaagttcgttcttctttttttaatcttgtcattagtggaaaattttatgtttgttagtgataacttgagctaattgattgttgagactttgatatggtaaaagtatgagctcacggggtcaaaattgttcgataagcatcttaatcttggtggaaacaaagtaattgggctgctcttgatttaactagtagcaaattgatgtcacccatttcgagtccttgatttttaagcttcgctcttctaacggcaatatgtatcgtgttcgagttcatgttttgcttgttggttttaaggtttgaacatgagacaataaaaagtcaaaatctacaaagattgtcttcttaggttggtcttgcaagtgatgttcgaagcagttcgttttgttgctcctttttctttcatagttattactcagctgatattctggttgtttctttgtgaatgacagctacaac

SEQ ID NO: 53537 - DNA, 415 bp, Populus trichocarpa
  Intron number 2 from transcript POPTR_0017s13610.1 (locus POPTR_0017s13610) derived from phytozome v7.0 (chr-ID scaf fold_17; pos 13724304 to 13724718)
acggagcagcgtagaaggagcaagattaacgagaggtaaaattctctttactctataataataataataataataataataataattttatgtaattataaaatggtacttctatttgcattgttaaacgctgaaagaaatggcgtcgtttaaggcttaaatggcgaagaaatgaaaacaaagttcttaatttctttgtttcaaaatgttaaatttatttgaaagaaaacagttttgtatttaatgcttgtgtttgagctttctcagtagactattttgcatttgattactaatgcatatcacatttgttttttttttatatatatatatatatatatatatatatatatatatatatatataaatgatattttgtgaagcaggttccaggctttgaggaatcttgttcctcaaa

SEQ ID NO: 53538 - DNA, 674 bp, Populus trichocarpa
  Intron number 2 from transcript POPTR_0017s01140.2 (locus POPTR_0017s01140) derived from phytozome v7.0 (chr-ID scaf fold_17; pos 821277 to 821950)
ttgaagcttttattggctcaaaaactgttattcaggtattggaccatgaacttatatgaaatgtatgtatttaattgcattttggaatttggtggaggttatattgttgtgcgtgagcgcgagcgaagaaaatttgagggttttttcattttccttactgttttggttggtaatttggagctgaatgtttgagtgggggttagattttgtcgaattttaattccatgtcaagtagtttgtgtgattttaagtggcttttcgaagataagtatttgttgtcatggagtgatgaaaatgcataacgggcttgatttgtattaggagttttgaaaggttagtattttgttgtcttggagtagtgaaatttgattaagggctcaatttttgtaaggggttcctgaagattcgtttaaatctgtgagcggtgaaaattgatgatttgtttctttttggttgctaaagagttctgctaaatagttttatggccagtgtgaaaagcgtgaattttatgtgtttaaatgaattctgcttttgaaatatttagaggtttgtaaagcagtctgttttgaagttatggaaactgtgtcctgttctttgtgtttttgaacattggaaactgatagtagggatatgtatgagaaacaatgaaatggaaatttcgcagatacgaagtc

SEQ ID NO: 53539 - DNA, 747 bp, Populus trichocarpa
  Intron number 1 from transcript POPTR_0006s03330.1 (locus POPTR_0006s03330) derived from phytozome v7.0 (chr-ID scaf fold_6; pos 2117446 to 2118192)
ggttacgaggcaactcttataaggttatttgagtttctcaaggtcaatatcaaaaccatttaaattaaaactaagtttaaatcatgaatttattaaatcaatcctccaaactgatcagattgggagtcacaaatgaaattgaaaattgatttggtggggacacatcttcaatgcaccgagtaaatgtacaagaaaaaaagtttttctttcttttatttcctatcatagtcattttttttttaaattttgagtaagcttttatggtacaaaaggcgaaaaagaagaagtacgatttgagcagtataattctctactgttatgaagctatcatgttactcacaaagctcaatgagcttcttatcctcaagaagagcagagctgatcccaatactaaaatatacattcataacctaatgtgctgactttacccttaattcaaaccttcacaccttaattaatcctgtaattagagcaaaaaccaaataaaactatgattaaggagtgacaaacctaggtcatttaagaggctagtatacgcatgacacctcttaccagcttgtccatgtgcttatgagctcccatgatactttagggtttccttttcttataaaatgcttgcgctgaacctcaacgtgccacataaaaaattgtggtaactaagagcatgcttagttgcacatcgaaacattgaatgcagcagtagtataaaaagggagaacacactggctaagattaaagaattcaaca

SEQ ID NO: 53540 - DNA, 893 bp, Populus trichocarpa
  Intron number 2 from transcript POPTR_0005s02580.1 (locus POPTR_0005s02580) derived from phytozome v7.0 (chr-ID scaf fold_5; pos 1643937 to 1644829 reverse strand)
ttcctattgaggttctcaagtttgttgatcgcaaggtgagtttatgagtttctttatggtgcacggatgatagagattgtacatttgcaaggtggtgtatgtgggctattgtgtttttgatatgagatattatatgctttttaatgcacgtatgatgaagatcgcacaattgcagggtgatgtacgtggccttgtgttcttttttctatacgggatgcttttgttcttacaattttctttttctatgttgattgagatgaaagtggcatggtaaggtttgttgtgaattgtgatagggtgtgttattgaggtggttgaaaaggatggactaatcctagtacttatcggttccaattttgttttgctatgttgattgcttataatttagataaaaatagtattgtaagttagattgttgtgaattgtgatagggtgagtgttgtcaatgaggttgaagaggatggactaatcctaggtcttattggttccaattttttttgctgtgttgattgcttatgatgatttagataaggaaaatagttttcttttcatggctataagctaatttatgctcttttttttgccttctggttagccgattctttgcttattgtttgtaattgagttcatgtatgtagtcgttcttttcttttgtttggtcataagataagattgagggcatgggaaccagattggtcatttataaagaccttgttttttgaaagaaagaatgctgtgcctctctgaagatgctaagattagtctatgatctgattgtctgcttttctatataccttacggtgatagaattgaaattttaggcttgtttaattaatcatgcatggttttggaggatttggttgtgaattgaaaccttccctggttgcaggtgg

SEQ ID NO: 53541 - DNA, 580 bp, Populus trichocarpa
  Intron number 1 from transcript POPTR_0017s07150.1 (locus POPTR_0017s07150) derived from phytozome v7.0 (chr-ID scaf fold_17; pos 5545568 to 5546147 reverse strand)
gactcaaagtaattctctctttttttagatgtttttgttatcacaagcataacactaatgttttaatgttctggcttgcaacatttactctccatcgatgaatgctgaaacgcattagatttttggagtcttggtgtttgaaaaaagcatgtgtttctccttaatttatctatataatttaatttttctatgataatccaattgaatcttcgtttgaaacatgtactgcatatggaccgcaatgactattatgaaggagaatcaacatcttttaatcttaatcaggtgattctcttatgttcatgttgtaaaatacttttgattttcttgtctactatcttttccatattcttatgtgattttttccttgaccctcttcatgattgtagctatggaaacgtttcagggggagtaaccagtctctagagagcctgggtgcaagcaaagaatacaatgttgacatgatacctaatctattttgtatggagttttatgatcttgttgttaaatgataacatgtagtaagtgtttatgttgttttttttttttttcaatttgttatgctagtttattatcacca

SEQ ID NO: 53542 - DNA, 1019 bp, Populus trichocarpa
  Intron number 1 from transcript POPTR_0017s11100.1 (locus POPTR_0017s11100) derived from phytozome v7.0 (chr-ID scaf fold_17; pos 10768640 to 10769658 reverse strand)
gacctgatcctattcacaacaggtacatacttctctactcaatgtttttagagaaatttttgctagagtcagcttgtgacgagtcgaacttgcatgaatataagctcaattgactgatgatgattgcacatccagtcattataatggtattatgttgtagcatgagaacaaacaaggcagatgctagagtacactagacattatgtgaacatacagtttcttctaggtgaggttggctggtaagagtaaagttaaaaatcgatccttttttttaatataatttgatttgtgaatgcggtgaaaggggcacaaactggtatttgttatctaggaaacgtctgatggtggttttaccctttaactaaagcatctttacatatcagtctttctcttatttttatgtgcaacaagcaaagactttggggggagaactggatcactttagatgcgtggaggaaacacaaatagcttcttttagaatctcaaacaaaaaatcttttagccacttttgctccatttggacaccataacctcccatattttcagtttaatacaacaaggagatggatagcatcatttagatgggtgtgatctcacactgtaatttgttattgtgaattctgtgttcttaggatttggaattctgggtgctgaatgctctaatgtgttttgtgctacataatttgttgcataaaaaatccgagggatgctggaattatattgtatagctttttttttttttttttgataaaggagaattgcatttgatcaagggaatgaaggagtagttcatccttctacaaagtaataacacaacatagaatagaactatctgataacaaccagttcacagtaaattccattttctacacatcgatctgaacatattttgtatgtatatattatcataatgcaggtttgcctctgtattctcttctttattctcataattgatatttcctctacttaaaccatgttattcaggaaaacagtccagtctagacaaccacctggtcaat

SEQ ID NO: 53543 - DNA, 592 bp, Populus trichocarpa
  Intron number 1 from transcript POPTR_0017s08300.1 (locus POPTR_0017s08300) derived from phytozome v7.0 (chr-ID scaf fold_17; pos 6761319 to 6761910 reverse strand)
actctgtttggatctcttggattacaggtctctctttctttgccattcattttgcttttttgttccctagtgatttgagagcaataagataatgttgcaaagaggcacacacagttatagttttggcctaactatataggaaagctagcttgaccttgagttttggcattgtatcaaattaaggggtaatttgtaagagcaaaagaaagagtcttgcttctcaaattgctggattttttgtgctattagaaggataacctctgtttttaaaaagtaaggtggggagattagatgtttatagaatgttttcagtttaattctagctggaaaccaaggtcttgaatatcatagcagaaaggtattatgatactaaatctgaaaggggaatgtattagtgcagattcaaaatagaaaaaaaatgattcttctagttgaattctattaagaggaagaaacttgaatggaactgacaatgtaatgacacatgcacttccagctttagtattattctactcttttgttaactttttaatgatattgtataatttgagctgcaggggattcccaaattggtggtgacataacacctttg

SEQ ID NO: 53544 - DNA, 584 bp, Populus trichocarpa
  Intron number 2 from transcript POPTR_0005s05240.1 (locus POPTR_0005s05240) derived from phytozome v7.0 (chr-ID scaf fold_5; pos 3469722 to 3470305 reverse strand)
gctctcaatctctacgcatccacatcaacaaggaggtacagttggtttcatgtcctcattcctcttgaatgttagctgcggaataatgtatgagcacaagaggtgcaggggagtgtgaggggcaggagaggagtgtgataaaggtttcatgtcctcattcctctttaaaacttcagagctgcaagctttctcattctatcagaaaaggggtccaagattctgcgagcaatatctattcatataatttttacccatttgacattttacaatcagggagctcctttacattgataagaatagggagcattgtatcattttattaaaaatccaatcattgtgaatgctgtcagttcattctagtgtctttgggaagcatgttaggaatacatcaaaaggaaattctgtaaattatgtcaaaaggtaatgctttgaacactgttctagcaaggctgattgtaaatttgagatggaccacaccttaaagctgaaaaggagttgattaggctatacagaaagtgatggtggttgaaggaattggattttttccagcagcattcatctgttgacttatcatccaaaaagga

SEQ ID NO: 53545 - DNA, 631 bp, Populus trichocarpa
  Intron number 1 from transcript POPTR_0005s05240.1 (locus POPTR_0005s05240) derived from phytozome v7.0 (chr-ID scaf fold_5; pos 3470351 to 3470981 reverse strand)
tcatttcttcataatcctccttcaaagcctaacctgtatgttccatctctttcacatcttgcccttatgagagtttccccttctgccatatttctttgagttgtttccattttgtttcccttcccgatttgattgattatgtttctgctagttggttggtcttcaattgctcaaatgttagtcttcctatgttcgatttacttgctgtatctttgaggtcgtgtttcgtcagtgaatttatgtcttttcaaaacaagaaaaacaagataatatgttttttctatctcgaaacaataatcaaagctaacgttaccatgattaatcctattttcttgtatcattatgtaattattaatttatatgaattacacatttgtaaagtgagctagcatttaagatggtgtgttcaaaaaggccacaagcagaaaaaagaaacaaaacattctggatcccatgagccagatggaaagaaaaccagcaaattactagtgggtttgaactaaaaaactaggacttttctcccaacaattgttctaatcagcatattaattaatccagtactcaataagcttccattagtaaataatctgttgcagcagtacttttacagaagtaaagaagattcggattt

SEQ ID NO: 53546 - DNA, 745 bp, Populus trichocarpa
  Intron number 3 from transcript POPTR_0017s03390.1 (locus POPTR_0017s03390) derived from phytozome v7.0 (chr-ID scaf fold_17; pos 2488077 to 2488821)
ttcctattttgcagcaaaatcaaacagttgaacaggtgaataagtatttcctctctttactatatttttcttgtgtcaactaggcgaagtcttattcaattgattgcaagctgtagttttatttttttttaaaatgtattgatcacttgtacactaaaatattgaagaataggatgcagagttcgtctgtcttcaatttcttccttaaaaaaagacagactttatttctaaaccatgtagatattcaactcggttgacttaatgaccaattgatcctgacctgataggtcatttcagtaatccaagacctaggtcgattaaagtttcaaattaaattaggtggaaataaactcagttagtcctgattaacctagtaggtgaattgataatctggtcattcatgttaaaatctagttttgagaattcaatagatcaatccacccaattcattatctggcgctaacagagacttaaggtgataactaaaagtattttccacgaggggtggaactaattaaagggggcgctgtagcatccccataatttggaacattttacattttagtcttaaaatttctcatgtttcttttaattgactcataagttttatgaatgtaaatcatataatcaaacaactgaactgtatgaatttgcatggttaattggtcctgtatgcaaaagaaacctgactcgttgaaatttgatatattcatgagcagtttgagataccactaaggaacattag

SEQ ID NO: 53547 - DNA, 525 bp, Populus trichocarpa
  Intron number 2 from transcript POPTR_0006s06720.1 (locus POPTR_0006s06720) derived from phytozome v7.0 (chr-ID scaf fold_6; pos 4860179 to 4860703 reverse strand)
gacaggtaattttccatattcgtattcatcatcatgtatttctgtcttgtggatgtgatttatttcaacaggatgccatcatgttaatctgttatcttggacaagaaaaaataaaatttatggacaggtaagttttccacttgtgcaggattgtgtatttgtgtaaaaacactctatgatttatttcaattggatgtcatcatgttcgtttgttttcttggacaagaaaaattaaaatttttggcatattggtgaacttgcaagggggcgggggaatatgtttttaagctaaaaaaaatattgcacttaacactccagtggaattttagatgcattggctgtatgaaaatgaactaatatctgggcctaaggtgaattttttttccctgtcatagaaattttctttgagtgactctgtgttgctactgtccttgtagaactagcatctttatcaataaacgttctggtattgttctcaacttcaatctttgagcatgcaggtgaattcaaggggcaaaacagtgt

SEQ ID NO: 53548 - DNA, 471 bp, Populus trichocarpa
  Intron number 2 from transcript POPTR_0017s08530.1 (locus POPTR_0017s08530) derived from phytozome v7.0 (chr-ID scaf fold_17; pos 7112145 to 7112615 reverse strand)
attgtctggtagtgatcaagaatcagttttatttttatttttattttgtacttgatggtaaaggtttctgggttttggatgttttgtgcttgatcttgaacttgggaatggtttgtgtattagagtttggttttaagggaaaggaggtgacagttctttgttggcacagaaggcaacacagaaaatcagattgtggcggataatttcatttctcaagaagcctttggtttaacataatttaagtaaagttcttcaagaactcaaactcgtacaactgagtttttgttgaattattgcagtgtagtgtagtatactagcagattcatcgagcggattagtttagggcttttttttatagaagttaattgttttgaacggtaaagtgctgtattccagtgatattgaaattaatttcctgtgaattctgtctcaccagtgtgtgcattacggtgaagggcattggtgggtttg

SEQ ID NO: 53549 - DNA, 769 bp, Populus trichocarpa
  Intron number 1 from transcript POPTR_0005s18600.1 (locus POPTR_0005s18600) derived from phytozome v7.0 (chr-ID scaf fold_5; pos 16844530 to 16845298 reverse strand)
gaggaggaggaaagagatttgttttggctgagagagtttgattatcataaactaatattgtgcacaactaaagcacttgctatgaattataataattatatttataaaaaaacgattatggtcttttacaacacgagaatgtggtggttgaataaaattttaaatggaaattagatatgttgtgttaatatgtttaggatggatacaatcacgtttcagagtttgtgttttattttagaaatccagtatggattaaaaccatcatgaaggattagtgttattaagaaggtcaacatgtttctttatactttagcattaggtgcttcaaataagaaaatttaggagagatttcaatattctaatgaaattgtgggtagatatttcaataaggttcttagttctgtgtgctcgctaaccatagaaataataaaactagacgtcctaaatttttaaaaacatcaagagaaatcataatgaatccaagatatatgtcacatttcaagataacactaatgttggttaatgatttaataattatgtcaactacacaagaaaaacttttttgcgactacgtttgaaatggttgttttcttacttagtgtttttatgtcgaattgtattggagatatcaaaggaacacatatatgtgcttatgtatcacaagaaaatcaaatatcatttattagaagaagaaaaaaaaaggtatactgacacagaacataatggcagcatgtaactttgacatgcaatttatatttgtttaggctgg

SEQ ID NO: 53550 - DNA, 843 bp, Populus trichocarpa
  Intron number 3 from transcript POPTR_0005s09240.1 (locus POPTR_0005s09240) derived from phytozome v7.0 (chr-ID scaf fold_5; pos 6451976 to 6452818 reverse strand)
acttgttgaagtctaattttgatcagcttattgaggtatgttttcaatcaatctttgtgttaaggatgttgcggaattgttcacatttggaaatagtagcactgggcacttaatttggtttctttaaacctgttcttttgatgctaattgtgtttggggagtgcagtagtcttttagaaggaactgctttttagcagtttgatagggtgctttactgattgttggtatggtgctatacctgcatagcgcatcataactgttgattgaaccatgcaatgctaattgcctgccagtcttttcccaaagtatttgtcagcttaaatccattttcaccatatttagttgcacctttctactcctggtttctccatgtttcttcatgtcccttctataatgtcagttcatgtcccaacttacaagaattgcagcaattttgaaggattgtgctgcggtcatgtgatttaaattggaatgaattcgaactccctgtatactggtcttctgacaccaaaccataccagcatttggccactgttgcattttgcataagattggagagctggcaagttttctatttaggaccacacttgcagaaattttgattgtcattaatcccgtgtcaaaataagcatgctgggaagaaagtagtccatcaagttaaacataataatactaattcaagggtttagaatgcattttcttttcttctttgaaattgaggcttcaatctttttcaatggtttgatatcaccatcgctgctacttgctagtcattcagtgatgggattgctaaatttgaaatgcttaaattacagcttgcaactaaaaagaagactgtagcag

SEQ ID NO: 53551 - DNA, 670 bp, Populus trichocarpa
  Intron number 1 from transcript POPTR_0005s04150.1 (locus POPTR_0005s04150) derived from phytozome v7.0 (chr-ID scaf fold_5; pos 2739862 to 2740531)
aacttggtttaacccctactcaacaactatcatttggtgtgacaacattggggcaacatatctctctgccaattccattttccatgctagaacaacaacatattgaaattgactttcagtttgttcgtgatcttgtgcataacgaactagtccaagtcaaatttctctctaccaaaagatcagattgctgacctgctaacaaagcctctggccacacaaaggttccaccatacccggttcaatctcaacgccagggaacttcccttgagattgcgggggcgtgtcagtaatgtacatggaaacttacatcttgaagattatcagaaggacaaaaagattgcagaagactacacaatcactaacccctaatgtttagtcaaagttaaatgcttgggagaattttaaggggataattgattccaatcaaatctcagcttgcctaaatcttggcacttgctgtgcacgtctctacttacaaatattctgtaaacaaaacaatgcaatgaaaaatacatcctgttctttagtcttttttcaaactctacacagaagggcttagtaatattatgagggaacctaattaaccgtaacataaatgcatgtaacttgatattgcaagtaaataagaacccgtctgattgcctgaactttgctaatctctagataaaca

SEQ ID NO: 53552 - DNA, 708 bp, Populus trichocarpa
  Intron number 1 from transcript POPTR_0017s03660.1 (locus POPTR_0017s03660) derived from phytozome v7.0 (chr-ID scaf fold_17; pos 2715291 to 2715998)
tcgttatacggttgtttctgtttcagtcattgttagttatgtgtcctgctgagttcaaataaaaaataggtagttttgcttattaaaaaaatctaaatcagaataaggatgctcacagattaagagttgagatagctagctaaatcagtagtgagaggttaatttgtgaaaacatgtggggggttgtgctgtttgtttcaattcttttttttctcactgtaattttttcagtatatatcgagaaaatatttccattaatgtttactgattaatacaacaagagaatagtctatcggtaaagttcatcagaattcttccgatggaaaaattctcctagtgttttcatttgtatttactattttttttttgatagtgctagaaaaatattttaaattcaaaacagtaacttctaggtgggaatcaaccctggacttattggtaggccttcaaaaccctgccgaggacacaaaagaattttgttcctcgttcaaaagtggatttgtggttggttatgcatcatctactgtttcaatcgtaattgtttttgtatcctattgttttccttcgatccatctaaaataagggtaacgcaatgccaatgatgagtaaagaagataactgataaatcaagagatttataggaatgttatgtcgtcggtgatatgatagtctaggtgcttcttagatactcttctaatttggacaagg

SEQ ID NO: 53553 - DNA, 885 bp, Populus trichocarpa
  Intron number 1 from transcript POPTR_0017s14270.1 (locus POPTR_0017s14270) derived from phytozome v7.0 (chr-ID scaf fold_17; pos 14386976 to 14387860)
atcatttccaggctaaaaaagcattaaaaaccaaggtttgtgttggcttaatgtagtgataaattcacgtttttgagattaaccaatttgatgtcaatgaaaaagatttatgggttttatttttcagccttattggttcatattgtcatgatcaagttcagtgctttctttttttcttgtctgcgagttctcttttagatacattcactgttgcgggaatttgagatcctgttggctgatttttttttggctggtagaagttgtgtttgaattcatttaggcttgagagaaagctccattgtttgttgtttagtgtatagtattatgaactgtacatgttcagtttagcattgataaactctccttatttggttttttttcttgcatttaacttatctgctcatctatacttgtagctgttatccattgccatgcttcttttcaaggtggtttcctttgctttagtttatgctcgttattgttcttgtcatttctaaacagctatgctgctgccgtgtcttcagttttattgaacgagattagttgccgtcattgtgcttggatatgtttacttctaattaggtatcttcaccagttatgaaactttcttgtatacctatatacttgaaattaactctaaaattactatacttgttttcattttctttaactaagcagaacggttacttgcatgtttagaatgttttggttaatctgatactctcatggtttactaacactccagttaagaatgaggtttgattcctttttattttcattttttttatgtgttcaatgtgtaataactaacagtattagttgtatgattttcagctaattcaattttggttttgcaggtgatttgagattggttagtggattgcc

SEQ ID NO: 53554 - DNA, 797 bp, Populus trichocarpa
  Intron number 3 from transcript POPTR_0005s11940.1 (locus POPTR_0005s11940) derived from phytozome v7.0 (chr-ID scaf fold_5; pos 8713939 to 8714735)
tgcttctgctccagctcatatccaccacaaagaaggtaagcaagtcgttgtggttatgctgcatcttatttcatgtacatgttagtgatgtcaagttctccaggcacatttcctgatgtgcaaattgtagggcctggattttttattctgtcccaagttattcagatgtacaaagctgatggttcaattctcttgtaaggttaaaatcaagggctatgctagtcatcatcatcgtattgtatactaaaacaatatgttctttctgtcattcaaatcctatcagaggaccccattcactttttattggatgaatcttcatttctgttacattctgataaatgttttttcttttctttcctttttttgggtcaatttgtccttacaacaagatatggaagcacaaaaaatgcaacatgcttcagtaagctcttgacctcaacagtgaatatgtttccatgctactcattggccaggccatgacagtagtctttggtttgggatctacatttgtcaaattagtcttcaagagcagtacttcattctaaaccgcaaaatggtctcagaatttaccttcttaggaaccactttggtggaattataactgtgcgagggcccttttgatggtaaacttggataatgaaaaatgaaatatgaccattttctcaaaattgatgcattctttgatacttcctcaaggcatcaatgacattcttttagttcaatcattttctggaatggtaaatcacttcattgtccatatctcacccatttaattgttggcaattgttttcttgaag

SEQ ID NO: 53555 - DNA, 814 bp, Populus trichocarpa
  Intron number 3 from transcript POPTR_0017s05470.1 (locus POPTR_0017s05470) derived from phytozome v7.0 (chr-ID scaf fold_17; pos 4329349 to 4330162)
ctgttattgaagaggcaaagccactgcttacaaaggtttgatgtgccctacttatgctttgttctagtttcgatggataacgtattgtcatgaatgcactttttaattaaataactgtctcagttttgcaatcatcaacgtggttcttatgaaagtgaaggctttcttctcatgctagttaaacttcacctgctgtcttatgaaatttctgcagacctcatttgtcttgataaaatatgctgcatgagagccaatccgttcaaagaatttgctggggcacccttaggaccaaaagaagtgcagaattgatgataatattacatttcttaaaattttgatgaaaagaaagaaggatttaacttgagcattgggtttgtaaaactcttaagaaacttcatgtacagtttaggtgttcaggaaccatctagtttcttgcttgttcatttgaatgatcaaatagaatcctgtgaatggcaatgctattcaggtttaaggttgtcggccattaatttgtaattaccctgtaaatgagtgaactacattatggaatgtgagagtgcaacatttcatctaaccagaaaacttaaagatgaactcattccttttcactgaaactcctgcattattgtcatatacgcattatgatctttgacaggtaggcaatgtggacatcgattggtataaggtagtgcatgtatcctgtgcatgtactttgcctgctgcgtgattgaaattgttacatgtttgttgtcaacatttaacttgtatccatgcatactttgattttgatgtagtgatgtctcagattaaagcc

SEQ ID NO: 53556 - DNA, 209 bp, Populus trichocarpa
  Intron number 3 from transcript POPTR_0005s22250.1 (locus POPTR_0005s22250) derived from phytozome v7.0 (chr-ID scaf fold_5; pos 21230080 to 21230288 reverse strand)
ttccaaacctcttgtggaggtccctatcattttaggtatgacaaggtcttgcccgaaaaattaaccaacaaacatataactagctttttgtttactcattgatatttaatttgtggtttttcattttgatataccttcaaagcgaaaatattagttttgcaattaattatacatatattaattatttttgttcttggcaatgtaggaga

SEQ ID NO: 53557 - DNA, 328 bp, Populus trichocarpa
  Intron number 1 from transcript POPTR_0005s22250.1 (locus POPTR_0005s22250) derived from phytozome v7.0 (chr-ID scaf fold_5; pos 21230751 to 21231078 reverse strand)
tccattgcttggctgcaactcattatcatttcaaggtaagcatgcacatatccaacatgaaaaattattttaagttctattgaaataactttgatgcatttatctcatggttggctaatttaatctgcataatattaatccttgcgccatgttttaattcactcgtcttcatccttagttttaacccttttttttatacatataaaagtcgagaattttattaatatctgtcatagccagtaagatgatggcgatgcagagaagaagaaaaacaaaaaatagttttaaccacttatactgggagctaaattttctgcatataaaggtt

SEQ ID NO: 53558 - DNA, 359 bp, Populus trichocarpa
  Intron number 5 from transcript POPTR_0017s06630.1 (locus POPTR_0017s06630) derived from phytozome v7.0 (chr-ID scaf fold_17; pos 5039333 to 5039691 reverse strand)
gaaggttttgtatcttaaaattaatggattagatctgtcatagttggaatttatatagcctgctgtggtttgttaatgatccagactccagttacctgttggatatatgatagtcagcactaaatgatcaaaaggcgttatgtggcacataatgtgttatttgagcagaaaaatgtcccctatagaggaataacttttttttgtattgtatcatgtcttttccttttcttttctcttatgttgaaattatttagtatgtcataatttagattttcttctaactaatgtgatttatttttattgttttgacatgcactttctcaggaaaacttgccattttgatcattgcaggttgccac

SEQ ID NO: 53559 - DNA, 715 bp, Populus trichocarpa
  Intron number 1 from transcript POPTR_0005s28120.1 (locus POPTR_0005s28120) derived from phytozome v7.0 (chr-ID scaf fold_5; pos 25481972 to 25482686 reverse strand)
aaaaaaagagcacagatctggtaaggaccatctttatctactaattgttttcattattgtatttccagatcaaacaaacaacacatgctatcactatatcactaacgtcataggatagccttcctttctctcggattattttgtttaattaccctcagaaaccatgtatgattaatttattacgttctatatatatacaccaagtttctccatttgacattgtggtgcgtgcggttggagatgctactccactccacttcatgtttttttttggttttcattgcttgaacatgaatttcatctcaaattatggaataaacttgtatttgaaaatgctacaacttgtaactttttttaaacccacctttttttctcttcaaattaatgaaactgtagtaccaagttgtgatgaagctctttttcccgcatcttttaattttctgggtaataatgtataatagaattggatcaattagaaaaatttatcttttgattttttattttatttttcatttagtgatgtgataaatactattcatgtatgtatgtgtgtgtacaaggtgattctatatctatttcatttgaattttccttttgaattactcgctacacaagctcttgatttctagcatttggatttgattttcatttttcacatttgcaatttgccatctagttataatttgtcttgactgtatatttagcagagcaagag

SEQ ID NO: 53560 - DNA, 846 bp, Populus trichocarpa
  Intron number 1 from transcript POPTR_0005s20030.1 (locus POPTR_0005s20030) derived from phytozome v7.0 (chr-ID scaf fold_5; pos 19044759 to 19045604 reverse strand)
ttagctacaggttctttctcttcctctatatatggatcctttttatatggggttctttttttggaattgaaatattgtgtttatgatgggggcattttttctttttttgttgttgattcaaattagctgactgtcctatgctctctgttttatattggaaattcaccgtattccattcacgttcaaattgaggccgtgtaggacatctgatttactatgcttggcttctccatgatagaacccaggtttcttttcaaggttcttaataagcttgtgagaattgatctaaatggatgtaaaatatgaggctgggttgatatttgaagtcaattcctaagcttgagaaccaaaagtcgtcgtcttctttaagttttgaacaatgtcttgggtggttaatactgatacagaacttaaacataattctttaacgggtagcaggacaagtgttatgaccaatcaaattaggtgaagttcttttctacatccccgcattcgttcattataaaagctgttagttctgcctcttatgcgcaagattttcattgtgcataaggccattacagaaatggtcctattaaggcgatcggatgagttgttgatcctctattgccttttttactgaaactgatggaaaaaatgacttgagagagagaggataggatagaaatttagttgtagtcacattaacatataagacagtatccatccatagacatgttatgtgctttctaaaaattctttattggatcattgtggatttggttgtttctgcattggttgtgtttttctaaggatatatagaaaataaaacggaggaactttggtgcagctgcggtatctgcgggt

SEQ ID NO: 53561 - DNA, 469 bp, Populus trichocarpa
  Intron number 2 from transcript POPTR_0005s02010.1 (locus POPTR_0005s02010) derived from phytozome v7.0 (chr-ID scaf fold_5; pos 1307966 to 1308434)
gaaccatttcttcgagctgtggtgagatttttctctctttttatatttcttacagaatgaatatagcttgcattattttatttccatttgtaatagtgttcttcttaaccaagtccattttcacttagttttatgttcaaatggtaacttgtgatcattcaaaacagcaacttgacaattttcaagttcaatctgtgattaggatttgtgacaggttctgctatactttgagttgttcttgtcattaccttcttcctcttcctcttcctcttcctcttcctcttcttcttgtgtgtgtttgttggctattttggtttccatgagtaaacatatagtactctataataaggattggcctgtaaagatttatctgattgaaatagctcaaattcttaaaactgggaagtattgaatgatttctgggcagtctttaaaattttgttctgtttcttgattgtttagatccgag

SEQ ID NO: 53562 - DNA, 771 bp, Populus trichocarpa
  Intron number 1 from transcript POPTR_0017s11500.1 (locus POPTR_0017s11500) derived from phytozome v7.0 (chr-ID scaf fold_17; pos 11245982 to 11246752 reverse strand)
aggtataattgcatctcatattcatctttcaattatgcttatgttatttgctgagacataggataaatgagaagctggaaaacttgaaatgaaaagaataatcatgatgaggggtttgtctggaaagctagacgttgatagcttattgatgcttttgacttgtggtaattttggattaaaacttcctctcaaatgatcgtgatgaatggttgatggtatgctatggattctcaactgcatgttcctggtagtcgaagcaacagaagactgtattctttttccaatgttgcatggatggaaaattaatagagctttaggggaaaacctattctgattaaatattctgattaaattcaaaagtcttagttggtagaggtggtttggctcttttcccctacttttgtgtgaaattgtgaggctacttttgtgatcttagtttatgtattatactatttgtttttcaatttcttttagttttggaagactggcacatagcattaaagagcctggaaaattttttgtggaaatttatgtcttaatattatgcattctaacaaattaggtggtttatgtactgtgacctgcagatgtactataagcaccgttttgtttattggaaaacaatgtaatctggatgaaagagtggaaaagataaacatttctggcacttgtgcctttgaacagaatcatctacttttttgtcttttttttttcctactttcaaaaatatgtaaagcttcttgtttcttatgcagattggtgggctggata

SEQ ID NO: 53563 - DNA, 853 bp, Populus trichocarpa
  Intron number 1 from transcript POPTR_0005s23330.1 (locus POPTR_0005s23330) derived from phytozome v7.0 (chr-ID scaf fold_5; pos 22148358 to 22149210 reverse strand)
tttcttagacaattttcttctcttggattatcaaagtttttgtttctttgtaaaaattatgagccaatgcattttacacatacatccctagtgtaatcaaagactaaattccgataagtttaacctctgatcatgagaaattggatactttttagtcttgattgagtttattgatggcttttcactggtttatttatggtttggccatattcaattataaaaagtattacgttgaggattttttgcaagtttggccatgtatttgttgtgctttttcaaatttaattaaatttgaacagatggcagaaatgagagagccaggttgcccttcatattacttttcatgacaatactgctatttgtatgaaaaaagcatactcttcttcgacttgtaaagatgagtcagctaccttagaaagaaactaacttcttccacaattttgacttcaggtatctgcagatactgatttgcgaccttgcaaaccaaaacaagtgattgaatggagtcctctttattctttgcatgttctggatttcttttctttccatttcttgttttccttttttttcccaccatggtgatattgaaaatttcattgccattctgtttgatgatggcgatggctatttaaagaatgagttttctcttttaagtggttagagtgacaactgtagtaattttattttgattgaaacttggttcacctttattagtacattgatcttgaaatgccagagctctgaaactgatttcatataacaatgcctgtggcttttgttaatgtcaggtagcttttgcattgctgtcaacagtatagaaaaaaatcagaggtgaagaaataacttgaaacag

SEQ ID NO: 53564 - DNA, 443 bp, Populus trichocarpa
  Intron number 2 from transcript POPTR_0005s26250.1 (locus POPTR_0005s26250) derived from phytozome v7.0 (chr-ID scaf fold_5; pos 24321760 to 24322202)
ttatcacattctgcccttcatcaacaaggtaaggattgtatgcttctgttttatttttcactttattatgttgcatttgatttattctgtatctattttatattgtaggtgttgcctgcatttccattatggattcttatctgtaaatgttatcttctttttgagcaatcgatttggcatgcgttctacttttttccaactatactatgcttttgtatgcctcaagctaacagggtgccattgccattggcatgtggagtacagaaaggaaatgatttgcaaattgaaaacaggaaaaagaaaaggaatatctgcagaaatatcttagttttcaggctttgtaaagagcaaattgcgatttatatatgtttattaaattctgatcatttctttatttttatcctgcagtcaaaaatctgcaagagacacgactccaccagcaa

SEQ ID NO: 53565 - DNA, 571 bp, Populus trichocarpa
  Intron number 1 from transcript POPTR_0005s06870.1 (locus POPTR_0005s06870) derived from phytozome v7.0 (chr-ID scaf fold_5; pos 4613099 to 4613669 reverse strand)
ctcaaagacggaagcttgcccaatatcaacaacaggttggtccctctcatttttctaattcaattcattttatgactttttaggccttgaaatttaatgggttttcgagtttgattgttttctgcttagttatattcaaaattttgattaccctgaaattaaaaaaaaaaactgacccttttttagtgcctgggatgtgatattctttatcaaattatgtaacaacaaaaggataagggaaagtttggatttcattttggttttttcaaaaacccattttttgttgttggtttgcttctcttaactaaaaaaaaagtcaagcttttttgccatgagctacaaataaagtgtatttttaggtttatagaaacgggttagttttgaaatcttgaaatggctaagtttttttttggtgtcttttggaagattgtaatgttgtcctgtgatggaaatgtgcgttgtggcttctgctgaattcgaagaaacgatcgcttatttgtggttatcactttgttttttaattgaaaattttccagcttgaagctgtgattgaagcggaaaagcaagctgc

SEQ ID NO: 53566 - DNA, 755 bp, Populus trichocarpa
  Intron number 1 from transcript POPTR_0005s14510.2 (locus POPTR_0005s14510) derived from phytozome v7.0 (chr-ID scaf fold_5; pos 11559103 to 11559857)
cactttctatcctcaagaccgctttgctttgcttagtgagcagccaacattttttttttttttctacggagtacacttcaatgcattcatgtattaatgtaaacccatgattttttctgttgaaaggttgaatctttatgcaaaatgttactatgattctattgttgtgttcgcttgatgtttccgctctatgtgttttgttttgaaatttgcgactctgtgtaaatagacttgctagttaattctagtatttttgtggtttagcaatacgtagcacttcttggattttggaaagttggtttttctgctccttttctgttttggaagatggataattgtagtcttgaactcccttttgcttctctttgtgtcggccattagttatatttaatgtatgaggtgagaaatgttttgaagcgcgccgtgaggattcaaatgttatgatcgaatccaatgaatgtaccaaagcatgggggttcttggtatgaaaatgggttttgtcttgatgagttcaatagagtgtttttgaggattttcatcaaataggataggtgcatatccagtggatgtagaaatgattgtgtggccgtgcatcttaagttttttataggtaaccatttattgtatgattaaataatggggaagcatgatttattttattgcttgtgctatgatttattaatctttcaagaagaatgaagttcctcctaatgttggactttctgttccctttccttaccacaggacccttcaac

SEQ ID NO: 53567 - DNA, 853 bp, Populus trichocarpa
  Intron number 2 from transcript POPTR_0005s07040.1 (locus POPTR_0005s07040) derived from phytozome v7.0 (chr-ID scaf fold_5; pos 4719903 to 4720755)
ccttacatatagcaaccaggaaaggaagagctcaggtaaatttctccttctctctaacctcttaacacatcagcaaggaataaaattttgtgattattttgtggatgattcaaaaaaatttcaagattgggtcttgttcctgttaagctcaggaattggagtgtcacagttttcaatttagtcgaatcatcttttggttttactttcagttctataacaaagcatatttgttgacaacacatgattactgattgaaaagtctgaattcaaggcaaacttcgttgtttcaaaatctatctgtggtattcaaaagatggggcatgcaacttaagtttctccataagcagctcgcatgcctaatttattttgtcgaattttcttaactgttttgttaagattttcattacaaaggaaaaacaaatcccgcaatggtgcaccttatttgagtttctgcttcctttattggtttgaaatcacactgctatttgacttctacacaaaattctgaaatatctgtcagttttgctttatttgactgaacttgtcggaactatgattgttcaaggtgatctagttgaattttagaccctcggtcgaataacatcagattgggcatataatataagtaaattggatatattccagtccaagactcttactgaaaccaaaagctttggtgcttgaaaattgtaatcttcatgcgaaattttggatcaatagtacaaccaattttctaggttgtacttctacatgataatgaatttagaatgtgcaatcattccgttgatgatgataggagtaagctgacataatattgttctgtttgtgcagattgttacactgctacttcagc

SEQ ID NO: 53568 - DNA, 773 bp, Populus trichocarpa
  Intron number 2 from transcript POPTR_0005s05970.1 (locus POPTR_0005s05970) derived from phytozome v7.0 (chr-ID scaf fold_5; pos 3925834 to 3926606)
agttcaagacatctttgctgcagagattggagagggtaaattttactttcgttaaattctgtttctaaatcatcaatggttttgatcacattctttcttgtgttgtttttcttatctgatttgagtgagcataatgggggtaatggaacagtaattatatctattaagaattatgacaagcgaaagatcctctctacctggtggaaacatattcaacggcggtgtttttggaaaaataaaaaaatgttgttaaagaggggtggtgatcaaatgtgctcaagttcataagaacctgtttgcactttagtacttttaatggggtctcaatggtcattttgcaatcttaaatgcctggagctggcggagggaatttgtggtctcatttggaagtgggagagagaaactaattaattaaattgcattgcatttgtcatttgtggaataaggagaatttctgaatagcgggaatgcgataatctccaaaagtaggtggttgtcgcgataatttatttgttccctttgctagtctcatgatgaatgcattcttggcgtgttcattcacatagatagctattgcactcaatttgtttgtaggaatgcttcctttttgcattttctaaaaccaaatccaactatcgggccctttaataataatccaaaagaacttcacatagttttgccatggattgttttgaagcatcagaagaagttatgtgaaaactattttatttatctcaggacaataattccagtcttgcctctcgggttaaaaa

SEQ ID NO: 53569 - DNA, 596 bp, Populus trichocarpa
  Intron number 1 from transcript POPTR_0006s12630.1 (locus POPTR_0006s12630) derived from phytozome v7.0 (chr-ID scaf fold_6; pos 9784086 to 9784681)
aagaaggtgaggaaatcccaacttttttagtatagtagttaatcaagctttattgatttgaagaataaaaggatattttaattataattaaacattattttatgcaatttatgcgttaaaatacactctatctcaatcttaacctctcaaattatgatattgaaattttaaatttttttaaaaattattctcttattaatgacatgtttagttggttctgaaattttaatacagaaaaataatcacaaattcatagctagttttgaaaacttgtttaagatacgtgaataaaaaaaacagctttttatttaatatgaatattgtgaagattttaatcattttattttttatgagataaatgtggattgacatcctttactaatttataatttttattttgataataaaaatattaataatgatatcataaataataacagtaataataataaagatagtgtttatattgataagataaagttaaacttcaagaaaaccaaaaaaattattaactggttcatggcgatccaggccataaatgatgcaggtggataaatatcgaaccacagtggaagacatgacctagcaggtgagaa

SEQ ID NO: 53570 - DNA, 517 bp, Populus trichocarpa
  Intron number 1 from transcript POPTR_0006s20810.1 (locus POPTR_0006s20810) derived from phytozome v7.0 (chr-ID scaf fold_6; pos 19820497 to 19821013)
taatttatcaagatcgtctcttttagtatcatcaggtctttcaatcttctcttttcggctctcttttttcttaataaattgctcctttttagcttattaatttgtaattttcttttgtattctttcgtcttgttaaatattgtaaatcccgttaggttaaagttgcaatcttggtgacctttaaccaaggttttgttggtgaaagtaaattgggattttttctttgaagttttgattaatttgaggtttttttttatgaattcatggggtttcttaactggtttgtgtaatttgtggtgaatgatggattttatgatatggctttcttgaattttgtggttatatgatatgggtttgtttgttggtattgtgacgttagggtttttatcctggtttgttgaatcggtgatgaagtgaactttgtctgcttatttttttagaaagttgggattttgatttgaccttgttgtgtttttgaaaattctagggtgtttgatcaagaattgttgaatttggg

SEQ ID NO: 53571 - DNA, 672 bp, Populus trichocarpa
  Intron number 1 from transcript POPTR_0017s07710.1 (locus POPTR_0017s07710) derived from phytozome v7.0 (chr-ID scaf fold_17; pos 5990771 to 5991442 reverse strand)
tcaacaaccacaagagcagctcgctctggttcccagtaagtttttttatttttttttatgcttattttcgtgttttgacggctctcttgatggcttaacgtgttaaagttttctacttttggttttgtctgctctttttttatttacatttgttttgaagggtgaatggttttccattttggttgtgcaatctagagtaccggtgtctggatcggttgaaccttgtgtttgattttatattttcgtttaagaacttggttttttctgtttttctttatggtgtgattagatcaagagtttttcgtcgtgtttgattttagaagaggagctaaagaaaggatatataggaatgattgtttgactgctaatgtctgagattacttgaaaagaatcgaaattctttattggtcattccggtgactgcataggatagttgacatgaataatactttatcatgattcaaagttctcatttttttgttgcacttcttagcaatccagtgtagtatatgtatgttgcagcttgattagtttattgttttgggttgtgaaatttgtgattatatgaaattatcagcataatggccatgctctgtctattgtttcttggtatttaaagtagctattgagcgatatttatgtgtagggcatgcaggaacttcagattgttca

SEQ ID NO: 53572 - DNA, 573 bp, Populus trichocarpa
  Intron number 1 from transcript POPTR_0005s27790.1 (locus POPTR_0005s27790) derived from phytozome v7.0 (chr-ID scaf fold_5; pos 25286782 to 25287354 reverse strand)
aatttcttcctcttttactttctcctaatttaccggtaagtttatgtttgtttattttttttttctttttttttctttttaattttggaaataaaagaaatttatgatgaatttctttatcctgatttgttgccttttctgatttcttgcaatccaatttttctgtccatctacacgagaaaaaataaaaatctgtgggcataaaaacaaggatccctacttcagttttagcagttattttgatattatattatatatatatattttttaattttatgggtttactggattcttgtctagattttttgtcccctagatttactgggattcttctgtttccaatttagttattgtttttttttcttctaaaatttaagacaatttaaagatctctcgccaccattaaaaaaaagagggaaagccacttccttctttctgtcttacacagttcagttgaggccactaagtattttgaattttaaagtgtgaattttgaggtttttttactgatctgaaatgatgtttttttttttttggacagaggttgtctgaaaatttagacgagaaagaaag

SEQ ID NO: 53573 - DNA, 658 bp, Populus trichocarpa
  Intron number 1 from transcript POPTR_0005s27030.3 (locus POPTR_0005s27030) derived from phytozome v7.0 (chr-ID scaf fold_5; pos 24850227 to 24850884)
ctgctcttgaacttggccaagaactggtatagcaattcaaaaaccttactttctcgatcttatttagtcttgtaagtccagaaatattgagtttgcttcgattccatgtgaaggtgtcaaggaggttggatcttgtttatggcggaggaagtgttggattgatggggctagtgtctcaagaggtccatcgtgggggaggacatgtaatagggtaattatgaatagctacggtgcatgctttcttgtccacataatttcattttcttgttcgagtactgatctgtattgctatgtctttggttgctttctcctacagagtcatccctaaaactctgatgaacaaagaggtaagcagattaggattcttaatccatgtatagaaacgattgtctctagttgttcttggtgcgtgtttgtcatcgtaatagctcctgtggttgtgatttaatgatttaaaaaaagtaagttcatgaacgcgatgattaaccaaacattttcaagtttataaccaagacaaaacacagccggcagcaccagtactgaacactacagaaacaaaacatagccttaattaatttactaatcaagacatgattaaatgctttgttttttgttatgtgcagctaacaggagaaacagtgggggaggtcaggccagt

SEQ ID NO: 53574 - DNA, 134 bp, Populus trichocarpa
  Intron number 1 from transcript POPTR_0006s08510.1 (locus POPTR_0006s08510) derived from phytozome v7.0 (chr-ID scaf fold_6; pos 6194754 to 6194887)
ccagagatagaggcgcccgtattctcttcttttctcttctatctctattattcgattcgattcgattcgatctgatctgatccaatcaaatgatatttgtttatttgattcttttgtgattgcagtttgtttag

SEQ ID NO: 53575 - DNA, 544 bp, Populus trichocarpa
  Intron number 1 from transcript POPTR_0005s14030.1 (locus POPTR_0005s14030) derived from phytozome v7.0 (chr-ID scaf fold_5; pos 11055417 to 11055960 reverse strand)
ttagaaaaggtacctctctgttattattattattattattattattattattattaagacccctttttccctttctaattaagatgatcatgcacgaaaatgggttgatctattttgtttggtttctccattccagtaaatgctatgaataaccctaggtttgaagaaatctgattttgaaaatagaataattttaaggtcttgagactctcttttttcataaaagtatttcttagttcactgatgaaatcaattcgaacagtatcaaatcagatggaatcacaaccctcacattagttattaaagagtgtgagggagatcggcctcttgtatatatgatctaatgaaagatccaaaaggctaaaagtgataattggtattcgaaatgcttgattagcttcagtctgttgcttaattcaagatgaagttttaatgcacccgcatgcaaatgtgaaagtcattatcaatcatgttctaacatcaaaatgatattttggcctctttgttagtttgctgaaatcggtcccaagggagaagagtggca

SEQ ID NO: 53576 - DNA, 397 bp, Populus trichocarpa
  Intron number 1 from transcript POPTR_0005s22110.1 (locus POPTR_0005s22110) derived from phytozome v7.0 (chr-ID scaf fold_5; pos 21097165 to 21097561 reverse strand)
ttcacattctccaaaagacgggcgtcctaaaaaaggtacggcgatgcgctttcaaatacttgttagtaaaagatggtcgatgatttcatgaagttacagtttgatttaatacatgtgaagtttgcagatatggtgctaggaaattaatgaatagaaggttgtattttgccttgagtttatggaatttcccatgtggctgtttgagacatttttcttggtttataggctttatcctgacatgcattctcttcctgtcttctagttatggaaattctcatctgtttgttttattttatttggatttagtgcattatttgttaacataacgggtagctttaaactgattccttcgataagtatattttcttgtggcaggtggttcaggcggtaaaggaac

SEQ ID NO: 53577 - DNA, 778 bp, Populus trichocarpa
  Intron number 2 from transcript POPTR_0006s10030.1 (locus POPTR_0006s10030) derived from phytozome v7.0 (chr-ID scaf fold_6; pos 7452508 to 7453285 reverse strand)
agaaaaacattgttctcactcgcatcaattcagaggtataatttgcttgatgttatttgtttattgaggttttttactattattcacttgttccgtggaattgtctacttgttatttttatgatatattttttaaaaagtgttcgaatagtgagtatttgatgttaattgagtggaaatgaggatgaggtttgtagcttgattacattatttggaactattaaagcttttacatgcctactattacttatcaaagtttttcctcaagctaggagaagatcaaatcaagtgtaattgttttcatgttacttgctttcatcgtcatgatgtcatcaggcagtataaaacttgtacctgatgtgatgtgtctatataaaaatagatgtatttctgtattttggtttggtatttacatttttttattatattttcacccatctgttaaaattatactttcttttagagagttctcaattttcatagaataacttttgattttggccaaatttgtacagccattcttctagatcagttcgaccttacttctgtgccttcccaaaagtttttagcttggaaggtttcatacttctcaaggcatggcttgattttactttttagctgacattattttgtcacttttcttgcaataaagtaggaaagtgacttctccttggtttgttgttagccattctgagttttctgatatgagaggcaagtgattactggtaatttgtttatgtagattcgtgatacaagtgtgcttgtgagataaggtctgc

SEQ ID NO: 53578 - DNA, 794 bp, Populus trichocarpa
  Intron number 1 from transcript POPTR_0005s05390.1 (locus POPTR_0005s05390) derived from phytozome v7.0 (chr-ID scaf fold_5; pos 3560527 to 3561320 reverse strand)
tgccacggtacagacccgggttcgattcccggctggtgcaattgtttttccccaaactttggcttgctttccagagtcaaaacttttcttcgaagtccagaccaaacctaccacattgtcatttattgtgttttggtagtttctactttgcaagatcgtagatttttgtggattttatagcatttctgtgattagagagtgtttgaattcatgggacttgtccaatggttatggaggtgcatggtgatggtagcatggaaaactctgggatgtatggagtggcttctttggtttgagttctcagtaaagatgcagactttatgtccagacagcacaaatcattgctctaattaactgggttttgactgtgaagtaattatctttaaagaatttgtaacattttttttatattatcgaacagtttgagttgaatttataagatttatgaaggcaagttgctcaatttgttgaagtgaagtccattgtgatgtgcaccaaattgagtgtctggcatttgttgagtaatcagtaattacacactgattatgtgaagtgcaaatttgaagggaaaatcatggcttctgcatataggtaacaaaagattgattaaaaatgaactgggaattgtcattctacttcaaaattagcatgaacttcatcgaaatccaagattctgatcttttgttttctttatgtaagagtattaaacactccatcttggtgttcttcctgtttatttgtggtttttccaatttggtatggtatgctaaacaggtctctaagttgggttttga

SEQ ID NO: 53579 - DNA, 558 bp, Populus trichocarpa
  Intron number 2 from transcript POPTR_0005s24050.1 (locus POPTR_0005s24050) derived from phytozome v7.0 (chr-ID scaf fold_5; pos 22712076 to 22712633)
tctacatacgtgtcagtctctccttctctatccatttgattgttcttttgccttaatctgggtcattactgggtttatctggatttgttgtcttggttttgtccttgctttgacttggtagttctgtaattgtgtttaaagaatgtgggcttttagtacttccctctgcaccaggatctttgatgatatctatccctttctagttagattccttgcttgatgaaattaaagttgaatgttgaatgttgggcataattttgttaattggaaagtctttaactctcttttccaacctaatcttaactttctgtcgggctagctgctgctacttggtggagtagtttatctgttacaatgtaatcctctcaagttcaaaagttagattaatctagtttatgaattttctattgtttatgcaagattaaattttggtgaagattattgtttttgagtttgtcaagtcggtagatgaaaaatctctaatatattttcgtttttatttcatttttcaaatttcatccagtttgcaggaagtgtatatatcagaggatatcagat

SEQ ID NO: 53580 - DNA, 541 bp, Populus trichocarpa
  Intron number 1 from transcript POPTR_0005s12220.1 (locus POPTR_0005s12220) derived from phytozome v7.0 (chr-ID scaf fold_5; pos 8978926 to 8979466 reverse strand)
gaaaaagcttctcaaagctgtgtctacacttgaaggtaagcccagcattttgttaacaatttgttttatgtttccctctttcttggagtgatattcaatcatttactttattatggtttggtccaaagattagaaacatctaataaatcatggtgagtgttcgattattaaagtggtacaagattgaagatgataaaatcttcaatctcatgttctacagtacatactagttttatggtttcctaagagattggatcatagttagtttcctcttgtctttaaggagctaaactggctggaaaatttcgcacataacgtggccgtgggagctagtgtcacttcttgacatcccatatgctctgactaagttctttctacaaattttgctattgtaaaagagaaaaaaaagttcacacaaaactacaatgatcatagaagttctaatactatgctcatcttttacatatatatattgatgttatcttcaaatttgatgttatatgcaggtgtagataagattgaggctgatcaagcgaaggga

SEQ ID NO: 53581 - DNA, 729 bp, Populus trichocarpa
  Intron number 1 from transcript POPTR_0005s18040.1 (locus POPTR_0005s18040) derived from phytozome v7.0 (chr-ID scaf fold_5; pos 16050879 to 16051607 reverse strand)
gctgagtatatctgtttattaaacaaggtgccaccaaattctctcttttttcgctctcttgcatgagttgaatactgggatttccttaaaatgctatttgtttttctctttttctactgcaaagttaaaactttttttcttttttaatttggttatctgggaagtcttgaaggataatttttttttgttcaattagttttagtggtagtatatgctgtagaaaaggctatttcattttataaattgctgtttcagttttgaagttcattgatctgtgggggaacatgtttgaaatgggtttgtggagtaatgcacgttctgatctgggtctgtttctgggttttttctagttgtatatatttcaatttctaagtttattttttagcttactgttgtcaaaccgacactccatttgtttttccttctataaaggtcctttctgttttttccctttttgtggctgtttatatgacattaaagattccatggttgtggtgctttctattgttatttgatgtggcgaaacattgctgttcttttgaatcatttctatcagttcttcacatgcctggttaagatcaagactggaatgacaattgttctttaatttcagatttttttttattaatttctttaaagctagtttgcatgctatgtctctcaatattgacaagcttaattttctgtttagcaggatacgacagtcataaagcctgctaagaaaactcc

SEQ ID NO: 53582 - DNA, 252 bp, Populus trichocarpa
  Intron number 1 from transcript POPTR_0017s01680.1 (locus POPTR_0017s01680) derived from phytozome v7.0 (chr-ID scaf fold_17; pos 1214695 to 1214946)
actgccctctttgccacaggggctttcggtatctggtaattaactaacttgcttctgtgtcacgtatttcatgtctgtttatctcagttgttgatgggcatggtcacgtgggccctaaaccaaggacccaccttagagaagattgtcacggttgtgtgagttagactaatgttgttcttggataagtaaaattgaacattaatggtgggttttgattgtttttgaaggtctgagaggacaaaaattgggagt

SEQ ID NO: 53583 - DNA, 637 bp, Populus trichocarpa
  Intron number 1 from transcript POPTR_0005s00460.1 (locus POPTR_0005s00460) derived from phytozome v7.0 (chr-ID scaf fold_5; pos 162094 to 162730 reverse strand)
ctcagtctcttcactttgcttcaagctcagctcaggtttcacttcttgtcctctctatctctcacacacaaaatcatcatcactgcataagtgaacatatgatcttgatatcttggttgttatctcttttcttctaccattccagactgtgctatatgctcaagggtttctgtgtttcctttatttgaaaacagtatgacacttacccttgttttggaagcaagttgtaaatattgatcttcatagttcttgttgaaatttcaatttatagctaacatcatggagaggtgaatcatttgatctagttttgagtagataaataggcatatttttggatattggactggtgaaaacttgcttccaattatacccaatccaaaagtttctgattcaaaatatttcttttgttctgacaatttcatcatcatctgacaacatcaagttttcttgtaagaagctactgagactatatagtaatctagttccttttagaaagctactggcttacacaattattttcttttatttttatgggaatgagtatattaggacatgcaaatgctctgttgaggcaaccagttgagcgtcctgcttactcttttcttcattctatcttgcagggatattgtatcctcat

SEQ ID NO: 53584 - DNA, 586 bp, Populus trichocarpa
  Intron number 1 from transcript POPTR_0005s24780.1 (locus POPTR_0005s24780) derived from phytozome v7.0 (chr-ID scaf fold_5; pos 23224499 to 23225084)
ttctcatcctccatttcccatctcaatttcagtcggtgagttttcttgtatcctgtcaattttcctctccacaaaaatcaacaaagttcgcaactttcttcttgattcgaagaaatttttctgggtctgatgtgcttaccaagattgcaactttcaagtcttgaaattttttcacttgtcagggtctctcaatcaatctcttttaatgcttaaccgtgtcaaattatagctggcaagtagttattgtcggtgcatttatttttatattattagtaatattattgccattatgtaattaatgatctttgattgaactgggtttacttgattatttagttttaagcctgtctcagatctatctctagttaatgctatcctctttcctttttttattgaatttatggcctacaaatatgggattttgttttagttaatgtttttacatagatttcgctagttagatattagcaatctaggatctttttatttatatattatatagtgtgttctagatatgataaatatttgctttcagttatggatgataagtcctaacttaatgttttttttggaaacaaggctggtg

SEQ ID NO: 53585 - DNA, 992 bp, Populus trichocarpa
  Intron number 1 from transcript POPTR_0658s00200.1 (locus POPTR_0658s00200) derived from phytozome v7.0 (chr-ID scaf fold_658; pos 6780 to 7771 reverse strand)
tcatctctattgatcttgccaagcagctactgcaggtatgaaaacttgaacatccttcctatttttttttttaaagttaaattctttaatctgttcttcttaattagtctctagaatggggagacaactgacaagagcatgatacttatggatatctgatacaaagggagcagttccctaaataatatcgtggcatccacaagatgtccagctggtattcttaggtgacaacatgccatttcaagtattcatacatggatattatctatctattatttattattttgaaatagataatagatatttgaagaatacacaaatattttaaataataataataaaaatattatacacgcgcgcgcgtttaatgcatataaatatacttttggttagattacatacgggttttagatcggaatcacaccctactcattatataagtaagataataatttaaaaaacatacacgcgttcgggtcggaatcatcaactttgaattaaaatgacatcattactaagtgataagcctatatatatagtgagtttgaattaaagacgggagttgtaatctaattaaaaaagaaaatgtagacttcgaacaataaatgatagtcccacacaactacttcaggtctgggaaaatgatgtttcaaagcatttatagcttaggtagcagtttatagacgcccttcataaatagaagacaagaaagcaccaacaaaaaagagttgtcctccggctgagttgatgcggggaattttcatttgagatatatccagctgtgtgattaatactcttttcatgaaaatgaagctcacctgcaagttgggttctgcagatatatacaagttgtatgttatgaactaatgatcagcatggagaatatcatttctctgttaaatattgcaacacgtgtttgagaagctgtgtaattaatgagataacctatagtgtgtttcactttttgttgtaacaggtgcatcccaattcct

SEQ ID NO: 53586 - DNA, 669 bp, Populus trichocarpa
  Intron number 1 from transcript POPTR_0005s18780.1 (locus POPTR_0005s18780) derived from phytozome v7.0 (chr-ID scaf fold_5; pos 17068533 to 17069201)
gaattaccttgttttccgctaccttcaagagtcaggttcggctgcattttcaattacttttttttttcaatttcttgcaagttagggttatccttattctaatggtttataaataaagtaattaaggttaggttaggattttgcttttagagttttgttctaaatgttatcaattagttttgttaattttgggttttgtttctgttttttctactataagagcttgtagatctgtgaactgggttcttcattacttgttaaattttatttacttatagtggataagaatgtatatcggttgcctgacttttcaatatggaattcgaatgaagcacggggctgcaaaacatttgaatttggttgaaaatatagttcatttttttaatggatttgattcaaactgttattgaacacacccaataggccataactatgctagaaaatttttaaattttattgatgccatccatggctaaagattttttttttttttgtaaatgccttctggtagctattgtttgtgggagcgaagattggttattggtagaagacaaggtgttctgataattggttgccaatttaaatacatgggaggaatttctagtttttgtaatggtgtttgttattgtattcctgcaggttttacacattcagcttttgccttaggat

SEQ ID NO: 53587 - DNA, 517 bp, Populus trichocarpa
  Intron number 1 from transcript POPTR_0005s14280.2 (locus POPTR_0005s14280) derived from phytozome v7.0 (chr-ID scaf fold_5; pos 11366427 to 11366943 reverse strand)
aggctacacggttgccatccttgcccgtgacttaggtacttatctagctagctctgtagtactctatctgcgcacctgtttttgcttccaagaaaaagaaagggaaactcaagattattattattattgaacaccattttatagcgaaacctgaaatagcaagagattgtgcagcaccattttctacacacatgcctgcagttttttttttctctccctagctagacaagaagaaaaaggaattactaacaattagtttttacatgtattgagattattagtaattgtttgacatttaaaacatgcaagtgaagaaacaaacttgaaagcgcagtgaattaagacttgtaggggactgaagagagggttttgaggtaattagatattgtagtgagagatatggggttttgtagggaggctatcaagatttgcagatgagatagcaagggaggagaaatctcaagtttttgcaatcaggatagactgctcggattcaagaagtgtgagagaggcattt

SEQ ID NO: 53588 - DNA, 664 bp, Populus trichocarpa
  Intron number 1 from transcript POPTR_0006s24690.1 (locus POPTR_0006s24690) derived from phytozome v7.0 (chr-ID scaf fold_6; pos 23272659 to 23273322 reverse strand)
gagactccttctcttagtggaaaggtacattcacatttttattatatatatatatattgatattttgatttcttgaaacttgtttggtttctgagaaaatgtgggataaggaaaggaatcctggcaaggttttctttcagtcttctttttcttttttcttttgaatgatgtggaaattaattaattcttgtagatttccatttccgtttctgtttttgggttcttggtttggtaaacattaaacaataaagaaatgtttttgttgtttgattcttgtattaataaatgatatggtttattatgtgaagacctgcatttcgttaattgagtaatgattgtatgccaaatgggcaaattagttaaggtttgtttttgaaaaaagaagtgatgcacatggaagtttccatctgcttgtagaatatacttaacttgggcatgcctaaaacttgcttttttttgtggagcaagtaagaggtaaaaggaagtggtccttttttcatcaaaggtttaccttttgaatgctttgtatctgtttagaaaagggttttggttggtttatgcattgatcttgttaccaaattcgatgaacctgtaattatgaaggtagtggtttgtttgtttgtttttgagtgttttgttgactgaatttcaattttgcaggagt

SEQ ID NO: 53589 - DNA, 536 bp, Populus trichocarpa
  Intron number 2 from transcript POPTR_0005s03840.1 (locus POPTR_0005s03840) derived from phytozome v7.0 (chr-ID scaf fold_5; pos 2549514 to 2550049 reverse strand)
ctccaaaaaatcgagggtatgctccttgttctgtgacttctctctcttttccttaagaaagaattgatttttatgtgatattttgttgagattgttaatttgtgttcattaattgcttcttttactagcaaaaactcctgtcctgatttttgaaagacaaagttcttgattcttgttggtaagatggatggtcaagagggatagaagatagttattcaaatttaacaagagattgtcaaaatattactagattcaaagtttttcaattttgttgggattttgggtggggaagggcagtttaaaagagagagatggatggttgcttgcttggaggttacttgtatctagttcaaattttcatggaagctgatattttcaagaaaacagtggattcttgattgatgggactttgcttagaagtaggatcgttttccaatcttactttatttgtttgtctcagtgtgcttggcagttttctttgaattttatttatgtggtactatttttatgcccaggtgtatatacaaccacagtga

SEQ ID NO: 53590 - DNA, 550 bp, Populus trichocarpa
  Intron number 2 from transcript POPTR_0017s01750.1 (locus POPTR_0017s01750) derived from phytozome v7.0 (chr-ID scaf fold_17; pos 1274892 to 1275441 reverse strand)
gcaagactttttgcttgattgaggagacattgtaagtgattaaagaacgggaaaaaaagtatctttgaagttttttttgtgcctcttatagtcatatagtgggtataatccatttgactgtaaatattattgcttttaaaacctggttatgcacaccctttaagcttaattttaagatgaaaatggctaattttactgaaaatcagtacctgaaaaattaaaaccgtaggatttgtgggagtttccggttgaaatcactaattcaatggttgagttttttttagaagtgattccaaggaagaatctttggtaaagactgttctcttagggattaatatatagatagatggatgtgataagtgaaggcttgaaagtttagttcttattttgcaacagtcaatgaaacaaagcaagttgtatgtttataagtatggtttggaaggacaaaaacacatgaattgagtaattgtcttagttttcttagattatcttattggtgaataaccttttctgccataggtttttggccgaaataggggcattgcttgtt

SEQ ID NO: 53591 - DNA, 748 bp, Populus trichocarpa
  Intron number 2 from transcript POPTR_0017s10920.3 (locus POPTR_0017s10920) derived from phytozome v7.0 (chr-ID scaf fold_17; pos 10504144 to 10504891)
ggacaactttggaggtaataatgcactcatacatatttgaaaaggattacaagatctttgacaaaaaattcttagttttgttgcatttttgtctcttctatagtgtatactttatctaggtccatattagaattgtactaaatctattctgtaattttggctcccttgaacctatggttcagttgaatgatcacacgattttgtgttcaactcacttgagtcagcagttttaagaaaagtataacccctcacatggaatgggtcatgccttccttttctggtaagagttttttgccttttaccacgggggcctttatataactaaacaaatatgtgagtttgattaatcagttagtcattagaaaaatatggcagattgaaattcatagtgctgattgcagctgatgaaaaataagtattccttgttccagtgatggatttttcatataggtgccttaatttgtgtggtaccacaatgttcaaattcttttagtctcgctatctcagtggaagctttaatatagcattgaaattgcaacattgtgcgttaaaattttcattatttttgggtatttggtcaaattttcattgttttacctgaaggcacatcttgcatgtttatttcatatcttatttcattgttctctcttgttatttcagaaaatatttgattttgtaagattctctgatatcatttctttgtttgttgacaggagcttggtttatacaaggctcaaacaaggcttcc

SEQ ID NO: 53592 - DNA, 927 bp, Populus trichocarpa
  Intron number 1 from transcript POPTR_0006s18670.1 (locus POPTR_0006s18670) derived from phytozome v7.0 (chr-ID scaf fold_6; pos 17234594 to 17235520 reverse strand)
agaagcattattagtaaggttttatattttccttgttgagctggtcatcaacaatatagctattttgttagcatattttcaagttaagtgtcaagggaattgagatttttctacacacaatgaatggctagaacacacgttgtgcttttactgatttctaaattaaggaactcgacaggatcgagatccaatcttcatcatcctaggtaagaggtacagttactatgcatttaatggcttctacatgcatggttttccacggtcagagtagaatttatttgtaataatcaattctctattttaattaaattcaattatatgatttgatttaaattcaaatgacaaataaatttaatttacatatttaaaaaagataaaattcaatttgttcaaagtgttttttttttaaaaaaattagatgagtatttaaataaaattaattttaatattatttttctgaattgtaaatcagaaggttcacaacgaaagcaccaattttgggaagaaaataaatcttggaattgggatttcatcaaattaggcatggcctcttggccttagctagcctataaaggggattttaattcaagctatttatatatgggtgcctaaaacatctcatgctagttatttatgtttttccctaaaatttagtcatggccaaaatttcattccctttcgctttttatttcctaccatgcaaggaagcaccaccttttgcattatactgagcctgatctagattaagctacgaaagactttgagcgagaatggcctagacaacatcatcattgatattatcttttctcctttgttgtctgcctagcataggaatatagatgttatcatttatagtctgataacttattcattttgcataatcttattgcagagcccgaagatagaacaattgacattcttccagga

SEQ ID NO: 53593 - DNA, 757 bp, Populus trichocarpa
  Intron number 1 from transcript POPTR_0017s03960.1 (locus POPTR_0017s03960) derived from phytozome v7.0 (chr-ID scaf fold_17; pos 2991852 to 2992608)
tccattccacgtggctgcaaagcagggtcatcttggtgagaaatcattctgattttgcatttttgaacttccgttctccattaaaattatttggtagtatgttttttgaattacggtcattaactcgtttgagctgacaaaatggcttcattatccccatgtatcatttttcctatgaattactcattcttttcctgctatcaaattttttcatctactgataagagaagaaagacctcaattaacttttatgcaaatcttgtctagaagatgataaaatcccccaatttcatgagacacgtcaggtgtttttcatatatatgagctacaaggattctggttagcctgtttgaggttcaaagcctcgaatatggatgtttgaacccaagcatgcatgaatttctagattttcgagtgatgagcatgaaattttcatatatatatctttttcttcttcttctttttgtgatgagcatgaaattagaactcaaagtagtttcaggacttctcttctccagatatttttagttttctgtatttaaatagtagtgtgctcatgcatttctatcgtgctctttctgcttagaatctttcggagaatttctagcattgttactttggctatgaacccactgaaaaccttttctatctggtcttgatactagaggctgtgtttagatctgcgttgcaagataaatttttctgctacttgaaaaactcttaggttgtcacttctgatttttttaaaaccttgcag

SEQ ID NO: 53594 - DNA, 646 bp, Populus trichocarpa
  Intron number 1 from transcript POPTR_0005s14510.3 (locus POPTR_0005s14510) derived from phytozome v7.0 (chr-ID scaf fold_5; pos 11559212 to 11559857)
attttttctgttgaaaggttgaatctttatgcaaaatgttactatgattctattgttgtgttcgcttgatgtttccgctctatgtgttttgttttgaaatttgcgactctgtgtaaatagacttgctagttaattctagtatttttgtggtttagcaatacgtagcacttcttggattttggaaagttggtttttctgctccttttctgttttggaagatggataattgtagtcttgaactcccttttgcttctctttgtgtcggccattagttatatttaatgtatgaggtgagaaatgttttgaagcgcgccgtgaggattcaaatgttatgatcgaatccaatgaatgtaccaaagcatgggggttcttggtatgaaaatgggttttgtcttgatgagttcaatagagtgtttttgaggattttcatcaaataggataggtgcatatccagtggatgtagaaatgattgtgtggccgtgcatcttaagttttttataggtaaccatttattgtatgattaaataatggggaagcatgatttattttattgcttgtgctatgatttattaatctttcaagaagaatgaagttcctcctaatgttggactttctgttccctttccttaccacaggacccttcaac

SEQ ID NO: 53595 - DNA, 767 bp, Populus trichocarpa
  Intron number 1 from transcript POPTR_0017s03655.1 (locus POPTR_0017s03655) derived from phytozome v7.0 (chr-ID scaf fold_17; pos 2711895 to 2712661)
gttggattcttctttcaaaagtgggtttgcaacaggttatgcattttcttcagtttccattttagctattttcatgtcctgttgtgtgccttgggctcgtcttaacaagaggaagaggaacaagataatgatgaagacaccaatgatgacatctttgatggaaaggcgagagaagaagataaaagaagccaacgagcaggtatccccataagactttcattccatcattttttttttatctttttgatgaagaggacgatagagttgcttttattaaggatagatccaaattcttcagtttccaagaccatgaagaagatggatcattgcaaactgatgaattaaatagaccacaaaccaaaacattaattcattacagaaacaagcagaaaaggagagatcacctcgagttcatgtccttaaagtagcacctaagcctcaaattaaaaccaagctatgagatgttcaactccttgctttgacaattgaccagcaacgagagacgtttctctcgctgaatgaataattaatgaagatgactgcactaaataagaagtcagcatgctaatatatagaactcatagtagagcaacactagctagatctccacagcatgagaagtttattacaagaatgcagtaaataaagcaactggcagtgatccaactctggatctcctgcgggaagcaacgaaagagatgcttcctcatgtgaagaatctgttcctttaataatgcatcaattaattagtctctccagaacttgga

SEQ ID NO: 53596 - DNA, 690 bp, Populus trichocarpa
  Intron number 1 from transcript POPTR_0017s11680.1 (locus POPTR_0017s11680) derived from phytozome v7.0 (chr-ID scaf fold_17; pos 11458441 to 11459130 reverse strand)
ccgctgttattcttcgaggaacaaatacaggtaagagctttccattaatttgatttttcttcaaagtgctttatgcatataatggacatgtttttttttttttactgtgctactttgacgcatctcaccatgacactgggtttcattgcttttatcatgcaagttgcctgacattgttgtctgggcattccgaggcttggaaagggatcctcgaaccactaggtcgtctgctgaagtcttcctacaaattaaggtcttatgcttactttttctatcctttaattagtagctctattgatctttgttgatctcctatggttgtttttttcggcatactatgctggactgtcaatgctctggttcttcactatggtttgattttcatccgttgaattattaaactacaagtttgtcatcttcgatgaattgatagccacattggtcaaggcttattgcatatggtgactcagtaattctgtagcctatacagggatatgacatagagagagatctacttccattcatttcttggcaagtgttcacgagaggctagctctttagactaccagctactaaggagcaaacttgacttgcattgttctagcttaagccatgatctgcatatttgttactacatttgcgattcaatattcagtcaaggattgtggggcttcttcattttctcttttg

SEQ ID NO: 53597 - DNA, 503 bp, Populus trichocarpa
  Intron number 1 from transcript POPTR_0005s15650.2 (locus POPTR_0005s15650) derived from phytozome v7.0 (chr-ID scaf fold_5; pos 12257288 to 12257790)
ctaatgtaagttttgatcggatctggttttggcttactcagctgttttttatttttttaataattcttatatatccttgtggaatcggtatttaccttttttataaatggaattttgttaatttttcattttttttagggggaataagagggatttctgggttttttgttcattttggtcttgattttattggtttttttctattggttttcgtctagatctgtgattccttcttgtttggtcgcttagaaagtagaagaaaattaaagaattttaaacggatttggaaattcttcttgtttttttttcttgtcaaaattttatttttaattaattttatttgcggttctgattagatcagagttatttgatttatggtgatttagatggggattaattgattttttatctggaaaaatatgatttttgagtctaaaattattgtgttgtggttgttgtggtttttttaaggactgttgtggatattttgtacaaatttgagg

SEQ ID NO: 53598 - DNA, 752 bp, Populus trichocarpa
  Intron number 2 from transcript POPTR_0017s06180.1 (locus POPTR_0017s06180) derived from phytozome v7.0 (chr-ID scaf fold_17; pos 4791511 to 4792262 reverse strand)
gaggctgctaaaagggtgtgtttcttttttttctttttatttaatccccttttttattttgttttttcttatttatggtatttaggttcacaagaatcttgaggcaattacacactttctgttgctgatggcatttgtgctaaaacaatttatgcttatctcttattttggttattatgtgattcaattatcttacaaattttgaaaacctgcccacgtttagatggcttccttaacgcagcttcttaattgattgatttgacttgcatacctcctggttgacattattcttagatcctttctgtgttttccctttgttaatttgggtactagaattgaacgattctcgtcatcagaaatgcactagaagacaagttgttttcttatatgattagctttggtgttcagtaaaagtttcatgattatgccagaacttcacttatcaaagtagctgaaaaatgaaggttacacctcaagaaatgaactctcattgttcttcatgcaattttgttatttggcaaattgattgaatgtttctattggataatcacctgctgattagttgaatttcttccctcccttcgagctgatagcccctatactgatcactgatgttttatctgatcaagttcatgtttagtgtagcaggatgccattttcttttcttttgcttatttatttgtttgtttgtatgatttagaaccttctgtatactttttcaggcaaaagaggctggtagcactcgtttttgc

SEQ ID NO: 53599 - DNA, 438 bp, Populus trichocarpa
  Intron number 1 from transcript POPTR_0005s03050.1 (locus POPTR_0005s03050) derived from phytozome v7.0 (chr-ID scaf fold_5; pos 1994368 to 1994805 reverse strand)
aggtgcaataaaacttagtcttcattgtcatgataaatagtaggagtatactttttttttcttgattcccatcttcccatttttcttacatggattttataatttctcctctggatattaatcgcaattgtatgctacttgcctactcattcgccgttgtatgttatttgctttcctacatgcgtcaacagctccattcaacagtgagaaacacagaaaaaaaacacacatgagtttttttgtatccctgcgtgacgttttgcttttttgatgaagagatcttatttaaagtagatttgtgacagagagagcaaagctggaccagagaatttgatttactgaatttttctgttaaatgctcttcacagccaagtaatattttcaatgtatgtatgtgttgaagaaccttgagatccttgacctccatagcaacaacct

SEQ ID NO: 53600 - DNA, 535 bp, Populus trichocarpa
  Intron number 4 from transcript POPTR_0005s24900.1 (locus POPTR_0005s24900) derived from phytozome v7.0 (chr-ID scaf fold_5; pos 23316691 to 23317225)
aagaacggaatcagctcaggcaaagtaggaggtaatgctttcctttgcattgtattaaacctacatacatgcaagtcttcattttaatatatgattccgtgtgagaatgtttgtgccatcatatactgctttggctgactttgaagtttttctttgttgcaaaaccatcttcatagtacatgctcaaaataaaaggactgcaatagacttttattggaatcccacaacttacccccccccacacacaaactctcatatgaacacatatttttgtcagtcacagactggcctgttgaaccatttgactgacaaggctgttgacttttgacgttgggcccccacttttcgatgtctgagatgacattagagcatcttgtatgtttttctatttgggacataccagtcctttttttctttatatatctcaaatgctttcagtttctgagcatcaacttttgtgcctaggccaaagtgattaatctgtgacattgacactttagggagcagtacatcaggtggaaagctgagtgtcaac

SEQ ID NO: 53601 - DNA, 302 bp, Populus trichocarpa
  Intron number 1 from transcript POPTR_0017s12710.1 (locus POPTR_0017s12710) derived from phytozome v7.0 (chr-ID scaf fold_17; pos 12895173 to 12895474 reverse strand)
gaatcattgacagtgaggtcctctatcacaaactctttaactaatgtattgcactattgtgaattagcataacctaagcagtcatcaactaggcttgttttgtgacagcaatctggttcaataaagtctgttagcggtttatctatggaaccaaagatagaaaataaatcaacattttgctatttttaagctagaagaccctgtaaataggaataggaagtttactgcaatctctatcattaacattcaaatgttttttccttgaaggcactccactaaagaaccagacaattcagttggca

SEQ ID NO: 53602 - DNA, 940 bp, Populus trichocarpa
  Intron number 2 from transcript POPTR_0005s07750.1 (locus POPTR_0005s07750) derived from phytozome v7.0 (chr-ID scaf fold_5; pos 5307492 to 5308431 reverse strand)
aagaagtaaagattccccctttgtctcctttgatatatatattttgtgttttaagattttttagttttctgttttattaaatataaaatgttttgtgaaaaattgttctttttattattatttcccccctttctctattggaatcggatcatggctgcattttctgttctatggttgttaatgactataataagcaattaaattgaaagttttgaagaaaggaaaaaaattgattgatgggttttgaagagtaacttcgttaatgaaatggattagtttctttttgtaaagatagttaatgtgatagcagatatggcaagtgatttaattttttatagataaaactttttgctttctgtctaaatagaaaaggagaatggttggtggtgaacttttgtaggaagttatagttaatttcttggtgggggctcatgaacggctcagatcatatgcatccctacacttaggtatggtggttcttcaatatgatatggagcccttatcagtttatgatcaagttgttagatacttgaatatggaactcctcgttgttaaaactaatcaacttttgagtttaggcgattcttcagtgcaaacaatttgatagttttacttgttttaattgaatcctactaagtacttcgatgattgatttcacttgtgcatttgcaatttatctaaattgattggcatggtcttattattctagaaaggtagatcggtctgttctttggcagacgatttagttttgactttcaagcaaactaacacctgccttaacatacagcacaacgatatttttcgtgctcctaatgggtttccaacttagcaaccttcaaactttgcatacaatggttatttcataaatcaatgtcagtttttcatgtgtgctttctctgagccatctgaatcattcccttcattttttttgtagaaagcc

SEQ ID NO: 53603 - DNA, 580 bp, Populus trichocarpa
  Intron number 3 from transcript POPTR_0005s26000.1 (locus POPTR_0005s26000) derived from phytozome v7.0 (chr-ID scaf fold_5; pos 24157820 to 24158399 reverse strand)
caactgttccaaggaagctacggtcaggtgtgtgctgtttcgtttgtcaattcagaaattgaatgctttttcatttttcttggtggggtttttggctatttggttggatgtctggtttttgatatcaagtgttttttggtggtgggtatttcttggaagtttcttcttttttttcttttttcattttttttttccggatggttttgttttgtttttggcatagtgaattttggattagagctgaagcaaaactggagctttgtgccttttcttttctttttatggaagcaagattctctgtgttgccctttttaattctatttattatgttgatgcttccactttcatgttgtatcgaatcttttcaattagttttttatattattgtgtttgggattttctttttgttctttaatattctcaagcttgcttttccgagggagatactttcagcttttttatgaatcagaaaagtttctttcatttctcttttcctgaataagcaataaattaaatatcagttcttcacgattttggtggcattaattctgtggatatatgaccattttcattctcagcc

SEQ ID NO: 53604 - DNA, 555 bp, Populus trichocarpa
  Intron number 1 from transcript POPTR_0017s04870.1 (locus POPTR_0017s04870) derived from phytozome v7.0 (chr-ID scaf fold_17; pos 3751290 to 3751844 reverse strand)
ctaaacccctctctcgctagaagaccctacctaaggtgtgcttatcattttggtctcccttcttgctttgcttctctcattttaatttgaaatatgctatcttatgtttattaatgtttggggcatcatatttcaactgggctctttccattttgaactaaaatcaagtaaaaagagatctaaaagcttaaaatttgatccttttgcttcattttagtgagtaacttaacaagttctctcctttttcaaaagggtttgtttgtctgcttttattaagctcagttgctttataaagttctgactttcttcaaaattgtgtgcccagaaagaaaagttataaacttcttgtgttctaggttgagtttccttgatgggtttttctggatttgttttgtagagcaggaaatgtgaaaatgggaagtgaacaatccctttgatgctatttatgttaacatcgtagtttgcctttagttcatgctcttggtttgctttggatgttgattgttgaccttcttaatgtgaatgaatgattttgtgttgtcagaatttgggaat

SEQ ID NO: 53605 - DNA, 781 bp, Populus trichocarpa
  Intron number 1 from transcript POPTR_0005s09250.1 (locus POPTR_0005s09250) derived from phytozome v7.0 (chr-ID scaf fold_5; pos 6459970 to 6460750 reverse strand)
tggaaaaaattggatcttggtggtgttgttgtgtatatattatgagtatgttgttatgttaaattgtgccctttttttttcgcttgtgtgtgaagaaggatgagaagaatttagtgaaaattagggttagggtttaggagttgggagaatttaagcaatggacgaatgatttaattagggggttcttttagtaagtttgtttggagattaattagggtttttagggttcaaattgtttagtttttgggggggtttgttggaggaggaagggagtgaagaattgtggttcagattctgtggctgaatctgcaaaggtgtttttttcttaatggatttagggagtctgctgcaaatctacatcaggctttgtgttcttatgttgagaaaaacttgtcaaagtttgtggctaatttgagaagtttgagtgctttatgcaattagtaagttcttcctaatttggaaaccatgtaggtttcttttctctggtgtgacacaatgcttgtaaatgtgggttggaagcattgttatgttatgtttcagtaaatgggtgcatgtaccttgaattgatcactgcaatcgaaagtggagttttccatgtgtcattctgcttgctttatatttaatctgacgatgcctgtgtgaatttggacttcagtctccccaaatttgttgaatttccctttgctgcaatggttgataaagagttgatattgattgatgcaatttgtgttccggtgagatgacaacagtgatggttttggtctgtagattgtgatttgcc

SEQ ID NO: 53606 - DNA, 867 bp, Populus trichocarpa
  Intron number 1 from transcript POPTR_0017s08780.1 (locus POPTR_0017s08780) derived from phytozome v7.0 (chr-ID scaf fold_17; pos 7373211 to 7374077)
caggtacattttttttactcttttctgtcgtttttagtttagatttgtgttgttgattttgattacctttactgttgttggatcttgtttgcttttatagatttttgtggttcttagagtttctgataagtcaaatctatttaacatttccagatatgctgtttaattgttttttttgtgttagattatatctttttttggtgactgaagtatatatagagtgactgttttattctatatttcatcttgagcatttgacttgttttgtgatgcatagagagaaatgtcgagcgctttttagtgttagttgctttctgttgatatttttatttttcaactgtgtcgtctttgtttccatggatcttttatgcttgttttagaaaactttctaaatgtgtctttgagtttttcagttttctgattcataacactctggagagtcattgatacatattttgagcaaatgtgatatttttattggataactggttaggaactggggttcgatattacttgttgttgtgcaccatctatcaactgtattgtggtatgaagaatgtctttgaaggggttcatttgttgttgttattgtgttctatctgtcgtaaactgttacatgtgctcaaatctaatttataatctattatttagtgttctaagttaacaggatttggaagcaatgtgaattttgagtttatctttgctagtagttgatgtgcgttttctcttcatttcaattttgtggcaccatcaagcataggataaattggttagcaatgttatgttaaaatattgaggatatgaactaatatctatgtgattgatttttcagatagaccctgccaagtacaagagcacctcatctgg

SEQ ID NO: 53607 - DNA, 759 bp, Populus trichocarpa
  Intron number 1 from transcript POPTR_0005s23740.1 (locus POPTR_0005s23740) derived from phytozome v7.0 (chr-ID scaf fold_5; pos 22496457 to 22497215 reverse strand)
tgtctgctgggaggtatatctctgaattacatgccttgccttttgtttgaactgaattattgtttttgctatttgatactgcgctttgttgtgctaaattctggttgtttcatgttttggtggccgaagaaacagtcatttatgttggactacaatgaggcttttctgcaaactcttttattacctttgagctttttaattccttttaagaattatccagaatgattctcctggtcaaaaatttcatcgaatggttttcgtgaatatgctttcctgtaatttggtatctactttccagaaggcatcagaacttaaaaaaagtatagttccgtcaaagtggcacccggctaaaaagtagaaggatttggagaaagtcattgtcttcagtattttgcatgaagtggcttctcctgaactataacctgcatatcccaagtcttacttgattttagcaagcgatggcctctatttggtttctatgaatcaagtatgttaatggttagtctacatgttggtaatgtaccattgatgtaatagaagcttttgggtaagctcttaggagtgtgcatacatcaattttggtcactcagtatgtagcttaaagagtaagaatatggtggattttcaagaaaaaataaataattggtgctttgttgttgaaatttgagcgaggtaaactttcttaatgatttcttatgggaattacatgtctgcaccttctcagtattgagtactggcctgatccccagcgtggcatca

SEQ ID NO: 53608 - DNA, 694 bp, Populus trichocarpa
  Intron number 3 from transcript POPTR_0005s11670.1 (locus POPTR_0005s11670) derived from phytozome v7.0 (chr-ID scaf fold_5; pos 8489246 to 8489939)
ttgccggcgccgcgtaagctttcttttcctgcaagcttatagcttaagcttttaatatttgataacatcttggtggatattagtcatgttagagtgattttgttatgcctgtcttcagagcagatggtgggcaaagggggatgtttttgaaaattttacgtatttgaagaaattattgttatatttcggaaattcaatgctgtaggtagttgtgttagcgaagtgtgtgatttaacttcggtaagcaaaagcatttgctcggatttgttttttttgttatgttttcaggttgagttactgtatatcatttttatatagtaaatcgttttggttgctgggaattataatgattgcaaaactgggttgaaaatgctaatcttctgtctatttgactctttgtgaatgagagattcaagaagaaagtttgataagaatttaaaggggattttttactatttgcttggttttaatgctatagatggcagttttgcaactcttttatgttattggagctggttgagcaatagatttgttgaatttttatgtcatcatagaagtatggatgtaattatttaagggaagcggcatatcttgttcataacagattgatattttcttgttcttattttatggtggttgttggaccatgttttcttattggcatgaattatggagacaacatgtttaacttcag

SEQ ID NO: 53609 - DNA, 555 bp, Populus trichocarpa
  Intron number 2 from transcript POPTR_0005s09480.1 (locus POPTR_0005s09480) derived from phytozome v7.0 (chr-ID scaf fold_5; pos 6606187 to 6606741 reverse strand)
acaaaggaccttaaacgtctctttattttaaccaggtttgtgtgtctttttgttttctatgctgtcattgggtgtatgctgcttctcttagtgtacattttgtaggctgggttctttcaaaatattgttggaattatattggctcctgaagtctgtgctatagaccatctgatttgcaagatttttttttcttttctctttttaatctaaatctctgttttcaacaagtaatattatcagaaagtcgaagttcagaagttcaaatttagtgttttttcttgctttgatcttgctctcaaattttgtaattgctttgatcttactctcaaatttgacaattgttcgactttcttttctttgaagtgttggagaaatattctaaaacttaattttgaaacttctttttcaagtactttgtttcctttattttgtattaaattggttcatcttcaatgtagctttatctcaacattagatctgtaattgcttgttcttttgagtatcttgagtttctaatgagaggtaaagttttcagctgcaatcgtttgggaagga

SEQ ID NO: 53610 - DNA, 718 bp, Populus trichocarpa
  Intron number 1 from transcript POPTR_0005s09380.1 (locus POPTR_0005s09380) derived from phytozome v7.0 (chr-ID scaf fold_5; pos 6547234 to 6547951)
tctctaacatcctcacatttttttaaaatttggaggttaaatctgaaaagaaatgaagtgttaaaagtactataaaaaaattgcagttaaaaagatagtgtaatgtataaattatatataaatatgtactcaataaactttatatcattattcaaatcaaacaaaatatatgtttgtggggagaggagcaaacatgtaatgtttttaagaattaaaaaaagaaaaggaaatccacaaatcccaaaaaactttcccctcaacattcttttgccacttcctccatcaccaaagttaaatctaaaatcaaatacaactttaaacttcagaaaaaggggaggggtgggggattaggaacatctttctttgactggacaaacaatgtcaatcaaacctgtgatcacttttaacaaaattcattgaatttaagggctagacatatttctcggaccgaaaaaaagagaagacaagtgaaagcttggatcatcataaccttacaaagattcaagaacaaaataatgacagtcaatacgttaatcaataactgagaaaaaaccagaactacatttcaaacagaaactggcctcgaagatgaaaaatgagttaaaagtcgacaacaaattgaacatacagtttaactgatcagtgctcgattgttaacacaatgtaacctgttaattatcaagcagaacggtaagttataaggattggagaagagaaa

SEQ ID NO: 53611 - DNA, 449 bp, Populus trichocarpa
  Intron number 1 from transcript POPTR_0017s11600.1 (locus POPTR_0017s11600) derived from phytozome v7.0 (chr-ID scaf fold_17; pos 11394495 to 11394943)
gccagcctcaatacctcgataaattgcaggtttcttcttattggtttagtgctgtttaagtgaagaatgaattgggtttttgttagattttgtttttgcatctaaagtcttagtcttttcttaggaccccatttatgctgtttttgtaagtagtttttaggacccaatttagtaaattatttttttattttttattttaatgggttttcatgctgcgcattccttgttttgagagaaacaagaattatggatttttctgttactttcaagcattatttttcaggaccctatttagtaatgatgttgatttgatgggtagtgttatagacgaagtgataattgttgttaaatgttagctagaaaaaaaagaaaggaaatgtgggcgtatatgtgatggaattttgattctcttaggtggagagagaaaggggaataacagttaaagcaca

SEQ ID NO: 53612 - DNA, 167 bp, Populus trichocarpa; identical to SEQ ID NO: 53260
  Intron number 1 from transcript POPTR_0005s24650.2 (locus POPTR_0005s24650) derived from phytozome v7.0 (chr-ID scaf fold_5; pos 23120619 to 23120785 reverse strand)

SEQ ID NO: 53613 - DNA, 469 bp, Populus trichocarpa
  Intron number 2 from transcript POPTR_0005s24530.1 (locus POPTR_0005s24530) derived from phytozome v7.0 (chr-ID scaf fold_5; pos 23056147 to 23056615)
agctgcacgaggagcttcgtgttatcgaaagacaggtgctttattccttaattttacgattgatttgaataatagtattaacatggatgctgcctatgctgttttttctttctgggtttttagggtttggagtcttattagtcacagtgaattgggatttttatcaaaaatgggtcctgtaacttcgcctaaagttttgactctttaagcaacgagttgaaatattttcctacaattttatctgggttcttcatttaagcttgagttgttcatgtgaaactaattggtattcatattagagtttgttttgtttgagaagctcttttttatattggaaagaaatgggaatttaaagtagttttatatcatttatttgtttaattataacaaggcattatgttctctcctatcccatctctatttttttgcttgttctgcaggagcttaatgactgctttgattcaggttt

SEQ ID NO: 53614 - DNA, 586 bp, Populus trichocarpa
  Intron number 2 from transcript POPTR_0005s22600.1 (locus POPTR_0005s22600) derived from phytozome v7.0 (chr-ID scaf fold_5; pos 21509828 to 21510413 reverse strand)
cggaagaaggcttaagattcttttctatgttcattctatttcacaggcaagttccttttctttttcttttttgcaactatggtcacacattccaataattttcccacaattaaggttaattttttccttttagtttcctttacgttaatttcatatgcctaacaatatctctacagagttacaaaaagatatcattaataaagctttgagctttgtttttttaaggtagataccccactttttagcttttaatgatggtgaaagagaaataaagcagaacagtttcctgatttgcaagtattatctgtagcccatagtttgttgttaatctcattattacttgagagggaagtaaagacatcgataagaaagtaatagcttgattggcagttcatagctttacggtcttaatttagcatagtaaaggtacagaattatgacattaattaggtgtcactaggccaatcaaaaatgaataggtaaacccatctttacattcaagtgaaaggataacaactttacttctttttaccacatgacaattctgttgaatttctggattgaacgagtaatttgttttcagcag

SEQ ID NO: 53615 - DNA, 649 bp, Populus trichocarpa
  Intron number 1 from transcript POPTR_0005s15600.1 (locus POPTR_0005s15600) derived from phytozome v7.0 (chr-ID scaf fold_5; pos 12224642 to 12225290)
gaagatcgaggagtaggatcttctcctcattttaggtatgcaaaatcgctttcactctctaaaaccctaaccctaatgatgtctctctttgcctctttattttggttttgattgaatgattttttttagtgtaagctgctaagaaagattgtttgtttttttgagttttcgaggttgttattaaggtgggtttattgggaaatcttgtaaggtcagttctgtttggggttttaaggtaattttgaggataaagaacaaagtaatggttgtaacaagtgcttgatttagtgctgtgatagctgtttggagcttacttaaggaaatctatagtttagtaataactgtattaggtttgaatgatgggattttattggagggacggcaatttatgattttggtgcatttctggtggggttgagatggtttcggtttcagtttcttgtgaattgatgcgaaattgtctggctaatgggttgttttaagtttaacatggaagcatgtttgattacccattgagtgctcaagctgttttgtttatgctttatgctttctttttcaatgtgtttatgcttgatatagtggaagcggtttgtatcaatgattttgtttttggtatttcggtgtagtcacactccattgcagatcatcc

SEQ ID NO: 53616 - DNA, 354 bp, Populus trichocarpa
  Intron number 3 from transcript POPTR_0005s15200.1 (locus POPTR_0005s15200) derived from phytozome v7.0 (chr-ID scaf fold_5; pos 11967134 to 11967487)
gctctggcgtggcacctgaccaccccgatactaaggtcattttttttttatgtttcattctttatacaacttttccaatttttagttctattcgtagaattttcgtggagaagaaatgcatttacttttaatattttgattatgttttacagttctgattttgctatttttaaatattttagtcaaatggtgatggctcagcattacctgtgtctagcaaattcgttttttcatttttttttctatttgaaatagttaaatttgatattaaatttctgttgctagtattagttttggtgcaaaataattgtcttaattgagcttagtataccagaaaacttgctacagattgtg

SEQ ID NO: 53617 - DNA, 712 bp, Populus trichocarpa
  Intron number 2 from transcript POPTR_0005s13870.1 (locus POPTR_0005s13870) derived from phytozome v7.0 (chr-ID scaf fold_5; pos 10854757 to 10855468)
caatcataggtaaaaaccctcaatgcttatgagagattaagattgctttttcatcatagctgcatcatccttccctcaagggatgcaagaactaacacaaaatcaaaggaaaagctggcattcagaatgagtaggaggtgttgaatcatcatacatataagataatttaaatctttcatcattattgcctgcccttcatcctttcaaacagaaatatctcaaccaaagaaacaagattggacatttaggtaactatattagtaaattgttttcaataagaaaaagaataaaaatgattcctctcagacaaatgcctcgaattgtcctcacaatttgaaagaatggaaaaatgatcagactcgtcatctatgtttcttcatcaccgagaaatcattgaaaagaaaagtgtaaacaataattaaaaaaaaacaaatgatgattacaatcgttaaaaagagaaggagagaaaaacgaaggaaatatgattgatgggaaaacgaagatacgaggaggataagctggctccatcactatgctccatcactattggtggccttcgctttaagagtactagggttagggttttcttgttacttcctcttcatcatctgctcaaattaccaggctgccctcccaacttcatccgtttgacaagtcggttatgtttttcttttcagcaacttggcttgttaagttgctagagaaaaaacaa

SEQ ID NO: 53618 - DNA, 824 bp, Populus trichocarpa
  Intron number 1 from transcript POPTR_0005s10550.1 (locus POPTR_0005s10550) derived from phytozome v7.0 (chr-ID scaf fold_5; pos 7588527 to 7589350 reverse strand)
ggcattgtagcagctctgcattttttacagattttgtgagttaatctctcttcttatccacccttcttttatcattatgttctagttgaatgaggttctaatataagttgatattctttcctatccatgatagaaaaccttcttcgttatgaatgtagatccatgcattcagtcaagtgattgcaagagattgtgtgggatggtttgatttagctgaaaaagtaattgccatattattttagcctgaaaatttgaactttgtttgatagttacaggcttaattgtttggaaaaacaagttagaaacacttactagaaaacattttttcatattaggatgcagggaggcattttcttgaaactaggaaattaatcaatagcgatcttgtcaaggtcctgctgtggtcaagtaaaagtattttggaaagaattaagcttgcaaaatatgcaaaagagcagcgttccactgcaaaactttgtgctgcatttgataacgaaacaaatgtccaattagttggatctaactataactatcaaatttattaagttacaatgtgatgtctctcaattaatttgcagaagcttgtgtgcacttatctttaacctcttacaaaaaaagttgtgcgtgttttgtctcgtgagtgcgtgcacaagtggatgcatgttcaggttcttaagaagaataaatgctgcttggtggaaagtttgatgcatcatttatgtatggatgcctgatccatatatacaaggtaaatttcatctgatggtccctctgctattgtgcatgtaggaatcagaaattggaattctgggactagtatcacc

SEQ ID NO: 53619 - DNA, 509 bp, Populus trichocarpa
  Intron number 2 from transcript POPTR_0005s04000.1 (locus POPTR_0005s04000) derived from phytozome v7.0 (chr-ID scaf fold_5; pos 2670102 to 2670610)
ttttgggctgattttgtggaccagaaggtatgttaattattttttattataatttttttacttaccatttttaatatatatcctaatggatactaatagtttttcttccaaatctgttatcagctaaaactggaattaaagaaactcgatagggtactgataagtgagttaaacctcttgtgaaaacacggttaaccatgttaatggtattcagtactcataattattttagattctttttttgtacttgaaaagtatatatttaccatatatatttgtaccactttgattgtccaaaatgtctcagatttatggtgtacttttttcatccctgcctttatgtgaacctgtagatttatgacctgaaagggaaaatgatgtggacagcagaaggagaagagcaggaggcagccaagaaggattttatcgattgcctcaagttattggaaggagagctaggagccaacagccaagccttacttcgggggtgagaccctgggctttgtgga

SEQ ID NO: 53620 - DNA, 676 bp, Populus trichocarpa
  Intron number 3 from transcript POPTR_0146s00200.1 (locus POPTR_0146s00200) derived from phytozome v7.0 (chr-ID scaf fold_146; pos 6899 to 7574 reverse strand)
ttaaagaagagccagtaattgagtttacaggcgaggttagtctctttaacttgtgccacttaaaggctgttttagcttagttcaacctgttggtatttttgggctgtagtttcacattatgaatattcgaagagtttatgctaggcaactggaaattagggttgaggtagtttatagaatttgaagaaactggtctgggttatttttaactactacttttttgctcaataaatgaacgggcaccattagatgttagtgtcatacaatattacaatgtatataggataatgggagcagtaaattaagcgtcacattacaaaatcttgagattctgttggcattttcaagttcatctactgtgagattggagtgagtagtcttttcagtttgatactttaggacatagtttcatatgccaagattcaaagtgttcatgctaggtaacttataatttagggatgtagtagtttctagtttttcccccttgtataaaagtgaaatagtgcttgcacaaaacttgttattgtgattgatggaatatttattaggcagaaaactattgtttgccttttttctaccagagacttctcctaattatgttgtatgaattttccctgcaataactaacagtatagctggatttatattacaggaagcatttgggaaatacctagac

SEQ ID NO: 53621 - DNA, 393 bp, Populus trichocarpa
  Intron number 2 from transcript POPTR_0017s09760.1 (locus POPTR_0017s09760) derived from phytozome v7.0 (chr-ID scaf fold_17; pos 8394364 to 8394756 reverse strand)
caggttaagaatatgtttcgttctttctttcaagtttaatagtttggaagccaaagggaatgttaccaaatgatggtttcaatctttgaattttactttcttacgtttattattttttttccttcatgaaatccaaagcactaatagttcctttcaaggaatcttttcatttgttctttcaacaaaaatggaatctttgcgggctacaattgacagttgatttttttattatgcttacgaaagcagaggaaggactttttattcttaggaaaagactgaaagtaatggtgaagatgtttgtgttctttattttagtacaatctgacagtcaactgctttgattgttttattgaataatatgttatttggcgatgtatgatcagattggttttg

SEQ ID NO: 53622 - DNA, 820 bp, Populus trichocarpa
  Intron number 1 from transcript POPTR_0017s08520.1 (locus POPTR_0017s08520) derived from phytozome v7.0 (chr-ID scaf fold_17; pos 7096786 to 7097605)
ctgctaggagacgttatcctcatcaaaacgacgaggtattgttttaatttttattttatgtgcttatacagcttcttcttcttcttcttttttttttccaattctttggagatgaatttggggttcaatattttttttgataaatcattggttattttgggattgatttggtgtgtttcaatctgggtaatttttcttttttccctgggaagtttgttgttagattgggttttggtgattttccttctttaattattagctagtttgtgctagttggcctagaaaggtacggaatttgctggagatttttttttttctaagaagaaaagaggggctttgaaattatgtgtttttgtgctggtcaatttttgtttatatgctgacagagtttagtagaaactttcttcatgttggaattgattggctaagaaacagagaattaatttttaattccttcaatccttttctgtttagatcttcactgaacactcctaagttcttgtttttcgctggctttttcggcctctctccttcgtgagaattgttgtttttgtatctaagtatttcaatttgatcgtttaattgaataaaaacatcgcatttagaatctttgatgaggttaaatcaccttgtttttcggtagataatggagatgtacacacgttagttgacatagtagatctttgcgtttgccttttacctttgttatctgggttctgatgtgttaaaaaaagcaccaaaattaggttagtttcggctttaggctgttgttgtatgatatctttttatgcttattgggttttttttttgcaatcaggaa

SEQ ID NO: 53623 - DNA, 890 bp, Populus trichocarpa
  Intron number 1 from transcript POPTR_0005s08500.1 (locus POPTR_0005s08500) derived from phytozome v7.0 (chr-ID scaf fold_5; pos 5916555 to 5917444 reverse strand)
gaaggttcttgctggtttcttattttcttgaatattttatttgttacttatcaatagattgttgtggccctttgtaagtctgtggaattatggattttgtttgttaagttgttgtgttattgaatgctggctttatagagttattttgaacagtgatggatggaattaatgctttattgttgtgtttatggagctggattggtctggtgagttatttttaaggtgttttattgataggatgtgcaattaagaaactttcttgtattagataatgacaggctctatataataaatttgactcgcagaacttgttatggtagtgtcttattaaattaaggtgtcattttcctatcagatcaaagagagtgttaattactgtcattttttgatgttaagttattgcacgagaaggatgtggtagctcattttctttttgtgggctgaatgttttaaaatttcaattagttcttgcctgagttcaatttttgtttgcttcaaagtgctatgctaggttcttttgctttgacttagataagaaagaggggtttcaatgcagcgggagatgggcttatagcatatggagatttgattgagacattaagattagacaacacaaacacaagatttggcttgtaattcatatctttgaaagcaatccttttctcatgtcattaagctggttgaaagagcacatcttcccaaacttgtaggacagagtcaggtgtaatgggtcatttaatgcttgttagagaatatcagagatggtaaaatctagtgctgatgcgaagttgagtaactttacctgcaagctttagaaatctgctttatcttcttgcctttttcttcctttgattgaccttcacgtctcaatattgcggttgaagcaggtg

SEQ ID NO: 53624 - DNA, 442 bp, Populus trichocarpa
  Intron number 1 from transcript POPTR_0005s03610.1 (locus POPTR_0005s03610) derived from phytozome v7.0 (chr-ID scaf fold_5; pos 2418613 to 2419054 reverse strand)
gacagcagctcctcttgtccactctccagttcctagtaagttcaatcgaaatatctctagttacctcatattcatgcttttttgatcgctagccatcaaagctttttggatttttttttaatatgaagctggtaggttgtttttcttacgaacccttttaagcttagttttggttttagtattacctatgtagacgagttgttatttgagtgaattcaaaaggaagtctttgatggctagagaaaattgaagacagaggagcagattgcaaattgacattacttaactatattctgtttatgtatgattgctttgatgtatgattagtagggtgtcttttggtttgttagttaatgttttgtgttattccttgctggaaactaactcaaaattctggttatgaaataggagctacaatcttgggctgttttcttgtatactg

SEQ ID NO: 53625 - DNA, 985 bp, Populus trichocarpa
  Intron number 1 from transcript POPTR_0017s10490.2 (locus POPTR_0017s10490) derived from phytozome v7.0 (chr-ID scaf fold_17; pos 9929743 to 9930727 reverse strand)
tgtgcgaacggctctgcgccgagttccctttcgaggtatcccaaaaagctccaatttttttcttaacttcgacccattttgtttagtctctaagaaacaacaagaaaattgaagggataatctttcacaggttgcaaacacagtgtctgtaatttttattggtttctcaagaacagttaggggtcttactagcaagattgattatctttctttttctttttgataattttatggcgattcgggactgattggagctccacgtggctttagtttttcctattatttttttgggaaacactgaaacaaaaacgtccgaaattctgatgtgttatgtgaatttgacatttgaaaataactaaatttgtagaatttatctaaaaaagggctaaggttttgatacctgtaagttatggaattttgggctaatcggaagacgatttttattggatttgtttactcactgcttgcttcactgctgctatagaatcaaactacgaagatagctagatgaaacctggagtcttggtttacgaaatatcttaactagttgcatgttcattttgacaatgtttcctcaaaatttgaggatatgctttctcactcatcccttaacagttcctctatcttcataatctattttgacacaaatgttatatgtttatgcagttttctttttgttgtactaaattttacccgacttcaaaataattgcatttgtttatgcggacaaatttgcaattgttagcagggtgttatctgcaaaataattaagcatactctacgtatcatattctaaaaggtagtatgcttcttcgtgttttcagctttcagatagttgttaacttaggatgatcttaatttatttagtcattgttttctttcttgtcgtggattttttttccctctcctattgatctattaaaagcattgtgtattcatgtatctttcagcttttttctttttgttattatttgtaggaacacaa

SEQ ID NO: 53626 - DNA, 921 bp, Populus trichocarpa
  Intron number 2 from transcript POPTR_0005s17280.1 (locus POPTR_0005s17280) derived from phytozome v7.0 (chr-ID scaf fold_5; pos 14537978 to 14538898 reverse strand)
accagaagctgtaagcttcccccgccccccctttttttttctgtcaaagtgtctaagattttgtgggtttcgttttagttaatcagttcttttttctagtcaaactatttgcttttgtagattaatgggatagatgctcgtgaactgggacaaagatgcattatttgggctgttaatatagtttctgcttttgagctttatgattttttctgaattttgcaaaatgttcaaagacaagtctagcacgtccttatttgggtgaaaatgttgttttagctaatatgttgaaatgtgatgatgttagagctttctttagaatttttgtatatcttttctggattctgtgttggtattcatgtgctttggtttggaacctgaacatctactgcatccattgtttagcattagattcatcatctgtttacacctcagttagtttcgatagtcaaaatgtaataaagtgcaatccaagtcctgcaataggagaattgaaatcagaatgagtaagaaaataaatcatgatctgatataaaaaggctttcacaatttctttgtcatacaaaaattcttcttttcaagaacttgttgaaaaatatccatttgcatgagtttactgttgaacttccgaagtgagcaaagtgtccgtattattttaccttttcttgttcgagtgacagtcttcccttgagtaagaaacattagcaacctatatagtgcgccattctgtatcataactagtctaacatgattactgtaaatgcgtttagcagtaaccattctgacagtagtcaacagcaagatcagattactatgtttgtgtgtttagtgattgctatttgcaattctaattctgattttttatcatttttaaatattgcctctgtagacgggcattttttgacaagaggatctcacaggagg

SEQ ID NO: 53627 - DNA, 390 bp, Populus trichocarpa
  Intron number 1 from transcript POPTR_0005s17740.1 (locus POPTR_0005s17740) derived from phytozome v7.0 (chr-ID scaf fold_5; pos 15444770 to 15445159 reverse strand)
ttgtcttacaaggctgctcaggtatcagtattaataatcttcgattttttcccctgttctgttctgtttggtttggttttttgtggattatgcttaatctaagatttcttttcaagtgtttggataaataactgggtgggtttttagctttacagcaagaagctataatctctagctttcagttgttaatggagttgattggatttatagcgagtattggagatttttgtttttcaattttttttgggggttttggattagggttgagtgaattgaaagtttgattaagggaaaagtagatggaagtgtttttatgttttgattgataaacgttggacgtgttgcaattatgaaggatattgcggccgcggatcttgcaccaacacatcc

SEQ ID NO: 53628 - DNA, 720 bp, Populus trichocarpa
  Intron number 1 from transcript POPTR_0005s24160.1 (locus POPTR_0005s24160) derived from phytozome v7.0 (chr-ID scaf fold_5; pos 22784080 to 22784799 reverse strand)
cagcggcatcaccattaacttctcatttgtaccaggtgggtcagatatattaactcttgtgggtcaactttaataaataaaattagaactaccataactgggatcagatttacatgtgaagctcattatttctggtgggtcagatttgtttgatattgttgtcatgtacatgtatatatgcgtgtgtttgtgaagagcaactgcagcttcatgtaaggattggcaatggatatccatttcaatgtgtacaaaatttatgtattcataccttatttatcaatatcaatatcggatctgacaatattcattatggatcggatcggttcggacaatattcatcgagttgggataagatattacactatccctaactccatggcgctttaatcacgaggattgtaatgaaaaaagaatcaaatcatgtacaaagtctaaaaattaattagggaaggtgaacaagcagttgtattgtactgctaattaattacatgatatcacgatataattgatgattaatgagttcagcttggtatccatgctagctctgatcctcttctaaagatcacatgttaatttgaggcccttctttatagggaaaaagaagaagaagcatgatgtgacgataatatcatgtttgttagtgtagaaataacatcttttgttgggattctcatgttgaaagcagaaaaaaattgaaattgaaagattcgaagcaatcga

SEQ ID NO: 53629 - DNA, 404 bp, Populus trichocarpa
  Intron number 2 from transcript POPTR_0005s20160.1 (locus POPTR_0005s20160) derived from phytozome v7.0 (chr-ID scaf fold_5; pos 19215937 to 19216340 reverse strand)
tcataattacaaatacagggtctgttcccaggtccagagttcatcgtttattgcttcggttttttcatctgaattttgattgttcttctccttgataacatgatttacaatcagatcaggtttcgaaattgcaattcttcatgttttggctgctaaatattaaaattccataaaactacgttcttagtaaaaaatcggagtcgcaaataatagttttaagccggggaaacaccgaccctttttcggaaggcatgcacatttgtcaggaaactccgcaaggcatttgaaagtcgatcgaaaaaggatgaatttagagcgaagaaaaacatcactagctagtatattgatgtcttccattgtttctggcaggcaagtaatccaagaagaggaaacattgacagtta

SEQ ID NO: 53630 - DNA, 834 bp, Populus trichocarpa
  Intron number 1 from transcript POPTR_0005s21780.2 (locus POPTR_0005s21780) derived from phytozome v7.0 (chr-ID scaf fold_5; pos 20872800 to 20873633)
gaaggatctcgcccatcattctctgcgtcgtcgaggtatgcttttctttctttcctttatgatttatgtgtgtaggtagtaatagattgtcagcagggatttggataaaaaaattgggttcgtgcaaaatattttgttaggatgaagctgtttctcttttcttattttttaggtctctaggttttgattgtattttcattctttgaaacctctcttcccttttttttataacactttgttctcccagcaagagatgaagttcttagcttcggtatggtttgctaagtttagctaaagtaaaacataacattctcatttgacagaaacggactgggcaatggcatatgtcattagtttgaagggagataaagaatgttattctaatgaatgaacgtttgcgggttgctgtgaagcccgtttaacgcttcatcaattgaatcttcaaaatttgcatatgaagagctgggtattttttagctaaccctgatattacacattattgactggagataattttggtttgggagccattctagctgtattttgtgtgctttatgctaaaaatttaggagatcctactttgtttccatgagtgggtttatagtagaattctttttattgttgcttgatacagatgaacatgagtccgagatcagtttggttagagtcacttttgataaacagaacatgagaaatggtcgtttcttaatatcatcttgatgagagaagttttaaagatctattttataagcaggtttaaacactttgggatgtcatgatgtattgcattgataacaaactggcaaattttcatctctcgttgcagtaaactcc

SEQ ID NO: 53631 - DNA, 606 bp, Populus trichocarpa
  Intron number 1 from transcript POPTR_0005s07240.1 (locus POPTR_0005s07240) derived from phytozome v7.0 (chr-ID scaf fold_5; pos 4895414 to 4896019 reverse strand)
ggcagcagattttggagaagattcacagcaagcaggtgtggtttttagttgttatttctctgtttagtaagtagaatgatgtttggattgttttgctaaatggttaaatgctcctggagtaacgtggaaaatgtgggaaataatggattttgaattttgtcttttgaataaacgtggaggggaattggggatttgattgtttatttgtgatttatgttgcagattttaagttgttagattgtggctttataataagtacgtgtggtagctgcttgtttttaggattaattgttttttacctgcattgttgtatacagcatgcaaggttgctactttgtgcatgatgaatgttataccatgtgttcttgatcatttgttagtttctttgttcttgattggcacattacaattgagagcagacagtaagaaaggtttctttgctgtgaagttgtgttattttttggttattgttgttcatttaattcttttgggcgttcataatttgagcttgctttttgactcttcctttcactataaacccagcgagtatgctgcttgaatctgcttgtggtttttgttctaaccactgctcgtgttgtgcaggta

SEQ ID NO: 53632 - DNA, 922 bp, Populus trichocarpa
  Intron number 2 from transcript POPTR_0005s20300.1 (locus POPTR_0005s20300) derived from phytozome v7.0 (chr-ID scaf fold_5; pos 19345450 to 19346371)
cattcaggtttgaaattatcactctcttttactctttttttgtcgaatttttaatttttttctcttggttgatattaatgttgaagtgggtgttgtgttattattgttgagatggatatgttagggctttgtgtgagtatttggaagatgaatttatttttgctttagctatggaaagttggtttaagtggcagtagtgaacttgaggttttgagtggcttttggttttacagtattgaatattgaaagaaaaagaaacagtaattgggggatttcattgcctgtttgctaatttaaggatttgattttcttgggggtttgccgtgtatcaagaaaaaaatgaagaggaaaatagagaggctaatgttatttattgaatcctattctgatgatataattcaaaaaggcaactcttattttgggaaacctttaattttttttttaatagtaaacggcaaaatcactttcaagccctgcagccttaatgaatgattctaatccaaattgctatgggaacctgcatttctgaacctcgctagttgccttaccaactcaaagcatctcatgatctagtgagctagctagtagccttaccagctcaaggcacataatttcgaggtttgtatgggtaaaaattgtttggcaatttcacaccaagagacgtgttatggatttgcttgattgaggttagttatcacattgttgctttcatttagagaaccttaacacagatataacttgccttaacaaatattgaatatcttttgtctgaatatttctgtgaattttgcttatttttttttccctgtgcaaactcatttttagctgtattatattcatagttttattgattttggcattttattgttgggattctctgagagtagattggttttctccggccttggtaaatcgactggag

SEQ ID NO: 53633 - DNA, 820 bp, Populus trichocarpa
  Intron number 1 from transcript POPTR_0030s00470.1 (locus POPTR_0030s00470) derived from phytozome v7.0 (chr-ID scaf fold_30; pos 205013 to 205832 reverse strand)
acaaatcgtctcctttcaaggaagcaatttgtaagctttgaccctagcattctctcttttttcttcattttctaggtgcccaaacgagggtgtattaaagaattttttttttagtttttgattttgttctactgggtcctttagatcttgaactgtaaggaagaaagtttagaatttttgagatggttgtttatgaatgttattcctggaagtgttagtgttattgtttgttgtatttggaataaattgttggtacttgaatggatcgcggctcttaaatggacatgcagaatattgtttgtgggtttttattagttaatgtgaatagtcttggttttgttttgcttcaatagaaataaagcgtgttttagattagggaagttcattttctttttaatttacgttagtgattaatgtttgtgtacgaattcagaggtggacaaaatagtaggggccagtgatatgacaaaatatttgctactcttgatgggtttcaaggaatccatttgatgttagtttccaccaacatctctgagctcatgaatccttttggtttcaaataattttcttgggagtttttgttggctggtaaaatgagatgttgtaacgtgtttactgaccctggcattagtggttattgtagaacaattatgctttggtgtcaaatggaccctgttagagcattacctactaatatctgtgtttgcataggttatagttcaatgaaaatgtgtattctattgtatttgttttcttttttaagtaaggtcttcaagtgtttttggtttaattcttctcttttgatttacgcagatcattg

SEQ ID NO: 53634 - DNA, 831 bp, Populus trichocarpa
  Intron number 1 from transcript POPTR_0474s00200.1 (locus POPTR_0474s00200) derived from phytozome v7.0 (chr-ID scaf fold_474; pos 2143 to 2973 reverse strand)
ctcgaccgatccctataagaagaagcacaatcgtgagtagccctttacttgtttcgatctctagtactgctatctgtttttaagtgacgactgagatgaccgttgatgctctagatctgagacttgatctctaatttgacggcagcggcagatttaaatggcttcgccttttgtccctgtgcttgcatcaccaatccgctagatcttacgccactagttgatactgttaatcttaatcattcatgtctccgatgctccatttcgtgtatttattttttcataatggtcctatccgaacagtagttaaactcagtgctgtgtttctttgaatttatagatagagcggctttttgtccgatctagtcatcttgttttgtaaattattttaggttacttgtataatctctgattctttttttatttgctagatgtcaggatttacggttcagttgatcaccaaataatcttgaaatgtgatttaatagaccaaaactccaaaaacaaattaaaaaattcttcaacgtggtccctttatcatcctgaattgttcgagtttttgaggctttgatggactaatgtcatgaattcgaatgttatttgttcggatatgtgatccatggtttataagctgcacctgcttatgtgacatctcctctaccaaggcttatctcgtcaataagaaggaattgaggaaataataatagagggagggtctctgctgttaggaaccttgaggaagctgttgcctgagtgccttttgttttctttgcctttctgtctcaccgcgtgttatttaactctctgtgtgtgcaggccaacgcagcatctggt

SEQ ID NO: 53635 - DNA, 492 bp, Populus trichocarpa
  Intron number 2 from transcript POPTR_0005s05110.1 (locus POPTR_0005s05110) derived from phytozome v7.0 (chr-ID scaf fold_5; pos 3400935 to 3401426 reverse strand)
ttctgtggcatctgccttttctgctcatcaacagggtaatttgccttttgagtatcttgctccattattattattattattttgtttctaacctgtttagatattttaatgacaaattagtatcaccagccgtttgttgatcggattttacttcagttgacctagcgacctagtgattcagatcctttttcggttagacctccgactgctctgacaactatctttataccccaatcaatttgattgttttacattgttgtgaacaccgaagagagtttgttcctgtccttgtctgcattaatgcattgtcctccccacttctctgtatagtaaatttatgattttcttttatttgctgttctgttctgttaaagacgtctctttggtttcgaggccatagtattttagtctcttgttagttattgattatgatagtttttgatgattgatcgaccagctgttcaggacagggaccataaattcctaactaga

SEQ ID NO: 53636 - DNA, 813 bp, Populus trichocarpa
  Intron number 1 from transcript POPTR_0005s05110.1 (locus POPTR_0005s05110) derived from phytozome v7.0 (chr-ID scaf fold_5; pos 3401411 to 3402223 reverse strand)
ctagtggtaatcaacttttcctttttatttgttatttcttgaattttcaaaaagggtttttgttttcaaggtgttttcttgtatggatgtgctctgtcatggtctaagctcaattatttgtgtttacatgcttcgtgttctttgagctttatggttttttcatcaagggattctcagctgggtcacttttcttgtatatttttttgcttttgtgtttgttggttggtatattttggaattatagcttggactgttttagctggttatctccatttgttttcctttcctttcatttcctttccttttcactcaggagatgaagacctaaagttctcccctttaatctttaatacatgctgaaaagattttgagatctcttaaaatggcggactttccaagaatttaagctatatgtcctgttttgacaaggacagagtgtgctttctttttatgtgtttgtacagattggtttatagattttgaggcttaatagaggtataagggtagcagcaattgttcgtttaatccctctttaagaaacatttccccctcctgtgatgtttaaactgttcactcagcaattggtatacagaagcatcaaagaaaatggatgagtcatttctgagaaagcaaaatgattgtaaatctaagaattttatcatttattcaaagtttatatcatcatggttgtataagattttacttgagtatatgtattttcttcaattgaagataaataataacatttttgtttttgttttgcctctcttcttcgcagtagccaaagaccgaactatttctgtggcatctgcc

SEQ ID NO: 53637 - DNA, 981 bp, Populus trichocarpa
  Intron number 1 from transcript POPTR_0005s15330.1 (locus POPTR_0005s15330) derived from phytozome v7.0 (chr-ID scaf fold_5; pos 12054118 to 12055098)
acacgtttactctaggaatttaaacatagggcaccgtaacatcacaaaattctttttccttgattcgtcatcgtaccaaatatataaacttaatcagccaaaataatagcacaaaggatatcaatataaggttacagtaactcatgatatttacaataaattatatttaatttttatatttttataatgtgaaagtagtgatgtgtttatgactctcttttttttatatagattttcatttaataaatttatacttggagcaacattaagatcttaaaaactaaataatctaaagatatatcatgaaattaaaataataaaataatatataaaggcttgtagctgccatgaaaacaggaatagacatctcttcgtcctttttagagcgtgacccagtgacgattaaagtaagaaatgatttggtgtataagggtctaccaaaagtgctatgcaatcgcttgtgtcaagtggccacatcaccttccaatttaagccaaactcaatagtcagctcttaaaattcttgacgaagcctgttttcggtattttgtgagttccgtaaacacgattttctagctagctcttctcttaaagtcataatcattttttagtaataagattttaatattacatatacaaaaatcattttaattttaaagtaaaattttaaaatataatttatattattttctaataataaattatttattcaataaaaaattcaacatcattcaggcaagcaggcaactatctaatacttatcagtataaacataatataggatggtttggaaatgtaacggttattattttttaaagtatttttttatttaaatatattaaaatatatttttttatctttttaaaaataaattttgatattaacacatgatccgatgatatttttttaaaaatatttttaaacaaaaataaataaatttcttgaagctattaatcaaggttttgagttggagtggagtgca

SEQ ID NO: 53638 - DNA, 941 bp, Populus trichocarpa
  Intron number 1 from transcript POPTR_0006s16640.1 (locus POPTR_0006s16640) derived from phytozome v7.0 (chr-ID scaf fold_6; pos 14533282 to 14534222)
gggctgctcctgcttctaagtaactcgcttgctcctctctttttttttaccagctgtttttttacctgttctcctcctttgtcttgctagatttttggtgttttatattatgttttggtggcttttagctagtgttttagttgctgagataattttgtacgaagaaaaattgaaactttgtcgcggatgctttttttttgtgcccatttctttgttgggtattggtggattgttgttgttgttaataaaagtattagtactatttatcaaaggttaatttatttttggaagactgttaagtggtttagttggagttcctgcttgctgatttctaattaatgtgatatttttgaactattgatccaaaaaaatatacaaaagaattgaagtattagtaatggtttctttatgactctcttcttggagcttgtgggtttcatcttttatttggattttattttcgttgctattgccagatgttgtgctttttcgtgctcttttttctatttggttgattcaaagcgtgcggtttgtttatgtattgactagtcgaattgtgcagcaatatcttgctttctttatgcctttatctgctgcatgtgttgtagttttccaaagtgccataattgtttttcttctctagtttgtgtgttctagtctcagagcatagactcgattgaaaaagggttagagaagtgctttatatgtatgtatatatgcacacagacacttcgacttttacaagcaggattttattgatttgatattctctctatgcttattgaattttttagcttaaaggttaaagttaattttttttaattgaattttcaacctttaggttgaagttaattattatttttttctcctcccccctgaaagagaaccaaagcaaagcctggttttctcatgtcttgcgtgtgcagggcacaagttgtggg

SEQ ID NO: 53639 - DNA, 956 bp, Populus trichocarpa
  Intron number 4 from transcript POPTR_1063s00200.1 (locus POPTR_1063s00200) derived from phytozome v7.0 (chr-ID scaf fold_1063; pos 1077 to 2032)
gtcaccgtggggaacttgccttcactcacctctctgtaagtgatccagtaccatggttacttactactactgcggtttattttctaaaagaatcaagataaaagttcggctgcataatttaacggcttgaaaatggcctaatcccactgtcataaagatgtgcattggacttgtaggattgtgagcaattgaagggcttgagcaccttcatgataatattgattgaaaaacatgcacgttcaagctctatcccaaatttatttatcatatcaagaaaatgtatttaaaacaagtaaacaatcatcacacacattcaaaatagacatagaaaattcaaaagatgaataaatattaataaataataattataattaaaaaaataatattaatgttttaaaatatttacatttacaattaaaaataatgttatcactataggtaattctactgcttagactatggttgactagataactgaaatagtatcttggaaggtattatcaaggaaattcccaaactcacagatccaaattataacaaaatatgaaaataatattttgcatatagaaaataggatcaacttgtctatctttaatgcagcattctcgtgggaaagcacaaaattaaagtcttacaatccttaggtcaattttctataaacaaccaaaaacttcaattaaagttatattttcattaatgtattgtgaatgtcttcccatttcttatatgcatagcgatctttccgaaaacttcctcaatgactgtctgcatagttatgtgcaaattaagagctgcttagcttttggatgatatacaataactaatttcagttcttaatatgtcttcataaaatttatattattggttcttagtgagtaataatgaacttatttggtaatacatatatatatatatatatatatatatgcatagcgatctctctacaaacttcctca

SEQ ID NO: 53640 - DNA, 543 bp, Populus trichocarpa
  Intron number 1 from transcript POPTR_0005s16580.1 (locus POPTR_0005s16580) derived from phytozome v7.0 (chr-ID scaf fold_5; pos 13457896 to 13458438 reverse strand)
tacaagtaatttcccccccttatgttaagctgtgtagactatactactatttatttattattaatttttttttacaatcttataccaacaatcaaattactctatcgttttatagagttcttgttgattgttggtgtttatcactttcaaacccttcatttatctctggagatatttttgctggtttcttgggattttcggttatagtacacaagaaaagagataagagaattaaccttatttcattaacatacatggtaaaaagcttggtttatttatgagaattcattttttttgtaagaaattacgactcaaattaatccaacacatgccatgaaataatttttcttgagggatccaacctcagtttaatctcaacatctgtcttgtcagaggaaaaaaaaacgactcttccttagattatttattttctaattaattagtatgaatccatactgtgtaatagtcatatagcatcaactttgtttttaacgaagttaatctggcattttgtaggggtgatagtgctttttgcagtcaaga

SEQ ID NO: 53641 - DNA, 610 bp, Populus trichocarpa
  Intron number 1 from transcript POPTR_0017s12930.4 (locus POPTR_0017s12930) derived from phytozome v7.0 (chr-ID scaf fold_17; pos 13104476 to 13105085 reverse strand)
attgcatcaaaggccataaaagaaccgaaacaaaggtcagtttatgtttgatctttgtatcttaggatgctactcggatatatatgtatgtttgtttgttgacctgcaaaatctaaaatctgttcactatttattcttggccttccatatttctgcttaatttgattgtctttagcttgttttaaactttgttcttacaaaatctttggaactccatttctgatatgctacacatgtttatcgagctactattatgaacttgttctttcgtgtttaatggctgctaattaaagactggatatacagaatcctctcagaaagagtgaaaaatgaagaagatatatatatgtatatacaagtgaactggcttttaatgttgtctgatgaatttggagctggttactattactattaattgtagtgattctaactagtatattggaagtttaagcttataatacaatcacattggttttctttccttcaatcagttctcgactcgcgggcctttttcgaaagcactcaaagtacccttcatcgtgtattttcatgatatctcaagcaaagcatttatattttggtttggattaaagtgttctcagttttcgga

SEQ ID NO: 53642 - DNA, 726 bp, Populus trichocarpa
  Intron number 1 from transcript POPTR_0005s06520.1 (locus POPTR_0005s06520) derived from phytozome v7.0 (chr-ID scaf fold_5; pos 4361868 to 4362593 reverse strand)
ggagcttcaaactttccgccttccatattttgcaggtaaccctttcctcctttctcaaattttgtacttaatggtaatttagttgctattcaatgaaaggaagtatctttacaagaaaagaaaagtggactgatgtttattggtggcgggttgtgaataattagctgtatttggaaaattataatgtataaattcaacaattttgattgccttttttttttcctgtttttgtaaatctgggtttttgttataatgtctctttcaacttgttatagtaaattctggttgttgtgattgaattgttatagttgaaatatataattctttgggataaacagattaggcttgttggtttgttcaattcttgaaatttttgttgttttaatggttgctcaaagtaaatgtttttgttgagaagaatggtaaaattgatcacttaatatcatgttatgtaattcattattaagattattacaagataaatatctcgataagctattatttgattggaggtgctttagttattcatgccggatttttgtggcatttgatgttatcatgtatgatatttctcaacaagaaagaaaaagcttgctcttttttttttaagggaacattttatttttggtgcgggatcatctgtactagcagaagagctataaggggcttgtttttggttctcaatctgcagggtgcagatattttcagaggcgttcgattttgcga

SEQ ID NO: 53643 - DNA, 956 bp, Populus trichocarpa
  Intron number 1 from transcript POPTR_0017s07205.1 (locus POPTR_0017s07205) derived from phytozome v7.0 (chr-ID scaf fold_17; pos 5593577 to 5594532 reverse strand)
tcaacagcaccagaagaaagacaacatagaaataggtaagaagaactgaaaccaaagatttcttaccaatccttgcaagctcactcatttcttacaaacttcagtgtcagcttgagttcttggcattaccagctagggttgttttagattgttcaagattcttggcttaatctggcaaaacttttctcttcctgttctttttccttgttttatcactgagtgagcttctctacatttctatttacagaaatgctcggtgctgtactaattattttttcttcagtttcttttttaaaattttcctttcgcttttattaaagcgagttgattttcttttgttaattttccatgtacatgtaaatcctcttagtaaatttggttgtgttgtgattgtacttttttcccttttcttttgtggttgatggtggcttgataatttcctgtaattaaagatccgttcttgatttcttgctatcatgatccagtagtattatccattaatgtcactcaaacgattcaattgatgtacgttttaaggtaaaggtagtggctagattttctttttttcttttttttttctttttttttctttttttcaacattctatcttcttcttcttcttcttcttgtttgtaaaaaaatctgtttatattttattttaaaaaatataatacgtttgcgtggatataagtaaacaaaattttgatttgcttgtaaatatacttgttgaggttgtttgatgcatgccttttctcattttatgtcaagggtatttgatttttctctctgtaaacattgataaggccctccattaatgatatataccattaggtctatggttttggtgctcagcctctcgatctctttctcttagaaattttatttttatcagcatgtggttaattatcttggttgattttgcatgaagggtgagctgaatttgtttcttggggaag

SEQ ID NO: 53644 - DNA, 498 bp, Populus trichocarpa
  Intron number 1 from transcript POPTR_0005s12530.1 (locus POPTR_0005s12530) derived from phytozome v7.0 (chr-ID scaf fold_5; pos 9311702 to 9312199 reverse strand)
gatttcacagtaccagatttttctcagccgattctgtacgtctcttcttcttttcacttcacgtttcatcttcaatctgaatccttgggtttttttgatagctcacgtgttacttgattatgattttccagcttctttaatagcttttttttttaatatcatgcgatagcattagattagggttactttttttgtgcgtgtgcgtgtagattctactatcgaggtttttttctgtaaatttttaggaattcgaattttaaagatttatttattttcttttacaaaaactagttggtttggtagtttgttgggaaatcaaaattagcaaggcacttgataattataatttgtttattgcttatttggcttgttctcctgcatttgtggttttgtttttcctgataagttaggttgaattttttattatctgattatatgaagttcgtgatggattctttggtagactggggggggatcctcatacacggttgtggatca

SEQ ID NO: 53645 - DNA, 205 bp, Populus trichocarpa
  Intron number 1 from transcript POPTR_0017s11220.1 (locus POPTR_0017s11220) derived from phytozome v7.0 (chr-ID scaf fold_17; pos 10933224 to 10933428 reverse strand)
gttcttcatatccgttgtgcactgatttaagtgggtgtttcttgtgtattatttactcttcttttttcttttttcattttggtttacttctgaattccaatgattttgctttgataatgattatttttattctattctttgattcggaccttttccttctgctgaatcagggtctccctttatcccgaaatcacgtctcgctttc

SEQ ID NO: 53646 - DNA, 657 bp, Populus trichocarpa
  Intron number 1 from transcript POPTR_0005s21620.1 (locus POPTR_0005s21620) derived from phytozome v7.0 (chr-ID scaf fold_5; pos 20728395 to 20729051)
aaatagcaagagtaagtgctccttggatttttttttctctcttttcagtgttttgtggatttaaacagtatgatcctggagaacattgtttctcgttttatggctccatttctgcattttgaacacacccatttgcctatctcgagtacttttggccgtgacaactgattttgtgtaaagttcagggatcccagttggtttttaaacagtgaaagcgattctaatggtttttcttttttctttttccagtgtatatttggaagatttttaagcatactactcatgcttaatttattgatttctttaggttgatagaggatcatattattgcgaaatgtgttttgtctcaaatttcttttcttgtgcactgcggtaatgtattttataaacagttttcattaatcagttcctgttttttttcccctttaagctctagatttcagagctagttaatgaaatgttgtatgaaattttgcaactttgattcccatcagctttttttttttttttttgtgagatcgagcagctaaaatatctcaagcttttgcaatcttcatttcatcaactgatgttgctccatggtctgattgagatttaattttatagctactatcaattccaggtcacatctgttaaagaattaagcgggcagatttg

SEQ ID NO: 53647 - DNA, 494 bp, Populus trichocarpa
  Intron number 1 from transcript POPTR_0005s05460.1 (locus POPTR_0005s05460) derived from phytozome v7.0 (chr-ID scaf fold_5; pos 3614595 to 3615088)
ttttcttttcttttccctcgttactatttctacaggtaacacaattatttaagctgtttcctctttttctttgtgattttctttgtttttatgtgtatatatctttgttggggttattccatatcggttgtggaagtgaccggcaaagagtttacaagtgtaaggaaaagtctcctatcacaagttagcttttgagggagagatcatggactcaagatttaaacaaatctgaccctacaattagggtaaggaatgagttgtcgcggctccgatccaaggcccgatgtgtgagtggcagattgttgaggttatcccgcataggttgtggaataggccggcgaagactttatataagtgtaagggataacctcacctcacaaactagtttttgagggggagataggccaaagaccaatctgttggtttaactttgaacttttacatcctatgggattgcaggacaagttaaggagataaaaaactctgagacactt

SEQ ID NO: 53648 - DNA, 831 bp, Populus trichocarpa
  Intron number 1 from transcript POPTR_0005s05130.1 (locus POPTR_0005s05130) derived from phytozome v7.0 (chr-ID scaf fold_5; pos 3409605 to 3410435)
ccgctgctgagaaaacttctgtgcttaagcttcaggtaaatggtggtgattgaatttttttttaattttgattggttttgcgtgttttaatgtttttggctttggtttgtgttgttatttaagtttgtgttctagtgttgctaaatggttaatcatgagttggaggagatgcttgaatggaatgactgttggtgaaagaactgttcaattgttgcttcccaatttgctgttggtgatttaggttgcttaatattctgatttttacggactaaatttggcagtaggaccttgtggctaaatgatttttcttcttttttttccggtccatttctttattgattacattgcgatgaggtgccatattaagcaaaacatggtaatagataagaaaatggcatgttcattagatgatgaagtctagcttctaggtggggtagttacagcaaaaattggggtatatttggagaatggattagaatgcataggattgtttggcatgagacaaggtgtggtagatgaaatgctttctttgagaaaggaaataaaaatgttaggattactgtatttcagggttggctcaaaggggactttgagaggttgtgataagtgtaaaaatgtctgatagttttgactgctctgatttaatttaaagagttcaaccaactgtgtcccttatagaggagtaatgggaagtcattattactgttataagaaagcctgattctgtcattaggagagttgcagactgacaatggatgcagtttcctaactggatcttctgaaagcattttacaaatcatcttatctttttcacaggttgggttgttgggg

SEQ ID NO: 53649 - DNA, 719 bp, Populus trichocarpa
  Intron number 2 from transcript POPTR_0006s02410.1 (locus POPTR_0006s02410) derived from phytozome v7.0 (chr-ID scaf fold_6; pos 1583446 to 1584164)
tgactgaatttcaggtaaaataaaacgatgcgtgatgtcctgcgatatccttgatgaatgatgctaaatttacccatattcacctgccccatcggtgtcctaaaatcttggatcgttagacgagtggattccaaatttgggttccattattgggtttttgtaaaatcatcttttttccatctttcataaatcaaattattacaattgttagccattgacaagagaaatacgattttgtgatcataagggcctttccatggatattatatttgatttttttttcttcgttattttttttaaaatataaatccaagatgtaactatttatatttattttttgagtattataaaacctcttcggagggattgaaggaaagaaataagttttttttccatctggtttctgattagaaactcccaaaagtgcataatttctagttttggaagcttgcgagaaagagattgcaattttaagatattttagcctaaaaactgaggtcatgcacaaggtttggcccagattggagacacaggaacagagcacaagaagccatgtgagctctctctatctgcctcgaggacagaatagaaggatcaatcgcaatcctcctcctcgaaaataaattaacattacaagaacaagatcatggatggttcgaagaatttaaaatctactagctaacccgtgatttccaccgtatgtaggctagagcaataat

SEQ ID NO: 53650 - DNA, 545 bp, Populus trichocarpa
  Intron number 1 from transcript POPTR_0005s05860.1 (locus POPTR_0005s05860) derived from phytozome v7.0 (chr-ID scaf fold_5; pos 3822274 to 3822818)
aaagaaggagaatttggtgtgatttctcaattcaggtaaaaacccagaagctcaattttgatatctgaatctgggttgtgtttatttttgtgtaattttgtcaatttattatgtgggttttttaaaaaaatttgatgtttaattttgatttttggattttgggtaatgaatatttttagcttaaaaatcgtgggccttgattatcttgtgaagttatggtatcatgtctgtgctcattgttgaatgaatgtaggttttgattttcttttctatttttgatgatttatgcttttatggaaagcgtaagggagtttaatttggatttatgtattaaattacggttgagaatttaattatgaatgaatgtaggtattgggctgttcttggcttattttatgctttagtagaagctcattagagtttaatttgatttgttttatgaatcactaatattgggaatctgggtttggtgggtttttctttttttttttaaaaaaaaaaaaactttcgattttagagttgttagaattgtaaggcttgctgat

SEQ ID NO: 53651 - DNA, 444 bp, Populus trichocarpa
  Intron number 1 from transcript POPTR_0017s07970.1 (locus POPTR_0017s07970) derived from phytozome v7.0 (chr-ID scaf fold_17; pos 6363592 to 6364035)
tcaaactttcccttgaggagtcaagtatatcagaggttcgtgattcatgaagaagttgacagatttccaccgctagcattgtaggtcgcagctttgatttgtttatttctttagaaataggtttctttttcttgttagctaggtttacttggtttgttagcaatacagctcatatttgaagttacaaaacttggatataaattttttgaatttgctaataatagcatgctttaattttcaataattcatgagaaaaaagtattgcagtttacactagaatcaatttaagagttgattgtcagtattcaaattgtacaatttctttctggaggatgagattatgtataattttttcggataattggaagccaccttaattcttttacacaatagatattcatacacattgattcaaattgtgcgaaaggtacatctacaaaagct

SEQ ID NO: 53652 - DNA, 561 bp, Populus trichocarpa
  Intron number 2 from transcript POPTR_0017s12750.1 (locus POPTR_0017s12750) derived from phytozome v7.0 (chr-ID scaf fold_17; pos 12919444 to 12920004 reverse strand)
acttgacagtgggcaccagaaacatcttgtttcaggtaaaggagctgctgctggtgtctgttatttacgagttcttgcattgctttgtacttcgaaacttgttacaatgtggattgtggagttgtacttttattcttttctccgtttcatttagcctgtccaatctgatgacttgatattcaaaaaacttaaggatgaaattctggcttttatggtatatagatcttggattggaaatcgttctaatgttcatttgtaagagtattttggtggacttttcattatgattgttgtaatatgcatgcagtggttctgatattctgttcaacaaattcattttgcgccttatatttttgtttttttgcctattagaagtaaaaaaattcacgaattctctagaagatgctaacattctagtgctacagatcttatagggattaaaaacacaatagtgtgttttgtaatctctttcttgtgtttccataattacatgccatattttaatttgttaacggagttccctagtttatataactgacctgcaatatgataatgaaggtg

SEQ ID NO: 53653 - DNA, 675 bp, Populus trichocarpa
  Intron number 1 from transcript POPTR_0017s12750.1 (locus POPTR_0017s12750) derived from phytozome v7.0 (chr-ID scaf fold_17; pos 12920106 to 12920780 reverse strand)
tcatcaatcctgttcaacgaccaattttagaaaaggtaagatcgagctcctctagcttattcaatattgagttttttttttcaagtaataaatttagttatagatggttattgttgattggttatccctttctttcttttcttttattataaaaataataattttcttacactcgaattaataaaaaaattggtttggtaacaacatcattaattaattttaaatagaatatttttcatggggtgtgaagtaaaaatgtgttaatatcaagaaatgaagctcgtatagggagcgcataatggctacatatagtagtatatgttggccctttttgttagtatggtggatgctaaaattcccatatgcttgaaagtccttaatcgctatccttttggtaatttgggtagtttccactttagcttcttcttgtttgtttatgtcaaaggaatcttacctttctaccttcaacttttcagaaatgtaagaaaatagtaagaaaagtcgcccttctaggcagctgatgtcataattgttgtgggatagtgtatattttcatttctagaaaacaagtctgctgttgtgttttcgtgaaagcatctgatactttgaatctttactttgtttctgtgtttctaatatgagtgaagatgattctgatttgcagataaaattaaa

SEQ ID NO: 53654 - DNA, 491 bp, Populus trichocarpa
  Intron number 3 from transcript POPTR_0006s23290.1 (locus POPTR_0006s23290) derived from phytozome v7.0 (chr-ID scaf fold_6; pos 22050887 to 22051377)
cagaacagcttttgctgacagcccgaaggtgatacgtagttctttgctctttctagatattgattttatggaaatattcaatggcactacaatttcattattatggcttgcattattctcttgcattggtatctatatgctttttctaaatgtcaccaaagtggtggattaattgttgtgtgctgaatactggatgaaatccataagcttgtcgaaattttatagtccttcatgcttgtgtttttttgtcagatataaaacttttgtttgttcatggcaaggcacatgttgaggatgcttgtgtctccatttgttcatggcaaagcacatgttgaggatggatttgtctccattttttattattgaaattttctatgctgaagtggtctctttttgaagcatgaatagtaaatgtctccatggaattgaggttatggtctcattgacatacaccttttgatattttgggcagagttggtcaagaagcactg

SEQ ID NO: 53655 - DNA, 936 bp, Populus trichocarpa
  Intron number 2 from transcript POPTR_0005s14460.1 (locus POPTR_0005s14460) derived from phytozome v7.0 (chr-ID scaf fold_5; pos 11484165 to 11485100 reverse strand)
ctacacaagctgcttggcaacaggcaagtgaaaatgtcttaagactcttaaccaatctagaattttttttttttttttgacaagacagagtattcactaaaagcacctagtaaggaaaagaactaacaatgagaaaaaagaaatacgaaagatagaaaagaaagcttgggaacaatacaaaaggatatagagatgatgataaagtcttactaagaaccccagccttgcaagccatgcatgtaagcatgaatacccgatctgagattgttgaagataaagaggtaaaaaccaacgaatgaagaagaagtggtactgtttctagtggtttaagaaaaatcaccaatggcagctaatagcaaattaagccaaagaagtctccgaaagagagggagggacttcaactgattgaagaggataattttctataaataaaatgctatctcatatatttaatgagaaatttaagaggaaaacttgaactgatatggaagccttactcctctctttttttaatgaaagctgacggcgacaagaaagtggctctacgaaattacagaattacaaagctcaaagccaagccgaaagggcatgctgtctgtgtagaccttgctttgtcagtccatcttctaaatagttcctttccctattggcatgctgagaagtacagattaaattactaagcataatcttaatagtattttttttggttggagaattttaatgctattaaacaagccttgaagtctccatagtaggtcctgacgagtgtcttccatctatttaacaacgttgcccgactcacactctattacccatgccacttccgttttgtttagaaaggaagaagtagatcgaaaccttaattaactctacggaaaatttattattttttgttacacaggtggtcattgattgccggtagacttccaggaagaa

SEQ ID NO: 53656 - DNA, 110 bp, Populus trichocarpa
  Intron number 2 from transcript POPTR_0005s17530.1 (locus POPTR_0005s17530) derived from phytozome v7.0 (chr-ID scaf fold_5; pos 15113671 to 15113780 reverse strand)
ccacaggtttataatttaattatcaatgagtattttattatatttttaattcaaaacttaagcttgcttttgttttttcttctttctttctttctgtgtaggaagttgca

SEQ ID NO: 53657 - DNA, 264 bp, Populus trichocarpa
  Intron number 1 from transcript POPTR_0006s21290.1 (locus POPTR_0006s21290) derived from phytozome v7.0 (chr-ID scaf fold_6; pos 20360618 to 20360881 reverse strand)
ttaatcagattgcagcagcccttttatttgctggggtaacttcatctgtctttctgtctttcaatttgatttttattgctattttattttagatattcggtatcaaggaacttattttaggtttcttggctcttccagatagataattaaaaccggaacattgcttctttttataaggaattagtgtgattttgtttaggaaagaataattgttgtttgtagtttctatcatttctaatagggttccacttccaggctgaattc

SEQ ID NO: 53658 - DNA, 647 bp, Populus trichocarpa
  Intron number 1 from transcript POPTR_0017s05200.1 (locus POPTR_0017s05200) derived from phytozome v7.0 (chr-ID scaf fold_17; pos 3991506 to 3992152)
gctgggtcttttgcagggcaaccactgtaagtttgaaagatctgtttggggggctttatgtttagcattatctggactatatggaatgctaggaacaacttgatatttgaggatcaaaagccaatatgaaaagatatcctatggcttttgttttactttgctgcaggatggatcaggaacctcaactcttccttttggtatactggtgctgatctatacaggaatcatgaatgcatttcggcatggtctgcttaattcctgatttagtgtgggtttgtttttgcttggccaaatagtagggttataggttttcttgtatttatttattgtaattaggctgatgcctaagctacaatctatgtagctaaagcttaagctctactcacactgttcatgtttttttatttattattatatatctattctcgatttcataaaaaaaaaacaacctataatgtagtaactaattcctacttgtaggaatgtttagaagtcttcttgtattataaatacatgatatgaacaataaaagatatattccagcaaattcaatctctcttatatcttttcatggtatcaaagctggactaagatcttgattcatcgctgcactctaatctctcatgttgcatctcttatttttagcc

SEQ ID NO: 53659 - DNA, 502 bp, Populus trichocarpa
  Intron number 1 from transcript POPTR_0017s01710.1 (locus POPTR_0017s01710) derived from phytozome v7.0 (chr-ID scaf fold_17; pos 1233796 to 1234297 reverse strand)
ggtttgttcttgtagggtaggtatttgtctaaatctgacaaacaacaggatctgaagaagtgagcactgttgtttttggttgagattagaagatgggttcttcattttttggatgctatttggaccaggcacaagttgattagtgtttctagcaagtagatttactgtcttgttttgttgtcacatgttttagatacattaaggatgaaatactgctgtctcatgtcctgttatgtgtgacttcttctacttgattatcttattacatacaaagaagacctgcagcaaagctatatagaatctgagctgagggagtctttgcaatccttcaaaactgtttaacacgatctgcctgaaggtctcgttatcagctttgaactacatggcagtgtgttgaaatagctgttctgttcttgctgaaatccgtattgatttgagttgctgatgttgttttccttgttttgcaggtaagaagggcagaaacatattagaggtttagatc

SEQ ID NO: 53660 - DNA, 527 bp, Populus trichocarpa
  Intron number 1 from transcript POPTR_0017s00790.1 (locus POPTR_0017s00790) derived from phytozome v7.0 (chr-ID scaf fold_17; pos 579012 to 579538 reverse strand)
ttagccacatcaattctcgtgctcaggtccataactcttgctagctatttgcttatgtatcatcgagtttaatggccaaattcaactaatgggcctgtttcaagtcttcatgttgcacaacgagggaaaacaaatgcaaagtattagattcaaggtttccttccatttttatttgtcatttcttttgtttctttggaaattaaaaaatcctatgttgcttcgacccttcattttgccttacagtagccgggtcccacactagacacttgaacataggaatggaaaacaatcaaattacatggaaaaatgaaagaggttcttaagagaatagccgagtccaacataagtatgcatgtcggacacgcacctatgtcggatatgtatcccgagtccgagcaacatagaaaacatctgtgaagtgaatcaactcagttacattgctcaatggtttattttcttttgccttcctttcatttttgcttttggcttgcggggtggcttgttgttgttttgtcaggttgcggggt

SEQ ID NO: 53661 - DNA, 553 bp, Populus trichocarpa
  Intron number 1 from transcript POPTR_0005s02510.1 (locus POPTR_0005s02510) derived from phytozome v7.0 (chr-ID scaf fold_5; pos 1609523 to 1610075 reverse strand)
attgattacattggtaagttacgatattcttgatttcactgtttctctaagcggtaatgctgccgcgtttcaaactgtgtttgacttgaaaaggcttcattttttatgatttttatgccttgatctacataataatgctaaacatcaagaaaatccgacacatcgtcgatggggcctgtaaattcttatctgtcagattttctctatgtttagcataactctccgtgtcatttagcttgtgtttgtttaattttcttgcttctattccctttctcttgttttcttttctgaaactttcttcttcttcagcaacaaccaagccgccttaatccgaaaagtttcttgttaaaaaatattacagtgtctatcagaattattcaagttaaaggctgtccattttcttatattattatggtaaattacatgatcttaggaaattcaggttcttaactctctttctaacctcttttacagtagaagttgcttgattgtgttgacttttctttgaactattgcagcacgctcggctaaacttccctatcctggtgcctac

SEQ ID NO: 53662 - DNA, 854 bp, Populus trichocarpa
  Intron number 2 from transcript POPTR_0539s00200.1 (locus POPTR_0539s00200) derived from phytozome v7.0 (chr-ID scaf fold_539; pos 2711 to 3564)
ggatatatactggtcattgtcgtgaaccaactataattctagaggcgatgacttcacaagatctttgaatatggcatgccttttttggaatgcctggatcattagatgatattaatgttcttgatcggtcacctattttcgctgcacttgttgaaggtcgtactgctcctgtcaattatacaattaatggacataatatacaatgggatactatttagtagatgtgatttatcctaattggtcaacctttgttaagacaatcccaaggccgttagaagaaaagagaaaatattttgcaagtaaacaagagtctgcaagaaaggatgtggagcgggcatttggggtgctccaatctcgttttgcaattgtacgtgaacctgttcgatactgggatgaagaaacgcttccaaatattatgaaaacttgcataatatgattattaaggatgaaggagcaatgaaccttggatttgaccatgaacgtgaagtcaattcctttatatcagtgtcacatggtgaaatactagaactacatgattttcttcaaactcataatcgaatcagggataggacaactagctctcaactacaagaagatttggttgaacatttgtgggaacaatatgacaacgagtagaatcattagatttgaacttcttatgtcatcataagtttcaagttttttatgtttttttttttattatggttgttatcttttaaattaattaatcttacttattgttgttaagtgttagaagaacttcaaaataatattatgaattgataccgcttttataacaatatatttaaaataaccaagaaatttctacatatttaattaaaaatacattacat

SEQ ID NO: 53663 - DNA, 525 bp, Populus trichocarpa
  Intron number 3 from transcript POPTR_0005s20970.1 (locus POPTR_0005s20970) derived from phytozome v7.0 (chr-ID scaf fold_5; pos 20076922 to 20077446 reverse strand)
accttgctcaactgcctcctttccgcttggtgcgtgcttctcgtttcttcaaccacctcttctctctttacttcttggctcttgtgtattacaccttctgaattgtattttcggttcatctttaaaagggtattcttgtaaaccaactgctaaatatgagctgcttttggttgtcatcaacaatgagctcaaaagacaaaaattatagccaccttcggtacatcctcaaacgatatacatttgaagccaatccaagaagatgcaattcagtgtgatgaatttttatttttttttcccagtctgctattgctttgcggcttaatttactctattttggtatatattggacacaacgaacaaagcatggtgctgtttttatatatatcttttttaattgatgatttaggtgatcaggtttcattaagcttgttaaattggacaggtgcagcttttgttttcttgggttcatgcatttttgtctaatcactaccatttaatcgttaatttttatactttgtggcaggt

SEQ ID NO: 53664 - DNA, 531 bp, Populus trichocarpa
  Intron number 2 from transcript POPTR_0005s20970.1 (locus POPTR_0005s20970) derived from phytozome v7.0 (chr-ID scaf fold_5; pos 20077479 to 20078009 reverse strand)
ccactgctttgtttctcttcttggctccaacgtatgcaccagaacttttcgttagctccatctctgtctctgttcaacactagcacacacatgcacgacaacacctgattgacatttatggagtttcttggttttgacaagttcgctttgtagcttctaatggctgttttcagtcatggggaagacaagaaagattatcttcctctctggctatagaaatgccttttgagtcatgatcagatttcttcaactttgggctgttttcttgaaaaatgattctcttctaaacccatccttcttttcctatgatcttttttaacttgctggatctctatcttgtttttcctttgcagttttggggtgctactagttttaccactttgttcatatatttctgtatttgggtgatcgagattcaatgatcattaaatgaaaacttgcctgatttgttagaataggataaagttaatgtggactatggctaatttgttgataggataactttcaagaggatcataagaagcaaatcca

SEQ ID NO: 53665 - DNA, 378 bp, Populus trichocarpa
  Intron number 4 from transcript POPTR_0005s25990.1 (locus POPTR_0005s25990) derived from phytozome v7.0 (chr-ID scaf fold_5; pos 24153030 to 24153407)
tgtgcgagctagatttggtgtttaactttcacaaggtttgtcactgctgcaatttttcttttttgttgttttgatactttgacttcaaccatggtcgtcttgcctcttgaaattctgtgtgcgttgcatgcataattgatgtttccttttcctgcttgtgatcattgccttctggtcaagttaccagatcaattacttatatcacgagtccctcaaaaggatttcacaggcctcatattggttctgatgattcccctcacatgcacacgcttgcatgcgtgtgcgtgttgctattgagtaatgtgttctttgctgctgtttttctgatatactgctttgtttgattttctgtttcctccaaggtttatctgatacttg

SEQ ID NO: 53666 - DNA, 1022 bp, Populus trichocarpa
  Intron number 1 from transcript POPTR_0006s04020.1 (locus POPTR_0006s04020) derived from phytozome v7.0 (chr-ID scaf fold_6; pos 2727593 to 2728614 reverse strand)
cttgaaggtgagtgacttaaattgtgttctcttccaacttcatcattcgatgccatcacgtaggacaaattagataaagttgcccattgtgtttgaaaacggagtaactggggattttagggttaattggtgcaaaatgtgtaaattgttcaagatctgaacatgtttggagaatagtgaagctggtggcaaggagttgatgatttgaaacagattttaagcttcaggtttttaggtacagcggctaaatattgaaatgtgtggttcactttgaaaggctttattgatgaggaaagcagtgtatagacatgcatggtaattggagaaaatggatggcattctgctgcataattttagggttctcatcaaaatttcttgcagtttatctggggtatgtgtttttaggcaaaatcctcattagtttctgaggacagattgccttgtcagccaccatgattatgtcagtacttgttattctgcttcacccataatccccgttgttgtaagaatttagatttggagtcttaagtgattatgttcctactgaaaattttaaaatcatttaggaagtccattgcttgctacttactactacagttttgcagatgatggaatattttcattatcttcttacttcatttggtatctcattgtaagcaaatgaaaatgttgtctttatgaactagctacccatagcaggaatattggagaaatcttttcttaaaaagaaggaagtattttaagaagaaaaggtaaacaaaattgtgggcatgacagtgaatccctaatgggttctatgtagttgaggaactgacagtccttgatctgtcaatattcatcgataaatcatcacctctttcatgtaattgcttcttcttgtcagcaaattcctttttaagttgtgcttactctctttgattctaacttctatatctttatttataatttgcatgctctttcttgaactaaaaaccctgttatttgcagcatcattggcaaatagtagcccccctttgctacag

SEQ ID NO: 53667 - DNA, 495 bp, Populus trichocarpa
  Intron number 1 from transcript POPTR_0005s24380.1 (locus POPTR_0005s24380) derived from phytozome v7.0 (chr-ID scaf fold_5; pos 22942625 to 22943119)
ggtgaccttcaagttgttgctgatcaaaatgaatggattgacgttcccctatacatggagctcttgcagtcaatatgggaggcatgatgcaggtaaatttaatttctctaatcgttatgaatagttagagcaatatctccgtctgagtcagatcaaagatacaacactctgacaagtaggaatggcatcatctggatattagtccagacaatcctcacttgtattataaaatgcacttaaaacctaaaagctcaaaatgaaacacatcactcgtgacaaacttagttcttccattattttcttctcccagaaaaataattgtagccttcatttgaacggagtatgcagtggtgatcatagtatgcggcaaattcacagcgcaggataaatttgtggttaaacaaaaatgatcaaccctacaagaaaacgtgctcatgtaggatctcctatctttttaatgatttttagctcatttgttcacgaagattatcagca

SEQ ID NO: 53668 - DNA, 529 bp, Populus trichocarpa
  Intron number 2 from transcript POPTR_0017s02090.1 (locus POPTR_0017s02090) derived from phytozome v7.0 (chr-ID scaf fold_17; pos 1521651 to 1522179)
gtgatttcaagctttttggtaagagtgacggtatcatctttttgtttttattctcataaaataatctttttttttaattttcatctctagttttttatttattctaaaaatactttttatgggaattaagtaaacaagtttattaaatatatatatatttttaaaaaaaggccattaattttttacttaaatttaaaattatatagaaggaatattactatcacgtgaataaaaaaaaatccttatttttaaatgaagagtttgaaaagaaaaaaaaaactaattaggtattcttttagttttctagaaaaactataaaacacgtgttttgaataaaacaattttcattttcaattaataaatatttcttaatgttttgtttcttagaaaagctttctgaaaaactgaatgattttccaatttcttttttcataattggcaaacaacatttaatgaatctataatctttttttttctgtgggtgttttctcaaattttccttcagagtccagagcaatcataagatact

SEQ ID NO: 53669 - DNA, 545 bp, Populus trichocarpa
  Intron number 1 from transcript POPTR_0017s11920.3 (locus POPTR_0017s11920) derived from phytozome v7.0 (chr-ID scaf fold_17; pos 11938181 to 11938725 reverse strand)
cataacaacaagaacagcttgggtaagaaagaacaccttaatgggaataataatgatattcttaggagcaataatcttgaaaactccgacaacagcaacaatgaggccaacaagaacatcaccaacgacaacaataacggcagtgaaggcttgaaccatcaccacaaccatcaccactttgagaatgagagtcatgttggagtacatgttgggactaatgggtcttcctcatcttcttaaaatcttatcagggactgttgttgtttttgatgatgataataattgttagctaggtagagagatcataagcagggatgggtattagatgtttatctctttctttaattctccatatttttttttcaagttttctgatttttgtttctagttttaattaatgacgatcttatcactttgttgagtaaaggcatgggagagacttgatccaaattaagggaaaatctattctcttttatttgatctaatttcggttcttcatcatcatttactaatcttgttttgttgttttggccagttattttggc

SEQ ID NO: 53670 - DNA, 545 bp, Populus trichocarpa
  Intron number 1 from transcript POPTR_0005s12910.1 (locus POPTR_0005s12910) derived from phytozome v7.0 (chr-ID scaf fold_5; pos 9745173 to 9745717)
gcttctctttttattccctgtctctcttgatcaaggtgagtggtattggttcctgtctccgtatgaagttttgctctgagtgttttattgtttgtgtttatatatgatttgggtgattttagaggattttaatggcaattttttgtagtttatctgttttctgttttgatttataaagttgtcaacttttttttccccccatctttttcaaggttttgacatgctgaattatgatgtttttgtgaccgactatgatgggtcatttaacttcttctttttttatgacatcgtgcattttttatgatcatgtgattcgttgtaatggttcagtttactttgattaggttgttttatgctggatttgtggaataggttcaatttttgttatttgattagttgtaaatgaaggtgacaattttttattttggagattttttgtgcttaaggctacagagaattgaagcataaaatttgttgttcttgatggtacctgaggattttatgtgattacaggctgttgattttgagggtttttggataaagag

SEQ ID NO: 53671 - DNA, 270 bp, Populus trichocarpa
  Intron number 1 from transcript POPTR_0017s08390.1 (locus POPTR_0017s08390) derived from phytozome v7.0 (chr-ID scaf fold_17; pos 6921380 to 6921649)
acattaaagaagataagcactcaaaaagcagcatcgttaacgacaacatcagtaataataatagtaataattctattagtaataataaaatagataatcgaaaagctgataatactgagagctctgcggaggatatttcaaatcaggctcttcttttgaccgaggttagttcaagtttttcttccttcctcccctcccctttaaaatttttgagtttctatttaaagctgcgttgttttgctgatgtagttatcaaggaaggtgataaat

SEQ ID NO: 53672 - DNA, 647 bp, Populus trichocarpa
  Intron number 3 from transcript POPTR_0005s26530.1 (locus POPTR_0005s26530) derived from phytozome v7.0 (chr-ID scaf fold_5; pos 24513423 to 24514069 reverse strand)
gtagtggcattaaggtcactggaaagcgaaaaaaagcccattctttgttggttttagccttttttattgtataacaattaagcaattttccttagaattgagcaggtggtgtgaagaaattggcaatagctagacaattaaaagttctatgattagtagcttggttggtttcttataagctagcttttgagttggtggggataattgaatttacattactaacatggttgcaagcatcaagctttgtatgttagggctttcaggacattttagttgcttagtgatcaagggtggaagttcaccatctaatttggctttatctgagtcatatactggaacaatcagaggatcagtttgaaaaatcagttggattccacttcttttagtggcattgtttctttttgtgcacattggttttgtggctttcatatcatcggaagcacaattggccagtttaacataactggactatgaaatctgagctgattgcattgagaggtaactttgactgcttcggagggcaaggatttctacagattagtcagatttctgttttgtaatgatgcatttaggatcaggagttgatttgttttcttatgttctcatttagccaacttttactaacaatagagagcatcttttgcaga

SEQ ID NO: 53673 - DNA, 1038 bp, Populus trichocarpa
  Intron number 4 from transcript POPTR_0005s22230.1 (locus POPTR_0005s22230) derived from phytozome v7.0 (chr-ID scaf fold_5; pos 21210736 to 21211773 reverse strand)
tcaacccggtgatctttatccttgctcaaaatcgggtacaatgccactgtaccattgcttagattttctcttttcatttagccttatatttctttaacatccagagtactacccctttgattcagctatgttttttttaggaaaaaaattgtgtttagatgcattacaaaaatgtatttagttttttaaaaatattatattgatgtttttttagtgatttttaatggttttaatatggtagggtgaaaaaaattttaaaaacataattccaagcaaaaatcacttttgaaaagtaccatacaactgagtttgtttttgcagttcgcttttgaaaaattttaattgtttttaaattaatttttttaatgtttttggatcgttttgatgtatttatattaaaaaaaattaaaaaaattattttaatacattttcaagtgaaaaatactatgaaaaacaatttttaccatcatcttaaacacgcaaaaaaaattatattgaagcttaatttttctttttgtttttgttaattcaattttttaatattttttttctttatttttagatgatattgagatattttataaacacacacccactgaaaatgaacggagggcggaaattggaacaaaagtaaaagatagggggctggttggaataaaataaaagatgaggggctgattggaagaagatgaaagagttaggatttaattggaataaatcaaaggttttagatgaaaatgagcaatatataaacctgtggggcaaaatgaaagttacccatgaattcttagaagcctattctttcctcccggcccaaacaatcaaatggttactgcattgcatccttaatatattacatgttaatttgtgttttattatcatcatcatcatcattcttatttcaaacgagagattcgacttgaaatttgttgagagagggaagaatctataactcagtggaacgtttgtatagtttaaagctattaaatcaaaaccttgtctttctaactgcagatacattcaagctatcggtggact

SEQ ID NO: 53674 - DNA, 404 bp, Populus trichocarpa
  Intron number 1 from transcript POPTR_0017s02000.1 (locus POPTR_0017s02000) derived from phytozome v7.0 (chr-ID scaf fold_17; pos 1454302 to 1454705)
atttggtttgattacaaaggattgcctctaaagtaattattataaggattttgtgtgttcttcattttattttatttttttgctttttttgagttgattgaagggcgataaagagacccttttgagagaagttttttttttattgatttagttattattagctctaacccactattttgtttgcttattttgttgatttaagtgaaataaagagccccttttgtgagaagttggtttttcgattgtagagattattgtagctaatgggtttgggaattgttcattggactgaaataaggaaactcaattggcagaaagttggtttcttttgattgatttggctaatgggtgtttgtgaaatttttgcaggtatataccaactggggtgctttttgatcttctat

SEQ ID NO: 53675 - DNA, 1053 bp, Populus trichocarpa
  Intron number 2 from transcript POPTR_0017s02000.1 (locus POPTR_0017s02000) derived from phytozome v7.0 (chr-ID scaf fold_17; pos 1454707 to 1455759)
tgcacaacctgaaaggccttggaatttgacggtatgagtctttttttttcttttttttttactgttagtttgagtgggaaattagtattaggtaatttaggttgattggattggcttttgtgctgttcgagttttagaaagtgtggaactttgaagttgggagattaactcattggttattagcttgtttatgaagaaaattgtgtggttgattgagttgagtattattgattgacaatgggatttcaactgtagtactttcactcaaaggtttgaagaccttgggaaaaaaaaaattaatcttgcaattgaatttcatatataaatacgtgttgtttaggattcagctttaggacctgcattgcatttagggggtttcaattattctttgcaatgtggccatcccatgttgattcttgtgtgttttccccctttttgtctctaccatgattgaactttgaaaactattttttgttgagatgcactgtgtttggtcagcatggctttgttaaggggatcacatcatcaacttgttgcttcatagtttcttgtcttgctttggtgcatcttattgcttggatttctatgaaaaagatgttccttattatgtgtctgccctttgcctctcttcattttgctgtaatctggcttcttttttaacaaatttggttttctatattccttttaagtgccacatttttggtctatgtatcaaattgtctgtacatcgttggttgcttttgaagacttcttttgctgtcattggcccttgtgactggtttagaatttatactctggtctgtttgtaagtagtttcctagtgctaattgtctttgctatcatagtttggtgtgtgactaaccattctctctttgaccatttagttcttgtactgattttcttaattaataataatgattttattcatcaaataaaaagaaaaggttgctcgttttccttttgttgtgcgattattttatgaattattaattttcagtatttggttctatttctgcaggtacattttagaggttatcctagtaatttgttgat

SEQ ID NO: 53676 - DNA, 512 bp, Populus trichocarpa
  Intron number 1 from transcript POPTR_0006s14870.1 (locus POPTR_0006s14870) derived from phytozome v7.0 (chr-ID scaf fold_6; pos 12341972 to 12342483 reverse strand)
cagctgcttcgagtgattccattaaggatttggaggtatgcaatatggtttgaattttcactctctcaagttatgttattagcaggagtattttattcttgataataataataataataataataataaaaatgccatgagtttgtggatttgttttattaatgtggttatcaaagttaaattgtttctcaattacgagttttaaaattaatgattatgaaatccttttgtagttttgagatttgtggaactttaactgataatatataaaaaacaaatctagaatttgattaattgagttggaagatttattattatgtaaagtagaagtagaattaatacttttattattgcagttttataccaaatattactattactatcaagttggaatccgaattaaattcctgacagttttggtttattactccttcaaaacttgtctctcatgccccttttacttgtggtctcgtatagcctaaacctagaacagattctcagtgttatttctc

SEQ ID NO: 53677 - DNA, 806 bp, Populus trichocarpa
  Intron number 1 from transcript POPTR_0006s16340.1 (locus POPTR_0006s16340) derived from phytozome v7.0 (chr-ID scaf fold_6; pos 14267946 to 14268751 reverse strand)
cagcagacgcagcagcagccagcagcgagggccgtgtgagttaaagtttgatatttttgaaaagaaaaaaaaactgccttgtgagattgtatatgtggattttactgggtaaattactgaatcttgcaagttttcatttggaagaattgatgtcaaacaaatgggaaatttaccattttgtgggcttgattggagtttttgtttgaaagttttgatttcggagttgcaaagttgtcatctttgcgaatttttgagggttcttgtcactgttcttcactgctctttctcccattaattctaaatttcctttttattttttgcagaggtgcagtttttaattttttttccaaagagagtttgcttagttttctttgatccagggataatgggcctgatgttttgttgaggtcatcttcgaattagattataagaaaggaattctattcccccccattgagtagtgaaagaaatgaaacattcttgtaaatgtgattccttgctattgcatttattttcttttttctatcggtgaagatatttctgtgtatacaggtctataccttttcaaattagatgcctttagtgaataaatgctctgaaaatgaagttgagagaagttttggtagagacagacacacagttactttgctaccattggtcaagacacacaattcgttttccattatgactttctttcattctttcatccattatttctttcctaagagtctaagactgctcttttcttttcttttttctccttatatccaggaaaccagaatcaccaaaatcaagaccaagactga

SEQ ID NO: 53678 - DNA, 931 bp, Populus trichocarpa
  Intron number 2 from transcript POPTR_0017s07140.1 (locus POPTR_0017s07140) derived from phytozome v7.0 (chr-ID scaf fold_17; pos 5533201 to 5534131 reverse strand)
gtgtgagatggtgagttatactgtctttattttcttctacatatgcatgctgatttgagcaagttaaatttcttgcatctctggatgtaggttacaactgctatggtttatctctgccttaaatcaaaggtttctgaaggagctggaaatacaaatgatgcttcaggtttgcacaattccagtgggattttgttcaagcttttctttatttaatatctcgaccaatcagattataggacgcaggcagcattatatgcaacctgctcacaaatagttaattaccatgatgtctctcctcacaacgacaaggagtaacactttagacatacccttcttttagatgtttattcagcttgctctttgcatagaaatatgatatctgttcaatcttagataatttcttgtagttctttccttaatgctatgtggtgcattgtgccatcatgttagttagcattagaaatatgaacaatatatctttgctaacaaattacttggccacaagaaaaaaaaaaaaaaactacaattaactagattggtttgtatgatatttggagacataatactgttccaagctgctatcataaaagttgattatgaatactgttcaaggaatgctagggtgagaaatttagaattttcattgttttattttgtgccttttccttttttcataaattttatttgttgcctcctgctctagttataatcatgccaacattctttatatatggacttgggtttaactcttggccaatataaatataaattgtattataaaatcgtttttttcaacacatttgtgatcaatagttttgtacttttattggattggcagatgctccatggaaaaaaatgtatattattaaatttttttttctcaatagagctctaatatatcctctttttttttttgtaaaattgcatgcag

SEQ ID NO: 53679 - DNA, 960 bp, Populus trichocarpa
  Intron number 1 from transcript POPTR_0017s07140.1 (locus POPTR_0017s07140) derived from phytozome v7.0 (chr-ID scaf fold_17; pos 5534285 to 5535244 reverse strand)
aagtgctagagtgtgcttctcttggacataaaattgtaagtatcctgtatcttctttttctaaaaaaaaaaaatattatgtattgatattcggagctgcctgaagattatttttatggtgatagagtgcagatgatttttttttccgtgtttttaaagtaaatatgcatgaacttaaactgcaaaaattgtttgtagctaggtataaagtctgtaacccaaaatcttgtcattagatttattccagcgtgctctgttctgataaaatggttcttcaaaattaaatggtttttctctctccttcagttgtgtgaagaaatttcattttttaaatgaaccgtagtttattctattttggcttgttggaaagcctggcttcttagcctatttgaggttagaaatcctctgaatttgcatctatttgctagatttcagatgtctaaaattcacatgtaccctcttttaatatagtccttttcttttgtttaagaaaaacacacttcctaaaatggagattccattggaaactctctcccatttggaaaagtgaaaatgcgtaaaccaaaatccatataaacgacattcttttcatcctctctgtatagtagcttgttgctatggtcagttctgccctgatactctttttgaactagctgatataattccataatttcatttttggatgatgtgggattctttccccttatttactgcatgcactgagagatgcaaaagctttgctcctttatggtccttctcttattaattaatccaatgtcaaatagccatccattttttctgtggattttccttcaccctccgtaccccttctctctttttttagacatacaatgaagctataagtagtccaatccaattggtgatagtttagaactcatggatcaatgcgtttgtttgtattgcaggattacacaaattatacagttgctgtttttcctga

SEQ ID NO: 53680 - DNA, 623 bp, Populus trichocarpa
  Intron number 1 from transcript POPTR_0017s01580.1 (locus POPTR_0017s01580) derived from phytozome v7.0 (chr-ID scaf fold_17; pos 1090366 to 1090988)
gatcaattcagcggaatacaattcacaattcacaagtcccaatcctttttccctctttgtgcagtaaaaaacagaatcaaacaatgaacaaatataatgcaacaatcacacaaatcaacaccaagatttttacgtggaaaacccgatgcgggaaaaaccacgggaccggagtccacctaaaaacttccactatcacaaataatgggttcacaattgttcttcctcagattcaactaagggctacaacatatatatcatcaagaataacttaatctcggattacaacaagattaaaggagaattatttgagaaaaactcacaatactgacagccccgttttctgtcaaaacggccagcttacacaccaccaatcttcaatccaaccgttcagaatgaagaggaacgtgtctagaatctgctgtcaaaatctcagcccgatccaacggtgaacgaactggaaatcgaagaaagaacgcaggctgctctgctgcctcttcttctttctttctctcggttttcttctcctctcttctcaaatttgctactgccatctacagtagccggacatttaatttttaaaccaaagaggcagccagctgccacgtcttgaagagagattgaaa

SEQ ID NO: 53681 - DNA, 572 bp, Populus trichocarpa
  Intron number 1 from transcript POPTR_0005s27490.1 (locus POPTR_0005s27490) derived from phytozome v7.0 (chr-ID scaf fold_5; pos 25129172 to 25129743 reverse strand)
gggatttgtttttttctgctgtttgcaatgtaagtaacgttctctctgtttcttggcttttaatttcgtttatagtgttggtatgggtgtttgattactgagaaaatggaggaaagaaatgttactttttttatgctaataatggatgttttaagctttccctttttgtctttcaaatgggtcacttccctttttttcaggcttgtgttttctataattggtgttgcctactggtttgtttttgaaaatatggtgggttttgcgtttttatttaaaaagctgcaacaaggcttacctgcgagttgtggactttagtttatataatcttttcgatgatttatggtgatgatttttactgatataggatatgatttgttgaaaaaccatgttatggatctgataaattgaaggaaagtcgatctttttttttgttccttttgttctatgaggatgcttgagggctgatctttgttgggttttttttttagatgatagaaggtgagtaatgctgctttcaagatggttacggggtgtaaattgttgtgtggaaactagtagaggacggggacgga

SEQ ID NO: 53682 - DNA, 438 bp, Populus trichocarpa
  Intron number 1 from transcript POPTR_0101s00200.1 (locus POPTR_0101s00200) derived from phytozome v7.0 (chr-ID scaf fold_101; pos 194 to 631)
aatatcgacttgttaatgtaggagaagaaactacagacaattttccacagacagagaattcagcccaggcaagttattaattgttacatattttatgcagcactactgtctgcattaataggttttgctgctcaggccagcaaaaaaaattcatattttatagtttctgagttaatattgtcgatcacttttctttgtttttactgatttttctttttttttgataatagtcggggtgttttaattatccaaagacctgtctatcattgagtcgtcaatggtatcctggttacaaaacagttattaaaaatacaagtaaaagcgcattaatctgcaaagttaaaggatgaaaagagttgaagtgtaaaaaagagttgtttttactgaataacattaactctgatgttctctgcagaattcttcttatcaactggataa

SEQ ID NO: 53683 - DNA, 491 bp, Populus trichocarpa
  Intron number 1 from transcript POPTR_0005s03080.1 (locus POPTR_0005s03080) derived from phytozome v7.0 (chr-ID scaf fold_5; pos 2009783 to 2010273 reverse strand)
ttccgattccagcccttctctctctcctcccacaggttagaagaagtaccttcactttgtttaattaatatttctctgaaattgattttttaaaaaaatttcatttgaatccgtagaagatacgaaattcgatacaggttcgtgtttttattaaaaaatatattagaaattatttgtttaagtactgattatcagtttattttttttattttttgcttcagctcagacttagaaattgtaattgtgaattatttgattttattttttattgaatttaattgtttatttatctttttaattctagggtttctaaaaattttaaagtcgtttttaattaagagaaaaaaaaagagttaaattgagtcaaattcggtgctgtagaactgtagacatttgcattttatattgaaattgttttgactcaaaaaggttgttttaattttaatgaattttcaggagaaactattaattcggaggaggagagcgtgtct

SEQ ID NO: 53684 - DNA, 743 bp, Populus trichocarpa
  Intron number 1 from transcript POPTR_0005s13960.1 (locus POPTR_0005s13960) derived from phytozome v7.0 (chr-ID scaf fold_5; pos 10974581 to 10975323 reverse strand)
tcctttccatcactgtttgtcaaggtaagagagtcaattgagagggagcagagcggggttattataacttatcattatcgaagcaaaactgggcatgttttactttgattggagttgtagtaaatgagctttcttattgttgtgcggtgagagaaagagagaggctaaaagaaaaagaaagagggatcctttttctgagctctcttaagtttgtgttaatggagtcttggtgatacaaagagtgtttagagaggggttcgttaagcgctgtgtccatttaaagtgaaacccttttcctgttttctttcttttggtaagatttggggatctggattttgggttctaggtcttagctctctctccctctctttcttgggtttcttctaaatttgttttctttcttatactgtttactgaaatgggagtttggacgttctggaattgagacatttccattctgagctctggtttttgacccacaatttgttgaagtttacatctttgtacagattctgtttcttgtttttgggttccttataaaaagtctgattctttggggggggggggaatctgtgttcctttctgagcttttcttgatctggttagggttttgaaacttagccttgtttttgagaaatttgagtttttcttagatgggctaaaccaaaattgttttcgttgaatcttgagctagatttgctttcttggttttgtctcagttgattggtaagttacaagatttg

SEQ ID NO: 53685 - DNA, 902 bp, Populus trichocarpa
  Intron number 1 from transcript POPTR_0005s10420.1 (locus POPTR_0005s10420) derived from phytozome v7.0 (chr-ID scaf fold_5; pos 7476195 to 7477096 reverse strand)
tacggatccagagggtatgtataagttaagcttttttgctttcttattgattctgttgcttgtctttatgatatttggaatgtgtaattaaggataagaaaacagtgttgtggaatttgctgatggtgtgtgttgatttcttgaaagtttagtgtttttgttgctttgaatgtatcaatagtggttttatttttgtggaatattaggaatcagaaggaaaaatcgagatttaaagtgtggtaccattgattactggcatgtgctgtttgacattgaatttaggtttaataataattaactgaattgggaaataagttacggaaaacttttaaataaggcattgatttgctgtcgttgataagggttttgtaatttttcaatacaaggaaaagacagagaaagataataaactgaagggtttgtgtttctcgaagaaagattttgttttaagcattaaggttggctatagagatgagaatagtattgaaaaggtgatatttaatgcgtttattttgaaacagctatcttattaagttgttatgttttatatgaccaaaaagatgagagtgtctttgtgagttagtgtcttatatgaactaagccttaagggtttggtcactgttttgtttttgtttgttaaccccttcttgttgcatgttgcattagttagtttaaatgtttttactgcaatttgtgattataaaatttgcttttgcatttggggtttatgtgtagttctatttttaggatggatggtgttaaatacggtgcattttgtttaagagttaaagttttaggaatatttgggtgtcagggaagtgtgggttgggattggttttattaacaggtttagtggggattttttcctttttttctttttgggtttggataattgaagggca

SEQ ID NO: 53686 - DNA, 743 bp, Populus trichocarpa
  Intron number 1 from transcript POPTR_0005s23210.1 (locus POPTR_0005s23210) derived from phytozome v7.0 (chr-ID scaf fold_5; pos 22049036 to 22049778 reverse strand)
tcacctgggctctccctcctgatctcaccatcaaggtttcttttttattgctaagttttttctttcctcgccggtttttgttcagattttgagaatttcaattcatgcaagttgcgggctgtgttttgcttgtcggcgataacagtaggattttttttaaagcctcgttattaatgtaatgtggaattcaaggtttggtttacttgttggttgatttatgagtgaaaagtttttcgtgttgcttgcttccgtgaatatggtctaatcaggtgttgtagaggaatttttaagggaacatgatttgtgtttggtaatcttgaatttccatttcgcaatgctttgattgatggatgtggcttcaaatgaattgattgcataaaaatgttgatggtattaattaaacgtggttaattaagtagcagcgaaatactgcctaatataatagtttcttgagtttgaaagtgcattgatgtgcttatattctgatacattgatgtggtgaatattctgtggatccgagatccatgaagatgttacgaggctgccatgttcggtttgatggcacttgttgatttagaatcaagaatttctagattcctgttatggaaatgtctactttgtcattttcagctcgtgctgagcatttgagtgtctagttaattataaattcatttttatagtaaaatggttttctttttccgaatgatcgattcataagcattatgcacgtgcagttattttct

SEQ ID NO: 53687 - DNA, 490 bp, Populus trichocarpa
  Intron number 3 from transcript POPTR_0006s05900.1 (locus POPTR_0006s05900) derived from phytozome v7.0 (chr-ID scaf fold_6; pos 4156984 to 4157473 reverse strand)
tacaggtaccatggaggaaagagtttctaaatcagtttccaagaaatcttcacatcactggttaccaagcattcatgaagattactatggtcctaggaatcacaaacctaaacaccattaattctctcttctctctaattatgactgccctttagttcatgtccatggcaattagtactcctaatgccttttctttttctttcttttttagctgagattctgacatgagagctagcttctgggttttagaagatttaagcccttgatcatgtactactagtattctctaaagcaaatttatccccaagaaacatattataaaactgtcattcttcaatcttctcaccgatttaattaacttcgatccttaaatggggttcttgtttgagtagaaacttcatgaataacgagaaatggatcaaactgttggtcccatttcatccaatcataagtatatcgtaaatcattctccatatctatttttgcagga

SEQ ID NO: 53688 - DNA, 380 bp, Populus trichocarpa
  Intron number 2 from transcript POPTR_0157s00230.1 (locus POPTR_0157s00230) derived from phytozome v7.0 (chr-ID scaf fold_157; pos 18721 to 19100 reverse strand)
gaggtaaattttttctttccattattgtaatttgtaccttttatttatctgtcattcgttttactcttcatagcaactgaaatctggaaaagctgtcctaaaacttttgaatttggaaaactataaaatttccttcatctaaaatgctattatgatattttcatccttaatatcttagtactcttttcattgcatttaatcgtcaaaatcttgcagtttagaatgctagtgcatgtattggttagtatcgtggataaatgtgttttttttatagctgacactgtattgctatcttatattatggattatagtaaccgtaaatctgatgaaatatgttttgtttccttgtttaggagtggttctccggcctgggtttattt

SEQ ID NO: 53689 - DNA, 617 bp, Populus trichocarpa
  Intron number 3 from transcript POPTR_0005s11080.1 (locus POPTR_0005s11080) derived from phytozome v7.0 (chr-ID scaf fold_5; pos 8029173 to 8029789 reverse strand)
attctaataaattggaggtattccttgttaattaaaaacgttaaccctaaaccagtcttctcaaaaatcaataaatatgataggttgcaatgtactatataatgatatctcgttgacacagttttatttgggtagtcactaatgtagtttcctgaaatctttatcccggattagtttcctgaataatatcggtcattgatggggtggactcaattggtggttctgatactcaattggtgggtctgatgcgactccaaactcaaatagttgatattattcgggaaactcattcggtatggattgttttttaggatgaatagcattgctggatccttaaattgaagctctttatgtttcaatctggatgttagtctcctgaataatatcggccattgatgagctggactctcaaacagcaccaaccatcaagtagttgatgttattcaggaaatgcacacatgatggatatttcagaatacatagcgttactagattcctaaataaaagtgctttacgttttgatgtggttgttaaataggttagtttggttggatttttcttgcctcaattgactgttcataagcattattgttttggatctgcaggtgttggacaac

SEQ ID NO: 53690 - DNA, 699 bp, Populus trichocarpa
  Intron number 2 from transcript POPTR_0006s00240.1 (locus POPTR_0006s00240) derived from phytozome v7.0 (chr-ID scaf fold_6; pos 28211 to 28909)
ccatcggtgttgagtttgccaccagaactctccaagtattttcctttcctatttttctatgctctgctctcaatatttcttcattttcttttattattcatttcataaatacatattactgtattttgttttatttttttacaaaaaagcaaaggcacagacatgactcatatcttgagtttttttttttttttttgtatgtattgtttcgctttttgattgattgcttttgctattattctttatttccatccatttgttagtcatatgttatcttatctattcatgctaatagtttcattgttagctcttccaaacccaaaactattaacgacgatcccatccccgtttgatacttagtttgtgatgctcgtccttgttggattcctattagatagaatacattaagttattctagttcccttccctccgcttgtttgatgatatgatgaaatggaaccttgcgcaaaactatttgctcaccataccattacaactcaaagctcccccttttgtattccattcaatatctgctgtttacactttgtgtctaagcctctttatatgatttaagcttctaaatcttttgtatgctaccggggcatttaattaactgatgttcgttgcctccaatcaaacactaaaacagctagctgatcattattttattttattttattttctttttggtgaaggtgg

SEQ ID NO: 53691 - DNA, 732 bp, Populus trichocarpa
  Intron number 1 from transcript POPTR_0005s16450.1 (locus POPTR_0005s16450) derived from phytozome v7.0 (chr-ID scaf fold_5; pos 13199582 to 13200313)
ccacacatgtaagatttgatcttaacaatgttaatatctgtcttgctgttgcttgctactatctcgatgaattttattaaatcacacatgaaatagacgcaagaatgtcatcaatttttttattgacttgggtgcacgtatatggctatcggcatatgtttatccttgtatacaggcttttcaattcataatgtgctacgtcaattaactaatcagatgtgcattcaacaagcttacatattcattaatgatctgattctagcaatctatatattctattgtacaatgccgtagagcggcgaatgccacaagtatttatcatcttggttgcaaagtcagagcattggcctggtgaaattctgagagtggggatgggcatatctaaaacactcagctttctaaaatatgttaacagaaaagaaaataaattattgttcttttctcattttcaataatacagacatttattactctgtaaccaaaaccaaaccaactaccttaagacatgtactggttttgtttgatggttaacagaaatggtgaagtatgcagctcacatcagtcactattttgcataatattgagtttgagcttcgttatagctatggcttaatttgcatattctcactgcttgattgaaaatattgttttatctttgcatctgacacttattgttctctgcaatgactaaatctcttatccctttcacgcaatacagattcctcatccagg

SEQ ID NO: 53692 - DNA, 788 bp, Populus trichocarpa
  Intron number 1 from transcript POPTR_0005s03330.1 (locus POPTR_0005s03330) derived from phytozome v7.0 (chr-ID scaf fold_5; pos 2184533 to 2185320 reverse strand)
ttaaagatcaacaagctgcccttgattaataactggtacaactttcttcctattcgtccattaatttctctctgttttgggttagattccacttgtttggccattgctgtagcatcattcatgttgtctatgttattgagttttcccttttagctcaaaatgactctgtaattaattaagatctcagctaatttcccactggctcctctctttataactctcattgctcttctttgctgggctcatatttttcttcttaaatattcctgctctgttctttctatctcattatcttctgacagttattattcacttctatctccttctttctgattttccacatgttttgggctagaacctctgagctatagaccactatatttgtctgatcattctaatacactcttgtttgatcatatttagcctttatttatgagatataaaataatctcccaaagaataaaaatatgccttctatctccttctctctttatttatcagttgtaagatctcaactagtctttgactaatagtgaatctgaaagaataaaaatatggattgtcaatcaatttttgccgtctgccttctgatctcacttctccatctgaattttccagttggtgttaaataatatggttttggttttaacgaatattcatcgacatggctcttattgcttgtttgatcatatttagcctttatattactcatcattataattatatcgtttgttttcttattgcttgttacagggaataattataacaagtagaaagcttacgtctac

SEQ ID NO: 53693 - DNA, 672 bp, Populus trichocarpa
  Intron number 1 from transcript POPTR_0005s07740.1 (locus POPTR_0005s07740) derived from phytozome v7.0 (chr-ID scaf fold_5; pos 5300217 to 5300888)
ctgagcagcttaataaagcttttaaaggtctcccctttataattcttctttaaagactcatcactctttttaatgctttgtgtttgatcatgttggttcttatgttccgttccgaattccgcacttagttattttgcttgcatgatggatcaatcctttatttttgtttattttgtctttctttgttgggccataagatgcagatcataatgtaaactaacattctttattacataatttggtaatctgtggctgaaaatttagatttcgattcgttttttttgaagaaagggttagattgactttttgagtcatgaaatgagtggtatatgatcctgcagatattttgttcagtgtttgatctctatactgatctccattttaagttcttgagtttgatctgcagaaatgacagctagattatattctgtggaataacattaatcgtgcctggtaaattatttgtctttattatatttctagctactttcttgatgttgatgttgagaaccgatcaatcgtcgtataagataatggaatcttcgcaaattatttgatgttgatgttgtaattaggacataaaaaacagatctttatccattttttctttgatgtattgtcctcttcttgtactaaatgtattggtactaacgttcttttttggtttgcagg

SEQ ID NO: 53694 - DNA, 730 bp, Populus trichocarpa
  Intron number 1 from transcript POPTR_0005s10470.1 (locus POPTR_0005s10470) derived from phytozome v7.0 (chr-ID scaf fold_5; pos 7518285 to 7519014)
agtttgcatttttgcttcagtgttttctcatagaggtatgttcgtatttcattctactctttctggtagttttggtaattgcagaaggagaggaaaggccatatttttgtgtttttcatgtttggtcaaggtttgttttgtttaaacagtgaaacaatgattgattacgattgaaatttagccaatttaatattgtgtataacttctataaccagagcagaattttttcttgctacttttgttggtggccatttttttgtggaataccaggaacttactcctcttttttttgtaaccaagtggatgttaatattcttcttgttttgagttcattttcttacattttcttacatcaagattctggattgacgtggggtgttgacttaaggagatctactttcattaattttgatgcgaaatataatgagcttcattcatctcaatttcttggtgtgctgattatgtaaagttccaatcttttgcttttgaagttaagataaggttggcccccagctgtaatacaagaaaacatttgttttgttggttcattataatcctcacgggctaaaaaaaaatggatcttgtttttactggatctgttatgttttcatctcattgttcagtcttcgaaaagtcttgattcaattattctagttttctgtcaatgatgttgggaagaatttgtgggctcgcagggtttccagctgcaggattgtataatttgtggata

SEQ ID NO: 53695 - DNA, 561 bp, Populus trichocarpa
  Intron number 1 from transcript POPTR_0006s08680.1 (locus POPTR_0006s08680) derived from phytozome v7.0 (chr-ID scaf fold_6; pos 6358134 to 6358694)
accagacaatcttaaaaggtcagtttgttcctcaatctactgttcattttgccaatgcatttttccaattttttttttgaggaatttgcatgaatttgacaggtaattagaaagggtgcctgaaatctaagttgctatgcataatatatatatattgttgattccattttgtttgatctgatttgattttatttacgttggaaagctttcttctttccacaaaattttttaaagcttctctctcttatgttgactccatttacgttgtttttatgtttggtccaaggaaccttgtagtgttttaggtttgttaaagactggtttttgtaattattctgtttttgtgatttgaaatccaattggcctaccatattttattggatgattcttatgaggacacaacatgaatatctaaagctgcagttttagtttctgtcagtcagggtttaattttatattgttatttttattttctttcgtttttacatttttatcttgggttaaaatgaaaagtcttgttcttttcttttagtttttgagcttacagggattgaaggctgc

SEQ ID NO: 53696 - DNA, 574 bp, Populus trichocarpa
  Intron number 2 from transcript POPTR_0006s08680.1 (locus POPTR_0006s08680) derived from phytozome v7.0 (chr-ID scaf fold_6; pos 6358723 to 6359296)
gagtaaaatcgaggtatcttaaatgtccctttaaatgtaagaatctttatcttttacacaacgacataaaaaaggtttttgttctagatcgtctccttttcctttcctttcttttctcttattttttaagaccatggatacatttattggagaaatggggaaaaaataactttcatggcatcaacagaattttcaactatgttttgattggccagcaatgataagtgagaatacatgtgtagataaatacgctaacatacaggtgcagatgcattttttattttaatattctttggatgttcaagctatttgatcacttaaaagtgatcatccttctcctggaaataaatagacaaggaatagagtgaatgctgtttttttaatctccactacctaatttgggataattgctatatcccaaatcactgatctactcagagttactgttttttcgttgtcgtaattgattctggaatgtgtattgtcttttatcctgatcccaactaaatttggtttgctgacatggtcttctcttgaggtgtgcaggttcaagctagctggttagtttaattta

SEQ ID NO: 53697 - DNA, 428 bp, Populus trichocarpa
  Intron number 2 from transcript POPTR_0005s23440.1 (locus POPTR_0005s23440) derived from phytozome v7.0 (chr-ID scaf fold_5; pos 22198246 to 22198673 reverse strand)
tcctttacggaggtgattattggtcttatatcctcctattggattggatttggggaatcttggccatttatatccaagaaacttgtccactgagttggatttggatttggattcttctagaccctgagtactttgcattatttctacttctgcatcactatttgtttttttacaacaaaaatgtttttgggttaatggggtccggctcccatctgcagttcaagatctgccaatttgttcctttcctcccctgaatttcatttcattttttttgtttttcttcataacaaagaatgtagtatttgttttttgtgctgtttgaatatatttgattgatgcatttggcagtgaaaagagcacagctttaacatctttattgcatttctttttcaggtggcggtgaagagtggaatcacaacttctcagag

SEQ ID NO: 53698 - DNA, 993 bp, Populus trichocarpa
  Intron number 2 from transcript POPTR_0006s03100.1 (locus POPTR_0006s03100) derived from phytozome v7.0 (chr-ID scaf fold_6; pos 1976533 to 1977525 reverse strand)
ggggatttgatctgccaggtaattttttacaggctatggaaatagatgttagcaaaatgtgtctctctttcacttttttagttattttgggttttttttctgttcatagatgtgtcatggggtgtttgtgaatcatattgattgccattcatttgattacatagaatgggtggtttttgctttgtatagtgaccagtggatgcatcatgagctgaaactgttggtctaaatattgatcaataaactctgatatctatatggtcttaaacttctttgatttgtggaacttgggaaacatttattttgcatgcatggtttttgtatgacctataattatttctgttcatagatgtgtcatggggtgtttgtgaatcatattgattgccattcatttgattacatagaatgggtggtttttgctttgtatagtgaccagtggatgcatcatgagctgaaactgttggtctaaatattgatcaataaactctgatatctatatggtcttaaacttctttgatttgtggaatttgggaaacatttattttgcatgcatggtttttgtatgacctattatttttcctcttgcctccaaacaaggtgtcagcagtgtttgagaaagcaactaatttccagcgccccccccccccccaaatgtactatcaaatactaaattggacctttagggtggcgtaaagtacttgtgagaacatccaaactttttttttttgaactgtagagcattcaaactcaagtttaccaccacggcacaactgttgtcaccgctaggcccgcttttgcatttatgtgttatcccatatatatgtcctgattatgcaatggcatcttcttaagaactccttgcagctttcaattgttgtaattaagttgtttttattacatgttcttgttataagaccattttaatcataacttttctaaatcttggcttttatctcagcttgtgattgatcaagctccatccctagacctgaa

SEQ ID NO: 53699 - DNA, 362 bp, Populus trichocarpa
  Intron number 2 from transcript POPTR_0017s07620.1 (locus POPTR_0017s07620) derived from phytozome v7.0 (chr-ID scaf fold_17; pos 5925928 to 5926289 reverse strand)
ttggcagagcctgtcaggactggggcttcttcgtatatctcatctcttttcatgtagcaagtaaagctcttcatgttatagaaatttgatctttgatggcttgacgtgatgtcgaatgactctctcagcaactttgaggactgaactagttgacaagtgcatgccatgctctgtattttgttacacatattcatttgtaaaaaactttaaacaaactattaaatataagtaaaagttattagatatataactggggaatgcaaatgcgaaaaacagagcaagagaactaggtatttttctttgatttataacgtaaaagaaacttccatccttcatatttcttaattattaggtgatcaatc

SEQ ID NO: 53700 - DNA, 281 bp, Populus trichocarpa
  Intron number 1 from transcript POPTR_0006s02090.1 (locus POPTR_0006s02090) derived from phytozome v7.0 (chr-ID scaf fold_6; pos 1357267 to 1357547 reverse strand)
gtcgaaacggtatgatatatatttgtgcgtgttaatttatcttttaatgcatcctcttaatttggcttttcttctttttacgtggaggtcctatatatgtacaagttcttgataatctctacagcggattcttccatgtcagaacatgttttgagttcttccaatctttctgtctataaatttatcctgagattttctttgtttttctattgggattaatcatggtgaggtcctatatgaaatgcatgcactaactagtactgttacagaaagttacaacg

SEQ ID NO: 53701 - DNA, 521 bp, Populus trichocarpa
  Intron number 2 from transcript POPTR_1399s00200.1 (locus POPTR_1399s00200) derived from phytozome v7.0 (chr-ID scaf fold_1399; pos 4018 to 4538 reverse strand)
caaaacatgtctaaaaaagagaagacaagttacaagggtgtcttttatttctttatgtacatgtattttaaattatttgattactagaattaatgaaattttaaataataaattataattttcaatgttaattaatttagctctggtcatgagagcatattcatatcgatcgttcagagagctggggtaataacatgtttgacactgtcactcagaaaccactctctattagtttcagataataataaaatataattgattgtagttaacatattatttatataaactgaatgtaaaaaaatatattaactttatggcttgtcttgttagatggtgtggggctagacatttcacagtaaatgccactcatgtccatgagttttattgggatgagttggatgcacagtagccgtattaggtatatattacaaatgtatttaattttttttgttattttaaggttaattatttaattttaattgattatttgagataattgtttatatgttatgataggttat

SEQ ID NO: 53702 - DNA, 821 bp, Populus trichocarpa
  Intron number 2 from transcript POPTR_0005s14480.1 (locus POPTR_0005s14480) derived from phytozome v7.0 (chr-ID scaf fold_5; pos 11534840 to 11535660 reverse strand)
ctacacaagttgcttggcaacaggcaagtgcaaatgtctttatatcatatagtatatctaatatatatactattgtggccgctacttaagttaatatttactagcatcaatgttaacgtttaggttttgaatctaaaaaataggctatgaaaaagaaataaaatatcgttcgtctatcccaagagtcgacataaaagtattctatgtgcgtggctttgaaaccaatctagattttttaattttttatttattttttggacaagccagagtattcactaaagcatctaattaatgagaaaaataactcagaatgaggaaacagaaatacaaagatataaaataaagattgcgaacaacacaaaagaaatcataggatggagatgatgatgaagtctatatattaagaaaccagccttgcaaaccatgcaattgaaatataaatactcaatctgagattattgaggaaaagaggtaaaaaaaacaagggatgaagaagtggtactgttgccagtttcttatgaaaaatcaccaacgccagccaatatcaaaaccaaagaaaagtgaaaaaagagagggggagaggcgaaaaagttaagaggaaactttatctatctatctatctatagaaagagggattttttaaatgtcgataatacaaattatattgtaatgaagccatttaggttatataaagagaaattttttgattcagttaaattaactcaattaatttcacatatggtgcatgatatatgtagatataacatattactttttgttacacaggtggtcattgattgccggtagacttccaggaagaa

SEQ ID NO: 53703 - DNA, 751 bp, Populus trichocarpa
  Intron number 4 from transcript POPTR_0005s02340.1 (locus POPTR_0005s02340) derived from phytozome v7.0 (chr-ID scaf fold_5; pos 1519231 to 1519981 reverse strand)
cctacgctccgacttcttcatcaatgtaagcaaaagtgtttctttctttgtctgaaatgacattttaatgatgttattaccgtgtgctttttgttaagtagtgattttttaggtttggatttcttgattgatgtggtttgttgttattgttatgtgtaaatgatgagaaagttttgtatgctgtcgtagaaatgcttagtctgtttgtcgtaatgtagtgggtgaaaaatgtggttttttaaaacaaaaggtgttattgttgtttatgaatatggatgatggtgcatgcctgatttctccttacgttttgatttcctttgctgttatggttttggatgcatctctagactcaaatctggttcagtttgctcttaacagccactagttttactgtaagatttatgtgggaagaagtggatagttctgttcaggtattagttttgggcatttggaatgatttaaagattataagaaagaagtagttatgttattttgaatcagaatgagagtttttatctatttgtctctgaacttgttagagatagtaaccaggaaaagaaaattgggcttttggattatattttttatgatgcttcaagataagatctagtagctatttgtctctatgttttttcatttagtttctctaatgggaagacctgtcaaatgctttttacgtgttgttcttatggaagcttacatcctgatgtgcttttttttttgaattgctggttctacagatccaaacata

SEQ ID NO: 53704 - DNA, 951 bp, Populus trichocarpa
  Intron number 1 from transcript POPTR_0005s05480.1 (locus POPTR_0005s05480) derived from phytozome v7.0 (chr-ID scaf fold_5; pos 3627101 to 3628051 reverse strand)
tcgtccaatctgatctctcgtctctcactagccaggtacgtacttacttctccatataagaccaaatcttgcattttttattttggtttttttattgtgtctgatactgagaaaaaattgaaatttcttgatctgtgcagatttaattttttcctaccctagttttgacactgtataagccctcataaattggactactgtgcctgatctctttttgtttttggggatctggggctttttaaaaatcgaaacttcgaatttatatatgtaattcaattaaatgaatggacaatttgatcctatgctatgttagtgccaagagaaatggaaaccctgaaaggacaaaaggttgcttttcgattctgaaaccaagaagcttaccctaaagagagagagagagagagagagttcgaaaccatgatagttgaatcaggttttatagaaaaaaagaggaggatgaacttgctcaatgataaacttggaaagcggaggatgattggagcatgattttttttaaatccagcttgtcttagccagctacaagcgatctttacatgtcaccgaaaaggactattttatggttatgattagtcaaacggttgcttcttcactttaattctcagctgctgttattgagctgcaagtgttcaatatgttaatgtatcaatatatgctgcaatgctcgtggaattaaacaggattgtttagtggcacctcgttgttttatgttctttagtgattgactggcaatagctagtgacatgatgtcatcctctgagatggggttcttgttatcattttgtttcatagttttgagatttactttgagtatgtatttcgttgttgggtattgttttgaaatatatattattctcttttgtaaacatgttttaatttcttgtttaagttgtagatctctcatgcatttttaatctatcaaattacagatag

SEQ ID NO: 53705 - DNA, 317 bp, Populus trichocarpa
  Intron number 1 from transcript POPTR_0005s26130.1 (locus POPTR_0005s26130) derived from phytozome v7.0 (chr-ID scaf fold_5; pos 24219866 to 24220182)
ctaagcgcttgaagaggaaagtctacactaaaaaggtatgttctttgaaattctgcttctctgattgtccttttcaatcccctgtttggatatgatacgtggcactttcttggtgattttatttttgttaatgggttttgattgctgggatttatctgcaattttagctctttaacgggttttagattccttttgttcttcagatttgaccatgttttctcttttaccaaaataaagattctctgtttgctgattctcttttattttcttgaatatatgcagagaagagaggatttgctgaagattacaaaccaaat

SEQ ID NO: 53706 - DNA, 442 bp, Populus trichocarpa
  Intron number 1 from transcript POPTR_0005s05330.1 (locus POPTR_0005s05330) derived from phytozome v7.0 (chr-ID scaf fold_5; pos 3533447 to 3533888 reverse strand)
catcatcaaggtaaaaacaatatatatgtacacatcaagatattgtttttgattatatatgcttcttctatttccattccctttctctttcagtcactaattaggtattggacttggttttagtataattactctattgaagttaatcagttggagatttaattaaagtgaatttagcaagagtacttgaagatatgatcatgatcaatcaaaatagtagtatagcttataagttcttcgtatcagcatctcgtacagggattttgagtcatatatttgtgtggacagcatttaaagaaacacttgtttgtgtactatacaattagataataattaatggaatagagaaaataaaatgctaatgatatacaggttattttggttttacacatttatgatggctacaggaatcttgcagagtttggtttcaaaaggagtactg

SEQ ID NO: 53707 - DNA, 195 bp, Populus trichocarpa
  Intron number 5 from transcript POPTR_0005s09010.1 (locus POPTR_0005s09010) derived from phytozome v7.0 (chr-ID scaf fold_5; pos 6327807 to 6328001)
ccaacagttctaaacccccttttgttatagtaattattccatctctagataattcacatactttctacacgtcaaagctactgattcaatgactaataaatgaagggttaatcttcttgtagctgacttcatttttctgtgttttttgattgattttttcttcattatctggtctgcagttgcttcccccaccaa

SEQ ID NO: 53708 - DNA, 619 bp, Populus trichocarpa
  Intron number 1 from transcript POPTR_0005s08330.1 (locus POPTR_0005s08330) derived from phytozome v7.0 (chr-ID scaf fold_5; pos 5738837 to 5739455 reverse strand)
gcaaatccagtgccgtatttgcctcgaaactgacggtaattacctctttaattgctttatgctaactgtaaaagtcgtcgcttaggtttcaccattctagtattctatttgtagtatttacttgcttgtggatgtacaaggttttaggtcaaaagagtgaaatatttctttttaaattcaatttgacaatttgcggaggttttacttgcgcacttgaaaatgatatttttattttacttacaattttgcttagttgttattgtaatttgtgttagctggtgatgttataaattgttgttgcttggaattttgtagcttttccaatttttactttaggggattttaactaaaattgagaatcttgctggtgaaatatttagagttaatttttatttgcatgtttagaattttctacatcttgtttatttctattattattgttgctatgttgactgtttattatagatgttgcttagagttcgtagatcttggaatcttgcaagcttggccttgaatttagttaaaaaaaaatgtgaactttgtaaaagcatttgacttttggccctggatttttggttcattgtgttttcttttcctcaggtagggattttattgcacc

SEQ ID NO: 53709 - DNA, 795 bp, Populus trichocarpa
  Intron number 1 from transcript POPTR_0005s08610.1 (locus POPTR_0005s08610) derived from phytozome v7.0 (chr-ID scaf fold_5; pos 5990765 to 5991559)
gagatttcgagatcatttctggtcgacttgctgtaagtcaattcatctcaatacgtctctctgatttttaacgcagttattaaccccttttattttgtttgatgagtgattatgataacctttaatagtactaataataatcaacaataaaagaaatttaagatatgatttgtagccatatccccataatttaaggaagtaatttaaaagaatcaagttacttgagaaaaaacaaatcgatcccatgaattaatctgtgctcggatttaacctcctgtaattggatattggatcagtagttaggaatcccttcacaaaatcaatatttgtcaacttgatttaatctcctccattttttttttctagctagagttgaagatataaagcatatcgatcattcaacttaggaagattgatcttctcccttaagatgttttcttattctaaatggtaataagtgttgcgttttcttatttatagtgcaaattattgcgattttgagtttgaagagtctccatatatagccgaacaaatcacctgctagaaaaaaacactatccagctcctctcttctttgatcaaaaccttaaaatccccagttttcctattccacccaagacagagagaaacttatagaacataaactcaatctgttcactcagtttgatccttgtcaccttagtgcaataagaacaattgatgcaaatttgtaagcctttcactaagaatcacttttttcatggaatgaatgtttcctgcagattgtgtttgcagcaacagtaacaacagaggtggt

SEQ ID NO: 53710 - DNA, 601 bp, Populus trichocarpa
  Intron number 1 from transcript POPTR_0005s04700.1 (locus POPTR_0005s04700) derived from phytozome v7.0 (chr-ID scaf fold_5; pos 3156607 to 3157207 reverse strand)
tgtcccttctctcttttcactcagattcaatcaaagtaagtatctttctcaattgacatcactttctttaaccagccacttccctttcagatcagtttttcgcttctgttttgtcttcaaagctaaatatcttgtctttctcaatccactgccctctttttctttctttttctccacttgggctcagatcatttttgacttggctttctagttaatgaatcttcaaagggcctaaattttgaagattaggtttcctctgacttgtttttatttatatacctgctctagggttctaagggtgagctcgtttgaactgtaaagtttctatctcccgatctttttttttctcctgttttttacttttaattctgatgtttttgtcaatcttgagaattatgaatctgggttgaggattttcttgattttggaatgggagttggccagttgagctagtttgacctgtgaattttaaactctgttggatcatgtagtagataggagttagtgcaaatttgttattttcttggattgttttaatgcttagtggttaatttattgatttgcagtggttgtttgctgattcttgggaaacccagataga

SEQ ID NO: 53711 - DNA, 580 bp, Populus trichocarpa
  Intron number 1 from transcript POPTR_0005s18850.1 (locus POPTR_0005s18850) derived from phytozome v7.0 (chr-ID scaf fold_5; pos 17213264 to 17213843 reverse strand)
ctttctgcttctccaaggtacgtaactcaatcggcgcttgttcgttaattattagatcatcatggttgattatgtataaatttcactcttttttttatatatttacttcacaatgcaataatgatgaagtatgtttgaatgtgtaatcggtaaattcaagtagtagttcaaaattacacgtcgctgatctaataaaatttaatacaagacgcgtacgtctattttttattttgttaaacgacttcttctgagttgtgctgttgattatatatagtgtccattttttagttctttaatacatgtagctaacttgccaaaggtcgctctcttgtttattattttcaatcaatgatgattttaatttaaaagcaataagttcatattgccacttcagtttaggcagtggaaagagttgtttatgatgattttatactatttcctcatgattggatttgtgggctacccactacccgcttagcctctaggcaaattagggatcttttgctaccaccacttatactaaagaacaaaatcaataatgaattttggcttttcaattttgtttttatcaggtacttga

SEQ ID NO: 53712 - DNA, 808 bp, Populus trichocarpa
  Intron number 1 from transcript POPTR_0017s13530.1 (locus POPTR_0017s13530) derived from phytozome v7.0 (chr-ID scaf fold_17; pos 13648807 to 13649614)
tctgccagtgttctttcgatctcctcttcgacgtatgatattcacttcacttcttgcatccccatttcatattctcgtccatataatgagtttttttttctgtttggtttcttttgtttgggatatagtttgctattttcatgatggctctgttggtttcttagtgaatggaggactctatctgttttcttcttcattcgggatttttattttaagttacccatatagcttaaaaacttgttggagtgaaggaactttggtgcttttgttttttttatgttgaattgaagttttaacatgactttatatgtagggctctttatagtggcaatgatttggtgaacgatgaccaatttattgatgataacttgcaattgatagttgcccctgaaaagcaatgagtatatgcttgaagttatattaaaagttgagcagtagaagtttcaaagtggactgtgagaaaatgcattgtactggttataagttaagctaaaagtcctagctcactaactttgttatttagatggattttcaataaattcattatgtggtttttgagaagttggaattatgtatgtgtagaatagttatatttacagacacttgatatatgttaggttctgctgcttttttctgtgttgtttgaattattacttttaatgccccgtatatattgaaatggtgtgtctatgaaattttcattgaaaagtttgtattcttggagtttcttttcccagttttgattcactagcttgttttaatgttgacgacaggctcccaaaagaggtgtgaaggccccgctagcagc

SEQ ID NO: 53713 - DNA, 632 bp, Populus trichocarpa
  Intron number 3 from transcript POPTR_0006s08830.1 (locus POPTR_0006s08830) derived from phytozome v7.0 (chr-ID scaf fold_6; pos 6497970 to 6498601)
gccagtcagtttttcctctattttacatattatctgatttctcagatgacagaatccctctctctctgtttttttgttcgcaatgccttataattcaaaatactgggttccctgtagtttgttcaaatagatgctttatgtcccttcttcgcctggccctttgttcaaataaatactgggttccctgtagtttgttcaccttattggttgatattgttggcacttggaaggggagtcttttgtactgtgggtagggtaacactctgtgcaacacaactctataatgtgatgtctctctttctgtttctgtttattgtaaattgttacattttggaacttattgataaagttggaaatttgtagatcatctatatgcatgggtttgtatcatgacatgttctatgagctatatgtcttttaatgaatgaagagtgacaaatgagatgaaattatgcttgtggagttattactttctatgaaaatgtgatttcatcttagcttggctctgttacttatcaatatgcaataattcagttcattttgactctcttgtaagttgagtttcccttatctgcttgatatatggatatgtggcagatcttcactcgatcgggggtttggttcctctcctt

SEQ ID NO: 53714 - DNA, 972 bp, Populus trichocarpa
  Intron number 1 from transcript POPTR_0005s20450.1 (locus POPTR_0005s20450) derived from phytozome v7.0 (chr-ID scaf fold_5; pos 19499371 to 19500342)
aaaaacccaataactctgacagtcttctcttcttggtaagtcagtctcagtcaaccgtttcttctttctttctcacttgtcattaattctttcttgttaggtccattctttcagtttcttggttttcttgattttgattgttatgttttttctctttttttttggctttaagccttaactcatcctttattgctatttgagctcttagtttcctttttcttctaatttgttttttattgtcttcccactgtaaaacctctagactgcgattccttggactttgcatggtatacttgatatgggttgtttgctggctgacgaatttagttggaaaaactgcaagtgctaagttaggttgaagtggacagttacagtttttagcatatcaatccggccaaaaacgttcttttttctacaggtttcctatggtaattcctgtcgtgggaaactcaagccatggcttcttcttttgaatcatcaacagtaaacaatacatatctgggttgcttgaagaacatggattatttatgattttcaatttattcagaaatttacggatgcctgcgcttgtgcaaatgagcacatccctgattcttgaatttaaagtttggtttcagaaaatgaatacttatattcctctttattacatgcctctctgcttgtatacatgcaactacatgtctcaattaagtgttttccacaagtctcggttcacttcctttgaatgaatttatcggatccaattcccatagtacagggttcacataagaattatccagtgtaacagtcataaaaaccctgttatttgattgcttgataaaaatattattgctggagtgttgtttagttttctaatgggttatgagagtggtatttatccattcgagtttcttttagtacacaaagtgaatgatgttaagctgatctcttgatgcagttcaagcccagaccttgacataactctctgttgct

SEQ ID NO: 53715 - DNA, 448 bp, Populus trichocarpa
  Intron number 1 from transcript POPTR_0005s11610.1 (locus POPTR_0005s11610) derived from phytozome v7.0 (chr-ID scaf fold_5; pos 8418799 to 8419246 reverse strand)
aaaagggtggcttcattgtctccagccatttacaggtatatcttcttttacgttttgttttctaaatttaacaattacagacctttattgttaaattccctatcggactgatctttttccaaatgaaaaatacatgtttccaactaaaaaaagataccatgccaaggcaacaagtagcaagcaaatcaatcaaattatttaaaatattcataaaaacttgtgtgaaataattaaacaatttttttgagtttttttattatataatcttgattagaaacttaaaagaaaaattaattcagtttggtttcggattcttagaaactgaaaaaactaaaccatgaacttgatgctttgaagatagtagacagtactaatattaaatcaatatcctgatttatgatcttataaaacagggagaggcagttcaagactggcgtgaaatagtgac

SEQ ID NO: 53716 - DNA, 670 bp, Populus trichocarpa
  Intron number 1 from transcript POPTR_0005s20990.1 (locus POPTR_0005s20990) derived from phytozome v7.0 (chr-ID scaf fold_5; pos 20119621 to 20120290)
tataatgtattgtgaacatatcctaatcccagttttccttttctttctgtttcctgagaaaatcttttgagcctccttttgatgtttcgttgtgtacgtaatcttgctgggttggtctatcgattccttttccttgctgctaactcacccccccttcaaatcttcatgcggtgcctactcagtggcgccattttagtaggaaagacgcacctgaaaagtttgaaaaaacacaaaaaccaagcatcggtgcctccttacaaaaagtagattctattagttacctcaaaagcatttaaggatcaaacaacattcacatctctcgaaaatctcgaaaaagacaattgaatatcataccagttatagtcctacagcatcatttctatatgaaaacttgtcatggtcaaagtgatcatcaacttaaaaaagctctggccacccaagaatcaatccttgaacaacactacttaaaattagatgtacactgatggaaaagacatgcacacatatgtaatcatagttatcgagaaatttacaacgtaatttatgattatatagacacatacatacacatacaagcatgtatatatttcatgcaaagaacagtaattaatcttcaagtaaatttgggtttgcaggtacacgcttctgctcttcctctttgaatacagag

SEQ ID NO: 53717 - DNA, 448 bp, Populus trichocarpa
  Intron number 1 from transcript POPTR_0005s23470.1 (locus POPTR_0005s23470) derived from phytozome v7.0 (chr-ID scaf fold_5; pos 22213699 to 22214146)
tgacaagaaatcatcgagacaaaagaaatctaaaggtaataactatttcttgaaccaacagacctattatattacattctttaagaaatatttaatttcctgatagtcaaataaaagcctaataacgttaattcatgtatgatgattgaatggaaggaagaaagatggatgtgtaacgaatgaattctggtcggtactaaggaaaaacctagaaagtccaggtttttaaagagacagacatgctaagaagaatcttaatgggctgtttttgctccctctgatgctagttgttgtattgttaattgttccataaccattttgttaatcattttggtatcctgtgttcatttcttctattcttgagatttgtttttggttactatagaaagttttgagattacccatatgaacaggcaagtctggaaagctcaagagtggtggtgctgtg

SEQ ID NO: 53718 - DNA, 409 bp, Populus trichocarpa
  Intron number 1 from transcript POPTR_0005s05900.1 (locus POPTR_0005s05900) derived from phytozome v7.0 (chr-ID scaf fold_5; pos 3874128 to 3874536)
ggtccgacttcagaccccataaatctaaggtaataacttaacatgggttttgtttatattttgatgtcatggattgctggaattttagtttatgctcgtgttcatgtcttctgggtgtttgttaaaatgcctgtgtgaagcaatgggtttttggtcaggctttttatgggttttagagggcggttgcgattgacacaactgtgcaatcctggatgcgtgttgtgaccagtgcatgattgtgggcccgacatgatatagtcaggattgcagagtcttgtcggtggcctttaataccattgttctatctttgctatttatatgtagtttctgcatttgggcattttgtagacagtttaaatcttagtgttttttaagaaattattttctttttgttaccaggcagcctcaa

SEQ ID NO: 53719 - DNA, 549 bp, Populus trichocarpa
  Intron number 2 from transcript POPTR_0005s12420.1 (locus POPTR_0005s12420) derived from phytozome v7.0 (chr-ID scaf fold_5; pos 9169811 to 9170359 reverse strand)
tcttacttcaagtttatacttcttaatttatcaaggtaagtcttggttatttagtgattttataggggcccaatttatttactactctactagactagacagtccctttttcccccccttctgtttgagtttcaaaatccctttactttgttttcttgtagggtttttcttatattaatctcttcttaagtcatctaatcataagtatatccactgctccatcacttgcttacgtctttaggaatacgagttgaaattagtgaaatgggttggtgagttttgcacccattaacgtcaaaatcggaataagagagcagagagtaataatcttattcagttgctacctagtgattggctcttccatcatgtttgtttctttggattggatgggctagctgaattagggttggaaattatcacaggaagatccatggtgattttgagatcgatcggctggaagctaattagatgcagtgcttcaagaagatatgtgttaaggcagcttaagatcaagatttgagtccagggtttagatagcaattaagttac

SEQ ID NO: 53720 - DNA, 954 bp, Populus trichocarpa
  Intron number 1 from transcript POPTR_0017s10130.1 (locus POPTR_0017s10130) derived from phytozome v7.0 (chr-ID scaf fold_17; pos 9368174 to 9369127)
ttgttgatcttgctgctgcccttcctctccctcaggttagccatacatacattatattcataatctataccaaggatttttcatgagttcctatattgcatcgacaatgaataatgtaatagtttgttcctggttatgtttcggattagattgttgaaagggtaacatgattttcaatcatttaaaatattaaaagactgatttttttcttaaggaaaaaaaaataccttgttgatccaataacaacattcttggtaaagggttgaaaaatataaatgggattcagaatgaatttcggaatgaaattgtgattatttagcaagaaaatgaaatggttattatattttaaaagaccactgctggtttttttcttggttctttaggtttgaaaattccagtatttgcaaaatattctactgtgaattttgatgcaatcatgccaacaacctgctcgtttctgtatccgctaaaatttgtatttggtatggaatgacaagaacctcatattaatttactttgaatattgaattgctggacacattctgtcattttcacaggctacttgccagttgaaatatgtatgattgcgaattacagtttttaactcaaaagattctaatgattccaattatggtcataaggaaaactatgcctaatttacaatgtcatttccactacgtttgtgactaatgctaaactttaaagctacaatcttctcccactatgggaccattgattaatttttctgccttcaacttaaagttctagacgcaatcatctatttattatgcgtattggcaaatgatttatggattgacgcaatcaacttaatttttctaggattcatcattgactgttctatagcccagcatgatatagggctcgctgtttcttaccttgatttgcttgattttgacagattgtgatttggttcataattacatcagtgctgaa

SEQ ID NO: 53721 - DNA, 694 bp, Populus trichocarpa
  Intron number 1 from transcript POPTR_0005s22840.1 (locus POPTR_0005s22840) derived from phytozome v7.0 (chr-ID scaf fold_5; pos 21724096 to 21724789)
atcttgtctaacctcaacaagaaatccagactctggttagtgttctttctttcctggcttctctcaatttgatcatttcttttatggctttactgcctgttgaagtttttgctgactagtagtggtattagatttctttcttttcaattggctgttctttaacttgtaattactgctccttttgttgaatgcttgtttgggaaatttgtgtttatctctaaatatatgttaaccgggtgtactcaagtttgagaaatgaattttaatggcatttacctgcaagaaaattgaggatccatggctgatactgtgagagatgccattttttggatgatacagattcttagctgactttactactgatcttctatcaactgggttgagttctttccttttctttttcttacaggcacatgcttctttcatttttgttcttgtgcttggattgttgctcctgaacttggaatgagactcaactttattcctttttagtagggatgtgcttgtttggtgacaaatagtcgcctcccctttcgaacaatttatccacagatctttatgatgctcttacttgtaactgaattattgtggctttgttttttgttattacgtgctagttgaatttgttttgaagtatcctttttgctaatttttttttttactataacttgtatttctcttgaagattgcaatc

SEQ ID NO: 53722 - DNA, 545 bp, Populus trichocarpa
  Intron number 1 from transcript POPTR_0017s02450.1 (locus POPTR_0017s02450) derived from phytozome v7.0 (chr-ID scaf fold_17; pos 1773780 to 1774324)
caacggtaaagcctgaatcttttgctttttttattgtttatgtgatttctgaattgggttttggtttttgttcgtgaaattgagtttctttgattgagttttgtaatgggattttgttgcttttgggttcgggattttggatttgagaaatgtagtggtttctgtgttagattttggaaatttagtttgtgttctatgatgggttttctatgtttttggattcgtggcttgagaaagtcggtatcttttgattaattggtaggttaatttgagatttggatcttaatcttgcgattgatgttttattcctattcatattctgctgaatttgattctatggagcttgaaatggctaatcctgacctggggttttctgtatgattaatttctggtaccttacattggattttttgctattcttatctggggttcttcagttatggctattgtagtttcctggttaaaatacttctgtgtttgattttaattcattgtcaatatgtggtttaggttggagtcacaattctgtttccaaaagaaagtat

SEQ ID NO: 53723 - DNA, 823 bp, Populus trichocarpa
  Intron number 1 from transcript POPTR_0005s20110.1 (locus POPTR_0005s20110) derived from phytozome v7.0 (chr-ID scaf fold_5; pos 19147311 to 19148133)
ctctgccaattcaggtagcttagcctagcttcaaagttttattttatctattgatgtatatgtgttatcatatgcatgcatgtgtattgttcttggagattatgttactgtacttggtgaggatatcttgtaactcagaggctttaaggaaaaatcagcttcttgggggcttgatttgttgttttttattttctaatttcttcttttcatctccctttttttttccttgaaaaaagcaggaaattaaggaaatgaaatcagatggctagattatctatcataatctattttcttttctagtgtattagatttgaattagctgcataaaaatgtctgatataaattacttgttccagagatttccagcttgctgcatgtgttttatatcaagccctaattcaaatttattatttttttctggagaaaaccgaggagaaaaacaggcgaaagtgagaaagaatttgtgaatgacttccttaatgttgacatggaagataaagaatctatacagcttaattttattattggcctgtgaagatgaatcaaatctagtgcgacaataatttaattataaagaatatttatgactcaactatattatttgtttgtcagtatttaattattaaaataagtcagatttaatgtgacacctgagatgagacaaattaaactatattcgtgttctaatgtaaaagttgtgaagagcatagtgacaaaatacgtggaatggattggcattgcagcagttattcgggacttactttactcttttgggatctcactgtaagaaatcctgggattgcctgtttcaggaagctgtaga

SEQ ID NO: 53724 - DNA, 665 bp, Populus trichocarpa
  Intron number 2 from transcript POPTR_0005s21860.1 (locus POPTR_0005s21860) derived from phytozome v7.0 (chr-ID scaf fold_5; pos 20917213 to 20917877 reverse strand)
aacaagaggtctcactctccctctctttctgtattgttttgtttgatttttatttggttcgatttttaatcatacgatagctatctgtttgggtaaatactttgatttgttttttaagtataaattcccctttaaatgggaattgctgttctttcctggttatatccgttatttttggagtatttttgcatgtagcacgcatgtttcttagtggttttatagacttgtgggttggtagcactcccttgtaaaaagaaaggtagaactctttaacatttacacccccaaaaggaaaattaaaatgtcttacgaattcatgacatgattattttttgataaaaaattgtttgggaaggtatgattgctttgggggtcattattgacatgctagagggtagagagcacaatgaaagctggtgaactttggaatttgagatgaaatatctgggatcatttgtcattgatgtttcaaagcgaatgagaataaattaattaatcatatgatttgttgggaatttacaaaatctcttcagattttggttgagttttaatttttgaaattagtcatgattgattaaagcatcatttttcccccagaaagactaatttaattgtcttcattattcttagggctggtgaactatctgcagccgagttggataacc

SEQ ID NO: 53725 - DNA, 832 bp, Populus trichocarpa
  Intron number 1 from transcript POPTR_0017s12810.1 (locus POPTR_0017s12810) derived from phytozome v7.0 (chr-ID scaf fold_17; pos 12991889 to 12992720)
ctctctctttcggatccacggtgtctggttttgaggtcagttcatcttgtagtaatttggtggttctctctatatcttcatcatttggttgcccattaaaaagttctttagtaagacatgaattattcgctatctcatttcttttctttatttgtgcgtgtgtgttaagcatgaatctttgatgttttatattgatgcagtgaaaattacatgtggccgtaataacttgttttggggttaacgtatttttaaggaaggttgtctattttttttttccctttccttctatatggtttgatagttggctgtgatcacagggaaagacaacagtgtttcagatttttaaattaaaatttcaattatagattcatcttttgtgtttttgatacgagtaataataccttgtgatgaaagcacgtagctggtaaagcttgaatctttgtactttttatctcggttacataggaaattaatgcaactaaagaagggggcacggaactatctataattttgataatggcttgtttattattgaagtcaattagtcatgatagtgaatgactgctatctgattctatcaccatggattgagcttctcttttgatgttttaacattaatgttgtcaattcttaacttgtcatgattttttactcatgattggattttcattgatgtgatatgactattatattatatgaagactaaaatgcatctgttggagttgtgggaccaatgtcttcacaaaaatgttcttcttgttgttgaaagtttaaggatttttggttatcatgtgcagtggcctaataggaaacagcaagctgttgtgaaggt

SEQ ID NO: 53726 - DNA, 878 bp, Populus trichocarpa
  Intron number 3 from transcript POPTR_0017s14180.2 (locus POPTR_0017s14180) derived from phytozome v7.0 (chr-ID scaf fold_17; pos 14333017 to 14333894 reverse strand)
agaagaaggctgtggtgaagaaggaaacccctgaggtattattgtatatgctttaccagaataatgcttcttttctgtttcttttatatttgatttttgatttcacgttgaggatgtttgctggatgcccatgatcgttattaacatgattttcccaagtgtaagaatgccacttctatgggatctactgaatttctccaacgttgtttatgaataggataagagaagttgatctgttttttagctttatggaatcaatatgaaccctcctcgcttcaatgtttcgctgctcctgtaaagccttcaaaactatctaaagcatgaattttgattcagtgactttgacccatccgtatattctccagaataagatttcttgtactaagggctgtgtggtgtgtgtgtgctcaatgtcattcctcattttgattttttcttcttctcttgtatcctgaatattctggtgaaccatttttcctccgaagtttctcttcaataaatttgataattaacataacttcaatgcaaatattgaatgctgtggatcgccctgtttgtttatagaatataacaatactgcctctctttttttctctttttatttaagattagcagaatgcttattgatgatgtttttctatggctcatttgtgtgctagggtcattagtgttgttcatgttgccaacaagatagaaaccatactatattttaataattgtttttgcatggtaatcggctgttttatcttctgcttgtttcctgattttgtttgacatattagtatcttttagtttctttgtgtggtgttcttaattaaaatgttctgtcttgtatatcagcaggaaggagaagcaactacagaagaaacaaagaagag

SEQ ID NO: 53727 - DNA, 485 bp, Populus trichocarpa
  Intron number 2 from transcript POPTR_0006s15000.1 (locus POPTR_0006s15000) derived from phytozome v7.0 (chr-ID scaf fold_6; pos 12478212 to 12478696 reverse strand)
aagaagtcgccattaagctcgtaagtttccttttaactaatgtgatttttcgttttgattattttgttcaattcctcttcgtttttcctttttttattttatgttggattcagttcagttaattatttaatttgattttgctatataggtggtctaattaatgttgtcactaatttcttttagctgcaggggaggatttgctatatttggactccacctattttttttatttatgtttggtttcaatttttaatcaagaatttagtagtgttgtgaactaaattttctatttcttcttactgcacaactttactaatgttggattgcttttcaatcaattaattgttttgatgtgtttttaatttaatgatttttcttatttaattttctttgtgggtttgagccgaaatgattatattcttagctctctgtgatccttgaattgttcaggaaaacgtcaaaacaaagcatcctcagttgctata

SEQ ID NO: 53728 - DNA, 570 bp, Populus trichocarpa
  Intron number 2 from transcript POPTR_0005s04640.1 (locus POPTR_0005s04640) derived from phytozome v7.0 (chr-ID scaf fold_5; pos 3111475 to 3112044)
tttggaaatccagcctaaggaacttaagtttgtttgtaagtaataaaatcattattagtacatacatgatacatggccccatgctcaatttttatcagctcatacttattcttgaaccattgatttatgtttttacccttctgtttatgtaaattttgattttttttcttgatgctgtaaagttcttttatgctttgtttagtgaatgaggataatgagaggggttatgatcatgaatttcgttctacttctttttattaccttatctgttgtgggttttgtttttggttggagaaaaaggtttgcttgcagtatttttgaagatataaaaaccatatttgtagtgtttcattttacagtaattgaaacaggaaaaaaatcatttttgggttttcgttgaataattaaaagaatttaatggtttgggacagagtagcattggacagtatctgggaattgttcatgtgactctggaaattggatatgtaattgctgtgctggtttgattggattttaaagcttattgaatgtgtgaatgtttactgtagttgaagtgaagaagcaaagctc

SEQ ID NO: 53729 - DNA, 521 bp, Populus trichocarpa
  Intron number 1 from transcript POPTR_0006s26970.1 (locus POPTR_0006s26970) derived from phytozome v7.0 (chr-ID scaf fold_6; pos 24994516 to 24995036 reverse strand)
gaaggtataaatttttattttttttcttctctgttttttttttaaattaattttgatttattttcttggtcttgatttttattgatatcagatgcttaatttttgtttatcttttattcgaataatgtgttgaattttgggtagaaattagatttgtgtttttttttcgatttttattgatttgccaaaggttatttgcaaaattgaaatgcaaaattatttaatgaggctggattatactccctcctttgctagtgggagcgagtaatcaggtatattgaataaatttttggggttttgaattggattttagaagatgaggaatcgtgtgttctgtggttgatgtggaattgaaagtgattcgttgacatgaacataaataagggtaattttatgaactagaaatgctttgttgtttaacggaagcggttggatttgggaaaatgtggctggaattgattttattctaattgaattgtgttttttttttttggttgtgcttgtcatgcaggagctacaag

SEQ ID NO: 53730 - DNA, 823 bp, Populus trichocarpa
  Intron number 2 from transcript POPTR_0005s05770.1 (locus POPTR_0005s05770) derived from phytozome v7.0 (chr-ID scaf fold_5; pos 3766518 to 3767340 reverse strand)
aaaaattcacaggtaattggaactttcgacattgcatttggtggatgctgttgtcatactccatgatttggttgaaactgataataactgctataatgaactcattatctttccatgtcagattaagccaactctatctttataagtggaatttggaaataaacctgacatgtagataagctacattcatgcttaccttgtgctgtagggttagggaaaaggaaaatctatcattttgaagtaaactctagcgagtagcgacagtgtaattctctaagcagaatacagctcgtgttaatctcttttcaaaattttgaaaacatctttcttttggaatgaagagattatcttttaagatatttggaacacatgcttggagaactagtgagactttctgtttctgtttcaatgcacatgccattttctacttgcttttcctggtgatattttgtgggtgcgattgcatacatcgttacttaatttagttggggttgtccactcgttggataattttgttgagcttgttacctgacaacgggtttctcagtaagatatatatagctaatatatctcaaaccctcgcttataaatatgattcacttcctttgcataccttcaagttaactggtacgaaaaaccatgcagcttaattcattttggcatttggagagcactattgaccaaccccaccccacccggacacacaaattcacatgaaaaaaaagcttgtttgtcatgtatttgtatttgacattttcactgatatttggaatcatgctctccttcagcaaaattcaccttctacagcaaggaagcctttgca

SEQ ID NO: 53731 - DNA, 768 bp, Populus trichocarpa
  Intron number 1 from transcript POPTR_0005s08040.1 (locus POPTR_0005s08040) derived from phytozome v7.0 (chr-ID scaf fold_5; pos 5531363 to 5532130)
tacaggtatgtttacatacatatatatattttcgaattatttcttagattttttttgtcttcttgaagggattttttttttccagtcgtgccttttcttttgttttcattaattcggaaggatttttagcttggaagcttggtggacatgtaaagatctacctatgaccgtatattgttattttgcttcgtgaatgatgagaaatgaagattttagcaaaaagaaaatgttatgtaatgaagtaaaatttatcactagcttccacttctagcaaaagaaaatcattttctattgactcaagaaaaaaaaaaacgatatcttctacgataatattacatcctattttgttcaattatgatctagtgtattttattcaactgaatgctgaagtttgttgttagattctttaattcgtgttttctttatatatatatatatatatatatatatataagatccgaaactgatctcctcatgcctgatgcctccgatctaagctcttcttttcatatattttttcccttcttagtctcaattgatttgcaaattcaactcttcaaattttgatatattttctctcctccttgtactatactatatatataagccaaagattttatcaattagcaaggatgaagatgattggatgattcttttcttcttcttcttcttcttcaatgaagtgcttaattgtattaagtactttctttttttctatatgataatattgcaggggagatacggcattctgcagtcaagagtgcagag

SEQ ID NO: 53732 - DNA, 250 bp, Populus trichocarpa
  Intron number 1 from transcript POPTR_0005s01720.1 (locus POPTR_0005s01720) derived from phytozome v7.0 (chr-ID scaf fold_5; pos 1148559 to 1148808)
cagacctagtatctgcacatttagagtgccaaaaggtttataatcatcatcatcatcatcatcatcatcgcataatctttgagcttctaaactttacccctttttctattttttttaaagaagtttttgttaatggggaagaaaagaataacatgaaaggaacaaaaatggaaacctatcgtgtcaaatttgagcttttgagtgattttctgtttctttgtttgctttgaaggttggtgctcctccagaa

SEQ ID NO: 53733 - DNA, 319 bp, Populus trichocarpa
  Intron number 2 from transcript POPTR_0005s01720.1 (locus POPTR_0005s01720) derived from phytozome v7.0 (chr-ID scaf fold_5; pos 1148897 to 1149215)
agttcgtatattttgaaacccatagttttgtcttatttcttaatttttttgtgttttttttttttttatttcttttctatttaagttcctttgattctcaagaaaattaagcaaaaaaaaaaaaacttcgaactttttgtttccctttcacatttcaagctatgagattctaagtgttgtgcttccttttccctttctttttaagcagccaaatggaataataatttgtttgtctagtagttttattcttggaataaccactgaaactgctgctggttttcaaggaatcatactgtgaggttcttcgtagatacaagga

SEQ ID NO: 53734 - DNA, 696 bp, Populus trichocarpa
  Intron number 2 from transcript POPTR_0005s04820.1 (locus POPTR_0005s04820) derived from phytozome v7.0 (chr-ID scaf fold_5; pos 3228991 to 3229686)
ttgggccttactttgcaccataaagctcttgggaagtaagttctgttttttctactttcataacaactacgtcaactgtcatttctttttccttttacattcggggcaatcatcttcttaaattattcattgaaatgatgacagaaaatgtttgcctagatgaaattggtggtcactgccctaaaagtttttagttccggtctgaacatggttttttaaacatccttttattgttattggaatattttccaccgtaaactcattttaagagggcatagtttctgcttatccgtcctctgctcagaggctgtatgaactgctttagatatgttgcattcagccttaaaataaagccaataagagaaacgtatgctctcgtgcatgtgtgattcggattgacaaaagacatatctatatgtgtttttcttctctctggatgtccttgtttttattctcatttatgacatgcgttattcatgtctgaactcggctactgtgcagatgctgtcttttgattttcgattccatgtaattaataaacaccatcttttcaattctttgttctacccgatgctcaacatgatgcttggacttcatgttttgttctgtttgccactgctaaataaatgacttaataacttaaagttctgtccaatttcagggtgtttgaggttaggtgccttcacattccagtgt

SEQ ID NO: 53735 - DNA, 610 bp, Populus trichocarpa
  Intron number 2 from transcript POPTR_0017s09960.2 (locus POPTR_0017s09960) derived from phytozome v7.0 (chr-ID scaf fold_17; pos 8754065 to 8754674 reverse strand)
taccacatccaggaatttccgagcgctctctcagggtacactctgctgcacctctcccggcctctaatactagcttttattgtttctctagtgagtattcccccccccccccccctttcagctgttgaattgattttttcttcttcattctggaaatgtttaatttctcctatgatttcgtgaatgaataatgaagcgtttaattcaattcgatttatctttttgaaattggaatttaaaattccaatggatgtaatactgaaaattgctgaaaaaagaagtttttgcagttaaagaattacaagtttagtttgggtttgacgtggcgagttaatgcttacttagtatataaatttgatcaaggtattaattagaaattgaagagtctagtgctagtgctaaaataaagattctttatccaggttgtatctttgcttgagcttattgggctcattttttgtacattaagctggcattacgttgttaagacaaattgagggtgttgagcgggatgagaattgagagtgctttaattgggtttaacgcaatctgactggaatatttggttcctgcaggcacataattcaaagaaaaaaaccggggacttgtt

SEQ ID NO: 53736 - DNA, 838 bp, Populus trichocarpa
  Intron number 1 from transcript POPTR_0005s14150.1 (locus POPTR_0005s14150) derived from phytozome v7.0 (chr-ID scaf fold_5; pos 11237266 to 11238103 reverse strand)
tttgaaaacacgtatctttcttagcattatcgaaggtaaacttaggtggtctttcgttcttatttaaaggtttttttgtttttagtgttttattaatttttggatttttgtttatttgagattataaaatcctgatttctctttggatatgaagattaaaagatttctttgatttagttttgagagaaaacaagaacaagaaagttttttttttttttgttcatctcttttgaggaagaaaaatacaatggagatcttgaaggatccttacaccttatggtttcttgcatttcaaggtgtcaatgaagtatgaaagacacccaaatccaagacttattgaaagaaatcatttttaaagagattgagagcaagagcttgtaggatactcattggctatggctctctttttttctttttttcttttttcatttggtaaattaattacaccccgtagtaattagatcactgctttctgtttcagtattctcttcctgtctctcactatagctaggcctggtgaaatattatttgcccatcagttaacagatgattcattttccttttcttatcttctttgttagagtttatctttctttcattgtaagttactgtttcattatctatatcgttttttattcatcatttacccaaataaatgagaaatatttattgtttattttccttatattggtaaacgaagcttctctgaatcacttaacctttatcttcgtgaatatcagatttccatgccttaataaaaccttttcccttgttacctagtgatttcaacttgctttatttaatgggttttggttgtagttgttaaggaaaggtaaag

SEQ ID NO: 53737 - DNA, 453 bp, Populus trichocarpa
  Intron number 1 from transcript POPTR_0005s18000.1 (locus POPTR_0005s18000) derived from phytozome v7.0 (chr-ID scaf fold_5; pos 15922959 to 15923411 reverse strand)
atactaataaagtaacctcctttttctttgccactcttcttcttcttctttttgagttatatttcttgtttttgtttctcttatatttcaggaatttgaagggtttttttttttttttgtttttttatctggtaaatgatttctttcaatttttcaaatggttaaatatgggcttaattttgcaaatctttgtaacttagcttttcagccaatttttataagaaactggattaaagatagatagataattaagcttctagctcttacaaaaccataaaaagtaagtactttggatccaaaaatctgctttgggttctttcactcatctcaagaaaagaatatatatggcttcttctttttgctttttttctttattggactcttcttcttcaagcttgattctgtgttaatgtatttattgtaattgatattgaatttatcaagaaggagaag

SEQ ID NO: 53738 - DNA, 258 bp, Populus trichocarpa
  Intron number 1 from transcript POPTR_0337s00240.2 (locus POPTR_0337s00240) derived from phytozome v7.0 (chr-ID scaf fold_337; pos 16552 to 16809 reverse strand)
gattctggtaatttacaataatattttttttggagttgtctggtttaagtattctgttgggtttgatttaaaagttcagttaaagttataattttgattgaagagaacaggtgaaaggttttaacttacaattattgattttggcttaatgtgattgtctgtgttatgatttagagctgtgcattagtcgtgctggacttggtttttgattctgatgtgttttaattgtttggttcagatttaaagagcttatcctca

SEQ ID NO: 53739 - DNA, 376 bp, Populus trichocarpa
  Intron number 1 from transcript POPTR_0005s03620.1 (locus POPTR_0005s03620) derived from phytozome v7.0 (chr-ID scaf fold_5; pos 2420319 to 2420694)
tcgacccagttttaatcagagaaactttaaagaaggtacatatttcttagtcaaaatatcgaacaaacccaccgaactctctcccttttgtttttgcctgtttgattcctcagaaaactggagaggaagaaagaaaatcttcaaattcgggtctttgattttctctaagttttgcttttgtgtcttcagatttggaccatttgcttgaatccattttattatatgaaatttttctgattttcagtcattttcagtcctaaagttcttttctttttcctctttttttctagcgaccaagtacaactttttttattatgtatgtttctgttacactagaataatgggtttgctttgtaaattctgtgaaggtggacag

SEQ ID NO: 53740 - DNA, 880 bp, Populus trichocarpa
  Intron number 1 from transcript POPTR_0005s06880.1 (locus POPTR_0005s06880) derived from phytozome v7.0 (chr-ID scaf fold_5; pos 4614963 to 4615842)
tggagactgcccaacaagaggctcagtttgctctggtgagatattgttgagaacccatttttgtaaattgtttgttttgttgtaattctatcagggtttatgtttttatctgtttttttgaattgaatatgatgttttttattaagtgtttgttgtaatatttttgctgttgtatttgacataatcaaatgcaacttctgcatgtggtgatttcaacttcttcttgcttgttacttcattgatcttaattttgggaacaagaatcttttatctgtcacagaatgtttgatgaatggaaagtaatttactgattctctattttagtgattatttcgtatgtttatttccacgtcgctgatttacttgtatctgcattgaatttaatagcctctggttgcctttaaattatatgtagttggctgttttttatgcattttagattcaatggagatccattatactttgtttcttaataaatctacgaataactaaatttaggtgctggttttttcttctcagcttgattttatgtatatatttacggtatgatatgagctgtctccatttgttgatatccatccatggtaactatggttggggttgtaaacttcgattttctaatggttgatcattgtttgaactccttatccattacacacctttgtcatgaatcgtgtgaatcctgatatgcgcttttgtttctggcttctaagtactttatcatattcccatatttgaactctatcatttgctgtaaccttcctttcctgaatagtccaaaatattctcaagtgtttgtcagtaaagaaaaagggtagcttcactttcaggtttgtggcgtggcttatttttctaacagtattacgagaggacagcttga

SEQ ID NO: 53741 - DNA, 967 bp, Populus trichocarpa
  Intron number 1 from transcript POPTR_0006s12870.1 (locus POPTR_0006s12870) derived from phytozome v7.0 (chr-ID scaf fold_6; pos 10033366 to 10034332 reverse strand)
aaacaaggtggtgctcttcagaaggaactcattaggtgagtagatttaaagactccccatttaagcaaatgcttgtttattttttcccctaacgtggttggtgtgaaagtgagagagttcttcaagatatactagaaggagagagagttggtaactagctaggtcgagttgactcaatgatttttatataatctcttctatcaggagagagataatttaacatcgctaatccctgaaatattgatgattggtgggtgggatgggattgactcgaccgagtcgtgtggggtatggtcgtccattcaatgggttgtctagtccagaaaagggtagagaggagtttccatttaaagtctttatggccaactgggctcccatgaaaagttcgacatatcaactctatactttgaagcttcatgaaagtgagggaaaatattcttaaaagacaattctttaatgattctgagaaattttaagtggaatcaagatttatgaaattgttaatacaagctgccaaactttaaacaagagtaggaaattcctttttctttttcttttttttactgatgatgacttcaagtcccaccaacacatcctacaggaatattcaatggggaagtttaggcgaaattgatcaccaaaagtgcattgacatttccctttgaactttattttattcttccaatatttcttgatttcttgacattgttaggaagcacttgcacgttttggtaaaccttctctagctaccagttagaatggtcaaagacattgtttaatttactgcttaacttcatatttgattgattgactgtttgtgatcatacacacaagttccatcttttgattttttgccttggaagcattaactaaaaatatgtcagtactattttaagtgaaggcatcgatgtaactaatttgtcaacagtgtttaattttatttttctccccctcttcagattcttga

SEQ ID NO: 53742 - DNA, 514 bp, Populus trichocarpa
  Intron number 1 from transcript POPTR_0017s00340.1 (locus POPTR_0017s00340) derived from phytozome v7.0 (chr-ID scaf fold_17; pos 99622 to 100135 reverse strand)
ctctcttctttgacgaggtaacctttgaacttaactcggttttcccttttcttttctgggttctctcatttttattgcgtctttcaagcttcaatggttaaaaattttcgaacttccataaaagaagagtgatttgaaaaagcccattatttcgcttgcgcttatatttgattcattatgtacaaagttttgaactttgacagaaaagtagttgaatgggtgagctacgaaggatatgttgcaaatttcagtctaggagagttattttgagaaaaaaccccatcatttctcaattcttcttagttggttttgtatggtgtgtgcgcatttttcataaagttttgagctttctgttgattttttattttgtattttcatatgcatgaactgatgcctagcaaatcgttttagttgcatgttatcatgctaagagcaagaaagaaattttcccttagatgttatgctgaatttgtaggagttcaatgcagctaatttcccgggcagaggcttcaaa

SEQ ID NO: 53743 - DNA, 710 bp, Populus trichocarpa
  Intron number 1 from transcript POPTR_0017s06680.1 (locus POPTR_0017s06680) derived from phytozome v7.0 (chr-ID scaf fold_17; pos 5118175 to 5118884)
agcctgggtttcatcaggttagttttgattatttacgttgttggtgatgcaccattttttattgatttaaaatactgaacttgtgcatcgaccacaagcatgtgatgatcttgtttttgaagataatttctttttgaaatgttggggatgtaattagattataagtgtgaaattgtgagagtgaagaattttagatggtaatgagtggatgatgataaatgccttgtatgagggttatcttacctcttatatttgtgagaacaaattttatttttgtgtaacaaggcatgttgtggagtatagagactgcgattatggtagttgagctgcactgagttgacttttagattttttaatcttctctaatgaaattggttatgtaatgttgctttgtttctctttatttatttgatgttaggattcctttctttgcgtcgatgtactggttgttagcatgtatggggcgccttggattagtgaaattatgaagttttattgataggcttgattagcttagttttctccggttgtgactggaggctttacaaaatgtcttttccaaaggaaatttaacattcttgtctttgttcattggatatccaagtgactgtgtttgttcttgtgaattagaggtttcttttgaatttgggtgatggaattgaaacttgagaggcagttttctgatttaatttgattttttctaggttgat

SEQ ID NO: 53744 - DNA, 768 bp, Populus trichocarpa
  Intron number 1 from transcript POPTR_0005s18250.1 (locus POPTR_0005s18250) derived from phytozome v7.0 (chr-ID scaf fold_5; pos 16378517 to 16379284)
gtgtaaaaagtattcgagaagaggtggttaggaacctaagaaaatttctatttaatacatgtggggctgccaccattatttcttttttaatgaaccgtgtcgtccaacatttggcataaatcaagaatgcgtcgcaagctgagttttttttattactaatttagcataaaatcactaaaaataggtgaaaaacataagaaaaaatagaagaagaaaaagaaaccgaaacgaaacatccagacactagatgacaaagaagttacacctaacctaacgaccaggtcttgtttccctctcttaccaccaaattcatatcttctgtccattttccagtcatcgccccaagccccaggttcttgaatctttataaatactcacagccccccaattatccgtttctttccctctctttgcttctctcgatatagcgacatccggaaatgaaggcaagctcaaatcttcatcagaacccactgctctctgtatatattcttgtgtataacatattttgttgtttacttctccctttcgtttctttcttcttcttttttttgcagggatcaaatgttttctctaatattctccccatccaacttctcttcattctcctttgtctcttcattgccagttcttcctgtctcaaggtcttaatttccttcttaataacccaagttactatcattagttatctttcattgaccagaaagagaaacacgtgtttatttcatgttcttgatttctatgatcaattaaacagataggggagac

SEQ ID NO: 53745 - DNA, 434 bp, Populus trichocarpa
  Intron number 1 from transcript POPTR_0030s00390.1 (locus POPTR_0030s00390) derived from phytozome v7.0 (chr-ID scaf fold_30; pos 146494 to 146927 reverse strand)
tataaccacgttgcttcaagttcaagaatttcagggtttgttgcatcttttctcaaattttcctccttgatactatgggggttcatactggatttttttagaagctttagtttcctatgtcttcatggatttttggtggagggttttgattagaaggtttttcttttcttttcttttttattattattctgggttgatgctatatatattaatttcaaaacggtgttttttgtgggttcagtttagatatcgagtggcccaattgaaacctggaattcttgaaaccatttctttataatctaaattcggttttggtgaattgtttcaatggttgcactatgtgttaatttttcagtaaagttttgtcccttttagcttgtttttttagccgatcactcggtgttttctatgtttgtgcagtaacctgaacaaaa

SEQ ID NO: 53746 - DNA, 909 bp, Populus trichocarpa
  Intron number 1 from transcript POPTR_0006s10200.1 (locus POPTR_0006s10200) derived from phytozome v7.0 (chr-ID scaf fold_6; pos 7559232 to 7560140 reverse strand)
caaaacaagtggcctgcaaccccagcttcttgcaggtatgcgtgcaccttcataaccagccgcatgttgctagtattccttcgtatctttggctatttctccttggtcggttatatatacgagttttcttcaatttaatcaatagtactggattttattttattttagttcttttttggctgttggcaatttcttttcttgctaccttccaatttagcctagaaaagaaggcacagtaagacaggttaatagcactttaatcagctgacagtactgtgtataaattaatttgattcttgaaccctttttttcccatctcaatttaatgctttgaaatatgaaacagaagggatcatattgttgaaacgaacatgagagaatatcagaaggattgtatccaattaggttgcagaactgtagaagaaaaggaggtttggcagcaggatgttttcccaaagaattgcttcacaagtacagccaatagtaccatcctttacatgaggatatcatgaatacataattacttagttgaccgtccatgcatatgtgttggatggcatcaactcctctttgcttttctttttatcatccatctttttttaaaaaggaaagatgcttttggagaccaattaataattatctaattaacagagtaagacaagtaataatatttgaataaataccacaaaattaaaagggtaaggaaagagaggaggtttatttcctatatttcaattatttgtatcttaataacaatcaagggataaaaaaattaattgagtcatactgaaaatgaattaatatacacagatttgatgatactaattaatttaaaaaactgctgattaagacgtaattaagtttactatttaattgatcatcttgactgtagggaattggtagctgagt

SEQ ID NO: 53747 - DNA, 395 bp, Populus trichocarpa
  Intron number 4 from transcript POPTR_0005s15770.1 (locus POPTR_0005s15770) derived from phytozome v7.0 (chr-ID scaf fold_5; pos 12375364 to 12375758)
tttttcgttcaggaccactccatcctcaacctcgagtgagtatttttcacgtacttgttttctaaggcagttagtcgtgtttgtctgcggaaattcgaccattacatttgagaaattctcattgtaccatcaaccaagcccttgaatatcgatcactatgcaaattaatgataaatgttatataaattttgtttttattgtaatctcaaattaattagcatctggagctcggaaatcattctgtgtggtcaatccagttgagggtcgtgtgcattgcttttgatcttctcttgctttatcgtgccactgggcaactactacatccctttttatcattttgtttaactgcgttactgacatccaagggcagattttgtgtttgcagggatccccgg

SEQ ID NO: 53748 - DNA, 493 bp, Populus trichocarpa
  Intron number 1 from transcript POPTR_0013s06840.1 (locus POPTR_0013s06840) derived from phytozome v7.0 (chr-ID scaf fold_13; pos 5529414 to 5529906)
cagcccatattcagttgcaaatttagtcgagacaggtgatatgaattatgtggtctcttcttacataatgtttgtcaattgcttatcttgcgtttcctagattgctaagatttccacattcctttggctacaatgatttttggagctgattctcaattgaatatctccagccagtacaactttgtatgtgcacagtccatgtgcactataaagaacttgagagggaaaaagagggggaaaaaaaacagaagtaactgcagtttctcttgtaccctatttgattcccgtgaagcatttagggagcagttcttttccatgacaaccgtctcattttgcactctggtttggtattagtttctttgtagtttagtggtccaacaacttaacatgatgcccctgccattgttctaattataaggtcatcgttaatgaaacttttgatggttatgaattgacagggtaacccaggtagatcccttgagtacctattggt

SEQ ID NO: 53749 - DNA, 744 bp, Populus trichocarpa
  Intron number 1 from transcript POPTR_0006s15040.1 (locus POPTR_0006s15040) derived from phytozome v7.0 (chr-ID scaf fold_6; pos 12509998 to 12510741)
agttggtggctctttatcaggtaagagttaagagactgattctgaatttactttcgaactttgttttatagttgttgctcagtgtttttcatgtagcagtttctaagtgtgtttgtgtagtagttgttgaattcttcttcttcttcttcttcttcttcttgccaaatactgccaacatcaccttcaaataggtggcaagaaagtactatggattgatttgaagaaattaaaatggccaaggacgttttctttttctgagcattattcttggaaaaatgcaactgtctgtgtgttttgcttagtgtatttggatcttccaaagctgcacataatttaagaccataggcactggaagggccatcatcatgtttccaagttgatcattgatagcccatcagttctgatcatattggcatggtgctatcagctgtacttaattctcatggaaggaaatgaatctcattttgaaatttaatgatattaggatggatatttatggtaccagatacctttgaatttagtcgagtttaaaatgattaacatgatagagttacattcctttccaaaggaaccggcgattgctattacagaagatataaatgaatgaaacctgtatggtttctgctaatggaatacaattacggaatccaattacattttactcagtttcatctcttaattttagtttggctattttgtttgattgcagaggcacctattagacattcttgacaaggtttcaac

SEQ ID NO: 53750 - DNA, 737 bp, Populus trichocarpa
  Intron number 1 from transcript POPTR_0019s01800.1 (locus POPTR_0019s01800) derived from phytozome v7.0 (chr-ID scaf fold_19; pos 1557550 to 1558286 reverse strand)
ttcaactgggatcaacttggctcacattcctagtagttttttttttccatttttttccattttataattaatttttctggcttttgtgtattctttttatacttaatgctagtttcttgtgggggtatgtgaaaagaattggaattgtgtgttttttaagttgacgattcaatggatatgataatgtatatttgtgttggtgaaattgattgtgaatatttttgtttgattcgggcccctttttttatattaaagcttcaagctttttgtgaatttttgttgattggatttcttttttctaattttggaagggtttatctagtaatgaagtgaaaataattggatttgatcgttaaagtattgcctgtatgtgtttgatgaaaggtcagaatgtcatatggattaaaaggaaaaacaaaattaacctgattggtattgtattgctgaatgtgaaaatgggatgaatttctgcatataataggaaagaaaagtgctaaatggtgtgctgttgctgaaaagttaatatcttttgtgtttagaaaattacaggtttgttagaatagtttgagtagctgagagtgtagaattatatgttttgggagccagtaggatcgtttgatcttcacagaaaataccttcatgtcttaaatgaactcgtgctctaatggctctcacgcctttgcaaaatttctggtcatgcaggtggaaagaacagtgctgacaggtctcttctcatt

SEQ ID NO: 53751 - DNA, 254 bp, Populus trichocarpa
  Intron number 1 from transcript POPTR_0003s20830.1 (locus POPTR_0003s20830) derived from phytozome v7.0 (chr-ID scaf fold_3; pos 19230737 to 19230990 reverse strand)
caagctctccatatcgcattagaaaccgaccctcggtacgtttctagcaatacccatttcatttttctctttctatttggtttctaaacttagattcccagtcaaagtttccatccttttcactttcgagtttttttggatcaaactgtttatccatttcttcaagagtgaaactttgagttttgtgtttagggagtagtattagattaaattctgtagtaattatttagaccttctactgtattccagctcgt

SEQ ID NO: 53752 - DNA, 319 bp, Populus trichocarpa
  Intron number 1 from transcript POPTR_0006s29500.1 (locus POPTR_0006s29500) derived from phytozome v7.0 (chr-ID scaf fold_6; pos 26846481 to 26846799 reverse strand)
tcttctcatatctcttctggtggtgcagacatcaggtaatccatcgatccctttccttgtttcttttttccattgacatggattgatttgctttgccgatcattaattgtagttcatgtatttgacttgaattacacaagccaagagtgtgtctggtaagaagaaacaaattaaggatcatgactaggattatactatatgagcttgctctgcttttatggtgtttagatgttccgctatatatagagcttgtcttgtgttgggggggatttattcaccagtaattttgagttatttacaaggtacgttgcagttggaa

SEQ ID NO: 53753 - DNA, 849 bp, Populus trichocarpa
  Intron number 4 from transcript POPTR_0006s22620.1 (locus POPTR_0006s22620) derived from phytozome v7.0 (chr-ID scaf fold_6; pos 21575877 to 21576725)
aggaggtgaatcatctatatatgtagtgtattaacaatttgcattcttttggtgctgtacgtgaaagtttattatcgtttcactaattttcttgttaatccaaaggataaattcatgtacttgttataaattatctataatcttgcagcaagcatatagtgaaagtcaaatttttctctttttccgtgaagaggatcctttattactgtgaattttctccctcgttgaaaaacatttctggacatgtttagggaaagagaggaatgaaaaactggataaaaagcacaagtaaagtggaatatggctggttgccgtgctttatcactttagtttctggaatatgtctacctaagatctgtccagaaagtgcagtgaccggctttggcaggtcaataatggttttcatcaggattgagcttgagacggcatatttgatcttttattgttttcaccagtatcattcccaggagcaaacactgtggccatatatagcatttccactcaaattatctcaagagatgcaatactagcaagcaatctgttttgtcacgggataattatttttttaaacacggagagatagttttataaatacaattgatgacaattcattctcaagcaattacttacatgacttggacctatgaattcctttctgaatcatcaataaggaagaagtaactgtattgattcatataatgtcattcttagcatgtaacttagaaaattaacatgtatattgcctatgatgattgtttgtgattcctgttctttcctgtattttttatatctaagagtacaaccgtgagcttttaattcaacattagtttattaccttcttttcagacc

SEQ ID NO: 53754 - DNA, 991 bp, Populus trichocarpa
  Intron number 1 from transcript POPTR_0131s00210.1 (locus POPTR_0131s00210) derived from phytozome v7.0 (chr-ID scaf fold_131; pos 10572 to 11562)
ggctacggtcactggttttgccttcgtaactcaacctcgcacttcttttcatgattttttccaagtaataagtcgggctcatatcttagttcttgccttgtatttcttccttaattccatcttcatcccatttttcacttctgtttctagaattgtttaaaaccgacaagatgtgtctgccagaattgaaatgtgagatattgtcaagatttttgtgctccacatgttgctgtgtatgataagattgaccaattaaaaaacaacaaacggagagctagcctttattgccaaatcaagactaggactccataatgttcgcttacaatttagcagcacgttatcattggctttagaaaaacaacatgtaagagctcagcacattagctacatcaacgatacatgatttatcgggctgggctgagttttatttagatcgttgattgtatagcctctagagcagtagaagaagcctgttgaaatggtaagagtccaggtgggttgcatgtttgttcccagatcactacagtaaatttagaacagatggtgatcagaattcaaacggtgttgtaattgaagaattggtagtgcatgattgtgtcaaaacactgtacagatcatgataatattagtataattagctaaaaacactatgatacgcttcattaaatcataagttgtccttcccctttttttaatgatcaaggactcaaggtgtctttggacaagctttagcttttatatcttaaaattaagtcttttctctttctgttcttagacgggtcatccacattagaattggtgcatttaccagatatttttttcctggaagactcaattttgatcccaactacatacaacccttaattcaggttttatcttcatggtctcggtgtcctttgaaattctcttttgagacgatgattctttttaccctctcctgttgtttttttttttttttccaggtagggttgagtggagcacttgaaacact

SEQ ID NO: 53755 - DNA, 971 bp, Populus trichocarpa
  Intron number 1 from transcript POPTR_0019s14190.1 (locus POPTR_0019s14190) derived from phytozome v7.0 (chr-ID scaf fold_19; pos 14940687 to 14941657)
agctgaaaggtttgtattttggaactttttgcgtcatttttaggtatgaaatgatgagttttttattttgtgatgtgggttttgtgtttgtgtggggaaattttgggttaggtgattggtttggttagtggtgctgtttgcttttcttgttatgctttggtttgcttgcttgctgtggtttggaaattttagggtatttgtgttgatgttagtgatgctacgtggagaatttcttttttgatgttgcttgtaaattttagtttggtttgggtgattgattagaaaatctgttgtccaaaactctataggggatgaagtttaattttttttaaaaaaaaaacagtaatcttagcatagatttgttgaattgaatattccgagtttctaaactcatagatgctgctgttctagtttgtttatggggaattagctatcgaaacttgtttgttgtgttggaaaattggtgggcaccctagcatatctattacgaggaatgagctgagtagtgataaaactttgggccctttgtggtaggatgggatataggaaagggagagtgatagcctactatcctctgtttggtgcaggatggcatagagattttattcttgactagggtaaagtagatctatattctattttgtgtaggaaattgctagatgtccttcttctttctcttcttggtgctgcttttaaaattcagcattgctaacgtgatagcttagaacacgtggggattgcattgttgctttagtaattagagctaggtttcctgtctttttggaacttataccagcgagactttggaccttttgactctctctcatgcttttggtaataacattgatggatttatttgttcttaactatgtggtttcttcgcttggtagtgcctctgtttcctagtgcctgacttactaccaagtttatgaattgtcatgattgtataacacttaacctctgtgtaacag

SEQ ID NO: 53756 - DNA, 601 bp, Populus trichocarpa
  Intron number 2 from transcript POPTR_0014s18450.1 (locus POPTR_0014s18450) derived from phytozome v7.0 (chr-ID scaf fold_14; pos 15667762 to 15668362 reverse strand)
cttgaggagcgagacctttattttcacaggctcaagtttgtacatttcttaatggcatactaacgttaatactttaatagccatagtaatcatttctgatagatcacttgtttcatataatatcaacttaggatgcatcttcgctactctgtacatacatcagctgaaaataaccactattacattgtatgacgggttcagtttgacaacattttcttcatcacaatctatatgagcatagagcttcacaaataagtaacagctaatattatatgtcggtcaactaaaaacaaactactgagaatcaagattttggaaacttgggaaagattgtttttaatagtactcttaatttgaatccaagattcatgcattttgtttttttggaagtgcttaacatgaatttctcaggatgtgtagttgttggaccaataaataaaagcaaagggatgtgaaaatgcctaatcatctgaattctctgtcccaaaagtgaagtttgagaatgaagttcatcttgtgattgatccaaaggaccttagatttttatttttttttcttatttgcaggttaacatttgaaactgcccttaaacttcgaggag

SEQ ID NO: 53757 - DNA, 680 bp, Populus trichocarpa
  Intron number 4 from transcript POPTR_0019s07550.1 (locus POPTR_0019s07550) derived from phytozome v7.0 (chr-ID scaf fold_19; pos 8605111 to 8605790 reverse strand)
ttgtggtaatttcctttaaccatttccctatgtgctaatagcaaagctaaatgttatctttggttatgcttaggttttttatttggtcacattgggggatgaatctcctgaaaaatgtactgagctctaacgactaatatcacacttaagcatttgaggaccgtgttttttcttcttcccctctaccttgcacaaaaagtgagttgtgataacagtttgttaactgttatttaaaaaattactacagcaatttgttagttcattgtgctgtgctcatcagcactatctcatttttttatttgcttaattagctgctctaaggttttgcagcaaagagtttataagattggtatcacaaatataggaagatatttctaaaatgccaagagtagtctgtatgtgattaaataagagacatgtgtggccttagtcttctgaggagaattcagcacctgcatgaataagatctcagtgctctcagggatcaaaggaaaccgatattaattggtattttgaaataaaagaacgtgggcttcatgctgattcaaatgctggtactttggaaagagagaaaggggaagagaggggtgggggagtgaaggggctgaaggatgagattcatttcccattataattgtgtgtttgtgtgtttcaggctgatactcgatcaataaagttga

SEQ ID NO: 53758 - DNA, 777 bp, Populus trichocarpa
  Intron number 3 from transcript POPTR_0019s07730.4 (locus POPTR_0019s07730) derived from phytozome v7.0 (chr-ID scaf fold_19; pos 8861673 to 8862449)
ggtatgggcgcaggtgcgtctaatgtgtttacccctctttggggttatatttattttctggatagaacacttgttagaaattttctggtttggtctcttattttccttctttgtttacatttgcatagtcacaaacacaatgcttacaagtcaagtaataggcttgaattagaaacatgatcttgtggtttttttcttttttttttcatacagaataaccttatgattttgcatgaggaagaacaatgtcgaagcattatgaaatcaaagcactctatctctattaattgacttttacgtttccttgtgatgattgtatggcctgccatatactttattatcatattccatggcgtgcttcttttcccctaccatatatataggaccaaaactggttctgggcagggcaactactattttcaaaaaggaatggaattggaaggataactgcaactgctactgaaagccttgaaattgcaggataatttttccagatgagaggtgatagaatcaatatatttataacagatgacttttgagtctctgttagctgctttagctataataaaggaatcaaaatgaatatgctgtgcaataggagctgggcaacaccattgaccagtaatgagattcaatgcaattttttatcctgggctatcttgtgtttgctgattaggagaatatgctcacagttgacacgctagattatttactgttgctatttttactttgtctttggcaggagttatagcccccgtgagagaagatctccaagac

SEQ ID NO: 53759 - DNA, 667 bp, Populus trichocarpa
  Intron number 1 from transcript POPTR_0018s13580.1 (locus POPTR_0018s13580) derived from phytozome v7.0 (chr-ID scaf fold_18; pos 13859398 to 13860064 reverse strand)
tcagtgcaggtaccaccacaataattttcaacttctcttcacattaattctactattcattgaatgtttcaaattgggtttcttttggttttgctcttacacttctgtaatttgacttagttggatagaatcctttctttttttggcttatttcacaacatgtcctctgcttatttcacatgtcctctgcttattatatgtttgtgattgtgattgggattgggtctttgttgttcactgcccctctacctttttattgatgttaatgctttttggcgtttctaattgtctctccaacccttgaagcaatgcaaagatgacatctttttcctgtagcaatgttttatagggttgctcattgtgttatcgactcttcaatgtgttgctagctgtactctcaggatatattcatggaatctaatgggattatcaatatttctaatgggataaaataccagttactcaaaaaaaaaaaaaaaaaaggagaaaaactccattagttgggtgcagaaatggtcaaatcataggggactagtttgtgctttacacttatttttttaaattttttttggaaaatattgcttccaatttctatttgtgacttcattttctgattatatgagtttttcatgcttatgcaatggtcatacatgatttgcaggtagcg

SEQ ID NO: 53760 - DNA, 619 bp, Populus trichocarpa
  Intron number 3 from transcript POPTR_0006s00290.3 (locus POPTR_0006s00290) derived from phytozome v7.0 (chr-ID scaf fold_6; pos 63464 to 64082 reverse strand)
ctgtggctcagcttggtgggccagatcgtaagtctcataaacatccacgtgactggtcttttttttctaactttgatttttttgttattttttaaacaccatttatctgattttttcaaatatattctttataaagcattgaagtgcttaaattagtgaatgcctttttttcatgcaattctagttgtctcatatgtttaattgacaagttgattgtttctagagaactttgatctgccattggatatactgttaagcattttgtctagatggaaatatctggcaacttttgcatattttgactgatggaaaggcaggcgaatacagagggaggcaattgtcaggaaaaaaataaatactagatgacatgtcatagggctcccatttaaataaacttctttttgcctgaagccggaaatttgtttatttaattatgtgagaacccaaatgagagttatagcttgatataactgcatgaaaaggcagatcagatgttcaaaacatgtcaatttattgaacaactaaggtgttgaagattgtttttttattagatttttttttaatttaaattctcttacctctctatccaggggctacgcctaaaggtgttcttagagtc

SEQ ID NO: 53761 - DNA, 760 bp, Populus trichocarpa
  Intron number 2 from transcript POPTR_0003s10550.1 (locus POPTR_0003s10550) derived from phytozome v7.0 (chr-ID scaf fold_3; pos 11491343 to 11492102 reverse strand)
aattttgttacggagtaagtatacattgctgaacttgatcaaacccattgttatactcttaatgattttatgacagcagaaatggctaatttacaatgctttgagaatagctgtcatatatgttgtgaagatatctactagatggacatgaggtctgggaactttgttgatataattagcttgtcagttgctttgatttctaaaggtgggaaattttctgaatatgatctgttaacttagtactactgctccgggagcctctcagtaaccatattgtattgtcagagcagaattttgtaatctttaggtttctcagtttttaccatcaaggatcggcatattctgattgacccaacaaccattttattgatttttcgcaaagaaagatcaaagaaatatgcatgcatgggcaagcacatctgcctcaataaagttcctaggtgttcttctatggttcaaacaactgtaacagactcaagatgttaagatttgtctgtgcttgttaatttgtatgggtgattcttaaatagctcccagccaatacttttcctgtgaattttatattagcaagataccaatagtagtaaatctgaattgtaaggaccttaggaaattctaggatgctatgccttgtccatctcttagacatgattcttttttctataatttgttgttactaaaggtggctgcctggttatgaattaaatgtgagagtgctaaaaactcaccaaatcttttcctgttctggtacagacaagga

SEQ ID NO: 53762 - DNA, 716 bp, Populus trichocarpa
  Intron number 3 from transcript POPTR_0019s09460.1 (locus POPTR_0019s09460) derived from phytozome v7.0 (chr-ID scaf fold_19; pos 11000947 to 11001662)
aagactgggtggggtgctggtgagtgcaccttgtctgtctctatgatttcgcttgctttcttcttttatttatctccctctttccagaaagaggagctgaggaggggcttgggtgaatggatataatactttttatatatatagcgtttgcttgggtaaagatatttctgagctgatattcctaagctgcctatcacaagttttactctttcaaatctgtggatcagttcatacatgatatcagctgatttgtcattggtacatatcactgttgttgataacttgcattttttccccttttattttggctgattccgtgtagatcctaacctgttcctttcaatatatatctaatgactaagagttgatgaagttaatctatcgattaatagcacatagtccgtctcatttttggcttggtttgaggtaaggaagaaggcacgaggctgttgatcttagcctcaataaattatatgtacatgattctgattgtgcagttctcttctcagtagcatgctactcgcctccataaggcgcagtgaggttgatgttgccatatagggatcagtatccatgtcatcgatagccttattattttgtcccttttgttttcaatcacctttgctgtttaaaaaggtcatgaatatatctaccgctaatgtttttgtttttcttttgtagtcatcttagcagaagctgttgctctaattgctgct

SEQ ID NO: 53763 - DNA, 599 bp, Populus trichocarpa
  Intron number 1 from transcript POPTR_0003s08060.2 (locus POPTR_0003s08060) derived from phytozome v7.0 (chr-ID scaf fold_3; pos 9511446 to 9512044)
tcaaatctgtttcacatcttcactgccctgaaaaagttaggaaaacttatcttggtctttattgtgttttgacaggatctgcatcaaaagcttggagcaatcagtgagctttttctctcttatctgagattttatatttaaacatgacattaacatggatttagtttagagcatgaagtattcagtatccagctgaagattttattgataggcgaaatcagttagtgaacttgcaaaatgaaataatcaacttttatatgtgggcttgttcgctactacaaaacgtcaaaaatatgtttttcccttgaccttttatcttttgagcattttttgctaagccttctagttttcaggcttttagacccaggagaaacttagcttatacgtgctccattgcagattctctggacataggtttgatgaagcttaggatcaaatgtttgaaaatctgaattgatgaagcttcttttttttttttgcagacaaatcaaaggcggaaaatgacataagcttcaataatgttgcagtttccaatgccaaatatattcctccatctaaaagtaggaggttcccaggcactaaattcttggacgcagttg

SEQ ID NO: 53764 - DNA, 526 bp, Populus trichocarpa
  Intron number 3 from transcript POPTR_0019s05350.1 (locus POPTR_0019s05350) derived from phytozome v7.0 (chr-ID scaf fold_19; pos 5681433 to 5681958 reverse strand)
atcctaaagcacttgaaattgcgttgttgttatcggtgggttcactacttttcatttacttgtatatccgagttgttttctattgggaaatcagatgagttatgtgatgcacttatttgaatttgaagaactggtttcttttttctctaaactttaagcaatggaatgcttttctttaactctttcccattctgatgtgaatgtacatttttttctcaatatagtattaaatatggaaagtatattgattctcgttttgatttttccttgacgaagacttttgcttgaaaagtagagggtgccagtctgtcttatgttatcatctctgttttaataaaagaaggatatgcccttagaaaggaaagtggctccaatgagtatgcagaaatagagaaaagcagagggtgccagtcaatctgttgattgatcatatgagtaatcacgatgatagtgaagctgtagagagtaagagttgtgtgtttgtgatgcagggagcaactttagtagaccggatagtgactataac

SEQ ID NO: 53765 - DNA, 814 bp, Populus trichocarpa
  Intron number 1 from transcript POPTR_0006s28220.1 (locus POPTR_0006s28220) derived from phytozome v7.0 (chr-ID scaf fold_6; pos 25983595 to 25984408 reverse strand)
ggtcacttctgcagaagtcactcaggtaagactccgtttcatatattctccgtgtttctttctttttttatgtttaattttggttatttgttttctgtttggttgccaagaagaggtaggaaaaagaacggacagctaaacttgtgtatccatgttaatgaattggaagaaaactctacttcttgaagtttcagattcttggttattggtttccttaattcaccactgtttgactgataagattccagcttacaacatcatgattccatcttaccatggaaattgaattgaaaaattcatgaatttccatatgttgcttcctctctaagatttattatatgataaaattagaaatttgtaaaattcacttgctcccttgtgctttggtagttaatcaggattctgaggaattcagtaaggtcagctgctttgcttaatgttgttttggtcataaagtgttgataaactttcctcaaccaaggtagaaatctgtagaactcacagttgtttactgttatttgggtgccaaagattggaaaaatttaggacatctgagtattttcttttcccattttcttattgtttcccaccatgcaaaaagatttcttgaaccatcatactttctgcagttaccatggaagttttgaatgcttttttccctgtgttggatacttttggtatatcttccttatttccgaattcattgatggtatacatgtttggtgtttgtcatgttattgatgatcaccatcctgacgttcatataaataacttgagaactcacacttctcgttttctgcagcgaatctttgaa

SEQ ID NO: 53766 - DNA, 537 bp, Populus trichocarpa
  Intron number 1 from transcript POPTR_0013s02230.2 (locus POPTR_0013s02230) derived from phytozome v7.0 (chr-ID scaf fold_13; pos 1338700 to 1339236 reverse strand)
ctcaccaagtaaggcttttttggctaaacttttatttgggtttctgtttttggtgtattttttgttaaaattcaattgggttttggatgtttttatgcatttgtattggtgtttgaatgttatagtgatttgaagttgtaggggtgcatgctgggaatttatgatatgcagctaaagtctattcttcttggtgtatttttgtttgaagttaaagggattgttttgttttttactatcgtattgaaaaaatggtgctttccggtgtttttagtagtagaatttggagtttttatgaaatggaattatgctctttgtgtgtgtttgttgaattataatagttcagcttattaatcactctagtgttagctaattttgtgttttttgaatgttattaatgaattattgatactagagcgtctgcatttgctggatatgctttaggattgtccggctttttttttctacgatatactggggctttgtaattacttctaattagccttcccattgtggttgctagagtgaattcattgctga

SEQ ID NO: 53767 - DNA, 387 bp, Populus trichocarpa
  Intron number 3 from transcript POPTR_0018s08390.1 (locus POPTR_0018s08390) derived from phytozome v7.0 (chr-ID scaf fold_18; pos 9341070 to 9341456)
tgtcgcttgacaaaccaggcattctctatttcttttatcataggatgcaaatcatgtttgatgatttttaactatggcggagtttcgtcaatctgaactctgctaaaagtcccactagaggaaaaaattagtgttcctcaagtttaaactgaaatatctgagcaagttcaatatcttacttttggaggtaattttgaggggtgaagaaaactaaacataaattagaaaagtaaaaaaatcgataaaaagcaattacatactattcaatttgtttatttgcctatataaagttcgatctccctgcaattgaaaattatgcttggctgctaacttgtgtttgttgaacaaccagttaattactcaaagccaaagttggttatccttcac

SEQ ID NO: 53768 - DNA, 684 bp, Populus trichocarpa
  Intron number 1 from transcript POPTR_0013s02770.3 (locus POPTR_0013s02770) derived from phytozome v7.0 (chr-ID scaf fold_13; pos 1666480 to 1667163)
caaaccattgggattcgagaatcttcttcttatctgtgagtactattcttcatttcttattgctccttttggtttcgtagaaaatgcgagaaaaagaaaatgaaaaggtaagtttgagttttgagtggaaagttttcgtctttttgacttggaaagaaaacccatttggatatatgtcttgtaagggtatgtgagaggtttttggttgaggctatgtttggttgctgagaaaatgcaggaaaaggaaaagtttcaatttcgaatgcaaaggttccatttttcacaatatacagagctatagctgtttggctgtagttcatgaggatagatttcttgttttatactcggtttaattggtttaagagacagactgggaattgcgaagaaactgttgaatctggatatggtgttatgttgtataagtataacaaaagtaaaaaaaaaaaaggctttgttgggttttttctttcttttttatattatttgcagaagaatttgataagttaatcacgttttcagttttatttccattgcattacttacatcgtctagaacaaaacgatcttttcttcttataatttcatgggaattggagttaaattgtgtttgaaggtagttttatgaaaaatgttgctctttgtctactcagacttgggagctcaagaagctactccagtagctcca

SEQ ID NO: 53769 - DNA, 761 bp, Populus trichocarpa
  Intron number 1 from transcript POPTR_0780s00210.1 (locus POPTR_0780s00210) derived from phytozome v7.0 (chr-ID scaf fold_780; pos 9763 to 10523 reverse strand)
tcaatccagcagctgaggctcaagcagtcagccgggtgcgcaccgaattgggcaggaaaagaggacattagtccatcgatttatagtatgctccttttccttttcttttttactttttgttttttgttaaactaattatggatgctatacattgcatatagtagacatgcatttgagatacataacctcaccacactgaagatagcatgggctattttgggactttttgtttgagttcctttttaaaacaatttacatttctatttagctcaccatttatccatgcaatttctatatgtaattagattagacttataataatccttatcatgtcaaccatccgattgttgctcgaatggagccttttatatttgtttcagaatttaaatgtacagtcccttctttagtgattatattaggaaagatttgatgctatgaagacaaggaacatgcaggaactctttaaggactagcgtgagggttttctattaacaaatccttcattctcattcctttttgtgaatttgtgtacgtgtgtaatgtttacattgttcaagtaacctgaggttcggccctttatttcaaaatactagtttacaaagacctctcatgctttctagtttgcttgttgtccgaaactttgaaaattcatgtcatctgttagaatttctgctttatatagtctctatgtgttctaacaaaatttcccccttttcttctatgatcttattaggttaaagacactgtggaagagagcatat

SEQ ID NO: 53770 - DNA, 373 bp, Populus trichocarpa
  Intron number 1 from transcript POPTR_0013s00420.1 (locus POPTR_0013s00420) derived from phytozome v7.0 (chr-ID scaf fold_13; pos 173004 to 173376 reverse strand)
ggggttcagggttcaacgcttcaaaagcccacaaggttagtttcgttttttattcttctaatttttgcttaatagtttcttataatttcagtttttgtgaaggattgggtatctgggtttttgttaaaagttataaatttttgttttctgggtcttaatctaattcccatgtgagtaaatattgtttctttaacttatcctgttgtcagtttgagttaaaagtaagatactttggtattgtgttttgttgtttttgcagagaatcttttttgtttttatcttggttcgtgttattttgcaggttcttgtaatcaatggatgacaaagagattgtttatcttgttttgtgttattttgcaggttcttgtaatca

SEQ ID NO: 53771 - DNA, 781 bp, Populus trichocarpa
  Intron number 2 from transcript POPTR_0018s09790.1 (locus POPTR_0018s09790) derived from phytozome v7.0 (chr-ID scaf fold_18; pos 10865346 to 10866126 reverse strand)
gggcgagaccaaagtcaaagtgggtcattctccaagtatgtttctgcctacttcctatttttgtttttgttctaaatattattggtaatggtatggcttctctctgcaaaatttggttgttttccttttcttttttattctgttctgacctctgctgatttataattgcttgtgctggttttggatcagagtttaattcaatttggggtaaataacaattgaactgacaatacttgaaaacccatattttgctgatccgtttgaataaaaactactaaaaatgctaaaacaaacggtgattgtttaagttttttgttcttcagtgcaagcttattaattactataacatttttatgcggtgcctttgttgtgaaaatggggtcattttatcttagttacaaatcgttgagcaagggatccatagtttattaattatcatatgcaacatgccacctcttgaactattcaacttttaatgtgatttttttataaatacgacaaagttcatgaattctcgtagaatagcttattttgataattagatattcctttgctcctaaaatttagttccagggtgggattatggttctgcatttgtgtttcagaaatggattgttcttttagttcatgttgattgtttccagctctctgatttcaacaattttacatctaattacatactcactttgcttctatataaccacaattcccaattgttctgattgtcggtataactggttctataggagaagttcaagtttacaggtgcagagcaaggaag

SEQ ID NO: 53772 - DNA, 742 bp, Populus trichocarpa
  Intron number 1 from transcript POPTR_0014s15890.1 (locus POPTR_0014s15890) derived from phytozome v7.0 (chr-ID scaf fold_14; pos 11971560 to 11972301 reverse strand)
cttctgttcaggtacgagtttcttttcttattagagtagtatttattggttttgagcttgtgggttttgcttttttaggcttacagggaagtttaagttgttaatgggcaaacttgatgcttttcttgagtgcattgaagtgggttttgttttatgtcatgcggttgtgtttaggggtggactttagttgctatgttgtgttgattgagttgcaataattgctcatggaaggaatgcaattagattatgaattggaatcattgtaagagtttctcattgagtgttcttgtacaaatgtggttgttgtttatcatgtcgtttttcttaattgatttgactttattggacctgggaaaggtatacagcttagggaggtcaaagtttagttgaatgccatttatttaatgtgttgaagcggggcttaatcctgattagcgttgtcggcgttaaatacaattcaagtttgattatgttgtacaccaatacttgggcagttaggctagtgtgttgagatattttgacaaggctaatatgtttgaactcatgattgttcctcaacttgctcttctttttttctttaaatgtttatataacttgaggtgtacatggatgtcaaaaggtataatgattttgtatgtaagctggataattgtctgcttcctctgtgtttgtctgctcatattttgtcgcttagataacaaagggaaattgaccagttctgcttctgggtaaggttgaaggc

SEQ ID NO: 53773 - DNA, 662 bp, Populus trichocarpa
  Intron number 1 from transcript POPTR_0018s07240.1 (locus POPTR_0018s07240) derived from phytozome v7.0 (chr-ID scaf fold_18; pos 7446083 to 7446744 reverse strand)
gagggaaccctttttttaatgtactggctttaagataatttcttcaaagaactcatttctgattattttgattttgatttagaaattttttgttacaaaaataaaaaaatttattacaaggaccattgtatttatttaaaatgatataaaatagatattttaaagaatatataaatagacttgtctcatattaactttttattaaataagttttgaaaaaaattcaaaacatatatatttgttaaaaaaaatgatttctatcaaattaatcttttcattggaatgtcaagaaaaagaattctagaaatattccaatgaaaattctaacattttactcaaatcaaatttaaagaaaataaatataaagtagacaagtcaatgcctaacatgattttttttgtttttttttaattaacgcaagtgttcgggctagtttgcgtgcacttcaactaatcccacgggtcttgaagttaacaattatataagtctaacatgattttgacaatattaataattcataaagatattataattcttagttctaatgattcaaaatatatcatcatacaaatcatgcaataataaattttaacttcaaaataagtttttgataatttcataaataagtttgtggatagtcacaaatacaaggaaaggcacgg

SEQ ID NO: 53774 - DNA, 568 bp, Populus trichocarpa
  Intron number 2 from transcript POPTR_0019s10640.1 (locus POPTR_0019s10640) derived from phytozome v7.0 (chr-ID scaf fold_19; pos 12174127 to 12174694 reverse strand)
aaggtaaaagcaaattcaactcttattgctgttgttttcctgagtttctttgtttctgctgggttttcttcctagttataagaaatcttgtttgtcacaagaaaggtctagaattttgctacatttcttgttaattaaccacagttcctatgctcatcgtaaacctcaataaactcaagatttctctcttttgtttgtgtttttgtttctgggttttttcttatatttgtagaatattcacttgaagcaaaaaggtgtgatattttgctattttgtttgttaattaaccacaattctccttcacattgtatttaggcaaagtatgagtatttgggcaaattcagtaactttgaggaggagctgttttggatgtctacatgaaaatcagttgttttcatatttatatgctttgatgttgttattgttcatgcttagagatgcagttagcttctattgaatgatttactattatgtgaattttttctatgcttaatgtttttgggacgagctaagaaagaaatgatatttatttgagccgcagctcctgatctgggtggtgaaaacatat

SEQ ID NO: 53775 - DNA, 434 bp, Populus trichocarpa
  Intron number 3 from transcript POPTR_0003s00880.1 (locus POPTR_0003s00880) derived from phytozome v7.0 (chr-ID scaf fold_3; pos 724163 to 724596 reverse strand)
ctaaccttgaggtatgcaatcccaatgcttctttctttctttcttttgttttttaaaagatttttttttaaaatagaaatgagggattttggtatgtaaattctactgctacaatatgtttgattaactaattcaattttttagccattaattcctttatgttagctatctaggcaatcaccttaataatcttaacaatttcttttttatgaattgtaattttcagcattgatttccattattatgaagcaattctaaaatcacaattaggaagagtgaattttctatttaaattcagctttaaaagtttaaattctcatggcatggtcggtaccttcttcttttgccctgtttgcctgcttgtagtatttcaaactgttcctcttctttgaaaaaaatgctccttccatttctgttttaggttaagcttgaaa

SEQ ID NO: 53776 - DNA, 995 bp, Populus trichocarpa
  Intron number 7 from transcript POPTR_0006s21530.1 (locus POPTR_0006s21530) derived from phytozome v7.0 (chr-ID scaf fold_6; pos 20578354 to 20579348 reverse strand)
tgcgtttcttgggaggcgacactctacagaaagtaaggattgcttctatcttggcatctctcttcagtttgtgacatataatgtctacggagatactctgttctgtgaaacaacatttatacacctctcttcagttcattcctctgtccagctttaatgacaatattgttgcggcatcttaacttgataaaaatactgcattttacttttattttaggaaaacaaaaatcacaattgctgaaaaatttgcattttaacactgctaattatagttattccttatgggggctgattttacatccagtaatgctaaggaaatcagatcacttgagagttgaagctgttaattttgattgtgaacttttataaatgcttcattgaaagttccataagttgcattttatacttttgagacagttctgagaatttcctcaagaatgtgtaggttggtggatctgtataaatgacattgtgcttaaattctttcacattttggccctgcttccaacttctttaaagacaatatgtacataagcacatagactaggatttcttccttggaagtttgacatttttgttcatgagtacaaaataagaggctgtgtcttgtcatatttgtctcatccttctacatatcgacccatgtcaatcatatttatccttgttactccaattaactattgctgccagacatgcatggtcatgcatgacggatagcaattagtgcattgatgaggagttttaggcttatgggaacaacaatctttgctggcagccttgccctagaaatgtcaaggatttatgtggctgcacgtccttctagattcatgtgattattcttatttctccagttttagttgagggacggtgcacagttgacaaaagagattaaaaattaaatggttgaaatcaagatttatattgcaaggttgctttaatctggtgacttagtgttctcaggtggccccagtatagtttcccaccttttaaaatca

SEQ ID NO: 53777 - DNA, 711 bp, Populus trichocarpa
  Intron number 2 from transcript POPTR_0013s06060.1 (locus POPTR_0013s06060) derived from phytozome v7.0 (chr-ID scaf fold_13; pos 4482436 to 4483146 reverse strand)
gaggtgggtaattctgattcctgcttcttcgtcagttttcttatcactctttataactttattttttgttttttgtgttattgaatgatggattatggttgattgttaattaattgaatttttttaactgtgtagctttaattcctgcaattttaagagtgtcaatcataatttaaatggtatacactgaaaaggtacaatcacccttaagatcatgactactactcctaatctcaaaaaatcttgatctggattaccggaaactggtagcttttggaaattaagtaaacattcttggttgtatagttgggcgattggaaattaggggaagtcagtccgaaagctactactcatcccacttgattcatgagttttagacgtgtgtgtcaatatggattttttatgtttttgtatgattaagcagatgtgaataggttgtgattggattcttttctttttttcattaaagggtgatgtgtttattgcaattaatggcttcttatatgtgggcattgttggcccttggatacatatgtgtgaacgtgggtgcttaatatttgcaatttaagtgttggttaaaagcttgtggtgttgtgtctaaagcttatttgatgtgaataccgttttcattatggcatttttttatagtgtctaactttttctcaatcttcttcagggacgtttaagttgactcttcaattcacagaggat

SEQ ID NO: 53778 - DNA, 824 bp, Populus trichocarpa
  Intron number 1 from transcript POPTR_0014s04680.1 (locus POPTR_0014s04680) derived from phytozome v7.0 (chr-ID scaf fold_14; pos 3581548 to 3582371 reverse strand)
agattctttttcattttcgtttatttgtttaacaggtgcctttttatataatttttaattatttattttgttatgttctctttgtttctggttaaatgctgttcggttgttccttcctcttgctttgtttaatttctatctagggtttcgagatctctccctgcttcagaattttggatttttattttgactttttatgttattgcgtggaattaaagggttttttaaggtaaggaacggtggtaagggggataatcgcaaagcaagttcatcgaattccacatttctttgccttttgttactttattgcagttgattgtgaatgaagttaagagtttttttttcgtttattgaatttttagatgcttgatgcagtcagatttggaggttaggtttttttttgctcaactgccttgtacaaaacggttggtgattatatctaatttgtttaatgacatttccaagttttttttttagttctagcataaatgtgttgttcaaaaatctaaacagctaggaaatcaatggaataaaagagatttagtgacccccgaatcgaaaattaggtagtagattgggtggtgggtgaattgctttgagattcttttgtgttcttctttgaagaaaattttgattgatgatatctatatttctgcttgtcttgattgtgcttgaacaagaggtaatcatattatgtttttcctaagaataacatgactctgcggatgttgtttggataaataaatacgggctgttcaaagtgcctaatgattagtggactctttgatctccatttgcaggtttatcagcagaaggatcaatcc

SEQ ID NO: 53779 - DNA, 277 bp, Populus trichocarpa
  Intron number 1 from transcript POPTR_0006s03830.1 (locus POPTR_0006s03830) derived from phytozome v7.0 (chr-ID scaf fold_6; pos 2565188 to 2565464)
gtaggatagatagaagagagaaaacaaagacacaggttcgtttcttctaccctctctctctgcttgttttcggttcgattagcttttgcgtgtaaaattagtggctttcgaaccctagattcgctttcaatttttcttctgttttcttttttcccctttctattgttaaatttagttatgaaatagttaaattgctttaattattgcgtttgatgtgctttgtagttttcttgttttgagtgattaatttatggtgtatttgttgtttagggtttta

SEQ ID NO: 53780 - DNA, 767 bp, Populus trichocarpa
  Intron number 2 from transcript POPTR_0014s17810.1 (locus POPTR_0014s17810) derived from phytozome v7.0 (chr-ID scaf fold_14; pos 14181055 to 14181821)
ggcagattcgttaataataaaatcatcttctttgtttttataaaagaaggttaaggttgaaatggcacaagcctgctatgaaagcattttgagtcttctgttggcacctccagacattggagctccatagcataggtttcgttctatttgcaggtacctacaagttgggaatgctgttgctattccagttgcacaatgggatatagcattggtttggcatgacaaagattttatgatgacacgccactgatgactttgtctttcaagtttcccacatgccttgaaaactcatcttttgcacaagtcagaggaaaggattctgattaaagaagaagttaggggaatacattgtgcactgacgcattgttacgagaatagctattgggatttttttctttttaatgttctttggctggtttagagaagctttcatgcactcaaagtattggtattcgttcctttcttagtactgttatccaatataatataactttatagctgtatgattttaattttctatagaaaagcttccttatttagtactcaattcatggatctaaaaaatcaaggctatccgtatagctgactgaatttgtattgtcatgtcattaaagcactgaaatatattctctattgcagcctggcagtgaggttgtaggagtggtgatggtgtggatcgtggacttgctgattgggcactgtttatggtggcaatcctgttggtttgtatgctgaagagcagatccttcctgcagacagggttgtga

SEQ ID NO: 53781 - DNA, 777 bp, Populus trichocarpa
  Intron number 1 from transcript POPTR_0006s22730.1 (locus POPTR_0006s22730) derived from phytozome v7.0 (chr-ID scaf fold_6; pos 21667667 to 21668443)
aaacctcgatccacctacgatccaatcaacccgtggtaaaacacgggtcaaaagcccattgagtttttttttgaaattttttaatcaaaacaacattattttgattcttaagaaaaaaaattgagttgactcagatattgttttagattaagttttaaaactatgataataatcagttttatcattatatattttaattacataattttaaaattaaaaaattttacaagatatttttactcagctgtatttactgaatttgtttattaaaattaaattttttaatcaaacaataatataaatagatacacatatgaaatttattgaataaaataaaagagaaaaaatatcatgaaaaactacaaatattagaaatattatctaaaaataaatatttcttatttttaagaataaagttcatctatataaaacataaaataaaattcatagattaatcaaaataatatatttaaaaactaaaaaaatagaaaataattttaagaaaatctctattaaaaaaaccaaataagcaaaataaaaaaattcataaaggagggatattaataagaaaatctcattttttttcttctaagaatataaaagtaatttcactgtagtgagtagcaatgagttgtaaattgagccaggtgcattgtgatttccttgcactttttagagttcttgttaatgccttggttttacagcttttacacttacactaccacccaaattactgcttctggccaggattttatcactctgctactctgaacacac

SEQ ID NO: 53782 - DNA, 506 bp, Populus trichocarpa
  Intron number 1 from transcript POPTR_1327s00200.1 (locus POPTR_1327s00200) derived from phytozome v7.0 (chr-ID scaf fold_1327; pos 1212 to 1717 reverse strand)
cgcctcctgtcacactggtttccgatttctcaacggtgagttttcatttccagatctgattcctctctcatttcaagtccgtctggataccgagaaagaacatagagaaaccgcaaaaagctgaattcattctgttttatctttccgatttgaacttgtggattcaatgctttgttttcttagttgtcgcggctttcatttgcttgcattttctcataaaccgaacaggctggatcggtgacaacacactgttttaagctactagtgtgtttatctacgctatttttagtaatttaattgttctttgccaacagtatcttctccttcgaggatgtgaaatttgtttcgaatttcgcctgctgttttttttttttaactcaaaatcgtacttttaaatagagtctcggatctgatgtctctgtgcaaaattattatttttttcgagagtgcttaatattttttatccggcttgccttttttatttctgcagaaatataacataaaaa

SEQ ID NO: 53783 - DNA, 1046 bp, Populus trichocarpa
  Intron number 1 from transcript POPTR_0014s15180.2 (locus POPTR_0014s15180) derived from phytozome v7.0 (chr-ID scaf fold_14; pos 11275492 to 11276537)
gcagagcccaaaaccaaatacgatcgccaactcaggtactactttttactgatcatcgcttcaaattttccctaatgtgttataatttattatatctgtttgggatgtggagatgaataaatacgagaaatttataatttataatcgtaagctaaaggtgcaataaatttgaagttgtaaatgtggaagttatatttatgtggtgctttttttcttaaaaaaaataaaatgtttaggatatggggtgagcaaggacaggctgccttagaaaaagctaccatttgtttgcttaattgcggtcctaccggttccgagacgttgaaaaatcttgtacttggtggagttggatccattactgtgattgatgggtctaaagttgaactgggcgaccttggaaataatttcatgggtgggtttgtcttttttttttttttttctcgttcttaacttgctatgttttttatttatttgtttgtgttatctatgattttttctggtagtggatgaatcatgtgttgggcaatctaaggcgaaatgtgtgtgcacgtttcttcaagagttaaatgatgctgttaaagccaagtttatagaagagtatcccgaggcattaattggctcaaatccctccttcttttcgcagtttacactggttgtagccactcaggtagtgttgatagtagggtgcttgatggaatgccgtgctctaggatattgtttctgctatgtttgcttttgcttgtcttgttgatcatacttgctcaatgcattggtttggatcacagatatgttgtagatgtttgtatgcggttttgttaagggcatattggtaccctaatcatgggatttttgccccattttcatcttttttttaattgttgtacagtctttcctcattgtctaagcatcataaaataattccatctatttcatgattggatattctgatttgctgtttctcaaaacatggttttctattatcttcattctctctgttcaatatctttgatggatgattcctgatacacatgcagttggcggaagactcg

SEQ ID NO: 53784 - DNA, 576 bp, Populus trichocarpa
  Intron number 3 from transcript POPTR_0014s15180.2 (locus POPTR_0014s15180) derived from phytozome v7.0 (chr-ID scaf fold_14; pos 11277188 to 11277763)
gcctgagctcaaaaggtacatggctttgtcgttgcatctatttttagttgatattttgcaatgcatatgcatgtctaatatcagtagactattgcttactgttattagtaaattgaagaaatttattactctctccatcccattttatttgtctaccattggatttctaactatttattgaaacatcatctattactttgtctgctgtgcatattctcaaaaatatctctgcctcggaaaatgtagaataccatatattttgaaatggagttataattaatcaaataattgaggataagatagaaaaaacattttttttcatgtacttcatctagaaactggacaaatattatggaacatctcaaaggaaacatggaaaagtgaagtgggaaggaggaagcatcactcctctcagcctcattttatgttgcactcagaggacatgcttccttttgtagacacattttccttatcgtcttggttggattggagcttaaagcatacatactgtattctactttgaagtttcttatatggtatttgcacacggtaggtttgcagaaaccattgatttaa

SEQ ID NO: 53785 - DNA, 899 bp, Populus trichocarpa
  Intron number 1 from transcript POPTR_0006s00570.1 (locus POPTR_0006s00570) derived from phytozome v7.0 (chr-ID scaf fold_6; pos 299536 to 300434)
tttcaagttcggtactttctttcacttcttatctctctctctctctcttcattttttactctttttttcatctgggtttctgcggttggcttggatctgtagtggggtttggctacaagtattgattttgtgaacaagatctgaactttgcttaattaacatttgatcatgttggtttacttggcttgtttgagaatgcattatgttatttgctgacttggttggttgattctttactttctttggtggtccttgaatccttcatgcttgtttttcattttttattttttgatgggcctggtttttgtgttcctttctggtgagaaatgattgcatgttgagttggccttgttagctatgaaattttgatcttgttcaattttttcttcagtttcacttgatcgaactatgggtgctgctctttgattgattgttttttctttccttcctgcgaaataattaatatttcattgtaattcattttcaggtttgtgtctgtttttgccagaaagtgtttcgtatttgacctatttttaggtaaagttaagtttcctgatatacatatggtttccctacgtttgagctgtatggtgattatgtgatgaataacgggttggtggtctttttttatctgactttgtgatgcagtgtttaggcaaaatgaaattagagtcaattatgctatcacttttatattggtattgttccattttacttggattccataccatattgtcttttgagtgtcttctgtattgatatgcacctaaatcagtgtcttttaggtgttatgaagccatatagagtgcatttttgtgcattatgttccatgtgaattgtaacttaccataatgtctttgacagattatttgctgctgttggcaaaattggataacaac

SEQ ID NO: 53786 - DNA, 959 bp, Populus trichocarpa
  Intron number 2 from transcript POPTR_0006s00570.1 (locus POPTR_0006s00570) derived from phytozome v7.0 (chr-ID scaf fold_6; pos 301452 to 302410)
cagccagggaaacattttcaagagcaggcagtaaagtatgataagtgaacttcaactatttatcctgttatttttatgtagtggtcatgcattttcaaaagttatttgctgataacatgacaacagtttccatagttgggaagaaagtgtgtttgacctacttttgggtatacattttataaatttggaagtgccaccttcataaagcatataatttagcccacggttgtcctcttagtatctgctgctagaatactatttgtgcttaaaatgttggaagtaaaataaacgggagcagaatataagtatctattggagtttaatgctgcagaacctgtaaaacttctacgtgccacttcctcaattaaaataatttatattttgatcaaacagaacaattaaataagggtgtggcatttgtgcttggcaaattaatggctaattgataaaactagttgaatcaacagtttatatcttacaggtaatgcattatcccgaagaaccagatttggctatctggacccataacttgcttttatacccatggtttcttctcatcctggatgattcctctctactagcaaagctagtgactcttacacatcttcaaaatggagtgtaagtaactatctgaagcaggacgttgttgaacttgagtcactctggaactgaatttagttgcagaagtttgattcaaattgcatttgcacttttgatgtcaattttgatgtaggcttaaactgttagatcttgttaactttagattgaaagagcaaagaatcctggtctcagcatcaggtaaattggacatagaatttctcaaagaaagaaaacaacattatcccgtttgtggtggatttttcaatacaaaatccatgacttgttcgactttgatttttcttcaaacctgcataaaactcaaaattaaccatctttgctctttccaatttgcaggtttt

SEQ ID NO: 53787 - DNA, 889 bp, Populus trichocarpa
  Intron number 1 from transcript POPTR_0018s01540.1 (locus POPTR_0018s01540) derived from phytozome v7.0 (chr-ID scaf fold_18; pos 1453466 to 1454354)
attccgatagtggggtttgtcttcttttcttttcttttttgggtttgatttgatttggttgcatttctgtgtgtttgtgtggatctgagtgttgagttttgtgagagtaatttttttctggtaggtttttgtatttcagcaatgttttgttgtgttgactgacagtgactagatctagttgttagtgtttgtgaatatgagtgttcagtttgatcttgattgcttgatttcttttaagaagatttggcccttttttttattcttaatattacattttccttaagccaggatcatagtatctcgcatcagtgagatttttaacttgtttttctagccatgtgataaatgagatccatctatatcaatcaatgaaagctgatgttttataattatttatttctgagctgaattaaacttgataaagtgacaattgcaatcgtttggcttcagaggatgcatgttctttctgtttgggatctctcttaaatgcgttaagcaatatcaggttacttacgtgatgtaaaatgttagagggggcagcgattccatagtctaatatgtcaagaagaaagaattcacgtttacgtttcttgatttccttttatttaagaagtaaaagcactctgaattgatctcacgtcctttattttgtggaatgtgtggcttgcattgtgtcttgctgtggacttgattgctacttttaatgtgccagtaaaattccaacattgcaggctgttagggtccgaagttaggaaatctctgattgaatacagttgtagaatgcgatttttttttgatgtggcacgtgaaacgatatatttgttttctgtattctaatcactgcgtttttttaatggaattctgcagcccaaacccctcaaaaatttga

SEQ ID NO: 53788 - DNA, 461 bp, Populus trichocarpa
  Intron number 2 from transcript POPTR_0018s06970.1 (locus POPTR_0018s06970) derived from phytozome v7.0 (chr-ID scaf fold_18; pos 7081502 to 7081962 reverse strand)
gaaaactggtgattggatttgcaacaggtgagttcatattgtaattgcacaaatatcatgatatgcctcagggatgatacgttcttgataatatcattatgattttccttcatttcgcactgactatagcattcggaacgatggctgttttgcttttgactgaaaacagaaaaggttgtttgaagatgcacagtaactgttgcttagttttacttaaaaagaaaaaaacagaaaggagccgggttgttcattggtgacagaatgtcaatatagtttcacgataccctactgcctttctcttatcacatattattcgatatttgcatatatagccatgctgaatattctattcctcgagtaaaaactacttcatgttgattttgtatctggttggaaaattaaaccacataacaaagcactatctaatatggacggacgcacttgttgtttgacagatcggg

SEQ ID NO: 53789 - DNA, 699 bp, Populus trichocarpa
  Intron number 1 from transcript POPTR_0018s06970.1 (locus POPTR_0018s06970) derived from phytozome v7.0 (chr-ID scaf fold_18; pos 7082250 to 7082948 reverse strand)
gttgttcaagatccaagccttcaactcgggaaaaggttagcttcttcagtttttgcctcctttctatatttataaaccttgagagatttaatatgtaaacgaccacttgtacctcgtctcaaaaaacatgaggttttatgtatagctgcaatattccgggttgggccctgtagtgaggcattccggcgatatttggtgcctgtcataggatcgaatgttttagaaagaagctagacttccgtaatcaaagtactgtggcttcttaaaatcgatttgttcctagctgtgcgggagggagcttagtactatgaccttagaactgcacttctatataggatgtttaccatcagatattggaatgcacttaagttttaccggctggaatcaagtacaagtcaaggaacctgatgatcaaggtctaattgtcagcaagcatgttcatttagtcttagggttgaaggattgataagcacaccgacggactgttaaaacattttaagaaaatttgttagacgtgtatatatatatatatatatatatatattggaacaataagaagatcgttacattttaggcccatcaggtcattattcataacagatgaagaagagtgtaggtcgaccaattgtgataataatgattgggaaacataagagatctgttattcatttctttaaatgaaacatcaggttagataca

SEQ ID NO: 53790 - DNA, 488 bp, Populus trichocarpa
  Intron number 5 from transcript POPTR_0407s00200.1 (locus POPTR_0407s00200) derived from phytozome v7.0 (chr-ID scaf fold_407; pos 4853 to 5340 reverse strand)
tcaagactggtgtccatcaacaggggaatcaacctgtaggttttgtcttttttttttctccagatgtgttttttgtgcccttgtaggaaattgaatattcccttctattgtcaagaatgggttctctcttgtttagaatcaaagtcataactctttgtttgcatgccttgacagagtttaactcaacttgataaatgttgctatgcatgggtgaaaactttgtgcagtttgctccgtagtgaaaataattgatgatgcttacaggtgcttttttctattttcatgaaatcctgacagttgttctgtagtgtgtcttctaaaactatattttacccatctacttactataaaatagtgttgtttccccttattttttgttcacatgttgtgtgttaaaccaattattttacccaaaaaaatgcagataatggaggagatgcttttagttcaaagagcaaaacaacaaggtacaaaaagcatagcagaaa

SEQ ID NO: 53791 - DNA, 972 bp, Populus trichocarpa
  Intron number 1 from transcript POPTR_0003s14160.1 (locus POPTR_0003s14160) derived from phytozome v7.0 (chr-ID scaf fold_3; pos 14300607 to 14301578)
acattagaaaccatctcggtgagctctttctggtgatgtggtggtatccatgacaaagtgatgatgagttttcaacaaaattttatttcttctcctctcgagtatgatattggtagctcatttatttatagttaattattatcatttttttgtttgctttatttactatcaattctctttttaaaattatattattaaattaaatgatcttattgaacttagttaaattaataacccaaatttatttttaattatttaaaaatattggcattgctttaacatatattttattattagaaaaaattagacttggtctacgacatacccttttttattcacaataaaaaagaggagttagtgatacttcttttctttgttttcggaacaactgccgaagcctaatgaatttttagagttaatatcatgacatgaactgatttaaaaacaaattccaacctaattcaacagaaatcaaatataattacatggatttaaaaacaacttactctaggacaagctgaagtttgaaaaatgagaatctttattaactttcattattaagattgtaaaacagactcttcttttttcttttattgctatatcttacctggtatagcaataaaagaaaaaaataaaggagtcttttcttgccctaacattcaattactacagatatccgttgaaagcctaagcggcacttaacaatgtcggatagaaaatgagaggcttgtcaaatgatgtataataataaactgatggcgtgagtgttcgaggttccatggtctagtggtcaggacattggactctgaatccagtaacccgagttcaagtctcggtggaacctttcgttttcttacatttctttttgggaagcacaacacgagctcataaaatctttctgtggggcctaacgaatgctattggatttgaattgaagccatactgcaagctagtggctaccacccattcctc

SEQ ID NO: 53792 - DNA, 884 bp, Populus trichocarpa
  Intron number 1 from transcript POPTR_0019s05820.1 (locus POPTR_0019s05820) derived from phytozome v7.0 (chr-ID scaf fold_19; pos 6238035 to 6238918 reverse strand)
tcggtgattttcattgtttgtttgattgatttgggagtcgtcacctagtatttgattgaaggttacatggaaacccatatgtactggtctttgttagagattcacgggtaagggactggttgtgactaggaaaggtattaacacccctagcgcaccctacttgaggtaagttgcttcatggttttgatatattatagaagttttaaaggttttgtctttacatcggatatcaggaatacatcttacatataaactcgtaatccttaaccgtgagtgaatcaaaacattaaattcttcttgtctttttaattttttttgtccttttggttttatcattaaaaaaaacacataaaaagatacaaacacccacacaccacttttcactatttttacttgcacaacctacaactacgtattacaaaaataacaaaaattcaaaataaatcaaatacaattcaaaaattacaaaataaaccccaaaaatccaggaattattggaaagccttttaggatctgcaggaaaagtggttgcgcatcttttccacgcgcggccgcaactggcagcgcgtgaactcaagcgtcgctgcaagaaagtccaagcaaataggggtatggaacaattccccccctctttccttccctgccggcagagaagatcactatcacctgcaacacgagaaaaatgcacaaataacctattcttaatcttttttagatctgtccagtttctctgccttctcccttctctgtttgtttttcttctaccaatggcagatctagtggttgggtctcagtccaaatcttctatatgaggctgaactggagaaggatagctgattgatgaggaaggggacgacgtctgcagggaggagctggaggaagca

SEQ ID NO: 53793 - DNA, 588 bp, Populus trichocarpa
  Intron number 1 from transcript POPTR_0014s16730.1 (locus POPTR_0014s16730) derived from phytozome v7.0 (chr-ID scaf fold_14; pos 12822357 to 12822944 reverse strand)
tttctttttccttcggttcctataatcttccagaggtaaaagctatagaaacacagcagagtagtagtggtgttttctttctttttattgagtttatggagtagtacttttggattcagcagtgctttgatgttaacaagctttatatccttgctgccttctttatattctattctatgatccatgatcccatcttgcttgcttgcttcttctttttaatccgtttttctttttcaaaagttaagtaaattgcgattctttttcaaaattatgtgacctatgactgttagttaatttacagtgaaacaacaaatgtttactttggttcctgatcattaaggaacttggttttgaggttgcagtgtatggctgcatgttctttaccttaatgcaagttttagacaccaaggaacatccttagatccactgtgctgtctctcctttattttaaatggtattatattttgtacaaatccttgtagctctgttgtttgtttctcatttttgaaagatgggagatgatggtgcttctaattcttgtcatccatcccaggtgattctttaaaccatcatataagaagcattgaa

SEQ ID NO: 53794 - DNA, 377 bp, Populus trichocarpa
  Intron number 2 from transcript POPTR_0019s13410.1 (locus POPTR_0019s13410) derived from phytozome v7.0 (chr-ID scaf fold_19; pos 14318126 to 14318502 reverse strand)
attttcacaagcaattctccagtcaacagtttcaggtatcactttgttttcttgtgtttatgcacctttaatattcctcttgaaattaatgaaccatgtaagttatcatgttaattgatgaaagaagatcacagaagtgtttcaaaatcccagatgcattagctaaaaacttattgattttgtgaccaatactgttgcaattagccctttcatttgttcaagttttttaaattatgattgttggaagtctgtaacatactaactgggagggtgaattgtgtgaattttgagtgttcatcttaagcagacgaggccgagaaagtaatgtttggaatgtttttgatttggtgtttgcagggaagacactgagtctggtg

SEQ ID NO: 53795 - DNA, 538 bp, Populus trichocarpa
  Intron number 1 from transcript POPTR_0006s07550.1 (locus POPTR_0006s07550) derived from phytozome v7.0 (chr-ID scaf fold_6; pos 5472554 to 5473091)
aaaattctccagaagagaagctcgagcaaccatcggtatttctcaatttccgattccaatctctaaatttcttcaacctttgttttcaagccttaatttttcaataatggctagcccttaaaacaaaatgggattcattgttcttatatttttggttttttttctcaatttttttaaatggtttttcggttctattgagatttttggtggtttaaaaagttagggtgctttttattttgttagaattttaatgggtttgttaggaatcggtcattttaatgggttttatttatttacataattgggatttgatgaaaaggttgaatgttgatggatttgtagtggaaaagtttggagctttacagagaaatgatgatattttttgaagaaaatattgtgaaactgaccaaaaaactaaataaataaagtgaagtttatttatatatttttagctgtttttcagtccgatgatgttgggattgatcattgaatgttttgttaacttaggtgccaccggcattctctggttttccagctt

SEQ ID NO: 53796 - DNA, 570 bp, Populus trichocarpa
  Intron number 1 from transcript POPTR_0006s28310.1 (locus POPTR_0006s28310) derived from phytozome v7.0 (chr-ID scaf fold_6; pos 26032329 to 26032898 reverse strand)
tccccacaggtaataaatcttatcacatgtatgtttcaagttttcttgtcttgtgttgagtactagaagttggatcttgctttgatttcacatccaagaaaagggcattcgggttcttttcttagtttcttgttttgatgttcttgttgtgatttctcttgtttggttttaggattttgctggatatatagtgaaattagccgtggtttaggtttgggattagattgtatgcatgattaaaagaaatttttgattaattaaacaaactgctgcacatttgaatatgtataaaccgtgaactaagtgtttcgtgtatggtctattgaaattgaatatatggggatgctgtattgctaatggtaatgaacagaaattcttgaactttgatggatcatctgcatttgatggcaaagatttccctgctctatggcgttagtcgtactcaaaatttccgtgggagcactggcgaaatgatagagatcttaagatgtgggctgtgtaagtgacaaaaccttgaacttggctctacttgatttaggttagctaaactatcagaaggtcagttgatag

SEQ ID NO: 53797 - DNA, 558 bp, Populus trichocarpa
  Intron number 2 from transcript POPTR_0006s23310.1 (locus POPTR_0006s23310) derived from phytozome v7.0 (chr-ID scaf fold_6; pos 22068811 to 22069368)
atcttcgaggtaataatcttcactctcccttcgcttctcagatttaaataccaattttaagctgtctttttagtaatttttttttttggatctgagtctaggctgccagtgattgaaagtttcaaaatttcatatctcttgtaggttaagaatcagtttttgataccataggagctttggaattacccaaaataataattaagagagagagagagagacagatgggttttctttcaatagatgttttaacgcaatgtttttgaagttttccccaaaataggcagtttaggtctgtgaacatgatcttacacaggggctaagtgttaggagggttgttaattggaaatatgcccttgagcaggtgttattgcttttttcgatgtgttttgttctatcatcgaactctttgttgagctacttcttctgttaccttgcgctttatcatttctaggtgtttcggatttctttgtttgtaagcctgggacataaacttgttctaaaaggttgcttgtttgatccataggcattaaagaatctgacactggtttggctgcacca

SEQ ID NO: 53798 - DNA, 469 bp, Populus trichocarpa
  Intron number 1 from transcript POPTR_0003s02095.1 (locus POPTR_0003s02095) derived from phytozome v7.0 (chr-ID scaf fold_3; pos 2130564 to 2131032)
ttgaggaaaagatttatactgccgccaccaatcaggtattcggctaatgctaggttcaataattttgatattctctagacatgaatatacacatgcataagtttgtggatttatgcatgtacacgtgtgtgtagtgtgtccacacttcctcactggtcattctgtagaagttcttatctttccgttaattctcttgacaagtgttttatttagagtgaccaaggtccttttcaagtacaagggaagtgtgcaaaaagcaaataacgaatcaatacataaataattaaataaaaagaggagacacagaagtatatcctcacagaagatgcaaatacagaaagcctagcatattagaaagagcatatatctcttttcccccttctcttgtaacatggactgctcagagatctaatgttttgttattgatatctgatttcagtctgattatctgcgtaaaatatctctgaag

SEQ ID NO: 53799 - DNA, 849 bp, Populus trichocarpa
  Intron number 1 from transcript POPTR_0006s06900.1 (locus POPTR_0006s06900) derived from phytozome v7.0 (chr-ID scaf fold_6; pos 4993389 to 4994237)
tgaagggattgtggaaaaagctgtttttcctttttgtaagtttgattctttttttaaggtttttatttatgaatttcttgatgtccttttgttagtttgattttgttttggatgatttgtttgcctgtcttttaatattgtttatgtttgtccctgaggtgtgggaatggttatctcgtttggttcagtgattgttattgaattgcttgaaggattgtgttactgtagtcttttgatttagcttttatttgtctgcactagtaatttttgctaggcagtatggaattcagagttattgttggcaaatcagccctctattatggaagtttgactttcaatttgtaattcataaattgcccttatgaggggtggggtatgtttctgctaaaagtgaggttcggcttagttatggtaaagcatagactctcatttaagtttaaggctttggttctagtggttgagtgctccttttgcaatgtggaatagaagaacagccatattgcagggttcctaatccaacacccccactactttcatctcgaattgtccttatggaacttagaaagtgagactgatggaaatctatgtctgttgtggttaatgatcataataatgaacaaaagttggacatgcttttacatttaccactccatgtctgtaaaatgcatggggaggaatcgttttggtggtgttttggttttattgttttatatcaatgcatccccaagttcccttttgcactctttgtagcttgtgcacatttttgtagaccatggtgtacaatatgtgtaatgactttcacatatgagagagcttaaactctaaatctggttttatcttttcccttag

SEQ ID NO: 53800 - DNA, 861 bp, Populus trichocarpa
  Intron number 2 from transcript POPTR_0013s01550.1 (locus POPTR_0013s01550) derived from phytozome v7.0 (chr-ID scaf fold_13; pos 881883 to 882743)
aatataatttctttactgctttttgtttctccaatgtaagtttatttaattcaaaataatttctctttgttttgctgtttaaaatatggaatgtgctaataagatgatgcatgtgcttattgtctcttttgttctcgaggatggattttcattaattaattaaaatatgtttataaaaaaataaaaaataaaaaataaaaagatgatatgattatgaatatagattttgaagtaatcttttggtcatggaatttacttaaagtaacctttgcaccactccgtaggaatacatatataaaatctaaaattaaaaatttaaatttgattaaagcatgtttcatatatatttatcatatcaatgcactgattcatgaaaaataattccacctatataatttataaaatcatgttttttttgttttatcaacaaacaattacaaaactctaatttacaaaaaaaaaattattaatttataaaataaaattgaacaataaatttgttcagatttacctaatgctttctagaaaagaaaacaacacatcgtgtctgtgcaataaatgagaaacttcaaataagtcctccaattatacatggattctaaatcaatccccaaaaatttcaaaaaactctcattcaatgttactgaattccatccagaacttcacgtttcttcagggagttaagaggggaaaaaaaaaaaaaggcgatttagcatagagtttggcatttttatagaaaatctgtgaagaataattcggatgaaaaacttaacggggaaactttagatatttgtctaatttatagatgggttttgcataattgcagaaagaccttttggggagtggtgaagaagaaatcaa

SEQ ID NO: 53801 - DNA, 530 bp, Populus trichocarpa
  Intron number 2 from transcript POPTR_0013s13190.1 (locus POPTR_0013s13190) derived from phytozome v7.0 (chr-ID scaf fold_13; pos 13742727 to 13743256)
ttgaccttgtgaagtaagtttttttttttaaaaaaaaaatatatctcatttagttatattctctcactctgtttttgttttgttttgttttgtttatgtttcttgtatatgcggttatgtaaatttatccaagtatttatgttttagctgaatcaaaggagattgcgctgtttaagttgcacctgagtagataatcctggagattctagcaagatatagtgtttaagattgatttttaatccactaaaacacgatactgtatacgagatcaatatgcatgctatacatttatttcatgtaggagatatcttcacaacgagaaaggtgtgtcaacttttgtcaattctgaattaaaggagaaaactgatagatcggtttttagttcacataaacctcttggatagctgcatctagttgcatggttgataaaatgagttggtactctgtaattttgtttttgttgcttttgagttactcttctacttgcttctgcaggtattggttatcggtcggtgctcaacctacagaca

SEQ ID NO: 53802 - DNA, 557 bp, Populus trichocarpa
  Intron number 3 from transcript POPTR_0006s22010.2 (locus POPTR_0006s22010) derived from phytozome v7.0 (chr-ID scaf fold_6; pos 21031177 to 21031733 reverse strand)
tggggtaccaattacaaaggtcaaacacagaagtggtaaggatacattctcacaaagagaaacaaaaacaatcagatggatcatatcatggaagctaatttgattgacccagatgtgtgtttgttactcctgactacagtttttggttgcttttagttttgctttcatgataaccactgccttgccttttgccgccgttaattcataaataggagtgattccatgtaatggttttgcaaacaatggtttctttgagcatcctttgttatttcggtaacataaatgttgctaaaggggggcatgtctctgtttctgcctttgtgtacttatcatgattgagtctttttctctctacaaattgtcctcgcttaatctcaaaatctacctgctttcttcacgatctcctttaaataattgcagaaagtataggatctgcccctttctgattctaagaccaagttgctggatttttcacaaaagtatgtccttttcaatttgttcatgctcgtaaagaacttttgaaaacaggtttcttttcaagttcactgggaaggagg

SEQ ID NO: 53803 - DNA, 283 bp, Populus trichocarpa
  Intron number 1 from transcript POPTR_0018s09920.1 (locus POPTR_0018s09920) derived from phytozome v7.0 (chr-ID scaf fold_18; pos 10993980 to 10994262 reverse strand)
ctcaccctccttctgattcctcctccatctccaaagtaccttttcatttctcttgtctttttactcagttttactttgatcatcaaataaattgaaaatttcctaattttgttgtttaaatgaacggtagatcagggttttggtttatgcttttcctgaacctaggaaaattagctataccttgtagttcgtgggagcataagaagattattagggttttatttgtatatttttttttttaattacagaatcgggaggcgcggtgcttgtttccgctgactgt

SEQ ID NO: 53804 - DNA, 763 bp, Populus trichocarpa
  Intron number 2 from transcript POPTR_0018s14330.1 (locus POPTR_0018s14330) derived from phytozome v7.0 (chr-ID scaf fold_18; pos 14566503 to 14567265)
tgagaccaagaacaagcacttgttgcacttgtcaggtgattatcttatctgtaaacacttaactctgcacattttggtctatgcttcattgtcttgttttgctttgataattttagtgggacttgattttgggttattattgttagtgtcaaaggtttaaggtttggtttcagggagggaggattataatttgtgggagatttttttactacttttctatgttggtatggatttttaagtggtacaggcttctttgaaggcttgaaacaggtttttacctggttgaatatgatggaggatgaatctatgtggacaaaattgttgctttatgttgaaaaatgaagatgggaaatcatggttttgcaagatgtaaatcgattgggttttatttaattctccccacaattccttccatctattagtgaaagaacttattgctgaatgatataatttcggcttccaccgttttcatggttagagaaatgaatggattactcatgtatgcgtgcttatagtcaaactatttgccctaaatgttggttttaggatttttttttaagtttttttttttatcgtggttagggaaggaagtgaaatttgatgtcttgatgaatggattgttgtttatttgataagcggatttttctgtgttatttgtgtatgggaagctgctccatttcttaaattatgttgaggtgctgagatgttcatgattatgtactttacaggaaagaagcaccttggagccaaaaaagaaaggaga

SEQ ID NO: 53805 - DNA, 672 bp, Populus trichocarpa
  Intron number 1 from transcript POPTR_0013s09460.1 (locus POPTR_0013s09460) derived from phytozome v7.0 (chr-ID scaf fold_13; pos 9220762 to 9221433)
ggttcttcatcatcgtcacaaagacctcgaagaaggtgagaaatttcaatgcttatgtttagtttgcataacatcaaaaccttagtaaccgtaacatcttgtagatggcttgtgttttacttcagaatcatctttgtaaacctacaatagttcaatgtgaattgctcttagacatgctttacgactcacatacgcatgaaattgtaaggaaagtatatcataaaagcaatccatttaaccctttttgttggggaaagatggtcggtatcatattgttcgtgctatacatattttttcttctgtgaacatgtctgaacattaaaaactttaaaaaattaaggatgcattaatgatatttcaaataaatatagtataaatttttattatttaactggaaaccacacaaaaaagattctaatcaaattataaattattaatataattacattagttatctcattcaaataatactaatacttataaatgttgtcaggtatttataattataatttatgtatattcatgcatacctttccttcaattatatacatggcatgtgtattaatcctgtttaggaattatcagaccacttctcaacaagttcggattcgtttttttaggctaattaatggctacctagctactatatatggttgtgaatatgcaggaagg

SEQ ID NO: 53806 - DNA, 1051 bp, Populus trichocarpa
  Intron number 2 from transcript POPTR_0013s12690.1 (locus POPTR_0013s12690) derived from phytozome v7.0 (chr-ID scaf fold_13; pos 13392759 to 13393809)
accttaatcctggcaatttaacaacatttcaacatgtaagatcctatttggggattattataatgttcttctgactagtaagttgtagaaatgcatcatacttcacagttcatatcattttggttctttgtagtacactttcatttatttaaaaggctacatcatgattacctacaagtatgaagaaatggaattttaagtcttgcactgtatttttctggtttaccgacatggaaattggaaaaagaaaaaaccatgttagctcctggctgaggcaagtcatatacagaaagattatggtcctttttattttattttattttccttactgaatatacattctcttatcattttactttgaagcttgatgccatagttcacatggagggtgtagattgttttcttgctggttatctgttattgcacattataactattacttttttcttttgaaaaaagaaaaagaaaaaagaagcaagcctattgcttgaaggtaatttagtgaagccaatgtgggacatattataagcctgagaaggtgattttatgttttgcaagcttcataggggggtctcgatgttactagccttgtggtttgttcaagtcccaacacatctctaatataaaactttaagaccaatagatgcaactatccaagtgttgagaaaactgcaaggccctgccctgatttgattttgggaagatacatgtccaagactatgacaacaataaacattcggatgggaaccatttcttaaatgctaatccatagcacttgagctgttttttgttaatgatttcagcttttagcaagttcattttactttttgtttcatttgcatgtccatgtgtaatttcagtgatcaactgaagtattcatttactgtcattcacatggtattcagtttctagtgccctaagttttgatctttcaaggcataaagatattctcggtgatgactgatgagcataaaacacttacatttcaggaatatttggtaaatagtcatggtcaggggcttggttttcaagggtttcatcaacccaacag

SEQ ID NO: 53807 - DNA, 765 bp, Populus trichocarpa
  Intron number 1 from transcript POPTR_0006s24030.1 (locus POPTR_0006s24030) derived from phytozome v7.0 (chr-ID scaf fold_6; pos 22728822 to 22729586)
agaagcctaagactatcgaggtcaagattgcttgaagaagaatgcttgattacatatataatgtagcttgttctgtgtgctaaggtgatgataaataatgagggttttgctgggtgctttgcttgggggtgcgggatgattttgggcgtgtttgcgtttgaatgagttcattattagttttctctttaggaaactggtgattgttgttcaaaacgtggtatgaaatatatgaatgtagtggtggcgttatatattactttttctttctacttggttgctttactctaattcatatgtatttttaggtttctgccaattttcttcccctgaacatcttcatctctgatattttcgaggtttatttggaattctcgactatcattgcatgatagagctacattaattaatcaccgcagccatataccattgacataacaattcacattaatcctactagcttagaaacggagcagacataccttgcggttcttgaaactctatcctaaaactaataaacttgaaaccctatttgccggccatattgatttgccgatagtagcaggagcctgaaagtctatcgagcacgggtaaatttatctgcaaaagctttcgaacttctcatcaatcatgtaatgggtttcgtcagtgtttaaactgaaaacaaaaggcaattatctaaaaggaaaggacgatgagcgaaactattaaagtatgccaatcaaatggagaggtctttgaacttctttcaggtttggatagttcttc

SEQ ID NO: 53808 - DNA, 911 bp, Populus trichocarpa
  Intron number 1 from transcript POPTR_0006s23220.1 (locus POPTR_0006s23220) derived from phytozome v7.0 (chr-ID scaf fold_6; pos 22019444 to 22020354 reverse strand)
gatcatccttgcttaccttttcgttcgtattaatttattttctttgttatttctgttctacatcaattttttcacttggaagttctgtatattttagtttgataagaaaatttaaaggcaataaagaaggaaatatccaaagggttatatgaattcctcgagctgcttctgtatatcctttttttttttgagatcatatcaatacagtatctatgcgttgaaaagttatttattctttctggctccttttctcattaatgaacttagcttgattcaactgatcatgtgcatgtctcgggtttattttcctttctttttgactcggactttccatgatacaggtatgtaatgttagctcggtctttgccccatatggaagaacacagagaaagacagagagagaaaacaagtttagttttgtttgtattagagacaaaaacatggaatttcttaaccgtcgatgttagctttggtttttctctcaactaacagtcctggccatacctaaaattgtctgaattctgacttcgcttccgggtttgaccaaaaaaagcaacaggaacagactacttctttttagttttctgcctttccatttctggttttttatatactttttaatgttaaatctccattttaccgtagataaattaacttggctgcttgcatcttgaaacttgcgtgtcaagaaaatcttatccagaaaattcctacgatccgtctgaagtttttgtgattctctttctagattagaattgaaggaatttggcagctgattccttttctgcaagacttcaattaggcttgtctcactttttttttttaaaaaaaacaattatttcgagttcttgacattgttgttgaatcccctgacaggtctctgttgctggatatacagctggacaacgtgc

SEQ ID NO: 53809 - DNA, 809 bp, Populus trichocarpa
  Intron number 3 from transcript POPTR_0003s06890.1 (locus POPTR_0003s06890) derived from phytozome v7.0 (chr-ID scaf fold_3; pos 8430654 to 8431462 reverse strand)
actaattctaagaacgagaacaggtcttttgtccattctgcatgtaaatgtaatatgtacttggttctgttaaggagacctaagatactagtatcagaattagcattgttgatttgtaattagatgatgacttttttatggttgcgctggtttaatttttaaatcaatgttcggtatttttattttctttcatttaattgtttggaacaattagtttgagttgcatgttgcctattagaagtagactggttcaacactgtggaggtaatttcttgactatttttgtcattacacccttcagtgttaattaatgatgcgggcttctgtgattcataaagatgcgggcttctgtgattcaaacttattcaatttcttctggtagtaaatgtagctatagtttatctttcttctttccttgtttaatttttgtttttgagatgagacaagtagggcatcttattctgaggtatgcatataaaatattgctgttgcatcctttgtagctgatatttttgcctagtggctattgccagttcatttcctgcatatgtacaggggcaaacttcattgctgttgtgatgttaataaaatctgttgaatgaggcaaggtatcatcagggtttgtgggggaaaattcacttttttttttttttttacttcagtttcttgtttatattgattagactaacaattcatagcattccttttctttaacatcagtaaaaacatactgacttgtcctttcaatttttattttttgtcttgatgaaatagatataagaagctcctgtgcacggtggatcttacaa

SEQ ID NO: 53810 - DNA, 489 bp, Populus trichocarpa
  Intron number 4 from transcript POPTR_0003s06220.2 (locus POPTR_0003s06220) derived from phytozome v7.0 (chr-ID scaf fold_3; pos 7701853 to 7702341 reverse strand)
gacgtgtcgcgctaattggatttccaaggtctggtgtcttgattattttcaaacatgtgaacatgcattgacatatcaaaaaattatgcttgtgcacgcattcacataggctttactaactttataatagaacctcttcctgcaaaatgcaataaagtagaccaatcgtctgcctcagtaagtgtttagtggtttagttggtttgtccaaatgtttttcttctatatcaggacttccaatttaatagcctgaatttgaagtgccttatttagaaaaagaaacggttctttgtatctttaaatctgcttcatgtatgtaggtttgcacatttgcatgactgatactatctctgaatgggtaatgtgatcggttcatcaatgtttggctagtcacataagaataatgtagcttgtttacatgtacaaatggcaatgccagagagaaattttcctatgtggttgcagtgtggggaagtcaacacttttaaca

SEQ ID NO: 53811 - DNA, 464 bp, Populus trichocarpa
  Intron number 2 from transcript POPTR_0018s12280.1 (locus POPTR_0018s12280) derived from phytozome v7.0 (chr-ID scaf fold_18; pos 12801870 to 12802333)
ctgctgaaggagtggtaagatttgtttttaggttaattttgataaattcattacaaaaatagtatgatcatatcttaatatgattttatctgttcttctgtggattaatttgcgaagtatttctccgtagatattaaatccatcattcttgatgagttcaatacgcaatttgttctagttttctgcctatcatatcagcatttatacaggcattagttgcaaatggttttgtctatgattggaccgattgcagcaacaaggctataatcttctattgcatgacttgtgacacttgttctcaataccatgcacttatgatcgtggttgaacttcgaagatgctatttcatgatataactgttgttttcataagtgcacgagaatgttctagccacttgatatggtcaatttactattttgtaatgcttaggtaaacacagagagggccatacgccacgcaattca

SEQ ID NO: 53812 - DNA, 224 bp, Populus trichocarpa
  Intron number 1 from transcript POPTR_0003s16920.1 (locus POPTR_0003s16920) derived from phytozome v7.0 (chr-ID scaf fold_3; pos 16425701 to 16425924)
acgatcaacttctcctctccaaattgctttccgaggtatatgagagagaaaaaaactccaaggaacattgaaatcatcttcttgtgtgattaactttcaataaacacttcatgttttgattgattgattagcttctattgaatgatttgttcaaattacatgtctcgctgtcaattaacgtagctggcctcgtttgtatgaacagttggaatcactaaaaggga

SEQ ID NO: 53813 - DNA, 442 bp, Populus trichocarpa
  Intron number 3 from transcript POPTR_0019s01930.1 (locus POPTR_0019s01930) derived from phytozome v7.0 (chr-ID scaf fold_19; pos 1707027 to 1707468)
aggttatctgggaggaaggaaatcaagggatcaaggtactgttatgaacataggtttgatttgtgaattctagtgtgcctaataccacatactttcaacaatgagaattcccaacctcaagattgtgtactctatgattgttaaaaagcacatgttttcttcccttccaccgtgatgattatgtgaaattgtttgttcatgatataatggttttttgtcacatgcttgtccttttcaacttggaatatggctcatgttaagctgttaattgagaagttcacatctaagatctgaactgtattattttagtctctcatcgtcatacaaatgacatgttttttacaagttagtttttttcttatgaattatttgtgtggcacaacttatcctcctcgttccttgggcagaacttgttgggctagatctgctaactggtatcttt

SEQ ID NO: 53814 - DNA, 850 bp, Populus trichocarpa
  Intron number 1 from transcript POPTR_0013s13990.1 (locus POPTR_0013s13990) derived from phytozome v7.0 (chr-ID scaf fold_13; pos 14293599 to 14294448)
cggtcgtccaatctctctgtcccaaatagcttcaggtttcaactcttccttcaatccttttctttgctattaaattattagcattactatgcatattattctactgttgaaaactacaaagtcattttggtaaatttaaatagtataggttttaagagttcataaaatattggtcaagtagttttgcatttagacgttttattttgaccattaaaatgtagctcaagtgaaaattatttttctcccttttcaaagaaatgtcaaatccgaatctctccgttataacccaaatcttttatgttaaatacataaacgataaaattgtgtaattgctcctaagattatcctaggacttcatataaatgtttccaaagtatactatatatatatagtttactctctttgtacatatgtttcataagatgttttgatttctttttatatatatataagaatgagacgttaaagattgtagggatatgattttttttaacattgtagtattcttaattatccaattctttcttcaagttttttttttttttaaattatggatgcttaatttttaacatgatatcaaggcatatgtcttgaattttaactaggtgattcgcccaagttgttgtttgatgcatggtataagttctttccaaagcacaacatatatagcattaatttcgaaaatattttaacattatattgttatccctagcctcaccaaagcacaacatatatagtattaatttcgaaaatgaaatatgctgtatataagttgcaatatacagatttttttcttctatccttcatgatttcaggtattaactcacctagctcggacatttcttatctt

SEQ ID NO: 53815 - DNA, 566 bp, Populus trichocarpa
  Intron number 1 from transcript POPTR_0003s03210.1 (locus POPTR_0003s03210) derived from phytozome v7.0 (chr-ID scaf fold_3; pos 3631233 to 3631798 reverse strand)
cgtttacttctcggtcgcatcagtttctaggtactttcttgctgactaccattgctttacatcttttgattgagaattgtttgaggcactttcttctctggaaataacagttcaacatgccatacctttactttcttgttttttcttagcatagccatcccattatttatttgggaaattgaagaaattcgtcatctaatctgaacatccgttgccttcttggtatgtatatgtcgataatctattgaatttggactagctgatccctagctaatgaatcctgaatttgatgaacaatctgagaatgtgccgtcatctctatacttgacaatattgttaattttccatcctagttgtcttttaagtttttaacatagacatcaagaaccaagataataaatcagtgctgtttttgcaatttttaagaaaaacacttcgaaaggaactttcaattccttagtcataacttatatatctgtattaaatttagaaagatacatttaactaaagtagacaatacatgcctcacaggtgataggagattcagacagtggaaaggttctgtt

SEQ ID NO: 53816 - DNA, 685 bp, Populus trichocarpa
  Intron number 1 from transcript POPTR_0013s03390.1 (locus POPTR_0013s03390) derived from phytozome v7.0 (chr-ID scaf fold_13; pos 2087360 to 2088044)
gcttacaagttacaagtgtgctttgttgtggttacaagtgggaactaataacgatctttcaattgcatgtgatgcataatcttacgtggccaagttccctatcatttaatagctctcctgcattaagaatttcttagatcacagtttgctcaacttttaaattgttctacaaggtgaggtggcagtttgttttttctttagcgtcagtggggataccaagtcattggacttcaaataggaacatcgaaatgttaatattatgaccatacacattcgttcgtgtggctttaggtgttttctctacagtttaatttttcagctgtagtttgagtccctgtaggaagtacaaggaaaatttttgttttgatcttaacatgtgatggaatggttttttcttttttcgcactaatcacaggcagactggaggcaatgctacaaaaaaattatatatagggagagacagaaaaggcttactcaagccttttagaggacaatccttttgatcatgtaaacttttgtaaccaatttttttttaaatgtagttccttataaagcctcattgtgctgtctttctcaatcgtgaagtattattggtgttaatgaagaagaacttatattcaaatcaggccaatgccatttttcttacgtaggtagtacacaagagaagggtagctttggcaaaggc

SEQ ID NO: 53817 - DNA, 735 bp, Populus trichocarpa
  Intron number 1 from transcript POPTR_0006s13450.1 (locus POPTR_0006s13450) derived from phytozome v7.0 (chr-ID scaf fold_6; pos 10664012 to 10664746)
tccccctcctcttctgcttttttctcttcctcactgtaagtctctctcttcaggaagaaaaagaaatctctcttttattctatttattactttggctgaccttaactaatttaagatcgaaactttttttttttggaataataataataacaataacaacctagatcgttaaacctagaaagaaagttaccatctaaaaattgaaaaatccgtctcttgtttaacacatcttgattggaaattgaattctgatttttcggatcctgaatcgggtttggatgtacaaatgtatgatttctcttagattggttagtttggattttttttttcaattgctttgttgatttttgtgtatttcttcttgttgttgttgactttgttggttagtgaacaggaagtgttttttttcatcagttgcatgattagatttaatagaatttatgaatatttacttgataatactctgtttggttgctgagaaattgaaaaaaattgacatttttgaccttttgtgttgttatgaaacttgggtgtgttatgtttattgtttgagtgtagacgctatttttagttgttttaactagtctaaactgagataattggtagaattgggtggattctttttttttttttttttttatgggtgttaggaaatcttggcattggccgaattatttttaaattatgttatatgaagatatgtctaatgttgcttgaatattctccagggcaatc

SEQ ID NO: 53818 - DNA, 1025 bp, Populus trichocarpa
  Intron number 2 from transcript POPTR_0003s05900.1 (locus POPTR_0003s05900) derived from phytozome v7.0 (chr-ID scaf fold_3; pos 7273112 to 7274136)
gttcaaggtattgtagctattctttcccgtctattgttgttgttttgttttgttttgttttctttcattgcattggcatggtaatccaccattcaaaaccaagtttcagattccaaaactctccttgagaaaagaagagactcttttctttagatttacaaaaaattgcagataacctattctttgtactcaagttcatcatggaacgaagtgttctgaggctcaaacatcagtgtgtcttagcatatcactccctatccagcaagctactgatcactgtttttctgtggacttcatctgataaacagtccaattgggctagtgggaactcaatgatttattccttaactagccatcaacgatttatgcatttttatctttttttccttttgtaatacatacaaatcctttgttggaatatggtgtgccttttggtttcaaggacaagataaagagaaaggagttcacaaatgtcaacacagagccatgttctttattggaggggtccatatgatatcaaatattttcgttttcttctcctttcattgagattctcattagaataagttccatggggagagaagctacagcagtgccgtgaaataatgtcgatctgattattcctcctttcctgttattttcttgtttgatgctgtgctcaatttgggcatgcttgaattggaaaacctttatatgtcatattcatggctaggtgaccactggttcacttaattctggcaacccatgttaaatgtgctctctgctaagaactttagagataaaaatattcattacatttatgccttcaactgctgctctttctcaaatgctgtgatcccaatacttagaaaatatactgcagatggttattaatattttatatttgaatttaagagattagggatttgttttttcttctgtgggacatggcaaagaaaatatctcttaaatccagtcatgtttctcattttattctctatttggttgcagttgttcccagctactggaaaacctccctctcccta

SEQ ID NO: 53819 - DNA, 529 bp, Populus trichocarpa
  Intron number 2 from transcript POPTR_0261s00220.2 (locus POPTR_0261s00220) derived from phytozome v7.0 (chr-ID scaf fold_261; pos 11635 to 12163)
gccaacatttctcttattgaaagccttgactacgagtaagtgagatgtgtaattatgccaattcccgagaaaatcagatttgccttttgtaatcataaactcacaacagattctttatttactttctttttttccttttacagaatctggttatttaatcactgattagattagaaaggaacctgcgagcttatggactcatagtcattcatacatctcataaaatcacaaaatatgaacataaaatttatggtgctcattgaagagagatagatataaaaaggaaaaaaaaagagagagaaaataaaaaaggtacttttaaataatcatattatttcttacaagtttcggatttgattttcattttcatcattaatttctagtgaatacacgaagtaactaattaatattcatcaccacagctttaatgtttggtacacatatgattctttatcagcttggcttcttgatagaagataaaaatgctaacgtctgtctttttatttgtcgtcctacaggattgctgaaa

SEQ ID NO: 53820 - DNA, 611 bp, Populus trichocarpa
  Intron number 2 from transcript POPTR_0018s01840.3 (locus POPTR_0018s01840) derived from phytozome v7.0 (chr-ID scaf fold_18; pos 1670750 to 1671360)
tctcttcaggcctctctttaatcagttcctcaagagtaagtattcttcttcttcttccttgtatgtttttaaatttaagagtaattttgttaaagctagaaactttgcttggttgcttggaaactgttaagaattaatgagagagtcaaagtatgaattctgggtttcgggcttttttcatgttcttttgttggtcaggcgaagcaaaaagtaaaagggtgaaagcaggatattcaaaggttagatcttttttgcctttcctttaatggaagccaaaagggtccttaagaaactgttttgattctgagaaaaaagaggtatttttttagtgatcaatttgctagcaatcatagacagcataaagtttgtgaattggtataaagtcagctactggttgcgtaatcaaagatataatttatgatcctaaatcttcttgtggtaattgtttgatgagatgtttgttgcatttagttgttttgtatgtaggaatatcaaagactctactgttttgagttcatactattgctgttcaattatttttatttgatgggtttttgtcaagttgccttcttttctaaatcaacctgatgtttttttctgtaggggataga

SEQ ID NO: 53821 - DNA, 823 bp, Populus trichocarpa
  Intron number 1 from transcript POPTR_0018s02430.1 (locus POPTR_0018s02430) derived from phytozome v7.0 (chr-ID scaf fold_18; pos 2203515 to 2204337 reverse strand)
cctgatctctcttccctccttcactccctctctcagtaactcacgaaccctactctttctttctttttagtttttactcagcttgatgcttttgtagtttttttttttttagcacagagttctaaattgctaaagaaataatgggttcttgaataagttagtagtcaagggttttagctggttgtgcactggttttattgttggagaagaaagaaatggctttcatgggcaatgtgaaatgagcaattttagtgtatttttgtgattcgaatatgttacgaatttaagtgagcatagagagtgaaaaatttatctgcttttatactgtttaatttggactttttttgtttaaagatttgagttttttagaaatgtatttagggttttagctgaagtgagggaagtaaactgtttaacattagtgaaaaataggcacttttaattcacattgagagtggaaattagtcatggaagtagttttatgttcaattacttactggaatttcaatgacactgtaacaatcctttggaaaaaaagaaataagaggcacttaaaacaacaatgtgtgcgagaaaccctcattatgattctaaaattgattggtcgagagtgaagattttgaataagaatttgaaagtagaaatggctcctggaaaatgctcaatttggagaattttatttacaagggaatgagaatgtccttttctttcaagttttttaatagtttggttattcattcggtctggagactgtggttattcatttccaaaataattttatttttttcattcagaccagaggatagtccggcacgttaccaag

SEQ ID NO: 53822 - DNA, 206 bp, Populus trichocarpa
  Intron number 2 from transcript POPTR_0013s00520.1 (locus POPTR_0013s00520) derived from phytozome v7.0 (chr-ID scaf fold_13; pos 228553 to 228758 reverse strand)
gttccgaaagttatctccattattatttcctgcgtgttctcttatgttttgttattaccattctggtttcttctagactgcatttgctctttcaagtttctagcactaatttttttttcttcctgttctggttccttgtaaagtttgtgctttgatttctggtgtttgaagggaaaagcagcacaacatcccgatttttggaaaga

SEQ ID NO: 53823 - DNA, 505 bp, Populus trichocarpa
  Intron number 1 from transcript POPTR_0019s08850.1 (locus POPTR_0019s08850) derived from phytozome v7.0 (chr-ID scaf fold_19; pos 10384821 to 10385325)
cagttgacccatcatatcaaggtagaaaaattgccatggtctctcctaacttttaagtgacaaaatgcagatataggaagcaggattatcaacatgttgtgtgacaactaggaggaaaagtagtcatttataagatggtttcttatcatgcatcggcttttgcacctactggctactattattggcttagaaggttggatgcccagttttagctggatccagattccagatgtaggattgtttggtttgttctgtttgggatgcctattgggtcatttgcttcattttatcaatgtttgttgtattaaattcacacgagagagccagttctaaagtcggtaaactgaatgtttgttgttctaacaccataattatttcatgaatggattttaggaagttgaagaatcatgaaatggaaacaggtaaaactcatatttacagcaagtgacgtgcccgcatgggaaaaccatcttttgattgtttagcttctcttgacagatagggc

SEQ ID NO: 53824 - DNA, 691 bp, Populus trichocarpa
  Intron number 1 from transcript POPTR_0013s00960.1 (locus POPTR_0013s00960) derived from phytozome v7.0 (chr-ID scaf fold_13; pos 500933 to 501623)
tctttggtgtacgtataatttccttcaactacatgaactataactctttttttgccctgaaaaactatcctttgtattgcctagatatacttgatgaagcagttttcgtcagttatactttgattttgctgctatcctttgcctttcatttctgttgattcatgtcccataatgcagagaacaagttctttctgctttctgttcagctatatatatacatatatattctttgtgttcttctatgaagtatatttggcaacgaagacatcaactttttccaagtagtttagttctttcctatttctcgttctttctagatacagaaataattataagaagaataaaagaatttgttcggattattttctattttcactttatttataatagaaacaagttcatgaaacttagtttgcctttgagtaaagcttttctctacagtgagatcgatgagtgctgaagagtaatataaataacatagctgtaatgatcaagccgtcaagagtagccttacgtacttaacacttaagttttcgggttgagattcacaatcagtttcattaatatttatttcgtgtattatttatgtgttgtgctttttgaaagtaatatctgattgcttggtgaactgcaaataaatttatttatgctaattactaaatcttttatgtttgtttttatcattccaggg

SEQ ID NO: 53825 - DNA, 835 bp, Populus trichocarpa
  Intron number 1 from transcript POPTR_0018s11950.1 (locus POPTR_0018s11950) derived from phytozome v7.0 (chr-ID scaf fold_18; pos 12583810 to 12584644)
gaatcaaaaaaggcaaaattgcccgctttagcaaggtttgtctttgcattacttcacgaggtttattgtttacgatttttattacaagtagttcatggtctaagcaatttgtgttgtggttttgtttcttggcttgaaggattaattaggacaactataagagaattgaaagaatgagttgtgttaattaggatccaaaatggggggttaattataggagaatttggatattggatttatcttcttggatccgttgggtttggtttttcaatgactcttggtgacttaatgactggtggatctcatgcccagtgaaatgttatcttaattaacaatatcacaaggctggtgacttgatagacttccggaatgattgaaactgcttgtagatgagcttcaacttgtttggcattgaagggaggtacatgaaggaatgagcctgtgattgtaagagaatcttgggtactagagcggtgttagagtgggtttgttctgttgatttagggctactgaaaccagtctttggggctgatttcagtatcaaagcttccactgagttgcttttgctaaatcagaccaatgtttaagaacaagatcatcattattgaaatatcaaatgcatgcttaagcttttgggctcgagtttcaaacagcctaaacttctgtggaattggttgaattttcaagtcattgtttgatgcataattaagtcagtttgtctactatcttctttgtacaaatggtttgcggcatttcttttgagttcactccaactgatataagacttgaattatctgcagtgtaattgtggaggctttgaaggtggatagtttgc

SEQ ID NO: 53826 - DNA, 501 bp, Populus trichocarpa
  Intron number 2 from transcript POPTR_0018s11950.1 (locus POPTR_0018s11950) derived from phytozome v7.0 (chr-ID scaf fold_18; pos 12584651 to 12585151)
tttgctcatctttggagcctttgtttcgcagaattgtgagtcataaagtctttctttaattcgtttattataataaaatcttagttgggttgtggtatattgatggctgatgagcttaatagataagaagagtgatatcatgctaagcctttagaagatacaatgacaccactgctgctgtatatttctagttcattgtatgtcatgagaatcatgactggagtcacctattaggtctcacgtatagtcatactgaaatagttgcagagactgctgctcagcaatccctagttcgatttgttgaaaaaaagtcgttggcaacattcaagcgatttcttgtctcgctatctccaatgcttctgctgttggttcaatttattgaaggcatcgcaatcatgacatgttatctgattctagctatctccaacttcttttgctgattttggttttttgaatgaataatcaggtcagcgaagaagtggaacgtgctttgacgaggtt

SEQ ID NO: 53827 - DNA, 936 bp, Populus trichocarpa
  Intron number 1 from transcript POPTR_0003s09590.2 (locus POPTR_0003s09590) derived from phytozome v7.0 (chr-ID scaf fold_3; pos 10887401 to 10888336 reverse strand)
gctattacacggccggtctctgtgttgccttttatgtaagtgacaagcaataatcatatattcctttcgagaaaccagaaaattgttctccgctttatatatatatgtgtatatatatatatatatatatatatatatatatgtatgtatatatatatatatatatatgtatgtatgtatgtatgtattgccttgtcttttcaaaggtaagctttttggtttgacaaggaatttgagtttattctggctttgtatgaaggaaaagttcaactctaatttgaatttgctcaccatgcttcttaattttcggcaattaattgatctcttaaggctccatttatgatcacttatctttcctcgttagttttttggaagatttaattcttgctttgttattttgaattttccacgaggaatttagttgttttggacccacatattgattaataatccttagtttcatcttcgttataaaaatttcccatacaaacatttgaattcggttatgcatatatggttttcttttttctatttcctctatgctttcacaattacctattgtaaatttagatattgcaccatgttttttttttttaatttagattttgtttaaattatttttttatgtttttgaatcgttttatatattgatatcaaaaataaaaataaaaaataaaaaatatattattttaatgtattttcaagcgaaaaacactttgaaaaacaatcgctactgaatcaagtaatactctctactataaatctggaggagggacttaggacatcaaattattattatttttttaaaatagtattaataaaattaatgtcaaaataataaatacagaattatagttatcatggtcaatgtattatggatgatgttattttgaacgcgcacgcagacatcgaacggggacgtgttcaagaagaccc

SEQ ID NO: 53828 - DNA, 851 bp, Populus trichocarpa
  Intron number 2 from transcript POPTR_0014s18420.1 (locus POPTR_0014s18420) derived from phytozome v7.0 (chr-ID scaf fold_14; pos 15565358 to 15566208 reverse strand)
gaaaggtaatttttatttatgatttgtattcgtggcggtaatgtctttttgtagattagtttggggctagtaggattgccagtggtttgctaggacggatgatgctagagatacttaatttttattttttaactgaaatactaagtgacgtgacataatggaatttgtgttttttcaaccaatcaattttataattataataattttcccattaaatgtgataagatattccatccatgatttgagattcttgatttttttcaaaaattagcatgtttttttttttaaaaaaaaaaattggaaaaataataccgtttaaaaaagaattggcaaaatagcacattgtatacatgtcataattgagaaaaatgacattcaacctcgtcggtattcaaaaacgcgtcatttcaaagaaattgtgaaatgagctgttgtacaaattattacgagaagagaggagaaagaaatattgaatgtctttatttatttattttttcttctctcctcattatcacaatttgtttttgaaatgttgcatttctgaatagtgatgaggttgaatgtcacgtttctcaatcttgacatgcccaaactgtgctatttcactaatgttttttcaaaggatgttactttacaaactttttttaaaaaagcacgctaataagcaaaaataaacgaaattctttccttgtaatagatgccacatcatttagtagcaaaacttagtaaaacaatttagtacccctagcattacccttgttaggactatctgaattgattcggtttttgagttaccacaaagtatgtgttagaaagtggtctgttactggcaggaccttggaggtggtttg

SEQ ID NO: 53829 - DNA, 739 bp, Populus trichocarpa
  Intron number 5 from transcript POPTR_0013s01900.1 (locus POPTR_0013s01900) derived from phytozome v7.0 (chr-ID scaf fold_13; pos 1098568 to 1099306)
agagattcatccaaaggaaaggttagtgattatggaggcacttaaatattaagcttatagtaatgtgttcgtatactaatttcatttttgtttcaaggaaaattaaatttgtgcaaaaactttccttggccaccctaaaagtgtctctttcaatgggatgagatccactggaatgtggttgtatataatgaaggcattgtaaaatgagttaatagtgtgtcaagtggtgtgaatttccataattgtgtgctcatgatcaattatttaaatttttttctgttaattttccagatgacagattttgaaagctaggctcagtatttctgaaacatgtgctgttcttcggtttaactgagcttaatttgcaaacgaagcttttgtcatctttaggctttgcatgctctttaactcaggtgttaactcgaatgtcattaattctttgctctttgataatggcatgctagaatgaatgccttcagtagtgaatgtctcgtattgattaatttggttgatgcagaattatcatatctagggaaacaaagttctgagttttttttctcattgttgttatgatggtcataattacctgcttttgctgtagaaaattatttccctcttcaattagtggttatgatgttcataaatgcaagcccgtttatactttagcgtatcaattccctctgatctatttgatctttaactcctgatgatctgatgtgtaatgaacccttgcaggttg

SEQ ID NO: 53830 - DNA, 807 bp, Populus trichocarpa
  Intron number 2 from transcript POPTR_0006s04690.1 (locus POPTR_0006s04690) derived from phytozome v7.0 (chr-ID scaf fold_6; pos 3225766 to 3226572 reverse strand)
atctcaatcttgatcgccgcaccggatttcttaaggtaattattattaactaattgaaaataaaatatttaagttcaatttatgagtgcggcaatgtcaggtagggagtttaggacttgataatgtgttgttaattttttgtagttttttttttaatttctggtagaaagtgtttgttgtgttttttatatttagttataaaactcgatccaatcaagtaaattaacctggtgatttactgatccgaagccggatccactaggtttttcttcaaaccttttattttaaatcaaaatgaggttattttaagttttgtttttttttttaaaacatcatagcttaggttgatatatagatctatttacccaacatacaacccccgagtgttggttcaagtcaactttaaattgagtttgatttttataggtttgagacatttaggtggatataaaaattggtggaagattattattgcgtgtgtgaccaagattaaaattcttataattgtggatcctgggagtgcttaatatttatgaatattggtcatgattgttaccaagtaggggatccttgcatttgttgccgatggatttgcaacttgggaattggatatctttattctgataggacttgctatgtgtgaagtatcaagaataaacccttgaaaaacattagagaatggtggtgattggagaatttgttgaatatgcttcactccttgataaattatttcgcaggttttgtaaataatatattgggatgtttctacttgtagatattgaaaaggtaaattctttgttcaggggt

SEQ ID NO: 53831 - DNA, 552 bp, Populus trichocarpa
  Intron number 1 from transcript POPTR_0018s09250.1 (locus POPTR_0018s09250) derived from phytozome v7.0 (chr-ID scaf fold_18; pos 10105393 to 10105944)
tatcatttgttcaccgacaactgaactctactcaggttagggtttctctctttcacgcatcgctttcttcttcttcttcttctccttcttcttcttgcaccttgtgaagatcgattcctgtttcttaatgagcaggcatggcatgcattttaaatcatcactcctgcctaactacatagcagcaagtctttcaatttatttcttccaattctctcattgcatcatatgcttattattaattaatatatcaacttgcttatttttgttcgttttccattctgcttgcttcgatggagtaagttttactttactttttttttaaaaaaaaaaaacattctcttgaattttaggatgtctgggaaatttgagttctatctagatttgttacttcagcttcattttgtagtttttatttatttattttctaggactggatttttaatttaatgctctagttgaaataactccttcttcttcttcttcttttgaatcttggctcattttctggacaacttaggcagcgttagagaaggaatttggagttgttaccta

SEQ ID NO: 53832 - DNA, 896 bp, Populus trichocarpa
  Intron number 1 from transcript POPTR_0018s13980.1 (locus POPTR_0018s13980) derived from phytozome v7.0 (chr-ID scaf fold_18; pos 14239749 to 14240644)
gccttccgcttcttattttattaaaggtatggtttttttggaggtgttgtgaaatggggttttgtttaatcttgggaatattgaaaattttattttttatttaatttactttttttttttttgtaaattttgtatgctagtttggagctttggagaaatgaggttttgtttaattttgttggttaaaatgaattctttgttgtgtgtgcttttaagattctgttatggctaattttggagctactaagaaatgggtgcatgttgtttctgttgagttttggggagtgatgtttgtatgcaagatttgttttttatgaattgattggggtttaatttatgaatgctgctgtttatgaaaagccattgcctcttttgccatgacttgattcttttttgccggtttgtgttcttgatccttgtagctgttgaaaaagtaagactggcctaaactaatggtactccctcaatgtagttgtgaaagataggtaaaggattaaattgaaaagtttaccaattctggatcattgtttagttcttatgcataatgtcaaaatgtgatgtatgaattaggacgtcaaaatggaggaattctacgttgctgttaatatcatggagttttgctactgtttatgaggaagaggtgatgcatttgaaataggaagctggaatcgcttgaattgttgtgggtagtaacatttccccaatcggttattatcataaagttgttggaaaatgtttttattattgttacttccatgtgactatgttttggttgagtcttttatcggaaaacattggataacctatggtaataaaagaatgagtcttttattattgcagtttaatagttttatattgatacatatttttcttggctgctgatacagctggaatca

SEQ ID NO: 53833 - DNA, 661 bp, Populus trichocarpa
  Intron number 2 from transcript POPTR_0003s04135.1 (locus POPTR_0003s04135) derived from phytozome v7.0 (chr-ID scaf fold_3; pos 4793885 to 4794545)
aatttgactgctttggtattctgccacctatcaagagacatttaaaaaaaaagtatttcaggcttttaaggctcatctgtttcaagcccatatcttttaaactcaactgttttgagtccctttgttttaggtccatttctacaaatattacttgatgctacaaatagacaaaacaagtgtcggtggcaagaagacaacaaacaaaaaacatgggcaatttctattttttcatcacccaatcatgacaggcaataccacatgggttctaaagaaatctccaggcttttcaaaagacattttggcctcttccgtgtcaactcgtctgtaaaagggcactcttaaatccttaggaggcagactatcatttttttcttagaagattttactctcctctgtaacccatatccattctcctctataaccaatatctcctctattgatttacattacaaatttaagtaagattctattttcattatttacactctatattttatatttctgtacatttaagtatgctctgtgtttgatcaaggatcctgacattgttggtcttgtcttgttcatttgcatcaaaaatttgtttatatttgcttgcatttatttatttgttcttttcacaaaatcagtatatcggctggaaacctgtgacccgatctaa

SEQ ID NO: 53834 - DNA, 564 bp, Populus trichocarpa
  Intron number 5 from transcript POPTR_0006s23520.1 (locus POPTR_0006s23520) derived from phytozome v7.0 (chr-ID scaf fold_6; pos 22237606 to 22238169 reverse strand)
ttgtgcgcccgtaagtctccccgttcaagattccaatatgcttgatccaattttatttctctcaatatggtgcttgatttcttccagccatactttttcatggcgaggctcgttttctttagagtaaaagttgactgcttataagtttttcttggatctcagtgttcttgatacttgagtactgaaattgtttcttagaactggatgtcttgaatacataggatggaattccttttgaattatacttctatggcgttagtaggctccttgacatgcagaattttgacctaggatggaattccatccgaattgtacttgctatggcatttgtagtctccttgacaagcagaattttgaccatcaaagctgctgcctcccttttctcctcctcggaaaaaaaggaagataaacagtttcatgttaaaatgtggtttccatggctcttctcttgaaatgattttactggcaaaatggttagtttattcttggattgttgaaagttaatttgtggaacttattctctactcaggtatacacctatatcagacccagattctaagggat

SEQ ID NO: 53835 - DNA, 704 bp, Populus trichocarpa
  Intron number 1 from transcript POPTR_0014s12340.1 (locus POPTR_0014s12340) derived from phytozome v7.0 (chr-ID scaf fold_14; pos 9116608 to 9117311 reverse strand)
atcaccgttacctccgacagcaacttctctaagcggtacttgctcatcaatctttatttatgttcgttgcttgaatccatcctcattcagtttcttctctgcttagattttttttcaataaaaatcaatccttgaaattcttcttacggaatcctctatgttggtgatgcaaatgaccaagtttcttaagaattaggagtttgattcatgttcatgagaactatacgttttgttttatctggaagaacaataaatcattgtctcagcaatccttgattataaatatatatttaaaaaaaaacgaacaaactctgctcgtagtcttgaatgtagttgcagatgatgaaaatcaagcgtctccttctcactttattacagcttcatgtgactactgggctggttgataattttctaaggtactaagtgaaaatgggggataacgcattattatttgtagttttgttttgcgatattatttgttatgcaattgactaacaagcagctagactgaagcaggcttgtatctttgaattgatggaatatattgattgttgttcatgcatagaattttaagatccctgatgttattatttcctatttcgcatccaacttatactggttgtctgacctaaatattatttcatactatttgtgcttctttttttccaggtatttaaagtacctgaccaaaaagtacttgaaga

SEQ ID NO: 53836 - DNA, 444 bp, Populus trichocarpa
  Intron number 1 from transcript POPTR_0003s18370.2 (locus POPTR_0003s18370) derived from phytozome v7.0 (chr-ID scaf fold_3; pos 17472381 to 17472824)
gagcggtactgatacctgattatacgttactttgctgcttttatgaaaatggttatataacaatttgtttttgtttttagttttgttgattgaattatgctattctatgttctaattgaattgagtgctatataggagggtactcatttttctatgttttatttggggttaatgtttaattggaagatataggtgtctgtaatgtattggttacccctcgtgttgcttaactttttaggatagtttagtgtcaaaatgaacacagttgagtgataaaacttcagtgcattcttcattaatgctgttggattatgttattatggaattatttgatctgaaagtttgggttttttaatctttgctatgcattttatggcttctgataaatggtgatgattgattgagtggatgttgacaatctagcagatttggtttttttccaga

SEQ ID NO: 53837 - DNA, 419 bp, Populus trichocarpa
  Intron number 3 from transcript POPTR_0006s18330.1 (locus POPTR_0006s18330) derived from phytozome v7.0 (chr-ID scaf fold_6; pos 16697062 to 16697480)
cagaagggaagggcagagtagaaaaggaagacaaggtaatgaaaagcttttctctattttattcttgaatacccttaacatgtagtatgcgagatctgggatcgaggttcagtgtgaagtcctttggtacagtggggcagaaataaatggtgaaagaaagaatattgtcaatgaaatggactgcaaaatccaagagaaaataaaccattaaactgtataactcaaaggcttagatcttctgggattttgaagaccatgtagattttgttacagcgtgtgcatttataaaagattctgatctgctttcgtttctttatgtggcatgtacatggcgaatgatttctgcttcatggaatggaaaattgatcatcattgtccttgcagtttatttgggtgaattccttttcctcttattttct

SEQ ID NO: 53838 - DNA, 791 bp, Populus trichocarpa
  Intron number 1 from transcript POPTR_0013s00610.1 (locus POPTR_0013s00610) derived from phytozome v7.0 (chr-ID scaf fold_13; pos 296289 to 297079 reverse strand)
tcttcctcctcttattttccaaaacggctttattggtattatttttgttgcctgtgttgcttttgttttttcaaagtctgcatctatttttttttattcaagcatgcaaagattgaaactttttggggattttgagataatttgtgtgtattggcttctgggttgtgttggatcttgttgaagctttgatttttgtatccggtttggtttgtcttgtgtttttggaggggtaattttagattttctttgtggattatgttcatgggctttgattttttttgtttaattattgtcttgggaatttttttgggatgatttgtttgtttttattgttagatcttagtggactttgtttgctttaatgtaatttttttaagtatatttcgtggagatcaaaatacttttactggtttcatttgctagtcatttcttcaagtgatgttttcttttgatgtgttaatttatctcctgtttctttgtattctgctgtgttggtgtttgagcttcttgattttgaacctggggaaggaatttacgtgtagaacctgacttgatctgttttgttatgcgtattcatcagtcattaatttttatgcagtgaagtggataaactttagagtgtgaatttattgttgaagtactagctttttgtaattgaccttgagttttatttcgtcggttttggtttagttatgttacattgtggaagatgaatggattgatatcatgtgttttgatgcaatttcaatcaattagttgagagttctaacatttttcgattgctgcaggta

SEQ ID NO: 53839 - DNA, 642 bp, Populus trichocarpa
  Intron number 2 from transcript POPTR_0013s04800.1 (locus POPTR_0013s04800) derived from phytozome v7.0 (chr-ID scaf fold_13; pos 3311121 to 3311762)
ttcatctgaaagaggagcaaccaacagtcctattggtattttttaaaattttgttttaattattaatgctaattatgtggtaaaaaaaacaataaatatatgtttgttatggaaggttaaattatagggatgtgttgaatgtaagaattgaaatggtgattgcttatatagaaaaaggagctcttttgttagtgttttctaattagggaaggatgaatagggattcaggtggaattggaaagccttttattttggcatgtttggttaaattaaaaattgttagagttagaaattgggtttggatttatgtgagaccatggatataacaatctacttgttgatataaggattctcttctagcttgctgcattttactaactgtatcattttgttttgtcactacatgattacaattgtgagtgatagtctgtgctgcataaatggcatgcttttgtgttgtcattatcatagttttgacatcttcttctcatgtctgtgtgttttgtctgattttgttgtttatactaaacatggagtgtggcttttatgttgcatgcatggccaccagcattgtttgtgtttgtccatgctacaactgtctctcatacacaatcattcttttttcttctgtagagtatactg

SEQ ID NO: 53840 - DNA, 619 bp, Populus trichocarpa
  Intron number 1 from transcript POPTR_0019s12240.1 (locus POPTR_0019s12240) derived from phytozome v7.0 (chr-ID scaf fold_19; pos 13335637 to 13336255)
cttggtgttcatttctttttgtactctattgatttctgttttcttttattattttttgacaattgttgtgtgatttttgggttttgaattaatagattactgttagtttcttattgataatggtatatgctgtcatttggttgctgaggaagtttcaggggaagagtgaactgtttattttagattataattttttttttgttcttggacattttttttggttaatttctgggaatttagaatgaaaatgtaggcagtaaaactatcatgaatcttgaaatcaggaactgaggttcacatcattgctttcaaattacatctggatagttggcttttcacgttgaaaagaaaaatcctgggttcctaaattgcatttaatgcagtttgttgtctttgcattccaactggctgttgaaaatggaggaaaaccttgctgttcgttgttgagcttttttattggatgcaattcagaaggaatattgaagaaaaaagaaattataaaccttgctgttcgtgttcaatttagcaaggcctggtttaggatttaagagagaaattattgtgcattgaatttaagttctttttgtttattaatttcaggggtggtgctatccagttt

SEQ ID NO: 53841 - DNA, 927 bp, Populus trichocarpa
  Intron number 2 from transcript POPTR_0014s01450.1 (locus POPTR_0014s01450) derived from phytozome v7.0 (chr-ID scaf fold_14; pos 1394077 to 1395003 reverse strand)
aagaagaggacttaggtgggtttcagtgtttttttatttaaatctttttattttatttgttttgtgtttttgtgattaattattggagcattactagttgttaattggattatatatctctctttgcataatgctatactcttgtgctaaatgtgctgcaaatggtgatgccctatggacttagattgggttctcattagaggtggcattgcacatgtattattgcctcagtaagaagtaggttcttggcactaagagagggttctaattgaaagttcgggcatggaacagatgggttatatcgttttgtgtggattcgattcgtgcacgaaaacaagtaatggaatttgtttggtaagtggagaattagctaacaaatgggcttggttgtgtgttcaattctgccgtaaggaacttcgaagcatgcagtgcttggttgtcatcttatttagcattatctgtaatttgaattgtatgtggaaaatttgttaataaatgagcctggttgtgtatttgattgtgctgtatggaatgtcgaagcaagcagtgctttgttatcatcttttttagcattgtctgtaatttgaatcatatcaaaacattgcacgactcagaattagtggttctgtagtaagaattctgctgttcgaatatgatcacgtacattgaatatgtggttcaatggcctcaaattaatttagaatggttttttacatgtttcaatcataacttggtggctaagttccatctggtccctttaagtgtgcttaattgttacttttgatgtgtttatacttgatttatatttatttagtgatagtctgcttgatctctgcttatgtgatttatgctacatgcacatctataatatagtcttcttttttcaccttcttttagattttgacttgtctgatactcaacgaaagc

SEQ ID NO: 53842 - DNA, 325 bp, Populus trichocarpa
  Intron number 1 from transcript POPTR_0006s28140.2 (locus POPTR_0006s28140) derived from phytozome v7.0 (chr-ID scaf fold_6; pos 25942566 to 25942890)
agaatccactgcttccgcttgcaattcaagctgtactaagattttttctctatttttcatatgattttcaatttccaattcttttctatttcaaatgactaatattttcactaaaattcgttttcttttttctaaatcagggttctgtaattaatggaaatttgagttttctttttgttggatactaaattattgagctttttcgtgttatttgaaatggtttttttatttatttataaagtttcatgcgttgtgtttttttttcatagtgtttatgactggttttgtttttgatgtgtaggcaaatagacacactatagttttg

SEQ ID NO: 53843 - DNA, 828 bp, Populus trichocarpa
  Intron number 2 from transcript POPTR_0006s28140.2 (locus POPTR_0006s28140) derived from phytozome v7.0 (chr-ID scaf fold_6; pos 25942960 to 25943787)
ggtatgtttgctatgtttctttttctttttcttattattattattattattcttggatgaattactggaattgctactgaaagtgttttttttaattgcccgagtgagatttattttgtttttttagctttggagtatatgcagtagcttgaaaggcttccagtttttttttggtttaatttgatgatttgtgtcctcagtcaaggagggttttcgttttttcgttttttcatgtttcttgctttgaacatagtgcagatgtaatggaattggtgtgatggattgtgggtttatggttatgttgtgtattttactgcttaaggagctctgtaaataaattcagccatcttagttgcagtagttacatgaatattgttttcttagtctgacactattctgaaaattctgttcttttttttaaggttattgattctccttaccttgctctgtttttacccccctgtagtttttttgttggaaatgaagataaaggctggttttttacacgctgtgtttgaagttgattggttttgttctcatcatgtgtcatcttattgagatttggtagtccaggctttcaccctaccaaaaaccttctatgtctttgcttgcataatggctgaagcaactcttatgaaataggcggtcaaataatgatggtacccacatgaaatgtatgaaagtaatttttttatgtaatcagcaacataagctctcttatcacttgcctagcacttagatttacttcttgacgaatctgtaacttttaaagtttccctactcattgagtatgttcattgtgagcatttgcaggtatttgcacactct

SEQ ID NO: 53844 - DNA, 866 bp, Populus trichocarpa
  Intron number 1 from transcript POPTR_0013s13210.1 (locus POPTR_0013s13210) derived from phytozome v7.0 (chr-ID scaf fold_13; pos 13760443 to 13761308)
tcgggcttccagagcactgtgtcacactcctgcaggttttgctttgtgctcagtgtcttattactaacacgtatctgattgtcaaatattttaaaagttgtcattcttgatgtttagtctgcacttgcacacttgtgatgttaagtgacaataaattattgaatgaaagagagtaaggctaaaagcttatgagtgagcttgttggctcccaggtagaaacctaagcaatggagaatgaattcttttccttgaggtgtgacatctcaggttcatccatgaagaattgaggacagaatgtctggattggattttggtattgttttaactactgttatggtctccctaaccactgaatttagtccagctatccccaatgccatgcttgtgggctataatgcctgtaattgagcatatcaggttataatttctccagaggaaaccaatttaaatgactttctgttttcaagttttcaaccaagagtgatccattgaccattggaatcaaactgattcaaacaagctgaacagtgtttggttttgttggcactattttaactcttaaaattctttaaacattttcttgtcaacatcatgattggaaaaaaaaaatattgtacagtccatttaaacatcattattttttgagttggttcagttgtgttaaccagaggaaattccactgtcgtaactatccatgtgcttccagtttctagtcttcctctggttaccactctctattccttgctcgcaatgatttaccttgcactggattcttattctatcttaagaggagtaatatcatggctacaacataaaatttatatttgatactgtttggttgatattaatgtatagggctttgcaga

SEQ ID NO: 53845 - DNA, 541 bp, Populus trichocarpa
  Intron number 1 from transcript POPTR_0006s24320.2 (locus POPTR_0006s24320) derived from phytozome v7.0 (chr-ID scaf fold_6; pos 22957088 to 22957628 reverse strand)
gccccattttcaggtcaggttacagcttttaatctctaaattcgctgccatgctagagctggtgaaagttcttgaatgtttttcttttgctcctttccctgtgattgatacgtattatatgctttaggtcgggactttgaacttgcttagaggattaattttgtaaagtctaatttgactctcttttttcccttctctggaaagatatttttttgtagtctaacttcctcaaagagtaatgaaaagtgaggtgattggagaaggaagaaatgttgatggaagtggagagataggtgtccctccagaagaaattttagtattctgtaactcctgttttgccctcttgtttcatacaattagcagctagtggatttgcatctgattttgtacatgtcaaatgttatctctagacaagggctattgatttgctaggccccttcggttaaaatggtgaaacactgaaactaggttaggctactgataaatttggaatagaaaataaattttaggtttgttgggatcactatggagcaggtttcat

SEQ ID NO: 53846 - DNA, 732 bp, Populus trichocarpa
  Intron number 3 from transcript POPTR_0013s09110.2 (locus POPTR_0013s09110) derived from phytozome v7.0 (chr-ID scaf fold_13; pos 8662578 to 8663309)
ttaaagaggttggttaagtaaatacttttctttacatacatttgcatctttgttcctgttaggcaaatgattttcttggcactatttgattgagcattgatttctctaggaaaacaatgtggggtgagggagaatatagctcgcgtattgtatcatttttttcctgcattgatagaaaacttacttactttgatgtttcaaagagtgtctgacagagattgacgaatgattgccaaggatgtttgtaattcgtaggacatgacttataactttattttcctttttagacttggtttcttaccatacttcttttggaatacaaattttccaaccataaaagcaccattaaatagtaagttgtgatgtttggggccatgtttatttactttcttactcccataatgttgatggctgttgtatgtctatgtacaaggtaagaacagttatgatggataaaagatacatgtatttatattctagttcacctgattcttatccggctgttaatgaaatatgatttttacaattgctaaatttgtaacagaaggtttggcttctctgtaaaacttatccaacacctggagctcatattattgaaacttgttgtcactccgcacaatgaagttctatacctttatttatttttgtttttgaataaactgcctagagattacatcttttgttattgcaaattcaggctgttagaaaagataataagcagcgacttagcct

SEQ ID NO: 53847 - DNA, 405 bp, Populus trichocarpa
  Intron number 3 from transcript POPTR_0006s14500.1 (locus POPTR_0006s14500) derived from phytozome v7.0 (chr-ID scaf fold_6; pos 11840444 to 11840848 reverse strand)
agtggctcgctgtgaatagtaagacactccgcaaattgtaggttttattttattctgtgaaactatatttctagacaaattcatatagttaaataatttatgtttttgggtgtctcttctctggagatttcgatacttggtacaaatttctgaaagattcatgtaggaacacgattgctttcaactgattgtaattctcttaatacgtgccatagttcactgctccttttatttctacattttgtacttcagaatgcaaacgatttataggagttgagaagtaaatatctgtggtttgttgtaaaggaaaatgattttttgagcttccgcagttttatttgatcttttcatttatattctttttctacagccgtggatttcttcaatcaagtgaatattttatat

SEQ ID NO: 53848 - DNA, 458 bp, Populus trichocarpa
  Intron number 1 from transcript POPTR_0014s13030.2 (locus POPTR_0014s13030) derived from phytozome v7.0 (chr-ID scaf fold_14; pos 9591024 to 9591481 reverse strand)
ttcaagattggattcaggtatttcattctttctttctttcccttttcttttactttcagactcctttaggatctttgaataagattctttaacgcttctcttcttacatgtatgtttttcctgtaagttagagatgtcatgtggtctgcttctgctaccgtttcttcctctgcaacaataattaagtagcaatttctggtgttttagtatcgtcatctctttcttgatcttaaattgtgtttatttaactctttttgttggtggggatcaatttatggcccaacttgtaatcaaatgactggttgtctatatatgatggaaatgggggtgccgtaaatgcactgtttctggcatttttatctttcatggctttgctaatgctacagctcatgatctgttgcggtttatttattaaattagcagaagagcttccatttcaagatcagtttctcttgctc

SEQ ID NO: 53849 - DNA, 521 bp, Populus trichocarpa
  Intron number 1 from transcript POPTR_0013s01650.1 (locus POPTR_0013s01650) derived from phytozome v7.0 (chr-ID scaf fold_13; pos 935699 to 936219)
tgcttatcctctcagctcggttaagctcgaaaaaggtgatttctttttcctacacccggtttctttcctttccatgtggtgtttgatgtttcgtctgtgacgatgacagctttatggatttgtaagaattatctgccaagattttgggtttttcattatatatataacacgcatgcgttggctttatagaaagtaaaacaagtgtaaaggttttattagattcagcttgaaattggattttttttggtagtaatagcttttttgatgccttaacttgatatttggactttaaattgtcattatgtttgtggttttttttgtcttaactctaaatcgtgcttctttatatatttgaagatttgattttggtgtaaatagcggattttatcaagtgtttagcatgcttttggagcttcgaatttgtttttatttaatgtgtttttagattgaaaacaagggaatttgatggtatttggtgatttttagtttctttggttgtggaaagcagctgatagaaggag

SEQ ID NO: 53850 - DNA, 1003 bp, Populus trichocarpa
  Intron number 2 from transcript POPTR_0013s01650.1 (locus POPTR_0013s01650) derived from phytozome v7.0 (chr-ID scaf fold_13; pos 936313 to 937315)
tcctttgtgcaaatttaagaaaagtgcaaaaggtatggctcatgatcatctatttagttcaaagtagcaacagccagcgtgtatgcttaatgccttcatagattttattttcttactgttacataccgaaaacaaaaactcaatgcatggttggtttttgatgtttcccaaataagagatagaatattcccggtcaatttctatataagaatctatgcttcacagatgataattctgaaattgttcaccgcaatgcctcactaatcagcactgtgaccagacaaactctttatgtttgtacatccagctaacaaggtgtttctttcactgtaatttagcgagctctgaaaattttcaaaagcttggtcaaagcaaagtaatatattgcacattgataatgcttgtcaatctttttctcttgcaaggctcagaccagcctgttttatacaatgctaatataagaacagaagtgttatctatgcaggttccttattaacaaatctatacactgtagttattctggatcatgtgtttcttttagttgttagttaattttcttcttacaagctttataatttgcaacaactaatgtttgccttttcccgtgcccaaatttttctgtttcctgtttatctgtgtttggtgggtaggtggtctccatgcacatgttttacttggtttgtatatgtgttcaatgtcaaactgcaatgctacatcttgaaattatctattacaattctgtctctgtctaacactggctgttccttttctgctgtcatgacattaatttgcaatgctgaagtgaatcttgggggtaatcttgtatagttttaatatcttgcatgatggcactgtcttgcaaattgtaaattgtacggtgttgtctactatctgtcatgaaatccctctatattatgttgccttttcttgataatctaccaaactgaatttactgccactgtcttcagatctaagtgaaagagaaataagctatcaagtcagc

SEQ ID NO: 53851 - DNA, 764 bp, Populus trichocarpa
  Intron number 3 from transcript POPTR_0014s14620.1 (locus POPTR_0014s14620) derived from phytozome v7.0 (chr-ID scaf fold_14; pos 10698400 to 10699163 reverse strand)
aagctccaattcataaggcagaagcaaatccaaaggtcaagctggctcttgtcatctatttgcagtttctttacgagtttaaatgccaatcataatacttgcatccatgggtctgtgcgaagatctcaaatcacagtgcatgtgacattttcattgcatgtaaaaatttgatgttgtgatatccatcaatttatgcttagagtgtatttgagagtgtggtagcggttgcttttcattccaaaacacattaaaataatgttttttttatttttttaaaattaattttgaaatcaacatatcaaaatgatctgaaaacatcaaaaacatattacttgaaagcaaaaaaaaaaaaattcaatttttttcaaaagcgcttccgaaacgcaatgccaaacacaccttaatgtatcaatcaggtgcttgctcacacgtgcattggctgctttctcctataattcattcaatatccgttgtgattatgataatgtctttcaataaatgctttcttatattgcttgcaagttgcaactcatagagtagttttttgtttttaaacaaatatatgtagaactcaacatttattgagaacacaagtatcgtggactgtgattttttataatttttttatgcagatggtttaagtcttcttttcagagaataatttgactgtttctaggtgtcaaggttcaatgcttgtaggtatttaagtcaagaagctcatggttgcaggctcatatttgtaggcatttaagtcaagaagctcg

SEQ ID NO: 53852 - DNA, 836 bp, Populus trichocarpa
  Intron number 1 from transcript POPTR_0003s19300.1 (locus POPTR_0003s19300) derived from phytozome v7.0 (chr-ID scaf fold_3; pos 18077014 to 18077849 reverse strand)
ttcggaaaaagcagctgtattggagggcattacaggtaccgtcttgatctttttcctctgttaagatttgcattttgtgagcctgcacgcatttagctaaatgttataatcttgcttgcgctttattggtggagatgctgccagtttaatcaagcttatagaatttactctcccatcgttgtggacttaatcattgcatagaaccctagacacatttctctcccattctatgggttatacccctcagatttcctgctatttttttgtggcatattaaggcacttctaccttatccaaactaacaagactacatttgctatcttcgttatagtcaccaacttcagattattaaaagtgtgtttcgaaacgttagactaagacctcatgtgaacagccaaaagtgattgtcaggacctcatttctgaatcaattgatttttaaagactatattcatttcttaattggttagtatagcttgtttataagattcaataaaacaagatgatctgacagacaacatagaaactagctataaatttacgtgaatattctggacaaatcaggtactgatatttcctgtttgtttgataataacttagcgaggacatgtctttttctcaatgcatttctgttttttatagccagtgtagaactcatttttcccatatctctttcattttgccaattggcatcagaatgtttgtcacctttttcaagactttccagttcttagtatgtatcttcttctcattgaatcaaacaatgctatgttctgatttaacttcttctgtatcgttgcagttttctgagtggttggaaagaagtaagcaaactga

SEQ ID NO: 53853 - DNA, 876 bp, Populus trichocarpa
  Intron number 2 from transcript POPTR_1031s00210.1 (locus POPTR_1031s00210) derived from phytozome v7.0 (chr-ID scaf fold_1031; pos 5790 to 6665)
gaaccgcctcagtaacttcctactttggcaaactagtaactgcctgttgtattctccaaacccaccactcaattttaaaaattaaaataaaaaaataataaaaagagttttttttttttttttctttctgatcaggcacttgaaggtatttgatattgcaattgaatcatactttgaaatattttgatatttttttagttttataatttttttatcatttaatataaagtttaaaaaataaaacatattattttaatatatttttaaataaaaaatattttaaaaaacaaactttatccctcttcgaaacaatgacatcatacattcaccactgtagctctgaaaacattaaagtcgaaaatggaggccagcgggtgacttttgagcgcacaagtctgatttattatttgccactaatcacagttgtacatgcggtggcctgcatgatgcttctggtttgaaaatgaagtttcatctacttccaaactcgtcaagcactcgcattgacttccaaactcgtcaaacactctcaattggtgactcgtataaacttgtttttcctaggaaagtgttcgggagtgcactattagttatgatttaaaatattttttatttaaaaatatattaaaataatttttgttatttttaaatattatttttacaaataatatatcaaaacgatttcaatatatataaaaaaattaatttaaagaaaataatttaaatatttaaaaaacatgtatccaaaaattgctttctttgcttcaatgtaggccttatttttacgtttcgaaaacgtttttaaaacaatttaaaatttatttatttatttatttattttaaattaatattttttcgtgttttcagatcatttta

SEQ ID NO: 53854 - DNA, 502 bp, Populus trichocarpa
  Intron number 1 from transcript POPTR_0018s14030.1 (locus POPTR_0018s14030) derived from phytozome v7.0 (chr-ID scaf fold_18; pos 14282177 to 14282678)
ccttcactggcagcgccgcccctctcattttaacggtcagataaaacagcctctctctcgttgggttcctctctttcctttcaaaatattttcttgaagcatttttcggacaaaataatagaaaacttgtttgtccattgaattctttaatagagttcgatgtgcgcagagattgttaataaaatgcacgttacctgttcgataaaatgtctcaaagaatatttttttttttccggtcgtgtcttgtctgattcctgtttgttaaaatgtcaaaaacaaattgttgtttaatttgatttctaattctctacaagggaaactcttttcgcattgttttttaaaggttctttgcttgaatgcaaatcttgaatatatattgggctgcctttgtatcttctctagattgctatgttgaagagagaccctgttacattgaataacaagaaatatatgtttgccttgtgcagtacaattgaaaggtgtgttcttttcaatccatcaa

SEQ ID NO: 53855 - DNA, 376 bp, Populus trichocarpa
  Intron number 2 from transcript POPTR_0006s25390.1 (locus POPTR_0006s25390) derived from phytozome v7.0 (chr-ID scaf fold_6; pos 23791584 to 23791959 reverse strand)
agaatagttacttccgccaacagacacaaaatgtaaagatctcttctttttcatattttgacttgcttatattatgagggaaatttggataaaaatgaaattcataaccaatatgattcttgtcaggctacggaattgcttgttcatgttaaatttattgctgttaggccaacaattattttacaatttcttttcattcccttaaattttgattgttggccaattaaagtagattacattgagtttttgaggtaattagttgtatgctaattttttcacaagaaaaaaattccgtgttgattttttttgggtggtttttgagttaatttgttgttttgcaggctacaaaccttgccaccacagacacaagttgtga

SEQ ID NO: 53856 - DNA, 708 bp, Populus trichocarpa
  Intron number 1 from transcript POPTR_0006s10230.1 (locus POPTR_0006s10230) derived from phytozome v7.0 (chr-ID scaf fold_6; pos 7611947 to 7612654 reverse strand)
tattgattttggcttgtctattttctttaagccaggtgagaaataactttattattaactgatgatgggaaaatggaatgataagggtttatcttagatagataagtgattttgtttccctttccttttcttgcgtgcgtgtgtgtaagtaatgcatcgatgtaagtatgtggtttgttgctacttgccagggtaatgtagtattagtgaaaatgctggaatctctagttactagagtgataagactattggagtatcatgctttgaaatgttaggaaattccttttaatattctgtttaatagtctacatttagcatcttaagttctatgtgcgtaattttttttatgatgccctttctgaagaacctattgtggttgctctaataagaggattgggatgctattttgttcgagcacagttttattttagagttcatgtgtaggatgcttaccatgtttagtcacggttaggttttagatatgaacttgatgttttcttcctcataattgtcatagatattttaggtgcttctgggaagacaacttttatttcaaaaaattgtcacatgctggccatatggtgaaaatcattgaaatttttattgtttttgattatttttatatctagttactatattatgctaatgttcactactgcctaatttttaataggtgagaggttctctgaaattgttggaagtccttat

SEQ ID NO: 53857 - DNA, 367 bp, Populus trichocarpa
  Intron number 1 from transcript POPTR_0006s09170.1 (locus POPTR_0006s09170) derived from phytozome v7.0 (chr-ID scaf fold_6; pos 6770949 to 6771315)
aaacagagatcgattgcgccgaggaaccccaagatgtcggtttttttccctcccttttttaacatgaattatgagtttcgctcttcttttatgctatgttttttggttaatcatgcttaacatatattatctagtcttttaatttcgattcttagagttttgtcagcataatactctgttttcttttctccgttgtttaacttgagagttgttttacttgttgcctaatttttattttcttgtttctttgaattttcaagctatgtgctggtagagaataaagtctaaaatcttgatgagaaaagaaacattttttaattaaaaatgtgttttttactgacatgtaaacaggtagaggatatcccaa

SEQ ID NO: 53858 - DNA, 667 bp, Populus trichocarpa
  Intron number 2 from transcript POPTR_0003s16460.1 (locus POPTR_0003s16460) derived from phytozome v7.0 (chr-ID scaf fold_3; pos 16052101 to 16052767)
gtgataatcgggttacccgactgtaagcagcatacgtatatttactactaatcttccagtatccctattttttattttttttcacattttatttgagccttcgtgcatgtttgctttagtttttgtagtttgtgtgttgtctggttgttaaggtttgaaaactatgactatatttttgcttctcaaaacaattatctagaccttaaatagtccaagacatctaattaggcactagagacaagcccctcatttctgaacaaatttactaatctgcatgcgtgcgtgatatctatttgtacatgatgatctcctgggtggacaactttttcaaacatgatgttcgaagatcatagtactactatatccttaactcatttttgtttcttttttacaactcaatctttgaaacaggttgtgtgactctgatgtgctagtaataaaggagaagatagggagaaaaaaaatatgaaagtcgttgctatgtatattcatgcacatgtaaatttaagagtagcataaattctgtcatggaagaagtaactcaacagaaataattatctgttaaattgtcaaggaagtcgacaaattatagaagtaataaatagtgagtactaaaatattggctgttgcagagacctgggaaacgcaaagctttcaggcagtctgg

SEQ ID NO: 53859 - DNA, 444 bp, Populus trichocarpa
  Intron number 4 from transcript POPTR_0019s10740.1 (locus POPTR_0019s10740) derived from phytozome v7.0 (chr-ID scaf fold_19; pos 12268436 to 12268879 reverse strand)
agccttgtgctgcagttaaagggacgcagatagtgtgtgtgaattggacttttgagtttatatgtggtttgcttgtttaattcataaaaatttgcaatatagaaaacaaagtaaatgaagggagaaaaaaatggggatgtcgttatgagtgcaaaatttagaagaccgttgtatgttaaaggttgtttgatagatgatgtggattttgatatatgtcatcaaatagttaaatcctcgagaatgaatgaatgctagttgattttgatcctgctgagaaaaggttagaatttactggaaattttagtgacaatctctgattttctataatattattattgttgttttttttttataagtatttttcttcctcaaataatttggattttgctgcgtcttaaataatctagttgcttgtcttattaggtagaaaacttgttctataac

SEQ ID NO: 53860 - DNA, 267 bp, Populus trichocarpa
  Intron number 2 from transcript POPTR_0013s07140.2 (locus POPTR_0013s07140) derived from phytozome v7.0 (chr-ID scaf fold_13; pos 5863385 to 5863651 reverse strand)
ctttggtctccacccctggtaaatataaaagccctctctttctatttttttttttaatcaaaattcatgagttttgtgtttttgttttcgggggtcagtaattcatcgatctgtttttcttttcttttgttgttttttcctcaagagcagtgtttttgttttcttctttgatgcttgtgtcgatggaaatgtttttttttttatttttttttggtcttaaatctatctataggtttattgaggagaggactcctaattggttcaaca

SEQ ID NO: 53861 - DNA, 544 bp, Populus trichocarpa
  Intron number 1 from transcript POPTR_0018s10210.1 (locus POPTR_0018s10210) derived from phytozome v7.0 (chr-ID scaf fold_18; pos 11186767 to 11187310)
ctaaacttggacaggtagttatatcatatattacgatatatcatggattatcatttatatatgtataatttcttttctagttctacaccacaatattacaagaaaaaacttataaataactcttggattacaatgtttttttatataatatttagtttgtttagatatttgagatttggtgctagatttgaaaattttatatggtgctcaagttgtaattatagaatacttacaacataagaaagatatagacacaaaaagaaatgaaaaaaaatcacatcagatattgataagaattccttttttttttttttaatttttaagatttgttttttattttctatatatatattttttaaagatagtgggtaggaaaattaataatcccattaaagttatcaaccataattaggtttgacatggccacacttcaacactgatctgtaaattaatgctgggtcatgggctaataactaatcaattacaaggatatgcaactcttcgttttcccattgacgcacgccaagtttatatgcgtagggat

SEQ ID NO: 53862 - DNA, 563 bp, Populus trichocarpa
  Intron number 1 from transcript POPTR_0014s16480.1 (locus POPTR_0014s16480) derived from phytozome v7.0 (chr-ID scaf fold_14; pos 12544199 to 12544761 reverse strand)
ctgtctccttgcagggtcagttgttgatccccactgcttaatgtagctgtctttgattctcctatcttattgtttgcttgttagttacattttgtttgaagtagcaagagttaggatgctatttcccaccttaaattcactttgaaatgagagtagtttttagctatgactgactttaatgatcttgctagttgtaggagtaatgagcttgtctgaagaatttctttcgactgtgcgcgaagaacttctcatgtgcaagagtttgaaaagactgattgtgaaaaactagggtcaaaataaactacacattgtctaagtaactagtttactgtcaacatgaaaaaattaaagagcttttgacattgagaaacttgattaacctaatctaatcatgcgcattgcaaagtatatggttcctatcttattgtagctaataggtcatatagttatgaccttccaaaaagttgtgcatgttgattatacgtcaaatgtctacatttcccttctgttctctgttcagtcattcattctgatgcttaggagagattttggaataggtttag

SEQ ID NO: 53863 - DNA, 820 bp, Populus trichocarpa
  Intron number 1 from transcript POPTR_0018s13010.1 (locus POPTR_0018s13010) derived from phytozome v7.0 (chr-ID scaf fold_18; pos 13485514 to 13486333)
caggctgtttttgcaggaactgcctcttcaggtattatataataccacaactcccaacttttcttatcatttcttccatgattcaacagaaaaggaagtattaaagagtagatgagtaggacacatggtcaatggtaagttcttattatgataaagcatattgtctcttccaaattatgaattaaaaacaaacaacatagtggtcatggaatcattttcacctgttggagagaatttgatgaagataaatagcatcctaaggagactgtcttttcttttcagggccaaagttatagatttacttccaagaatttagatcaaggcacaaatcttcactgttttccttagacaggttattcagaataagaaatcatttccagcaatagcatgttttcactttttccatcattgccagcaagtactttcttggcacaacataacttctggaaagatttgaacagtttccatgccttgtggagcatcaagtgattcagaatttcatgagttttgagattgcaggggactagagcctcaatgaatccatcagaaaccaaccctattaccactatcagttatgcttccgagaagttggttttaaactgtataattcttagcataattttaggagaaagatgtaaaatacatgtttgttgtcttgcttgaactttattttgcatgtaaggagtaggtgagtgaaagcaagtattctgtggtgaagcagatattgttagacagctcaaagaatcatactcagtttccctgaccacatcaattgcttgtaacaggtgttctcatttccatcttgaggatcattacaaag

SEQ ID NO: 53864 - DNA, 711 bp, Populus trichocarpa
  Intron number 1 from transcript POPTR_0003s16420.1 (locus POPTR_0003s16420) derived from phytozome v7.0 (chr-ID scaf fold_3; pos 15999650 to 16000360 reverse strand)
tttagatttaaaggtaaatagacccttttaaattataaagtcactgccctatctataattacagttataataaatgcagatcttgtatttgggtttccgttttgttttgttatatggtgtctttttattcatcagtaatgtctttcattcactgacttgtatttaatgctttctttccggtctcacctccttccacctatatactcggatttaaaaaaaaatagggcttttatcccttgaaagaaccctaaaagggatcaataatacttttcttcgttaatagttctggtattgccatctttgaatgtgtcccttttggtttgcatttctagagtgaaaaaagaaaaccatgtccagataaattatgtttccttaatggtgaatgttgttgaaatatgtaacaaaggaatgaattttcacggtttgatcttgtgcgggtctttgatatatatagggtcggtacattttgatgaagatggtcaagagtcaagacctgcgtagcgtgtgtgggtgtataactatgtcaatattggatgataataggcaacagaaaaacacttccttcttgatagctaaattgtggtggtcattacttgttgtctgctcttctttcttaaatattctcagaaatttgtatctttgttgtttatggtgctactttttgatgggtgtaaatgcagacaggggagatatactacataaactggagga

SEQ ID NO: 53865 - DNA, 626 bp, Populus trichocarpa
  Intron number 1 from transcript POPTR_0003s06980.1 (locus POPTR_0003s06980) derived from phytozome v7.0 (chr-ID scaf fold_3; pos 8584049 to 8584674 reverse strand)
gggtcactataaagtgataaggttccatttagaacacataataacaaaaagggcaagcaaaagtgtgatttaaaattgctattatttggctttatgatatccttgtttaatgcatgcctacgaagaacaggtcaagaaacaacataaacaaaactcatggccaagttttctccaggacaagtttgattatagcaaacggtttcatatttattaatcattaaaagtactgtttcagacataatatataatgtctagtttttagtttacatacatatttatctttacgttcctttctcgataatgatttgttggccatgaaatcaacaattttgctgagaaaacagcttaatattagcttgaagactgcgaacaaatcttgtttatacttagaatatgtagaattaaaaagtgaaaaagaattactttttttatgtactgaaggtcaacgagccttctaattaagtaaacacacacatcaaattaactataaagatatcgattggtgggcaaaagaaaattacaaaagtaagcccgcccagttccaagttgttctataatattacatatacttgtatttaaagtgctctgtagctgctggagtgacaaagttaaacttgacaggtgag

SEQ ID NO: 53866 - DNA, 714 bp, Populus trichocarpa
  Intron number 2 from transcript POPTR_0014s15940.1 (locus POPTR_0014s15940) derived from phytozome v7.0 (chr-ID scaf fold_14; pos 12012786 to 12013499)
ttgaggtaaattatgaacgactgatgtttagatagtttatttgttaaatatcataaaatcgaaaaagctttagatgatgatgatgatgatgatgtattgttgtcttatgcagaaatatgttcttatgtctgtttaggtttcaatctttgaactgcagcaattcattacgtgtatcgatgggtcactaggtttaaatttaagaagattttcaatcgaaaggatgcgagtggcaatagattggacaggatcatgcgggctaatttatagtccaatgtggattttcattgaagtggagagactctcgagaaaaaattgaactctttctttcacctaatgaccgaaaatgaacttgaggaaatgctgggacattagaatggttttttcaagcattattctactctctttttttccctttttgtttcagtttcaacattatattttagggtagaatttcattgtcttgtcttacagcttttccatttggatctacttaattggtgaagggctggaatagggttgcatctaactttcttatcatatggttctatttttcttcagtcctatgcctgttttagaagttgggattattgattttttggatgtgatgagtagaactgcttgtatggcaactatcaaatttgttttttgtgaattcctggaaatgctattattgttagtgttcatcctaattctgtttaatttttcagccaatat

SEQ ID NO: 53867 - DNA, 709 bp, Populus trichocarpa
  Intron number 1 from transcript POPTR_0013s04480.2 (locus POPTR_0013s04480) derived from phytozome v7.0 (chr-ID scaf fold_13; pos 3077792 to 3078500 reverse strand)
ttctcctttgaattcttcaagttctgggtttttcagtgagtataagttaaccctgtttgttcttcaactgctgtttgtttctggcactgtcatttgtaaaattcctgcaagttttaattggttttggatttatgaacagggtttttagtccaaaaagttttactgttgaattctcaagtcttgactgattgttaaagttgatcagagtaattttgattggtttttggtgaagacaaggcagaaattcatgcatgaaaagtaaagccaggaatgatcaaagggtgcatgtgaagcaacataaacttcaagtgacttgttagatacttttgttggttacttctccacttgaccttgatcagagcttctagatcactgtttgctagtgtttaacataattagtccaaccactcgttctctagtatacttagaattgaggccaataaccctactgttcttgaggtaatgattgataagttttgatgctttggaaataattatgctcttcaaaagttagccttcatgacgaagtgaagtatcttacttaattctgttttagtcagtcttctaaacaatcgctgtcaactgcatccctgagctgttgatgaattgtggatctcatgtaatttaaagctttaattttataactaaaagcacttggattgatttaattgcagatacagttacaagtgcagactgcaaatttaaaaga

SEQ ID NO: 53868 - DNA, 676 bp, Populus trichocarpa
  Intron number 2 from transcript POPTR_0018s12260.6 (locus POPTR_0018s12260) derived from phytozome v7.0 (chr-ID scaf fold_18; pos 12791615 to 12792290 reverse strand)
aacgaagacgacactcaagatctgaggtgatatttctgaatagtttttgaggaaagaatgctatactatcatttacttttgcacacacacttgtgatacatgttggggattatagttctgtatatttttggcgttgatcagttcttacaatcatcaagaagacccttgtacagctattaatccactgaagtttggatttgggaaggaagcctaggaagacaaccctgtacagggacaaaacctaacaggggccagggcgttcaattttttttaaaatcccccttattcttggaaacattttaaattagtcctaatgaaatcgccacttcaaaatagaaattttatgttctcatcctctcaagcttcaaagtcagggatcctggccctgtaattcaatatctttgcacgaatctttggcttgatagaggtttttgttttttatataaaaaaaaacaattgcaagccctggtcttttattgttgcactattcaattgttcttttagtttctttggtataattgcatgccactccattctttgtctatccagtagtcacgggggctgggttagctgaacataaaaaataaggttaaaatctctttccttcatttgtaattcttatgaactactcttgcttactctttgcagatctgggaaagacttcgtggtggccttg

SEQ ID NO: 53869 - DNA, 236 bp, Populus trichocarpa
  Intron number 2 from transcript POPTR_0019s09090.1 (locus POPTR_0019s09090) derived from phytozome v7.0 (chr-ID scaf fold_19; pos 10653506 to 10653741)
catctcaagctcgtcctcactactcaccatcactggtcctttctttttactcttcaaaatcctcctctttttttttttgcaattccatacctaccttttgttttttcttttttagtggaatgtttcatactctaaacgatttattaatggctcactcactcaaattaattatatgggccaccatgggtaaccatgtacagtaagtagtaatcacaaactgtgttttggtagggatc

SEQ ID NO: 53870 - DNA, 531 bp, Populus trichocarpa
  Intron number 3 from transcript POPTR_0019s09090.1 (locus POPTR_0019s09090) derived from phytozome v7.0 (chr-ID scaf fold_19; pos 10653871 to 10654401)
ttaatattttggctcttcacactccttggtatggttttttttttaagatatttggttttttgctcaattattatagtgaaagttagcttgttaagcatagttggattcttgaatatcagtgaagttagcttctttgtttcttgatgttatccagttgtgctttatatatatatttgaggctaaccaatttttaagaacactaccttgcattttgtttacattatggaagtgtaatgattacttcgtcctgggaatgcattcgctgaaattgtacatgtttgattgagggatatgaaggattggacaatattccttctcccttttgcaatcaaactacgagggcgtgggattttgttatatatatatatatatatgttgcatttctgtcttgttttgtggagacaaatcgttcttatttccttgtttttctctctcatgaggcttttgtaatatattttttttcgttttttgtctctctgttctttcttcaacttactattatcagtcacaccaaaggccacataagttatt

SEQ ID NO: 53871 - DNA, 544 bp, Populus trichocarpa
  Intron number 2 from transcript POPTR_0006s23340.1 (locus POPTR_0006s23340) derived from phytozome v7.0 (chr-ID scaf fold_6; pos 22080290 to 22080833)
ggtctcctactttttctgatcttgaggtaccttcctccacccccagttacttactgctgctgctgctctctttcttgtttgcaaatttctcaaatacaataaagctgaaccccaataatttataatacctaaggtcaatttttttttgtaaagattgccttttcttgcaacttgtaattcatttatccactcccattgctctggcaacagctgtgatttctcaatgttttttttttccaacacctgcaatagtgtcatttgacataagatgctagacccaaatggggtgggggggcggcaaataatttggcaatcatcaaattttatttgatgcttcatgcttcaagtaatcaacttgtggattggtgaaatggaactaggggaaaatgtgaaccttatgccatccattctaatgaagtgtaagacttcatcacttaggtgctaagcaaatgctcccccctacctttctttttttgctgcttaggaatttactgtttttttaagaaaaaaggaaaagaaattcgaagtgcatagtgttttcagg

SEQ ID NO: 53872 - DNA, 783 bp, Populus trichocarpa
  Intron number 4 from transcript POPTR_0019s07560.1 (locus POPTR_0019s07560) derived from phytozome v7.0 (chr-ID scaf fold_19; pos 8621239 to 8622021 reverse strand)
tcagaggtatttttactttatatgccaggtctcattgttaattcaagactttgaatttcgtttttctgtcgagctctatttgttttagtgggaatctttatttgcaatgatgaaatgaagcaagaactgcattgttaatgttatgtattcgattgtttttgagctataaagttgtgttataggaaccgaacacaagtatatatttcgtggctaacaggcatcgttatggcgtctccatcctactcccatcaattttttttttctgcgggggtttataatttcagtttacgttcttctttggcccagagtttccctgttttggggctcacaattgaatatttatacccagtgaatttatagactgaacttggatgcatttttctatcttatgccaaaattgcttgtagacgcaatttccaggaggtgacttgtactgctcattaatgcataatcttgaaataactgacttttggattattccacatctcctatgtccctttcattttgctttctatctatgtcgttaagttgcatagtggtgtaggtaatggtttcagataatggaaatctatctaccttttgtaaataaattagcttatgtttatcatgtcccatctgctgataaatatattctcagatactgtcacctagcccctccttctaactcagtctgctttctaaacagtactaccgaacttctattttcaatggaggtccatcatatttatcaatcttaaactttttaaagattcagctgatgggatcattttttgtaggtaaacg

SEQ ID NO: 53873 - DNA, 349 bp, Populus trichocarpa
  Intron number 1 from transcript POPTR_0018s10990.1 (locus POPTR_0018s10990) derived from phytozome v7.0 (chr-ID scaf fold_18; pos 11811721 to 11812069 reverse strand)
atcagaaattcagataggagattttatcctaactggtgcgctgctttcttctttcttcttgttttctctatttatttatataatattctggtttttaactgaacttatgattcttttaattattggaaaactaaaggtttatctggtgctgatccttcctgttttttttttttttacttgtcaccgttgaaagtgaccgttatttaattatcttaacagcgatttttcttttttcatgattccttgtaaatttgaattttgtatgaagttaattagtggaaaattctggtttgcttttttccaattaattacaggactctgtatattctagagagcttgtgctgatttg

SEQ ID NO: 53874 - DNA, 492 bp, Populus trichocarpa
  Intron number 1 from transcript POPTR_0013s06070.1 (locus POPTR_0013s06070) derived from phytozome v7.0 (chr-ID scaf fold_13; pos 4489503 to 4489994 reverse strand)
gttgtgtctcgaccattctcgctctgcaacagcaggttttacaataatttcaaagttctagttcctatatatatgcatgtatatacctctaatttagatttaattacatggacaatatttatctctaaatatatttacattaataaataaattagtgaagaacacgtgattaatgctagtgtagcatgataattcattgtatacgttttgaagaaacagaagcggagcgttagagagatatgctatcaatattttgacttgacttttgtagctatctatttataataatcatcatccaattccctttattaaaaaaaaaaaaaaaaactatgctactcccaaacaactcttttttttatttgtttttttttctgcccagttgaacagagaggatcaaatttcatttctcttgagtactcttcacctatctggttctcccatgtcctcccttttgcaggtggcatcactgcaagctgagctttcagtggtcca

SEQ ID NO: 53875 - DNA, 508 bp, Populus trichocarpa
  Intron number 3 from transcript POPTR_0006s29530.1 (locus POPTR_0006s29530) derived from phytozome v7.0 (chr-ID scaf fold_6; pos 26870926 to 26871433)
aagaaatagcttgggctaatcatctctctatacaggtgattttcaatcctgaaatttaaactgcttctttacttcattctttcaaagttgcaatgtattttaattgccatgaactccatatagcctggcaagtggtggagaaaccaaaaacttttactataagcaaaccctttcctgttacttgtcaatacgatggcagtcattggaggtgcatcagcatacataaattagtttgtacaagacaaattctgtatgctgacaactttttttgttccacaccttcaatggctgtctcatttccacttttgtctgtcctaaagtaaacaaaaggcacaagttgtcgcactcttctgatttacccccttgtgcaatatctatccctattcccggtgttcattcatctttactgtttgtgttgtggtgatttctcgtgctctagatatagttctttcagaaaagccatttttaagagcctatggtgttaaagctttcattgtctactgtaggc

SEQ ID NO: 53876 - DNA, 382 bp, Populus trichocarpa
  Intron number 2 from transcript POPTR_0018s01550.1 (locus POPTR_0018s01550) derived from phytozome v7.0 (chr-ID scaf fold_18; pos 1461849 to 1462230)
ggtattgtttctttatccgcatgttgatttcatttatttatatatttatttctcttatacataggatgcatttcttgcctgttgaaattagtaatctgtgttgcattccctatcaagtgctgatttagctaattgtaagtcaggggagttattgctcaacttggctgggagtctgatttaaatatacactatttaatcacaaaacataagatggaagtgcggtgcaatgtagtcatacgacctctcttttttctgaaaactttggttacggaagaaaagtattttggtccatatttattgttattgtagattttgaatataatttgatttttatgctacgtgtacagcaatagccactgttgttaccattgctgagatcttg

SEQ ID NO: 53877 - DNA, 594 bp, Populus trichocarpa
  Intron number 1 from transcript POPTR_0018s07540.1 (locus POPTR_0018s07540) derived from phytozome v7.0 (chr-ID scaf fold_18; pos 7886760 to 7887353)
gccccattttcaggtcagcttactgcttttaatcttcaaatttgctgccatgttaaagctggtgaaagttcttgaacgtttagcttttgcttcattctctgtgatttcgacttttgagcttgtttagaggattaatttaaagtccaattttgcttctctttttttgtgggtttcttagtgaaatgagttgtgatattacggtctctggaaagacattttgtgacaggttagatctattttatactcttctaacttcgtaattggagaagaaagagaggttgatggaagtggagagattaatgtctagcttcgcttgaatatgaatagaagatgaaacaatgaccacttggtcaggaaaacagaacaaaattttagcattttgtaacttgtattgtgcactcttgtctcatacaagtgtagcttgtggatttgcatctgatattgtaaatgtcaaatgtaatatctacataacggctattgttttgctagagccctttggttaaaatggtgaaacgctgaaactcggttaggctactgacaaatttggaattgaaaaacagactaaattttaggctggtgtggagcaggtttcat

SEQ ID NO: 53878 - DNA, 322 bp, Populus trichocarpa
  Intron number 1 from transcript POPTR_0013s07370.1 (locus POPTR_0013s07370) derived from phytozome v7.0 (chr-ID scaf fold_13; pos 6150010 to 6150331 reverse strand)
gctctcctgatcataaaggtttttgtttcatatgtactctctcaaaaaaaaaattattttgttgttacatttaacttgttacttcttgtttgattattgatgtattttttttcaataataaagatggtggatttttttttattccaagaagataattttccttgtttttaatcacattttttcatatttatttttactcaaattgaaaattcgtatctgggtttcttcttcattgtgatatattctttgtaaaatatcgatctacatgtagcttattgtgttttgttgattttttttttttttttgtgtttaatagattatt

SEQ ID NO: 53879 - DNA, 959 bp, Populus trichocarpa
  Intron number 1 from transcript POPTR_0019s08470.1 (locus POPTR_0019s08470) derived from phytozome v7.0 (chr-ID scaf fold_19; pos 10005870 to 10006828 reverse strand)
ttttttagagcaggtatgatcctacactgtccctcactcccagaatcgctcagaaacttgctttcttctataaatatactagccatgtggcacacatataacaatctgtcattgtattgagcctttcacatgtaacataaacgtgagtccattctaccgagtataccacaattatatcataattctgctttattttgatggtgttgaaactcctatctctgctcgtaaaggattcctttattttattatttttattttattttttattttttatttttatcttctatccagcttcttagaatagtactctttattctgattctatctcaaatcaaatagctaaggtcctgtaccgttaacctatcccttttatccattgttttgtcttgtaagcaatcatgcctatgtaatataatcttattttgcttaccaaagtggtcttactataagtaagatcaagacttaaacccttttcttttgtgttggattctcctcctcacaatagttgtcttttgattcttgtttccttttgttgttctttgcacttttcagttcttattattatcatctggttggtagattgggatctttcctttttcattaccaacattcctttttgtttctctattttaattttttttttctgtatttgcataagaactcttcagcatttctgtaaaaattaccatttcattcttcctaatttttttttcttggcttttattaacaatctgatggttgagcttttaaaattaagtaattctttcccccctttttctgtgcgtgggttcttccaaatccttgcttcatccattaagtgagttcgctgtctctctctctctctctgcacatatgaaattagtcttcaattgtaacatagaatccagtacatgcttgacttctctgatgctaattgtttctcaggctgatcaacttattgggcaagatcatcttttcaa

SEQ ID NO: 53880 - DNA, 879 bp, Populus trichocarpa
  Intron number 3 from transcript POPTR_0006s16270.1 (locus POPTR_0006s16270) derived from phytozome v7.0 (chr-ID scaf fold_6; pos 14200084 to 14200962 reverse strand)
ggatttgccttgacattcttaatcttcccccgaaggtgacacacacccacccacaccctaattcttttcttttcttttcttttctgttttttcttttgtcgaaagtgaaagtttgtttttggtttcctagaaatatataatgttctgagcatgatcgctttgtgttgttttctgggatatgttcttgtatatataaaaatgaggatagattgacaaattctactgcttattactattattaatggttttttttttcaagaattaaacctaatgattctactttgaatggactttatattaaataaaatgtgaattaatctaaagtaatatctcaagttgcttgcttctagttattgattctgtaattttaccattttgacaaggtcggttgttcttcccgcttgttacaactacttgtgctgatattttataaaattttgcctgtattttgggctgaaagtatgtactcccgtggcttcccatttttcatggaatcggcaagaagttggcctgtaaagtcagttgttggtccattggtttgaattaactcttaaagcgtaaaggttccaatgtagttgttcacggtcccttttgccattattgtagctttggtatgaactatgaagaacagtgatctggaggatatttgtcaagaaaactgaactttatatttcatgggcagtgacaactgtccaattattgtactgttagacaaatcatggatgacaagaaatttcttgaggtttttcaatttatttgtttcttcaactttcttcttattttgttatcaataggcaatggatgtcttaatgaaattgtagggtttctctcaaacctgctatttataacaaggtttgtgtttctacacaagcagggtgc

SEQ ID NO: 53881 - DNA, 373 bp, Populus trichocarpa
  Intron number 1 from transcript POPTR_0003s07290.1 (locus POPTR_0003s07290) derived from phytozome v7.0 (chr-ID scaf fold_3; pos 8857894 to 8858266 reverse strand)
ccattaggtttccagctggtggaggcaatatcctggtgagtatcccgtcctgttcattcttatccataaacagcgatattttacatatcgatcatcttttttagaatgtacataataagtagcactagcttctgaactgattaaaaaaaacacttcctgatcatttttctctttagactaaatacatttctatatttattataaattaatccctgtagctatcaaacttaattacttgctatattatcagagataattcaaaaaaggccacaatcttccactgaaaatgaaacatcttttcataatataacaatcgagcatgttgactaatccataaggtacacgcgggaactttgcgggcatctgacgattt

SEQ ID NO: 53882 - DNA, 783 bp, Populus trichocarpa
  Intron number 1 from transcript POPTR_0013s01130.1 (locus POPTR_0013s01130) derived from phytozome v7.0 (chr-ID scaf fold_13; pos 616779 to 617561)
ttaaaagacgaggtacgtttttttagttcaattatttattgattttgtttatgattttctttcctcggttttgtttggttgctgaaaaagcttaggaaaatcgaataaagattgaaacttaattatattttgttaaagttttggttaattagagttgaaatatcaactgggttttgttgcaattgacaaaaaaaaaagaggtacttttgttttattttaattgaattattggcttgttttttcttatgattttttttatctgcgttctgtttggttgctgagaaattgctggaaaattgaataaagattgtaaatttattacttttatgaagtttttggttgctaagaagttaaatatgaattaggattttttttcttaaattttgtctttatagttggaagtaaaaaaatggaaaattaaggattgaagttcaaccctttattctttaatcactgccattagatctttctcaaaagcaaatcgtagctgttgatcaatcattatttatagttattgtttatttattcaagtttcttcaacttgaaaaaataaattaacagctaacgtgtgattataaaattgatatttaatttctttttttggctgaattgtacttcaggtcactaaagatggtaaacgaaatgcgttttgtttaaagtgtaaaagttttgattctataagtgagaatttgaagaaatgaatttattttgtaatggcttttgttattgtttgtgtgcgcaagtgcagagactggtgcaacatcagccaacgcagtatccaac

SEQ ID NO: 53883 - DNA, 668 bp, Populus trichocarpa
  Intron number 3 from transcript POPTR_0018s14340.3 (locus POPTR_0018s14340) derived from phytozome v7.0 (chr-ID scaf fold_18; pos 14572598 to 14573265 reverse strand)
tgtacgtgtaccattttttttaaaacacatagtttgttccctactaatttcacacattatgattatggtttccatttatggaaacctatcaagaaccttaaagccttccatgtctctaagagcacaagcaactctgcgtcaactgtaatgtagaatattcttttaatggttcaagtcttacggtgtgtttgacattgcgtttcggaagcgcttttgaaaaaaaatgatttttttttttgcttcaaaattaatatgtttttgatgttttcagattaatttgatgtgttgatgtcaaaaataattttttaaaaataaaaagtattattttaatgtgtttaggaatgaaaacatttttaaaagcaatcgcgaccacactcccaaacacgcttttaattggtgacgatgactaattttgtaatgtcgtttggctacactattatgattgcttactccttcctcttttctatcagttgaaaatgtagatttattcactttggactgtcctcttaatcagttttcccattttttaatattcacatgcctgcatcaagatctatagctgttccagctggaaacttctaccatcatgatttcttcattatatgccttttgatttccctttctaattttcaggtactatcaagcaccgtcaggcaagagacttcgct

SEQ ID NO: 53884 - DNA, 562 bp, Populus trichocarpa
  Intron number 2 from transcript POPTR_0018s14340.3 (locus POPTR_0018s14340) derived from phytozome v7.0 (chr-ID scaf fold_18; pos 14573864 to 14574425 reverse strand)
attttccgtgttcatattttaaagagcagatataggttagttggtgatccatgttatatttatttatagtaattttccatttgaggatttgtttcttcgtaacatgttgtaatggtacgttttgtactgtattttgcctggtatgcaagtgatgcatggatactttagtggaatcttaatgtgtcaactgggggaggaaagaacctgccaatgaaaggggaaaaattacctaaactacagaaaaggggggtttaactctaaatgatgaacatttcagtatctaaatgttgataaataacttgttcttccattgtctttcaaaagaatttgtaagccttggttctttatctttgttctgtttcttgacttgtatttacaaggatgtctcgtcctccttttatggactttttttccccttatatcaggataaattgccttttcttttttcctatgaaagaggaggtttttcttttcttttttcaaaaagatcaaatattcactgatggagaagttttatgatctagccttatgactgtctgttaggtggttgaggcataatcag

SEQ ID NO: 53885 - DNA, 656 bp, Populus trichocarpa
  Intron number 1 from transcript POPTR_0018s14340.3 (locus POPTR_0018s14340) derived from phytozome v7.0 (chr-ID scaf fold_18; pos 14574434 to 14575089 reverse strand)
aaccaactgcactgatcacatcaccttcaccaactgtaagtttgattctctttctatgtttctcttccaggttgtgatttatctttctgggtttcggatcttttgctttgtcaatcagatcagctcctgttgttttaatgtttgtttggcttgttgggttgtcttggaaaacttgtttggttactgagaaagctggcatttttggagtgtttgtgtttctcttttgtgtttgtttgtgtgttgtttccttttggggaagtgtgatttgtctgtgtctatttaagttttttgagtttcagtattattctgcactagtgactttcctttttgttggtttttttccttattctaaaaatggatacttttcaatttctttttttatcttagatcctaccaatctagtcaaatatataaacttaagcatacctcttttttggggggactagaagagttgatatattgtcaagtctggttggataataacatagtagagaagggttttaaattttgtttattttttagcaacatgcaacattgagttctaccataggaaaaatctagtggctgtgttttttttttcttttaataattttgttataagtatagagtctgttagactagattgatatgattgaggtattttctatgtgcaggtt

SEQ ID NO: 53886 - DNA, 516 bp, Populus trichocarpa
  Intron number 1 from transcript POPTR_0013s09680.1 (locus POPTR_0013s09680) derived from phytozome v7.0 (chr-ID scaf fold_13; pos 9546496 to 9547011 reverse strand)
gcactggatccaaagaagaggtcaggttttctttattccatttcaaatgcgaaggcctatataacaattcaactcttcttcaatcctaggtttagggtttagtaagagtgtttctacttagctagtcagcaatggactttatatatttttttagggtttaaagctctcttaagagggattttgctatttatgttgtatttggtactgcaaagtgtgaaaataaacggacgaaggaacgggcgagcgacctgcttaattattattgaatggaagtgtattatattttgtttcaaagatgggtttatttccattttgaatttgaaatgcggtaataatgattattattgttgctcaaattgtctattgcaccgggggttggtgtttctcattttttactagacgtcttcgaatttggttcctgtttttggttgttttggttttgcttgcagagctaaatttctcccctctctattgtctacagagggtagctgctgaccgtattttgcaggacttgca

SEQ ID NO: 53887 - DNA, 295 bp, Populus trichocarpa
  Intron number 1 from transcript POPTR_2192s00200.1 (locus POPTR_2192s00200) derived from phytozome v7.0 (chr-ID scaf fold_2192; pos 1285 to 1579 reverse strand)
ggcaggaaaagaggacattagtccatcgatttatagtatgctccttttccttttcttttttactttttgttttttgttaaactaattatggatgctatacattgcatatagtagacatgcatttgagatacataacctcaccacactgaagatagcatggggtattttgggactctttgtttgagttccttttttaaataaattacatttctatttagctctccatttatccattcagtttctatatgtaataatcttcattataactagctctgttctgcaatctcccattcca

SEQ ID NO: 53888 - DNA, 1026 bp, Populus trichocarpa
  Intron number 1 from transcript POPTR_0006s21970.1 (locus POPTR_0006s21970) derived from phytozome v7.0 (chr-ID scaf fold_6; pos 20981060 to 20982085 reverse strand)
atagcgagtttgtggagaaactgaagtctagcttggtatgtctttctgttattactattattttgtttttattggtggcttcgtttatttagcagttttttagatgagaatatgagcaatttcgtttttataggattttgagttttattgcttatatgagacttgggaatttggggattttgtttggagtagagtcttttttagttgatcggttttattggtctctttatttattagttggacaaagctagatgactttatgcagcgctactcaaatgtttattggttgtcaatttttatatttaagatggtacactagcttaaggagaaacttttgctaaagtatttgaagcattcgagggggactgtaatggtcttgtgtaagctgaaatatgctgggaatgatgaagttggtgtttaagtaatgagaaaaaggctgatgctttggtgtccctaatagcatttagacattagtaaggttataattagctataggaccctattttcattgtgtaaatttttaagttcaccatttggctgctgtgagttcgtctatgaagagctatgtcaacatgtgcaccacggtctggtttgttgtgcttgttcaagtttcagatttgttaatcattatgagattttctctcatttaggagttcatgtaaacatgtctgacatgaatacggtagtctgggccgggtgacatagatgcagggcttgctttcaaatctgaaggaaatgtgttgatcctcatagagacattcttccacagaatgaattagattgacctttgattgcatacacacaccaaaatattctcccctggtttgatgtttgatacttaagcttagtagaatcttacacttactgcacaatataatgttttgaaatcatcagtgcatattttgcattcattaatattcattagatgatcattagctgcgttcattcttttaacaatgtaaggagtctcattctgtctacatttttgcagaaagcaatccacaaggagcctcaggagtcaaaggt

SEQ ID NO: 53889 - DNA, 595 bp, Populus trichocarpa
  Intron number 2 from transcript POPTR_0019s05390.1 (locus POPTR_0019s05390) derived from phytozome v7.0 (chr-ID scaf fold_19; pos 5734524 to 5735118 reverse strand)
acgagagttttgaaggtgagagcaaatttagtattgattttttccttacaaaatcattaccgtttcttagtgaagtcactaaactgggacaagatcacagccctctctttttttgccactgtcaccatcaacgccaccctcttttcctctcctttcccctcttcttcctctaagaaagctcaaaacaacgctgctaagctcgcctataaccacttctccctcctctctcctcctctctcgcccttcctcctcctcccccctttatggtaattgaatcccttttgtttctttgtaatgcttcatttcttccctttttatatttccttgtgctgtatcagatattttaaagacttttttaggttaattattttaatgaaatgaaattactttgtaaattaatgtttgattaagaatgaatgcttgcataataacatttgattgttagtagaatgtattgattggtgcccgtaatcatgaatctgtttatgataaatcattctagtggtgcctatgcttatttaactgcatcaataaatgaagaaactgatgttatgctgagtttctgcaggctgttcgagtggaagcgctgggggga

SEQ ID NO: 53890 - DNA, 810 bp, Populus trichocarpa
  Intron number 2 from transcript POPTR_0014s03460.1 (locus POPTR_0014s03460) derived from phytozome v7.0 (chr-ID scaf fold_14; pos 2786071 to 2786880)
gctgcctgaggtattgcactcacctcctgattatattgtttaaaaaggtgggaatttgaaaatctcaagtgtaaaatgaggaattccctaattggtgctgttatttagttttgtccaattctgctttgtgagcaacaataacattgttttgttatgtgatggagctgttagatttgatcatttcccattgccacacagatggccctgtgatctctctgtggcaagcagaaacagaactccgggatctaattttattgtgttgcttgtaattttaggattcttggcattttagataatgattaaaagtaaaacaacattgaacgaatagagtgatgcaatgatcttataggttgtgacattaaagatatggcggtcttcttacctgctgctttgatcaacatcttacatagttggaggtgtaggccaggagtcagagaaagctgcttctgagaattacattctttggagtttattgcatagctggttgtcataacttcttgatgctccttttcattcatccacaaacttatatatactgtttctgtctcatcttcatctactaaccatcttgctatcataacacctctcgctaccataaaccttcaccatcataagcctgcagttgagctagtggaattttgacttgatgacgagactaccccacaacacaaacaaatatcaatacgcttagcagttcttctgcttttttaagtttttaacctggtgtaatctctaagacttgaattggcattagtttgctatgatgtgctggctgattacattttattgtttgtctgcagctacttcatt

SEQ ID NO: 53891 - DNA, 753 bp, Populus trichocarpa
  Intron number 1 from transcript POPTR_0006s17860.1 (locus POPTR_0006s17860) derived from phytozome v7.0 (chr-ID scaf fold_6; pos 16078459 to 16079211)
caggccaatccaaaagcttggttgatttaattcaggtagctattttcatttctaggaaatgctcattgatttgacagttaattactgtgcttggatacctctttatataatttactttcctgttgggttgacacttaatttccctgcctttcagatagcttcccttgataattgttagctacattactctgatgcaaatggaagagttgttagttttagcatgtaaattccataactgacagaagtttgtcattactagcttctagtcgtgttccatttgaatttcgtctgtgttggagtttgcctgcaacaacaacatgttcttcattagttatgcaccactcatgcttggatatatttcatatgtaatagtgacttcattgttaacttcaaattttggtttcatgtttctttcttttgtatttttgttgattaagttaatcatggatgtaccacactatagttcagacatgttttggtttgtaaatttaactgtaaattttcatttgttccaacaaaacaacagtaaacatagcaatcctaattctataaggttgaactaaaataaaaatcgacccatcatttaacgtaatttatatgctcggtatgctgcttattggcttaacattagcatgaaaaaaggagattgattcttttatttttgttccttttgaattacattattatgcacgtgttatttattgattcacatttacaggaggatttcccccgcactccatctcctgtatataa

SEQ ID NO: 53892 - DNA, 485 bp, Populus trichocarpa
  Intron number 1 from transcript POPTR_0003s06600.6 (locus POPTR_0003s06600) derived from phytozome v7.0 (chr-ID scaf fold_3; pos 8126535 to 8127019)
aaggttcattaccattgatctgctgcatgattatttgtttctaacgtatttcattccagcaaaaaataagtggtcattgtggataatctattcttaaaaaacaaagaatcagtcatgctgctaatttttgggctcaagttatggagggaacttttctcaccactggaatggcggctgcactaaagtggcggagaatgtggccatcaaacacaaatatgaagagagcaaattaaactaaaactaaactgatcgaggcacaaaacagtgctaatgaaatagaaaatgttcttgttagaggaatacttgccttcatcagttgtagtttcattttgcttttgatctgatctgctgtgggaactcaaaaggaccaaacattcttgagtcagaagtctgaaccaaggcttcaaatttactaaatcagttatttcttcttctgtgtgaatctggcaggctttcaggaaggaagtgatatttataattgatat

SEQ ID NO: 53893 - DNA, 954 bp, Populus trichocarpa
  Intron number 1 from transcript POPTR_0006s14430.1 (locus POPTR_0006s14430) derived from phytozome v7.0 (chr-ID scaf fold_6; pos 11790786 to 11791739)
aaattgaggggattcgagttggtgttaatttagaggtattatttggatttcctgcctgttttgctagccaagagacagtatatgtttgaaaaatggattattttggatattacttggcttttctatgctatgttcttaatttatgtatgtgctaaatgatcaatgagagtgaaagtgtaagagtggaagcaagacgggattttggtcaaggaaacatcttgttgctagtttgttttttgttttttcttttcgcatatcctttgctggaaatgtaccattgtgaaagaaaatgagtttttctggtgttggttattcctttgagatgtagggtacttgtaaatatgaagattgatttgttatggcaatctagttgtattctaatgctttgtctttgtcttttttctatcatggcaatatactgttctgacaattttctgtctggtaaatacctctggatttgtccattttggtaaattttgctaggtttccatgtttgatgaatatcctatttcgacttgaattctttgacgtggatccttcacagagagcaatggattcaatgtctggagaacatttttctgctattaaagatagacagctaatttaatcaaagcactaagatgtgatcatgaaagttttgaactttaaagtggaaccttaagctattgcgagtttgtattgtttggaaaacctgacagggtagtgggtgcaaaatggaataaataaattattcatcgctcctgttagagtgatggatattggtaatttgtcaaatgaacacttgaacaatatagatattccctttctcatttctgctgtgattgaatggaattccttttttattttttgatgaatgcttgtctatattttttatgctgtgctatatgtgcattacttgtcctgttgtctgtctggttgtgatttttggagtccacattttgattcagttctata

SEQ ID NO: 53894 - DNA, 719 bp, Populus trichocarpa
  Intron number 2 from transcript POPTR_0018s13880.1 (locus POPTR_0018s13880) derived from phytozome v7.0 (chr-ID scaf fold_18; pos 14174838 to 14175556 reverse strand)
gctctcgcttatttataaagtttttcgactctcctgtaagatttgcctctggtctggtctgatgtgtctgggttttggttttggcttcaataccgttaatttctgcttcaactgttttacaagatctttgtggcttaaaactaaaagggtttaatatttattgatataaaagaagttagtcaaattaagctgccagctttccactgtcagctcgtacttgatttgctacttgtccattgcttccatcactggcttagtgttcgttatgaatatgcatttacaggtaaagctgctactgctagcatgcatttcactgtcaatgaacttgattaaactgttgtgtctaaagtaatggcttgccagaaaaaaagcgatacacaaaagaatctgataatccatctgggtttatatatatcaagtgggaaatcttggaggagattctgcagtgtggactgctgtgacaaacggggtataaaagggtgtctctttgtcatgctttgaaacaaatccttgtacttctcatgtatatatgcatactgctcggcttgctgtagcattccagagagtgaaacttaatgcccgtttttctgtctacgtttcaagccaaaaagcatcttttcttgtgtttttggctttaaccgtagtttcaccgcgtagacaaacctgtcttgatctttttttcttcttataatgtgtccagcgtctgttcttcggcttta

SEQ ID NO: 53895 - DNA, 548 bp, Populus trichocarpa
  Intron number 1 from transcript POPTR_0006s29170.2 (locus POPTR_0006s29170) derived from phytozome v7.0 (chr-ID scaf fold_6; pos 26624819 to 26625366)
gcttgatcaactcaagtctaagatccacgctctcggttagttagttactcactttcttactattttggctgttcaactttttctacgattctcgatattttgcagtttgactttttggttttagatattatcgatgctacttgaaatctgatgctaattctgtcaaatcgaagatattcatttgtcttttttattaattttgattctaatcctgccaaatttaagatatttatttgttttttgtatgatttttatgaagtggaagccagaatttttataatttcttatactaatttttgagcggttaaagcaggtttatctgtgattagattgactaatgcagtgttaatgcaaggattaggaaaatcagagataattaattgtggtgaaaataataatttttgtttaatttacgattatgcttagttttcttgttttataaaggaataaacttgtttttcagttgtgcaagttttttttatattgtttttttttaagaagcctttaacgaattgtgtggttgttgggtgatgaagaatctcatattg

SEQ ID NO: 53896 - DNA, 517 bp, Populus trichocarpa
  Intron number 1 from transcript POPTR_0003s20350.5 (locus POPTR_0003s20350) derived from phytozome v7.0 (chr-ID scaf fold_3; pos 18869978 to 18870494 reverse strand)
cattttcttggattcttcaattcttgagtaatcaggtatcacataaattcttgattttcttgttttatttttacaatgtaggttctttcttttttagagatcaagaaatcactttaaaaaaacagttgttttagagatcaaaaccctgtagtagtgaagataggcgagaaagttcttgatttggcaagaaatgtgaaaaagtttgttccttttgagttgatagaggtaattagagatcactagcatctgatttagatgcttaatggaaatgggttcttggctttttttgtaaaaaggacaagttatggctgaagtgagctattttgttctgtttctctcatcttttgatgtttctctcggttaatcttggctttatttgaagccattttcaacaagttgggatcttttttctttaagatgttttgaatatgcaagcatttcttatttcattgcttgatttatcttgtgctatcaaattttatgctaatttgctgacttattctgtaggagttgtgag

SEQ ID NO: 53897 - DNA, 567 bp, Populus trichocarpa
  Intron number 1 from transcript POPTR_0013s10150.1 (locus POPTR_0013s10150) derived from phytozome v7.0 (chr-ID scaf fold_13; pos 10155460 to 10156026 reverse strand)
ggcaagtttaatctttctcacaggtacttgattacttaagttatctcccctttctttaatgtacagtatggtttcatgtattatccatttccttgaatttgcatggtttgatgtagatgacacgctgtgatctcagtttgcttttctgttttcagcagcaaaatgcttttgtattcagaattcttccgtgaagtcttgttgatcattaaaaatcgatatgtatgacacgaagaaattagtatatgacctttcctttttccttcttgatttttctgtttcatttgatatgttgggtaatgaatttgttataagatcatccaaaactttttggctattgggtcaagctttaggtaatttacccttatcatagttgtttgttctttgatttcctggttttcatcaccaactcatggccgggaaatataatcatgtaaattcccaggtttaataaatagttaatgcagtggatatactgctttctttgaatatcattttaattataactacttcggtgatttcatgtttttttcagaattgtcctggcaccattgactagacagagatctt

SEQ ID NO: 53898 - DNA, 810 bp, Populus trichocarpa
  Intron number 1 from transcript POPTR_0018s03010.1 (locus POPTR_0018s03010) derived from phytozome v7.0 (chr-ID scaf fold_18; pos 2686106 to 2686915)
tctgccaacaactgcctgcaaccactcttctaaaggtttaatcaccattcgagcaatcttttcttgattcatgtttattaattatatatatttaactttgttgatcctatgttggtttaatcacgattctttatttagattctatgcccatgcaaaataattctttgaataatagacatgaatatctaaattcgtactttggttaacgtttgtcaacttcgatttcatttgataatgtaatttaacatgttttttaaagtattttttatctgaaaatatatcaaattgatatttttataattttttaatgattttaatgtgttactgtcaaaaataaaaataaaatattatttttaatatattttcaattaaaaaatatattttcaaaagcactgtacattacacactcttggtttaaaaagataaaaagaacaattgaaaatcatgtctaattgtcgtttgtttgtttaagtacaatccctctaaaaaaatcactccaaaatctttatccttttttattttataaaaaccctctaaacaaatacaaaagtcatgcataaaatcttactaactgatatattcttggactctctccaatctcaacttcttagctctgcccagccccgccctattttatatctaaaactttaaaattcttttcaataaaatgacttcatggatggttcaacttattcctcattaagaccacctcaggtaataaactcagtcgagtgcctgcatgtaatcacactaattcaaggtttatgcatttcagtttcaaacagtttatccctggaagtggtgcacagg

SEQ ID NO: 53899 - DNA, 921 bp, Populus trichocarpa
  Intron number 2 from transcript POPTR_0019s05690.2 (locus POPTR_0019s05690) derived from phytozome v7.0 (chr-ID scaf fold_19; pos 6055021 to 6055941)
gaaagccagggcatcattgtcaaggtcaggtgcttaggtaatttttctttcgcttcatagtgcatgttctaacaattttctttttcaaaaagtaatcgcttatttttcatgtgaaatttatttagttgactatcgtcaagatcatgctgaatagtaactgttaattggtcactagctattggtgaaaccattttattgttatggcaaactatggtcatcatcaaagcctacattttttacaaattgaacaatgtgcttactttctgagctaattggccaagtcaattactattttgtttgttttatggagttaattatccgcatgtcacaagtcttttttctggaaattaataattttgtatttcaagaaagtgcaatgtacttttttctggctcgtgcaagccctttatgcttaggctcagcaggaccttttcagtgtgtcatcagcccgttatgtagggcaagtttactgagtagaattgattctgatgtaatgctactataaaagaaaacttgtttaccgccataccatcgacaattatttcttgtgatgagatccctttccgcaaaatagctcaattagttaccactttagggctcctttttttcaccattcaccttagcttataaattttgatgtctattcatgtttgttgttaacttcaactcaccaagaggatatgttgtagtgagtatacattagagtatctctgtacatatttgggaagtagtaaacgttgactagcttggcctgtagtcgtccatgaggcttggtcttgtggtatgatcgctgcatgctacttcagaacagtagcatggtagctgattgttggttatcttcatctgctgtgttatatttcgcaaagaaaatgatcctatggtacatttggttttgtaggttgtggtgggacagggaacatc

SEQ ID NO: 53900 - DNA, 434 bp, Populus trichocarpa
  Intron number 2 from transcript POPTR_0006s07470.1 (locus POPTR_0006s07470) derived from phytozome v7.0 (chr-ID scaf fold_6; pos 5408863 to 5409296 reverse strand)
aggctctttctaaaatcattggcaaacctgaatctgttaagtaccctgtttaaccactttcctttataactaattgtgtctttgcttcagttttctgtccttgtttttcttgtaaaactttaaatgactgcgttctgtttgatgaaattactctgtgacacatcaaaattagtgttcggtacacagggttggacagctgtgcttgcactgatgttttgtgtgtcccacgtgaatttttatctttcttcttgtcgtaggataaccttgtttactcttctccagtctaggcgtgcacatcaaatgcgtctttcttttcatgtgtttagtttagtttttatttttttcttttttcatgaagctattgaatgctggacttgtatgaagatggaattgacattgatgtgtcatgacggaatattgctgtatttttcagt

SEQ ID NO: 53901 - DNA, 572 bp, Populus trichocarpa
  Intron number 1 from transcript POPTR_0003s01370.1 (locus POPTR_0003s01370) derived from phytozome v7.0 (chr-ID scaf fold_3; pos 1207780 to 1208351 reverse strand)
tgtaacttcctctctttcaaattccctcactcgaagtaagcaagctcctaaatcttctccttttctttttataataattatttgaaatctttaatcaatgttcaaagtttcacccggattcatcttgaaatgttaattcctatctgggttttgaaattcttgagctcccttttgtttattttcattttcattttctttttattttttttaattaaattcatttcatttgagcatatgcaaatatggctaaatgagaaatttttatgtttaatctgtgttgaattctagtgtttttcttttctgaaacagggggctttgaccaagaattcaagtgaaatgaaacggagatgttctttatttatttaatatcaaacaatgtctttgtccgctctaaattttagaatattggaatcagtgaataataatactttaattattaaatttaatagcgaatgcgaagtgggtgcacgcatcaatgaatattgtttctttttgaaatctcaatggctctgtattaattttgagtaatatcatcggttgcctaacacatgtttgattgaagtcctcacaga

SEQ ID NO: 53902 - DNA, 428 bp, Populus trichocarpa
  Intron number 1 from transcript POPTR_0019s05090.2 (locus POPTR_0019s05090) derived from phytozome v7.0 (chr-ID scaf fold_19; pos 5335876 to 5336303 reverse strand)
caattatctattggtaagatgattatcttcttcttgtcctttctcctccatcttctatccttctctcaatctggtgtttttaacaagtcagtcttttttgaatggttttatgaaagatttccttttgatttctgtttatacactcttagatcttgaagctggaccacacaccttcatatatgctttattaagcaaatccctgatgagcactctcaaaattcagttttctcttagcttctaataagccaattctgccatttctataagtttcctcttctgggtaaacttgattctctcattttatacatcaaagttttgaaattcagccgattttcatatctgggttatttttgttgtactcaaagtttcgggctttatatggttctaacttctgggatggtctttgtttcttgttttctgtaacagat

SEQ ID NO: 53903 - DNA, 284 bp, Populus trichocarpa
  Intron number 1 from transcript POPTR_0018s00860.1 (locus POPTR_0018s00860) derived from phytozome v7.0 (chr-ID scaf fold_18; pos 801671 to 801954 reverse strand)
tctgattctcctcggactcgcatcgatcaggtgggccccctaaaccctagaaacttcccaacggtaaaaaaaaatcgatctttcttcaaagataaagaaaatctgaactgaattttgaaaactgggtttgttcgaaattagtcaaatttgaattcagatcatagaagatttgaactaatttactatattttagtgcggatttaattattccaacacgtgctttgcttgtgtctgtgatttaatttacagttttttgcgtcgaggaagaggaaatcttcgtcgcc

SEQ ID NO: 53904 - DNA, 758 bp, Populus trichocarpa
  Intron number 1 from transcript POPTR_0078s00220.1 (locus POPTR_0078s00220) derived from phytozome v7.0 (chr-ID scaf fold_78; pos 34717 to 35474 reverse strand)
accaggcccctgcaactccaatctcacgtgtcaaggtgcgcgctttctctacactactttcaacctctctctttcttgtttcacagtttgcactgcattttcattctcttttttattaattttgaactaattgatgtaaatcttgcatgttttgagtgttgaagagcacatatcgaaggcttgcaggtggtttatttcaaaaaatctgtgagctcaaagcttgtgcaatatcataaatcacccattaaaaaaacccttttgacaatatacctgtttgcttgaggattttttgtggggtgatgcacattttttgattcatttgctattattttttaaggttatgtttttgtatggatttgggtcttcgtttttataagaaatgaatgtttttggatctgggtttttgcctgtctttatgtttgatggctttatgtctttggaattttattttttttgggttttgtaaagccaatttgcagagcaagggtgtcgaaaatggcacaacttgcattgaaggttggcaatactaatagcaattctccgtgcctatcaaatcttgatttcattttgattatggcctcgaacaagttgctacattagttattcttttctttgttcttttttattctgttttgatgttatagttggtgtgggaatctagtgtatgaaaataggcatttaggaattgttgctagtttaggtactgaaattcctttgttcttttgatgtttaacagggtttgaattgtgtgattgaag

SEQ ID NO: 53905 - DNA, 554 bp, Populus trichocarpa
  Intron number 1 from transcript POPTR_0019s09420.1 (locus POPTR_0019s09420) derived from phytozome v7.0 (chr-ID scaf fold_19; pos 10966484 to 10967037)
cctgcttctctcaatctagtcaaatccattaaaaggttttttttttaattttcatatttagttgaattaaattgctagtgtttattgttgtttattgatatgtgaattttatcgttgtaaaataaaatctgcaaaaattattttgaatagaatcgaaattaatttttgattagtaattgttggttagtttctgtattttaaccaaattgggttttggtggtgttctattgttacctgtagaggaaaaatcatagagcaatttatggtgaatttagtatttttttaattaaaaaaaatcttttaatccttttatgtttttctatatcttgtgctgtatctggttgctgcaaatttgaataaaaaagtagcggattttttttataatgtgattttcttcttgaaagatttttcaatttttaaaaaaagttgcctgcagttaatattttttgtaaggaatttgttatttgtaagtgctcgagatgttataagttttaatgaagaaaaataaatatgtttcagcttcattgtatcattccaattttcgtctgcgaacc

SEQ ID NO: 53906 - DNA, 925 bp, Populus trichocarpa
  Intron number 1 from transcript POPTR_0021s00770.1 (locus POPTR_0021s00770) derived from phytozome v7.0 (chr-ID scaf fold_21; pos 441554 to 442478 reverse strand)
aattggggttagaggtatttttttttattaatgttttcatttagatttatgacccccttttttttttgaatgatttttttttcttaaattgaatgcatgtttggttgctgagaaagttaagtttcattttctgggaaattaatccaagcagtttcttttcttttcttttctttattttttggctggcatgttatctttttcttcatgatggagacttgacaggtagctctttgttgtattgaggattcaggtgacaaatgaaatgcaatgggccatatgtttacttggtttcttataattttctgttcactcttatttttcttcacgggctgttattgatttgtctacactctagatgctaagaatttgttggtaaaaaaataaagaggtcagaatttgctttgtttttcttagttttttttaactcatcaatgaaaatttaccaccacaataagaggaagattgcaatgtttttttcatctatatgcaatctgtactcaaaagaaattctgaaatgagtcttcctgttcgttatggtataatgaattttccatgatcctccttcttctacatttttattgtcatgaaaaagtgtgataaaaaagaagaagagctagtccaattatttttcaagtgcatccgggctgattaaaattcatccaagcaatgactgaactcataaatctcttattcgtaagtaatagttcgtgtttgtgcattctcgtcgtaagatctaatcgaacttaaataatgtaatggtttcattggtttcgtgcggatctgttcatattctatttgaatgcctgttcacattttgtttccataacaatttcgagactttggaatgatgccatttgcttttaattgcatcctgttgttggaaagttaaacacggtgtttccctcccatcagattagcagcgaat

SEQ ID NO: 53907 - DNA, 402 bp, Populus trichocarpa
  Intron number 5 from transcript POPTR_0018s04310.1 (locus POPTR_0018s04310) derived from phytozome v7.0 (chr-ID scaf fold_18; pos 3640629 to 3641030 reverse strand)
cttcagataaggtaagcaaagttttgatatctagttttacgaggggtgtaatcagtaatgcatgtgttttgcatcaacatcgttgaggacaaggtttctgtaatgataatgtaactatcttcaaagataattccttcaattttcaacctttcattcctttgtgctgagtttttgagatttttgcacatggctaagctgccttgattcttttatctgtgacaatttttgttgtgtcaaaaaccttgtacattgttaaaatggtagaatttttttatgaaaaaaattgggttactaaattcagatttacattaaaatattatttccttgtctttgaatggtctaaaacaattgttctgtttttccttgtgagagtgtagttcagtggagcaaggagattaagag

SEQ ID NO: 53908 - DNA, 770 bp, Populus trichocarpa
  Intron number 2 from transcript POPTR_0018s14160.1 (locus POPTR_0018s14160) derived from phytozome v7.0 (chr-ID scaf fold_18; pos 14431852 to 14432621)
ttataatagactggaggggttaatagatttgaaaggttagtttttttctatattattatttttacaaatattaaatttaattaaaacaattatctattaaattcaatttcaaaaaacacaatttatattgtgtagtgtattaattttttttccttttataaatatcaagattccctgagtagcttggagagattggatttaagcggcaacaatattaataaattggtagcctcaacaggtaagtaaagcgttcacattacttggtagcatgaagataatatatatatatatatatatatatatatatatatatatatatatgtgtgtgtgtgtgtgtgtgtgtgtgtgtgtgtgtgtgtgtgtgtgtgtgtgtgtgttcatccaattattatagcctatccatacaatattaattattttttaaattaatcaaataaggtgctgtttaattagtatcattttggttctccacagtaattcatcaaagaaaatagaaattatatttagttgtttaattccttacattattaatataatcataccaccacagaagatattattgcattaccaatattattataattatcacatcagatcatcactataacaattactccttttactttcactctttcaccatcctctttacatgaagtcactgcaacaattacatgccttttgatcaatcataattaaattactccaataatattatcttttttaatcttaaaatcaagtcttaatttatttattttcttatataggtgggt

SEQ ID NO: 53909 - DNA, 996 bp, Populus trichocarpa
  Intron number 1 from transcript POPTR_0003s10180.1 (locus POPTR_0003s10180) derived from phytozome v7.0 (chr-ID scaf fold_3; pos 11274752 to 11275747 reverse strand)
tctcattgacagctgctcgtctctctctctaacaggtactatccctttgcatctcctagcttctcccctttaacttcagtttcgatatttcattttctcaccgctgtgctgttgaatttatacgttgttcttgttgttgtttttttgtattttgcaagtaacccgatacttgggtaatcgttgtctcgtgttcggtctgctttgccaatgcattgctggatctgatgagtcttaagcactgtcttacatttgcttactttttgggttttgttttttctttctgtaatcgtttctacttgtttggctgctgagaaaatgaaaggttaaagagatacaaaataaaccatgatttacttcttttatttgtgaatttgtgcctagtttgttttctaaccagcggatagctgttggttagtgtacctcgcaccagagttattaagtcacttttttaatgtccgtgttctttatcctgctgctttggttttgatgcatggcttctctcgtctaataaaatcatgagaaaaatgtttggagagattttaactgacagtgtcaccacaatatttaaattctcagttcttgagatgagcccgtaatgcaagaatgattgaactattgcgttctagggacctgggcaggttgttagaattttaactctctactgatgagcgtggatgtggctgtagtgattatgagttatttgttgctttcttgccagcctgctgttgaatttttgtttagtttcgttttttaatctatgaatgaataggaagacatttaatggttaacttaagtgactatataattttgttttaagaagcgtgatcatggtgtttcagtagaaacaaattgagattattgcttggttgtattatagttgcctcaagttttgcctttttcatgttatgttgttaacttgattctttcactcgattgcatcatacagacaatgtcatgtctctaactctgtaaatcttatgctcttttaggtaagac

SEQ ID NO: 53910 - DNA, 668 bp, Populus trichocarpa
  Intron number 4 from transcript POPTR_0019s09520.2 (locus POPTR_0019s09520) derived from phytozome v7.0 (chr-ID scaf fold_19; pos 11094043 to 11094710)
ccaaaaggtcctctctccctccaccaactcctaatttatagcattaatttagaaagaacagacctgttgaatttgctgattttcggctattatatactgcatggattagaactcacattccatggctgatgtatagtcacacaaagatcaacttaagaaaaatcaaaataaataacaaattgtcaagtcaccgcaggaatctaccagtaattttggagtttctattctaaagcggttttcttgtacttggccataaaaaggcgaagagtttttgcaattgaaaaattaatttaacttttgggcactaaaatacgcaagccccaaactagattccaaattttaactcaaatctcaattgagagtctgaagggatattctccctggattttggtggaatccatcagcagaagtgggcacataattgaaaatttttaaaactttgagaatcaattgagatacaaaaaatttactgtaagaaggaagtattgtatacatagataaataaataaacaggttaattatcataatttatattaattaccaatccacaatgcatgtgtaatacataatttgattcacctaataattctcaattaccgagtaaattactaaagatttgtgtaattaatgcaggggaaaagttaaagaaattggagaaagaaaaaggg

SEQ ID NO: 53911 - DNA, 631 bp, Populus trichocarpa
  Intron number 1 from transcript POPTR_0014s17320.1 (locus POPTR_0014s17320) derived from phytozome v7.0 (chr-ID scaf fold_14; pos 13448291 to 13448921 reverse strand)
ctttggctggcaccatctctgtcaaggtactccctttctttctttttcttatttcttcttcttttaaatgaatttatctgtgtagtgattcaaagttagttttttgaattgttctggaataataggtggattaggttgtaatgaaagctccgacttttttctttgtctgtggtctcaaggcaagattaatgcctaatcttatatatatatatatatatatatatatcggttgaggagtaagctatgttgaggatacctcttgccgttaaataaataataataataattttaaagttagcaatgttgtggttaaattggttgtctttaatactatgacatgggaaatggataatggactgtatcatattcttggtttgttggcttttttttttaatcttctgtatgcctgtttttgatgcgtaaagaaatttgatgtggaatccccaactacatatatttttggatgattacgtctgttagttgagtgtttctcgacaatgattgaatattttgaaatgtaatgctagttcatgtaatttggatggaattttcattgcagtatacaattcacatgcatcttcctttctatttgtgattgaatgtttgttgttgtattagcactgttccgacg

SEQ ID NO: 53912 - DNA, 515 bp, Populus trichocarpa
  Intron number 1 from transcript POPTR_0006s00250.1 (locus POPTR_0006s00250) derived from phytozome v7.0 (chr-ID scaf fold_6; pos 31168 to 31682 reverse strand)
aggcttccacacaagctcagacaagcgaaactgaggtactatactatctcattccttaatatttgctattttgttcaattccaatctcaaaagtgattaatcctctcttgtctttcgtagagaaacctgtattcccttggtgtcaagatagcagaattatacaactcagtgaaaagaatacgcgttgagcttggccttctgcagagaatcaaacttctatggaccatcgttgaagctcaagtaaggctgctgctgctgacacacacacacattcttttttattgtatctattgaattctacagttttttttccctcttcttcatcaacttttgccccagaactataataatgtataacaataaaaaaacaaattgcctgtatctcacctggttgatgcgtttacttgtgttttgcatttaggcatctctattgtgaccaaacaatctacagttacatgtaatagtttacggcaacaatagtgctatttgttgttctaatggaatcaattttatag

SEQ ID NO: 53913 - DNA, 528 bp, Populus trichocarpa
  Intron number 1 from transcript POPTR_0013s07970.1 (locus POPTR_0013s07970) derived from phytozome v7.0 (chr-ID scaf fold_13; pos 6895291 to 6895818)
cgctaaggtgaggcagaagaacaggagtagtgcacgttagtggcttgcatttaaagaaaaaaaaataatataaatttgtgctcgtgctggcaaaagactgaacatccatggctctcttctttatttcctctgagtaaaaaaacttgccctcctctcatgtggaaaggtaaacacaaacccacgctacagagcatgaaaataaaaccaaaagagagaagaaccttgtttagaaccccaattttgtatacaattcctaggtttgaatctagaggtaagcaaagtttaacgcatcataagagaaaggaacccagatcgccgtggtttaggagcgaagtgaagggagagatagaatagttatacctgtagtgccaactggatctgctatctttgctccttcaagtgacagacctgtgattgaatcttgaaaaaactgtagaagactttgatgattctatggttttcttttcctctttctacgctttctttccagggatttgacccacacatgcactcaacaaaaagttgaca

SEQ ID NO: 53914 - DNA, 843 bp, Populus trichocarpa
  Intron number 1 from transcript POPTR_0003s08020.1 (locus POPTR_0003s08020) derived from phytozome v7.0 (chr-ID scaf fold_3; pos 9479201 to 9480043)
agaaatctatccttaaaactccatgtaaattatcgttttatgtttttttctttcttttcttttcttttgtttcaaaatgtgtgatttttgtttggttgattggaaaatgtgggaacgaggagaagttttgtgcttgactttttttattgagtgggaagaagcatttgtattgagtgttcctattaattaatgtgactgcgttttgcttacagtatttatatcagtggtttgtgtttgttgcttggtgttctatgttccaattaagataagaatttgaaagctttggttttttgaagagtcaggttaatcttttgtgcatgtttcattttgttgagttgcaattggatgtttcgatgatagtccttttcttctggttgcatttgtcagtgccttttatcgcctgcaataaaagatgttactacagcgaaggtaaagaaagaaaaatataggaaagaaaagagtttaatcaccacagataaccgtttggaattttgaactgatccaaaacaattccttttggaattgtcaagtcccaggacatgttcttgttgaccatagtccttgaattcaaagtgttgttttctttgatcatcctgtaaatgtcaattaatgaagtcagccactacctacctgtacatgatttgtgatcgtaatcttaagtactttcacatggataattgttagactttggggtcaaagttgattccaataggcacaaaatgttgtttttaccttcttttattggtgataccatttctaaggacatctctgaatcttttcaacatgttatgtggttgttaacttgcaaattgtgatttgaactatatcctaggtgcattgcca

SEQ ID NO: 53915 - DNA, 987 bp, Populus trichocarpa
  Intron number 1 from transcript POPTR_0018s10610.1 (locus POPTR_0018s10610) derived from phytozome v7.0 (chr-ID scaf fold_18; pos 11494882 to 11495868)
gcatcactgtattaggtacgattgcttctctattttattctgtcatgctatttgattaatccatagtgggtgctcttcttttgcttctgttatgttgactttctttctttaggattctctctctctctctctctaattgcgtgtttatgtaatccttgtatgtacatatgaaattgaattgctttgaggaaacctagatatagaaacagaagttcatagaaatgtggaaatcatttaggagcactgtgttgcttcttttcttgttttctttgatgatcttattattgttgttttgtatgtccaatttctctgattttcgtggccccttcaaagtcaatcatgagttcttgagttctaacactatcagattgcacacctaccggcaattacttgatgactttcataagcgtcctagcaggttgtctttcccccctttcttttctctttatctttgatttgttaaactgattgatgttgatgctagttttagtgcttaatttgatgaagtatgcccctacattcctgcacccaattgtagaaagaatctacttctcagatatattctatttgccgcaagtttttaacatgtttcccttgtttagaacaatcacagtgagaaactattgacagaaacaaattgtactctattattgtcatgcacaccatacgtgggaaattaatgaagtgatggcttacttgaaaccatgaggggcccgtaatgaatgtttatcacggccaaaaagagtacattacaaccaaaatgtcagagatgttcacctagggcaaacgaacacagagaaagagccagcattttttctttttcttattatttttgttgctgttatctttattttgttcattgtaaatggtaatgctatttcctctatacatttgtttctgtgcttctgtgtgcttttttagtattattcttaagacctataaatgttccaagttctcttcaggaaggtcactggaataaacacaaat

SEQ ID NO: 53916 - DNA, 884 bp, Populus trichocarpa
  Intron number 3 from transcript POPTR_0018s10610.1 (locus POPTR_0018s10610) derived from phytozome v7.0 (chr-ID scaf fold_18; pos 11496159 to 11497042)
tgaagatttggatacagacatacaaagtaattattcttcctctgtctgttggatcactttctgatttaattgtatgccacttattgatgatgcatctaatttttccaaaaagtttgttttcatgactgtaaacttgtaggatatgctctttagtatttcctcccctagtagtattttattgtgctcaaaagaaaaaaaaaattattagaaagaaaggaagactcaaaaacatactccaagatgaagaagaaagatcagaaaattcaaattaacaagggtttcaatacttctgcatagttgcttatgagattatccctaaagccgctgttgtagtgctcaaaggagaccaaaaaattatcaaacagtgcttccacggagatacttgggaagtcttgaactcaactccattcaaacacaccctgcaaggaatgcaacctcaaggtcttatgatcgtccttctgaaaacattcaattaatcaataactagttctccatctgtcttgtcatgggaaatccactgttctctacaaatcacaagaatcttgtcccacatatatcccaagccagtgagcaatagaaaaataaatggataagttttgtttcaacacattaaattcttctttccagtagtaaagttcacttcctctgtaaaataagtggcatcaattaactggtcgttagattcaaaagattaatgcaaaaaggcagtgttaggaagatcctggacatattgattgattcattaacttctactaagccctcttgacttagtcgacctccaatcacttctgtaagtaactgattctttctcaaattacctgttattttgcctctttggattttaagatggtttatctcatatgagtgggtatctgatgtgcagg

SEQ ID NO: 53917 - DNA, 226 bp, Populus trichocarpa
  Intron number 1 from transcript POPTR_0003s12590.1 (locus POPTR_0003s12590) derived from phytozome v7.0 (chr-ID scaf fold_3; pos 13119864 to 13120089 reverse strand)
tcacagccatcaagggcaattgtcatcttctgcaagtaatttttttacttttttaaaagacccttttgaattccctctgtgatggtttcttctttgatgtaatcatcacgtactgaaaatgttttgaacttgagttctttttatattcacgtaatttatttgatctgagtttcacatgtttttttgtatagggtaaacaagatagactttgaagaggttggaattg

SEQ ID NO: 53918 - DNA, 736 bp, Populus trichocarpa
  Intron number 3 from transcript POPTR_0003s01860.1 (locus POPTR_0003s01860) derived from phytozome v7.0 (chr-ID scaf fold_3; pos 1728787 to 1729522 reverse strand)
tctgaccagttgtggtttcatatcgaaccttcgaggtaaaccttctcatcaccatcattgttgttgttgtgattacactcctccctctagttgaaatgtgaaaagaactattgaatatgtgtactttgccctgttcgtgcattttatgattggtaataattagtcagtgtcgtaacttaactattagattacccactatactttaattttgccatattgctcataagtttgtgtatggcgtttgagattctgatagtggtataatttatgaaaatatgttctatgttttggtatcacccaagtgctcaagatgacaaaagagagcctgcctttggcaggaataacaagaatgcaatttttttctttttttaaaaaaaaaatcaaagaaaaatgtgaggaatcaagaaacatgacaagaagtaaaggatattaaattattttttcttcctagtgttaaaactgcaaaaaagtgtacgctgaacattccactctttgaaacaatcaactatccatttgtacgataaaaaccaaaccaatgactataaggtagcttcccaaactgatgtaggactaaacttagcataccagctagaggatgcttgaatagtgcaggaagacctctaaatcttaaccagggtgacactccccatacatcctgagtttcaatgtgattcatgtgaagtttggtgggctagtggcaggtcaggaagctactgaaggagatatttcatcgtag

SEQ ID NO: 53919 - DNA, 469 bp, Populus trichocarpa
  Intron number 1 from transcript POPTR_0019s13420.1 (locus POPTR_0019s13420) derived from phytozome v7.0 (chr-ID scaf fold_19; pos 14344232 to 14344700)
gatctcttctttggttctctactcaagcataaaaggtaagaattcaagaatcatgaaaatacgttcattttattcttatgattgtagtgtattttgatgtattttacttggcaggacaaacaggtttcttgttttctgatttgttcttgaattttatgcttctctctttgctggcttcagttttttaattatttgtttgtggattcttaagtaacaagactttaactctctaagtagtgtgacaataatgtgaatccttacgaaggacaagatattaggacagccttttaagaatatcctattccaagttgacatggaagattattaaatttggttttgtttgatttgttgagagtttagttacttgcagtcatctctggtttctaacgaggtatttaattaacaatcattaactgttgtccttttgtttgtgctcagccagtttaatcgttgatttgcgcaatcactt

SEQ ID NO: 53920 - DNA, 818 bp, Populus trichocarpa
  Intron number 1 from transcript POPTR_0013s10570.1 (locus POPTR_0013s10570) derived from phytozome v7.0 (chr-ID scaf fold_13; pos 10911202 to 10912019)
tcctcaactcgtcgaatttccgggaaacaccgccggttagtatgcgacctaatcttctgctttgattaacttacatgggttatagaccagttttcttgatattgccttcaggttgtcatttttaaggaattagtaccgcaccttgtactaaagttttgttcttctgaaatttgttgatgttttctaacattggaatgtgacattttttctgggttttgcagacccaagacactgcttaagattagtccccaatagtttgaactaaaattgagtagtgtaggttgttattttagtgccgcatgtgtatgtttgtgtgtaaatttttttattgtcggtttcaattattgcttgatgcaattttcctacaaattatttactgaaaaaatcatcgcattccaatctttgtattgctgagcttcccggatcttttgagtttctgatgatctacattaccctcttgggcgttgttcttcatgtgtgtgaatgaatttaaacttataaacttggattttaagtgagttagatgtggttcttgttcctaaaacatgatgagtgtgtagttccaagaccctgacatcattcttgagatgcaatttactctggatatggtgatatgttttagttgtttgattggttttagcttgtagtgaatgatgttgttggtaaacaaggcaacaagtagacaaatgcttatgaatcttctcgtattccttttattaattgtgagccttttaagtggattagatttgatttgatgatgaaaacttgtgcaatgtttttcaggtttcagaggagatttaggtacaagagattgtgcg

SEQ ID NO: 53921 - DNA, 902 bp, Populus trichocarpa
  Intron number 2 from transcript POPTR_0003s13790.1 (locus POPTR_0003s13790) derived from phytozome v7.0 (chr-ID scaf fold_3; pos 14072034 to 14072935)
tatcagattccgggaattagctgccgacgttttaggtaactatcgaaacggtaaaagagctgctggtttcgttttgttttggtaaaaactaaaagaggcagtcaggaatgacggaaaatcattaaagatgtgcttccatatgaacggaggaatttaagtgtgcctttgatttaatttgctgttaaaaaatttctggttttgctttaaatgtgtcatgtttacattgaccatgtcacctaagaatcttaaccatttgatttggaccctcactacaagccctgcaatccaatggatgacattttcttttttgtgcgtttgtgtttgatagtgtgattaattataggaagaaaacttcaaatggtggaaagtataaaagttttccatgaatgaagttttgcaaaggaaaaggaaattgcactttctactaatgccactaagaactaggaaagagatgacttgaggaagctagatgttacctccattggtttatgaggccaaagggtaactataaagttgctctaagatgcctaaatacatcgacaacctctaagtggaggcaatatgtagcatgattaggcccgttggagacacaatgaaacgtcctcttcattgccaatacgttctctcttttcttttactttcatttttgtcattgatatgtccacacagtaattacacgaagctagaattttcttattagtaattgatttggttttacttttgtcattgcttccctttcattatttttcagattggatttggtgtcagcatttcaagtagggaaaatcagcataatttaactccttgtcaatcgtttaaactttaaagcataaagtttagactaagaactaacgaaattaacaaatctgaggttttgccttctattttcttgcagggtctgg

SEQ ID NO: 53922 - DNA, 778 bp, Populus trichocarpa
  Intron number 2 from transcript POPTR_0003s15370.1 (locus POPTR_0003s15370) derived from phytozome v7.0 (chr-ID scaf fold_3; pos 15167283 to 15168060 reverse strand)
agtaaaatatctgttaaatttaatgtttcatcacataaatctttcgtatctgctattcagttggacccccaaaaaaaaaatctttacttgttttgttctttgagatcttattagaattctaacctctgttagcatttctcactaaatccagggtttcctactgctataggtccattattagataatactattttccccacgacttatttcagtaagatgattttctattttttcatggagttgtattgataaagattttaacaataaagaattgttcatatagaatgaaaatgagatggggaaagacgttaaccgaagttaaatttgaatgaacttcaatggtcatcctaaggattgtgtttttgttaggaaagctttgtttactaataggtttataaaagagtgagctacaagatttctaaagttttacgtcagcaaatatcgatgctcttatgttgccatggttctcagggttgcatctttttaagggttacgaattttctctttgattatgttggacatgatggtatttgtcaccaggcaagttgaagaaatttgggttgttgatggcagtgcctttaatttttcacaaataacaaacagaagatacctcccgacttctctccaactttgttgttgtagtaataatacgagtgcttttttttaccattctcagtggttcatgaatcatgttgttgcttcttctttttttcaggcgattttcagtgcaagtatgatccaatgttcactttcttttacagaaataaaggctcctggg

SEQ ID NO: 53923 - DNA, 284 bp, Populus trichocarpa
  Intron number 1 from transcript POPTR_0003s15370.1 (locus POPTR_0003s15370) derived from phytozome v7.0 (chr-ID scaf fold_3; pos 15168203 to 15168486 reverse strand)
aatttccctctctcaggcacctctaactcctactggtaatataataaaccactacttgttctctgcttcttctatgaatttccttttaccccacttgattttcttctcatctctttattttttttactgtccctttatctgttttttgtatttaattttctgcctggtcactatattactcactatcttggtttttgatatgttccgtgttatgtttgtgaacataattttgatgattttttggttatggttatttgtgctgtgcttggatacacaggatttcg

SEQ ID NO: 53924 - DNA, 699 bp, Populus trichocarpa
  Intron number 1 from transcript POPTR_0006s14160.1 (locus POPTR_0006s14160) derived from phytozome v7.0 (chr-ID scaf fold_6; pos 11487647 to 11488345 reverse strand)
ggcatccaacagcgaatcaaccccgaataaaaacggtatgaatcctctcctttctctgttttaaccatctcttttaggagttcaggaagatttatttttgttaaaaaaaaaatttgattacggttaccctttattccagcctccctctcttttctctttattaaaaaaataaaaataaaattgttgtttgcattgatgaatgatgccctatcgatttattttagagctgaaggggataatttgttggcagtaattaaggcttttagatctgcaaatcactttgaccactttaggaaattgtaatgttgatttatcttgaagtatttatctttactttagatccaagaatttttcagacttaataatttgacatgttcctgttaattatgggtcagagaacgtgccctttttttccgccgctcctcggaatactcaaactcagtttttttttttttaatgcatgtgtctaatttaattataagtctgtttaaatgttcaaaattctgttgagattatttctgtttcggttagaaagaaactcggtccagatttctcttctgcctcattataaacaagccactgcttgcttttacatgtctgtctttagagtcaacattagtagctatacaagttagagaaacaggagaaagagatctgatgtttagttttttgtatcgtgatgttgcaggtccgtctgag

SEQ ID NO: 53925 - DNA, 582 bp, Populus trichocarpa
  Intron number 2 from transcript POPTR_0006s02040.3 (locus POPTR_0006s02040) derived from phytozome v7.0 (chr-ID scaf fold_6; pos 1281407 to 1281988 reverse strand)
cccatgttgtgaaaaatgccgccgaggcccatgttgtcatcactattgcatgccaacagtacctccatattgtcctgtaccttgtagaagggcggtgtgtgatatatgggaagctttactaccaatatgggtctttgttttttatgctgtcttatctttgtgcagtccctttggatgttttcttccaaagtgctatatattatctgtttcaaaaaacccctctccatctattctctagtcattttttgccggatgaaatgcccagaaacaacatcattcgaccgtactttgtcaatgatagttttcttataatatttgtttttgtttgggataatattgttttttaaaaaattatttttaatattaatatattaaaattatatgaaaatatataaaaaaaaactaattttttaaataaaaaataaaatattttaatctatgtatcaaaaacaaaatgtactaaaaattactatttaaaatgcatagcatgcgacttgtgttttaaaataaaaaacatcaaaatatatttttggttttaaaaacacaggttgcactatagcggtgcccgtgttcccgatcaaa

SEQ ID NO: 53926 - DNA, 976 bp, Populus trichocarpa
  Intron number 1 from transcript POPTR_0003s15170.1 (locus POPTR_0003s15170) derived from phytozome v7.0 (chr-ID scaf fold_3; pos 15041094 to 15042069 reverse strand)
ctaatagtaagtatattgaagattaatattgttgctaattttcttcatttttttttccggttggtatatgttgtttcttgttcagtccagatctgagatatttcaagctcaacttcagcctgcaatttcaaactacgtctggtttattgagattattcccaactttatgccctagttcttacctgtctcttcgtagcaaagtgatatttttattgcaaagaggatcgaagggtttgtcataattagattcttctttttctttctctctctttttttttccgggaaaaggtcctaaatttttatcacaattgaagagtttgatgtgaagataaaacttggcgattggtcaaatatggaaatacgattaacgtagtaaaacatcattcaattcttctttctctttccatagaaatacaagctaattagtagttggctgacaaaaaaaggatgttgggtctgtacaattacaacatggattaagctgatcactattgtaagattgaagaattaacttggcctccttctttatgggcaaatagaggttgaatcccttgaagggatttgaacccccaggcttctccttgatgggaggttggtataattagtccacctgaaagcctattggttgagaggtggataattgcattattatgcttaatgtcttacgctatttatttgtttatttatttttattaatattctagttaattttcaagggattcaatcccgtcactcttttatgcgttgagattagttttgtttccctttggcttttttatggtagctattgaagtccatggcattcaagttcctcatatattgtcttgatgctctgttcgttcaagttcctctcatgcatctatctattattattgttactgttattattatttgtgtgtctttgttcttcttttctgtttcttactcaaatcgttttccagatcagaaagtgaaaaagagaaaaaacagagagtgt

SEQ ID NO: 53927 - DNA, 481 bp, Populus trichocarpa
  Intron number 1 from transcript POPTR_0018s13300.1 (locus POPTR_0018s13300) derived from phytozome v7.0 (chr-ID scaf fold_18; pos 13678683 to 13679163 reverse strand)
aggagagcttcagaaggcataccactcttaatccggtacccttttgagcagctcttcttgtccttttcttttcttttctcttccttgggcagttacttctggctatcctgctaaaagcaacacaaattttccatctcttgatcttgataagatatcagaaaattaaaatgatatatgtttctttttttttaatatatcattaattattgtaagtacttatgattaataaatatattatagtttggaaactttaatttttaaaataattacaaagttcttcatgcatgaactttttataaatccttgatcctgctatcaaaaacttcaaattaggatgcctgtaatacttgctttgtttattatttgtctttttgtttaattacctcttgttatttaatttattaattatccagtggcttgatgagatattcacaacgtgcatgcaggctcaaaagcattcacttgccgagcaattgaatct

SEQ ID NO: 53928 - DNA, 446 bp, Populus trichocarpa
  Intron number 1 from transcript POPTR_0006s10920.1 (locus POPTR_0006s10920) derived from phytozome v7.0 (chr-ID scaf fold_6; pos 8287853 to 8288298)
caatcgtggcatttgctgcctctcacgaggattctgtaagaactcccatttctgttcttttgattgtctctactgttttcattttgaaatttgatttctttttgagtgaatttcatgtgtttttcaactgggtctctctgttttttgaatgttgattttgagttggatgttagtgttttttgctgaacgtgaaaaggctgtattatttgattaacattgaaatttgtatggtttgacttggttttgaattttaatcaattccatcttgtccgtgccaaattttaaagctttttgtatctttttgcattttaagagagatttttaaaatgagttctcttcaatattgaattggagtgagatatgaatgggttctctctttattttttttttcttgtgggcaatatctataagcattcaaagattgaagtggaaaaggaaagcgaaga

SEQ ID NO: 53929 - DNA, 800 bp, Populus trichocarpa
  Intron number 1 from transcript POPTR_0018s00390.1 (locus POPTR_0018s00390) derived from phytozome v7.0 (chr-ID scaf fold_18; pos 286478 to 287277 reverse strand)
ctgcagcttcaggcggccatacaggtaagtactatacacttcaagcattattaatttgtaacttaaatccaagaaacaagctactgtacaatacatgtgctttatttaggcaatgccttgaaaaaaagggcagcaaattccttttcagtggccacgaaaagacgagaggataaatcagtgggcacgaaaagacggggataaagctttttgacaattctaaaatggttttggtcccgccgggaagggtttatctttggatcattcatgcacatacaactggtgggtcattaataaacatttttggttgaccaaataaacgaagccggcatgacagcttgatttcacactgtaattccattgtttgtagaagatgtttgaatatggtggtattttaaattgttttttatttaaaaatatattaaaataatatttaaaatataaaaaaataattctaaataatatatttttaaaattttaaaaaacataatttcaatcgctaccaaacaatattgggcaaggatagcagcatacctctcttaatcatgggccaacttaataattttagtggaattgcatgttactttctgaagttctaagacctggtcttcaaccagtgaacatatcacagctatgagatactgtactgatggctaaaaagtttttagcaattgatttatccttcttttttttaagcaataataaattaattaataagtagaattagaattagttttcgagtaagattctgaattctcctgtatacagacattgtaaaggaaatcctgaaggcacgcccggac

SEQ ID NO: 53930 - DNA, 335 bp, Populus trichocarpa
  Intron number 2 from transcript POPTR_0006s03380.1 (locus POPTR_0006s03380) derived from phytozome v7.0 (chr-ID scaf fold_6; pos 2146905 to 2147239 reverse strand)
agaacttgactgctgctgctaagttggctgaagaggttatctaactttgtcattttttccgatgtggttttatttgttatttatgcgtgacacgcacacatgcatgtgcacaattgaggaatactcatttaacattgaacacggccttcttcttgcaattgaaatctataccctttatttacttagctcaatcaaaggccatctgccctttccctttcagctgatcttttcttaaaagagtatgttcttttgatgtggatagatgacaaaattactcatacttgtttctccgactttcaggcaaagcttagagaggtggcttctttggaaggaca

SEQ ID NO: 53931 - DNA, 937 bp, Populus trichocarpa
  Intron number 1 from transcript POPTR_0006s03380.1 (locus POPTR_0006s03380) derived from phytozome v7.0 (chr-ID scaf fold_6; pos 2147490 to 2148426 reverse strand)
ctgttgttaagctattttttcgtgctgatatctctgtaagttctctatttttctgtcttttatatatatatatatattaaggtttggagctcaagttttgctttttagcagtaaagttttgatcttggctgtgattctgagagctgcttgagaatctggaatgtgattatgttgtgtgtttaacttcccagaagaaagtttatggcttggttggtgaagaatttgttctgtagagatatttggtaatgagggttggagttgttgaaatgtagttgaagacatatacttggtaactgcaactataagtaaagaacatacttttatggactaatttgtctcctgctttaattaaaagcttcatttggatgacatttgtctctccccctttttttccatggctgcatttttgagctggatcatgctctttttcaccattagagtagcccgggaaattttgtgttggaaattggagaccagtgttgctgcagatcgatgaacattctgttctttaaatgaagctcataatttggtttgaagtaggaagttattttaactttgatgctctgcgagacttgttacttgctgccactagcaagttgagtttccatttaatttgtaaacttagccatcaatttcttgcatatctttactcaatgtaatatacggcccttcattgacttcaaatcctttctgcctttgtgcatttgaatagtaatttccttggtttgattgtgttcttttcaatacaactaaatatcaacgatcaatactctaggttttttaatctgcacaaattctggagctttgtgctgtgaagttttgtgaggggtgaagtttcaatgtgtctttagattttccttttctcctatttaaggtttaaagtttgatgtttttttttgggactggcttatggagagcaggaacctaatctgagtaa

SEQ ID NO: 53932 - DNA, 999 bp, Populus trichocarpa
  Intron number 1 from transcript POPTR_0018s11760.1 (locus POPTR_0018s11760) derived from phytozome v7.0 (chr-ID scaf fold_18; pos 12405038 to 12406036)
ccttcaatagaagcttttattacattcaatttcaggcaagttaacctctcatttcttattctctccacaggtttcaacacacagtttctacacatagattttcagtttgttttgttaaaggcttaaagcccttgttttattgtgtgtgtgtgtgtgtatacatgagttgatactacttgatctatggtatctctgtattccgttttttatctacttaattgagtgacatgatgacatttagggttttatttttaatggcatgttcacaaaatttagggattttctgttgcaatttaggatctaggtacagtgatgtttggtccatgacatctcctacccgttccttttttatcaatgagaccttttcattaataaaaaaaaaggattgctgtaaaatccaatttatattcattgggatattgcaaaatctaacagcacagtattttaccttagtcccattcatcttgatctcataagtgttaaagactttcttgattgcattaatttcagccaaataaaatttggggaatttaggcattttgtcagtgtagataaactgtcatggttgatcaatggaactgtttttttaagctggaagtattggagttggttctggaactctttttttttcaggttggatgccctagagttggtattgtgaatgatcaccgtgtttttgtattatgattgattatttggttttattttcatgattaagttgagtgatttctacatgtaatttggaatttttagaaaagaaggaaacttgtgctggtgaggaaaaaatggtgatttgaattagtgaacaatagattcactgcaggctgtttttttttcaagttggtactgaactggataatgctttttttttttccagtttccacattttcattaatttatttttatcaatgttccttaattttattatatctacttagagtttggttttggctaataataatattattaattaaatttgttatttatatacttaaacag

SEQ ID NO: 53933 - DNA, 663 bp, Populus trichocarpa
  Intron number 3 from transcript POPTR_0018s11760.1 (locus POPTR_0018s11760) derived from phytozome v7.0 (chr-ID scaf fold_18; pos 12406452 to 12407114)
aactacttcttttgcgtctctaaagcacaactcaggtaaagtttttgtttgtttgtcggacctggaattctcaggcccagtaatcagaactattgtttttctttgggaatagtagcaagttttcaatattatatatcaacaacttgtggagctgttttcagcttttctagtaagggttgatttaattttttgttatcctaattgcttgaaaaattaaatgtaaatcgtgaacttgcactaatatttcactggagaattgttcttgtatgcaatcagaattatgaataggaatagagcatgtttatttttgctcacacagacacaaaatcacagtatatatagaaggaagtctctgcatagatgtggcttcaaattttattttagtttctttccttgtactgaaatccggatagcttatgtttttttggtataaaatttctgataaagatgaaaccatatacacatgtttgctagcattttcttgtctctcattttcttctccaagctcaaatgataaggtaaaaaaagttggcataaatgtctgtttttgctttgagtttcaatttcattttacaaccattttattgtgcttagcctattattataaagaggcaaaatgacttttaacctatttcatgcagaggcgtcaatcagcaaggaaat

SEQ ID NO: 53934 - DNA, 774 bp, Populus trichocarpa
  Intron number 1 from transcript POPTR_0006s04610.1 (locus POPTR_0006s04610) derived from phytozome v7.0 (chr-ID scaf fold_6; pos 3160562 to 3161335 reverse strand)
agcttctggacgtgaattgatcggctttaaacctggtatggtctctctctctttctataatatgcactagctaggcgccacaaattattttacactctgtatatgaagctgttgctgaaatattgaagcacaaatatatggccgaaactatataatatacccttatattaattagtttcaagggcatattatccttgctctgtgtttgtatatacagctgttgcccttgttctacgtacgtacgttgctctgttacatggccggtttctttgttttgccatgaataggtactttagactgtaaatactaatatcaattaagaatcacaaaaacaattaagaatcacaaaaacaagcagcgtgattttttccttgaaatttctatctcttgttgtcaccgtcgctgtcgaatatgctactgtatatttcgaaagctttcgctacataattcaactggattatcacaatcattaatcactccctcaacaagacgcaaaactggccaaaaacattgaagaagaaatcaagcatcatgagtgcctactccaaagtctacaccaaccttaacttgagctttttggttcttgtttcactcattctctcattccaatattctctttccatcacaatatgcgttgcttttgaacttgaagttggtgcggtcaagttcttcatccatcaaatattagatgcaactctatataattatcattattaatgatattttctaaatattgcagtcacaaacgatacaattccattcagttatattgaa

SEQ ID NO: 53935 - DNA, 765 bp, Populus trichocarpa
  Intron number 1 from transcript POPTR_0003s20350.3 (locus POPTR_0003s20350) derived from phytozome v7.0 (chr-ID scaf fold_3; pos 18869978 to 18870742 reverse strand)
ctaagaacagagaaaaacagagaggacaaaggaaagtgagtatctttatctctagtctgcctccccctcttcttctaaaagccatcacctatcaatgtctgtcggttctttcttctttcctttcttttttactgctagtaagaatcagattctctatctctttctttattgctgataatatatatatagagagaggtatatattcttgtcttcatcacctgatccatttgtttcacattcctctcccacattttcttggattcttcaattcttgagtaatcaggtatcacataaattcttgattttcttgttttatttttacaatgtaggttctttcttttttagagatcaagaaatcactttaaaaaaacagttgttttagagatcaaaaccctgtagtagtgaagataggcgagaaagttcttgatttggcaagaaatgtgaaaaagtttgttccttttgagttgatagaggtaattagagatcactagcatctgatttagatgcttaatggaaatgggttcttggctttttttgtaaaaaggacaagttatggctgaagtgagctattttgttctgtttctctcatcttttgatgtttctctcggttaatcttggctttatttgaagccattttcaacaagttgggatcttttttctttaagatgttttgaatatgcaagcatttcttatttcattgcttgatttatcttgtgctatcaaattttatgctaatttgctgacttattctgtaggagttgtgag

SEQ ID NO: 53936 - DNA, 592 bp, Populus trichocarpa
  Intron number 1 from transcript POPTR_0019s13430.1 (locus POPTR_0019s13430) derived from phytozome v7.0 (chr-ID scaf fold_19; pos 14354633 to 14355224 reverse strand)
attattggcatgtaagtgatgtttttgttaccttaaattccgttcttttttcttgtggttagtaaatgaatccagttctgtttatgctgaccatgaacatgggtgaaagttgtgctctttgtagtttgcttctgtttatgattaacaggtgggatttttgtttttaatttttggtttgtaatgttaatttgttatgtattgtgcaaaatttggattggttcattcttggtttgcacaagaacttttcttttttcattgatcttacatgtgtgaaactaattgctcaatttttgtaatttggctcttagaaatctgatattaatctttgaggtttgataccctttgattgtcagaatcatgttttgtgaggttaagcatcacctgaattggttcacaaattgtgggatcagcattatttgatgttttccgtaatttaaagaatagaagttttatccagtgatgaagaagctgaaaagaaagcttaatatcaatttccttgctacattttatcagtaatgaacagaattattgttctagttattgcatttctatccttcaggaaacttttcgtaatttttaatagcgttcaggg

SEQ ID NO: 53937 - DNA, 1025 bp, Populus trichocarpa
  Intron number 2 from transcript POPTR_0003s07500.1 (locus POPTR_0003s07500) derived from phytozome v7.0 (chr-ID scaf fold_3; pos 9060377 to 9061401 reverse strand)
attcagctcgttttaatttcttttggagggtaaggcaaaaattaaaaatctttaagatgatttttaatatttcaatgtcaataactgcaatacttacgagtaatgaatgtcaaagttagagagctagctatatgcatatatatattgcctgcaaaattcagttttgtaattagtactttgttttgtcagtattgttctcttcaaggaaatcaaagctggtaggtcttgtaattaataattagcaaactgttgttttctttgaacaaaaccaagtactaagatgacgaaggtgcaaataaatcctcaagagaactccaaagttaccattagttattattctcttgtacaggaaaatcacaatacagcagcaccagtttaggttctgtttggagtgtaattttctcgaagggctctctgatggctctccaatatgaattgaggagaaatgtgtccatttgtaaaacaagtcatatagtgattcattatgtgtggcataattaggtttaggcaagtccttatttttattttaatcgacatatagtcgataggcacgtctacacgctgcaggcctgtggtgctacagcatatgcaaaggacatgttggatgcccctgtcaccagcagatttgttgacatgcatgaagatcaacatatccactcatgcgtcactcattaccaactagtacattaaacatcattttggggtctagcgttctctaccacttcggatgatgttagagatattgatctttcgagagctatgggtgcctgaatcctatcatgttttttctttttagtttctgtaagtttcatgttgaacattctattgtcattttgtccatggatgtatctattaacgtttgtagaggtttttactttttttgagcgaggagagagcagaccgagaaacaaactaaggagaaaagcctagacactgattcattgagcatggcactcaaatggttttctttctttcctatttcattttcagggttactctgtttcagtccttattccttaagggga

SEQ ID NO: 53938 - DNA, 370 bp, Populus trichocarpa
  Intron number 1 from transcript POPTR_0003s10670.1 (locus POPTR_0003s10670) derived from phytozome v7.0 (chr-ID scaf fold_3; pos 11578408 to 11578777)
gattgtgataagcagcagctagcatgtgttttctgttcactcatctatcctctcaaaagctaattcttcaaaaagaggaaaagattgttcttgtatggttggataccccaaacaaccaggctgtatatggtcttgttcacaagttaggtatgtggctggttcagatattatgtgcctctttgagttataacaacaattttttttaatcaaattgagtgtttaaataaaccaaaatagtatatttgaatcttttgctgcctcaatttagagagtttgattaatatagcatgtttataatttggagcttgttgtaaatgttaatttttcatttccagggagcttagttgtgagattggtgaatcttccattc

SEQ ID NO: 53939 - DNA, 725 bp, Populus trichocarpa
  Intron number 2 from transcript POPTR_0003s10670.1 (locus POPTR_0003s10670) derived from phytozome v7.0 (chr-ID scaf fold_3; pos 11578794 to 11579518)
ctacattttccaggtctgcatcaggtttatttctctcctcatttgttctcttaacattgttctgatttcaacagatttgcttatgttgttttgatggttctggtctcttcatgtgttcttttgcattttcttgctttgtggtttcatcattttcgacaaatttgcttatgctgtcttgatggtactggtctcttcatgttttattttgcattttattgctttgtggtttcatcatttttgttatgtatttgaatctagcctatgcttttagctagcaccgtatcgtttttagttaagaaacatagttacaaactttgttgagggcagcaagacaggacctggaaaaagaaattttcccatcttctgtattattgtgccattacacttgcctgctaatgccactactactactagcttatcttgtgtgaccaggcattttccctggaatagtgtgtgattaactcctttgctcgccagaatggttaagaatttgtagattctttccctttcttttcttttgggctgaaagatttacatttggaatacatgcagtaaatgcatttcaacatcaatttgaagtcacaatatttctgtttaccttcataagtagctgaatgcttctcctctcatgactggacaagatccaactaaagtaggaaattgatgacatattctttattaaattgaaagtctctggtcactggtttcttgactattctgaggat

SEQ ID NO: 53940 - DNA, 775 bp, Populus trichocarpa
  Intron number 4 from transcript POPTR_0013s03660.2 (locus POPTR_0013s03660) derived from phytozome v7.0 (chr-ID scaf fold_13; pos 2326634 to 2327408 reverse strand)
ttatcgtagagtacaaagattcctgggtagaaaaggtatgctgttcctgttgttattacttatttatgagtaaatgtctttgcctcttcttcattttgtcctgatctctaatggttttacatggttaaatgttcattttttgatttagagaatcttggtgtttaatgttccatattttctgaaaggttttaaaatcctcttcctaactcaactcctatagattgctgcttttgcaatcagatatcgtagaccgatgtcctattagtctttactaaatcgttcagggacgtgccttaaacttgttgcatgctaactattttttcccatcatctagtagctatccttaacgttaatgttaaacacatgaaatttaacttcatggttgcgttatatcattaatgaatgccattgacagacattacctgaaacttggcattatttcttactccttttttagtcaactctccatataaatttacattttatatttctgaactccaataggctttatttaatctagcaaaagcttcattttttcaacaacgtgcaaaaggtgtactacttttgcgtaatattgtttttttctacttagtattcaaagctttttccttgttatttgggataaggtgatgtttagttgagttgagatagggtttctgaatcattctgttaggttgggaaaaaatattttagttatctagggattgagatttttttattttttttataaataggctaatattggttctttttatgctttggagtcagggttgct

SEQ ID NO: 53941 - DNA, 919 bp, Populus trichocarpa
  Intron number 1 from transcript POPTR_0013s03660.2 (locus POPTR_0013s03660) derived from phytozome v7.0 (chr-ID scaf fold_13; pos 2328203 to 2329121 reverse strand)
tctcttttgatctactacctgtttacatcactcaggtacctcccttccctttcttttcttatctttttctttgtggaatctgtagatttgattcactttctttttgtcaatgtaaaaactgcttctgtttttagtctactttgcatttcctggagctgcatttgtcttcccaaggtcccttgggatcttagttgtttaacttgataagttttgaagttcttgatttgtaatgtagggagataagttgatgaatttgtggtctttgtatgtggtactttaggtagatattttttttgtacagtctcccccccccccctccctctccctgtctgcttttttttttttttggtaatgagagtgtttggttactcagaaaatgaggtaaaaggaaatatggtctttaggatgcttaactatgcaacaattaggggctggtaagaaattgatagtttcatgaatagttgagctttatacaatgaaaatagtttacttgatctgttcatagaaaaaataagcattttgccactaaaaacaaaacccacaaatattcatttcatttcccttgatttcctcttctttttttggctaataaacatacaattaaattttttcccccatttgtgagattattggatgattttattattcatgtttacctaaaatgctctcataattcttgtatttcttagctttcaagggccttcccagttattttattttattttatttttggtcaatttcgcgcagttcctttctttgttagtaaagaagtttttggtagcttatagtatatgcatttatggagtaactttacagacagtgtagctttttcttgttattaccttattgcattctctttatggcgttgaagatttctttttgtctacatccagagaagcaagtcatttcaatctctcag

SEQ ID NO: 53942 - DNA, 780 bp, Populus trichocarpa
  Intron number 2 from transcript POPTR_0006s08730.1 (locus POPTR_0006s08730) derived from phytozome v7.0 (chr-ID scaf fold_6; pos 6418092 to 6418871 reverse strand)
gggcaaaaatctatcaagaacagcccacatcctaggtaactaaccatctccttaattacctttttttcccgtatagtttatattttttttacgtcaaccattttccttgtagttgatacgcttatttttaagcccttgtattataacagataaaataaatttgttaatgattagtttaatttgtcagaatcaagaatatttagctgcaatagtttctcgtgattctttaaataattttaatatactgatattaaaaataaaaaaaaaatattttaatatattttaattaaaaaacacttttaaaaatcactttatatactttaatttacttttacctttttcccttggaattgcataaataagattggtaaaggatgtcagttttctaaattatgaatcaaaatacaattaatttttaaattaaatgttcattgacactagtttgtgaacaaatttgaggatttaattggttgcttctatcaattaagattttcatcaatttctctagcctcttttttattcaccatatatatatcaatttcttcaattaagcgttaagaatactagaaacgcatatggctttggaggatggaggattgttctttgtttcttttagagaaaacattgtcatgctaaaaacgttacagttaactatggtgctgtccataatgtgacatgccatatctttggtatgtttgtctaacaaaaaaaacttttcaacataaatttgttgtgactggaacagaagctattataggtgcacgaacgcacggtgcagtg

SEQ ID NO: 53943 - DNA, 1014 bp, Populus trichocarpa
  Intron number 1 from transcript POPTR_0019s06030.1 (locus POPTR_0019s06030) derived from phytozome v7.0 (chr-ID scaf fold_19; pos 6491400 to 6492413 reverse strand)
aactttgctttgatcaatttagacacacacagaaggtttgtttatgtctgttgtttttattcctctgcatttatttttctggaactcatttttcttttttgtacttgattttgaacagtaaaggcgatgcattatgttttgagtgaattggtgtttgacatctttgtaaaaataaacagcttttattgcatttccactgagttgggatcttgattaaacaaattctagtttcaattccaactagttgttccaatgacgcattctctgcaattattagattcaaagagtacaatgtttgttcatgtatttagcctctctctctctctctctctctatctatctatgccgtgattattattttttcaaaatttgaggcgattttgtgcatccatatgtgtgtataacgaaactgttttatctttgaattttcacccaaaaaaaagaagaattttcttttcttttataccagctagaggaatcagaatcctaataataaaaatcctggcagttgaattaaattattcgatcgagagacctttcagaggacagaatatccgaggtacattggactgttatattttcagtttttttctcccactacaacattacttctctgaatcattgtgagccttgtgcattttatgttagattgacacccacaaaataatagtttaagttagcaaaatccaattcagaaaaaagagaatgaaggaaagaaagatgcagtttgatagaaattctgaaatctaaatggattctagacaatccaaagaaagtaccaaatttaacacattcattaaatccttgggtttatcttcttccaatatgaatgaaatactccagtctttgaaaatatgatagaatatttactttcactgtgtgttttctttccttcttttgaagttccattcagtaggtgacaagaacaaaagcccacaaattttgattgcatggtagtaaatatgatatccatgactcatttatcacatcatatctgcagatacatagtcaaag

SEQ ID NO: 53944 - DNA, 552 bp, Populus trichocarpa
  Intron number 1 from transcript POPTR_0013s10210.1 (locus POPTR_0013s10210) derived from phytozome v7.0 (chr-ID scaf fold_13; pos 10225715 to 10226266)
aaattggtaaacctctcactgccctcttctttggctttccttgcttttatgttaagctttcatgtagtatttgagttcaggatgccatgcagacataaaatatatttttcttcatggccattgtttcctttctttcatcttctttgatagtcagacgaaaaattgtttataggagacagacctctatattttttgtacttaaattaaaccacttggaatatggagacagtagtttgatgtttagcacattcttttccatattattagggtcggtttttacacctttcatttacttttttctttggtttcttgaaaggaaaagtcatttttttctttctccaaatgataattacaaatattgcaatgcagcatgctctatgaagttggctaagcacacacatttgtgattgttaatacaaggcatttgaacaacagtatgatgacaccataatgcagtcctgttttgatctcctgtttatgattaccaaattttgcttttgtccattttcttccgcagctgaacaactaggacttcctctgattcctgcttac

SEQ ID NO: 53945 - DNA, 565 bp, Populus trichocarpa
  Intron number 3 from transcript POPTR_0014s12330.2 (locus POPTR_0014s12330) derived from phytozome v7.0 (chr-ID scaf fold_14; pos 9109635 to 9110199 reverse strand)
tctgggcatacatttggctttatataattttagaggtaatttccgcattcccctctcatgtgaactgcaacagtgaacaattttggagtatattatggatttgctatatatgttttgattcattgattaagatcttcatttttgcttttagccactggatcttttaactttcctggacatgttcatattgttgctcttatgttatattgtcaatgttctcaactccactacatatgtacatatgcattttgcattagtttattttaatatagactggtcatgctatgatatgttatagctggatagttgtcattaactaaacctccctgttccccactagcggttcttgaaattatatctggattgcatcaaatggataaaataatgtcactacaggtggggttcatgatctgattatctcatgtttttttcttttctttccttttttttaatagaagcagaaaacttaactgcatttgaaaagatgtatttgtgattgaagtttacatatatcaagcactttcttggcaataaaaaggtcttgactcttgcttgtgttgcaggt

SEQ ID NO: 53946 - DNA, 926 bp, Populus trichocarpa
  Intron number 2 from transcript POPTR_0014s12330.2 (locus POPTR_0014s12330) derived from phytozome v7.0 (chr-ID scaf fold_14; pos 9110339 to 9111264 reverse strand)
agaaggtgtggaattatgcaattgcagacatttctttgcttgccttcgggaccagctttcctcagatttcactagctactattgatgccatacaaaatattggcaacctgtatgctggaggtttgtaaattgtaacttttgtaaatcatttcaaatttctttctatacagacatttcaattgaatttggatgcataagtatgaggtttgtgatatcatatatattgaacctgtgcgcttgttgtttaatcctaagctgttgtctttactatttcggccatccatgattccctcactcactagcagttgaaacaagtggagtcaattttatttatttatttataggctgtttgcctctttgtttttgccaggcgttggcaatttatgccctgctctcatcttgccaagccaaataatattaggaaaatgacatcactgtttccttatatctttcatattctgggtggggttggccatcagtgagctcagcttggagttacctgattgattttctatggttaatgaaagttcttgcatatctataatcagtgaaaatgttattgtgagagaaaaaagttataaggttttgaaatttacagattgaatatgctgtttttttttatgttcctgtattgattatgttgttaatttgtaatgatgcaaataaaattctatcaagtttgatttgatgaagttaacaatctttttcaccgcctctctcatccttgtataaactttttttaatgtatgtattattgcctgttgacatgttagtagtggtcgataataatcagattggtgatgtttgtcttacattttgaatcatttggcttcctattattgacagtttgcaaaatttgtgtgaaaagttagtggtgtctcaagttgacatttttgacagtttgcaaaattacttaatgtataggg

SEQ ID NO: 53947 - DNA, 384 bp, Populus trichocarpa
  Intron number 1 from transcript POPTR_0014s12330.2 (locus POPTR_0014s12330) derived from phytozome v7.0 (chr-ID scaf fold_14; pos 9111579 to 9111962 reverse strand)
cggtcgtcagcgattgtccggtgaacctgttcttggttagttttctttatcaatccagttcctacgtatcatatcaaaatgcgcgtctctagtacatgatcatagacagttttccatctcgagattgcatttacttaatctgatttggttttagtctgttagatttaatttttcgatacatgatcgtttttcttcttcttagtattattatttaattttagaaattaacaagcaagagcatctttgttcaatctaacagtggcatttaatgagagcaaaaacaaattaaattttggtcttgaattattggatttctctgcggcttagactcacttattagttgttaattcttcaggttttgttagtgttctgcaataattgctg

SEQ ID NO: 53948 - DNA, 735 bp, Populus trichocarpa
  Intron number 1 from transcript POPTR_0013s01280.1 (locus POPTR_0013s01280) derived from phytozome v7.0 (chr-ID scaf fold_13; pos 715498 to 716232)
tgatttggtggcttcaagaaaagctgaagaagcttgtatgatatatatatcaatcttttccttgatcatttatttctttgctgaacattttgattgaatttgataaagcctttttgtttgtgttctttgatggttggatgcttgagaaacttacggtctgtgttttgaattcattttcctggaatcttgctgatctatgaggactttatgtttaggctgttgaattttatggattaggtggttgattcgtagaagttggattgatgcacatcacggaattgaaatttgtagaatttaaggatttgtcatggattatgtgatgctatattgatattgatagtgtttcttggctagattcgtgaattttggctgcctgagaaatttttgtagtaatattgagaaaactcttcctttgagccctggtgataatttgagcttatgtgtttcatctcttattgatggtcattgaagcagtatctacatgaaacttttttcaagttagagatttcttgtaattacttctttcatggtgcttgttccttgtatttttactcactgaggacttcccatcatgtgtggttagatggaattgttgtagcgaaattggaatcagaataggaggcctttaaatatacaaatttggttcgatacatatttttctgtaaaagaagaaaaggaaaaaaagagaagttggtgattttacatttttgtattggtttgcagccttgagaaggt

SEQ ID NO: 53949 - DNA, 639 bp, Populus trichocarpa
  Intron number 4 from transcript POPTR_0003s18100.1 (locus POPTR_0003s18100) derived from phytozome v7.0 (chr-ID scaf fold_3; pos 17306963 to 17307601 reverse strand)
gagactctgtaagtaatttgttgtctttttaaatttcctatgtaagatctgtgttttcttttttcttctttcagaacttaaaattgttaaatgggttatatatatccacacatgttttcttatgctgcttagaaacttcatctattttaaatttttgaaattgtgtttcctgctagtccttcccctaacttttttctgtagctacttattttttcaatttgtgcagttgttaaaatatggccagagtttgttttaattagttctctgtcttgtataatacaaaacctgaacccaaattatatacaatatttttgcaagcctgatcaacatatgaacctaccctccttgattgctttattggatatcttggctatgataagctcatagtttgttagatcaggatggtacattatatattggattactctgtttgtctttggtctttaagaatcaaatctcttttggaaaaggatgatatcactgtttcctttctcatgagtaattcagtgtcaattacatgattgagtcgaggcttgtgtatataataagatgcttctctatggtgctgattgttagttttttttctccattgaaagtaaaaagtagtgattatttgtacctcatggtttgtcaagggaa

SEQ ID NO: 53950 - DNA, 782 bp, Populus trichocarpa
  Intron number 2 from transcript POPTR_0003s19750.1 (locus POPTR_0003s19750) derived from phytozome v7.0 (chr-ID scaf fold_3; pos 18409358 to 18410139 reverse strand)
ttgattatacaagcacggttgttaggtatattcaggtaatgcttgaaatatgtgatagctggtcatttttgtgatatgtatctcaattggaagcgatgtaggtcttggaattttattttttttggttgtggatgtgtttctggccggatttggtgttcttgtaatggtaattgaataattgatgaggcatctatttgtccgtgttaattccaatatctgaatctgtagttggcaggactagtggttttctttgggttatggtgggattagttgatcttgaccaagagaagaggtggtggtttttgtacagtttgggttatggtgggattagttgatcttgaccaagagaagaggtggtggtttttgtacagtggaaaaacagagaagtatagggttttgtaattgcttggagatgtggtggttttttacaggggaaaaaaagagaagtagaggattttgtatgtctctactaatattttgggtttcgtgaagagagtggagtggaacaaagagtatttgggagaaagattctactctcaactctttgaaggactcgtgggttcaaactttacgcttatagtattccaacaaagaagaattaaacaattgaactttagagatcacgtattctcgtatgcggtttatatgatgtaccatcaatgatttgcttgctagtttcttttgcttttgcaagtggttggtgcccccttggtgcctgtatcaatagatcttttgttatttgagtcacttgtaatcttgtttcagtgttgctgcagactcgt

SEQ ID NO: 53951 - DNA, 543 bp, Populus trichocarpa
  Intron number 1 from transcript POPTR_0003s16030.1 (locus POPTR_0003s16030) derived from phytozome v7.0 (chr-ID scaf fold_3; pos 15656278 to 15656820 reverse strand)
aagaacacccaaccgtcccccaggacctccttggtgtaagtatttttacttcaatatctatgttctcttcatgatctttcctttttcatctgggtttatttggcggtgatcatcctagctttcatgtctttgcttggtttcgccttctgatctttctttttatatgccgatgatcaactttttgatttttggtttcttatgaaaacatgacacagttcctagtttcatatgctttattataccttgcttaatgcatcttccagggatctgtctcttatttaagccaagaagtactatcatgtacaaagtgatgctggaactgatgcttaaataatacattgtcgatatgttctaatattgcgatatggaatttcttggtcttcgatctgatgcttaaataagaaaggattgggttatattgtatgcatggcttttgctggttattcaatctctttccttttctgttttgatgattatggaccctgctcagtttccatttaacgagatcttatcacagtgtcaggtgttctcaatccagtggaa

SEQ ID NO: 53952 - DNA, 551 bp, Populus trichocarpa
  Intron number 1 from transcript POPTR_0013s11030.1 (locus POPTR_0013s11030) derived from phytozome v7.0 (chr-ID scaf fold_13; pos 11699914 to 11700464)
ttgagctccctcttcttccttttaacacgaacgaggtacttactacttacttccactaccctttgtctgtctatttttctcgttgttaattccggtgggcatgtgatgagctacttctcttgttctttacttaagcacatggttttgtacaacatggagcctctagttaattagttagataacaagacctgaacttatcgtttggatttttatttgatttttttctttttctcttgtgagatatatttttacgcttgcctttaaagggcttgtctaatcctgtacaattacttgatatatatgtgcaaaatatatattgacatgggcatgaaaaaatgaagagtatagaaaaaccataaaagagatgtgaaattgccagacctggcattgaaagagtgatactttcaattttggtttctctaattgatagaatgatagaagtgttgatactttcttagcccttaattgatatggtaaggatttattagtaataatcttttcttttcataatgacaggttctagttccatctgagagtaaaacactccatct

SEQ ID NO: 53953 - DNA, 780 bp, Populus trichocarpa
  Intron number 1 from transcript POPTR_0022s00790.2 (locus POPTR_0022s00790) derived from phytozome v7.0 (chr-ID scaf fold_22; pos 388938 to 389717 reverse strand)
gctcaccgagtcctgtctctgcataggcaaaagaggtgtgtatttgccatttttttcccatatcaatgatgggttcttttcaagttttgatttttgttcttttttttcttgccagtgcatttttttgtggaagataatggtgaaactgtgtaaaaatactatccttttgtcctcatgtatgttaagcttaactttagcttgctggatggaaagcaaaaaccctaaagacaacactgattatatattgaaaacccaaacagaagaatttttcagctttttgtttagtgtctactcatttcttcaatattctcgtagtttatggtttacaaatactattactttgccctcatgtagggtaagcttagctttagcttcctggctggaaagcaaaaaccctaaagacaacactgattatagattgaaacctcaaatcagaagaatatttcagctgtttgtttagcttttaccaatttcttgaatgttctcatagctggaggtcggtctatataattggttaggctgtcagaatgtttgaactcttgttggagcaaattgtagtgcattattactgctaggttaggtgtcattacagtaaaagcaaagtttggtaatcgaacttgtgaaatgagaccaattttgcttatgataatttcttttgtaaaatcagtatataggctgatttgaggtgaatttggattttcttgataagtgtggtttgtgggttttgatgcgattttttttttcttttgcaggttttttataactatttggtaatcgaac

SEQ ID NO: 53954 - DNA, 686 bp, Populus trichocarpa
  Intron number 1 from transcript POPTR_0013s02980.1 (locus POPTR_0013s02980) derived from phytozome v7.0 (chr-ID scaf fold_13; pos 1804764 to 1805449 reverse strand)
aaagcaaggtactctctgtttttttatccctccctttgtcttttacattttgtactcttgtggtgatcaaagctggtgtcttttgatgggttttttgtggtttttgtgttttggtggtttgaagttgaaaatcagctggattcggagcgaaatctagatgtttttggtggggttttgagattttgattcggttggtgaaggaaaattggtttgggttttatgtttaagcatcttagattctttaggttatatattgtttgatatttttgggttttatgttcttgtttttgttgaaagaaggaagcttgttgattagtataagggttttgggatgttttgttttgaagttttattggattctgagatcatataacggtagtttgttgataggtttctgttacacgtggaatatctgatttctggtctggaagtactgttttggttatctaaattctaaatgctgaacttggcttattaatcttggatcaatttagttcagggaacatgatttggtttatggataaacctgtttcttgttagtatgtttttcagtctctacttgcttgtttgttggtttttctagtacttagtttgtgaaaaattatcaccatttctggtttatggcttgctattttactattcggaatgaaaaaagtgaagattttgatcctttgttttctgaatag

SEQ ID NO: 53955 - DNA, 446 bp, Populus trichocarpa
  Intron number 1 from transcript POPTR_0003s06830.1 (locus POPTR_0003s06830) derived from phytozome v7.0 (chr-ID scaf fold_3; pos 8369993 to 8370438 reverse strand)
cagagctcaggagtgcttataagaaacttgcactggttagaccttaaccacaaacctcttctcttttaatggatcttctacataactgcaaaacaagctgatcatgatcaatctttttattcttgtgttctgttgttgggttatcaggacaatggaatcaattcctggctgggttcttgccatgcaggaatctgaccattccgtttttcgtttctcatatttaaacaaatgggtcaccaagttttaatctttctggtgtgaaacaaacaaattcaaagttattctagactcttgccttttattttcaaaagggaccgattaattctcttctccaggagatagttggttcaacaatttttacttctttcctggagctggtttttctaggagagtagaaatattttccaggaaaataagaaaaaggtgtgtttttgtttgggacagag

SEQ ID NO: 53956 - DNA, 701 bp, Populus trichocarpa
  Intron number 1 from transcript POPTR_0019s09010.1 (locus POPTR_0019s09010) derived from phytozome v7.0 (chr-ID scaf fold_19; pos 10606595 to 10607295 reverse strand)
tttccgtataagtctctatctccataatatttgtttgtcacttgctaactttgaaaatatattttatgttgttatcagcaagtgatatcaggcacactttctttaacatccaactggatatcaattatttgctcctttattttctttatggctacttcctgtgagcttccctcctgcatgattcccaaccgatttcttcttctaatggataacgcaggtttacacagctccatagctcaaatgaacaagcatgaaatgagattctgagtgaatgatagtgacttagtggcatctgtttcctactttcttaatactgctagttagaacaatagtgctactttctttatgcaatgccttttctttaacaaaaaaaagaaggagaatttaactttttgctttctctttacatcaatcttttttttctcttggattctttatcaccactttgcttttgacatgtgcttcctctggtaagtgagctttgctttcccaaaataaaaatgtcaatcaacaacaccttatttattatttctccttttgttctaaagtaaattcaactttaaagtacagtaatctactgttgtggtgaacgatctcagtaacttcaacatttccacagaaccatgttcagctaacttttatcaatgttctgattcactgaaccaggagagcaccgggagctgctgaagccagaaacaagc

SEQ ID NO: 53957 - DNA, 228 bp, Populus trichocarpa
  Intron number 2 from transcript POPTR_0013s02320.2 (locus POPTR_0013s02320) derived from phytozome v7.0 (chr-ID scaf fold_13; pos 1379016 to 1379243)
ttcatcgcgtaagattttatcacttacttttcctgtaattaatttggtaactaagttttgtaatgggcaaaattaaggattttgaatttgactatcgtgtaaaagtttaagacttttggactgatttttcttgttacttgtcttcttgggttttttttttgttttttttttataatgacttcgagctaaattagtttattgaaattttgtaggcttttccatatttat

SEQ ID NO: 53958 - DNA, 448 bp, Populus trichocarpa
  Intron number 1 from transcript POPTR_0019s04750.1 (locus POPTR_0019s04750) derived from phytozome v7.0 (chr-ID scaf fold_19; pos 4955782 to 4956229)
gagggtatcttcctcaagcttcggttgtggctctggttagtcaaatttttatggtttggatttatggtctctattttgattttgttttttgagtgattttttttttattttcttgtggggttgaatttttaatttcttccctgtttgttatcgtaattgttggtttatttttaattattggattgcttaaattactgtgatttcgcttaaccattgaatgaatcgaaggagctgggtcctcaatattcggtttttagaggaaaagaaagtctggatttttgttctttttttaattaataaaaagaatcatgagattttgtatattgtggaaactcaaagttttgattttttttttcgtgtcattttgatattacaaggatggatagcttaatggttttttccttttgttatcttttgtggaattaatagactggccttaaacttaaat

SEQ ID NO: 53959 - DNA, 577 bp, Populus trichocarpa
  Intron number 1 from transcript POPTR_0019s12610.1 (locus POPTR_0019s12610) derived from phytozome v7.0 (chr-ID scaf fold_19; pos 13630312 to 13630888 reverse strand)
tgtgtgtgagcaatgatacgtgttgaaagaacaaactatttctttaccaagtagggtctttgtctttcttgtttattccacaagctagactgatcagtagggcctcttttttttcagtgtcgactttcaaggtatttttacatgttgctagcaggtgcattgttgaagaaaaacatacgtttcatgttgaatatcaaggtcctttctttttcttcaatgtactgatgattgatgaaggagattaagagagaggagagctagattagtgaaacagaaaaataacagtgcaggtgtagagctgatgatagtagtgtacttgtgagggagaaactattgaaaacatttctgagtttaattgcatgaagtttcagggttagtgagatctgtttcgtccatgggtaaaattcaatcgggcaatatcttcattggcattagagaatacctcctgtaatattttccattttttccaatgaaagaatttgaatctggtgctataattcgcttccatggaagcatgttttgtacttctgcaattttggcagtataacacattttctgctacaagtttcggttacaa

SEQ ID NO: 53960 - DNA, 1021 bp, Populus trichocarpa
  Intron number 3 from transcript POPTR_0014s02970.1 (locus POPTR_0014s02970) derived from phytozome v7.0 (chr-ID scaf fold_14; pos 2436260 to 2437280 reverse strand)
ttgattggaaagcccatagaatccagactgtagaggtacactcaatctgccattctcattgatgtcacacatcctgattatattcgtaacaataataacttttcagcactatttcatcaagcaccagtcaatacttttgataatgagaagggaagcaatatcttttgctctgttatctttttatggattttgcagcatggaaattttttgtgcccgtgtcttaacagaaatctaaattgaaaatggcatattagaaacaagaatttgttgctgaattggtgtgttttgatgcctatggaaattctgattgcaccagtggttaggaaaggaatggatgtatatttgatggttacttattttcgtaagaggttgtcatttgaagaggcttaagaggaatgtaccattgagtctgtgattaaggctttagtgagacatagcaagcctcttcttatcaccatgatgcagcaatatacgagagcatggcatttgggtttagatattcaataatgccggttggcaactaagaaaatcagcagattctcatgtttgatcacttgtgctgcttttggtgatgctttacaaggaaaactcaaaatgttttctttcaaaagaaatagcacatgcatcatcacctaagttaagatttatcttttccttccagaaatgatgttagagttgttactgcaagctgctttttcgctcccttttattttcaaaatagtttgacatttgacattttttggaaatgaaagaaaggaaaatgtttatgcaattcttttctaaaggaaatcttatctgattgtgcactttttccatgtttaaaaattggaagcttctcttcttcgaatgagtgctggactagcaatttgagttcttcctgatttgcttccaatcattgcatctatttgattgctgtgctccaacagcagacatttttttccatctccataattactaacttgttggtgttttctctaactctgtagagacgcaagctcgtagaccaagaattagagacagt

SEQ ID NO: 53961 - DNA, 810 bp, Populus trichocarpa
  Intron number 1 from transcript POPTR_0006s03390.2 (locus POPTR_0006s03390) derived from phytozome v7.0 (chr-ID scaf fold_6; pos 2160489 to 2161298)
tcgaattttatccctctctctctaaacacctcaaggtaaacatctctttctctccagatctcatgtttttctgagtcacattgccgttaattattactcactagatatatcaattgtgtatcatttatgcttaattttattgcgatgtttttttttggcgttttttttcgatttttctggttaaattgttgatcttctacgctcttaatcgattagatatctaaatcttcaaaattatgtataattcgctgtttttttttaccgcatttgctgcaacgctctcaccaggtagcgatttgattgatttatccatttcttctgattttttaaagtttattatagttactgaattgagtttatagtaacgattttattcaatttttgaaattaaattatttctagttaatttatttagatttgattatttttctcactaaatttatttctaatttgcaatttttttagatcttatcagtcccgcgcaacattttagttgatattatgatttgttaaattatagtgctaatttatgcgttttttttattaaatgaaaatctattagagtattatatctgttagattattttttttttgttatcatgtgaaattaatattattgtgaattctgtttgcttaaatcttggaggataatttcgatagatgtgtcagataattactcttattaaagctcgatttttttgaagtttaaattgctttctgtagttgttaattgctgattaaatgatttgttctttgtgaaattttgggttttgattgattggggtcctgttttttgctgaagcagcaaaa

SEQ ID NO: 53962 - DNA, 484 bp, Populus trichocarpa
  Intron number 3 from transcript POPTR_0018s03080.1 (locus POPTR_0018s03080) derived from phytozome v7.0 (chr-ID scaf fold_18; pos 2743393 to 2743876)
ttcgtgaaactttgatccgcttgggacctttttacgtcaaggaaagtgcaattcttttgaatttgtttctaattctttttcgttccgcatcttatgttgccatgtgaagttatcatgctaaatgctactggaaatgtcatcagtttgttttccattctaggcggtgatggaaaaattaataagttgttgcttaattggtaaagttggcaagttacttgaatgtctaggagctagcatttggcagttgttctttcatatgtggatgtgaaactttggaacatcatctgcgtagtgcattgaatggaatgaggcgtaaatcataataataattgcagcataatagtttctgcagttttggatcgatagttattaggattgaagaattaaacagcataaaattctgtaacgggacagaattgctctcttattcaatccatttgaatttacagcttggacaggctctgagcactagaccagatatatt

SEQ ID NO: 53963 - DNA, 301 bp, Populus trichocarpa
  Intron number 1 from transcript POPTR_0006s06960.1 (locus POPTR_0006s06960) derived from phytozome v7.0 (chr-ID scaf fold_6; pos 5015391 to 5015691 reverse strand)
gcggaccttgattcttccttttacaaaaagattatgtaacaaatctaataattcaggttttattgaattaaaaggaattaactacaaagacttaattaaaaaatatataaaaatagtttctgaacacttaaaaaatcccattaagtttttctataatctcaaaattctacttaactaacacttaaatagaaaagaaattcaaacaaattcaaatttaaaagatactaatctactaactttgaatttaatgagttatctgtcgggcaagctcaaagagttgcacttgctaggactctagcga

SEQ ID NO: 53964 - DNA, 566 bp, Populus trichocarpa
  Intron number 1 from transcript POPTR_0006s27180.1 (locus POPTR_0006s27180) derived from phytozome v7.0 (chr-ID scaf fold_6; pos 25161626 to 25162191)
ttcaagcctctctttaatcagttcttccagagtaggtatttctcttctttaatttaagactatgtttgttaaagagagaaactttggttggttgcttagaaattgttaggaattaattagagaatgaaaatatgaattctgggtttcgatgttttttgtgttcttttgctgttcaagtgaagcaaaaagtaaagggttgagagcataatattcaaagactgcagctttttttcctttcctttaatggaagccaacagggtccttaaggaactgtttggattccgagaaaaagagtttttttttttttagtgatcatttcattaccaaacataaagagcataaagtttgtgaatttattgtgaagtttgcttgttctgcataattacgatatattttgtgatcttttatcttcgcatgtttattgtttgattgtatcgatttgttgcagatacttgttttccagtatatattattgcaattcaattattttgtttgatgggtttttgtcaatttgtcttccttttgaaattaactcgacatattttttcttttttgtataagataga

SEQ ID NO: 53965 - DNA, 808 bp, Populus trichocarpa
  Intron number 3 from transcript POPTR_0022s00850.1 (locus POPTR_0022s00850) derived from phytozome v7.0 (chr-ID scaf fold_22; pos 449967 to 450774)
ggaaacagaaacagaagaaaaggtaatcgttttatttgtttcaatttatgttagtttcgaagattcaaactgcattagaccattcgaagtgacctgacatgaggttgatttgaagattggcctatgtgtgctatgttgcggcgtagctataaaattagtataagaggtttggaatgaagggataaaggttatgtgactgtagattttatatggggtttcttttgataggtttgggaatggatattgattatttggtgactagatttctatgatgctgttattccagttttcacctcaagaaagttgaggttaattttgattagtttgttgcatgtattatcaagtcgggagatcctagtagaacttgggtttgtttggtgaaattattggctaggatttaggtaagctggtggctatccatcttgttggaaacagaaaagaaaacggaaacggatctaagttccattgttttatttgtggtttgacagaatcatgtggggtatagtaagtttcacctttgggaaatgatagaaccaaatctgttgtgtcgtgtaagggtagtttatactataaataggtgggtggctattgctatctttgcactccaatatttgaagcttgtgtggtctgttttttgtcaattatatttccttttatggtccaggtattagttggctgttgatgattccctcttcttctgaagtgtagaattgtggtgatctggtatgaggcatttatgactaatacttcactatatattgctttgatcatagaccaagaaaagaaggtaaaattgacttggaggaag

SEQ ID NO: 53966 - DNA, 776 bp, Populus trichocarpa
  Intron number 1 from transcript POPTR_0006s02250.4 (locus POPTR_0006s02250) derived from phytozome v7.0 (chr-ID scaf fold_6; pos 1473755 to 1474530)
agcaaaaaccttcttcttcaccgtttcatatataggtaacttattattctttctcttttccctttgtctaataaagtatttgcctttttctttatgtctattatatactgacctttcatgtcatttattcaactgggttgattttttttttggcttgtttggtttctgggaattgaaaagaaacatctaagattgaaactcactaaaaaagattgaatcttttcatttcaactgttttatcagctggtaaagttcaagttttatactgggttttctttgttctttcctcaagtttcgagtttcaggtttgttcttggctggttcgtgtgagcttttggattgctcttgctgttgaattggttgtctagagtttttcttgtttgtttttttgctatgtttggttgctgagaaaattggaacggaatgatgatttgtttggtttctatttggagattgattcagctaaagaatgtaatttgatccgcgatccttgattaatttagaaggctaggtgaaaggctttgggggcacactagccggaaaagtagtctgtggctattttagtattcaatttgtgaaattgatgaatggtttggttaaaatctttagattaatgaatgctgtttgctccgaggaacatatattcttaattttgaagtttgtcatcatcttgtatagaaatttgtgcatctatagatttcgaatttgctattgatattcagatttgatgcctcgcctttgcttgttttgtaggttagaattagctggatttgttg

SEQ ID NO: 53967 - DNA, 711 bp, Populus trichocarpa
  Intron number 1 from transcript POPTR_0006s25460.1 (locus POPTR_0006s25460) derived from phytozome v7.0 (chr-ID scaf fold_6; pos 23842280 to 23842990 reverse strand)
ttagaagggctttactgaggattgctgctggtcaggttggctttattttattttgttcaatcttgattttcctttgatgggttttttctgttgtttttttttttttttaagtttgatttggtgaagtttgatgctttgttggataaataatgtggatcatgattggttttatggtaaagggaaaaactctaagctcaaaactatggttagttaaaaaatgagaattaataatgtagttttattgtgatttttttttaactaaaaagaaaggtaagtttttcccttttcttttatatatttctgctgttaatttttgaaagtttggagctgaagagttctagaatgtttcagttgtcaatgtgctacaatgggattatatgtctagaacaataaagatattttcttttctttgtattgtttttctgaatttaatactttgatcgatatgaattattatccaagcgtggtttcctttgctcatggtgtgtattttatctttattattgttaaagctgaaataccattttactaattgctgtaaactcttggatagttatgcatttgatcgcctctttcttttatgcttgtctgttgagtctttttatagtttgctcagctgaggtagcactctcacgttcatggctgttttggacccctattaatgtgcctgttacaggttggaaggcgaattgagtcagttgttcttccgct

SEQ ID NO: 53968 - DNA, 540 bp, Populus trichocarpa
  Intron number 1 from transcript POPTR_0019s09780.1 (locus POPTR_0019s09780) derived from phytozome v7.0 (chr-ID scaf fold_19; pos 11378332 to 11378871)
cgaacccctcttactgtctttcctgtatccactctgtaagtccaaactctttgcttctttccactttgtagtattcaaattgatgctaccgttagttttaattatcaactctctctgggtttattgattgagattgcatgtttatttgataaatgaagcgtactgtaaagctccaagtctcacggtttgcctttgagtttagctgaatgaaagatttatttgctgagatttaagtaaaaaagttatgttcttatcaaattattgagcgtaagcctacatttgagcatggtttctaactttctagtccattaacaagccgcaagtattcccattttgtcggcattttggggtggaaggatctggtgatttttttgtgaagaaatttttgaatccttgatatttgtaaggtgggtttcagagtttagtgtttaatgagtttagtgatttgtccttctcttaaaattctcgactgttgtttagtgttatcgactgtgatttatatccttaatttttctttactaggtgaaaaagagagcatca

SEQ ID NO: 53969 - DNA, 575 bp, Populus trichocarpa
  Intron number 1 from transcript POPTR_0003s06750.1 (locus POPTR_0003s06750) derived from phytozome v7.0 (chr-ID scaf fold_3; pos 8293393 to 8293967 reverse strand)
gtccaaaaccaaatagtcacttgctatataatcaggtaattctttcttttttttttttttttttttgcatgtttagttgattattgaatgatggtttttttttattggttctataatcttgtgattgcattgtttaatggggtcttaattggatttcttgtttgattcgtgacgatggatcgcagggatcttgtttactttatgttgatgaattataaaagaaagactggaggttttgtttctgttatgatttcttttctaataatggcttttcaattgtttttattttgttaatcagtagacaattacagaaactgaatgatgggttttgttttttgtttaacatattttagtgggtacgattccattcttagatttctgataaattacatcctgatgctttgatgccaaatttaacttgaggaatgttttttttttcgatttttttaattaaacattggttttgtagactgaattttgaacaaattcgctgctttggcctctcatggatctgggttttctattcttaacgtaatgcagttactttgcatatctgaggaagtaaaaaagtaagt

SEQ ID NO: 53970 - DNA, 704 bp, Populus trichocarpa
  Intron number 1 from transcript POPTR_0018s11710.1 (locus POPTR_0018s11710) derived from phytozome v7.0 (chr-ID scaf fold_18; pos 12357054 to 12357757 reverse strand)
cattaaaggatattcttgatacgctccctaaaagggtagaattttctaagaatcagctacattaatgcatccaacttgcctatgctgtttgccatggtccactattttagaaatttccattctgagaacctaggggaattttgaactgatatcagtcttgcagacctgcaataagtttagctgtctcgttatgtcaattatcttcttaaataactgcactttacacatgttctggtgacaagggattagccatggcttcacttttttatgccaaactttttaatgccaacttcaaatgtcacttataagattacagagtaacttaatgaacccagaaacccagaaagcttagaaggtttgctgatggggatgatctggatggccctgtggcccctgtccctctctgcttcttacaagttcaaagtttaagagcagccatttcattcaaaaagttgcattatcaggggactatatctgcgttttcctgatcttgattctgtttctgtggggtgtgctatcataactgggtggtggcctttaatttctttatagctaggcagtggcctccaatgcctttaggcaaagagctattgttgattctttcatggaaacgagctttgaaaaaaaaaattgcaactctagtaccaatttccttgttcttctctctgtttcaaattttggtcgtcatgtgtttgagatcgata

SEQ ID NO: 53971 - DNA, 1041 bp, Populus trichocarpa
  Intron number 1 from transcript POPTR_0003s07650.2 (locus POPTR_0003s07650) derived from phytozome v7.0 (chr-ID scaf fold_3; pos 9179603 to 9180643 reverse strand)
tcttctctactccgtttcaaccttacgtttatcaggtacacgatttcactctactttcacaattgcgtctatatgattggtcgctgatgtcaaggaataaaatttgaatgatggaggttgaatttagggttttagtgtggtttgatccctttttgatgttcattgttcatggctgagtttagtagcagaagtgactatgttactcaattcgatataaatgtgatctgtttttgctaattgaacaagattttgtgtaaaatgggattttttttatttatagaattaaggaataatttggaaattggtatcactgaatttgtttttttttttttggattttcttacctttgaggttctcacctcatcagcgaacgctgatcaaactatcatctagttttgtaaactcttcttcctgtattaaggaagattcttggctgcttggtctgtgaagctttttggaacatgctctaggtttaagtttggtgcttctttggctgttgcctatgtcaatatgaatatgaatataaagattgtatgatcaaaatgatgaagattgaagatataagaagaatgtgcggaagaagacaataaaacagtagtgattgattgggcaggctgataaaaggaaaatgaattctgatttgaagatagagttttggagttggttccgcttcgcgactgttatgacctaggaagtcctactgtggtgcaatggtttaaacttaattcaccattcaatttatatcattgatgattacaatagatagaaaccaatgttgggtgattggtttccacctatttcctttaggtggatatgttgtttattttgctagtcctgtgggtatcattcttcctggtttggtatcatcagttctgcccactttatgaagactaatttaatcccaggatcaccaatttatattgcctcctttgttgttgggagtctgtactttaattttgtaatattacatacactgaataatctcatgagggataatgtaatgtagagtcatcaaggtgctgtgatacctttccagattct

SEQ ID NO: 53972 - DNA, 629 bp, Populus trichocarpa
  Intron number 1 from transcript POPTR_0019s12730.1 (locus POPTR_0019s12730) derived from phytozome v7.0 (chr-ID scaf fold_19; pos 13692296 to 13692924)
gaccgtagggaattctgagtaagcgcttgaaatatatcccatgagaaaatattcgttcttttgttgagtatttgaaatttgatttaaaattattgacaatgatgagctctatgaatccgtatttattttatttggttttgaaaacgttgtagcgaaacacttgtacatatcttaagttttaggagacagaaagaagatacttaggaatccttatgttaaattttattaggacaattaatgttttctactattgtttcacttgaaattgggttattaatagtctatttatttgaggtgaaaaatatcatgatgtgtttaaaaataatataaatcatatgttttgagattttctgcaaacaacttaaacttttttaattaaaatgattatatgatatgatgatatgagaaaacatcttatgcatttgcatttcattgattttcttagatatacacttacaagtagtttccagtttcaaggattgattaactgtagatttctgaactcaaatgcattctctcgagagtatgtttatatgtttcttcttgtctggtccattttgactaacgattatgtgtgttcttcttgattgtcaggttggagtctgaatttattgagaaaatcgttggag

SEQ ID NO: 53973 - DNA, 918 bp, Populus trichocarpa
  Intron number 1 from transcript POPTR_0003s14510.1 (locus POPTR_0003s14510) derived from phytozome v7.0 (chr-ID scaf fold_3; pos 14582161 to 14583078)
ctgctacaaatcagaggattgcgttgcttcaacaggtaattcttttcggtgtgtggtgatttaatttgagatgttgaatgattttgatgagctatatgtactcctattttgattatggttgttgttgttgaattgattattgaatgagggaaattaggatttgcagggatagatttggctaggcaaattatgaagtagatggttgtgtttgttgggggaagggatagtaccttgtttcaactctgcacgggaaagtgttaaaggtgattgaatttggcattgggccatcagagatattaagctttggtacattgtgattgtttctttaaatatagttactgcattgaaacctcggtattattctatagggttgatttatttttttctgtatagtttcttgggtacttgatgttgttggatttacggtgtcttactctcttgttttctatcctacttgtagatttcattttgtattttccttgtgatggtaggtttgtgtgcattttttcatgaaaattcttttttccatggaatgcaattaacgcactctccacctcacatatcgagctttttcaacattttttgcaatagcatgggtttatcccacccttttacatatgcaccaaagtttccatatctttttcattttcaaatatagctcaattttccttcaaaaacactctggtttgggcgatgagcctttaatgacttgtttgtcatctgtgtcaactgctgaagcatttaattgaatatttaggtgttacccaattcatgagttcgctggaatttagtttggaggtttctgggtcttaaatagactcaacttgtttaattgtgttgttgcttagtagctttttgctgacaattatgtgcatctttctcttgatctaggttgagggtccaaaatctcctgaagaa

SEQ ID NO: 53974 - DNA, 630 bp, Populus trichocarpa
  Intron number 2 from transcript POPTR_0018s00620.1 (locus POPTR_0018s00620) derived from phytozome v7.0 (chr-ID scaf fold_18; pos 557408 to 558037 reverse strand)
gtaggaattcaaaagttcagctactttccctaacagtaagcttcgcgacgccttgatatcagttatactttattcggtttttgtgatacaagtgcaatatagtttttagcatgctggtttcatcagggttctgcttaccattttttattttctaaaagggtaactggattaatgctaggttttatcgggagagagttgtgtgttttagaatatgagcaagtgcagtggcaatccagtgtacaaatttgtcaatttcttaagtagggtattatggtgtgtttgattgaggtagaaaggtgagatctgattgtattgggcgaattcaggtttggtctgagattcattttgtttttttgacttggtatgatattggaaaatgaagtcaaactagcttgtatactgtaattctctttttgagagtggtggtttggccaagtatagaagctagtaaatttatcttggctgctattaatttagtataaattgtacgcccctgttttatcaaagagtaactctgtcacttttcttgtcatttcttaacatctctgtttccagaggactaagtttgtttcaattttggtctgggcgcttctagctgttagaaacgattataaagaactgtggggacat

SEQ ID NO: 53975 - DNA, 411 bp, Populus trichocarpa
  Intron number 1 from transcript POPTR_0018s00620.1 (locus POPTR_0018s00620) derived from phytozome v7.0 (chr-ID scaf fold_18; pos 558071 to 558481 reverse strand)
caatcgcgacccttcgtatgcgccgcacttgattcttctctctttatttctcttttaagttttttttttgtaattcattgctttttttcctagtttgttgctgctttggataatttattttctccgttcgataatttgctacgactcaagtgaatttgatcgaacagtcaattctgattaattgacgagaaagtctatatattttgaattgtgtgataattttttaaggcttgttaatgtctcttgttttatattcatttttaataaattaaaaaagcctgcttcttctcaatctaaatgtaggttttatggatttagctaggttttggctatgctaaacactaagaacttgttaagattgcttaagtttggaagtttttggtttggtttggattatcaggcaagggaagg

SEQ ID NO: 53976 - DNA, 467 bp, Populus trichocarpa
  Intron number 1 from transcript POPTR_0022s00740.1 (locus POPTR_0022s00740) derived from phytozome v7.0 (chr-ID scaf fold_22; pos 353831 to 354297 reverse strand)
cccggttgcaaatcttgtttctttggttgaagagagtggatttaataatgaacccaactttgtggagaagttgtgtgatatgctgtttagggtttatgccgattgtaatttgtttgaagagggttttcgggtttttgattatatggtgagctatgagttaaagattgatgataggtcttgtattgtgtttttgcttgcattgaagaggtgtgataaaatggaggcttgtttgggtctttttaaaagaatggttgagtttaatgtggaggttacagtttattctttgacgattgtgattgatgggttgtgtaagagacgaagggttaaaagggctatcgatttgatgattgaaatggctagcaaagggattaaaccgaatgttgttacatataacacacttataaatgcatatattaagagaacggattttgatggtgttaatgagatgttgagattgatggaagtgg

SEQ ID NO: 53977 - DNA, 751 bp, Populus trichocarpa
  Intron number 1 from transcript POPTR_0003s10135.1 (locus POPTR_0003s10135) derived from phytozome v7.0 (chr-ID scaf fold_3; pos 11241507 to 11242257 reverse strand)
atttctgaagctgacaaactcactcaatctcttcggttagttttacctctctctccccccccctctatgtgagcttatccttcaatttgaaattggctgaaccataaaagatcccttcaacttatagtttagtttttattattttctttgaacaagtaatttaaaaatatgtcctgaaaaggagaagaagaagtcctcttgctgtctggcttaattagcaacatcacagctgaaggatcgcatttcagctggctattatataaaatcgtattttttctttaaataccaaatcgaccaagaggacagaggaaaccgttaaacgtggagcagatggacgcaagccagctcattacatatttttctattttgctcgttaattaagagtaattgtatttatcccgaggagaacattctgatatggcaaatccagatcatgatattgatgatcttcttgctactgatttatggaatcgaacttttcaaatgttcaataacaagctagcctgcgattttcaacttaaagaaataatgcctgccgaaccaaagttagagaaaccaacttttgatagaatgaggctatcaacgtactttgattaggatgcttggagatatgaagggtagcaatagaggtcagataatattgttaaagagccaaatctccagattgtgaaagaactagtactgtagtgacagattttaaagcatacacacatagctttcctgtgcttagttttatatgttattgcagaga

SEQ ID NO: 53978 - DNA, 952 bp, Populus trichocarpa
  Intron number 2 from transcript POPTR_0014s08290.1 (locus POPTR_0014s08290) derived from phytozome v7.0 (chr-ID scaf fold_14; pos 6162365 to 6163316 reverse strand)
aacctcatttacacggaacgcccgtgtattactatgttagtattattattaatatcttcgttctcctgagtatatatttatgtctgcttatcgttttttttttaaaatgtttacattttttataatgttctagtagagagtggttgattttaatgtcgtgtgcttatgttgtcttgcgtttattgaagtggatgttgagcgttgggaaatttgggagttggatttagctgttattgattcccgaatcgcgtataggatttggaactagcaagcaagagtcctaggatgtctctgagggtcttaaacatgggttgagattgtatcatacatgatggcatttgtgatttgtacgtctcggtcttgaatcaactttacttggattggaaaaggaaaagacactttttaattatgttttgtgatgatggtagaattttagggtcagcattgcacctgtagaggacaaagcatgttataactcagttgttttagccttgaatataagctcaaaaccatgcctctaattgtagctttcaaattcttgcactatttcacaatctatgccttgtctgacagcaagataaatagagaaaattcgtgatgctcttcaaatttgctccaccatttttcatgagtgatgtattgatggaatcgtagtaaatatatttctatatgaccataaacgaagaggggggcaaagattagaggtttgaggatttttattgtcaagattctgtcggtgaaatgatgtaaattgccatgataacataatcttagaaacacccaaagttcttgcatccttttccacaccatttcacaacgacatggcctaaaattgcttccactttcaagcggaaatctcttgaaatggaaccaaatgggttcttttggctaacaaaataccatcttgaaatttaaaacacccttgtgcagtgtccaccagctttggaagagc

SEQ ID NO: 53979 - DNA, 602 bp, Populus trichocarpa
  Intron number 1 from transcript POPTR_0003s11510.2 (locus POPTR_0003s11510) derived from phytozome v7.0 (chr-ID scaf fold_3; pos 12276208 to 12276809)
tgatttctctcgccattgttttcaatccccgtctggtacgcccctctcaatatttagggtttactaaccggctttgtttttgttgattttttgttatgcattgaatgattttaccgattctgacaagcaatattggatgtgattggagtatttgttttccagtcgagcttttcatcttaggtttccatttttagagtcttgatttgatttagagtttgtttgtttctttagtattactgtttaattccaatcccaggttttatgttcttgcgttttgatcgattcttttttgcggatttttcattattttatggttctggatggtttatggctatgaaccattgttaatatttttgtgttttgatttaataatatcttggggtttttatttttttattgtttgtttgttttgttttgttcagcactgctaaactgcacacacctttttctgtaactactggtttggacttggattgatgtttttgttctgcaaaaaggattgaaaagatcggcattatgatgagcggggtcgagtctttcactttttaattcgtgggtgagggttttgataatcttctttatgttttaacagaagattcatt

SEQ ID NO: 53980 - DNA, 640 bp, Populus trichocarpa
  Intron number 2 from transcript POPTR_0018s04710.1 (locus POPTR_0018s04710) derived from phytozome v7.0 (chr-ID scaf fold_18; pos 4007023 to 4007662 reverse strand)
cagggtattactcgtatattcgtacattattcaaggtatatagcagcttttcctagttttggaaagtccatttatcagtgccatttccttttcttttcttttatttatagttaactggtgttttgcgcctaatattttagattaagtaataatgaaattaattctacaactttgcatatgtttgatttgcacacgggaaatgcaccaatttctatgctatatttttcgtcaaatttcttgctttgtttagccaactaattagaagttttaccccacatgatttcctaaatctatttaaggagctaaagcttaatatatgatcttatcggtcacaggccttaagcgatgcggcaagagctgccggttacgatggcttaattatctgaggccagacatcaaacatggaggttttactgaagaggaagacaatatcatatgcgctctctatagtcaaatgggaagcaggcaagttttagtctactttgtttcttatttttggtcgatgctttattcgattcttcataattattgtacgctttttttttttttttactgtatgggatttgtttgtatttggcatgcaaccatttgattcttaattatcaattaattataagctctaacctttgtcttgttgtag

SEQ ID NO: 53981 - DNA, 685 bp, Populus trichocarpa
  Intron number 1 from transcript POPTR_0006s07180.1 (locus POPTR_0006s07180) derived from phytozome v7.0 (chr-ID scaf fold_6; pos 5162524 to 5163208 reverse strand)
ctggtgaaagaggtaaacttttttaaggaatttgtttagaccccatttctttattttctttaaatttcccgaagtttccttctttgtttgatttgcattgcttcatgccactcaatttatcaatttagcttatgttagtatcagtctagcaaggcttctctagttttttatgtaaattttgctattatttagttgctgcaattgctgtttttggagtatgtagttggtttttcttgttatatatatatatatatatatatatatatatatgggttgtagctctttaactctgttaaattagtggctgattttgattttaattatttttttcgaaagggatgaaaaacaactgaaagattgtagagttgcctgcctagctgctcaaaatctgggattttgctcattatatatttgcttttcactgttgtcaagtttaaatgttaatgatttttttttcttcttttatttaaaatccactcgtctgctcaagacatggttaattagtttattattttgttcacagaaggtgattgctttgctcattggctagtagctttctgtgtaaaccgtggaggtttttgttacagttgcttgtccccttaaatgtgattgattgatcttcattttcatctttgtgctcatcaatgcaggaaaagctttggaagaattgcggtcgtctttattt

SEQ ID NO: 53982 - DNA, 676 bp, Populus trichocarpa
  Intron number 3 from transcript POPTR_0019s13490.2 (locus POPTR_0019s13490) derived from phytozome v7.0 (chr-ID scaf fold_19; pos 14406973 to 14407648)
tttgcttctatcagatcaatgtaagtggtagtctctcaatctttgggagcagaacttgtgcatatgtgcataggtgtgagcttatgaacgatgtggttgcctaattgaaacttctgtccttccacccccaaacattttttaacctattccgttgatgcttttagaatcatctgttttgatttttatttaaagtgtgaggaacggaaggggcattttacatgtgcctttgactgttattgactacaagaggcattgaagatattgcatgggattgttttacatgtacaggtgcttttagaatttgagccggggttgctccattgcttacttggaaaacactgcattgttcgagcaaaatgccaatggcatggcgctttatactggatatcattctgaagatccttaactactttacaggagccactaaatgttatttatcgacccttaaatgaacggtctaaatttcctgataccccaactttgcatttctagttgtttgcttcactttagatgaaactcagaggatgtatagccaaagtacataaactgcatttgtttgaatattaggcaatattcgttcttgtgatattaatggatgctgacattaatctttgtgtttcttttcttttatttatttccagagatctaagcaacaacaatataggggggagtattc

SEQ ID NO: 53983 - DNA, 461 bp, Populus trichocarpa
  Intron number 1 from transcript POPTR_0014s13050.2 (locus POPTR_0014s13050) derived from phytozome v7.0 (chr-ID scaf fold_14; pos 9595225 to 9595685)
gggtatctgatgttgaaactggtacaagaattaaaggaaatggagtagtaggcttacaaatgaggcagcccagtccgcgttttcagtggctaaaggatttcgcagaagattttgtttctgatggctctgctggtgaagataaaggtgcaggtctctgttccatgattctatccagtaaaagttttgcttagcttagctttttttttttcttgatttctgatgatatatgttttgattcgataaatgaatttagacctatattatattgatgaggtagagtgactaatttttatgttctctcgttggccaacctggctgaccttaggggctttaattaatgctgaagacaccgatgagaaaactgattgtcctcgattgcatacatgtgatcaagagtttgcaaggttaaattatgttgactctgaggaacctggagagtcatctcaagctagtgcacttgg

SEQ ID NO: 53984 - DNA, 687 bp, Populus trichocarpa
  Intron number 1 from transcript POPTR_0003s02200.1 (locus POPTR_0003s02200) derived from phytozome v7.0 (chr-ID scaf fold_3; pos 2304733 to 2305419 reverse strand)
tgataggaaataaagaaaggttgtagatagggagattatttataattgatttaagcaagcacactctctcaccaatagataagtgacgccctttccaggcagccaacttgctattgattctattaacaatagttttccacatgagatgaagatgcacaaataggcaggcccaaatacttaaatggcatcccctccattctacatattagattgctagcagttgaagaagtaataatagttccagtgattgagtacttgtggaaattaaccttcagcctataaatcaactcaaaacatcacatagttcttttgatgttttgaagagatggaaaatcatatgaactgaagatgagtgtctcatctacaaactgaaagtgagtaattttcagttgatcatgaccaaaacaaataccttttataagtcccaaatcacatctctttttagcattctaaccctcagttgctatattgaaaagagatgttgataaagagtacccttgtcgcaatcccttttccataaagaactctttagttggagagccattcacaagaattcaaagttttgttgtcgaaattaatacattattgtatccatcatctccatcgtaaaccaaaacccacacaagccgtaactgttgaaatacctgggcagtaattgttgtgcgtggtctaggatcgtgtgtgata

SEQ ID NO: 53985 - DNA, 533 bp, Populus trichocarpa
  Intron number 2 from transcript POPTR_0019s14590.1 (locus POPTR_0019s14590) derived from phytozome v7.0 (chr-ID scaf fold_19; pos 15329493 to 15330025)
agggtgattctgctggaactgttactgctttctatgtgagtatattcaagcaattgttaccctttattttatctcttgagatagaattgattgttgcgtagctggattaccccatgaccatgacctttgtttgtccccattcaataatgtttcacctatttcacgcaatacactaaagaaaatttttctgatatgcagacaatttaatcttgaattcatttgccttcattaaatgcacgtactgagtcactagcagaagtatctacccgctaattttatgtctcctgaatttcttgttagtctacattatcttgcttttattagcttagtacccccccacaataattaattgctctcattggtttgaacttttaccttagtaaaagtcagaagattttatttctggatgttattgtagtacttgtcaaactgtaaacagtgtgcatcaattttatttaattgcatattatagtgttgacattgacattttacttgtggactttgtctaaagttttgatcttttgatgaaacag

SEQ ID NO: 53986 - DNA, 983 bp, Populus trichocarpa
  Intron number 1 from transcript POPTR_0003s14970.2 (locus POPTR_0003s14970) derived from phytozome v7.0 (chr-ID scaf fold_3; pos 14877893 to 14878875)
acgagggatctatttctccaggaatcgactcagtggtatgctcctgccatttcttttttaatttttaagcatgtccttaattatgttggatatagacattgccatagattctgcagtagatgcattatgcatcctatgtaactatgctccagaaggtgtttcatgtcaaatcctttgcaagaggactataggactcgtaaccttttacagaattcagaattcttctttcaacatccattattgagatatttttgcctttatgtaaatgcactagaaagtgatatgtcaagttttgatcttattattcacattggccatatctgattctctagccatatggtatccataatctgaacaactctgtttatcaattagttgttctgcagggtcatggttgactatgtccctgaagagacaatctttcactagtgccttctaaatttgtttcttatcaaggaaatgcttacgaacctattgaaatttagctctgaaaatatcttcaacagttattctatcaactctaggtgtagtgcttgtttccattctggacttggtagagtactttagcctttgtatctggattatgaccggggacaatgttaatgtgactagtcttttgaaacagaacattattgtgtaactcaaaatgtctgcaaattcaccggcatcttcaatatactgatctttgattaatagtctctcatcatatatttatccagacattttcttctactgcctgagaaagatggattttggtgaatttgcaggaagcattccaagaactattgggaactgtacattgattgaggagataaatttcagtgaaaacaacttgacaggtgagatcaagccaaactggccctttctaacttaccttgttttgattagttctattgagtttcagtgaaaaaaacttgatattgtgccttgatattctgtttatggcaggtgtattaccacctgaattgggtggcctttccaac

SEQ ID NO: 53987 - DNA, 625 bp, Populus trichocarpa
  Intron number 1 from transcript POPTR_0003s04600.1 (locus POPTR_0003s04600) derived from phytozome v7.0 (chr-ID scaf fold_3; pos 5466678 to 5467302)
caaggcaagagccctttgatttatttcctgtatgtcagtcttctctttatttttatttttttgttatttattctttgctagtaattcttttgatataattttgcagtttaaacttagtcggtttagtttgaattatgtaatttcttttttaatttatgggttttgaaacttgtgaactttcgaactatggttgcaatgattcttttatggaatttgttaaatagacgaaagacaggccaaagaggaacttggaagtactgggttcatttttgccgggttaaaacttttcttagaagttcattcgggaaaaaaaaatcattcatatgattcagagtttcttgaagtagatgatggttgagttggtgtgtttctacggagacgaaatgaacttatcttttgtgaatattgcaatttttctcttaaaaaatatccttgtactgtttatgttttggtttgtaaggcatctatcttgtgtttctgttttccaatgtttgtagtttcaacgcaaaatgcatcgattgctattattcgatagagaaatgtaatgggatgtctttctttatgttgttttccctgaaaaagaaaattttgctattccaggaaattgaattacctgatcccaaaa

SEQ ID NO: 53988 - DNA, 282 bp, Populus trichocarpa
  Intron number 1 from transcript POPTR_0006s01980.1 (locus POPTR_0006s01980) derived from phytozome v7.0 (chr-ID scaf fold_6; pos 1210238 to 1210519 reverse strand)
gtagaaacggtatgatatatatttgtgtgtgttgatttatcttttaatgcatctctgtggcctttttcttctttttacgtggatgtcctatatatgtacaagttcttgatatataatctctacagcggattcttccatgtcagaacatgttttgagttcttccaatctttctgtctataaatttatcgtgagattttctttgtttttctattgggattaatcatggtgaggtcctatttgaattgcatgcactaactagtactgttacagaaagtcacaacg

SEQ ID NO: 53989 - DNA, 400 bp, Populus trichocarpa
  Intron number 1 from transcript POPTR_0018s14880.1 (locus POPTR_0018s14880) derived from phytozome v7.0 (chr-ID scaf fold_18; pos 14907165 to 14907564)
cagacgaggatccgctcgatccaccatttctacgggtacgttttttctttatttgatcttcttcttcttcttctaattcaatctggatattattgttggttctatcctacagtccaaagagagttgttgatgatgatgatgccgcccctttttggatgtaaattggatagctaacttgatggagaaaataaattgaaagttttgcaaaaactaaaaaatatcgtggaaatctttgctgctgttctgaaccaataatttgttttttccttctcttatttcgcttggaagtttatgtacagtatctagcaataggagtctttgtaaagtgagtctctcttcactgctgttgcatcaaacagacatgctactaaacctgcatatcgcttcttgacagtgtttg

SEQ ID NO: 53990 - DNA, 933 bp, Populus trichocarpa
  Intron number 1 from transcript POPTR_0006s28350.1 (locus POPTR_0006s28350) derived from phytozome v7.0 (chr-ID scaf fold_6; pos 26058897 to 26059829 reverse strand)
gctataactccttgagccacagtgtaagttctctaaattggatcttttgtttgtaaaaattgtaataaatctctagtcttcgattggatagcttgactttgaacggacggagaagtggaccgacctagtttcggtgcctgaaagttggcctgagataataaaacctaaaaaacaagttatgaattgaaaatgtttagtgctattaggcacgtatagtgaagttgtgggtggtgttagaagttctgagagttaattaagctgctagggttttcaacttcttactaaaactttgtttatgttagtagagactataattttgctagattcaagttacctatagtagagattttcagtttaatagtgtctataattttgtcaaatttaagttgtttaattaatttaaagatttagatagcaaatagctgtgtcttcaattgatggggattttaaatttaaagtgtatttgattttgctgtgaaaaattctcattttaaatcttgaaaatatacctaaataattttatttttattcttttaatatcaacatattaaaactattgaaaaacacacttacaaaatatatcaaaattattaatttgatgcttttataaaatatattttaaaaaaaaaataaaaaaaataatagacactacactttcaaacactcaatttagaaatgaatccaatctcaacaaaatttcaatctccaaaactagtcaaccaatgaatgttgagttcaagtttaaaagtgtttgtaatctgttttctcatttttgaaaattgtcatgctagcttgttacagatttctaagtagcatttgtgatttcatgaatctatcatcgttttagtccatctgttgttacaagggatttatctgtagttccaaagtcctgatcttgtgggcttttactgcaggtttcttcttcatctcttg

SEQ ID NO: 53991 - DNA, 611 bp, Populus trichocarpa
  Intron number 2 from transcript POPTR_0018s09100.1 (locus POPTR_0018s09100) derived from phytozome v7.0 (chr-ID scaf fold_18; pos 10008583 to 10009193)
gctacccccacaccgtataggaacttgctttccttatctcttcctttctttaattatttatttatagaattgataaccctaaatttcattctagtcaaaattacatatatgagctcacatcttgaatgggaaatcaatcgtgtgtgtagatatatatatcaatatatacatatccccactttacacaactgtgcatcttgaatgattttgatatagattattaccagtgatgaggaaaatagaaagaagaagaacaaatttagttgcaaccaattggattttcattaacgtttagaaagtagtcctctccatcatcatcatctaagtcttgcttaattcgaattaaattgtaaaggacatgcttccaatttcaaaataatttcctgtacaagcactcttcaagggatcttattatttcccttggaagcttgattttatttcatttattcttgtttctgtattgtttcgaaagtttaatttgtttagttattcatttacacaaaccctagttccttgcctgttaaatatatatgtgaatactccacaccatctcatcttttctgatcatgtggcaaggaggaggagcttaaattaattagtctgacattttc

SEQ ID NO: 53992 - DNA, 383 bp, Populus trichocarpa
  Intron number 5 from transcript POPTR_0006s13650.2 (locus POPTR_0006s13650) derived from phytozome v7.0 (chr-ID scaf fold_6; pos 10873727 to 10874109 reverse strand)
cgggttcattgatttcttgggtggattaggaaagcgtatgctccacttctggaatcctttttactgatcttacgcacttttatgtctcgtttttgtagaggttgtttgcatacaatcacaattacttctgcacacttcttccctgtttctcctttgagggaaagggttgtggaattaccttttccttcttgttctttttaacttccggtacgaggaggttgtttatgtttatagggccttatttcatttagtgatgctgaaatgatgatcctgttcttctatgtttggaatattccagctggagttgattttaacccttttgtttttattactacaatttttcttcaggttatctaagtcttggatattcaacaccgttcctc

SEQ ID NO: 53993 - DNA, 839 bp, Populus trichocarpa
  Intron number 1 from transcript POPTR_0006s11700.1 (locus POPTR_0006s11700) derived from phytozome v7.0 (chr-ID scaf fold_6; pos 8909116 to 8909954)
tgacgtttccactaggaagaagctccacccttcaggttatatgcgaccaatttcaccatcttctcttctaagaaacctaagtactctttaaccctatcacattcagcgatctaatccatgaattcttctatgtccaaatctctatagaatgttgtaatttctatcttgatgcgaaaatcatgtgtttgttacaatggtctatctcatcaaattcgtctccaccaataccatccacatggacaattggttgtctaggtggaatttcaagaatggtccggggttaggcctgccttaaggtaagtctccaggcaagttcctctcttcctcacgattcttgtttgcgttacccattaaccgagttagatctactatagcttgctccaaacgatcacacaccccagagggcctccacttatgcattgcctagtgggttgttatcatctccatccatcaaagaggccaacctactctgataccaattgacgaggcaaatagctggtagaaactagagttctcaagctcaaaggttatagacctaacactatagagaaatatagaaaatctttgatattttatcaaaagtttaaatagtttgaatctcaaaataaactagatatacctatttatattaatcctaaaatcctttatagaaaagaattcataattaaaacttaccaaattaatacaatacatctggcattaggattcttcaataataaaatactaattaaattataagtcttaagctaagtagtaaacaaataattaaaacccaaaattaactaggaaaataattaaaacaacttgaagcttcatataagaagcttctgagtttcttc

SEQ ID NO: 53994 - DNA, 814 bp, Populus trichocarpa
  Intron number 3 from transcript POPTR_0014s14090.1 (locus POPTR_0014s14090) derived from phytozome v7.0 (chr-ID scaf fold_14; pos 10317165 to 10317978 reverse strand)
ggacagttctacaagaaaggggtaagcatctgttttatctgtactgttaccattattctttttctttcctatttgccttggcagaagggagatgtatggtcatctttttttttttattcccatcttgctttgtcctatgatatacggaatagaatctttgctttttgtggggagaggttggcggtgctgagcaaggaggactttttattttgtgaatttggtagattttgctctgtgagagggtcctatttgatggagatattatgcttgctgttgtttgatgtatttggatggattggaaataatgtttgttaaaactattcccttgcctggtggatactgtgaaatataatagtttcttgaaaatgttctggagctttttctaggagtttctgtagcagatatttgatgggattatattgcccttttgtattgattttgatgtgatagtcttctcatatggaggattctagttctccacatggtaatcttcatgcacttatttatcaaacttattgtcattcagaatgtaagatgttgtttaagcatgatattgttatcatatccctccacatttctcaacatttctttggacgatctatgctaagctaccaacagtttaagtttttttgctttatagcttagtcatggtgtaatatcatatttccttacaacactgtgatgttataaatcttgtacatcaataactactagtaattggaggattcttgactgaaccaatttgtacattacaggataagaattgatgtggcaaccatttttccttcaaaatttacaggtgtaccataactat

SEQ ID NO: 53995 - DNA, 529 bp, Populus trichocarpa
  Intron number 1 from transcript POPTR_0014s14090.1 (locus POPTR_0014s14090) derived from phytozome v7.0 (chr-ID scaf fold_14; pos 10318286 to 10318814 reverse strand)
aatccaagcgtcctgatttaaaggcaatatccaaggtaagtgaagattcaacgagtctttgactctttttagaattctacccatttgtcttacttctaatagaactactatttatgaacaattcatctcaggtgcaattccacctttcttgattgctatactggtcataaatggatgaatattgggcacttctttgtttaacttgtgcaccttttgaattcttgatttaaaattcactaatcaaaatcactatatatattagcttttcaatcacataaaatttgaatcaattttctttatttactgtttatctcttggtcatatccatattcaaaaaattatcatctttgcttcttgacgttatagatatgatgacgacgacgtttcttgtcagttttttctttcaaaattctattcttcgcaatgaaattgaatgagactgattgtagaagaacatgatgttatgctttgtttatttgtaattaggaaataatctccattttctcttcaaaacgaaaaattctggcag

SEQ ID NO: 53996 - DNA, 724 bp, Populus trichocarpa
  Intron number 1 from transcript POPTR_0013s02340.1 (locus POPTR_0013s02340) derived from phytozome v7.0 (chr-ID scaf fold_13; pos 1403438 to 1404161 reverse strand)
acacagacagcggctcctcttttccactctctaaagtaagttagaccgaaacatcttatattatcatatatgtttgatctttagaaatattgggttgtcaatgttttgttgaattgttggtttctttttgcccccaatatgcttatatttgtggactaataaatgggttatgaaagctatatcaacccaattgttgatgaagttagtaaagttgttagcttttttgtgttaaggaggtgctatgtttgatattaaggttgttttctttttcagctttcttgtacggatacgagggtttttagtgatcgttagaaatcttggtttgattgagtgtgtttggacttcagtgaatttttatttcatttaatatgaaggtggtagattgtttcatttaagatgacccttttaagttttgcttctgttttagtatttacttaagcagaggagctgttttttgagggaattcaaaaggaaatctaagtgaaaattgaagactggggacagattgtgaattggcattaatttatattattttttctgattcagtttctaggataagttggctatgtttcgtttatgtttgattgctttgtgtggactattaataatgtatcttttggtttgtttgttattgttttgtgtgccattctttgctgccaatctaaactcagagttctgtttatgaaataggagctacaatcttggaccactttctcatatactg

SEQ ID NO: 53997 - DNA, 535 bp, Populus trichocarpa
  Intron number 3 from transcript POPTR_0006s11160.1 (locus POPTR_0006s11160) derived from phytozome v7.0 (chr-ID scaf fold_6; pos 8472626 to 8473160)
aaagacaacatctgtcagttgctgctaccaaactggtatatgttgtgatgtaaagatgaataggttgaagaaattgcatcggttgctatgcactaatcttttgatatctgcttttgtaggaattgctgaagagggatggtatatctgcatcctgagtcattaatttctctcaagttctgcttgtgaagctgtaagatagcagaattctcacccttgccaagtggcaattctttctttcttctttcttgctgtttcagtccttttgtgttaaaattgtcctaggcttttgttggttattaatgaagggtgcatcttgtattctctctttccaagttggattgaaatctgtctaatgcaatgttgtcttatttgctttcaaaattgaaatatgcactaatctctgttgtagatctatttccaatcacacaaaggataaaggattagagagcaaagcactaatttgttttaaagactagcaattgttataacttgatgggtgtaacatactgtttatgttttttatttttccagcaat

SEQ ID NO: 53998 - DNA, 727 bp, Populus trichocarpa
  Intron number 2 from transcript POPTR_0014s02380.1 (locus POPTR_0014s02380) derived from phytozome v7.0 (chr-ID scaf fold_14; pos 1996886 to 1997612 reverse strand)
gagaattggcttttcttttgatccaaggtgcgtgctacactcttttctctttattctgacttctccttataggctgccaggtgaaaatgttgctgcattgaatttagagggatgaattactttgaaatttatcatgaattttctcgaagttgatgatcatgattgtgtaggtctaactttactattgtcatgagcgtctcttggttttgggggacattatctgttattttggtgttaggctgatcaattgtttgtgttaatgatttcaaactggatcgttgtcaaataatgatttggtatagttttaacatttgatggatgagaaactaatcgctacaaattattccatgaatctgaattctattgtctatctatgtagaattcgtgggttagttgtagatactctgattaacattgtttaccatgttaactctgatgtggcaatgaagtcagactttattcattacacctttaatgaatgtatcttgttgagtacacatttatttgttcaatgtagctgagactgaagcattagtttttctacatcgataatggttaattaggctctaggttttcctccgattagttctttttatgttctgattatccttgtacttcatgttccgttcattaaaactgaagttgtatgttgaaagatctaactttcttcctcttttgcttgtatcttgcagctataattttagttgctattatctactacttctca

SEQ ID NO: 53999 - DNA, 980 bp, Populus trichocarpa
  Intron number 2 from transcript POPTR_0003s02190.1 (locus POPTR_0003s02190) derived from phytozome v7.0 (chr-ID scaf fold_3; pos 2284139 to 2285118)
atctcaaaacctgcaagagtaagtcgttaaagtcgttatataaaatatcattctaattttgatcttattggaaatattaagaaacaatttttaaatatcatgaaggcatatttaatatattatataaaatattacgaaacaatttttaatcattctaattttgatcttattggaaaaaaaaaacaatttttggatataaagtcgataaagatggaagctaagttatgatagacttacaaaacaagataaagaaacttataattaagatctcatcggtaattaaaacaagaataataatcgatcctagatagcaacatattgtccaaatatttcaccataaaatcatcctccaccacagaataatattctgattaaaaaaaggtccaaaataacataaacccattaaaaagagaggaaataataaatggctataaaacagtcgagagtttttctcataaagaaattggcagtctctcgttggctgtctagtgatttgtattggatatttctctaagttttaacaattacaattttcttaattataatattctagaagagagcttcttattatgttattcaaaacccattcaaactcaaatgcattaaaaaaaaaaaaacttagagttgtgttcgtctaagtacctcaagacagaaaaaacatatataaaaatatatttatttaaaaagataaatataaaatatatatttataggagagttttgaagtgaacttctgattgctaatttaatctaaatattacaacacttttggcataaaagggccaaaataagaataaaatatatgcctcttggacctcattccaagtgcctctttacgtagatataaagtcgtcctcatttttgttgataaagaaacaatataattaagagaatgtcatgtgaagcatttaggtaggtagaaactgtgtattatacctgatcctgtcaactcattgtaggacagatccaaagacttgaggg

SEQ ID NO: 54000 - DNA, 582 bp, Populus trichocarpa
  Intron number 3 from transcript POPTR_0013s03220.1 (locus POPTR_0013s03220) derived from phytozome v7.0 (chr-ID scaf fold_13; pos 1964703 to 1965284 reverse strand)
ctgtgcgatcatatcaataggtacacccacgaactccagacctgcagttgatttaattctttgtaatgcttctcacattttatggagtcaaaacatcaggactgaaatttagaggaagttttttgtttgaaagttgccccagtgctcctttgattatgggaaatgcatggatgaatgcgcaagatttgtttccccatgtttgcttttttgctgattgatggtgctatatcattcctttgtcccatcattcagttttcacctttgccattaactcatgttctttcaaattgtaaaatatattgcaagtccttgtattatggaatgctattgacacacaagctgcaggatatccatacgaagatcgtctatgagtttgaatctaaatgtagaactaaaagataaataccattgtgttgcttttgaatgagaacagcagaaatcacagaagaaaaggaaattgcaatctatgcctagtcaccatgctccttgttgaaattgaaataactatgtttgagttgcatctgataaacacaaataaatttggtactgatttttttttttttttttgttctggcaggagct

SEQ ID NO: 54001 - DNA, 355 bp, Populus trichocarpa
  Intron number 2 from transcript POPTR_0013s03220.1 (locus POPTR_0013s03220) derived from phytozome v7.0 (chr-ID scaf fold_13; pos 1965328 to 1965682 reverse strand)
ccgggtatgtttatgctccattaaatcttaatgcagttacatttcaagatcattgctctttgtgattagttagttttagctaaccaagattaatgcactttgtttggtcttgaaccttactctggttagttttatatcatgcttttctggttaagagcaagacgtttcccatcttatttattatttgaaaatctgttctgtatttgactttgtttaatgatgatactgttgatataataggaggatttctacaattgtcttcctctagcctagatataatgtttgatttatttttttcgtcatctctttctgattaccaggtttcaggtgaaaaagaagcaattcttccgtaatt

SEQ ID NO: 54002 - DNA, 627 bp, Populus trichocarpa
  Intron number 1 from transcript POPTR_0003s01510.1 (locus POPTR_0003s01510) derived from phytozome v7.0 (chr-ID scaf fold_3; pos 1368724 to 1369350)
ttgctcacttgcttattgaaaagggttatatcaaggtcccttttctctctctctttgtttttcgatttctttgtgggtttgatagagtactgtgtgcgttcgttctctttttgttggaatttgttttgtgtctgtgcgatgttacttcatcatgttttggattttcttacttgattttcataattgttcatgttggtctagttttgcacttcttctttttttcattggaattagaaacgtttgtgacctcgactggttcttggttcttgtcatggatattgtttagaaactgctaatttgatcaatccatgtattgtatttacatcattaaaattttaaattagattgcactgtcgtccaagatgttctcgtatttgaaatttgtgcatcatgcaagaaatagacaagaagtggaaagcaaaaatgaatccacttctcttcatgtcctcgtatatgatttttcttttctgctgtatttaggttgtttagtcaaactggggatcaataattctaatctttagcttaagcctctgtttctttctttcgtttttctctttccatttgaagattatttttcttatgttctgaacaggaaaccacaccattggctggttcctctgctggtgc

SEQ ID NO: 54003 - DNA, 1017 bp, Populus trichocarpa
  Intron number 2 from transcript POPTR_0003s01510.1 (locus POPTR_0003s01510) derived from phytozome v7.0 (chr-ID scaf fold_3; pos 1369425 to 1370441)
attgtcggctaagagggactgcctttcggcttggggtatgtttctactccaatactttagtagggttatcagagcttgcatgcaatttttcttaacttaccaacagttaatatctgaattgaattgtggcattcaatctttaagatttgctgtgtctgcttttcttaacttaccaacagttaatatctgaattgaattgtggcatttaatctttaagatttgttgtgtctgcctttcattctaaagaattttcactgtcagtgacttattcttttaatgccattcggctatgagtccatgtttcaatacctgagtcaatccttctagtgttttgaccttcatcatatgccattttgagggcagtgtaacaatgcattgtacactataaagttggctttacagtatgaagtaattgtttttatgagatgaaacaaatgggaaggaatgtctagaaaatggaaggcatatgaataagagatattaactcaagcaactagttaacaatgtctgaagaacctctgcgggccatgaaatatcatgcttgcaaataaagttattctcttttgctgctttgattgctgtgcaccgtgctgtctcgtatgatccttggtcttcatttgctgaaagtagtgatcatttgcatagcttagactgagcaggatgcttttgcagatgctgattctaaacttgcaattaacagcatgcttatctcactacttcgaaacaatttgtcatgcaatgtaaaataccttcaagggcaagtttcataagtaagtacccttaagggaatgtttataatgtacaaagaataaacatgatattgggtttagcgtgagattttggccattatgcaactttatgttagctctgtgaacagtaaaccttttgcaaattaataaacaagctaggatttcctatatgtttctgctacaatttgtcttgcaatgtgaaataaccattgattgtactttcttttccgtaggctgttctgcgggatattcttgaaaagtttctgcc

SEQ ID NO: 54004 - DNA, 827 bp, Populus trichocarpa
  Intron number 2 from transcript POPTR_0006s01820.1 (locus POPTR_0006s01820) derived from phytozome v7.0 (chr-ID scaf fold_6; pos 1094317 to 1095143 reverse strand)
ccttgcagaggatcttgctgaggtattaacctgaaaagttatcaattttttggatttttgagtggatttaaatgtggctggaatgaaatctaaagattgtgcatgtataagttccttgctttctagtctatgggagagtccttgaagataccaatgaaagatttggttgcatgaaggagcattaaggttctccagtgattattatgctagctgtatgtaattttccatcttaattagtatatgtagttttagtgtaaaatcagattatcttcagattattaaaatcaatgttgttcaaattataaggtttgttattgaacggtctcaagcatagttataatacccgattcaggatcccgacccaaggcttgaaaccccaggtcaagtcaggggtagacccatcaacttgagcattgatttttttttacatatataaaaaaagaaggttttttcacttgactagtcagggccattcctcggggttggtgagttaccaagttgactagttgagcgttggttctcaagcatatcttttgatgtcatatataatgaattatagatcattttacatgttggacgttattagcattattgtgtttctttgcaatttgttggtatttcaggcagcttgtttattgagcagactgcatttttgtttgaagtttgtttaagttggtataggcgtgtggggttgaattccccagttatctaccacattcgtgttgataaaatcttcaaaattcaaacaaggatggctttatgatagtatttggggtgtacagttgtttattatatttttcttcttgagaaggtgaaggcagataaat

SEQ ID NO: 54005 - DNA, 905 bp, Populus trichocarpa
  Intron number 2 from transcript POPTR_0013s02900.1 (locus POPTR_0013s02900) derived from phytozome v7.0 (chr-ID scaf fold_13; pos 1752822 to 1753726 reverse strand)
gaacagaagagaaatctccaagtacctctttcaaggtatcacttttattcctgccttcgatgtttctctgcctgttttcctcttcagatatcattttaagttacctagagagaacccatcaaacattttttttgttattctaaggtttttaatagaaagcgtaaatcttgaaataaaaacattgaattgtgcaatgactctaaagtaggatgagaacttgattaggcgattaagctatgatgttagtaaggtgatagtctctctgttcgagtgccgaatgcaactgctacaattatacattcttttgtcatgacagattcataaaataatgtctacgcaaggcccatcctttactcctttttttggtgtgtttattatagggtacatcttcttttctctaaatgaattttttttttgttatggcgttggatagttgaaacggaatgcaactaatattctcatccctaatgaataattttctccactggggattggtgttagttaagttaatgggtttttgctagagcttttggtaatgacttcaaatcaatgagatggaataataagtaaaactgttttgatttattctatggaggacttgaaattcacctaaaccactaggtaactgctgatgtttagaaaaatttaccagagatattgttgtgctagttatgagataactgcacccttgtttcttgctattttggtttggtttctagtggctggttttgtttattgcctgttctaatgtattttcttttatttggatattaccggtttgattgaataatgtgagtttttttctagttaaccaaatgggacaaaggaagattagtcttatcatgtaccatatatcagcattcactcatcttgattttgtcttgaatctgtagagggagtttgct

SEQ ID NO: 54006 - DNA, 881 bp, Populus trichocarpa
  Intron number 1 from transcript POPTR_0003s05850.1 (locus POPTR_0003s05850) derived from phytozome v7.0 (chr-ID scaf fold_3; pos 7224996 to 7225876 reverse strand)
catcacctcgcagattgcatcgtcagtcaccggtaagtcctccgagtattttttcgtataggcacaaatatttgcttgcttgccactaaacactaattgattcgcaagtaatttgattaattagtagtccacctcttgcccaaatcttgtttgctagatctttcatgtaaaactcccctgattaacatatattgtaatcttgtttgcttatgttagtacgctgatcaactagttggtagcattatatgtcaggaacacagttaaaatcatgttttctttaaaaaaaataattattaatgttttttttattgttcatacatgttgaaataaaaaataaattttaaataaacaattattatcattcttcttccgaatattcttttaattatgcgagatcagtttgcgaaccaaaatcccactccttgaagggatctgcaatgatccaagcattgatgttttacctctttaattagtgtttaggtcaatgaattctgcctctcttcaatgctgtagtcatattcaatcgtttcatatctctctcgagatatatatattccaaatccactgttagagcaccggtttgagaaaaaaagtatgtagctgtaaaattctcattaaagaatttattttatattttgaacctttatcatacacattatatcttttaaaataatatataatataggaggtaactaaaagaagaagaaaaaaagagcatcttcttgaacatatttgtaatcaaacatctgctgtcatttcttttttctttatgggttgaaaaatacatcgtaatcacatggcacatgacagatgaattattgctaccacacatcaagaacttgaaactaactaatggccattaatttcaggtttattgccta

SEQ ID NO: 54007 - DNA, 837 bp, Populus trichocarpa
  Intron number 1 from transcript POPTR_0003s16830.1 (locus POPTR_0003s16830) derived from phytozome v7.0 (chr-ID scaf fold_3; pos 16347138 to 16347974)
ctgcactgagacgtacgagagctagaaaggtcattcgtgtctctgtcttttttctttgaagagccattatatggtgcatcatggaccaaattgctccaaaaaaataaacaaaagaaacattcctccaacataacttgccgagggtttgatatcttgatatatataaaaatgctttgcaccttcttaattttattgacacttcggagctattatgccgtgcatttcttgcatagacaacctaactccaagtaaacttggaaaagatctcagcaacatgtctgcgtctcttcatttaagcaccttcttggctattgatcaataattccactaactggcacacttcacaggcccatggtagtcaagtacttgcttgtgatttgtgtattaggaacacgaaatcaaggttggttttcaatgctgctagataccaaacaattccatgtttggctacacatgtggacttctgtccgagattcacatgggacatgtggctgtaatggtttgcatttagctggaggggtagtcaggatgcccacttgctgaaagaaaaataaagaaataaataaaaagcctgtattccaagacattcctgaacttgttagtgtggtctcataattagctgacttaagaggaagaactagatgcttagccttgatgagcaacttatctatttcatgattacctttagttatcgttgggggtttctccttcaattaaggtctttaggtggcaaatattcatttgaacataagaaagttgccatcgctctatgctttttgaactttcactctgcattttgtaatttcatttgatttgtgtttgtttcagacggaactg

SEQ ID NO: 54008 - DNA, 793 bp, Populus trichocarpa
  Intron number 1 from transcript POPTR_0006s12960.1 (locus POPTR_0006s12960) derived from phytozome v7.0 (chr-ID scaf fold_6; pos 10221219 to 10222011 reverse strand)
acaccgaattgataaggtttctttctttcttttgatctaatcaccaaaatacatgcttttattgttggtaggtatgattttggtaagaaaattagtgggttttcttccatttcgtaaaatgtacaatgtttttgagaattcaatgatgttatattacacaagcctggagctaaaaaatgccctcaatttttaccttttagttatttatttcttgattcgcaaagagcttttcagttggctttacaaatttcactcgtattaacgtgattatgcttgaattagagagtcacttaagtggattgattgtatgattatgcatgtagagttacactagcctgttggctgttactactaattatgattttgttagtccacattccatcgcagaccctaattaattatgtacaactggagttaaataatgaaccaatttgcaacagagctgaattctgtccttaaaatgaaaagggctttgggttggttcaccagcttatatgctatttttacaatgtttgcttcttttctagtaaaaatcaaagctgtcatcgattctgaaagcaagctgaataactttgtatattttttgttcccagtgcagcagtagaatactttccatattttaattgttttacaatgttgaatgcagtaattcttataactggtgttgtccattttagtaattaaggcgcaaatgcaattgttttaccttcatcctacttcttagctccacggtgtttctgtgctttggaattttgtagaagacagttcgatcttgccaacagggaagcattgg

SEQ ID NO: 54009 - DNA, 951 bp, Populus trichocarpa
  Intron number 4 from transcript POPTR_0006s12810.1 (locus POPTR_0006s12810) derived from phytozome v7.0 (chr-ID scaf fold_6; pos 9976504 to 9977454)
ggagtttggtttggacattgaggactatcttattggtaagtaattttttgaaaaaaaaagcatgtttgatttgtgtgataatgtatatggattaggtaattagactttgttctcatggtgaaaagtgggtttgcttgaatatactcagggtttctggtatacatgtaaatatatgttcaaattccaaagcaagtaaaagaattcaaatattcacatgaatggcatataaaaattcaggtggtagtggtgtctgattgtttgtgattgcgtgttgacctgcttaggttatagctgcaggttttgtccacttgacttcatcagccaatgctgaccagtatcaggaggccactctaatgaaatgcttattcctgtgaattaaataccaagtcgaaatcaaactgtttgaaggttgacaggcccatgttagaatgatatagagaagattgtcatggctcttgcccaagaatggcatgcataaattgaaatggttcaaattttttacttgtcagaagaagtaccaagttgaaatcaaatagtttattttgaaattctgggcactaaacccatgattcaaactcctaaacctttcctttgtttaaattcttggataataaattttcagttcatgcttgtgtgttgtatataatgccatataaccaagataccgccaatgaatcttttcatgcatgtatctgttacattgttagtggcatgcgatataccttcctctgctaacaccctggtataaagatatttagaaatatggtaacaaatcattcctgataacacctgtttcagttattataatatgtaatacctatcttaattgctgcctgtttccagataatcagtctttgtttgtaggatgtgaagtatcctgttgttggtcattctgttctttgactggaaatgctgatgtttaaattctctgtttatacaggtgtttgcttt

SEQ ID NO: 54010 - DNA, 262 bp, Populus trichocarpa
  Intron number 1 from transcript POPTR_0018s02080.1 (locus POPTR_0018s02080) derived from phytozome v7.0 (chr-ID scaf fold_18; pos 1847241 to 1847502 reverse strand)
cttggtaacctcaaattcttttgagttttcgctttgcttctctattaaactctgatgtaaattctattatttttcttaagtaaatgctgggaacttttcttgggactaaaaatgaggccattttcttgcttctctgtttgcttcttcttttttttttttttcattttatgtgtgtagtttaatttgattatgtaatctatattgttttttgttcacaatggttgatttttggttgttttgtagatcagaactggctgctgta

SEQ ID NO: 54011 - DNA, 492 bp, Populus trichocarpa
  Intron number 1 from transcript POPTR_0003s19110.1 (locus POPTR_0003s19110) derived from phytozome v7.0 (chr-ID scaf fold_3; pos 17922512 to 17923003 reverse strand)
tgtttcgttatttttaaaatcaactatttaataaagtaataatatttttttttagatttgattaataacataataaagtagaagattctcaaaaaaaacaaaaacctgaccctattttttaaaattaatttatcataaatcaggtttaataactatatttatatttcttaataaaaaaatgagattatttttaaaagccaaaacagaaaattatcttgtaccttttagacctttgaaagcccatgaacgatttataggaaagggccaagcccaaaatctgtagtgcagcgatgcaaaggaatcagtgaggaggtcggaaagagcgggggctaactgattttggttcctgactcgacagaaaaactaaccgaacattagttaccgttgacgttgaattacttggtgaaaagtttcgatcttgatttcctaattgcatactgatttttctatacaatccggactctatactgattaatttcagtctatataaga

SEQ ID NO: 54012 - DNA, 744 bp, Populus trichocarpa
  Intron number 1 from transcript POPTR_0006s23640.1 (locus POPTR_0006s23640) derived from phytozome v7.0 (chr-ID scaf fold_6; pos 22354798 to 22355541)
gaggctttagaggaggtcttgcctatcaggtatttttataaataaataaatatttcttttggctttgcgagaaccattttctttttcttttttacttgtagtttggaataaattagttcttttcggtaaatcttaattaattagatgtttttattactgcatttgatgagaacttgattttctttacatgagcgttttgctcttgaataaggggatctttagaagtgaagatctgagcttttgattgaatgggatatgccctaggtatttagttattttcttgaccaaggaagcaagccaatttcagtcactgctaccgttgagtcttcatttagatcattattatgtgctgggcagattttttttctaattcctatgttctttcctttttcatggttgtctctgtggaaatagcagatgattttctgtttttggctagtttctgctttgttatgctctttaaagtttagaattacaaattgtttgcaagatctgaatagtgaaacttatttcctctgcaagatatgtatagtgaaacttatttccttagaatggcatcttacgagaatagcactgacaacagtgggacatttcatatacagattggcatgtaccagatttctttagggtttgtcttgttttggatgtttagctaattgaaccgtggaataatcatgttgttttgcattattttggactgatgattgagaaatgtttgcaggagaggtatatcaaatttctata

SEQ ID NO: 54013 - DNA, 742 bp, Populus trichocarpa
  Intron number 2 from transcript POPTR_0003s17650.2 (locus POPTR_0003s17650) derived from phytozome v7.0 (chr-ID scaf fold_3; pos 16954758 to 16955499)
ccgaggagtatatcagcagaaacaccttacaattggtaacctctccctctcttgctatggtattataaatctttttcttttttgttattgatttgggtcgtttgtttggtttctgagaaaattcatgacaagtaaaaaataaaataaaaataaaaattggaggttgctatttaagatgtacaaaaggatcatgccttaagctacatattgctttagtgaatcagcagaaactttgttggcctttggagttgcttcttgtatgtgtagtttttgaaatctagtagcttaattatgcacagcagcattaactctgctagttatggctattgtgttgtgaagacttcttggaaatgaggttttctagatgagtggttattctgtttgattgattcctgggctgctctgttaagaagtgatgcaagtttagtggcttgatatattttttcaatcaatcgagtaaggggtttgtatagattgactggggctcccaacaggctgctctttctaaaaggccacatgttacatatagatgtttgaaatcagatatatgatttaaagacccactcgaaatatcatgcctcaaaaaatggtacaccgggtcttggtgataatcgtatctttactagattttgtttagacaagatcattttttctacagtttcaaatacacttctcaacatactttttttttcctcttcaaactgtagtttgattttgatagtgctgccccaccggaacaagc

SEQ ID NO: 54014 - DNA, 874 bp, Populus trichocarpa
  Intron number 2 from transcript POPTR_0019s08120.1 (locus POPTR_0019s08120) derived from phytozome v7.0 (chr-ID scaf fold_19; pos 9542012 to 9542885)
gaggtaagaatttgtttgtctgtaaacaaccattttattctccgagacattgaggctgtacatctgacttttgcaaatctactacagcttctttactgaccatgtcatttgctaagttggtccttgctgattctatttgccaaccatatattttttttctaggttttgctaacaattgctttgtaaagcacagttttacggcacagaagcaagctagttcctggtgaattgattcactccggtttagcaggaaaaaaataattaaatttcacttagtcagctaatcgagctttgggacaacaatttatttgaacaataaaatccaaacatggtttttccaaaaaatcatctacggagctctaagaactcggcatagtttcttgattaattgcttacagttctttgccatcagtgctaatattaactgtattttgatgtgacaagagaacaaactgatcgattcttctctggataatttgtctaaaaaaagaaaagaaaagaagggcaaacaagaacaacttcaaacattcatgttaatcatcaaacatattgagtaatatgatggataagtacagattgtcaatacatgtacccccatatcaagtaggttattcagttgcttgttttttgtgtcttgattcaagtaatggctgatggattattagagcttgaagaggtacagtaggcttgctttgaattttatgaaaagatgcatatgcattaactttaggtactaatttttgtatatggcatacttctttaaatttgacaatcatttgtgtaaacttgtgaaagttagtggcacatgctttatatattctctctttctttacactatgtactcaggaagctcgaaaatcttgcctacttgtga

SEQ ID NO: 54015 - DNA, 538 bp, Populus trichocarpa
  Intron number 2 from transcript POPTR_0006s19380.1 (locus POPTR_0006s19380) derived from phytozome v7.0 (chr-ID scaf fold_6; pos 18437430 to 18437967 reverse strand)
ttgaaacgccggacgattctcaagtgtctctcaaggtaaatgtactttcctagctagtattctccctccctgtcattataatttttcttcattaattccaaaaatcaaccctttgaactacttttcttaattaactggtgatattagcataaaatttaagagtttaggttttagaaattttgaagttaatactttcatatatagtttttttgttgttgttgagtttttaattaaataatataaaaattgaagaaaaaactgttcaaaattaattaagttatattgactttaagaataatatatctctattgatccacaaaaaaaaaaatatttcttttgtcaaattaataattaatgagttgtaatttgcttgttactatcttctgctttttcgtatttgttttgttgtttttggtaggtatatatttcgacagtactcctgttttattattatattttctattttttctgcttggtttgtaagaccttttttgttgttgcatatatttgtagggcatctccacggacaggatcttgg

SEQ ID NO: 54016 - DNA, 419 bp, Populus trichocarpa
  Intron number 1 from transcript POPTR_0048s00200.1 (locus POPTR_0048s00200) derived from phytozome v7.0 (chr-ID scaf fold_48; pos 1545 to 1963)
gggattttgatttagagacggaaaaaggtttccaggtttgttttcatatcaggatttaggagaataagaaagagatgaaagaaagtagattttcttagcatatcgagtttgaagtcaaagtaattgttttttctactttcaaaatctcataaaatgtgaattttcccccattagcttcattttctgtgatctctgtgtttgcatttgctagtgtttctgaggtgaaacaatctttaagctttaaattagagctcatgaggcattccttattacaaccgcattagcttgagtccaaaatatttgtgccattaaattatatgtgcaaagagacattggtcttgtttgatggtgttataaaccctgtataagcccaactgtttgcaggctgccgatttacggatcaatttacaacctcgact

SEQ ID NO: 54017 - DNA, 734 bp, Populus trichocarpa
  Intron number 1 from transcript POPTR_0006s12790.1 (locus POPTR_0006s12790) derived from phytozome v7.0 (chr-ID scaf fold_6; pos 9956405 to 9957138 reverse strand)
tgaggttaagcaatcccgtctaggaagatttgaaggtgaggtttgccggcttctccaggattttgcagctttattttgctgcaaatttggatggtcttgctgttttgctactgatagagagattgtgtgtgtcaatagattgtatcagtatcagtgttaattttgatttcttgatttcactctcacttgattttgaattcattgaaggataaccttggaactgggagaatgagaacggtaaacatcttgacataaattatcaaaagaaagcagacagtattgagccagtagttattgacttgttcatgccttttaatttcgtataggttattcttgttttctattttgcttatgttgcatgaacttgggaaatcttgttggttatcaatttctgaatccggcaagaagtgaaccacaagcactgtctctctgtcctgttcttttctttcttcttctttgttttttaagaactttttttgcacaaatcaatcttgcgggtgtttctggttggttttcaaatttaacctcacaaaaatatgcaaagagagaattttgagttccaactattgctaatgatctgatccactgtatcctgagaatgaacatcatattttgtgcagcttttgtttttatactttccttttgcattctattttgtggacacatttctaatgaacactgttgtttttgagtttttaggttcctgcatcttatcaaggctttctttctttgct

SEQ ID NO: 54018 - DNA, 631 bp, Populus trichocarpa
  Intron number 1 from transcript POPTR_0006s13570.1 (locus POPTR_0006s13570) derived from phytozome v7.0 (chr-ID scaf fold_6; pos 10793651 to 10794281 reverse strand)
agcttcaatctcctccacatcatccaacacagaaggtattacaacaaggaacacttctcttgtttccacgtgtcatttgatgcttatctctctcaaaattctttgaaatgttctggttttattttttttgttctctcgtgaatctcatagttgacggtgttgcatgcctataacagtctagattgatcccttttaaaaaaaaaaaaagaaattcggatgctttaatgatagtgaatgaaatgcctagttggtttttcaagaaattgtgagggtgatatgtagagattatcatgagaggtgtaaaattgtgatattggtacgtttaaatgaaaagagagagctatgggaagtaggattggaattatacgtgtgaaggatgttgttgtccttgttgagtaggcgtgcgttggaggttgaatccaggcaagttcaattccattactttcaaggtttcttacattcgtgtttaaagatcttgtttttggcaatatgttgtcccttttcttttttaatgaatgaatttgtttgcattgagtgttttcattttctccgaaatggggattttcgatgactgatttgggggcatttgagaatgaagaaattgttgttgatgatgtcaacagggacggct

SEQ ID NO: 54019 - DNA, 934 bp, Populus trichocarpa
  Intron number 3 from transcript POPTR_0003s10590.1 (locus POPTR_0003s10590) derived from phytozome v7.0 (chr-ID scaf fold_3; pos 11526106 to 11527039 reverse strand)
tcattcggagaactttactatcgggcaaaatcaatgtaagtttcgctgtggttacttactgaaggacttttattggttacaagtatagtgaagtgttgatattagtgaatgccgggttttttttagaaatcaagtttgtttttcttgaatttggcaaagaaatttgtctcagttaagatcatgtgctcttatactgcagcctgtagctcaatttacgcagcttagcagaattattgaggatatttggttttgtgtttttgacttaccaaatgtgcacctcctcgcaaatgtaccgcatggatgactgatcgaaccttaaaatgtgttttcagaacatttcttttctgccctttcagagtttaggcattatcgactgaatcaaataggatttctgcttgcttttgttgtgcatgggatcaatagatgtgtattctgccttcccagtacctttgtttcccattatacaagcaggattagaaaagaacataccaattactcttgtttcttgtatttggcaaagaagtagacaggtacacttataaccctgttatgtgtaatactataatttcatagacattctagcagttacaaatgagaacattcagtagtttccaagacaaaccagagtgaattttttttgttatttttgtttcaataaaattaaggttttcttttgactagaatgatgagaacaatcttcagtcagaattgtgatcttctaaagtcaaagtatgctgttcgtgcaagtcattgcagctttccttgatgctagcatttttgcggacctgactgcaattgcttggaaaatgctctgtgccttgcattctttataacatcacacatcccactaattttgtcttgcaccatatcattgtacattttttcttgttctctttgtaatatttatcttacagatcctgaattgggtggacag

SEQ ID NO: 54020 - DNA, 962 bp, Populus trichocarpa
  Intron number 3 from transcript POPTR_0019s10070.1 (locus POPTR_0019s10070) derived from phytozome v7.0 (chr-ID scaf fold_19; pos 11683878 to 11684839)
tcttgggaaggtttgcatgttgcccatcttctagaatacttgcttttaaagttgattttctgcattatgagagttgttatctggtggccatttaattgtttcaactagcctgaaggttgattgccatttatttgtattttgttacctgctttcttttaaaatgaacagtgacccctccgtggttcatgtgttttgcttaaaatttgtggtggtgtaattatgttttctattgagtagtactaggaaggctggaatggcatcatgctatgtctgggttgttcttctttgccctgatggtagcttgattccagttttgaacagtattcttattgacaaagcatgcattttttgctgatatagaattcaaggtttatggtcatgatgtattttttttttcaattgaaacatccaatagaataacaatatttttgaagttgtagttatcttcaacaaaattgccgaaggtgtctgaaaatttttcttggaggctattatgtaaatgtgatgattaatcttgcatatttcttttgcttgaaatttcaaagattatttatttttgcgagaaagttttgaaacttattcttggctctgctgtgtcttataacattcataaaaacacatgtaataatgggaaaactttgctagaatgtatcctactatgtaatagtaatcttcaacatcatcaggctagggttgtgaattttttttataaggattttgattaattagggtttcgtgctttgataccatgttgtaaaacaaaaacagatgagagattcaaacaggagttttagatgtgaaaagtactgtccctttgctcttcactgatattgtattggaagagtaagtgtaagatgtacattagatgaaataaaagtgctgacaaacttagctgcttaatattaatgtgattgtgtcaacactttctaattgagattcaattgccatgcagttggttgggg

SEQ ID NO: 54021 - DNA, 992 bp, Populus trichocarpa
  Intron number 1 from transcript POPTR_0006s08450.1 (locus POPTR_0006s08450) derived from phytozome v7.0 (chr-ID scaf fold_6; pos 6165541 to 6166532)
attccattcacttgaccgacaattgcatccgggtactacgctcatttgattgtgtttttgtagatttatatgtttgtttttctttttggcttgttaattgttaatgggctttgcttcaatttattttttttaagagttagatagatagatagatatagattagtatgcccatatgacagacacccaagaattggcggctagcaaaagattgaaatttttggaacgtcaaatgctattttcacataatataatcccattgaaagtctattatacaagaatttcgtctgggttgcccccccaccccctcctttttttggggtcgctgtagcatgcttgatctactagagtgaatctaagtgttcatcctcatgatcgcgctgccactttattattagtctttgatgctaggttctgcttcttagcttattctgctgctcctgcatttctcaatattatggcatcttctttcctatatcaatgctttgttggatctgtatctgcctgcagaggtttactccttttcttgctgttttgttgaatgtttttgctgctgtcatttcccttttttcttcttttgtatgctgtaattcagagcaagggtgatactactaatgtgattaattccatgctgacctcttagggcctcctattagttttcctaattctagttctgtgctgtatcaatttttttcctcccctgaacctcttctgtatctttgatcaatcctagtggtgtgtcctacagcttggttttttaatcttattcagccttctaaaaaaaaatataaaactgtcatgcccatatccttgtttggtatcagttggatttttaaatctcttcaataaagctgtttttatttatgtcacacatataacttattttatgcaaacacatatcagcctgtttcttttgcaatttattctagcttttccataaaattaaggtctggtttacagagactgaaagaactgcaaaccagtgaaggatcggc

SEQ ID NO: 54022 - DNA, 709 bp, Populus trichocarpa
  Intron number 1 from transcript POPTR_0003s12170.1 (locus POPTR_0003s12170) derived from phytozome v7.0 (chr-ID scaf fold_3; pos 12838119 to 12838827 reverse strand)
acgtttttatttggattcggctatttaattggctggtatgtgtttttaattttatttatttttgagaaagaaagctcactttttatttttatttttatgaatcagttgtttcttgattaattggagctgagttataggatttttaattggattacttgttaattgccatgctttgatgatttgctgcttgattaaatggactcggcgtgctattcattttgatttctcttgaaggcttcaaattaatgcgtaaattgcagaaaataaaacatgctggaggttaaatgatagcattgaatttacttgaacgcatgccgtagtttgaaatgctgaaagctcaaatgctgcatgttttgttttatcttgttcatgttgggtggaagtaggagctcgtgaatgttgtatttttaattatttattttggaaaaaaaatccatatataaggagggatagaagctgcttttagctagaaaaggtgtcatcgtcggaatgctgaatttcttcattgagcagctgttttctgtgtgtggagaatatggtactgccttatgaatctcaagtccccttatagcttcatgtttgttatttgatgttcttttgaatatgagtatgaaatttatactagttaatcaaatgggactgaagaaatcttttttctttttttgggattttatttctgaattcttgattattgtatccatgtgtagcc

SEQ ID NO: 54023 - DNA, 688 bp, Populus trichocarpa
  Intron number 1 from transcript POPTR_0003s11430.1 (locus POPTR_0003s11430) derived from phytozome v7.0 (chr-ID scaf fold_3; pos 12237347 to 12238034 reverse strand)
gcgcctctgcagatccctcgctgcttttgattacggtactcaacctattcttccttcttcttttttatttccgatttttatctccactcgttccgatctgtctcgttaatatatcgaatgcctgtatcttcttttttatttgtttctcattctcattctcattctagctctaaagacccgttcttttttttttccttgtaagattgtaaacgtttcttggcttcaaagtttttgggctttagctcagtgatttaaattctgtttggttactgggaatgaaagaaaaacatggagaagaaaaggaaatattaagagaaggggttccagatattgatttggttgtttctcgtatagctatttaatgggctttaatttttttttttaatttctgtaaggggttaactatgactctgttcgctgggtggccaaagatcagtttgttatttaaatcgattttattgttttatagttcactagctgtttgttggcatataaacgcatatatcatgaaaacctagaatggaatggtgtaacattgttcaatatccgccctttattgaacaacattatccaaaggctgaaaagccattttcgtttgaatgtttatttgttattgtgcaccatatttttgtgcatccaagacatctgctgctaacaatatctgcaatgtatgtgtgttgcagcaaca

SEQ ID NO: 54024 - DNA, 682 bp, Populus trichocarpa
  Intron number 1 from transcript POPTR_0014s15010.1 (locus POPTR_0014s15010) derived from phytozome v7.0 (chr-ID scaf fold_14; pos 11113769 to 11114450)
ggtttggatcgtcttcaggacttgctcttggtcaggtctgcacatgagttcttttccatgtccttcctctctgctatttgtgccttttaagctttatgatccacttttcttaaatatttgtttggttattatacatgattcttcatttcttaacgaccccatactaatttccttacacccccttaacatttttcaacacatcagatctcttcttcttcttcttcttcttcttcttcttcttctgctactgttcaggagttaaaaaggtgtattatgtttgttatttggcttttagaaggacaaatttgttttctttaagcaaaatccttctcgatacttgcaaaacgcgtaaagggctttgctcttttcttcacacggacacagagggagagagagggacttgagaatctattattttgacatgggccttcttgtcctctacaggatctaacaattttctacttttaagcagttttcaaacgtggtttccccacaagtccttgacttttgaatattataaaatatccttttagcacctctctctcatacatatatgtagctatatgttggcattagaacattagctttctgtgtgtggaaattaatttccattatgttgttagattgaaaaacaataagcttcaggaatcttaaagatctgtagataatgttccagccaaac

SEQ ID NO: 54025 - DNA, 1013 bp, Populus trichocarpa
  Intron number 4 from transcript POPTR_0006s09080.1 (locus POPTR_0006s09080) derived from phytozome v7.0 (chr-ID scaf fold_6; pos 6706505 to 6707517)
ctagtcttgctaaaagtccaagtgaacaggtaattagtttgtgttctgcataggtttcccccagagttccctaaagtttctaatgtgtctgaaatttttgtgttgcttgtgctgcaaatttagttcaagaattaaacctctctacatgcttggatttttactcaaacttgtacaatttaagcttttggctgcacaattttcttattgaaaatttcatgtctgcatataaaaatatttgaatttgtataaattgatcgaaacttttgatccatttaagttatttgagaatatgttctcaagtagaagagtcgggaattgacctcctgtaacttgatccatttgaaactgtattcttctattagattttgtaggcttccatccatttattaacggattttcgcatgtgaaaaacatgaatttgatttttgaaacagaaagatatttaaaaagcactaagaattattcatgaaaaataataattaagtttttttttccataaaaactgtaaaactccaaaaacaaaaatgatgaatattttatttatatggagaaattataattctttttaagtttttatgggaaattttatttttttattttacatggatgttttgtgtcactttttaaatatatattttttcaatttttatggaaaaaatcttgttgtttttatatttcatggattttatacatatatttttatttttttttgttttatgctcaaatttcaaattcatttaaaggttaaaaaaaagttaatagatcaatttgtgagtttcacggacaaaaatccattatttaatggacacaaccccataaaatctaatagaaaaatataattttaaatggaccaaaatcacacgaagacaatttcaactttttaattgaagaaccaattctcaaacacttgaaattcaaagaagcttgaatccatttattagtctttcaatttcaagtactgttatatgatcccataacatcagtgttttttttgcccatggcagcgagctggt

SEQ ID NO: 54026 - DNA, 851 bp, Populus trichocarpa
  Intron number 3 from transcript POPTR_0019s03530.1 (locus POPTR_0019s03530) derived from phytozome v7.0 (chr-ID scaf fold_19; pos 3615048 to 3615898)
actaggctcatctgtttggagaatacacaagccaagtgagtgtctttattcttccatgacattaaaatattttggtggagtaactagtttatgttgcacaatggtttatcccacttgtttcagaagacttggatattctattactctaatatatgtgactcatattttgacgttggcatgttcctttctctccacttgcatgtgaggactacattgatttctcccttggttgtctatcaatgctagggagcttcaccttgatccctgtaattttctgtgagggacagttggtagatttggtttaacactgcttttgtcttttcactttcctgttgctttcttagtcttatgctaggcgcgctgcttctaataagtaggttggccatctgcaactggagttggtaacttctgtaaattttgaacgaaaagacggaacctcttctagctcaactgggtggaatttaatagaaaattgcatatctaggattggattaaaaaggaattattagtgcatgtaagaacaattatattgctttaaaaccgaatagagcatcggaatcgatcaatgtttttagtgaacttcaggtgctcttcttctatattgacttggatatgggatttttgtcgaacttagttaatactgactagcatattactaataggctgttatttaataattgataattgcattatatttctggatattctgtttttcttattctttttaattttctgaaattttggtaccattggaaagagattcatcttttcttttactgtatcttctacatttttagttcaactgttatgtcttatgggatgatctctaatcaatgcagctgcggtggtag

SEQ ID NO: 54027 - DNA, 762 bp, Populus trichocarpa
  Intron number 2 from transcript POPTR_0019s02740.1 (locus POPTR_0019s02740) derived from phytozome v7.0 (chr-ID scaf fold_19; pos 2536200 to 2536961)
tcatttcctgggggtgtgtgccgcgttattgccatgtatatctcttcacttaccactccatgcttttattttcaattttaatttgaggtctgaaggattctgatggggccagtccagggaattaacaaattactaactgtgtggctaagcaggcacactcataattttgctcgattctttttattaagttatataccaatatcatgtatattttttttatttcaacattaaatatgttaaggatctcaaggaaaacttaatcatgctgaaaatgtcgtgaatagcaaagaaaggatctccagcaaagaaaattgagcaattgtcagaagtttaggcttaagagtttgaagaaaagctgagtttgtcgaaaaataatataaatcttattttaagatcttatttaataatttaaatttttgaactaaaatggttatttgacataacaatatagttttatgggccaagtaatgatgagttcgaactcttattattctatttgataaaaatcaagtataaaattgtatggatctctaatctcgaggttttcattttagatgtgtgttagacaatgctataaatcttttagcataagtcaaaaatttggttttctattccattggctgttgtagttatgtcatgtattttcctgacatatgattgttgatttgcaatggttgaaagttttgaattcttaccttgtattgaggaattgatgggtcccagtgttcttgcaatgcagatatctcaaaaggcaagatcttg

SEQ ID NO: 54028 - DNA, 244 bp, Populus trichocarpa
  Intron number 1 from transcript POPTR_0013s15460.1 (locus POPTR_0013s15460) derived from phytozome v7.0 (chr-ID scaf fold_13; pos 15433203 to 15433446 reverse strand)
cttgcagaaagatccacctacctcttgcagtgctggtatgcttcctattcttttctcttttcccttaaaaagaatatcatctttaaagctattttctctttattattaaattatttgctgacccttttgcacttgagagctgattttgtatatacttgtagaattagagggaaaagtctcgatctttttggcccgttcacttgttttttgactttataaatggttggaattttaggtccagtag

SEQ ID NO: 54029 - DNA, 722 bp, Populus trichocarpa
  Intron number 1 from transcript POPTR_0013s03790.3 (locus POPTR_0013s03790) derived from phytozome v7.0 (chr-ID scaf fold_13; pos 2448760 to 2449481 reverse strand)
caaagctacaaaaccccagatttccaattactcaggtaaaaaaataaaatctgaacttgtctttgttgcttacttttcttgctcaaaatacatctttttgtgaccaagatacttgcatttttagtttcttgtttctttttaggtgttagggttagaatttgatacgggtttgttttaccataactgaagcctctggttcagaccctgttatgaattatatgttattgggctgttggtatgctaaatttcaaatctttgttcaattcagtgacatggattattaccttgccctttgtttcttagctaattctgaaaacagctgcttgttcttgtcttctcatgaattatgttcatgtaattttcagtggaacttttaatttaccctagtttgttttcactagctgtgttgtgctaattctttccaacgatatgaggtcactggtcagtttattgtttctcatgtgctctttcttttctattttctaccataagtaatatccccggatgctctgatgttgttaagtcaagtaaaatagtatttttttttctcttcaaggaatatgtttgtgtagctttctaaatattttatttgtcctgtaatttcaacctctctcttgagtaggtgctttttatttggttaattctgatgtataatccctgactatgtttccttgttggtgggattaggatttggctggctggaattcctttttgtcttttag

SEQ ID NO: 54030 - DNA, 548 bp, Populus trichocarpa
  Intron number 1 from transcript POPTR_0006s25280.1 (locus POPTR_0006s25280) derived from phytozome v7.0 (chr-ID scaf fold_6; pos 23690928 to 23691475 reverse strand)
gactgtctctgttgctaggtgagagaaatgatattttcagtttttgaattttttttgtgttattcttgtcttattctttatggctggctggcccatgttgattttagatgctgcattgtggagttttcatctaaagttttaatttttatgccctgaaaattgtttgcaattttgctcaatttgatttttaattgttgctcaagttgtgaattcctggttatttttactggatctttttttttattgtttttattcatcgaaggatttattggtttaataggaagtggtaccagtggtttatttagtaaaacatgcatccagtaagtttggctcgtgttcttctgtggatgtattacatttggtccaaaacaagaaatctatccttttcataaggccctgaatagtttgacttgagaaacccttgattgttggttttgctgattattacatataaaatttgcagaatttaagtttttgattcactcaaaaatattgttttttgttatgttacagtggatatactttgttgagggatccacgccacaaca

SEQ ID NO: 54031 - DNA, 402 bp, Populus trichocarpa
  Intron number 4 from transcript POPTR_0006s29390.2 (locus POPTR_0006s29390) derived from phytozome v7.0 (chr-ID scaf fold_6; pos 26763489 to 26763890 reverse strand)
gacgccaactgtaagttttcatatctccgtaattatacttggtcgtttttgtacctgtagcctaattgattcattcacttgacaatctaaaacaaatgtgagaaaatctttgtaaatagtatactttgtgccactgatcctcctaatttcaagcattctcttctggactaagccctcacttcagaattggtagaattagtaatttgattgcatgtcttgtattgagtaattgaggtttgcaaataggctatacaactctatttaatttttacttagttgtaagtgctaccttgttttctgtgtaaactcatttttcatttttggatgtcattgattttatgtttttatactttattaatatactttccagttacggtgaggcgcttaaagtgaattgggcat

SEQ ID NO: 54032 - DNA, 554 bp, Populus trichocarpa
  Intron number 1 from transcript POPTR_0003s17170.1 (locus POPTR_0003s17170) derived from phytozome v7.0 (chr-ID scaf fold_3; pos 16611848 to 16612401 reverse strand)
aagcgcagatcaccgagcaagattctcttcttctggtacacatatatgatatatcaacgatttcacaatgcgagtttcactttttgagctgttgttttcttatcaaattttcagtagagtgtacttgtttgttgtttattcttctaaattcatgattatttagtgtgattagcccgtctaaagaaagtttcgtgaagcttgtttgttcgtatttgaaggtgctgtttggataaaatttgaaaaatctcttttccgatttatttttctgtttgatcaagtagatcaggttagaaaaacctttatgtttctcaaatatgagtcatagacgaaactctgagctcgattttggcttaacacagcaaatcatcacgagatctcacaattatttgacgacgcgttgagtaattgatgatcattagccgcgaaatcactcatgtaccatatgctaattgtttttgttaacgaaaagttgatctaatgttatctgatggtttcgtttctttatttgttgtggtatagacaaggaacctgcttcgtattgctatattcaatat

SEQ ID NO: 54033 - DNA, 536 bp, Populus trichocarpa
  Intron number 1 from transcript POPTR_0013s07940.1 (locus POPTR_0013s07940) derived from phytozome v7.0 (chr-ID scaf fold_13; pos 6877077 to 6877612)
ttaatcgaacttgttagaggtatgcaagtcaacgatccaaccccagaaatccaaaagacaacccatttgtgactaaataaaaattaaatagagaaaatattaaggtatcgaatatttatagttttaaaaataggaggattaaattaaactttttatatgagctttaaaaccatcactcatttgtgatgtcttttttactttgatcctctatcttttaatttcatatttagtcaacaagattgattcaattgctcttaaatttgatcccaaaaaaatgtaatcacaaaaataaatttaatgattaaattaaaaaaaatctgtaacagtaaattcacaataaaatatagaaggataagtagaccaaagcaataggaacacaccccaggttgaatggttgataaaaatggaacaaatgtagcccaaagcccaatattatttatcgggccgaagacgttagggtccggaatgaaggcaagaagtaataactaggaccgaaagcgttcgaaccggtttctcgatagttgagaaagatttgg

SEQ ID NO: 54034 - DNA, 179 bp, Populus trichocarpa
  Intron number 2 from transcript POPTR_0018s10130.1 (locus POPTR_0018s10130) derived from phytozome v7.0 (chr-ID scaf fold_18; pos 11112465 to 11112643 reverse strand)
ttatccaggttcttatcttatggttttcaaattttttttccttccagaatgttggtttttgggttcaaaaggtttaattatttatattatttctttgttttcttaatattttctctttaattattcttgaaaattttcaaacaggtttgtggaacagcatatttagtagttggaaatta

SEQ ID NO: 54035 - DNA, 435 bp, Populus trichocarpa
  Intron number 1 from transcript POPTR_0013s10160.1 (locus POPTR_0013s10160) derived from phytozome v7.0 (chr-ID scaf fold_13; pos 10159458 to 10159892)
ggcaagtttaatctttctcacaggtacttgattactcacgttatctcccttttctttaatgtacagtatggtttcgtgtatacccatttccttgagtttgcatggtttgatgtagatgacacgctgtgatctcagtttgcttttctgttttcagcagcaaaatgctgcttttgtattcagaattcttctgtgaagtcttgttgatcattaaaaatcgatttcctggtttcatttgatatgctgggtagtgaatttgttataagatcatccaaaactttttgtattaggctgcttttgattcacgaaaagtgagttttggtacaaatttttttatgtttgtttgttattagaaaagttaatcaacgaaaaatacaaccgattaattacatgtttttttcagaattgtcctggcaccactgactagacagagatctt

SEQ ID NO: 54036 - DNA, 990 bp, Populus trichocarpa
  Intron number 1 from transcript POPTR_0006s10540.1 (locus POPTR_0006s10540) derived from phytozome v7.0 (chr-ID scaf fold_6; pos 7896170 to 7897159 reverse strand)
ctcaagtggccaaaatcatcggcaaacctgagtccgtaagattttctttttccatttgcctcggattcttgtaaatacatgctagtttttggacttgattgttgaaatatggataaaatgttaaaatgttgcaggctattaaaattatttgtgggttcctcggtgcatatagaaagattttgaactatttaaacaattagcctgctacaagttttatagtgggtttttagggtttgattaatgtgtgttctagctggtattaaaattgttttagcttgttagtactaataattgtaaatagtttttgtaatgatggagggggaatggaggtaagtttcttggttactgtgaagtgtatttgtatgctcattttcaaggtgacaaggatagagtaataactgtaaatagtttctatcaactacatcggaaagaatttctggatacttgagttcttgatgtggtatggttctagaatcgtttgatatgattgggctgtttatcatttgattttgaactggataagtttatgtttttactatctagttgttcttgtgttcacaatggactgtacaatgggttttttctttttaattcctgggaggtgtctcttttaaagagttccctcggaaactatgatggtcaaagtgtgatttggttgcagtgtcttgtgtagcttataatacagttgattctagtatcacttatatggccatgaaagaagaaatggattttatctctgtttgcatgttctttgctagtttatctctatagtggacgggaattgtgttttgtacacctacacctgcaaacctccttgtttcaatattttgtgcttttatgtctgttatttttcaaatttttacaacctagaaggaagttgcatatttgcattgattgataccacagtttgctcataatatgcattgatcgataccatattttgctcactggatgtgtctgttaactattttatgtgtgtgattgtgcagt

SEQ ID NO: 54037 - DNA, 506 bp, Populus trichocarpa
  Intron number 1 from transcript POPTR_0019s05520.3 (locus POPTR_0019s05520) derived from phytozome v7.0 (chr-ID scaf fold_19; pos 5883905 to 5884410)
aagagagagagaaaagctgtggcattaatttgcaggtatgttatggttcttccaagttttctctgaacccctgtcattaaattgcctgtctttgcatgtagaaagaaggagtgtgtcagtaggatttagaggaccctcgttgacatgtctacgagtgtatggtagcagagcttttttgagtttttgttgaagtggcctgtgggtggtcttacagagtgtgatgaacacttgagtcttcttaaatttccttctttttgaggattaggaaggaggttgttagttgggctattggatgttgccaggtgtgaaatgcaaataaatgtgcgtagtctgaactggctttgaggaatttttgaggattaatttttgtcctgattttggagattcctttgtagcttgttgagagggtttcttatcttcactatgaagtcataaccatccattagtctgcttttttattttttgctacagggctcaagaaaaacttgagggtttggatttgattc

SEQ ID NO: 54038 - DNA, 677 bp, Populus trichocarpa
  Intron number 1 from transcript POPTR_0006s21370.1 (locus POPTR_0006s21370) derived from phytozome v7.0 (chr-ID scaf fold_6; pos 20422881 to 20423557 reverse strand)
gttagaaggaagactccgtcggaactgagagtaagttttcaacttgggcgttgttgtgctccgtgctttaggtttttaacttggaagttttgatcactttttggatggttggattttgacgttttcaaccattattgctggaataaattcaagttcacgtgtgcttgtggtttgtcttctgtattcacattccttgtaaatattgaatagtaaggacagaaattctgcttacctacgttcattaatcaatttatgatcttttgtcttgaacctctttatttttttatttgggcgtgtgtgtggaaatggtttgtgtgtattgaccagtttcctcgtaattccctgactttcattctcattttatacttgcttaacatgtttacttttgtttcataaacacttccatctgtatgctaatcaaattggaggtgttttggggagattcacttttcattttggattgcaagaactgaggatctatatacaaaatttatatggaagcacattgtgtatttgtttaatgtcgctgggacagtcattattcattaactgcattaaattcgagttaaagaatcttctcaaaactaataaattgtagtggaaaaaaaatcttcacagtttattgtccttgttggcatgcagggagagcagctgaagaggacaaaagttctggagat

SEQ ID NO: 54039 - DNA, 518 bp, Populus trichocarpa
  Intron number 1 from transcript POPTR_0014s02920.2 (locus POPTR_0014s02920) derived from phytozome v7.0 (chr-ID scaf fold_14; pos 2411951 to 2412468 reverse strand)
aaaaagcgcgaacctttcttctccaattgcaacaggtaacctctctaacataatctataacatctgactttttattgtcttctactttaagcatttcatggtaaccaaatttacttaggcaatcttaaagtctttgaattctctactttgtcgatcgaagttggaaagataatacccacttcagtttaattgtttccctttcaattgttttgttacagtgtcatgtaatgttggaaaaaaactgaaaatttgagaattgtagactgcatagagatttttttttgtatagcttaaacatgatatgtgtggggagggttttttttatcccacttttggtggtcagaagagaatttgaaatattatttgtgtaattttaggaacatgaatatcaagaaatgtattttcaggaccaccttttcatgacatcctttggaatatcttttttatttttttaatttcagatatttccaatgaagtaataattctgatatttctggttttgtatagtgacgcattga

SEQ ID NO: 54040 - DNA, 955 bp, Populus trichocarpa
  Intron number 1 from transcript POPTR_0018s11940.1 (locus POPTR_0018s11940) derived from phytozome v7.0 (chr-ID scaf fold_18; pos 12579045 to 12579999)
actctactcaagattgctcctggtatccatcaaacacttgtctcttcttgcttttgttgtttcgtgttgtcttattggcattctattgtgtttttgcatctgggttgtcgtcaattttagttttgatcgagtttttgtgaatttgagtggaattaagggtgcccatttcatcaatttgtggtcttgatctatcgctgttcctaattttggatcttgaattctcttaattgctttattggtggactgtttttgtgtttggtggagagaaatttagggggttccacgttcatcaatttctcaggtttttatctgtgttggtttccgattttggatttctatttctacttccaatttggtacaacctttatacgagaagagaaaacgatgttaaagttgttagtgttgatattgaatgaagaaggcttggtttatggttgagagaaattgcaaggaattgtctttaaacttgctttccttgctctgtatttgtataaaattattgtttttatttcactgctgcttcattttaaatgcacatcttgcatgcttcccccttttattcctattgaatctgatttcttttttaactcaatcatccatttcacttcttttttgatgtcctgatccgtttgcaaccgaatgcttgaataaccttgtggtaggcatcggcccgttcatgttgacaagatacttgaatgtgcaattaaatctgctatggaaataattgaatagaatagctttttaggtagcaaaatatttgaaaatatttttactagaacaatgctactagccacagcattcattatagcctctattagaaaaaatatttaagcttgtttgcaagtcaagttttaattttgaagaaatcagactcttatgtactaatttcttgtggctcttgttttgttttcttctttcagggttggccaacctttcagtcacaggtgagagctca

SEQ ID NO: 54041 - DNA, 902 bp, Populus trichocarpa
  Intron number 1 from transcript POPTR_0018s10660.1 (locus POPTR_0018s10660) derived from phytozome v7.0 (chr-ID scaf fold_18; pos 11547588 to 11548489 reverse strand)
caggtatcattagtgctttatgtttgagtttccacctctcaatcttccaacttgctttctctttttgtctgacttttccatttcctggtatttctttctttcttttttctgaactttgaagacatctcttcatggcgtttgctaaagttctccttcttcttgttcccaaacttgttccatcttattagtataaacaatatgcagtatatcatcttcaatgtttaattaggaggtgggaaggcaggctgtcaactataattgctatttagtaattttcttgtctcatatgtcgaggtatttctgggacccacttgatggttttcatgactgtgatgaacttcatttagaattcagaagccacgctaccatcttccaatatatgtctttgactgattgacctgtgatgaaccttttctcttctttgtctgtccttgtttaccaattgctttagtaagagataagatatcatcttgtcaggttctattttagtaccactgctaaatccttttcgcccctcttttcatagcttagtacttttgatgttgccttgatctttctgtctcaactaaatatttaaagaaacttttgaacaaacttttgaaagccaaatggaccccccttgtgttaatcttttatctgttactttaaagagccttttttctggtgcaaagtcttcacttgttatcaagatattgcaagttgaaggcgaatgaatggtctcttcatgcagaagttctgaagaataaagattgcctctctaagtatttcgtgttatcctactttggctggataataatctactggcagcatttatatttattactttatgacctggtttaatgatttcacatctgttttatgacgtagacatatcttcaatctctcactgtgagactggaaga

SEQ ID NO: 54042 - DNA, 889 bp, Populus trichocarpa
  Intron number 1 from transcript POPTR_0013s11520.1 (locus POPTR_0013s11520) derived from phytozome v7.0 (chr-ID scaf fold_13; pos 12138761 to 12139649 reverse strand)
agggattcattatccgtcatttactctttgcaaaggttttcttgatcttctttgtttggctctctccttttctgtgtggatgttaaaaagaagcatttctttaaaggcttttagatctgggtttttgcgtctcaattttgttgctttctttgttgaaactcgcaatcttgaccttttgttttacatttttccataaagtgttctttttatttgtttgggtagtaaacaaaaaagtctatgtcttgtgttattttgatatttttgcggatcttgatgtgctgttgttggctttcaagttttattttttggtttttaatggtaaatgtaattgaaatttaagtgtaatctttttgtgtaaacctacaaaaatggtatttttgtttttcattttttaatttgtaaagcttgttaatttgccctgatactctgttcttgaatggttttgttttcatttttttagttaattaaaaatggggtttttttttttggtttattgtttttaaatcccatgaaattaggtggtagataagagaactggttgagttttacaagtccgaattttcttcttcttgttgttagcacattcaacgtatataaagctatagtaccagataagttttaattagtggtaaaatgacggagtatatattaatggataagaggttaataattttgcttataaatagtgtttatagcacgttacagtttctattttgagctttccaaatttctatttctggttctcactttcatgttgatgatatttgtgtgtgtgttagataatttatttgtttgtctgaccgttgaatgtctgtattctaaagctgtgattcttgttttgcatttggtgatagaaacaaagctttctctgtagtattcaaggattgag

SEQ ID NO: 54043 - DNA, 464 bp, Populus trichocarpa
  Intron number 1 from transcript POPTR_0019s04410.1 (locus POPTR_0019s04410) derived from phytozome v7.0 (chr-ID scaf fold_19; pos 4584106 to 4584569)
gaagcaggagcgcgacacaagcggcccccattcaggtaattaattttagaaactaaaacaataagatatttttactatttattactatacatttgccaaaattcactgataactcattgtttatggagcattacgtatggagtttccttcaacattgggttttgttttattattatatttcttctctgctttacatttgaattcccattcttcgtattgattgaagttctttaattctctggatgaagagattaattatattttcaagactggcttcaaaataactagtggaatcctcatattttcattaatacaaatattctctccatctaattgataaataaatactatattaagtataaaaatatgtttgcttataaaaatatgaactcagcctctaatatatctgcgtattatcttttatttcagaagcgaaccaaggtgcttaacatccttaaaaaggg

SEQ ID NO: 54044 - DNA, 367 bp, Populus trichocarpa
  Intron number 1 from transcript POPTR_0013s05370.1 (locus POPTR_0013s05370) derived from phytozome v7.0 (chr-ID scaf fold_13; pos 3839182 to 3839548)
aaaaagttggttagttgtttacttgtgggattgtggtacttgtatgcttagctctttggtcatttacatgtaatatttcttacaaaaaaaattttgaccgtcccaaggtctggttgctcattttttatttatatgtaattcaaaagagtttataaatgccatttcataatgtcttcctactcaccatcttgttcatgtaacttgtaataaaagtccagttttctgccttatgtactgtatattttatgccttcatttctcagattttactaggataatcattattttgtctttatttgattggtccaaataattcaagctttgtattagtttgtagtgctgaactatatacttttgttaataggtgg

SEQ ID NO: 54045 - DNA, 637 bp, Populus trichocarpa
  Intron number 1 from transcript POPTR_0006s25650.1 (locus POPTR_0006s25650) derived from phytozome v7.0 (chr-ID scaf fold_6; pos 24022082 to 24022718)
catcagttcaatttcttcactttcactgagatgtttcatgctgttataacttgctaccctgttgcttcaactttttaccttgtaatgctctacttctataatttttaagtgttacagcagcgtatggatgctgttaaaatctagagagtctagcaactggttaacctgtgatgcattttcttcttttgtagcagtccaagtgtttcttttttttcttgctgtgatttgattgagcatgcttgcaaagttttagtgttgccttttagtcacagccaatccaacttactaggatgtggtggttgctgattcgtgtagatattttttcaaaatatgcaattattagttttagttgcaaaacttatacgcacttattttccttgacaaaattcaaattttgcgatcctattcatatttctaatatcatatcattttctggaataatccaccttttattttgctgtgttatgcaggagaaacctcaacaatttcagtttgttccaaattaaaagcaggtaccatttgttcagaccacattgtattcataaagttgtatttattgtgatagattcataattctgtttatctgatttatgctctcacaggtcaaggcagcacaccaacttctcaagactattcc

SEQ ID NO: 54046 - DNA, 974 bp, Populus trichocarpa
  Intron number 1 from transcript POPTR_0013s10610.1 (locus POPTR_0013s10610) derived from phytozome v7.0 (chr-ID scaf fold_13; pos 10961505 to 10962478)
tggggaaagtgcctaaggagctcaagggagtgagctttgataatgaattgtttatgtttgttaattggaactccattttgttaaaaataatgtgcatagtggagtgattagaaataggcttaggttgtgggtatccctaataggattgattgcattacctttcggatagaagatgaagtttaaggttgcacatgaaggcatttgtaaggttaatttgcatttttgctaccaaaacagttaaagaatacctctcgaatatgattttaagtgcctccactcccttttgacttactacaggctgggatgcaattgatgtaggttacttggaaaataatattaatgactttgaatggtttgtgcaatagctttgtattgtgattagaactttaaagctgaaatgaattagtcatggaattcactaaaatattaaaagcaagtgttaagagaagtggatagtggagaaaggacagttaaatctcattaaaagcttgtccgctatgacatggtagaaatgcattatgggatgttaccaggaaatctaggaactccttcaataacatgctaacctcatcatgaaggaaatcaaactagactctataaagtttggaagtctctctaggtacaattgctgggcatcatctcttcttcctgaccatttcaaaagtttcaatgacttaaactgtcagactcttccaagttggtatggttccaaaggaaaagactttggtgggaaaataatttcttatggtacatcagcctatatcttcatcttgtttagaccaatggaatttatatattcaaagatcttgttatcatcttatgagcagtgcttgcttttgggctctttatacattcaaagatcttgctatcatcctatgagcagcgcatgcttttgggctctaactcatcattctactgatcctatcaatataggtggtaagcgttgcattacgaaagtttttgttttgtaggaa

SEQ ID NO: 54047 - DNA, 543 bp, Populus trichocarpa
  Intron number 2 from transcript POPTR_0003s17670.1 (locus POPTR_0003s17670) derived from phytozome v7.0 (chr-ID scaf fold_3; pos 16968116 to 16968658)
gagctaaggtataatatttgttcccgatcttgaggaagtttaaaaaataaataaacaaacaaaaccattcatcatgagttcttgatgtggtttgaggaagttttttatcaatttttttttaacttttgttgaagacttgtaatgtaatgaagttcaattacatggatataatattgtattaattggtttataatcacacttgtggggaataaaagaaaataccttggagggctttttcttaatcaggttatgatttttttattgataaagaaaagggagttggttttgattttgtgagagcaaataataaaggctgttgcatagtggaattaacataatcttgtctcattttgattctgatgggggactttgtgcaaactgatttgcaagttcttttttcttttgaagtgagaaactttggctttcggtgatattaatatatataattcttttggtgaaagcatgatgtttaactgttcactaatggtatccaacattgtgtttcaaggttggaatttgtgagcttccatttcatcctatcag

SEQ ID NO: 54048 - DNA, 965 bp, Populus trichocarpa
  Intron number 3 from transcript POPTR_0003s17670.1 (locus POPTR_0003s17670) derived from phytozome v7.0 (chr-ID scaf fold_3; pos 16968673 to 16969637)
gaggggttggtggaacgtaagttcatctaaaatcctaaaatagacatctcagtttcatttgctgcagttgttgcagcatagttgtcttactgctgccataatggtcatgcagaatggcacaaaacaatccatatagccagccccaattagtttgagatggaggcttggttgttgttgttgcatcgttattttattggcattactttttccagatatattccactatccattagatatatgatttagtttttcagcattttggctacaatgtcaatggatgagctgatagaagaaatctggaccccgagacttgatgtgtttgaattttgtagcaatggtggatgatttgtttgcagtcatgtccagtttcatgaacttcaactggttgttggaattttgtgtttaagttcattaagttttaccatgtttttatacaagtggaggttaaacaacatttggtgctatatgcttctgttgtatctcctattgcggggagatttatctggtcgtggaataatgctgaaatttagcaaagaaaagttgcttttgacattaaatgacctttaaaggaatgtttcctgtagggtcatttgtctgactgaataagagatttgtttggcatggcagttactagttaaaaatctcaagtgatcgcgcatgagtgtttgatgacattaaatagaattattgaattcatactttcatggcccattgaagtacttctgatgagtttcaaatggagaaacatgtttttgataatctatagtgccatggtaaaggaagtttattgttattattgaaaacttaaagaatgttgactttcaagtttgtttttagtttaggtttgagatgattgctactgaatttgaattaactgaaatgttgaaacctaactcataatcaatggcatgccttcatttggttttgtaggtgtgttcttcgcggttgtgttcccaagaagattt

SEQ ID NO: 54049 - DNA, 506 bp, Populus trichocarpa
  Intron number 2 from transcript POPTR_0013s12780.1 (locus POPTR_0013s12780) derived from phytozome v7.0 (chr-ID scaf fold_13; pos 13449870 to 13450375)
ggaccgacgagcctggtattaagttagtactttattttgcatttgcactattttgattgagaagagtggatttgccatgggggtttgacttactgactcataattgaattgtgaagctttgaaaatatgatttgattttgttactatggtggtgtggcatatgcttgtacaatggtaaagtttgatcctttagttgatgggtctaaaatctttgctttgtgtcgatattgcatatttgcattgggaattcaagaagtttggcactttgttcagagcaatatcttgttatctcaacttcatggatgattatacagattgtacaaattgaatgtgtgactcttccatccctctccttccatccttactatgcatgcgccgacatgttttgtttattgattatgggttatattctcttagcattccatgccttctcactcagtcatgttggctgtgattttgatttgtatgcaggaacttcagcctgcccaagaggaaaattttattgc

SEQ ID NO: 54050 - DNA, 604 bp, Populus trichocarpa
  Intron number 3 from transcript POPTR_0006s08300.1 (locus POPTR_0006s08300) derived from phytozome v7.0 (chr-ID scaf fold_6; pos 6034141 to 6034744)
gagagtctgctgcgaggtctagagctagaaaacaggtaccactattttggattttcttcacgaatgtttttatggaacatgcatttcgcttaaaatgaaccaaatctaacgcatctgtgaatctatatttgatcttcagtttatatatacatacataacgaggcccacaaacaaattagccattgaaattgcttctttcttaaatgatgtacgagtatcttcgaattgagttaatgcgttaattattcttaactcatcaatctctcaagttttcttcgcccttgttgttgattgttttgaacagtaaatcaaatacttatgatcgctagaaataaagaaattggtgttcttccaattacattttaaggaatagctgaagtgtaggttgcctgacaggtgcatctgtctgtctgctagaaatctagggagatgatatggatttcttaagagcacttaaattatcctgtaattaatcacagagatttgattaaatgcttacacttcagtcttcaacatatacaccatcacatatatttgtacgttttataataattttgcctgtcccacaggcctatacagttgaactagaagctgaactgaatca

SEQ ID NO: 54051 - DNA, 551 bp, Populus trichocarpa
  Intron number 4 from transcript POPTR_0013s06650.1 (locus POPTR_0013s06650) derived from phytozome v7.0 (chr-ID scaf fold_13; pos 5333481 to 5334031 reverse strand)
ttgtgagtccgtatgatgactctaatgtagtgaagcagttagtgttggcatcaacatagcacatccctttagtttcttatgttcaatgcttagatgcagacttctagcctatggtacgcctgcagttcttaagtttaaatttcggataggtgcatggttgaatggggaggggaaaactctctcttgttctacagctgaaggtccgatgcaccccccagaagacctaaaaaaagaaaagggttcataagttggctaatttcttgcatgctgtcaaaccataagtcagccaatttctgaatcaggaaaatgaaaatttgttttaaaggccattaaaaagtggaaaatgaaatttgatgtttaatgcctacagtatgtgacatataatctggaaacttgaagacaggaaaatatttactggaatggtgttatttttctcaagttttgaaagtactcccattttaagtgctagaaggcatgcaattggttgtatggctgcctgtatccttgcatttcctttattataaatgtgtcgtttgaatttgcagcttggc

SEQ ID NO: 54052 - DNA, 415 bp, Populus trichocarpa
  Intron number 1 from transcript POPTR_0013s14080.2 (locus POPTR_0013s14080) derived from phytozome v7.0 (chr-ID scaf fold_13; pos 14422350 to 14422764)
aaggatttctgttggtgttactaatccaagtggtaattaagcttgacctttttttttcttttgctctttcttgttttgggtttctctctgcagtttggtttgtgagaaaatgtgggatataaaagtaaagttattagttaaaattaaaatgatataagctatcaaacctagatggaagaaatgcttggttggttttgtaaatttcctttcttgtttcaacttttctttttcagcaaccaaattcggatttttactagttgttattgtataattttaagctggaatagtagtgttgcttattaattttgttttatagtacatggaactttgaatcttatcacctgcattgttttgattgacttagttactgcaattaatagcttatacatttcactgggctctcctgtactgcccg

SEQ ID NO: 54053 - DNA, 984 bp, Populus trichocarpa
  Intron number 2 from transcript POPTR_0003s01440.2 (locus POPTR_0003s01440) derived from phytozome v7.0 (chr-ID scaf fold_3; pos 1332487 to 1333470 reverse strand)
tgcagtgaccacacctagccctgctggtgcccctggtatgttcaagtcctgatctttactgataatatttctttttgaaaaaaaatatcatgttgttgttttttaatttattattgatatcttttatgtatgtggatgtgacacttgatactctggctgaattatttagatttttttctttttgaccccacccatgtctggattatttaaaaaagaaagaagaaattaagtgctttgatgatgtcttcctgtcattcttttcctgattttggtataatctattgcatgtcctgttattgaggtcccaatgtttctattgagtgatgactgatgagtatctataagagtgagcattaatggtgctgccttttatatgatgatgttgattctgtactccaatctttaagtcaaaatcaatccttttttttgttttttagtttctgatattttatacttgaggggaattctctccgtttcccaagccttaagctagatttcttatatttgaattgaagtgattcatttgtgttctcttgtttgttcttgaacaatgtggaatgcgacaacgtgacagccatcattcttggtcatttggtcttgagattggatgtttatctgatcttgcctttcctttcttaaaagaagaaacaagagatttccccttccatctcattcgtgcgggggaacttgtaatctactttcgcttgttgtagtttcggtgcacgaacacgctcaaattcccccccctacatggtgaatttgatgcctaaaacaacagggtgttgatggttataaatgtggcaagcagtttcccttgcttgcatctaggtgctttttaaggagtcattcaatcgtatgattctgctgtttcatttataactatttgatcttcatgctatttggtttcccgatcaaacacactgttcatttgttgcgaaattgtgtgttatgcagcaggatctgctgcagccggaccgtctgtga

SEQ ID NO: 54054 - DNA, 338 bp, Populus trichocarpa
  Intron number 1 from transcript POPTR_0006s06400.1 (locus POPTR_0006s06400) derived from phytozome v7.0 (chr-ID scaf fold_6; pos 4565824 to 4566161)
gtactgggttgattttcctttaccactccaaaacggtaaaaataaaaataaaaataaaaaatttagtcttcctttttttttttttttacctgtcagtagtgagtaattgttctttttattaattatttgtgacaaatgtgatatatattttagtatgaagttgaagaaaaaaaatgtgtatctgaagtgcaagagtttgatatatttttgaattgatgtatttatagattttatatggattgtgggatttgaactgtgtaaagtaattgattttatgtgaagaatttttcaattttgggtgaaaaggagtttttttttttttttgtgcagattttaga

SEQ ID NO: 54055 - DNA, 478 bp, Populus trichocarpa
  Intron number 2 from transcript POPTR_0019s04080.1 (locus POPTR_0019s04080) derived from phytozome v7.0 (chr-ID scaf fold_19; pos 4159523 to 4160000 reverse strand)
tagatcaccctcttttaaagaatcacaagatccaggtaaataacctagaaaaaacttaaaaaaaaacaccttctcccctctcttgccttgtcctttccattaacgtgtaacattgctaattaacgaagttaatttctcttcttgttttacccctatctttcaacattcatctaggttaacttcctgtttgacaataaacactaccatattataacttttttacgtgtaaaagaaggttatgaagctccccaatgctcctaaatcttgtgcatgaaaaaggactttcttggctccatgtattctgtcatcttctttttctcttaaaaaactcactatatattcaattactataaaggtaaagctaaatcttcttttctctctctctcattccttagataacatgtagtaatgttaactttgattaatgctagtaattatgatgattatgccatgtaattaacagagagagcccccagaa

SEQ ID NO: 54056 - DNA, 696 bp, Populus trichocarpa
  Intron number 2 from transcript POPTR_0013s01770.1 (locus POPTR_0013s01770) derived from phytozome v7.0 (chr-ID scaf fold_13; pos 1012356 to 1013051 reverse strand)
tgatttgccttgaattacctaatcgaagcggagatgtaagtctttttttttgcttaattttggtattatttcgtgaaatgtgagtgtattagttaaattatgagtcgatttaggtattcgagtgaattttgataatttaatattggattttttgttccattttacaattaattattttattttattttattaattgattttaatttttgttattgttaatatagttacatgatttgctttgaattaagtagaagctttatattttttccccatatttattgctatcactttgattttatgctaattttgtttatttgtaggtttgcaagtttttgacttgctgattctaagcttaatatcaaagcagaggttttgtttggatattttagtttattttctttagtttagtatttggatggaagataatgggctcattagtgacggcctatttattctcttttgttttcattttaattttccatgaaggttgtgtggtgtggagtagtttatctatttggaggattatttatcattttttagactgtattttagggtttatttgtaagtatagatatattgatctgttaacctgatttattttgtatgcagttagttgtggtagttataattgcgtctctaacttttgaaattgtatttgcaggtgctggttacgtcttataacgagctcgaggagaa

SEQ ID NO: 54057 - DNA, 249 bp, Populus trichocarpa
  Intron number 1 from transcript POPTR_0006s16370.1 (locus POPTR_0006s16370) derived from phytozome v7.0 (chr-ID scaf fold_6; pos 14305655 to 14305903)
tgccccttctcgcagattcgcttatcttgctaccggtaactgtactcttcttttctttcttgaatttgatttataattttttttattaatttgaattaatcgaattcataattgaattaaatttacatttctgtagattttatagtgataatattgaaagctagggctttgtttccttgcttaatttgtgcattgatatgtaatggtgatgcagctgttccgcaatcacatttcttcggtttgaaagct

SEQ ID NO: 54058 - DNA, 747 bp, Populus trichocarpa
  Intron number 1 from transcript POPTR_0019s06040.1 (locus POPTR_0019s06040) derived from phytozome v7.0 (chr-ID scaf fold_19; pos 6510078 to 6510824)
gtggggtgttaaactgccctttgttgcttattcaggtaattaatttccttgctatatatgagttttccacaccttcatatgcatattatcgtgtgtgtgtgtgtgggggaaggtaaatatatataaatattttaatcaatgacatgataggtaaagcatgttcctaagtcaaaatctttatcgagtcaattagcacttaagatgctgatttcagaatttaaatgaaaaaaataaaaagaaaacgaaccttcttcattttcagaagatgtaatttactaattattcccttcatgtatatgaataaattaatgacgataggcttaattaataaattctgacaggatccatccatctacatgcctataagaattttttttttttttggttccacgggtgtgtgtgtgtgtgtgtgtatatacgaacaatttggtagattgacaatgaaaataaactaacagtcataccagcaattttatataccagcacgccagctaaccagaaatattgacctgctgctgcacctactcactcctgcatgtgttcaaattgtagctttttttacatccaagttctaccacaatttgagatagatgaaaaacaggttcaaacacaatttgtgatcgcgctaaaagcatctacaatgcgaaacggataggtggatatacaactggtgtctaacatatatatatatatatattgtacaaattggcaggtgacgcgcctcaagtgtggtggttttctgtttgc

SEQ ID NO: 54059 - DNA, 754 bp, Populus trichocarpa
  Intron number 1 from transcript POPTR_0019s03820.1 (locus POPTR_0019s03820) derived from phytozome v7.0 (chr-ID scaf fold_19; pos 3888968 to 3889721)
ttgtcaacaaacctcttgtttggtatcggtagccttctttctctcttctttctctctcatccttgatttttgtgtacgaaccttaagtttttcaaagcagccattcaatttatttttcaattagatatgatctctgttttttaattactattttttttatttgaaataatttataaaattagatttttttttcaattttatcatcctttaatttttttcattaatcatatttgtttccattcttttaattgttattttttaatcattttcttgatttattttatatttcaaatttcatccctctttattttatttcatttaatttttataccagatttggtcattatcttttgattgctattttttttgtttgttaattttggatgatttgaattttttttcatgatttttttcgggtttacggagcttcaattggataatccaatctcattacttagatcacaagttttgaaaattaatctaatttgacttcaatttttttaagttttttttaaattgatttttaaaatttttttttatcatttgacattaggttttggacctttaacttcatgatttttattgcttttttttatatgaggttatctcgacttatatcccgggtagcgagttaacctttttttttcttgtttcatcttttatcatttagtttgattgagagttgacttccatcattttatttaatttattttgtatagggttatcccgacctcacaatcgatccgcgagtttg

SEQ ID NO: 54060 - DNA, 403 bp, Populus trichocarpa
  Intron number 2 from transcript POPTR_0019s03820.1 (locus POPTR_0019s03820) derived from phytozome v7.0 (chr-ID scaf fold_19; pos 3889701 to 3890103)
cacaatcgatccgcgagtttgacttgtgaactaaagtaaggtttttgtattcttttttaaaattatttttttttaatttgtcttttaacatttgatttggtggtaattgagcttgagacttttttatttttcctttatgaagttattcatttcttatttaatttttattttattattaaataaaatcattaagatttttataaaaatattcttttcatagaatttgtaagcattcattcttttctatagtcattgtaacttttttttgttgttgtttatttgtctgtatgctaattgctgcaatttactatagtaacaaaggggtattattccctattctttacaaccttaaatatattggaggacagaaatttacgttgtggctcaaatcatcgaattcttg

SEQ ID NO: 54061 - DNA, 771 bp, Populus trichocarpa
  Intron number 5 from transcript POPTR_0006s07750.1 (locus POPTR_0006s07750) derived from phytozome v7.0 (chr-ID scaf fold_6; pos 5665361 to 5666131 reverse strand)
aggaacacttttggagctgccgtttactattggaggtgtgtgaagtgaacttgttgacctttttgtctactaactataatccatattttttgtttttgcgatccttgttgaaatgttagttgtttgctcatgcacttgtttattcttaactcataggcaacaacattaatagattgttactattattttcgctacttgtataattactaaaggcagcggcatgggtcgtcggtggatttctcttttgcacccatcttgtcagttgctaatagcatcacctcacttgtacctgctttctttgcaagtcttggcggaagtgtgacctgccctgagaaacttgtcaaccccatataacttcatttgctggcagtaataatttgcacgtgccatggtgtcataaccctttagattttagaaagttacttaagagatgtaattttgtggcttttttatgatattcaatttttacacactgaatctggtgtgttttggggatgaatgatgatgataggttattcttctttttttcatcaaaggtggttgctgctgataactcatattgactagttaagattgaataaatcaccattatctgatatattgtaggggaataaactaccaatgtctgcaggagttggacttattttaattttgtaaaatttgactgatctgtcatcatcctacgtacgtgggatgggctattaattgcatcggctgattaatttttttttatctgctcgtggcatacaggttcaggatccacttacttgt

SEQ ID NO: 54062 - DNA, 754 bp, Populus trichocarpa
  Intron number 3 from transcript POPTR_0006s23370.1 (locus POPTR_0006s23370) derived from phytozome v7.0 (chr-ID scaf fold_6; pos 22119108 to 22119861 reverse strand)
attctactcggtaaattactcttcaactttatcgaatttttgttcttagtttcgaaatttaattgtactaacatgccattccatatctttcctgttatgcgaaaatgcagtattttcttcatgcttttgattccgtggacttgcttctctgcatatatacttgtcttggattgttatgttaacattttgtgaacagtagccgttcctctttcaccctctaggactgcaaagagtaatgtacttgctatttaagaataggtctttaggtttgtggatatatggttcataatttgctgcagaatactccctgtggatagagataggaatagaaatacttgcagattgaatcgtctttttttccctaaggccccggttgatggagggatcctttgcaaagtacatttatgtcaattatctcgttcttggagatgtatttgtctttcttaaggtagtaaacatttatctgttgctcttcgttaagcattcctcagtcaagatggggctttatcatgattcctatcttagcttaaagagatgcttttacaccctgttctctcttctttgggttgtcagttgtttgtagatatcgatgatcttcatgtagctcagggccactgaaggatttttcgttctcttgtcctttcttttcatctttatgaaagtcttgcttctttattcagaaaatttattcagttatcatgaactttgtttttatacagatcagagaaagttgaataccaagtttctgtggagg

SEQ ID NO: 54063 - DNA, 899 bp, Populus trichocarpa
  Intron number 1 from transcript POPTR_0006s15660.1 (locus POPTR_0006s15660) derived from phytozome v7.0 (chr-ID scaf fold_6; pos 13124129 to 13125027 reverse strand)
cattggctttgttttcacagttcaaggatctactggtaaatttatgatctttactcttctttgttagaattggattaaattaggatttttttttcatcaagcaatcattttgtttatctgggtttatcaaacttcgtgttgccaatggtaatgtgaagaagctgacaatagatataagagtttataggaaccaaatcggactgtggtgtctttgttgatctgagattgtttactagtagtaaaccaaaaacttaataaaaatgttcccccctcaattttgtaaccgtagatcagagcttgtagatgtaattgagacaccaaagggagctagctaatagttataccaatctgttctcttccatagtcccgctcacggatcaactatggaaatgcattacaacaacaattatcgtgagctgcttccatagttttgatggttcttggaacttcatacaattcagcggcatttcttctgctgcattgatatgtcgtcttgctttgattcccttgcccgcagtctgatttgttaaaaatttctcatatagtataatacttctcttcaaggacaaagatatccaagttatggagttttaaaatcaatagagtgtagatctaatgagttgtcatttgaattcttcctatacatagactagaaaaacatagatacttaaccccataagaaaaagaaaattctgcttcatgatactagcagaagcaaatcatatgtgctaatgttgttaagaactatgctcttgtgtcttttctggttgatatttttcaaattgaatattttagtttgaaacttacaataaatgccgagtttcatatatgctgttttaaatctggtactcaatcttttttcaggtgacaagatatccccaactccagcaattgtttct

SEQ ID NO: 54064 - DNA, 1008 bp, Populus trichocarpa
  Intron number 4 from transcript POPTR_0013s06680.2 (locus POPTR_0013s06680) derived from phytozome v7.0 (chr-ID scaf fold_13; pos 5393250 to 5394257)
gctggtaagtctgtttttcccccttctattttatcctgcattcttcaaatgggcctgtttgggattgtggtagcggttgcggttcaaagtgtttttcgcttagaaatgcatcaaaataatgttttcattttttaaaaaatcatttttgagatcaacatatcaaaacgatctaaaaacataaaaaataataatttttagcacaaaaaaaaaacaatttttgaaatttgagggaacgcggtttcaaccgcgttcccaaacggtctcagtgtctctcactgggatccatgggcatttaagaacctctttgcctcgacttggagtttggagtggattgacatgtttattcagtggattgacatgtttattcattttcagaaagttatgccaaactgggcaataattatggaaagcatttcaaaacaagtcatctgggtaataattctacccttactttatagaggtagcccgaatccaaaaccttgttgtacaaggtatactcgtaaggaaatcccatgatacacatagacaatccacaccagataagaatattctccagaaaaggaaattcaaaaattgagttggaacttgaaatgaatcctaaaacagatttggactcagggtagtctaatttgtgcgggttggggccatcaaataaagttgcctggtcagacaagtcattttgcaggtcatttggctacatgattatgctgcaatcatcatctgacgatcttatcattttcatatcctcccaaagaaaaatgtagctcttccttactttgacatttaaccaaaaatctaatcatcattccttttttcattattgtgatatcaataacaaaataaagcacgttcctcgtgaggaaataattttaattttaaccactaaaaatgatttgaggagaacaactagcagtatctttttggcaactcaaggaaccatgtcctgatcttgatttttttttcctctcatttttgtttctcttcagcattcctttttcaagcaattct

SEQ ID NO: 54065 - DNA, 629 bp, Populus trichocarpa
  Intron number 3 from transcript POPTR_0022s00670.2 (locus POPTR_0022s00670) derived from phytozome v7.0 (chr-ID scaf fold_22; pos 309404 to 310032 reverse strand)
tcatattgtccgagaagttgaaaagccaggctcaagtgagtatctttactttttctcgattatccttctggatggttgctcttttttatctctagctttggtgaaggaacttgtttgatacgctgttgcctataaatttatcaagatcatcatgtttgattgtgtagcatgcagggatgcgttgtcctggtagcatgtgttttggaccaaacactataatattaacaatgggaggccaaaacttttagccttgttgttgccagggccaccccagaccacttggaattgtccctgttagcatgtttatattgactttgattattttacacttcttttgccaataaaacatgtctgggtggcttggaattggggattgattgggagtatttatttgaaagtgtctgcacaattgtaattttcagcccttcattgctgccttctgttgttcaatttgttggttgtaagtcttttttgcgtacccctttttgatgttctgtttttttcttcacatttttaaagcagccggaaggaagattgaaatattcattgtaacactatgattcacctctagcttatgtgctcattaattctttcttcatttgtctttcagagctccacaagaaagaaac

SEQ ID NO: 54066 - DNA, 908 bp, Populus trichocarpa
  Intron number 1 from transcript POPTR_0022s00670.2 (locus POPTR_0022s00670) derived from phytozome v7.0 (chr-ID scaf fold_22; pos 310742 to 311649 reverse strand)
cttctctgctccttctctcttatcattttgccgaggtactatcgttctatttctttctcgtttatctgaaaacattcagttttgtctttttagccttttgttgccgatctagtaggctttttttatctttctttttctgattgtttttgctgtaaaactgaagaagaactagttttgtcaacctatatgttatttgctatacgtttatttgattggttcgtgactgtgattgtgtacatgcgatggtatttactactttacatggtgatgatttgaaagaatttttccctttatgaaaagtggtgagtaatcagggctggagtctcagaaatggctctttttttgccgaaaccctaaatgggtttttggaaagaaataccgatgagcttgagaattggcatcataatatgtctgccataggcctgtggttttttcggggaaaaatcttttcttttcatttgctggtgttttgtggttaatacccttgtaagtttacaattcaaagggttattttatgataccaatagtggtcctttccttttctttatttcaaattagtaaatcttaattgtaaaaaaataacctttaaatcatttgtattcagtttaagcttatttgtgattagtattttagttgttattatgatgatttcaactagatctatttaatgatattaacaggcatttaattttttgtgggtctttgaaatactagataaaattgttattattttatattgatggtcctattggttggattttatatttatacatatattgaaggagaatctgaattagtactattgatgttttatttggatatattattttttgttgatattttatttcttgaggaaaaacaatattgaagctcacgagtcttgcagaggttatatcaaaggtagaagc

SEQ ID NO: 54067 - DNA, 497 bp, Populus trichocarpa
  Intron number 3 from transcript POPTR_0006s17780.1 (locus POPTR_0006s17780) derived from phytozome v7.0 (chr-ID scaf fold_6; pos 15949442 to 15949938)
gaagttataggttcaaggtttgaatttctccttaatcacatgcacatgcttatgcatacatgataaagagaaccatcaattgttttactctcctgaaaaaaaagaaaaaagaaaaaagaaaaaagaaaaaaagaaaaaaaacatgctggtgattcatgatcaaatattttctattctggaaattttgaatttggatgcttttttcccattcaactttatgcttgtattatcatggttaatttgtgttatcaattgtatgaaattcgctcgtagttagacctgtatcagttcttttattccagatgttgataacatgaaatgctcctttccaagggttcggaaacaattatgttatttattgtgatatcctactgttgcttattgattactgagagaaactattgatgtgtttttactgtaagaagacacaatttttgggttagcattgtcatattcattaaaattatttcagggaccttacctctccaagcagagaa

SEQ ID NO: 54068 - DNA, 535 bp, Populus trichocarpa
  Intron number 1 from transcript POPTR_0014s01160.1 (locus POPTR_0014s01160) derived from phytozome v7.0 (chr-ID scaf fold_14; pos 1112070 to 1112604 reverse strand)
aagtgaaggcgggcgtggaaaccagttaattaattgtaatagattcacaaaggctaaagctggaaaagaaatgcggttattgttgttttttttatttaaaaatatattaaaataatatatatttttttatttttaaaaaattatttttaatattaaaatactaaaaaattattaatttaaaataaaaaaatttaaatttttttttaaaaacttttaaaacataaaaacaaaaaagatctaaatcccatctacggagaccaacagtttttcaaaatatttatttattttgaaaagtattaaattaattattttagtgtttttcaataaaaataaaaaaagatattttccaataaaaaaatatttaagaaatatgtatttaataatgtgaaacgtatttttgagatagagaagaccacatcctatgtttttctctcaaagttctacattagagttggtagctagagcaatgaatgtcctttctttttcacctcgatggtaggaagtgaacattgaaaaagagcccttgttgaggttg

SEQ ID NO: 54069 - DNA, 526 bp, Populus trichocarpa
  Intron number 1 from transcript POPTR_0006s28260.1 (locus POPTR_0006s28260) derived from phytozome v7.0 (chr-ID scaf fold_6; pos 26008255 to 26008780)
gaacaagcttggttaatctctcaggtaaagtttaaatcgttctcattttttttaattgggttttctttctttctttttatgaattatagattgggatttctcaattttggaaatttaatcttacttgctttgcatgaaatatggtgatagagattaagttttatttaattgttttgggtcggtgaaaattgagtgagaaatgaaaaacaattgacaactttgtgtctttgaaaatggaatatcttcaatgggatgttatgattggatttagggcttaaaaaattgaggtatttttagggttttatgatctggaatagtaccatatggttctatgctactaaccagaagagtagaatttaatgatgtttaactgttttagaaaagggcaaggattgtttactgggatatagattaaagaccaacagaatgtttgatgcgatcatttctgtttctgacaagttttacatatcaaatgttcgtgatggttacagcaaccaaggccagtttcgtgtacttcctgcgattc

SEQ ID NO: 54070 - DNA, 325 bp, Populus trichocarpa
  Intron number 2 from transcript POPTR_0018s08970.1 (locus POPTR_0018s08970) derived from phytozome v7.0 (chr-ID scaf fold_18; pos 9872376 to 9872700 reverse strand)
ccaagggaaggcgactggatctgcacagatcctttgtaagttcatatttcatagttttttattgtatggtttcactctccattcctccacacccttttttgtcttttcttggtacctgattctggcacttttgggtcattaaatttgagttgaataagacttgaagttggttatctcctccctgtcttaatatcacttcctaattgtatgcaaatgatagaaggaaagggttttaccttttaacggttgattttgttttagcatgtttcttatgataccatgaagatggagcatcttcaaatcttacgtcatttttccctttcag

SEQ ID NO: 54071 - DNA, 988 bp, Populus trichocarpa
  Intron number 2 from transcript POPTR_0013s04160.2 (locus POPTR_0013s04160) derived from phytozome v7.0 (chr-ID scaf fold_13; pos 2771187 to 2772174)
gcagttctgctattcctatcttacggtaaccttataaaaacaactgcaactttgctttctttgtctgttttaaggctgtgattttctgtggaactgttcttatacataggaattgcaagtgtgttctttcactttacacatgtctacattttggactttattaacattttttttactagaaactaaaaatgattgaagtgagaacctgggttgagttgttcatgcccatgtcttgagtttgaatcctcacataggctgcttggatgtattgatatgttggtgataggcttgcctacttaggtgcaaaaaatcatattctaatgggatttgtattgtaagaagattcacatttgataaagttgtaaggggggaaatctctctcttaaaaatgtttaacacaatagtgaccaaagtaggcttatatagggtttttcttttttaagataatctgatagaacaaaaccgttgccataaatggtcctgatgatgacataataattatcacaattacaacatttttttctctcttttctgccccttgttaataatttttgtcatttggaagatcaacattggaaaatttctcatttttggtattgactccatgttagatataatttcttatgaactatttatttgctctgtgtcatgaacaatttgttatgtattttttggtgacaatgtgccatcgattacagcaatattcagggaatgtgtagtgataccttggtttgaattcaactaactggtaattaagttgcagatgtgaactcgtgtttgggaattctgataatcatcttgcatgcgaattgtatgtgttaaacttagttacattctttcattgatatttcgtggatgaatcctcatatgttgcactcaccaggttatatcatttcattagtagaccttaaatcatgcttctggtgttccgtccattaaaaagcttttctcttttctttttgtagtggcaacaaggacattatcgtat

SEQ ID NO: 54072 - DNA, 551 bp, Populus trichocarpa
  Intron number 1 from transcript POPTR_0006s21220.1 (locus POPTR_0006s21220) derived from phytozome v7.0 (chr-ID scaf fold_6; pos 20316487 to 20317037)
agacctaacattgtcactgaggtaagctctcctccacctgtcttctccttttcgactctaaatctttaattttcttttttgagtttagggttttcttgttttaattgagattatgaaaatctggggatttcgcttagctttttgttgatgataatgtggtaattgagtatagttaactgtttaattagtgctgttgggcttgattgagaattctctacttttgtccttttgatttgtgaggaatttatgcaaatgaagttcattttgttttcttcttttgtaaaaaatgaactagtagatttgatagcttaaatgactgatgctccgatatcatttgtaaataaatgaggggagaacatgttgatgttgtgatgcaatctatttacttctttcaaatgatttcctttgtcgaagtaagcagaatgtgcagttcgatacagaactagtcagtaaagcatttcggatcatgttttttatgggtttatttatttatttagtaacaaggttggtgtcgtaagttttcaggcgggactgcaaacgagagtgggaca

SEQ ID NO: 54073 - DNA, 455 bp, Populus trichocarpa
  Intron number 2 from transcript POPTR_0006s21220.1 (locus POPTR_0006s21220) derived from phytozome v7.0 (chr-ID scaf fold_6; pos 20317143 to 20317597)
tttcttgccaactgctgttgtatcccattttcagggtatgtttgttaggtgatgcatttaattcgtgataatggattaatgaattatgatcaacattggaagatatttttgaaaccgtgtttaaggtcatgataccatgggaaaattaactttacctggccttggtctaaggaggaacccttttagccctgaaatctgcactggtgcattaggcacctatactgtgatgcctaactaaacaaccatttcattcaatctgcctatagttttaggttccttgtaggcttaggaagaaaggatcaaaattttgatttttttcatttgatgcctacacgtatgttgtcacttcatccttatcttaaaaaaagggatttatcccatacttgtggtcattaactttgcgttcttttttttttcttgtgcagtttacaggatttatacctcaatattttttc

SEQ ID NO: 54074 - DNA, 757 bp, Populus trichocarpa
  Intron number 2 from transcript POPTR_0003s02960.4 (locus POPTR_0003s02960) derived from phytozome v7.0 (chr-ID scaf fold_3; pos 3185667 to 3186423)
tgagtagagcttgtttgatttaaagaaaaaggtgtggcttttcagcttaagactgtttgttcaaatttgtggaagattccatcatggtcaactcgatttttggaaactggaacaatttttttattttatttttaaactccataccaatctgggatccaagaaaagttacttgaatcttttggagctatttcttttaccactgtactttgactcattaatttgacgactcagaaaaagaaggctttagcagcgttaagtgacagtgaggcccagttctagtgtttgcggatgctctttctatgaatgtttttgaaagaccaacttttttttttttgtcgaatttctgctagtgtaatctggttcttgcattttgagccaaagggtgtccagatctttactagttttctttttttgggtgggtgggtttacaatttgttgattaatcaaaggaggggccaaatacaattgtagggctgtgaaataggtttttgttattgattctagaggagcttgtgttaaatagtgaaaagggtcttgtcaaaggtgtggtctgccgctgctataacgggaggggtataggttttttgtcggtggttcttgtcttttgaatccaacatggatgggacagtgtaataatgcatgaaatatcttggtgcgtcttgtagtcatgcttttgttgttggctctataactgtagtggggactttggttaagagaacaagtggaggtttttgataaattaattgtggtggtagtg

SEQ ID NO: 54075 - DNA, 617 bp, Populus trichocarpa
  Intron number 2 from transcript POPTR_0019s11920.1 (locus POPTR_0019s11920) derived from phytozome v7.0 (chr-ID scaf fold_19; pos 13134727 to 13135343)
ggatcctagtaccttgtactgaatctactgataaggtttttgttgctggattgattatgttgaattttgaatttaaacagttctcgaatcatttaaaaaagattgtttcttaaagtttggggataaaagttgaatttaaacagttcaaaattaaacttaataagaaccaattggtttgctgtagcttattgtgctgcttttgtttgtgagtttacttgagttatttatacaaggatgattgattaagctatgctgctatagttcgcatggttattacttcgttctgtggtttttcttaacatagacatcacccaaaacatagatatgtgtgctgtgatttcttgtggttgatgacatgacttcttcttgattgcaattaatcataaatcaagtgcaagtgatgttatttatggactatttgataaacaaaatcctgaattttatatggatttgactggttttgtaagagctggatgttatagttgttgtcaagtttccagcttatgcttttatatgttaagagctggattttatatgttaacttgggttcctgaattattaatttgaactttcaggcgcaaggcatcattgcttgctggagatataaaccacttgaa

SEQ ID NO: 54076 - DNA, 733 bp, Populus trichocarpa
  Intron number 1 from transcript POPTR_0019s05200.1 (locus POPTR_0019s05200) derived from phytozome v7.0 (chr-ID scaf fold_19; pos 5439897 to 5440629)
ctcattcttaggcttcacaggttgcttggtaacaggtatctgtaatattccctgtgtaatgatcggattttatggtctcggggttgctgattcttttctctctattcccatcagctgggacatccataattaggttgatttggatctctctcttgtttttaatttattctgttttttttaggccttctgtttttttttttttccaggtctttcttcctcaaaaaactagaaagcttgactttcgattaatactttaaattgtctcagaaacgtaattgttgggctttaacttcaaagggtttccccttgtttatttctcttacctttcgcttagcaatccgaggttctatcatcatcatgaatcatgatgatccgatctccatctcttttggaaaaagtatatattcatacatgcatgtacgtgtgtgcacgtatttatgcctcttctttttttgataatcgtcgtatatatttatgttattgttccttttgtcttcttttctcgttcctatagcaacagcgttctaaaactaactccaatgtattgtattactttatttgtcaacgttttacacaattcgattaatagagagtataatgggcagatttagggctattggaagtcgccttttggtttttgaatttgaaataacttagatcgatgcttgctagtcagtaattttgtctgtcaatcttacttttgtttggttttccttcttggaacaggtggtct

SEQ ID NO: 54077 - DNA, 1001 bp, Populus trichocarpa
  Intron number 1 from transcript POPTR_0003s08340.1 (locus POPTR_0003s08340) derived from phytozome v7.0 (chr-ID scaf fold_3; pos 9729137 to 9730137)
ttgccataaaaaagctcaacaaccacggcttgcaggtacaatctcattgtttctttgtaattgctgtgcttaatttatttatttttccaattgcctcttgcattcagtaatgtatttggtgaactaactgtttgtatggacatcttgttataaattgaaaaaatgtcatgttttgctttgctcctcagttaaatcaaggtgaaaaagttagctgttaaacaaaaattgacaaagaaagtgtcctttggtgattgactgatttacaagcatatccattcctgaaatgatcacaaaatagtaatgtactcattttgaggcttacaattactttacatgtaataattttcattcggttgggggagttaatgttgaaatcaaaatctgacatgatcatgtgaagaaatgtggcttacaagtcacataatctcgactttgggatacagattatgtcattttgctgccaacgatgtctttggccaaagtagcaagacaattccatttggatatgatcttgagtttcattcttaataatgataggataataatgtagacagtgataagttagactttgcaagtcatttggcgattgccagggggggagtattgtgaatgagcggagagttggcattatcacaaaatttagcaagagaaaaaagaagctaacggacaataatatgcaataggccaatagctcttgcatctcttaaacttgaactttatgcttagaatcccattataataaggaaaatggagtgtctttcttggaacaaagctcaaattaactggatccaaaagttagtattcggtccttgaatcttctctgtagttcaaattacacaaattcatcaaaacttaattttttttttggtaatattgatgactgttggccttcattaactgttgtatgttttcttttatttgttgtttatgtatctcttcatttcatcaactaaaacctgtttcttttggtgatgtccttctctgatatagggtcataaaca

SEQ ID NO: 54078 - DNA, 606 bp, Populus trichocarpa
  Intron number 1 from transcript POPTR_0018s06200.1 (locus POPTR_0018s06200) derived from phytozome v7.0 (chr-ID scaf fold_18; pos 5925478 to 5926083)
tgaaaaaccctagattcctcgcccattatcaacaggtactaagtaacaacgtgctctctcccaaacccccctttccctttgctttcgaattttggttttgattgtttgttgcctcagatccgttactgttcttttgttttctcaaaattacgtgttgatttttcctgactgagaattatttagctctttttttctatttttaaaaaatttaggacaatgtacggacatctaaacactatttactctttaattcagccttttcgataagtttaatttatagtaatttattttttcttcggttgtttctgcttatgtgttgagtattattcaatgtgctgaaagtttttttctaatcttcaaagatactattattattgttgttgttgttgttgtagagagtgatagcatttttcttacaaaatttagtttgcaaagcagttgctatacattggaatttgtggtgttttaggttaatgcaatttatttcgttgcttaaaaaaattgagaagaacattaaaaaaaaaattaagtaaatttaaaggcattttggtgtttgaatttatggtgacaggtaaggcagctaaaattagtttgccgacctgttta

SEQ ID NO: 54079 - DNA, 774 bp, Populus trichocarpa
  Intron number 1 from transcript POPTR_0019s07280.1 (locus POPTR_0019s07280) derived from phytozome v7.0 (chr-ID scaf fold_19; pos 8263610 to 8264383)
ccacttttcacagaaatcaatttgctgtcaggtaatggttatttatgataacatttcaaacttattaattatttgaggctgtagtgtatgttgtttatttatggtgcccaaattgcaccctcagcatgaacatatatataaaattggttttgaaccatggactatggtcttgtcacacaaacatgcaatttgaagttcacggatgttgttggctcatctaaaaccttgagtttctgtcagattttggagatcgagtataatcaggtttaaactaagaacagatgcatcaataacattcattttatatgttttccagactgtgaccttgcttgatttcctttcttcaaatgaaatctatctctctgacctgaatcttaatctttatgcgcaacatctaaattcccataatcatgcagaccatgggtcagtattacattgggattttgtgcctcaaattatcgcaaggtgtttggaattcgattgccctctcatttctttcatacttatctcctgcagtcacattcatttattctttggttggggttaaaaggaaacttttattggcgtttggagctgcatacttttgagaacattgagattacgcaagtgtgtgtaattagccaaatatggcttctgatctccaaggtctctatattcaatgcttcaaacatacttaatctacttttcctctttgttgcaattctgggattgttctttgttaatatcctgatagtattcttttcttttgagtttataggtaaagcgattgtaatc

SEQ ID NO: 54080 - DNA, 979 bp, Populus trichocarpa
  Intron number 1 from transcript POPTR_0003s05400.1 (locus POPTR_0003s05400) derived from phytozome v7.0 (chr-ID scaf fold_3; pos 6669080 to 6670058 reverse strand)
ctcaaattgacggtaccttttcctcctgtttcctaatatatatgtcaccagaaattttttaagtcgttttttgtgttgatttgggacaggaatgacagtatttcaaaaattaggcaacataaattatcatctgctgtgcagtattgagataaatgagaatttggttctcaaaatttttcattgaaaatgggcacacgttttttcttttttcttttttttaaatctggatcatgacccccaacccctccttctgattttcccatgttgcgatgcttttgagataggattcctaggatccatgtagaaaatagagaagccaaatttcaatactccattgaccattctggaaatcagctgttcttgtagcaatatcagattctccataggcatattaattacaatagtttatgaatttcgttatttgaattgatgaaatccggtgaaggaagatgccctttattctaattcataatttgttacaagttaattgaataagtagctatgcctgtaggctatggaggaaatatgcggccaaataacatggatgcttatccctgattccagaccttaaattgataatcactaatagttttctttgtttttttgtatgagtatgctgaatttcttttctcagctgctgtaataggtttaccgtcgcagtttcacccttcctctgcccatattattacttcagaattatgcctggattgtttctgttaaaagaattgaacatgtgaaattaagacaagtccctgtatgctaaacaaggagctgcttctgtcaacttcataatttggtagctcagagtggtctggtttgcatcacgaaacattgttttactattctatcaatttcttatccattgtgctggtgtcatgcataatttgttctgaaggtcacaactacttgtttcatgtttccctttgctcttatggctgttacagctggttctggaggagcagattacgagcctggttct

SEQ ID NO: 54081 - DNA, 403 bp, Populus trichocarpa
  Intron number 1 from transcript POPTR_0006s11930.1 (locus POPTR_0006s11930) derived from phytozome v7.0 (chr-ID scaf fold_6; pos 9125953 to 9126355 reverse strand)
cgcaagctgttgaggcgttaccatttgaagagcctgttagtcctttaactcatgtcttattaattacgtacctcctctgttttttctgtggtagactatatatcttgatcaatgattcatctataaaaaaaaaacaaagacttcgatcttgatcaatgtctgaagattttcgctgtttcagttagcatttagcggttttctgtgtgttgaatatacattagcttgcagtgctgtcactgtgacagttttgaaagatctaagaatatagtgctttcttctcaaaaaataaattatatacatctttcaatttcgaatcaacaaaaatttctggttagtgattttttatttttaataatttggggctctaggtgagtgaataattttaagtttactggtgtgcaga

SEQ ID NO: 54082 - DNA, 381 bp, Populus trichocarpa
  Intron number 1 from transcript POPTR_0003s07930.1 (locus POPTR_0003s07930) derived from phytozome v7.0 (chr-ID scaf fold_3; pos 9430531 to 9430911 reverse strand)
taatttagtttagttaggtattaaccccgacgaccattttcctcctccctttgacctcttcctcctcactttctactgttctaccaagcatccaaatttgaattcggtgattttcctgcaaaaatttccacctaccaatttcaattttttttcacctatcttcttttctccttgtactttacattaatctactgccgttatggtgctttaaaattcaaatttggtccgtggattatcttagatttgttctgattagggatttctttcgcgaatcaagctgagctaggttatcgatgatgcttcaagctgttgtttttgatcgtatgcagttttttttttaattatttaactggtatgaaacaggaatttgtaacggagaaa

SEQ ID NO: 54083 - DNA, 585 bp, Populus trichocarpa
  Intron number 2 from transcript POPTR_0013s08900.1 (locus POPTR_0013s08900) derived from phytozome v7.0 (chr-ID scaf fold_13; pos 8405766 to 8406350)
agatgttgataaccatctgcctctaagacaatctgatagaacacacacagtagaaaacattttgtgatgctacataaatattcctaagagcatgtagcaaaaataggaagtgatgaaaagcagcacaattcttcacgttattgatatcaaagtgtctatccaaaggaagttccttgatcctatttgggaaattcccctccaaacttgcaacaattttccaaccagaaccctgcagcagaatatttgaaatgaaactgatttgaggtagaacttgtttatttcattttgacaatttgtttcaaaggtctatgatcaatacctggttctgttctgtgctactgatggagttccttcctgacttataacaggtacatcatgtcctggtgcatatagtttctgctgctgcaaattccacaccaggtcttggacgataccctcttttcaagagataggtatgttactctataattacatgttctatgatttatgctgtagactctgaacctgcacaagtacccatcacggttcaaatattattctttttgtaaagtctatcgtttctttattccttttgtaaggttgtgg

SEQ ID NO: 54084 - DNA, 978 bp, Populus trichocarpa
  Intron number 1 from transcript POPTR_0014s04830.1 (locus POPTR_0014s04830) derived from phytozome v7.0 (chr-ID scaf fold_14; pos 3737893 to 3738870 reverse strand)
aatcctgagtagtaagttactattctaacaataatcaatcacattaaacacaggctagggttttgatttaatctcattatctgtttttggattggatgctgaaacctggtctctaaaacctagaagcaggagctcttgttgtagatccatggatttgaatgaaattttatgtgttatgatccactaatcgggctgatcaggcaaagattatctaagattaattaatagcacgtgattgaatataggtttgattcgcgccgggtgtcgcttgattaatttgtatgtgttttttccaatcataagtttgagctttgatgaaggtttagggcgacaaggaaaagcgctaaagcattcaggattaaactatggcagataattttgtagtgtgtatgttttagatgcgtgcacgttttcgtagttgtggcgaatgttgcgtgagctgattattggaattgaattttccaaacttagtatgcaatggagtgtgagatgaaatggggttgagtttcttttgttttcattgctcttgatgcttttgattgactatagtctgtaatgctgtctgtagcgatgatggcaatggtaacaagagggattttgaattgatacttctctgttgtatgacgaacaaaaaaatgttttgtttttccgtttgaagtttataaggtatgtcaggagtttctaaatatgaaaactagcatctgtggagggtcactcttatcgtcaattgtcactctgaattttgggtccatatcccggattctcaactcccctccccctccaatgcttaaaaaagaaaaaaagaagaaaagaagaagagttgaatggtccagggctaattgtcgtgtttcattcttttcaagagctattggttgcagcactattttacttttgcaacctacattttgatagagctctaatatctcttttcattcgtttgcagtgattacttgttcaagctccttctcattggcgatt

SEQ ID NO: 54085 - DNA, 381 bp, Populus trichocarpa
  Intron number 2 from transcript POPTR_0014s17760.1 (locus POPTR_0014s17760) derived from phytozome v7.0 (chr-ID scaf fold_14; pos 14104943 to 14105323)
gcacccagttccttctctcagattactcctgacaggtctcgtctcttctcttcccttcctttttttttctcccctttctgggtttcttttttatctttgttttattaagccatcccatcaatcagtgctgagggtacttttttgttcacatataaggggcattgataaagattattaagtttagttagcccaaactgattttagttgctgttttataatgttcaaaaccatttattttttcttggtaaactgataactcgtgcatattcgcaatgaaaattcaaatgttaggctttttatttgctcctttttgtgacatttcgtcattgttgtggccattttgcagtttatccatctttcaaattgtgcggcctataccag

SEQ ID NO: 54086 - DNA, 626 bp, Populus trichocarpa
  Intron number 1 from transcript POPTR_0019s06950.1 (locus POPTR_0019s06950) derived from phytozome v7.0 (chr-ID scaf fold_19; pos 7577496 to 7578121)
ccctcaaagttcttgacaaggtacgaacgaaatataatcttttctttgaaatgattaaccaaccatttaatattcttgcctgtattcaatgaaattaagatttaatcttccggatccaattttctatcaatgaacgagcagcctttcttgaaatattcaataaaatccgttgatattttcttgattttattgccatggattagtctcatgcagaccgattggccactttgagtgaaccattgaaaaaaaatattatgttatactattagatatttgtgcaattattttggttgtcaaataattttgaatactgcatttcaatatatatatatatatatattggtttctagcgaccacacagaagaaatctaatcaaatatttagtaaaatgatgccatttatatttcacagaaatcaaagaatgctttaacaaattaatttttttatcaagcccagtacccagttgaattatcatgtaatttttcctttagtccacaacccctttaatcttattattagttcacaaattgaaaggaaactgtaggaattcaaacctttaaatagtttttctgtctccaaaaaatttacttaattttttcaggtggaaggacgtgaggagttcacca

SEQ ID NO: 54087 - DNA, 920 bp, Populus trichocarpa
  Intron number 1 from transcript POPTR_0003s05310.1 (locus POPTR_0003s05310) derived from phytozome v7.0 (chr-ID scaf fold_3; pos 6548786 to 6549705)
tcgtcctccttcttgctgccaaagtatgtgccaaaatcaccctctaagaacagcaaatttaactcagctaatgttatggcaagaagcagctgtccttgcaaattaaaatgactcgggaaatggattattgacagtatatataattatatatttttttaaattaaaaaaagaagaaggaaaaggtccattatcagtagaaaatgatcttataagttgacggataaattgtacgtaaatagatgagtttcaggggtcttataggtaattttactaagttaaagaacatggttcagaacgaaacggcgcgcaaaatcttatgccggggaagatagagaatcctgcgtggctaaatcttctctctctcaaaaaagggcactctccttttccgcatcctccctaaaaaaagccttcgagcttcctcgttgccaagtcagggattcttgtttgcctgaaccactcctttttctctccctatatatatatatatatgtccattcaaggatttctctctctaaaaccaagctaaaaattcctgcctttgagagcctgtatcttgttgatttagagcagctcatttctttgtttcttccctttcatagaattaaaagataaataccaatctcctcggttttgcttctctaaattcttgcttttttccccctagaaagttttgcatttctttgcttcttgggttcattaatgcagattcttgatgttacttgatgcccatttctgcatctctgttaatcttatcacctcatcattgcttcaaagagcaacccagaaagtagaaaccattaacgaaaagaaaatataaagacagaacctctttctcttcccttttttttttttgtgatttgttgaaggcttgtagagatcaaaatgtttgactgccttacaaggtccaacttctatacaaa

SEQ ID NO: 54088 - DNA, 796 bp, Populus trichocarpa
  Intron number 1 from transcript POPTR_0014s16830.5 (locus POPTR_0014s16830) derived from phytozome v7.0 (chr-ID scaf fold_14; pos 12929020 to 12929815 reverse strand)
agagaccaagacaggaacttcaaagcttccatagtgtaagtctctgtcacttatgtttccagtttggaatttgttccctttgtcttctttatattttcttttgtgggtcttctttgaaatgtaatttgatgttagaaaaataggaagagttcttgtatttttgaattctgtagaaagtgctagatctctaggcaccctttactgcgtattttttactggttatttgattttgttgattcatttggattttttatgatcttgggagcttcttatttcccctgtaatcggtttgatcttcgatttttgaccaaatggggcatgatatcatggtctgagtcagagggctagatctttattataattttgcagtgatctatgcaacctgttggctatgatttagttatatgatttcttgttttgagtcctttaatttgtaatcagatggtttgcagaaggtttaatttctccattgattgagggaatttgattctttaaacctagtatacaggtccaatccaatctctccatgaaactaatttgcacttgagcatggtttatactctatgtaagcttcgattcaatctctcccaagaggtagcctagtggcagccccaaggggctaccaattgatgcaatactaataatgtagattaaaatcatcccttgtattcgacaggaagatggagaattatttgattgattatcttcttaatgttcccccgtaacactttccctaccgtgctgtggatttttttctgcaggtcactgttgtcggctccttttacaggattttgct

SEQ ID NO: 54089 - DNA, 532 bp, Populus trichocarpa
  Intron number 1 from transcript POPTR_0013s04040.1 (locus POPTR_0013s04040) derived from phytozome v7.0 (chr-ID scaf fold_13; pos 2667172 to 2667703 reverse strand)
gaaggcgcagaagccttactccagagttgttgagggtcccttcaggttttttttttttattttgaaaatgtcaagagaaatgtatctaatatcacgtaggtgaggtatcacattcaggtctatatattctggcattttaatctccatttggcatctgagaaaagatgaaggaaaaaacccataaaaagaaactcataaaaacctataatccatagtttgaatcccacaaacctcagagtcactggaggtttacatggtcgttaatttcaaggctcgtgggattaatcgaggtgtatttaagctggcccagacactcatatttattataaaaaaggaaaaatcataaaatcgcatgtgcaatggtatcaaagaacacatagggcccggccttgaagaaggcaagaatcaaaaggcaacaatatcacatccttgaaagccacaatatatataaagacggcaccctcaccgaaatattcagcttgaaagaaatagttaagctggagagaagatagtagaagaagaagttccccca

SEQ ID NO: 54090 - DNA, 996 bp, Populus trichocarpa
  Intron number 1 from transcript POPTR_0003s15950.1 (locus POPTR_0003s15950) derived from phytozome v7.0 (chr-ID scaf fold_3; pos 15601186 to 15602181 reverse strand)
caacgttacgtggatcaatttaggcttgtggccgggtacgcaaaacttttgatttaaattctgttcggtgttaattttcctaattcccgttttgttttcttaaggtttattgcataatccataataagtccacaaatgggaaattaatgaaagcttcactgcgtatgtcagcaagttcccttctggggcttctctgtgttgaattttgtcgtttcttagaagcgatgtagtgctattattaaggtgtaattaagcagatatgtttcgttttacgtaaatttgttggtgataaacatatttatagacctggaccccaagcattgactctctgtttactctgctgttatacaagtttatggataaggaacattcattattatggaatatggatagtcattacgtgtccatcttcttcatccaaaatggcgtgactcttgtacagtgtacagagtacagacaggatctatgctgagaaaattgctcagatggccgtccatatcattctactatgctgagaaaattgttcaatagcttttttgtctttgtatacgacacaaattttaatagctatattacttgatatgaatgctgctgctaatttgattgcgaagaatgaatttcaacatagaaaaataaagttttgttttttcaacaagttgaattaattgccatttttaagggaaaactatctttctgggacagcttcgatatgcttttgcgacattcttaagcatggtgacagattcatccttcaattatgaacttcacgggacctgaacaatttggaaactatagtaactttgctgtaatgttgttgacatgatattgagaattgtcttggtggattacttgacacatggagcgtgattcttgtgttaatctgctttttacgcaaatgttaattctcaatttttgtttctactgatatttttattgaattgcactattctgattgctatgtgaaaaccaggtgcattcccttcaaacttgaaaaga

SEQ ID NO: 54091 - DNA, 754 bp, Populus trichocarpa
  Intron number 2 from transcript POPTR_0003s11440.1 (locus POPTR_0003s11440) derived from phytozome v7.0 (chr-ID scaf fold_3; pos 12239863 to 12240616)
atttcaagtcgcaagtccctctccacaagattcccgtaggtttctctctttctcccttttcattatgaattgaatcatgggttttatgttttacttttaccctttgtatttgttttattttcaagtatgatttggtctcccctgtctgagagttaatcatcggatgttgtctccgtttcatgttctctcttgatctgggttttcttgatttggagttttactcgttagcacttactctggttacttgtttgtgctcctgctttacttacaagctcttgtcttgagtcaatgcccaggctttcatttgaattttattctattatcttggatcgttttgaattctcaatctaaaatgggttgaataattttttttttaaaaaaaattgtacgtaagtttcaaactgtaattgatcgagggttatactctgtatcttcaatttgtgtagtgcttgaatcacgcaagtcttggccctactgatatttaatttcatcccttagcttccccgtactatttttctgctaggttttaacagatgagttggtcttttattttttttttatgtacgaagcttcaaaccatggggcgtcgatttaatcgacaatattacgattgttgttcttttattttgtttttcttttttcttgaagcacaaagaagtggctggatggtttccctctctgatatcattcttttcatttgctgtctccttcatttgaatttctttttagatcgggacaaagcagtggagatact

SEQ ID NO: 54092 - DNA, 1043 bp, Populus trichocarpa
  Intron number 1 from transcript POPTR_0018s07420.1 (locus POPTR_0018s07420) derived from phytozome v7.0 (chr-ID scaf fold_18; pos 7726734 to 7727776 reverse strand)
ggttcttgccaaattctgcagaaggtaggtatctttatccaaaatccatttccttgatacatgttggtgttattgctgttttattgtttgttggtttgattttcatggctacttctttatacctaagcttatgtttcgtttttcctggtgaagattagagagggtaaatctggtgattttttttactattttttttttaattttttcttagcatgtatagttgattgaaggttgagattttattcacagtgatgatatttttattcccccccccctcctttttttttttcctttatgtgaaaactactatttttcttatctcttacacttggtgaacatcaaagatttctgatgctatatggcatgcacattagtattgggatttttagttggtagatcattttcttgtatctcacttttttggcatctcgtatggttttttcgtttggaagatttagaattttcgtacagcactagaagttatgcaaggagatacgtaccgtctacaagtttgttgttaagatcaacacctcaaggattccattttaatctgtatctgcgtttttatgcagtctattctatattattcaaccgaattttagattttctgaatcttgaaatttccttccatttcaagttcttgaatttctctattttcactgctgaatctaatgacagcatcagtctgacaagaaaactcccacgaggtcttttacattcataaaatcttaatgactagaataagcaagcaatggagctgaaaatatactaggaagacatactcaaaaagttgctttcaatgcaactggagataaattctgtgtggttgatataatgcatgatcatgatcaaacatgtaatcttcagagacagaaaaaaaaaactggcttgtgggtaattatatttaatttgcattttcagaaagactgaattggttataagaaatatattttatattcttatagctcaatcaattttagatttgtttgatattggtattgagaacaggagaaagaaagagtatcaattcagagttgtggcat

SEQ ID NO: 54093 - DNA, 273 bp, Populus trichocarpa
  Intron number 1 from transcript POPTR_0006s13990.1 (locus POPTR_0006s13990) derived from phytozome v7.0 (chr-ID scaf fold_6; pos 11230381 to 11230653 reverse strand)
ttgctgtgcaaagcaaacaatctgataccattcaggtccttaataatgtttttttttttttttaattcctacagtagcttcaaaactaatactgctattttcttttatcccatcaacatagctcaaaactctattgctagttaattaatatacagatgtacttcaaaactgtcttggctattgtacatatatactgtcaatattctttgctgattattcgtattttgcttcctttcagtggtacgcgttcgaatttcttgtcgtttgcactgg

SEQ ID NO: 54094 - DNA, 373 bp, Populus trichocarpa
  Intron number 2 from transcript POPTR_0019s03920.1 (locus POPTR_0019s03920) derived from phytozome v7.0 (chr-ID scaf fold_19; pos 3999940 to 4000312)
ttcattcctcttacagcctacactggctttctaaggttatattactgtctttttttcataattattatccctaaggttaataatgatttatcccagtaacaaaattggtagagaagaagagaaacaagatgtttataaccattactgagttaatataaaacctgaaacctcgtttatcacagcttaaaataactacagaatcaaatacaaaatacatataaataatagcaattgcttgaatcaatactatagaatgtgctgttgcctgttgtggttgaaattagtcacgcgtgaacatatacatggcaaagcctgaccatatattttcatgacattaggtgccagaaggtatatcagataacaagggaaacat

SEQ ID NO: 54095 - DNA, 458 bp, Populus trichocarpa
  Intron number 1 from transcript POPTR_0019s03330.1 (locus POPTR_0019s03330) derived from phytozome v7.0 (chr-ID scaf fold_19; pos 3387713 to 3388170)
gttgtagcttcgcttcattttccttcccacaaacggtatactacttctcttctgtgtgtatagcagtgtagcttttcttttaatgattttaagtatcaagacaaaaaaaaaaaaattccaaaaactgtatataagcttttatgttagtgggatctatcatccaattctgcactaagattataatctgatgtttcacaattgtttttttattttttttgaattatatatcagtacttctctctctctttttaatgataaaatcatatgtatattttgttgccactcctctcatatgctatacatttgtctagctgttgattacttttactttaaacagaaaaaacattatcaatagagtagaaaaaaacacgtcaaggattacccaatgctatcaatttatattaactgaatatttcactgcaggaattcgagtcatacagccgacaagtagaagagtt

SEQ ID NO: 54096 - DNA, 418 bp, Populus trichocarpa
  Intron number 2 from transcript POPTR_0019s03330.1 (locus POPTR_0019s03330) derived from phytozome v7.0 (chr-ID scaf fold_19; pos 3388403 to 3388820)
ctttgtggtgagtgcaacttatggcctttgaaacattaatcaacatctccaataattctttaatgaagtacagaggctggtttagatcaaagaagtttatcctcctttgtaattttctaagttttaatctttagactaatacctgaaactacttcttcctgtaagtacaccgaaatgacaatttttgtttttgtaatgtgactcgaaaatgactcgaaaaaaaatgcagtaaatttgttcttacaacttataattgatctttggagaatacataattagcagtaatttaaactctggtaaatctttctttcacttacaagaaataatctctcataattcacaaacatcttttgaaaatggctaaaatgtgtagtatgcttttatgaatcagttgtgttcggcaagttcaaggacacca

SEQ ID NO: 54097 - DNA, 931 bp, Populus trichocarpa
  Intron number 1 from transcript POPTR_0014s15290.1 (locus POPTR_0014s15290) derived from phytozome v7.0 (chr-ID scaf fold_14; pos 11363534 to 11364464)
caattgctccaagcctctcttctgggtattcttcctttcttctttccttttctttgatttgctggtatcgtgtctttttttattcttcttattcacttcttggaaagaaaaaaaaaggaagaaaagaaagagggctatttgatttctggtaaaatggggtgctaagataatgttattttgtactctatgcaagtttacctaaactaagattttcgtttttttggagtgaggattttggatttttttttggtgatttttttgggaagcaattgaatgagagagagtcttatggaattttactttgttgttgtgatgagattgagtttggataatagagaagcaactatctctttccttatcatccattgcagtattttgggcattgggatcaggtgtttcagtgtcggtaggaattcagtttggccgcaattagacaaagccaactacaagctaatgaattatgtgcaaagtcagttgtggtgggttctattttgattaggtggcgtaaatattgtaactgcactcttcgttacagtctagaagagggttagttttgttggaagagagaatatgtttcttgataatatatgcaagtcgccaaaaagtgtacatttgtgagtttaatggcaagttattctacaatcttagatgttgttgggatggtgtgatatttcgcttgtcctgaaaatggtacatgtgtgagttagtatttgcttgtgagttctgtgcaatagcaagccatttccacaatcttatatcttgttggaatggtgtaatatttaaccgatccggtctcttaataaagctcagaaccttagtgccggcttgcctgattctcagtaagtgcagactggtattattgttaaaggttagaatttgattttgacatgattgttatttccatgcaggcttcttgctattcctctcattg

SEQ ID NO: 54098 - DNA, 731 bp, Populus trichocarpa
  Intron number 1 from transcript POPTR_0006s19670.1 (locus POPTR_0006s19670) derived from phytozome v7.0 (chr-ID scaf fold_6; pos 18697054 to 18697784 reverse strand)
agttatacaaggtagtagcttttctgggttttcgagcttttctgatttctttgtgggttttcggttagatctgctgttttgttagatctcctttgttgggttttgttcatatgctcttttggttgctgagattattgagaataacaagagaaatgaacttgtctttgatttgtttcagtatttatgtgaatcttgcctttcctaagctagatactgggaagggttaagcctgcagcttattaagccaaatgctttataaggcttgtctgagggtggattttgtgctattttggtatcttttcatgatctcgcacgtttcttgccctgaatcagcatccatacagatcagttgacttgttatctggcaactgtttctgggtttaattcatgaattcgtagtgtctaatctctttgattttatcccctggcatgtgtttgtatgcatttttggttttcacacagatgatttgtgtggtttattaaaaaacaatgcttttacccctattacctatctgtccggttgaataattcccaatattatgggttccctacctttccctttggatgttcaacagaaaaacctttttgggtccttttgtttctcttttaattacttgatatgtagttcttctaagttctccatcttaggttgcaacatagaactgtttatagatggatttataatcctaagcatttctcaggaaacagaagccaagaaaaggaaattgcag

SEQ ID NO: 54099 - DNA, 965 bp, Populus trichocarpa
  Intron number 1 from transcript POPTR_0018s01160.1 (locus POPTR_0018s01160) derived from phytozome v7.0 (chr-ID scaf fold_18; pos 1070880 to 1071844)
cggacctctctcttccacctctgatctagcttctggtaagtactggctctacaacttgaaagcttctttctctttcttttttgatccttacaggttaatgggtccttttgatttttttttctctttattgatgtataaactcttcaacggtttcccccccctattttagttgatgggttctctttatctaattatgtttttattttgttttgttaaattttcgtttcttctttgctattatcaagtgaaatggaggtccttgctatttttccctccatgatttagtggagcatgtttgtgtgagagagaggttaatggccagtgttgatttttcactatacgtagagaacactatctatttcaggttgtcggggtgggtttattttcttgttgattagttttagtgaggttgttatctttagcaggttttcacttaatctcctttcttttattttattagtaaacttgttctttactggggaaggtttaatttgcaactacttgccactatttttgtgttatctttatttccatactaaaactgctttgcaaatgtggtgttttgtggttttctttactcaaatattgttccctaaagaagaaatggaccaaggttgaaagtgttcatgcatataaccttttcctttaagaaatcccacattacaagttgaagaacagaattaagaatgtcattccagtttaggccattatgcattttggtcaagatatgctttccacaattatagtttatacatgttatttttccttttgtggagattttttttcatccacaacctcattaaaaggacataaccaaggttgaactttagctgttgaaattgctttttatttattatagcttgtgttttctggtttcgtgatcctaccaatcattttcaaactttgacactttatcattgattttaatagaaaggcaggctgggaatcatcttgaggggattcca

SEQ ID NO: 54100 - DNA, 641 bp, Populus trichocarpa
  Intron number 1 from transcript POPTR_0018s12030.2 (locus POPTR_0018s12030) derived from phytozome v7.0 (chr-ID scaf fold_18; pos 12646957 to 12647597)
tcaaaggctacctcaagcgagggctttttgagcaggtgatgcatgaccttatgattggtccaggggaccctaaaatgggttagtgcactttaaagggggcattaaaagagagagactccatgcatatgactcgtacaggaacattgccctttgaagttggattaacttggagcgtgtgacaaatgcatcttccatttagcttacataaacactttaatctattttttaaaaattatttttaacatcagtataataagataattttaaaatattaaaaaaaaattaatttaaaataaaaaaattaaatttttttaaaaacacctttaaaatacaaaaacaaataaggcattaccttaaatactactacaacaatatctttaaaatttcagataagtcctttaattattcaaaaaactccgggcttacctaaaaaatgtcggccctaacaacttctatgctcaccctgatatccataggccatatctttcgggccgtcttttctttctctcctagcccaccactcagcaccaacacacgccggcccatcatactaatcaaataaacgacgccgttaacttctcctttctataaaacttagaaacctagggtttctatcgcgatcggctgcttcagtctccaac

SEQ ID NO: 54101 - DNA, 470 bp, Populus trichocarpa
  Intron number 1 from transcript POPTR_0006s12290.1 (locus POPTR_0006s12290) derived from phytozome v7.0 (chr-ID scaf fold_6; pos 9445358 to 9445827 reverse strand)
cttctatcgcaccctcgccttcatcctcctctctggtacaaatattctttctaaatttgtggttggaattcaatattctttgttaattaagctgagaagatcgaaattaagtgaatagtgatactgtttctatttcattcaatctaatggagaaatggagtctagactatgaagacaaaatggggtttcaaaaagttttagccttttttcgttttgaaggataaaaatagggtataagctttagctattttagtcttattatcttgctgttatgataacgaattgcggacttttcaagtccaacttattatatatatggaaatgggaatttgttggtttatatggtttttagtatccttaagattttgaatcttttcaagaatacctaggggtatgataccgtaaataggttgatataggggagagtggaaacaaattaatttgaatttgaatgcaggtagcggttggat

SEQ ID NO: 54102 - DNA, 872 bp, Populus trichocarpa
  Intron number 2 from transcript POPTR_0003s08330.1 (locus POPTR_0003s08330) derived from phytozome v7.0 (chr-ID scaf fold_3; pos 9710764 to 9711635)
gaagaacttacggggaagctgcgggagtgtaagaggtatttgcaaattgcaccttctctttaactctccttatatatgcatgttgttagtttgtatttaacagttcaccattggctgaatacaattcccaattcgatattgaatgaaaatgcaatgttgggtcgattgttaattatgctgatttttgttagggatgatctagaaccaggatgcatcaaatgatggaactcaccttagcgcaaaacatttactttatgaatgaccaatcatgaaatgtatattttcctttcattgtttaagcagttatttaacaaaacttaccttagcacacaacattcaccctctgtttcttggaaaaagaaaatcatgttttatacagtgctgttatgatgtcgtttgtactatttgttttcctagcttctgtgagaattagatggtataatttaaggggtctgggagtctttgaccaactacagaattttatttactgatgtttcttttatcaggtttcctatccatgtattttcaacttatttcttattctgaaactcaaattcttctatagtcaactccatttctgttatcacagttccacattataggatgaatatattaagaatgtagatacagcaatgattgtaaaccctaagaaccgagttgctaagatttgatacaattgaggatctaaaagtctatagaggagtgacaatctggacatcccatacaatactgttaggttaataggacaaatattgctgacactttaattttacttcttttctgtcagttctctttcatacttactcaattagaattagaatcagaataatgtcctcctgtttttcaggcttatcaaagagtttgacagagaa

SEQ ID NO: 54103 - DNA, 595 bp, Populus trichocarpa
  Intron number 2 from transcript POPTR_0013s02850.2 (locus POPTR_0013s02850) derived from phytozome v7.0 (chr-ID scaf fold_13; pos 1727152 to 1727746 reverse strand)
gaagacctgggtctctctgtagcagaggtaagcaattataatacaaggttaagtaaaatcttttcagttgttcaataagtactgcatcattctgtccttttgcataaaatgccttgtattgcttcttttctgtttataggagcatggatctctgatatgcagtcttgttttaacacataaattgattttagtcgatggaaataatcctgatctcattgttatcaacactttcctaacagaatgacctttagtaatggagggaattgtaacataataatataaaaccattatggagctcgcctaatagcttaagtttttagattgagatggttctttgacgggaataacaatatatctttcatgattagtaatgaaaggcaatagttgcagttattgaacttcatcattcaccaagaaacttgatgtcatcagccaaattgcatgtgtctaagaagattaaaaattatatgccattaattgaatctcgtgtgtaatttattgtattttaattttcttttgaattcctcaaatgtttactttctttctcattttttatgcagtactcactttttggttcaatattgaccattggggc

SEQ ID NO: 54104 - DNA, 663 bp, Populus trichocarpa
  Intron number 1 from transcript POPTR_0014s16780.1 (locus POPTR_0014s16780) derived from phytozome v7.0 (chr-ID scaf fold_14; pos 12850040 to 12850702)
aaaccgctcaaaaacttctctctcaaggtctctgctcctcgtccttttcattttgccttgtggggtttcttgttctcaagctcattgccttagaccgtgtggattcttctggttttgatgtgatccgtcgttaaagacttgatttttttttttaggttttgaattcggtctatgagaaatagggggttttcttaattttcttttgtggggtgtttttactgtattttgttttcaacttttcgtgaacttgtggggctaataagttagattttgctatagtttttttttggcgacttctttttgttcctggaaggaaagctttgtccttggctttcatgtttgaatttgtggaaatgaaatcattgcttatattttcaaagtgttaacgagaagaattagatgcaccttttttagtgaactttgaagtcgataattggggtcctatgaatggggttttggctcctaccatactgtgatttttacatcttgcaagttgttttcaactgctcactaactttatttcttattgttcaagaagctgaggatgaatcgtgacactgaaattgtctctctgtaatttttgattccctttacaactgagactacaagcatgtctatcgttttgcagatccatttcacgaagtcaaaaggaagcgtgacagg

SEQ ID NO: 54105 - DNA, 686 bp, Populus trichocarpa
  Intron number 2 from transcript POPTR_0014s16780.1 (locus POPTR_0014s16780) derived from phytozome v7.0 (chr-ID scaf fold_14; pos 12850677 to 12851362)
acgaagtcaaaaggaagcgtgacaggaaaaaagaggtaacttcatttgtttctccaaactcttacctgtcactggcttcctttcctgctaaatgattgcaagcaaatctgttgcaattattttcacttttataagactggtataataatgttgttcgggatgcaatattgcttaacatgacatattttttaatggagttttatccaattactgaattgagataatgcctgtctgcttcagggacattaagagttcataattttttggtgcctctatgtaacttggtttctgtatttgaacatctataaacatattctttgctggtgcaattggatgtgagaaagctgtgcaattttaagaaaaactttgaaggcgggacaatgctatacaatttccataggataatagcaggggtttctgagaactaatggactagggcaaggggattgatgaaggggctacaggttaatgatgaacagatgatatcgaggcattaaaggctcaagtggcagggattttgggcttagacaaatgtggcggaaaagaagttacttatttttgtttgattatgttggccttttcatcacgtggttacatgaaagcgcatttaggaaagatgtaatcatttttttgtgtttcatatacaaattctgagctctaatagcattctacttctttaaagcaga

SEQ ID NO: 54106 - DNA, 586 bp, Populus trichocarpa
  Intron number 1 from transcript POPTR_0018s05870.1 (locus POPTR_0018s05870) derived from phytozome v7.0 (chr-ID scaf fold_18; pos 5509528 to 5510113)
agaactaaccatttgaccttgcccaccaaccaggggtactgtgaaatcagtgccccatatatatgtatgagttagggtatacattccatcttcaagtgtttatgagagaagtttcttgatattataggttggatctaggccaacgacatcctaatgaatgactaattttgtctacttttgacaagttccctatgcttgtggaattgagcctactgtaaatatgtttaggacctgttaccatttgattagtggtgctaaaaacaacaatgatgtctgttagttctttgtcttcctactgcatccataaaacaaattttgcaagacaagcttgaacactttgcaatgcaagccctagagatgagatgcaagaagtctagggttatgttcggatgaagaaaaaacacatgctgcgttgacctcgacctcatccaagtacaatgtcaataagatggccaaagggaattaccaggccttgttgcaaagtatacaacttatttatctcttgtttttgtgcatctaaatattcatttctaactttgtttttatgcaaggttaacaactaaaggagaaagagaaacttcatcaa

SEQ ID NO: 54107 - DNA, 673 bp, Populus trichocarpa
  Intron number 2 from transcript POPTR_0003s12960.1 (locus POPTR_0003s12960) derived from phytozome v7.0 (chr-ID scaf fold_3; pos 13381675 to 13382347 reverse strand)
atatctcgaaacacagcggtttcctcagttcagaggtttgcataatttttccattccgcttgtgaccttgcattttgataggaaatttatgtatgattattttggcttcatctcgtccatgtattctaagttctgccagttaatgccctgattctgaaatcataatttttatccaggctgccttttcaaggaagtcttggctttcatacccagcattatatgtaagttacatctattggtttcttcttgtatgtctgaacacaattcatccaagcatgtacaccatatccctacacactaagggacaaaaacagactttggttcttgggagaaggggggggggggctaaagtgcaacattaccatttgtggggtgggggattggaaggggcattttcacatgattgttccagaaacttctaaaaacaggggggggggggggttgaatttttcttttgttttttttgttaaaaaataaatttgccccccctcccttaattcgtccttgcacgcacacacatctatgtaccctgcaaagtgtcatgacaattatttagattttttttgtgatcaatttattcttcttggtgttgcatgcatgcatatgaacttattttgcattccttgactttttttcagagagataagcaagggagaaggaggctaatttgtgc

SEQ ID NO: 54108 - DNA, 663 bp, Populus trichocarpa
  Intron number 2 from transcript POPTR_0176s00220.1 (locus POPTR_0176s00220) derived from phytozome v7.0 (chr-ID scaf fold_176; pos 22902 to 23564 reverse strand)
gtggcttctgggcccttctcttctcctgactacaggcatggtacccacattatggctgcctctatcttctgtattccttggtcccaatatagccagccttctttccttgattggactggattgcatcttcaatcttggtgctaccctttttcttctatggctgattcttgttctcggtccaaaaaccaggcacaaagctgcaatagcaagcctcctttgagttacaaattttggaacatggttgcaactgtatccggttttgtgattcccttgatggtgttattgggatctcaaaagggcaccctccatcccagctgcctgctttttatcatgagcatatttatttttgtgtttcaaaattatttaaaaaaaaataaaaaagtttttaatttttattattttaaattaatatttttttatatttttaaattattttattatgaggtttcaatttcgagtctcaattctatgtaaaaaaatccctaacaaaacttgtttcaaaataaaaaaacagagagagaagaaactttaccgtccccctttccctgagcggcttagccccctttaggcattaaggattgaaatgttaatgtgttaattatggaatatgattaaaattgaaatcaaattttaatgcaggattggccaagatattgaagaagt

SEQ ID NO: 54109 - DNA, 699 bp, Populus trichocarpa
  Intron number 1 from transcript POPTR_0176s00220.1 (locus POPTR_0176s00220) derived from phytozome v7.0 (chr-ID scaf fold_176; pos 23969 to 24667 reverse strand)
cactgcacatttctttacataatcaacacagcaaggtttctcttcctttctctcagaagttaaacctcaatttcaagtttcttttctttttctttatcttgattagatgttcttacttcttagatgtctcttttttcaacgattgcttattattcgataaaatctgtttctttctagtttttagagcgcttatggtagttgtattgtagagtgtagttgaagttggtgagttgagatatggaagctgttttctgattgggctttcaattctctaacttttatggtgggtattgttgaattttgtcattaatttctgattttgaagtttaatagctcaagttgtgatgagcttgatggtggtactgttttgtaaattttggcaatgttttattttcaaatgattctatattaactcactgtaatgagtaatctgttactgtcttgtaaaattctcgagagtcaattgctgtggtgtctggagtatatggttgctgtgtgattaagctgcttggagatgttaaaataatttgttatctggaagaagttatggtggctgtataggaaatttttttaagcaaatatgcagttagtttaaaccacagagaactcactggttcgtgaattgtgatcttctttgatctggcaaatgttcttatggcctttgtttccgtgtttcagagatttgagaccatatcgtat

SEQ ID NO: 54110 - DNA, 541 bp, Populus trichocarpa
  Intron number 3 from transcript POPTR_0018s13850.1 (locus POPTR_0018s13850) derived from phytozome v7.0 (chr-ID scaf fold_18; pos 14118324 to 14118864)
tggccagaagtacttgtcctattcaagttcacgaagtaagtgattctctctaccttgcaaaataattatcccacaatttccttctttctgtattttattttattttttgtgaaaaaaatgatgattatgcattaaaacaagcacaagccaacaagaaagtgactactgctaacaaaaaagcagagatgacaacctggaaacatcctatcttgccttcctatgctttcttttgctaagctatgagctaaatcattttcctcccttggaacatctctgagagtgactttaccctttaatgcaattgaaaatagatttgaattcattctgcactctccatggtcttccactagatctcttaacaagctgatagcattagaggagtaagtttctaaaatccactccacttcctttgccagcctacagaagatcaaagagtagatatcatcccactaattgtacctcaaatgattaggaataagctttattatgtgttacttatggtacactttttggtgttgttttccagcttagtgtcacttct

SEQ ID NO: 54111 - DNA, 512 bp, Populus trichocarpa
  Intron number 1 from transcript POPTR_0014s08590.1 (locus POPTR_0014s08590) derived from phytozome v7.0 (chr-ID scaf fold_14; pos 6379111 to 6379622)
tgcgttccgctccttctcattcaatcactaacaaggtaatctttttaccatttctaattcatgatctgtaaactgcacgcgctttggttttcattgaattttctcagatttaatggaggagtgttacagtgatcttgtgatagttttgatcgattgagtattttttaatgtatttatctgtgattaattgctggataggaagccggattagtttttcctttttgtttggttgatgagaaaattgaagaaaacgagagataaatttggattaaattctgtactttttttgttatttaggtttatctgaaatgaaatttccagcttagaacttgctcaaaacaaaaatcagctcacttaagataaatctttttggcacacttactattttgctcctcatttgatgattatgaagttttggttaggtttctgaaaaatcgacaccataattatcaattttcttgaaattttaacttatggtgatgattaacgatgatatggataatgagaagcag

SEQ ID NO: 54112 - DNA, 616 bp, Populus trichocarpa
  Intron number 4 from transcript POPTR_0014s08590.1 (locus POPTR_0014s08590) derived from phytozome v7.0 (chr-ID scaf fold_14; pos 6380206 to 6380821)
tccaagattctaagcaccgtaaaacacttgctgaggtgagtttttgggtgtttgggtgcatgtgttttgaatcattgtaaaaactatactggagaagacgaatcaataaataaatgaaaaactgatttttattttgaagtaaactgcaaaagcttctttatttttaatcctagattagatctctacagcagacacgcgtgcacacgcgtccatgtgtgtgtaagttaattccatttcctttagttgggtgatattatatagtaattacttgccatttgatttttagtggttaatgttatatattgattagattaaaagtaaagcagaatagaagttggacaatcaaaagaatgtattctttttgaaataaaaagaaatagaaagaaaagtaaagttgagaggtttatgcaatatgtagaatccagaaatttgagaatgaaaggtgtgtggtttctttcatttttggcaagaggtttttaggtctcaaggggaatttggttggtttggctcctctaagatacaatcattttgtttctctttgttctgtttccgagatccatctaacatagttaccatttgctatgtattttatcttttcagctggaacagggtgtag

SEQ ID NO: 54113 - DNA, 912 bp, Populus trichocarpa
  Intron number 1 from transcript POPTR_0003s21780.1 (locus POPTR_0003s21780) derived from phytozome v7.0 (chr-ID scaf fold_3; pos 19816795 to 19817706 reverse strand)
gcggccacaaaaagaccagacaaggtacgattctttttctttttttccatctctctctctctctcttctatatatatatatattaaatttaaattttattttattttataatttgtgcttcttagttagttcgtcactgtagaaatgctcggaatttatttgatagttaattatatatttttttaactaattaggctaagtttgttttaggattaattaagagttaaattgttaaatatattatctgtttaattattgaggcatgtgttttagtctgttttgaaggtaattgtttataattttttatttttctagttgagtttttagtgtggttaatggatgttttttttttttttggaatacggtaggcgggtgcataaatttgttttatttttcctgagttttggttgaattacttgctcttgtttttgttcctgatgtgaatgaatctgcttggtgtccggaattgctcaaatgaagaaatggccgaaaagaaaatgttggagttgaatttttttttgaaagaggatatgatttatttattttggttttttggtgggtaatcaaaagcttaaaaaagatagggttttagactgtcttctagctttattgtttttgtagtgcgggattttttttaaaaaaaaaagagcgatggaactgttttgggcaggcactttattgtttagaaaactactattgggttggtatctatacttgaatgtttaatggggtcacgtagtttatctatttctataaaattttactatttgcattgtttatatcatataaaatcatcatgttatcaatggtaatgagaatgagtaacatgatgagagagtttcttaaagctcggaggttaataaatcactgaaatcttaactgagaaaattaattaattttggtgcaacagaa

SEQ ID NO: 54114 - DNA, 665 bp, Populus trichocarpa
  Intron number 4 from transcript POPTR_0014s07720.1 (locus POPTR_0014s07720) derived from phytozome v7.0 (chr-ID scaf fold_14; pos 5786576 to 5787240)
tttcacaagagaaggggatctgccaccatccctatgtgagaatggttcgacaagtgaccttttggaggttacaaaagagaataatggtacagatggattctgtatatttttttgtttcttttttggcttatggttattccaattttcacctgcttttattttcgattcttgctgagctgcttatttgagatttctgtaagttgcactagaggtggaaagtgcatggtgttattactccaagtaggatagtcttgtcatcttagatggcatttattgatattactccaagtagggatcggtgtcatagtttctttcataatactcacattcattgggaagcatagtatgatctcagagaagtgctattctctttctggggcaagcaataaaagaagtatgttcatctctgttgcttccatgatcttatgccttatctttttcaattttattgttgttttctgtgatggctattttatcaaattttttaattcacctccttaggctggttgaatagatttttcaaaactcttctattcatcagttatcatgtttcttttaagctggcacattattttctttaaagttatatcaagatgagatttattggtcttgacgtaagcattgtttgactcaaaactatttataagcaggtagactttccacta

SEQ ID NO: 54115 - DNA, 879 bp, Populus trichocarpa
  Intron number 2 from transcript POPTR_0013s11880.1 (locus POPTR_0013s11880) derived from phytozome v7.0 (chr-ID scaf fold_13; pos 12505456 to 12506334)
tctctcaagttagcctcactgaccctgttattgctgtgagtttccttttctttcttacttttgattttatgcatatatggtagtagtacttttggttgtatgtgaaaatgagattgttgttcagtgaaagttaatggatattgttaaagaaagagggtatcttgcaaatttattgactgatagagggatatgcagatgacccagataatcagaataataaatgttgttgataaaattctttgagattttaaagtaactgttttgattaaatttgtataagtgtcaattttttggtcttctagattcattgctgcatatgttagactttgggaaaaaaaaattcactttaaatttcaaactcatctagttttcaagcattggaacacaaagatgtgtctgaattgttaagtgacaagtttgcattaatctgggtctagggtgaaaagatggtgcatgttgcatagcatgatatacttggaattctttgctctcctttgtaaaagcttgtgttctagaacaggaggtgcctcaagaaaagtgtagggaagcaggaaattacatacctcactttctctgtaatacagcctaatggctgcgacttcctgtggatgactttgttgagagggaatgacttgttacatttccaaatgtatgtataagctaggtgccttcataaccaagaacatttcttggatttatccatatatggtcccaaattgtgaatttattgaaatttactcttttgagattggttctcttacttgatatactctgattggaagttatcaaaaaataatttatcatgataaccttctcttggtttattatagcttgcttgggcttagaaatagttgttttgtgttggtttacaggttcttg

SEQ ID NO: 54116 - DNA, 354 bp, Populus trichocarpa
  Intron number 1 from transcript POPTR_0018s14860.1 (locus POPTR_0018s14860) derived from phytozome v7.0 (chr-ID scaf fold_18; pos 14900519 to 14900872)
ttagcgcaaagaagactatcatttcctagtttcaggttagttcatattttcttgattatatgttctcatgcgcagctcagctccatttatgcatcttccaaggaagtatcaagcagtattagtgtttcgtgttgtttgattcgtgtccatgtgtacccaagcaattattattaacaagtaaagcttcataaacttatatccagttggccgcttctgtaaggtattcagtctcttgtttttttcaatgattgatacttcactattgatcttctttcttgagttgaaactacaagtaatttggtttttgacgtaaaagcagtgatatatagcatcgatctctgactgctacgccca

SEQ ID NO: 54117 - DNA, 569 bp, Populus trichocarpa
  Intron number 3 from transcript POPTR_0018s14860.1 (locus POPTR_0018s14860) derived from phytozome v7.0 (chr-ID scaf fold_18; pos 14901360 to 14901928)
ctgtgccttgtcaataatcttcactgtttccttgacgtgtaaagttaagaatccttcataatgtctgtatggatatatttgtgtatattgtatagcttcaggaatttggaaaaaacttgcacaaacttttctgatgcttctatggtagatctttctctatttaaggttttaggttgacaaaatctgctctttcgaagttccaattacacagttttgcaatattttggtggttttcctattatttttggctgtcttgttcgcttccaatttaaagtttatgaagtgcaaatgatttccaaataggcaaactggcaagtattctgtaaatacccttctcattacatcatcaaagctaaagatcaagtttccatcaagtgttgatcccttctgctaaagatgttgctgtacaaatacgatgtttttctttgaaaccatccgtttgaatttgaatctttgcactggactcttacaaacccatggttaaatattttacctcatcttacaagttgttttagttccatttggtctttccaggaagggtttcctaggagcaactcttctgacttgtg

SEQ ID NO: 54118 - DNA, 719 bp, Populus trichocarpa
  Intron number 1 from transcript POPTR_0003s12080.2 (locus POPTR_0003s12080) derived from phytozome v7.0 (chr-ID scaf fold_3; pos 12766132 to 12766850)
ctcctacgaacaggtcagtctgtttctctcgttcttgttaaaatgtgtctgcttttggtttttcgttttcttttatatatatatataattttttttttttttttttttggggggggggggggggggggagcttaatcatgttatgaagatgtgaacttttatggttgtttttggtgttagcgttgctaggacctggtattggattttggtgtgaaacatggtgttatattttttttctgggtttcctttcttgtttttcttcaaaatttgtgcagtttgtaacagatctttcagtttgaagttttagtttggattcttttatggtgagtgtgtttgaattgtgcttggggattacttgctattgctccgtgctgagtttgagtctagtttttagatgtttaatgcaaatttatggaatatgttgtgtttaaatttttgttgcgtgacaatacccttaatttatctatcatgtgggaaacgagaaaacaaaggaaagaattttgagatttgatcatgttaaactgaactttagatgatctatgttgagtgctaggtgattgatgcatgctctgaaactttccagcaataacgcttcggaaattgaagggtttgttgtatacgagattcactatggaagtaggaaagcacatcttctgaatgatctattccatgtataaatttcaggtggtttgatttgaactctggcgaaagaactgagc

SEQ ID NO: 54119 - DNA, 324 bp, Populus trichocarpa
  Intron number 1 from transcript POPTR_0006s16260.1 (locus POPTR_0006s16260) derived from phytozome v7.0 (chr-ID scaf fold_6; pos 14183568 to 14183891 reverse strand)
tcagcattcgtcagtttttccacaactcaatcaatgtcaactaaatgtttatgattgtgttcttaaatctttccttgaaaaaagacaagaactaatttttattcatattcattgagggacggggaaaacatttttatgacatacaataattaatcggttgagattagatggtttgattgtccttactgtcacatcatcgggtattgcatcacttttactacctggtggtcacacagctcattccagatttaaaatccccctaactgtttctgatacttcattgtgcaagattaaaaaaaaaacaaacaaaccttgcacgacttc

SEQ ID NO: 54120 - DNA, 854 bp, Populus trichocarpa
  Intron number 1 from transcript POPTR_0003s20960.1 (locus POPTR_0003s20960) derived from phytozome v7.0 (chr-ID scaf fold_3; pos 19292338 to 19293191)
actctgactgatttactccaatttgtatcatcatttgtgcacggtaactctctctccccctcgatatatcttccttaccttgtattatgtgtttaatttgtttcttttgttttgtggggtttttttttttagaggaaattgtcgggttttttaggattagtgtttcatgatgatttagtggagatgagtatatgtagtgagtttgtggggcttttttcaagattctcttttgatgcttcaatctggcttttcccctttctttttgatgtttatgtgtgcatggttgcatcttgatgagtgatgacattgttaaaaggctgaggtcatagccatggagaagatttgaaaagaaaagtttgcttgctatcctcggaatttgctggcttatatgtgttcatatgccatacaaaacattgagggctatgtccgttttggacttggatctagtaggattccactaattggtgattgttcctttttgtcttaaacttttttgctgtgaggatgctgcgcagaaccaaagttgattcttgcctatccaacatcatcttaccttgaaagattgttatattccaattccaagacgcaaacttttctcttgatgtgaatgagatctttatgagtagctgatcttcttgatgatcaattagttgatcaccttaaatgttttagttttcctattagagatagaagatacataatctagaaaacttcaccacttatctgttgattgatttcattggaagtgcaattgtcaataatcgttgtactttcttaagttttctgttgaagaagtttcatattttacacagaaacttgttgtagactgcttagcatcttgtctatgtatgcag

SEQ ID NO: 54121 - DNA, 623 bp, Populus trichocarpa
  Intron number 1 from transcript POPTR_0064s00280.1 (locus POPTR_0064s00280) derived from phytozome v7.0 (chr-ID scaf fold_64; pos 88313 to 88935)
ctgaagttgccaaggttatcggcaaacctgagaaagtaagtgttgttttccttctttaattttcatgcgttcattaatttcaagcttgtcagtttagtgttgatcagtttattaatccacttgtgggtttttatatttgatctgaaaaatttgtctgccaggtgttgtctggtaggtttgttagttttactgatcacctaaagtttgttggtgtcttggttggatcttagaagtttggtttttgttttttatgaatctaacatcacttgatgaagaatccacagcactgggatctggattattcaattctggtatggatagctatgtttatgttcgcctgagttgtgacgttgtttactatggcctgtaccattagaaaattgaaatagattttgctagattacagtgatttctttactcatttatcaatacattggacaagaattatgttctttacacctcaacttccagcctcctttctgtgctttgttagaatacaagccattgtaaacaatacctgggccagattctcatgagtttttcttgtcagttattaatttgtttggtgaattctagctatggaatgtgcgttcttgactaatttatgtttgttgtcttgcagt

SEQ ID NO: 54122 - DNA, 691 bp, Populus trichocarpa
  Intron number 1 from transcript POPTR_0003s16130.1 (locus POPTR_0003s16130) derived from phytozome v7.0 (chr-ID scaf fold_3; pos 15749934 to 15750624)
ggcataatacgtaattcattgatgcctcacatggggttttaaagtcattttggcccgaagtgtagctcctggtgcctgcactgctaggagatattagccacagtttgacataacatgatagattgttttaataaaagaagagtttctagttatctgatttaaccattcaacgaaaagtgactttacaccattgcagggtagttattgcatttgttgttttttccacatgttgtttggtgaactggagcatttagttctggtgaacaagtgtgataatgtgatggttagtttgttgcaattttcttttcaggtacatttgatgtaagcatgtggtactaataatactatgcattaatgtatcattggcatgaatgcagacacaaacaacttgctcgtttcaggtttagaaattatattttgaattccgctgttagaacacaaatttcttatatttttcttaagcagagaaactctttcctttagccaaaagaaattctctattttcttttttaggtgatttttgtgccccttcttttctacttagtctgcctttttttttcttatttgattgatctcctcttgtttgttggcatgtaaataaattaaacaaatttatctatgttgtctttgtcaatgatttaattttgaaattataggctttaaatatatcaagtctgttcaagttgcaaga

SEQ ID NO: 54123 - DNA, 386 bp, Populus trichocarpa
  Intron number 1 from transcript POPTR_0006s26420.3 (locus POPTR_0006s26420) derived from phytozome v7.0 (chr-ID scaf fold_6; pos 24640510 to 24640895 reverse strand)
acaaaatatagtagttttcttttttgggttttcaggtatcgcgatatttaattttcctttgatttcccataaatatttttttaaattttttttgagtttggttttattcaattaattttaaaaaacttttttttttaattttctttctaaatttagaggttctatttctctggcactgatagattcttcattgctcttttttatcactaaaaaagtaaaaaaagtttggaactttatcactcctgtttttttttttgggttctattagtgatttgattttatatattgaaggcgaagttttttttgtactaataaatttattgtttttattttctgggttgctatttttagaggcaaagagagctaaagcagtgtgtaagtaaaac

SEQ ID NO: 54124 - DNA, 826 bp, Populus trichocarpa
  Intron number 1 from transcript POPTR_0018s12630.1 (locus POPTR_0018s12630) derived from phytozome v7.0 (chr-ID scaf fold_18; pos 13160761 to 13161586)
agacaccgcctcctggttacacttgctctctctagatccaagctaagtacgtaatacactttacgtacctaaaaaactcaaaaccatatatatcctgattaaattgtttaataatttgattaagttgatatataggtaaactcaatatcttagagttagcgagtagtgtttgcatgttaatgcattttaatgtcttaattttgaaaacagaatattaaacccggcaaataatctagaacttgagttgggatgggtttatataaatcaaataagagttaaacttgattttaatttttttaatttaaaataatattattttaacttttaaaaaaaatgtaaaacaatatcgttttaagtacttatatgcaatgttgcaaaaatgatccataaaacatgcaccgcaaggataattggaagatttaaaaccaaaacatcatgtttaatttctcttaataaaaaaaattaatatttttaaaaatattattaagaaaaacaccattttacattgctaagtgcaaacaatcttcatgttatttgcataccctaaaaattcaatcggatgaataagcttagttgctaattatcaaattaacaaagaattaacaagatgggctctcatgtatcctcgtaatattgtcgtgactgtaatttgatggtcaatttcaatcagtggagagacacctaaatatagagttttttcttttcttttttatggattcttttgctttataatgtttttacatatctaagttctaaatagtgacaggaattggctcatgatatatctatatatgtgtgtatgtgcagactagctagctgatcatcc

SEQ ID NO: 54125 - DNA, 822 bp, Populus trichocarpa
  Intron number 1 from transcript POPTR_0003s11460.1 (locus POPTR_0003s11460) derived from phytozome v7.0 (chr-ID scaf fold_3; pos 12253879 to 12254700)
gcttctctacaaggttggtttcaatgtgaataatatttaatttgttgaaagaatttcagcttgattagtcgaagaattagtaggtctctatatttctgacctggtttttttttttttgtgtgtgtgtgtgttaatgtgctttttacacacagactctttaccttataaaaatcgagtaaatggtatctcatacgtgagatgcagaagagagaaaatttagtttagcttgcaaatttctgggctctataatctgaactagtgtgactccatgtctttgatcatgaaagaaagtaagcattcatttcttcggttgattggcatgtcaaaaaaagaaactgaaagaagcaatgctacaattaagcagaaattattgtgttttggcagcataggtttatggagaagatagttaaaagttagctcacctggctcatcttttattaaacacgcaccctgtttgtactcttctggcaattagacatttatggaaaaagaactgttctaagaatagataatttgaaagcttgctaatagaaattattaagatattgcatttgacacaactgagtgggatttctaagatgatcgtcttccagttcaccaaagtgatcaatcgataggccatactttaactttccttttctcacattttatcataaaacaagcataccactagatttggctgtctatattgtgtacctagtagtcaaaatcaatggcgtagaacaatcctaattgctgctcatgttttaagatggccctgctcatctcatttgtttcagttctgattaattgggtatttctttgttttgtagttttagagct

SEQ ID NO: 54126 - DNA, 487 bp, Populus trichocarpa
  Intron number 2 from transcript POPTR_0006s08280.1 (locus POPTR_0006s08280) derived from phytozome v7.0 (chr-ID scaf fold_6; pos 6015591 to 6016077 reverse strand)
caagtatgtttttttcttgcctaataatgtatgtgactttagcggctggctgatttcttttgatttgttaaatcatgcaataagataatgcttgaattgttttctgctgaagtttgaacttcttaaacatagagtgaatcatgtttgttacttttctaaaatggttcttgtggtttgagtgcttggactggaaaagagtattataagactaaagacattgaaaagagagtgtagtaagtaaattacaatgtgcttgctctccgtttcttctatgcacgcgaaggatatgcttttatgaattgatacttacagcgaaaacaattttactattaggttatagggagagagattctattagttttattgcataatttggtacccacctggcaaggagatcttttaattattctatcttaggttactgacatggtagggactcatttcttagtgatttatgtgacagtctttccagaatcaaggtctttgg

SEQ ID NO: 54127 - DNA, 213 bp, Populus trichocarpa
  Intron number 1 from transcript POPTR_0006s08280.1 (locus POPTR_0006s08280) derived from phytozome v7.0 (chr-ID scaf fold_6; pos 6016097 to 6016309 reverse strand)
tcgccggtgatattctactcctccaatcacacttcgtatgtttctctcaaaactccaagatttcatttattttctttgcttttgaatcacctgaaaaggtgagttattgttgcgtgcgtttcttcctctcctaccgctaacaatataacggtgattattatcacatgtatttctgcagataaacttttgaagtgggcaagttcgatagtgaca

SEQ ID NO: 54128 - DNA, 454 bp, Populus trichocarpa
  Intron number 2 from transcript POPTR_0013s12850.1 (locus POPTR_0013s12850) derived from phytozome v7.0 (chr-ID scaf fold_13; pos 13485762 to 13486215)
tatcaagacaacatattttctagttaaagttctttgattatttgattcagatgataaatcaattattaattttatatatgaagcaatggattgagaaaaaaaatcattaattttggttttgtgaaaaatagatactaaactactaattatctatattttttattgtttatttactactacaagttgattcaatatatttatttcatatttgtcttaattatgttataattagttaacaaatgataatgatttcataacttcttcttattattattattattattttgtagttacatacctacatggaatattattgattcaagatgggaacttccactccattattatataactatatggaattttgtagttatatacctatatggaatatacttttacttgcaacaacttattatttgaattttttactatcattataatcctaataaggtta

SEQ ID NO: 54129 - DNA, 550 bp, Populus trichocarpa
  Intron number 2 from transcript POPTR_0006s12080.1 (locus POPTR_0006s12080) derived from phytozome v7.0 (chr-ID scaf fold_6; pos 9230512 to 9231061 reverse strand)
gctgctgcctttatcactcttttgaaggacaaaaggtgacctactctcatgttttcttgttcagtatggaatcaaattactgcatgctgctgaccttgctttctaccagatatgctcataaggttgaccgtgaattggatgtgctttaatatatgttgttttgcgaacttgattgattgcatatatgttttacctaatatcaagtctgaaaggcttttttgttttcttatctaggctctttgaagatcattaagggtttttttttcccatgatttttgttttgtgatgtatgttgctacattgaggtgtggtgcttgataaatattgcctttgtagacgactagttttttatctaatcaaaatgaacaaaaataataaataatttctgtaaacatttgaaagaggaggaagaggaggattttcctcttcgttttttgttcaaatgttactgatcaaaatagatgattgcctctgtagcttggaaaaaatcatgttacaatgcacattttctaattacttcttttctttgaaaatatgtctgatagtgttg

SEQ ID NO: 54130 - DNA, 707 bp, Populus trichocarpa
  Intron number 2 from transcript POPTR_0018s13500.1 (locus POPTR_0018s13500) derived from phytozome v7.0 (chr-ID scaf fold_18; pos 13812621 to 13813327)
gttcaaatagcaagcaaggacttagacagtggcaggtgattgtattttattgttgatcttgcaatttgggagtcttcagttagccaaatatgcatgattagtatcagaatgagaggtttcattagatgagcctcctgtcttgatttaatatttattttctggtgactgctgaacttgtgcatttcagtccagaaatttagctgtattgtttgcaattaaaaaaggataataatttgttgagatgtggcatgaattcaaatctttattgtataaggacttcaattttaactcacacagtacaatgaaagacttgtgattgttttgtctagaaaaagattaggattatgactaagatatattcccaatttaggcctggtttttttatttttttttaaggatgatctgttatgttcttgtgtgctaaaaagagagctagcatgagaaactcatagtgtgccatgagggttagatgtatctgagattcgggtttgatagttcttcaaaacttgtactggttccgattatagtaaaatttctctttaattatgaaaataggcatagacgaaccatgtaaaatctttgtgatatatggttgttaccttcctgtgatattctctatatttttatgtttgatcctttagtgtgtacttcctttatatgtcactggtacagacagaggttggtttcttggcaaagctttctcatcc

SEQ ID NO: 54131 - DNA, 859 bp, Populus trichocarpa
  Intron number 1 from transcript POPTR_0014s09390.1 (locus POPTR_0014s09390) derived from phytozome v7.0 (chr-ID scaf fold_14; pos 6969739 to 6970597 reverse strand)
ctacaaaaccaaaactctcgttgctctttcaattggtactctctctctctctctctcactcagttcaaatttcagcttcattttcgaacacggatttgtttgcttcctactgtattaactctgagaaattaggtcaatgctaatgaaatcttgattttatttttattttgaagttatttttcgaattttactgtgatactgatttatagccgatttgagctgcgtttgattttttgaagcagctttgaaatttgagtttgaagtagtaagtgactttgcttccttttattttttatttttatgaaataattaaagtgtaattatgcttaaaatcaagtgtttgatactgtaaatttgagctacttcttgtttgctagatcgcagaatttgctgattctgttttaagaacgaaaatcaaaagttgtagaaattgtagaatctgaactgcattttcttctttaaatcgaactatatttctgttttacattgctttcttggtctttctaagctaagtgctgtttatttgcaatcttaaccactgtttggcagctgagaaaatgaaaatgaagataatgaaaatgaagtttgaatttcgtttttcctttctagttgttaaggaaataaaagtctaacacgtaactcaagaatttgaatattttcattttctcagattttgagatttgtgtacgaaaattacagtttcaatcatttgctgatcacactttctcagccgccaaacagatccggaccgagtttgaatttgtttttaggtttcgaaattaaagaccagatttaagttttcgtgaaaaaatatttatggcaatcacttattttgttttgatcttcaattgagaaaggt

SEQ ID NO: 54132 - DNA, 941 bp, Populus trichocarpa
  Intron number 1 from transcript POPTR_0013s10040.1 (locus POPTR_0013s10040) derived from phytozome v7.0 (chr-ID scaf fold_13; pos 10021488 to 10022428)
aacctctcgaactctatttcccttcttgcttcaaggtaaaatcctctgtctctcttgccatagatgaaatgggtcttctttctcttggcttatagtcaaccatgccatagtttgcttcttcttaacttgtgttacttccttctgttgtttgctgtagttctgagttaccaaggtaataagaacgtagatttttatatcatttgaagggctcaatacacttttttacatataaagtacttgtagtttactgcttatgacctgttttgcattctgggttcttaggattttaattctttgattacttgaattttattgtacaagatctgacctttcatggtttgatattgatgttttagccattgttaggtaaatgcttgttcattatagtaaaactgtttattggatttagatctgcttgttagaggctctgcattgtggcttttggaggaaaatattattcagatctgatctgtccctccgtttagcttttgaggggctaagatgcttcagcttcttgtggtgtcttcttctaatgatgaaatggttgtttaggatgatttgatgctaatcaggatatttaccattaactttacttgcttgtattctcgacatacatttggttggttaggtaggtaagatgtgacatgagtttagaagatgattttctaatgtagtggctcctcttttatgacatgtgatgaaaatgattcatgggatatttgagtatagcaagtttggagataacttttttgattttttgttacatttttgcatgaagctttagggtagtggaaactgaaaactacagttatctaagttgcgattggttaccttttcttttctcaaagaaatggatttttgaatgctgtgaaatactatagtttctgctttgacttttattgttccttttatttaatcatgccaggaatttatcttctcca

SEQ ID NO: 54133 - DNA, 617 bp, Populus trichocarpa
  Intron number 4 from transcript POPTR_0013s10040.1 (locus POPTR_0013s10040) derived from phytozome v7.0 (chr-ID scaf fold_13; pos 10023404 to 10024020)
attcttgcctcaacaggtttgttccttgtacaagcatgggactcaccctccccctattgttatgagctgaatttatatttattttctttttttttccctgtttggttggaagtttgagatcatataattagatttaataatcaaatcaatttcaagtcttcttgtaactggtaactgatagcttagcctgttgatttgctggcattttgctggcaagagggaataggttggtttgatggttctgaaaatttttttagataagagataattctaacattttaaattagtggattttatggaacaatttgcatttgttagtttgaagtctttatgctcattttttgagttctatgaacgatctttcatgtaaatcagtatggaatcagttatgttattggcatttgctagttgtccgaccaactgattagtttctcaatttagataatcattttgttggaaaggacatgtaaaacccaagaaagtatgtccttgtttagggttgttcttctattatttttgctctttgttaccaattagttatatgcttgagatttttttttgtatacactgttttactgcatttttttcataattgcagttggaggaaattggcaagc

SEQ ID NO: 54134 - DNA, 787 bp, Populus trichocarpa
  Intron number 1 from transcript POPTR_0019s11740.1 (locus POPTR_0019s11740) derived from phytozome v7.0 (chr-ID scaf fold_19; pos 12971568 to 12972354 reverse strand)
gaaggttggttgtttttatgctcatttattgggttttttggtactgtatttttgttggttttttttctttttgagaatttgaagttgatcttggtttttgctttatttgttcatttgtgaaaaagggtttttgtttttggttccattaattgtttgctgcagtgaagaatgaatatttgcggctgagtaaagtactttgataatgggtactggtaaacttattggattcttcaatttattgcttttgttggtgaatttgaatgtgttgtaaatttgaggttgtgtatgttgatctcttaatgtaagaacgagagtatgtttgtttgtactatttatgacatagagatgatagttagaatggctttattgcacctgagaatttacctcgtaagacgttgtcttttgttctccattttaaagcgcttcatatctggatggatttatcaaataattttaaaaaatgtacttggtttgagacacatttggttgtggatgtatatccttccctctatgttagataatgagtggatgatttctgtgagatgattcgggtcttgcacattcagttaagttctggtatcacaagaaggccttaaatcttatacttttttcttttctttttttgggaaaataatctcatcttttttcatcattaatgtctatggatgaaatgccatgaatcaatgtcaacctcgatgttcctgcacctcattgactcatctctgtctattttgtgccttgatagttgtcaacccctaacttgaatttgcttgctggaaaacaggtg

SEQ ID NO: 54135 - DNA, 342 bp, Populus trichocarpa
  Intron number 2 from transcript POPTR_0013s06400.2 (locus POPTR_0013s06400) derived from phytozome v7.0 (chr-ID scaf fold_13; pos 4977864 to 4978205 reverse strand)
acggctgctgaattgtccaatttacacaaggtcaggtaaatcactctttttccttcttcgttttgtattcgaacaattaaatgtcatgttgcaaatgattttagagtattaatggcaaaaacaaataaaataaaagaataatggaatagcagagcaatttgtttcaaataacagaagcctgtaatttgtttgaatctcaaactcatttcaatcctttagcatttgatttcagtttataactttcccaatttcattgatttggatattcctctttgaagtttttgcattcatggatgagagttctttttttcttcttcttcaggcaagcttctgtggctctga

SEQ ID NO: 54136 - DNA, 696 bp, Populus trichocarpa
  Intron number 2 from transcript POPTR_0003s03180.1 (locus POPTR_0003s03180) derived from phytozome v7.0 (chr-ID scaf fold_3; pos 3598909 to 3599604 reverse strand)
tttggacttctgggcttatctttggaaaaggagaggtatttcagtttggtgaaatttgattccactttatgagacagaatatgtagccaacatgcagtacgcactcttcaatttgatatcgttgctgtcttaagtttttagagttacgatcacaaagatcatggtggaattttgtcattggacatctatcttttaccaacactctgttgaacaactgaaagatatgtttgccatttccttttgcatgatctctatgcgaaagattgtttacctgttatcaggctccatggtattcttaaggtgcattgcttttggagagactttacactgaatttttgacaaccggtctctcttgtagtcagatgcttgttcttttgcgcctgtaatgcacaaataaacaagtacaaagtttgagtactgaagtttctgtagcttgatgtttgtgctctttgattgctgaagtttttttgttgttctattgccgctgcagttgatatgaaactatgacttgtctctgtattttgattataaaaaatcgctgtggtgattatcatttggcctaccaagaaatttgatgctgctactttcctctgtgttttatacgattgtcattgctgcaggtcccacgttaattttaggatctcctctattaatgttcttgcttatttcagggcattgttggcctggaaacagaat

SEQ ID NO: 54137 - DNA, 512 bp, Populus trichocarpa
  Intron number 1 from transcript POPTR_0003s03180.1 (locus POPTR_0003s03180) derived from phytozome v7.0 (chr-ID scaf fold_3; pos 3599641 to 3600152 reverse strand)
gcaataaaaaggcttgcgggtctaaatttggggaggtcagattgaaattttggttccgttttgacttttaaatgttttttccggaatttttattgttattttgaattacatggttgaaatgttggattgattgatggacaagaatgaatcttatttcttcatggaatttgattctgaaaacagatgattaaacgatgctgtgatcatgccctttcaaaccctggattgatcattgacttaattcaatgaactgatttagatattgaactgataaattaagccgatctataaagaacaagttggataattctgagttagcagctccaagacctctcaaaccctgtttctttatgcaattcttttttccttgcacttttgatgattgagtctgtggtggtgttgcatgtagttatttgaatgaaatgctaaagtttcaatgatgatgataagaatctctttactttaacttgcttcatttctccagtgttggctgaagaaacaaaaggatatat

SEQ ID NO: 54138 - DNA, 774 bp, Populus trichocarpa
  Intron number 2 from transcript POPTR_0003s20130.1 (locus POPTR_0003s20130) derived from phytozome v7.0 (chr-ID scaf fold_3; pos 18718596 to 18719369)
ttgactattgttgtggttggattgatttaataaaggtggtgaaatggctactttgatctctggaagaactgttggtgggagaaaccactggtggtggctttgaaacactcggaggggataaaacacactgttttatttcaagaaacaaaagcttaatacaaacacaaaagcttacaatacacgccctctctttctctctagtgtttctctctactctctccactcagaataacataagcttagcttgctatttatacacgaattcaaaacaagaaaattcaaccttcaagtgtgaaggcggctgtggacggtggtgtgaaggcggctggcggcaaacagctggtggctggcggctggcggctggccggttggtggctgggcggtgacagctggtggctgccttccttgaccttctggatggattgagtttgttctgaaaaatgtttccctcttcaatggctttgtatttttgcactttttcttttgcattcttctttgtcttatagatccatttgacacctattgctttcttgctttctggtggataagtcagcttccaggtatcattcttctcaatggcatgcatttcttcatccattgcttctatcttctcttttgtgatagctttgttgaagctaagtggatcattatctgcaaagaaacaaaatagagttgtatcttcgatgacttgcgtggcatcgtacaactcgtcaagatttatcccctcacagctgttgtgtgttgtggttggattgatttaataaaggtggtgaa

SEQ ID NO: 54139 - DNA, 502 bp, Populus trichocarpa
  Intron number 2 from transcript POPTR_0003s02450.1 (locus POPTR_0003s02450) derived from phytozome v7.0 (chr-ID scaf fold_3; pos 2541510 to 2542011)
cataagttttggccagagaatccaaaatcattcaggtcttcagcatgctctttgtatacatcgactgctagaacatgtcaaagatagccttgggaaattcagatatattatcagaaaacctgtatcctcaacaaactccagcaagatatgtgtgtgtgtgtgtgttctcaattctaaactgtgatttaacaattaatgcacaaaacattccacatgacagaacatttaaaaagtaagatgtcctaagcatatgttttatatcatcttcttcatcataaatagcaacagagattcggaaagaatctgatagttttcttgggaagaactggtaaagattttgattataggaaactaacaagcaagcagcactagaggattcacaatgacttgttctaaagaatttcaaagattttgcgttcagatcagaatttttgtgacttctaatatgcacacaacatattcataattatgcagagaggttttagaagaatacacttctagg

SEQ ID NO: 54140 - DNA, 906 bp, Populus trichocarpa
  Intron number 1 from transcript POPTR_0019s00340.1 (locus POPTR_0019s00340) derived from phytozome v7.0 (chr-ID scaf fold_19; pos 112649 to 113554)
gctgcccatttgctgaggcaattgtgaggagcacagtaacaacctaccttagcagctggtcttgttagaatgcatttccatgattgctggatacaagtaattgcctttttcttttttcctttttcttttttcttttttagtttactatctcattaattatccatacacctctctcacgttcatgcataatctttatcactagggcgtaccgcatggtaggtgatagagttaatttggatataatattactaggattattgaaaatttcttaaactcaaaattttaatttggaaatttttggtttaatttctataggaaagaagtagggagatttatgcatattaaacaaagtttactttatactttgtaagtagcttatgtcacaaatattatattcttccaaggccttcaaatttaggaggaaaaacagccttggcatagaaaaggtactccatcatgcagttctgaattaatcctttaatctaggatctagatggggctagattagtaaaaaaaacatggatttaaaaaaaaattatttttttaaatgtatgttcaccttggttaatcctagctaattcactatccaagttttaatccggtttaaccttgaactatatttggaaattatgctccatagagttaaatcgcccagctagaaacaagtgggtttagaaaataaaaatgaaaaactcatccattagtatgtattgataacttgtacttcatgcaaaattaataatcatgattttcatatttttcttaatttaattcataatatgtttatgtagcaaaatatttgattctgatactgtgtgtgtgtgtattaattaaaattaagcagttcaattgtctcttaatcattttttttccttggtgggactgttcgaaataatttaaataggg

SEQ ID NO: 54141 - DNA, 328 bp, Populus trichocarpa
  Intron number 1 from transcript POPTR_0013s07470.1 (locus POPTR_0013s07470) derived from phytozome v7.0 (chr-ID scaf fold_13; pos 6267852 to 6268179 reverse strand)
cgacgacggtggacaccaccgagaataatctccaggttctcactcccactcctctcattttctgtttgtttccctagaaaatcctcatgaaaataagtaaaaaaaaaggacttaattacgcgaaatgggtttgatttttttttaattattttgcgaaatctaaaattctcttcgcagtcagcacttgattctctcttgcgttacgagtttgattttgtagcaaaagtactctctctttttgcaacaaagtggagaactaatttatccaacatttgtttttctgtgcactgcagcccttttttgttcttcacagagcacggtctcggaa

SEQ ID NO: 54142 - DNA, 1049 bp, Populus trichocarpa
  Intron number 1 from transcript POPTR_0018s08185.1 (locus POPTR_0018s08185) derived from phytozome v7.0 (chr-ID scaf fold_18; pos 9021592 to 9022640 reverse strand)
ttttgaggctcattttccttcagacaactcgtgtgccacactctattcactgttggtgacctttgttaatgtaattgggttcgtctcattgaaatatttccaacagtatcgtaggtgttattatcgaagctttagtatacctccagagtctcttttttgtttcttttttttttctcctccttgtaatttgtgaagagagaggagagagagagaaaagtaaaaaaaatgaaaagatcctggatacatactgaagctccgatgacgataccattagtactgttggaaagaacttgacgaaacgaatccaatgacatcaaggaaggccaccaacagtaatcaaagtgtgtcacacgagttgtttgaaggtaaataaaccctgatatatttggacggctcgtgtgccatttcggtcaccgttcacgatctttcttggtgctgttggattcgtctcatcgatatctttctaacgataccaatgatgttgtcattagaattttagtatgtctccatgatttttctttatttccttgtttttctctctatcatctctttttattgtaaattatgttagtttaagtattctctaaactgtgttattttatcattcttgtttattaagtgctaaagtctttttcaattgcatgtgacaactgggtcatgcaattagtcgaccattctggtacacgtttactttagatacaccaattgaaaattcaacaattcattgattttaccaaaatggcagatgtatacattgccagcattacaacgtagtgctgttagattgagccatctccaccctatttataaactaacattattcccttcatccactcatggaagaagaaacacagcttaaatgggaaggctgaggtaaaagtcccagcagacaaagtatggtctttcttgggaggacttctataatatacacaagtggataccaacagcggacacaagttaccaagtggagggtgagctaggccagcctagacaggtttaatactgtgctgctagcaccacaatagcatcggaaggccgtcaggaagaga

SEQ ID NO: 54143 - DNA, 532 bp, Populus trichocarpa
  Intron number 1 from transcript POPTR_0006s25680.1 (locus POPTR_0006s25680) derived from phytozome v7.0 (chr-ID scaf fold_6; pos 24059688 to 24060219 reverse strand)
cacggcaagcgggctttcaacaggcattgactagtttccttatttttctttggcaattaataatccggcttttttgttcatattatttttgatatccatcttttagttaagctgtttgatgtttatttatcagaaaaaaagaggattatctttgtaaaattctcttacttcttattgatctgtgggtcttccttcttgtatccatcctttcgtttttcctttcttttcctttccttccctcctgagatatggacaatgctacaagatcattgaatgagtatagagaatatggatcttgagtgtttgaatagtgggccctcctgctgctccaggggtcaagagggattaagtatgtgagaccacagcattcagaggctcgagggatggttgtattagaatgttttttgaatatttttagaagacagtcttgcagaaagtattgtgatggaagctgatgtattctcgggaataattgttggattttgattggattgcaggctggatagagtgggagggcgaaagatttgagttc

SEQ ID NO: 54144 - DNA, 674 bp, Populus trichocarpa
  Intron number 2 from transcript POPTR_0013s03180.2 (locus POPTR_0013s03180) derived from phytozome v7.0 (chr-ID scaf fold_13; pos 1939235 to 1939908 reverse strand)
cgctgtatgtttcttgttttgagtctgccttaacatcttatggttttcacttgtactgtcttgtttaggggaagtgatccgttacatttattctagaaaatcaaacttgattgaaatgttgcaatgtttggatgttcttcattgtttcttttgccttctattttgacttggttgtttgatatattttgattttggaaatatgctataaacctagtaaaggtgaacatattggctaagtgttttttttttttattattctttatagctaagggttttatttagcatccatttcatgtagattggagacgtgcagaattgcctaaagctagatgcttgattaaaacaagaatgcgcccgccttttattttcctgctccttagataaaacatgacttgtcctgaaagaaatgctatgtgtatatgtgatgtttacctatgttattcatccgcataactttggaaaataatatggtatagtccgatttctataactatgtgaggtctgctgcaaataatttttacaaggcctatgatgtggtttgtcaatctgatgatccaatgtgtgattgtttgcaaatgtgctagttgaatttcttcacttgtattcatccattatttatcctttaatgttctttagcaggcaaaacctgaaacaattgataaggtgtgtgaaat

SEQ ID NO: 54145 - DNA, 599 bp, Populus trichocarpa
  Intron number 1 from transcript POPTR_0013s03180.2 (locus POPTR_0013s03180) derived from phytozome v7.0 (chr-ID scaf fold_13; pos 1939984 to 1940582 reverse strand)
aagctcacttgtctaatgtctttttgcattatgggcaaatggattttttctttctttcttttttgtttggtttttagatctgttgctaaattcaagctcttgatttgatcttggaagtttgttatttcatatttaccttgcatgtgactagatatctctagctaatgataagaactgtttttctttgctcttagtgtagttttagtgttttcgctgtattgttttcataaatatcgtgatcaatttgtagtccagtgaaatgttaatttggatccaaagtttggatcttttttaactagagtgacatacatttggaaatatagttgttaattgggatgtccttgtgagattaataatggatatgacatctcttgtcatctttaaacgggctatatagtgacacactgcaattgctttgtacatgaagcagaaatctcttgatgggtgtgagtgatagctgttgttctatgttcataggattcttttggctgttgctttatgcccctttcttgtttatgctattggtgattgtctaaagcttgtgcttggatccttattaaacaggctgcatccagtatctccggtttgaagccagtttc

SEQ ID NO: 54146 - DNA, 999 bp, Populus trichocarpa
  Intron number 1 from transcript POPTR_0019s06020.2 (locus POPTR_0019s06020) derived from phytozome v7.0 (chr-ID scaf fold_19; pos 6480789 to 6481787 reverse strand)
ttctccatcaccttttgctttcctaaccacttcaggtatgcagcagcagctcttgaatcttccacatcatttctttccgttctctattgtcaccaaattatcaactctcttaatttgctcatgtttttctttcaactgaaatcggtttgagattgtctccttgtttcattcttttcactcatcgttcatgttcttgttcttctggccaaatcttcaacacagacaatatatacagagtagaactcgaataactcaggatcggaaaatatagtgaacatgaaaaataaccatctgtgatcattcactccgcaaataagatggggctagcttctgctataacacttggagtgttggtctaagttattctaagttaaatcattcatggtctgacatcacactcgatgctataacatgtaactgtttcaggcttggcaatagctcaactgtttttcatgtggtaaagaagactaaactacggttttaagacttgaatacaatcatattcggttttgtagttagggatctatgttctcaacacatctgttttttcatttcctataggattgtagattgatattttcagaaattcaaagttggaactctctacctgtattcacttggttgcaagatgctaatcctatgcatattcatgggtgtgacctgatactcctgtgcagtatatatctgttgtataaaagtctcaatacaccttttttttggtttccctgtgtctgcttgaactggaacttctttatttatttgtttgttttggttagctttgaatatgatgaacttagacaaatttggtaaaaactgtcatggagcatgatgcagtgagggtcattattatctttcgattactttgtatgacatcctgccaaacatatatttaatgtttttaacatattgaggagtctaatgtttgttttctgttttttccagttttccttgattttaattccagaaggctgccaaattgagcttagggcgatttatcct

SEQ ID NO: 54147 - DNA, 1029 bp, Populus trichocarpa
  Intron number 3 from transcript POPTR_0006s26880.1 (locus POPTR_0006s26880) derived from phytozome v7.0 (chr-ID scaf fold_6; pos 24956667 to 24957695 reverse strand)
attgagtaatcatctgcacaatcctgcattaagaggtttggaattcccaacttcttacagctaacgatggaatttctttatgatttcgaagttttttggaattggtttgtgtcaaaattactgtgagaacaatcttcttatcacatggttgtcagattgtgtatcatcagttattatgcattatatgttgtacagcttatggtagcaacaagagttcagtggaatgcttaaattttctttaaatggttttttagtagaaaggcatgtgtgaatctagtatgtcagctcgaagcccttcaccattgtgcttcaactacatattgagattcttataacttcgcacctttgtgcctcgcgaatctacgttgatgctttgaattctccataccttttgatggaacttcgtacttctatgcttttaaattccttaccaaccctttgtccttcaatatcatatcttcatgcccccctctccatttttctgttctcaactccatgcctttttgtttctacttcatacccctgtgctctggttttattctttggtgtctcggatcccaatcttttgccttcaacttcttatctttctacttaaattacaataatttatgcttcatatctacaccttagtcctttcgccgctagacctatatgttttgatgcttccataccttttctgtttcatgttcatatatttgtgctcgaggttactatatgttcttctatctaacaccaagaatatgagggtttagttatgatattttgccgcaattggtaaaataatgcaaaactctacaatcgaacgaatatgaatacttcctgattgcatgcatgtgtgttcgtgtatgtgcgtgtgcgtgtatgtacttttgaacatatgcatcttagaatcactgctttacaactaattatttttaagtatggtattaaagcacctgttcataataattcaaattgtttacaagttagttattaagctttgatgcatttgtaggtcataaacctctcccttggactacacgagttcag

SEQ ID NO: 54148 - DNA, 698 bp, Populus trichocarpa
  Intron number 1 from transcript POPTR_0018s11230.1 (locus POPTR_0018s11230) derived from phytozome v7.0 (chr-ID scaf fold_18; pos 12033155 to 12033852 reverse strand)
gctatagagcaggaggtgagtgttaacagttgctgtttttgtttctaagttctgacttgtattgggatgcaattgacattattatttgtgtggttctcgattttaggctggagggtatatgattaattagctaaatctgagtagttggtatgcatatagtgtattgttggttgctggaatgtggtgctcttgtcgaggtactatttggaaattctgtttgaataatgtatctcagtatttttgaatatgtgtaggaaacaccaaagtagtgaaatgacttttaacattcaaaaggctactgttatttagtatatagatgaaagaataatactgccaacaggagatataattgtatacactttagtccatgtctatagacagattcaaagttaattaagagtacaaataaaacttgaatattgttcttgaacttgatgctaagttcgtgttaggctttagcttgatttaatgtagataaaccaaacttgaaaagtatgaaactcaacttgttgattatggccctaactcccgtatatgacttgagaacaggcttaatttgagctacccataatgagatgaaaaatcatcctgcaaaatctatgcaaaacatcaaacttgataacttaattctaccattgagctaccagttctctttcttctcaggttagaattcataatttcttggagaagaccaagaa

SEQ ID NO: 54149 - DNA, 736 bp, Populus trichocarpa
  Intron number 1 from transcript POPTR_0006s13140.1 (locus POPTR_0006s13140) derived from phytozome v7.0 (chr-ID scaf fold_6; pos 10371179 to 10371914)
ggtggtaggtggggtggtctgttcgaagataatgctatcctaagcgttgaggtctaaagagcgaacttccaagaattcggtgttaggattaattgacatccacgatgaatcaggaatttcggacaaattggttatgaagagatcccccgagaagaaaacaagaagcagccgattccctaagctatcaggttggccttcttatgttcctcaacacttgtatattctgtacaaatctcggagcttttcacagatgggggatgggaaaacgcatggaaggatccaatagaaccaagaacagcatccatagcggatattatatcatctttttatgtagttattatcgaatcaaatccactgtaatgctcaatttccattgatgttgctcctcctgaaaaggactcgccttgtatatgaaaatcaaaagaaaaggacatttaaaatacaacaatattgtcctcaaaattaagaaaacctcaaaatcaaaagataagacaaaagcgctgctttctactctcctttctatgaatctgcaccaagcaataatcaaagcttaattattgttttataaacataattcatgtctatacgcctgcatgcttgagcatcgccctatataaacttagcacagtgttgctacccaaccttcaaaccattttttatcgtttatatcgttggcctaaatattgattccttctccctaggttgttccatcaccaagaaacaaagcctctttaac

SEQ ID NO: 54150 - DNA, 168 bp, Populus trichocarpa
  Intron number 2 from transcript POPTR_0018s11040.1 (locus POPTR_0018s11040) derived from phytozome v7.0 (chr-ID scaf fold_18; pos 11856907 to 11857074)
gcattgaaaagttccgatctgctgcttactccaacgtatgtatcattcagaactctcaacctaaattaatatcacgcacataaattaatattttgtttgaagtttttttcttttgataaatttgtaattcgttttcttcttttgtgggtttgtttgcagtgcgtgagg

SEQ ID NO: 54151 - DNA, 719 bp, Populus trichocarpa
  Intron number 1 from transcript POPTR_0013s14830.1 (locus POPTR_0013s14830) derived from phytozome v7.0 (chr-ID scaf fold_13; pos 14937879 to 14938597)
attttctttggtaattatgctacttgtttacttgatttgatttgattgcatcagttttgatgattttgacaattactgtggttttcttctgataatgaaaattagtagtctttgttgacattaatccaaaactgaaacttaataatctttggcaaatagcaatggatgtggaaaattcatctgggaagaaaaaaggaagctttgtttgaccattggaattattgaagctcctaaaattctgaatatgttcatgacttttgtagaaattaagattggagaagttagtttttgtatgtttcatgtttcttcacactcttgcagtggctcaaatggtatcagttctgaatctgactagagagtttctttatacatgaattgtatttgtgtctctagtttgtgtccttgttcctcagagtggagaatcaggagactgcagtgctggtatttttcttagttcagtaactgcactgtgattttattatgccatctgctttatcttgcatcttttgtgctggttttttatatatgaaacgaaactaacaattattaacatttgtaattggatgtgcatgattagtatgactaaatttagatataatcataacattgtataaatgaattgatatgattttgttggtttactagttggtaaataactttgtcctgtcaaaattgcttctgtagttttctgtgccagtcaaagaaaggcttcaagaggc

SEQ ID NO: 54152 - DNA, 1031 bp, Populus trichocarpa
  Intron number 1 from transcript POPTR_0006s14070.1 (locus POPTR_0006s14070) derived from phytozome v7.0 (chr-ID scaf fold_6; pos 11361177 to 11362207)
gattcttgccaaattttgcagaaggtaggttgtctttagtcaaaatttatttctttgatacatgttggtgctatagctgttttctggtttgctagtttgatatccatggttacttctctatacctgagctcatgcttccttttttcctggtgaagacttttttttgggagttcaggaatctggtgatttattactcaattcttattccacttttcttagcatgtactgttgattgaagattgagtttttattggcagttgtgatattttttgccccccccccctcttttatgtgagaactactattttttaaatgttaccacagattttttatgctatatggcatccatgtttgcatttggggtttttagttggtagatcatttacttgtatctcactttcctggcatctcatatggttttgagtatcagatttttgtttgaaagacttagagtttccgtataatactataggttatgcaggaagatatgtacggtgcacgagtttgttgttaaaattaacacctcaaaggttccaatttattctgtttctgaatttatgcagtctactgtttgattttaaacagaattttaaattttctgaatcttggaatttccttcttttcaaattcctgaatttctccattctactgctgaatttaaagacagcttgttttcagtccagtgaaaaacatttctcacttgaaattttttacattcataaaatcttaatgttaaggataaaaatatactagcaagaaatattcagtaagccctttcagaaccactggaaataaattatgtgtggctgatacaattcatgattcttacatatatcttggtcatgatcgatcatgtaatcttcagggccagaaataagaacctcacctgttttgaaattatatgtacttcgcattttcagagagactgaattggttatgagaaatatgttttatactctttagctcaatcaaagtttgatttgtatgattgtgatagcattctgattggttttgaatgcaggggaaagaaa

SEQ ID NO: 54153 - DNA, 969 bp, Populus trichocarpa
  Intron number 1 from transcript POPTR_0003s17020.2 (locus POPTR_0003s17020) derived from phytozome v7.0 (chr-ID scaf fold_3; pos 16524460 to 16525428 reverse strand)
cctcctacatctaccccttcaacgatcacttcccggtacgatgctatctactttatattcaactagtagatctgagggaaaaaatgtttttgtgttggtttattcttcaatctaattacatataatctgtgagaatgaaacattacgaatatttggtttctttgtgcaatcaaatggaatatagtgttgtgtaagaatcttaaaagattttaattttttgatgtatgaatatgttttgtaaatagatggatattcaaagaaattattgtaaagaagttttgtactagaacatgtataattaagctttatgattaagctagtaattcttctttgcaaaatcattaattatcctagctctaattactataattaatggctttgcaaagatagatttactagctaaatcttaaaagcttctggagcaatgatatataaaagcttctggagcaatgatatataggatgaacactgagatttctccagcaaaatctacagatctaaacaaaaccaggggagctttttttttttttttactgtggtttttgtattggatttgtattgttttatgtatttgacaaattttaattcaaagtattttttatattgatgttgtaatactaatatatatgctaccagttaggttatatggtggagaaacacttagattagttcttatcataagtttaagcctctttattgtaatattggactctcaacctttgttccttttaatttaatcttccattcagtttggtgcttcaagcttgttgcggtgaaattgcacaactctcctaatagaataaatactgaacatccggcatttctctaccctttttcttcttgaatcgacttgtaattagaagatcccaatcatcttctccgaaagagagagaatagcgtgaatgccttgtgtgattctgtataggctagagttaatgcagcagcagcagatatgtttaatcctttggg

SEQ ID NO: 54154 - DNA, 807 bp, Populus trichocarpa
  Intron number 1 from transcript POPTR_0003s15850.1 (locus POPTR_0003s15850) derived from phytozome v7.0 (chr-ID scaf fold_3; pos 15546541 to 15547347 reverse strand)
tttaaaacgacaaccgcccctggtcatcggtaagttgccgttttttgtttctggtgagtccaaggtgagagtgagacataggtagcgacaaggttccatggaaatggaaaggaggtggaagctaattcctcagcttctgctgattgcttgcttggtctttcaaattcatgctaattccgatcatatggttggtatctttctaagtaaaaatattctttttttttcctcttatgtctagtaataataataatctgatatagtttggagtttcttgactgatgttctcagatattttacgagccatctgattaatctcttaaacgatgttggattgtctccaagaaagatgactatctagatttgcttagcttcgcttttcttttctttttcaggattttcacttcttatagccatattaataattctgtttcttttatttatggaaatctaatgatgatggtttcaaagtattataaaaagacaccacaaataaatgatggtttcaaagtattataaaaagtttattttagtccttaaactttaaaaattatatctatttggttccttaatagttttacaatttaattttgatataaaagtttatttttgtttttttagttccttgtttaaaaaaaaatagaaaggttgttggattttgatggtacagagaaaaattaacattgatacccattagaaccattttaaaaattatacctctctttcaatcttgaagcagtggttagaagttagaactaactggacaatgaataacttggtgggatgaaacccaaataacaaattaacagg

SEQ ID NO: 54155 - DNA, 634 bp, Populus trichocarpa
  Intron number 4 from transcript POPTR_0014s10380.1 (locus POPTR_0014s10380) derived from phytozome v7.0 (chr-ID scaf fold_14; pos 7775691 to 7776324 reverse strand)
tttccagcttgcacgaaccaataaccgtggaggtaatcaatgttctgtttaagctccgtcgtttgtttgaatttcttctctggattagtgtggatctttaaagcaagctacttttttttatgttcttatacttttcaggagacatctttggtcatcagcttaagttggttgattctgactattattcaatctcgtacaaacataataaaattaaaattaggcatggcatatattggttgatagctgactttgcaatcaagttcttatcttttcttacaaagaacaaaaagtttgttggaaattctgtaaaaaaaatttatgaaaagaccttcattttattttggcaggcaggtggaaaaacaatctttctcagtctttgcagtaaatcaaattaatattttctttttgcttatttggtagtcacatgtaaactgcactttgtatgctattgctctccttgagtatgcttgcctttttctatatgattttactgacctccaagttaaaaaatcagctacttgtgtcccttctgctatcaccatccaatccagcttgtataagttcatgctaattggattgggattttatcctctctgcaggcctgcttactgctgtgcgtaaggactactttaca

SEQ ID NO: 54156 - DNA, 343 bp, Populus trichocarpa
  Intron number 4 from transcript POPTR_0018s04140.1 (locus POPTR_0018s04140) derived from phytozome v7.0 (chr-ID scaf fold_18; pos 3511180 to 3511522)
tcttctagttgaatctggcacgttaaggtatgcaaaatcaaacttggactttagtagttttttttgtttgcaccaattttctgtattgcgttttgtgcgtacccataacttctaattatgctttcaaaatcattacctttaaatatctctaaaataaatttatggcttctacatacgctcttactgactttccttttgtttttttttcctagggtggtagcacttggttatctagcaatgaacgaacttttttttttcttttcttgttatatacacttagcttctttcctttccttgtctcatcccagtatctataagagcagcgggcttcattgtcaagagc

SEQ ID NO: 54157 - DNA, 661 bp, Populus trichocarpa
  Intron number 1 from transcript POPTR_0013s07650.1 (locus POPTR_0013s07650) derived from phytozome v7.0 (chr-ID scaf fold_13; pos 6486596 to 6487256)
tcttcgaaaaccaggtaagaataagatctgattatttttttcctttcagttgctgttcttacttcaatgggtgttgcgaatttaaattttgattccaaatatggaattttcgttcttgattatgtgattgttgggtttgatctgctagggggttttgaattcaaagtgcatatccttttcttttcttctttttgtgtcactctactttttcactgcaactggagtttccctctttaccaattttggattttgagttaacatttgaagtgggtttcgcttcatttatttgtcttaatcctgatctttgcttcattattattttcttgtgatttagtttctttcttatttggatctgttcatttagcatttctgcctcaaaagttaacatttgatttatgtatctttatatctatgctggtggataagtttgatctaagtgtggactaatataattgttgatttatgtttcccaaatttggcgtagatccatcttaattttgattggggttgaatttttttttatgtatgtcttgaattttgtgtttaatatatagtgggtttttatgtgatagtgtaatggcggtactttaaatcttgaacagatctggtttgtctgaaactcctagcaaaccatcaccagcaactcctagagttagtaaac

SEQ ID NO: 54158 - DNA, 456 bp, Populus trichocarpa
  Intron number 2 from transcript POPTR_0019s14100.1 (locus POPTR_0019s14100) derived from phytozome v7.0 (chr-ID scaf fold_19; pos 14858231 to 14858686 reverse strand)
ttggttccttacacctatttctttgtccctactgggtaagaaatcttcttcttcttcttcaaatttagtttggttttttcctttattttagatttatttttgttaatttccccttgcttagttaataggttgttcaatggaaattttgattctctaaagggcattctttctaaaattccactaatgatatgtcatagctaaaatcaacttgagaagtaaagaatacaaaaattccgatgctgtgtttaagtttataaattatttctttgagattaaccttgcttgctaagttctaaattgcctcatatatacaattgctatagtttatttgtttagggattaaatttctggccattagcaaccataacatgcctgcatttcgttgttccttttccttgctgtaattggaaaaatttatcaggctcggaggaggtggtggtggtaccgttgccaagg

SEQ ID NO: 54159 - DNA, 1035 bp, Populus trichocarpa
  Intron number 1 from transcript POPTR_0019s01630.1 (locus POPTR_0019s01630) derived from phytozome v7.0 (chr-ID scaf fold_19; pos 1438416 to 1439450 reverse strand)
gtcaaacaaaacctcgtactgagatagctatacaggtaagactagctgtaggaaatattaaacactatctacacactacacacaaatataattttaaatcgggtaaaataattaatggagatggtcatttctttaattcctttcttggaaaataaacccagtacacccaagtcgcctaggcgattgagattaataaaaatacatttttttttatttggaaggcttatttgatcatgtttttcttgctacaagggagagattcaaacgcaatacctcatcaaaagagaaacatgggtgctatcgagccacaaagctcattgcaaagcttcttaattttgacctgtttgtttttacgttttaaaaacgtttttgaaaaaaattaattttttatttatttttttttatttcgaattaatatgttttttatgtttttagattattttaatacgctaatatcaaaaaataattttaaaaaataaaaaaacatgattttgatacatttctgagtgaaacactttgaaaagcaaccgcaactatactcccaaacaagctaaaatttatttatttatttctattataaaaaataaattttgtcaaaaaaatcatctcaacccaatagctagaagcaacataactttaagtttttaacctccgtaagacccttgttttcttgcataccgacaacgtagtagttgaactaaactagtttagcttggcagctctgttttgtgtggaggcaaacctgcatactagggctgttgctctgttcttgtggtttttcggcctcttcttcttcgtttggttcttttgctacatctgtgtgtttttgcagatttttaactcctccttcccgtcatcttttggctttttaatacatttcactagttatatatatatatatatatatatatatatatatatcactagttatatatataaaaaaaaaaacctaaactaaactaaactaaccaagattgcttaatcattgttcttcttgtagggatataactattcatccggggtttggcaatttga

SEQ ID NO: 54160 - DNA, 545 bp, Populus trichocarpa
  Intron number 1 from transcript POPTR_0014s17500.1 (locus POPTR_0014s17500) derived from phytozome v7.0 (chr-ID scaf fold_14; pos 13723238 to 13723782 reverse strand)
tctcaatcacaaagtgagttttctttcccaattcttgaattaatttattatttacacgttcccattcttcttcttcttcttgtttttacccttcgtttgttattgttgattctgtatatttggtgtgttcaatatggtgatgttgaagcttcaatcattaacacaaaaaaggtttttttaggttgggtgccattttatgcttacatctcctatttgatgtatgtaaagtacaaaacctagaaaccttctgtttcttttgatttgtatgttttgggaattaatatatttgaaaaaaccagttcttttagtagctgtacaacaaaatgggcttcataaaattacttaaactatataatttcgagcatttggactgaaataacatgatgggacacaagtgggtttcttggatcaaattctgcaatgagcagtacactgttatcaagaaaaagcctcgataaaacggttttcttcttgcatagtcaatgtttttgttttgcattgttgcaactgaactaatcaagtatgtatggtgttgtctacagtgg

SEQ ID NO: 54161 - DNA, 611 bp, Populus trichocarpa
  Intron number 1 from transcript POPTR_0192s00210.1 (locus POPTR_0192s00210) derived from phytozome v7.0 (chr-ID scaf fold_192; pos 11238 to 11848 reverse strand)
ctactctgttcacaccaccattagacctgacccaggtgagcttttgttcctcttctcattgtcaacacagcttcgataaggagcagcacattaccatgtttagaaactacttacatgaacagatacattaaattcatcgttcatagataaacaaattcatttcaacatcgttacaaaactttggtgttttctttgtatattgtctcctaataaagttcatggtaataaaattattcaactgctttaataagatcctataatcaaattgagaacatgtctgttctgccactttttcttacttgcatcccaattactcttagaatttgagacatgtctagtgggattcaccaacagaaacactgatttgatcaataaagacgatttcttatgcgtgatgttactgatctaatcaataacatcatttggcacgtaattagtatggatcggtaagtactgcgatggttacattgcatcaattttctttttctcaaagatgattaaagtttcaactcgtttgattcagcataggttgtgaatcccacctgcataaatatcaaaagttaattctcagtcttttcatcattttgatgcgtgaccagaacacaagagag

SEQ ID NO: 54162 - DNA, 546 bp, Populus trichocarpa
  Intron number 3 from transcript POPTR_0006s02600.1 (locus POPTR_0006s02600) derived from phytozome v7.0 (chr-ID scaf fold_6; pos 1671829 to 1672374)
gaattttcattcaagtaggaagaaagattttgcaggtatcccaaattgaagtttagtttcattcaagaaatcctaggtagcgttaatatcttggggggaataaagagagatggagacaataggggacatgtctctatctttgtctcttcaaccgccatttctatctttcgatgctaattaaccaaacgcactagtgaattaaattgtcgatcattgtggaaaaaacggtgatttcctgtctttcttttacagattcctccaaagtaaatttcccctttttccctactattatttaagttggtcatccagctttctgcttcttgtgcattagagatgattcaattaaatgtaggataactcatgagatagaggatagtatatatgcaagatggtaaaacataatcctggacttagtcactggctttcatatgctgctcaactatagacaactttttctaaaaaatcccttttaaatttcttttgatattttcttttgatattttcttatgttgtttttcttaaaacggatttcagacaagtagcata

SEQ ID NO: 54163 - DNA, 570 bp, Populus trichocarpa
  Intron number 2 from transcript POPTR_0013s02720.1 (locus POPTR_0013s02720) derived from phytozome v7.0 (chr-ID scaf fold_13; pos 1640942 to 1641511)
aagtgcaagaaatattgctatcaggagttacagaggtaagattaatttccttgtcctcgctctgttgtttatgtttttaagtaaatttcacttttgccttttctttacttgcgtggcaagaaatttgtgtgtatacttacttgcaacttcattttaagtttcctttcctggatatcagacccggaagaagctttgctaagcctatctgtaagacacagttgcttgattactctatcttcatactccagtaaatagtacagcttctgatcaacagcttgaaatctcagggtgggatagttaatagagcagttggagagactcatccttttccttttcttttgcctatatttgaatttatccatttcttgcttatgcttcacttataaaagaatccaataactgcactccatttgcctctcttttcttggtgaatatagtggcaacaattcttctgattcttttgggacacttaacgtagacagaaatgaacatggccagaagttgaagtcattgtatttttatattgactattcagctagagtcgactacagataagaggtattaccattt

SEQ ID NO: 54164 - DNA, 846 bp, Populus trichocarpa
  Intron number 2 from transcript POPTR_0018s08270.1 (locus POPTR_0018s08270) derived from phytozome v7.0 (chr-ID scaf fold_18; pos 9166995 to 9167840)
tggaaatctcgtcttcccttaacttttgtttcaaggtaggtttgctttgaaaaaacaaattttctatagaaaatagttttataaaaaataaattattcttcattaatgataataaaatatataaaatacaatatttgtaataaaaatagtggtgatgatgatagctctgatgataatatttttagtaataataaaaatcttacgataatagttattatggtagtgatgattttgatgataacaataacgagtagtgttgatgttatgatagtagtaagatgttaatgacgatgcatgttaattaaagtagttatttgatgatgttggtgaaaattgtaaattaatagtgtttagaaaaatatttttctcttcggttaacatatttttctctaatttattaaaaaatatatttgttcttgaaatataattttttggcaaaataaataaaactctagctacaaatatcattctagggaaactataaacgccttataaagatcaaaatatacgaaaaatgcacaaactgacttttaaatagatttaccgatcatgaatcacgaatgcttacttcgtgctttgctatcttttaaatacatctctctttcctctatgaactattataatcaatttttgggcttgttcttgttcgagctatgcttggtccaaacctagattgggcccccagtttgcaactacatcaataagtagaggatttatagtttaaacttctgaattaggactagaaaagaaagataaagagagaaaagccatgttgtttaagtagtagaacagacaggtctgtggcgtaaggtgattttaataatcgatgattgcagggataccttg

SEQ ID NO: 54165 - DNA, 796 bp, Populus trichocarpa
  Intron number 1 from transcript POPTR_0003s06600.5 (locus POPTR_0003s06600) derived from phytozome v7.0 (chr-ID scaf fold_3; pos 8124851 to 8125646)
ggcgagcaggtacagcatatgttgctcctttgtttatgatcacttgatttctttttcctttttctttgttttttttttttataaaattactaagaagaaacaaaagctggaatggtgttagttgccaacttgcctcaagttcatttgcttttattaagattttgatggtcgtaaggatctgtttgggttcaaatccaacaaggtgttggttatggtgggttttcaattgattgaggttagaaagaagtgatttgataataacaaaagtctaataaaaaagtatagatgattttgaattttgatatgtgtttgataatcttaggcggtgtttgtcattattacggtaattatatttgaaaattttttatttttgattttgttttttaatttttgaatataatttttttttaaaaaaacaagaaaaatacacttctaacatatgtatagttggaaataacattacacctaacatatctcgtacatgtcctgtattttaccaatctactatgtatctaaataagtgaacagtttgaaaatacacgcgcgccggttctacatgaaaacacgacttgttgctggtaccgttgctgattgcacaacgggaaattcaactctttttttttgcttgtagtattgtttccttgaacagcaaatgtttttgcttaatttgcgtctttagaacatgtggaattctatttttacttgcttttcctaaatgtttaaattaacttcttttttaagttctcaagcaaaacatgatgtggctaacagggttcacttctaggtgtcgaggttg

SEQ ID NO: 54166 - DNA, 771 bp, Populus trichocarpa
  Intron number 1 from transcript POPTR_0019s04460.1 (locus POPTR_0019s04460) derived from phytozome v7.0 (chr-ID scaf fold_19; pos 4611560 to 4612330)
ggagcgcgatacaagcggcgccccgcctcacaagggtaattcactgatttgttcactacttattactatacatttgcctaaatctaattgtttttggagctttacgtttttttctttttctttttctttttgatagtggatatttttatttttattttttttgcaatttcagctgtcatttttttgtgttgagattttcttttctttacatgatctttctaattcaaagtgtcatgaaattaaatcaaagatcaatttaatgaaatagaatttaaggctagtcttaaaaaaaaaaaaaaaaccaatgaccaatttgtttttaattaaaactgtgcttttattcattttcttgtgaaaatcttcattttagtctatctaaattaatgatttttatttatgattctgaactttattttttaatatttcaattctttagtgttgagatatgagaaaaactcggttaaaaaaagggaatggtagtcaacgatgagtgccatttgaattcccatttgtcgtattgattgaagttctttaattctctgaatgaagagattaattacattcttaggactggcttcaaaataactaataattcccatttgaatcctcatattttcattgataaaatcattctctctatctaattaattaataaataccataatatgtttaaaaaaatgtttgcgtataaaaatatgaactcatcctttattatgtgtattatctttaatttcagaagcgagacaaggcggctcaaatccttaattgtag

SEQ ID NO: 54167 - DNA, 672 bp, Populus trichocarpa
  Intron number 1 from transcript POPTR_0003s11540.1 (locus POPTR_0003s11540) derived from phytozome v7.0 (chr-ID scaf fold_3; pos 12312909 to 12313580)
cgactacaggaattttagacaaattagccgtgaacgtaacttcaatatctccttctctatccatgctttcaattttaggttcagtttgattgattctaaagcaagcaatttaatatgatcttgtgctcttttttttttgtttagttcaatggagttataatttagtttatttatttattttaagcttcaaacttagttgagtattttgtaatgtaatgtaaaatgaccggtaattttgttatttctgataaatgatcagcacctaataaatagagatactggccaaatttagttagggtttggcatctcagtcgctaggaatttgttgaattgctaccttatatcgatacgaatgaaataatttgtgctggagatttcgattttaatctggcgaaggttagtcgctaatgcgatatctgtatctttgtttggattctataaattttgaagttgagattattggagttgaatatcttatttctctaagaagaatggctttgatatgagaaaatttctgcccattggaacaagttgcttgctaaacagacgaaagcttaatggaccaccttgaattggttgatgctgttaatttcttttgttgaatttgtgagaaaactaggaagggaatgtcgtctgtcattctaagttgatatttcttttcaggtttattgc

SEQ ID NO: 54168 - DNA, 487 bp, Populus trichocarpa
  Intron number 2 from transcript POPTR_0563s00200.1 (locus POPTR_0563s00200) derived from phytozome v7.0 (chr-ID scaf fold_563; pos 6268 to 6754 reverse strand)
atcttcggggtaataatctttaggctcctttatttttttttgctttcaattaaagatttaaatagctatctttatagtaattttttttttttgatctgggtctaggctgccagtgattgaaagctttgagattaatatcgttcatggtcactgctgtaggtctagacttaaagaatcagtttttgatacctgcacacacacacacacgctctcatatatacacagagagagaagagattggttttctttaatgtagtgccattaaagcttctctccaaattagttgttgattgaaaatgtgctgttgataagatgctcgtttcatttttcatgtgtgttgtttatatcatcaaactcttcttgtgtgattaccttgctcttccaaggaatgcaccatttagatgcatttagtatatatattttgattattgatgcttttgcttgattcataggcattaaagaatctgacaccggtttagcagcaccc

SEQ ID NO: 54169 - DNA, 345 bp, Populus trichocarpa
  Intron number 3 from transcript POPTR_0018s00710.1 (locus POPTR_0018s00710) derived from phytozome v7.0 (chr-ID scaf fold_18; pos 624121 to 624465 reverse strand)
gaaagctgaagaggtagtaattcttctgtgtactcgaagtatcttggtagaagagttattttatgacgtggagatgtttaaaaggaattttttttgcattttttttggtctcatgattagattagtttacagggcaacctttcccattttgattttcactgctttttcacgcctgaaatgacatctcatggtgatgcttaggtttattgtttacttgtacccatcacgtttaagtttcttttcattaatttctgttttagcttcattattataattaacacttccccaattcttagctcatatctggttatatatagtgatgaacaagtgttatatgtgcttagg

SEQ ID NO: 54170 - DNA, 612 bp, Populus trichocarpa
  Intron number 1 from transcript POPTR_0018s00710.1 (locus POPTR_0018s00710) derived from phytozome v7.0 (chr-ID scaf fold_18; pos 624771 to 625382 reverse strand)
atttctcctcttttctgtcattgaagctcagtttggtaagtccttgaagctctttttctttgaagttttaaattttaaggtatctaatttatttttatctttgaataaattaaaatacttttctcataagatttgtgccattttgatcccttttttttttttttttttataaattcgaatggttagtggtcgaaaaagattgaaaatctgtctcgtcgatcatgttttagggttacttaattaagtattaataaattaattttactgattgtagaattgaatttcagtttcattcgagtttggaggttttgaaggaagctgaatgatttagaaattcgaattttttttcactttgattatgaattgggtttgggacttaacaagttaattaatttcactaattgtataattaaattcttaatctttttttttttttaatttgaaaccccactgtacttcaattcaagtcaactgcactgaaatacaaagccctacttggtgatttcaggaagtgaagatttttatttagaggttattctgatctgggtttccttttctttttgtgtttacgtgctagttcgtgagattgggggaaattggaacggattggta

SEQ ID NO: 54171 - DNA, 996 bp, Populus trichocarpa
  Intron number 1 from transcript POPTR_0003s09550.1 (locus POPTR_0003s09550) derived from phytozome v7.0 (chr-ID scaf fold_3; pos 10865299 to 10866294)
gggttagtatcataaactattgcaaaaaaaaattattttgggaaagtgcaaattctctcccctataaactgtctgagacaatttattgtgagtttttcatcttctttttgtaaaaatttgaaacttgttgtgaaatgcgtcttgtatttaatgttctctctgcttctctatgggcctgtagctgtttttctctgtggagttgaatgctttgtcctaaaattttcttttttttcttttttcttttccctctcttttccgataacagttatactgttatggttctgggttttgttgggttagatctgtgagtagtggtggtgaagttttaattatcctggtgccattaacatattttgaagctattaagcaaataatggttttaatttactcactcatccatttttttttatctagtcatttttactctttagagtaaagatggatggtaatttaaaggtgttttcaagctggcatcagtctttttccactttttattcttgacttctgttttacttaaagataaagtaattgatacttactgacttgtatttggatagaattggtaacaaagccaaatttcttctcttcagagttttgtgtgcattttgggccctgtgaggttttaactttactgtttctttgatctgtttttacttgtcatttctggcacagtctttctataattcagatcctgaaaaagatccagcatgatctattcaatggtattctcaaatttctgctattcattttaactacttctgtgtatctctatggatccaatctttgatatggccttaaacctaagtgtgcttacattcaaatgcttgcctaatttttgtgtgccatggaaactttctttcttttgaaaagatgactgtctcatgctattgttctttaattagctttcaatttttcttgctattcttccctctcccctgctgtttccttaattggtttgaattatgatctctgccatctgaatgctatgatgcagct

SEQ ID NO: 54172 - DNA, 476 bp, Populus trichocarpa
  Intron number 1 from transcript POPTR_0013s07540.1 (locus POPTR_0013s07540) derived from phytozome v7.0 (chr-ID scaf fold_13; pos 6349278 to 6349753 reverse strand)
ttttatccgtgggatagagaattcagctgtttaaggtgagacccacaaacaaagaaagtctttttttttcccctttttgaaatctgtattggtttgatttgatgggatagttgaattttgattttggataaagattgatgcttttgacttcattgcttggttggatctgtatcctttctgggtttttcttgcctttgcttctcgatttatcgcatgttagatttgatgttttgtttgtcaagtccaatatgttgtgacttgttaggatttgaagttgttgttattagttagttgcagtttgtgttaatcaacaacttgtttttgacaaaaaaaattcttcttttttatttgctttaattgattgatgcagcagaaggaaaaccaacccagtttttgttttttaaaaaatggtttttagagatgttatcaaggaaccaaaagtgaaggtggagaggccaggctgtgattcatcggtt

SEQ ID NO: 54173 - DNA, 648 bp, Populus trichocarpa
  Intron number 1 from transcript POPTR_0014s08530.1 (locus POPTR_0014s08530) derived from phytozome v7.0 (chr-ID scaf fold_14; pos 6341685 to 6342332 reverse strand)
tacacgaggtacttattcacgcactttagaattttcagttattcaagttgcttagataagtgttgattttgatgccaaacaatgtcgtttttagaatttttttgttgcttgtgaattaaataggagaaaattgttagatttttttaataggattggctgatgggttagtagagccatttgaagttaaaagaatttttttgttttgtggatgcagttgatttatgggcagatcagaaatgatcttcattgtgatgttttatggggtttatgtggagataatacatttcgtgtctgtaaatatttccaaattagttggttataaggcacaagttgttttcttatctttgtaatgaaagaaaataaaatcttggtttagcataccctgttatatttgataagcttggcatttggaagatgcaatttgggtatgattgagaaacattcttttagaagttgattagttgtgggatttgatgttttttgaagtgttgctactctctaatttaatgcattgacttgttgtgcgctcttttgcttttattttccggtgctcaagttatttgcatttgcatttgctctccattcacgtttttgcctaaattaaataatgcaggggccaggaaaattaaccaggtcttctattacatt

SEQ ID NO: 54174 - DNA, 613 bp, Populus trichocarpa
  Intron number 1 from transcript POPTR_0018s11820.1 (locus POPTR_0018s11820) derived from phytozome v7.0 (chr-ID scaf fold_18; pos 12489922 to 12490534 reverse strand)
cccaactacaagaaagactcagtacaaggttcaaggtatagttgattaatcccatattgttgttctttggaaaataatgcatggcccctgatcagcaccaggttaacctcagcttatttgacgaggctactgttgtttttggattttttttgtgataaatgttcctttgaaaattaccttgtgatgaaagaatgtgcacgaatgcatagcaacgaaattacaaccattaatttctctcaccatttttgatgatatatagatgttcatgttgaatcatggatgtagtcttgcctgataatctttggagaaagagagactccttaatgttgatccttgttttatattcaagcaattacctctatttatgaattggggggatgaggacaaaatcatttttatacctgtaagaaacttatcatgcaataaagggagagaaggatgtataattaagaattagtaaatttgatctgggactactgaattttttgccttggtttgaaatgatggagagaggagagtgtataatcttgtctatctacctgaagtttgttttcttatcaaaatttggtatgggtttgaaacagcttgtaatcaggaagaggttaacaaagtg

SEQ ID NO: 54175 - DNA, 747 bp, Populus trichocarpa
  Intron number 1 from transcript POPTR_0006s14150.1 (locus POPTR_0006s14150) derived from phytozome v7.0 (chr-ID scaf fold_6; pos 11457867 to 11458613 reverse strand)
agtatcttcatcctgctctcctagctgctcctcaggtttgtttttcttttcctttggatttattagggtttttttaaagctactgattttttatgtgatcgaagttaaagccttttcttttagttcgttaatactgatgtttgttttgtttttttattttgactttttagtgcttgaggtatattattgctgaaaagaaaatggtttcagtgtgtgaaaaatattaattgaggtgtgtgtcttcacaaaaaaattatcatataaataattttaatttattgttttatcaaatgcttaaacgggtatgttatgttatttggaagagggctttaaaattttaatttctgttttttttttcctttgcttatatttgagtgagcggagggctggtgggcgtttggtcatgataatagtgtgattgaatggaggaactgatgaatttagcatctttttttatagtgcacataataagcataggaatttagcattaagcttactttttggtgttgacaatttgattttttagtcacaagtggccttttggtactgtaaggaagacgtggaactactgaattgaaacttaatttattaggtgctgcattcagcttcggggatggtgtttttcgaaacatatatattgaaagtgttgtggagtgtaggtttttaagttttaggagtttttgttttattttttttattttattttttgcagatagagcctatcttgagtggaaatctgcctcctgg

SEQ ID NO: 54176 - DNA, 440 bp, Populus trichocarpa
  Intron number 4 from transcript POPTR_0018s11220.1 (locus POPTR_0018s11220) derived from phytozome v7.0 (chr-ID scaf fold_18; pos 12017521 to 12017960)
gggtgagaatataatgagttcttacttttatttggcacatcatttttctttttaaccctttgaaggctcttattgtttcttccaattctattatcaaaatcattgcatttgattttgtttttcgttttagttagttgttttttttttgtgtggaagttaatctatttataatgagcttctgccttctgatccaggaaatagaaattaggagcctgtacagatagtttaaattgaggataatttttgcttactgtgtatgaaagcttgttcctcatatttttcatctgtttgtctgactgtacacatttaatttactgtgtaaatttgctcctcaagttgagtccttgcatttttccttttatggttattgataaatccctcaggcagtatacaaatgatatcccataggcaattatgcatgctattttatgattatatag

SEQ ID NO: 54177 - DNA, 355 bp, Populus trichocarpa
  Intron number 1 from transcript POPTR_0006s13860.2 (locus POPTR_0006s13860) derived from phytozome v7.0 (chr-ID scaf fold_6; pos 11038899 to 11039253)
cagaaattcaggctctataagactcaatcggtaggtgctcttttcttttctttgaattgcttaatttggtttccgtttcttgattttggatcggttgcaagtagattgcattgacttgaaacgtttttggatttcttgaattgaatgatcaaatggtgtcagtttagcttagatgctaactgtacagagtagaatcactctgttttctcttgttgtttaatgatttatgcttgttactatttttggatgtgtgcttgtgctatttgaattgcatgaagtcaaggcaccttgatctgttagcaatgttctagatgattatttgattgatttatcttgtgtcttgcagaacttttac

SEQ ID NO: 54178 - DNA, 582 bp, Populus trichocarpa
  Intron number 3 from transcript POPTR_0003s12060.1 (locus POPTR_0003s12060) derived from phytozome v7.0 (chr-ID scaf fold_3; pos 12749487 to 12750068 reverse strand)
gcaagggtatgtatgatatatcagaacattctaataagcactgtatattgtcagtccatttatttggaaaagaaaaaatcgcccccccccccccccgctccccccccccctccccaaccattttttttctttggcggatcaaaaatctatttggagatgtcaaatggtatctgtgcttaatgtgtttgatttggagccattagtccatctctgcgggagtgtaacacttgtagcttttgttcaactgggttatgattatattccttaattaaattcggaaaccaaatcaaattttgggtttatttccagtaatctgaattaaatcacacattttcatttcacatgtaggtctttaggttgatagaaaaagagaactttagagggttgtacatatggtgtgagaattgtttcacttgattatgcatgttgttgcagcattctgatggtgacagtaagaagtcccttgtttctgtgcactgtaatgcatgattgtaaagcattctcctcaagcttcctcaagttttctgttttattttgttcatggatctgctttcttgtagatactatatcaactacaaatta

SEQ ID NO: 54179 - DNA, 496 bp, Populus trichocarpa
  Intron number 1 from transcript POPTR_0018s05980.1 (locus POPTR_0018s05980) derived from phytozome v7.0 (chr-ID scaf fold_18; pos 5598855 to 5599350 reverse strand)
tcacattccaagcctgtcttttttttacccaattagtttgttcctatagattgatggtttcaactgcaaattcaatattgtcttttgtgcaagcaaatctctttaaattgatggctggaatgaaaaggaggtcggatgtacggacttctcttatgggtacaaaataggatcaaaagatttattgtttttttaatatatttttttagaaaatcgaaagacaaatttgtattctgtgtaattgtttggcgataacatgtgctgccatatatattaattgtgataaggataataagagccatccagttcaaactggagagcttgcaaccgggagggcattttatcttgtatttaaatctcatgtaatttgtaacaaatagatattaagctctttctcttctctcttgtaatgactttggttatttataaagcagaacatacatgtctctggtgtgtctttacagagttgcagggtacttgactgtcgaattcatagcac

SEQ ID NO: 54180 - DNA, 462 bp, Populus trichocarpa
  Intron number 1 from transcript POPTR_0006s10010.2 (locus POPTR_0006s10010) derived from phytozome v7.0 (chr-ID scaf fold_6; pos 7440777 to 7441238)
ttcgtgtttcttcttctccctcacctgagtcccaggcatgcgctcttttcttttccttctctcttgctctatgtatgtcatagctttcaagtttcagctttcctttttaggtctccaaaactttctggagtggttccttttcttgtcccttattaattttatttattctcacttgttggagatgtattcaaaatactcatgaaggcagactcaaagatgttttcttgacaagttttcaaaagagaaaacagagtccttggaagaattatatcaaagacagagaaattatgcttaaaatacttatctttaacctttacttgtgtttatttctctaaagcagttgtagttgatgatgttacaaggtgcttatggggttagggcttattgtgtatgtacttaaaattcagtataaaatctaaactggttttaatttcttcttttaggtagacttggagaccggag

SEQ ID NO: 54181 - DNA, 776 bp, Populus trichocarpa
  Intron number 1 from transcript POPTR_0018s01730.1 (locus POPTR_0018s01730) derived from phytozome v7.0 (chr-ID scaf fold_18; pos 1578376 to 1579151 reverse strand)
aagttttgattttcgctgcacgcgtttcgaggtaaggaggttatcgggagttttgttgttttttttctgtttggttgctgagaaaactttttcatgttagtctttctctctctcactgtagagttagatttgagtggttagtgaacttgtttggtacttaacggagtattggtttttgtttgcttgtttttttttttttggctatgagcagatcagtgttaaaaggagggatttgagacttggaaatgctgacattcttttaactaatttgttgagcaatattggattttgtactgatttgattctgattttcttgaggattagaaattcatttgtttaagtcttgtttggttgctgagaaagtgggggagggaaaaatggtcgggattagttaaattgttatagattgaattgagttaactaggttacttagccatcctttttctttgtaatctagtgttttgtaaacacagtttgttagacatttttctggaaattgtgctggttaatgagtgcaattttgggttttgaagcacaatgaaatttgtgaggggcttgtttctgtgtagacaacgaaggagggtgagattgaggattgttttcgatgtttaatagctttgggtttgtaattatgactcggttattatatggaaacagagaaacagtttttgcagtctaattgttagtgctcagtgtatgctttgtgttttgtctaatcatcttttagttgcttaagtttgttttatttatttaactattcttccttgcagagtgtg

SEQ ID NO: 54182 - DNA, 402 bp, Populus trichocarpa
  Intron number 1 from transcript POPTR_0003s20940.1 (locus POPTR_0003s20940) derived from phytozome v7.0 (chr-ID scaf fold_3; pos 19289699 to 19290100 reverse strand)
ccattcgtgcccttcgcttgaaaaaggtttaatcttttttggttttgtatgtgcccattttgtgtttcttggttgttttagttttgtagtcaattttggttactggggtggttgttttttcttcttttttaccccttttttttcaaatttagtgtaaggattcaaattttatgctttcttcaatagaaaaaataattgggatgttgacattctcttatgaattaatcatttatagaaggatgctggatatctctttcttggtttttgtgtggtaattgaatgatgattagtggtgaattttaagtttctgaagtttggattcaaggacaatgagcttgtttaagattttattttgaatgttttgtaggttgaagaattgaggagcaaagggcttgagcccta

SEQ ID NO: 54183 - DNA, 704 bp, Populus trichocarpa
  Intron number 2 from transcript POPTR_0003s18760.1 (locus POPTR_0003s18760) derived from phytozome v7.0 (chr-ID scaf fold_3; pos 17717986 to 17718689)
tggatctggtttaaccttcagaacatctcaataaagtgcaaatctatgggatgcgttctcaataattccctagtgtttttgtgagcgtggatatctattattgttcagttttttacgaggttttttctaataataacaaaaaaggctttgtttttattatcactcccgaccagaagtttctagtaagaagatgataaaagattggtctttgctgtgtctcttttgttcttgtactaaggaaaatcttgaaggatattttggtgtttgtgtatttttaacagagcaggtacaaaaaaaggcgggagataaaagttgcttcaccagaaagttgcctcatttattggcgggtccctcgaacgactcttaatccaataacggataggtacatgttcccataaaccactccagtgtcctaaaaacagtcttctagtccctgtaattttataagaagctgtttcagtacttctttttaatacatttataattaagtcctggaattgtaagttctttttatccttatggtgatttgtttttaagtttaatctttgtacctggaaatttcataaaataattcataggcatgaaatctatattaggttgttttgatgataaaaataaattttaaaaaattaaaaaattaagatctattattgttgtatctcaataaagtgcaacgttctccttaattcccttgtgtttttgtg

SEQ ID NO: 54184 - DNA, 827 bp, Populus trichocarpa
  Intron number 2 from transcript POPTR_0013s14980.1 (locus POPTR_0013s14980) derived from phytozome v7.0 (chr-ID scaf fold_13; pos 15046153 to 15046979 reverse strand)
ataaacctgtacgttttgagatgcttggtcagtaagtcttcaactctttgtatttgataatgcatcagctatggtatgttatttcaattccttttttaagtttgtgtaatgtaaagaattttatgttttattatcttcacgtttttaaagacacaattttgatggattattaagttgtctatacaattgattgatttgcaactagttttggatgtgatattgtgaccgtcaattataacctttgtgcttgtgctgttcagtttttgttttggtttcatcatcaagcttttgtttgcttgtcatggacaagcataacaggggaatggtaattttgcactagctgtcttctaaaactatggttggaaaatgaatggttctggttgagtgagctgtaagagaagccatgagattttttgtggttaataattgggccattgtgattcttaaactaatagttcattatgtaatggaaacaagaagaaaaagggaaagattgtgatgtcttatatgaagtttcaattatgtccttcatggaattatattatttttcacctaataaaatggtcatagttgtgtgatatattttatgttagtgtaataaagaagggagaatcatgcatgtccttaattgactgcaatttgatcaaaaaaattgaccattggactcgttgaagcatgcattcattgaagacggttattctgtgtatttgtgaatgataccttcatttagaatcttaatcaaatttctatttcttcattctatctttgttcctactaaattttcaatgtggtaatgtatctcattgatttggtgcagcgaatccagt

SEQ ID NO: 54185 - DNA, 394 bp, Populus trichocarpa
  Intron number 1 from transcript POPTR_0019s11570.1 (locus POPTR_0019s11570) derived from phytozome v7.0 (chr-ID scaf fold_19; pos 12851144 to 12851537 reverse strand)
atattgtctctaacagatctctacctatctaactggtaagtttgtcttcttgttttgctttgaattagatgcaaatttaatgcatctttttaggtctgtgtgtttctcgagtaaagattgatgctttttcttgattgtggttttgggttgcttttgttttcatcagtgcataattaatttgactgtgttatcattttttttggtgttcttgagtttttactaatctttttttaagtttttttgaactgggttgttttgttcttttttattttgatagtattagcccttttgatttgatgttgatcaggttgctttttttttcttccggatttgtaagttggacttcatgagcgtgttgttttcttgatttacagttttggtggggttggtgttg

SEQ ID NO: 54186 - DNA, 698 bp, Populus trichocarpa
  Intron number 1 from transcript POPTR_0003s09200.2 (locus POPTR_0003s09200) derived from phytozome v7.0 (chr-ID scaf fold_3; pos 10529822 to 10530519 reverse strand)
ttcgaagggtttgtttctaattgtttcctgcaactaccacccatctgttctcttgctccttttctataatggcatgcagatacattaattaattagtgataattcatgaagaagttgttctgattattgtttttgccaactttttgtagtagaaatttggtaactctcctagaccttagtggacagtaggcacatgaatatctatggataacttggagtctatggatatctcatattcaagcatgtacattttaaaaaaaaacagttgcaattgttaattaggtgaattttagtttagatgttggtgttaattttaggaacaattggatttttttttgaaaatttgagaatagtcggatgaaagagaccgtaaagcagcactcagattctcagaacccagtcacgtgtatctgaaaatactggctccaccacggcattttgctctgtttttttcttacataattcttttattttcaagtgagaaaaaagcaatattatagagactctagagcaagtgttcatccgtggtgctgctggtgattaatctggatttatttgatatttaaggttaaaattttaattatctgagtaaattatataattttccttgctacctgcatgcatgtactcatcacgtttgttaaaaactttcttaaagtgcagggtgaccaggcttctatagtgggtggtgccattga

SEQ ID NO: 54187 - DNA, 389 bp, Populus trichocarpa
  Intron number 1 from transcript POPTR_0006s11360.1 (locus POPTR_0006s11360) derived from phytozome v7.0 (chr-ID scaf fold_6; pos 8609350 to 8609738 reverse strand)
gggtaaggttactcgtcgctagaaacgaggttttagcggttaaagatttttaacttttctgagtttttttaaagaaatttagtatctttgttatgttttgaatcacttcgaatgatgatgatcaataacaagtggttggattggtaagaggaataataaaggtaatcaaattttccctcggaatatcttccttgtaaatatttataattttaataaaattaattgaatttttttctttatcccctctaatttacaatttggcccccctaactattttttcttgctccgcccctgcctagacgtgttccggcaagccaatattttctcattatcatgggcatcattgatgtttaggcctccaaggatcgtcatttttggaaagctggcag

SEQ ID NO: 54188 - DNA, 821 bp, Populus trichocarpa
  Intron number 1 from transcript POPTR_0003s10970.2 (locus POPTR_0003s10970) derived from phytozome v7.0 (chr-ID scaf fold_3; pos 11829491 to 11830311)
gttgaagatcacttcatgtatgcaataacactcaatctttcaaattttataacttttagattcttctttaattacttttgtgggttcggttccgtttcttaaatttctgtttttctttactgcagttgtggattttattctctcttttaagtcggtacttagcagccagtaatgatacttggtgtttgtgttgaagcttcaattttgaactggtgattttaagtacttttagtttgtttttgctaaataatctatttttttatgtgggtatttttttaaaattttcttgttctttgctaaattgggatactaaccggtagtattggtcacttccaggattttctgtgagaagttcaacttgcgcttctttcaaatttactttcttttttttaagtttatgaagtgacaatgttagttttgaatgatcaacctctttgaagtatgtttgcttcaaattttttttttaaaaaaagtgatttcttgatgatatcacgttgtgtttgattgatgcagtgcttaacacaattagtaaatagttaattcaaatgctgtttgggtttcttcttttaaggcctgaagtcttatgcgtgtaatcgtcgttgctggtgcatacaaatggtgcgcattttaggttttatttttacagagaacatatctaccacatggaatcaggttgtcgtcagtttaaaccttcctgttttcactttagttgtactatgtgggagctggtttgaatgatagatcagaaatatgtacatgcttgtggttcatctttttattaggctttgactggcacatgattttgaacatttcaggtgcat

SEQ ID NO: 54189 - DNA, 867 bp, Populus trichocarpa
  Intron number 1 from transcript POPTR_0006s06040.1 (locus POPTR_0006s06040) derived from phytozome v7.0 (chr-ID scaf fold_6; pos 4299954 to 4300820 reverse strand)
ttcacttgatcacatcaaagtttggcttttctaaggttgtttctttctactaactttgatgatgttttgtttcctgaactgtaactttgatgatcattaactgatattaaaggggcacgatcatgtaaagttttggtttttgttggtgtaaatcttgattttctagcataaatctttgtacttttctttagaacttgatatagtgaagcgggtcatcatttgattgtgattgaagttgtgattttttgttggaaatgaatatttacatgtgcccccttttgttgttctgggaagttggattggtttggtttttttgaattgagagatgagacttgcttatttataacggatgatttctctgtcaactcatttcaaacttgcctgtggaataagaaaaaaaatgaagaattttatctgtgatcaccctctttgcattttagaaatggaagttggtccgttttcttaatttatcatgttgttttggcttactttgattgcagatggtttcttaaaagtgctgatgatttgtgttttgaggttctgaagtacgcacatggcacgcctaactaggaaagctgaacttctggtgttcttaagttgatacaaggaattttatctttgttgtttttaatccataaggtttctttgtctcaactggggaattgttaatagtgcattagagtttgcattgtaatgtatatgaactatatgatggaccaacttcagtagtgttatcatgttgtcaccctagattatggtagatggttaacttttatagctttcttattttccttactatattagtcaaagaaattctaatgtgatacttttttttaagcatacaggatatattaggcttattgccct

SEQ ID NO: 54190 - DNA, 877 bp, Populus trichocarpa
  Intron number 1 from transcript POPTR_0006s03790.1 (locus POPTR_0006s03790) derived from phytozome v7.0 (chr-ID scaf fold_6; pos 2544893 to 2545769 reverse strand)
tgggctcttcgtcgagcttctaatcctctcaagtaactctctctttctgtaactttgttactctctttttttggagaattatgtattgcaattaatatttgagtatggattagaaatgggtttgttttccttttcatttggttactaaagatttgatctttttgatcaccataaaagcaaaagggaaagttcttttgtttgccttttttttagtagcgagaaggggaaaactaaggattgaattttttagtttttaatggtcttgttgttactgagattcttacaaggaagagaaatgggacccctttgaattaatttagctggttgtcagcgcagtactagtttaaacagttttgttttatgggtggttttggaattctgtaatttcatgagtttgtttgattacaatgacttaaagctgtggaatagggttatactgtatggttagtttcataaactaaccccatttgtgtgtgatttccggaatgggaatagagaagtgatgaaaattacaacaagagttaagaatgggtacagatcatgtgaagaatgaatctgtatctgttgcatcaggtctttaatgttcatgatatataagggaatgtaggatgtgattgggggctcaacgatcactcccacagtcagaacacaagtatctctataactgtcccactctctatgcttgttctgtttccatgagaagcttgaaaatgcatttcttgtactagattttttttgtctagtccgctggctttccattgattttatgccgagagcaatttttatttttcctttacttttgggtatttttgagtgataattttttgttgttctgtttccaggttccgtggattgagtgttggaacttctcgcggtt

SEQ ID NO: 54191 - DNA, 840 bp, Populus trichocarpa
  Intron number 1 from transcript POPTR_0013s00970.1 (locus POPTR_0013s00970) derived from phytozome v7.0 (chr-ID scaf fold_13; pos 508971 to 509810)
agggttttcaggccttttggccgcgacccagataggtaaattgcttgttcttggtctctattcggttgttttggtgttttttgaggatttgcaaaatgggtttcttgattcgttttaaaagtgtgtttgcttcaaagattctgccttttttgttttatttctatgaatctgaatttgtgactgttttggtgggttgatattggataggatgaatctgtaatagatttataatgttttatttggcctcgttgagcttgtttatacattaaattggcattttttttttataaatttgaattttctttttgtgtcattaagtgtattgcttggtgtataggtgccttttcaataatcttggaatatttgttcataaataagcgcttgatactgtctaatatgtgttaattgctgttatatagttatctgtgttaaatttcttttctggtacaaccttcaaactataaaagaaattaatttgtaaacttttttcagtttaggtgacatatgcgttgtaacctgtagtattcactttctcaattatcaaataggtagttgctgctataatgtaatgttgccaattgaattgtatgaagtcaacgagaatctgttcagtggttagtgtatcgatgcagaaaggattgctacttgttttttgtgctgtgttatttggggcttcatttacagtgtggcatgagttgcttaatgccgttttgtgcttaatctgccatctgtgatgcaattaagaaactttgccttgaaaagtttgtgttttctatgacttatttcaactttctttctttggtagataagagcagaactaggcttctgctttgtcctgtt

SEQ ID NO: 54192 - DNA, 470 bp, Populus trichocarpa
  Intron number 1 from transcript POPTR_0003s16670.1 (locus POPTR_0003s16670) derived from phytozome v7.0 (chr-ID scaf fold_3; pos 16221549 to 16222018 reverse strand)
caaaggtgattgtttcactgtttctttctcttatctttttttttttgtgttatttgttttttggatctgtttgtgttactttcttgaagttcaagaaatgaagaagatttttttgttttttattctttttttcctgtctttaattaaaaaattatgtttgtaattttgaaatgatatgttatattgggattttatagcagcagatggtttttgccacattatttttttgtatatttttatttgtctaagaagagtatagaatatggtttttggccgatttaaaacgaagtgttgagggttttgtcaatgcgtttctttggatctgttggttctaaatggaaagagtgaatcgtcactgtgtttaggctcaagaaatgacaactgaaaaaaagattattttttattgcagatgattgttgttgcttctgcttgtttttttattagaatttatttttgtgatttgaagagaa

SEQ ID NO: 54193 - DNA, 1025 bp, Populus trichocarpa
  Intron number 4 from transcript POPTR_0014s02590.1 (locus POPTR_0014s02590) derived from phytozome v7.0 (chr-ID scaf fold_14; pos 2160858 to 2161882)
ttgaatacttgaagcagcttcagcttcaagtgcaggtgagtggtttctatggctcttttatttgattgtttgttttaagccattatgattaattggttttgactcttttgcatgatttcaattcattttgaacattgttgctctatgagtgatccttgactaaagcttgttttggagcttttacgtacaagaatgttgcttcggttcattaaagaatttgctggatgtagaagccagctgaacggtctcttactttctaggctatgcaattcttatatatagttagagcatctggttaaaatatttagaacaatgatacacccatttctgatctatttaatttcatgtcttctctaatggatctttccaaagtctaagcatcatagaagttttaggcattctaatccataatcaaatacaggcaggcctatcaagtgttatcattttatatagtatatttgtgtttgttgactttgattttaaggctcgaggaattcctatcttggttggtagacagagcaggaaattgaccattttcaactttgtctttgattggcaaaaatgaatctaatttttcaccgtgtatactacaaagatggctctgactcaaatttggttttacaacggtttgaatgctactgctctgcactacaggaccgagtcttcttgcagtcatgactgagcatgacttcctacacttagaatataagttggatgacttggttttctgtacctgggtgaacatttgtttgcttaaatttccatggggttgtgggctggggcaaaaccctcacgtcggaggctgcgcagagtagatactaactggttttaaagttacatatctatactgtttccatggagtaacattctaaaagttctgattctctgccaagttcaatgttagcatgtgaaattactagatggcttcaatgggaataatagcaaaaataggttggtcagtatggacaatgcagttatttgtctctgtagcatattatatgattcatatcatgattgatttacag

SEQ ID NO: 54194 - DNA, 556 bp, Populus trichocarpa
  Intron number 4 from transcript POPTR_0019s08260.3 (locus POPTR_0019s08260) derived from phytozome v7.0 (chr-ID scaf fold_19; pos 9740239 to 9740794 reverse strand)
gattaaagagaagctgaaagaagttgacaaatgtgagatttatttaatagaactagttcgagatcttttatttcaggacttctttgccgatgatgctacaaaatatgtttgattgttatctttttgttaatgttataatccagtaaccatttccatgcagccagaatgaaaattattttgaagtttcccgtcttgagcaagtttatgcagtgaattaactagctagaataaagtttagtcatttgttgacattaattttaccacttagcaattatctagaacattgttaatgtaaggttgtgcagcttattgaaatagcttgtttagaggttgtataattgttgtaattgttacctttttgtttgatttgggatattggctatctttttagcacgtattacaaactgatgtggatagcgtgcatggatttttccgttgttacatgaaaattttagtgtacttgggttttaatctgcttatattggttttgtactgacatacgtattgctataaatctgcagatctcgaaggcaaaacagattttaaaattcaagtt

SEQ ID NO: 54195 - DNA, 871 bp, Populus trichocarpa
  Intron number 1 from transcript POPTR_0003s20850.1 (locus POPTR_0003s20850) derived from phytozome v7.0 (chr-ID scaf fold_3; pos 19242491 to 19243361)
aaaaatcaggttggttaccaccactctctcttctttttgcccaattcatgcaattctttcttcttttcttctttatatgtgattttttctgcataattagatgactaatatcatgatcatcctctgctcggaatgatttggcatgtcctgtatgaattatatgtctccagttatttttttattaattttgttaagaatgtctgaggaattttatgttagactgattggatgtgatgagtttctattttaatgtaaaaaatatatgagactaaatattctcttgttgttctttttcacctctctatcttttattctatggactagaacacagtagagtttgccctattgagaggtggtgcaccttttattttcttttttttttggtggatagaggaacctattatactccctacagtggcttgatgcttatttttacagtatttttctatttcctccaatgaactaagaaagcctacacattgcttcaaaattattctttttctttaaacctctgatattgccattcccccccgttttttccctcttctcctttccttttcttgctttgaaaactgctgcctttagtcttgattttatgcttcattttaaggtgaccttttggtttctttaattgttgtctgatgaatctttataaagcaccagcttttagatgacctttctgatgatttcctgtgctgaagagcagaaattaaaagacagattttattttctacttctttaatgattcttttgactttggtttaaacataaagggatttcattatcgtatttgtgattctaattttttttttttttttgtcatgtttctatgttagagtctccgaaagaccaaagtccatcaggaagaccc

SEQ ID NO: 54196 - DNA, 512 bp, Populus trichocarpa
  Intron number 1 from transcript POPTR_0006s20240.1 (locus POPTR_0006s20240) derived from phytozome v7.0 (chr-ID scaf fold_6; pos 19296918 to 19297429 reverse strand)
taaataaatattcacctgaagataactgaaggtcagaaatgtccatctatataatcatccatctcaaaacaaggggtgtcatccagtcaaaaatagaaagagaagaaaggtcttaaacagatcatcgcttcatcatcaatggctaaactacattaaacaagcaaatagctctccctctctcatgttttgttccctaaaaatccttattattcattttctgggtttctgttcccttctcctcctcctcctccaccaccaccaattccagcccatcctcttagatcggatcccttcacattaacctataaacaccataaccaaaagacaaaaaagtttcgaactttaacctctttttatcaccaactgacgatgttaactcacacccattttttgtcatcataaaatctcaactgggtttggtttgttttcttctcctctgcttactttctctttgtactttcttgtcttaaatattagagtacaaagaggatacaacgtttgcgttgacataa

SEQ ID NO: 54197 - DNA, 706 bp, Populus trichocarpa
  Intron number 1 from transcript POPTR_0003s20800.1 (locus POPTR_0003s20800) derived from phytozome v7.0 (chr-ID scaf fold_3; pos 19215784 to 19216489 reverse strand)
ctcgacaccaaggtcctctctctctcttgtttccctttagttttttgtttttttcctatctggttcttcatttcttgtaccttattacatttatttttgtctgattctgctgatatctttgtttattcctgaaagtggatctttttgtttgtctgagactgattttatgattattttcctttctaatccggatttcttgggaggctgtgtttaattgtctatttgattccttgcaataaggttttgcatgcctgccttccttttgttggttgtaatgtctgtttcttccttgttatattcttggcttttgtaccgtatatcaccactcgtatctttttctttcttctgattttggggtaagccaaagttgggagctttggtccatttgatttggaattttcctttttctgagctcaaatctgttttcctgtttttggtttttcagaacttgtgttgagacaccatttttgtacctgtttatttcagtgttaaaccaaaaacacgaaggaaatattactttgcctttagtttcgctgcaataaatttctctcttaatcttcatacatcgaatagggtctggctatttctagcgtcaaattttaggagttttaagtcagtctcctttataaagatttatagatctagaagacgcttattttgtcattttgttcccagggaccagagattcgtactgggttcctgaaag

SEQ ID NO: 54198 - DNA, 964 bp, Populus trichocarpa
  Intron number 1 from transcript POPTR_0019s00350.1 (locus POPTR_0019s00350) derived from phytozome v7.0 (chr-ID scaf fold_19; pos 119069 to 120032 reverse strand)
tataaggtacttttgatatatttttctctcaaagttttctgtttttttatttttcaatggtttttcttatcagggttggtgagttttcaggttgattaagttttgagagattatgatctgatatttaggtagaaaaatgtctttagttctttggtgtgggccacttgcttcttttatgtgttatacatgtggagatgtttcgaaagttttgtgtttttttatttttgaaggttttttcttatctgggttggtgaaattttgttctaattgtagcttgataaactcttaagagtgatagatatgatgagatattgaggaaaaagagtaagtttttcattgatgtctgtgatctaattgcatgatttggagtctcaagttgaaactaattgttaaaactgtgattacactgctagagatatccgctataatatatagtgttgttaaaactgtgattacactgctagagatatccgctataatatatagtgttctaaaccttagggctgttgttatctgttgctttctcctgcagtggagagttattgatctgttgaaagtttcttacattggagaatttcatcttggtgatgattaaaaggcaaacaaaggtaatggactaggaatttctagagaggtcatactcagtttttcctattaagtgaacaggcctcgaaagtcttgttgatgatagactatttcttctagactctacagtgacttgggggcatgtacgtgtatagagttagtaataaatctgaacagaacagcatacagggaagtttggctatgaataggaccggcatcggagttgatagttgcatgaagtgaacccacaattaattagttagtgtttttaagttgaaacttgtctttatactgttaattggatctttttatttatgtttccaatatttttccccttcttccagctcaaatatacaccgccaggtgctccactattggc

SEQ ID NO: 54199 - DNA, 468 bp, Populus trichocarpa
  Intron number 1 from transcript POPTR_0013s03230.1 (locus POPTR_0013s03230) derived from phytozome v7.0 (chr-ID scaf fold_13; pos 1978672 to 1979139 reverse strand)
tttttcggtggcttttgtgacatcataggttcttggtatgctataaaactttgtttctgtcacaattaacttcgtgactgaaattgcaagatttacaagctgttaagctgatttttttttgttgcttttcaccattttttccttaaacctctccagaatttagcagttaatcgttctccttttgtttaaaaaaccctgccaaaaatatcccatttctagcactcgtttttcttttttttccaagaaattctggactgttttaagccctaaacggctggtttttaaattcttctttcccccctccctgtagcattatggtaaaacagtattgtagtatcctaatagttttatgcagaaaacttatttagcattatcttgagaattaaaccttgttttgctgttctctaatatttgattgctgtgtgcttggcagcttgagctgcctgtgctgttgctggctaatacgag

SEQ ID NO: 54200 - DNA, 1010 bp, Populus trichocarpa
  Intron number 1 from transcript POPTR_0003s11730.2 (locus POPTR_0003s11730) derived from phytozome v7.0 (chr-ID scaf fold_3; pos 12519939 to 12520948)
gataaggttagtttttataaaaaagttttgtgctttttgtggtttcaattttgtttgtgttgtggaatttggtggatcgggatttgcttgctatagagttatatgttgcttctttttcctatatcgattggtggcttttcatgacaaggttgatttttatctgaattttgatatttttttttagttttgctaatgtttatgtgatttggatttattccttgtaaactgatgattctcattacatgtttctcgggatttggtggtgtttttcataaattggcaggttttgtttcagttttgatatattttttgtgggttttgtagtgcaatgtgtttttcattctgggttttattacattgccgtgcaattggagcttttgttgtggtttttgccccacaaaattcagggataagggtaggctttcagtgaaaaaggaggtgtttaatgtactttttaatgtgcatgtctctaaaaattatggattctatcgaattgttttacactttgagatatagttatgtgttttcccttaaatttatttgatgagatagattgtcttgtatactgttgtgtttaaatgtttgtagcattatatcgcatctacacacacgcacatgcgtgcgcacatatatatgcacagtttgattattctttgttctaaaatcttagtcttattgaagtgtttcatgcaagtgatttcttattgttagcaacttctttctgagcatggaggcaatattgctttagaacacgatctactcttcattatcttatagatgttccttttctgatatctgttttctttaatttgattctaactggatgctctgcagtattctcttctaccaatcccactagaaacttgccataggattatgacattactattctctaccagaaggtcttgctagaagttcatggtggttattggatatttatgggatattcatgcatattttgatttttcccctacctgactggtgaattttttcaggagattatccctatc

SEQ ID NO: 54201 - DNA, 843 bp, Populus trichocarpa
  Intron number 2 from transcript POPTR_0019s03680.1 (locus POPTR_0019s03680) derived from phytozome v7.0 (chr-ID scaf fold_19; pos 3762262 to 3763104 reverse strand)
gttggtccttgagactcatagcttgcggactacaggtttaatttcgtctttctatggccttgctgtttctttgataattccatttgcatttttttatataaataaatttaactgcatactcacattaactttggcttatgttgttgccattgctactaccaagtgagtgggtgatcgattgtgttttctcttgtttcttatttgattggagattctatccttctagtttatatgctcatgttttgtgtcattaactgattccttttttattcttatctatttgattttttgtcatacatttaatattgaacccctgcaacacacgatgacgatttgtcttttgtgtccccatgcatcaagaactaaacttatttccttccccttgacatgttatgtgctctgtgagtcaggtaacttgcttaatcccattgtttgtccctccctgaattagttggagtttataacctctcttggtgatatagaaagtaaatattagagatattcattttttttttcaagaatagatgatgaggttaatcctcatttggttagaaaatgggatcggggatgtttccaaattgatgttggaggattggttgtgtgaaagctgttaataaggctttgttgggtacatggtggtggtgatggttggttggttgtgtgagagctgttaataaggctttgctgggtacggttgtggtgatggtttgatttaattttgtttcttaaattgctgcgctgtgtctctaaatttgagcatgctgtttgtttaagttgggctactaaggttgttccttacttgttgcatagggctcattaatttgtatgtatattcctcttcag

SEQ ID NO: 54202 - DNA, 892 bp, Populus trichocarpa
  Intron number 1 from transcript POPTR_0006s20210.1 (locus POPTR_0006s20210) derived from phytozome v7.0 (chr-ID scaf fold_6; pos 19257830 to 19258721)
gaatcaaaaaaggcaaaattgcctgctttagcaaggttggtctttgtaactacttcatgagatttattgttcccaattttgtgttttggttttctttcatggctttgaaagataagttaggacaactagaagaggattgaaagataattttgttaattataggaggattggcagattggatatattccctatgatccattgggttgagttttaaaattcagcacttgtatcagttttattccttccagagctaaattaagtcttctcattttaatctgatgcctaaaccatacatgggtggtcactatttacaatgattctggttccttgatgatttgtggatctcatgccaaacctagctatgcctagtgagatcttatcttcattaacaatatcataaggtaggtgatttgatagacttcaagaatgattgaaactgcttgtaggatgcgctttagcttgattgacattcaaggaggtaaatgaaagaatgagcctgtgattataaaacaaacttgggtactagagcattgtcattgtggggttgttctgttgatgcagggtgctgctgaaatcactcttttgggctgatttcagaatcaaagtctccactgagttactttactagatcggatcaatgattaagaacaagatcttgaaacatcaaatatgtacttaagcttttggattcaagtttcaaacagcttaaacttatgtgtggaattggttgaatattcaagtcaatgtttggtgctgtattaattcagtttgtctaatatcttctttgtgcatgtgttctgccttagcatcagtttttaagtccactccaactgatatatgacttaatatatctgcagtgtaattgtggaagctttgaaggtggatagtttgc

SEQ ID NO: 54203 - DNA, 733 bp, Populus trichocarpa
  Intron number 1 from transcript POPTR_0006s23620.1 (locus POPTR_0006s23620) derived from phytozome v7.0 (chr-ID scaf fold_6; pos 22333273 to 22334005)
tgatcaaaaacctgtatttcttcctctaatataaggtatgctctcattaatttctgattgcttgcgcacttgatcatttgacacaaaagaaagaaaggaaagggcaaacttttgcagattgtggtcattttttttttcattcttacattagctagcttaatgtaaagacccttgatcttcgtgcttctttgaaatgttggggtttgtctgaataaatatgatgggaaattgtttgtaggtgtgatttgctttttctcggtgggattaataaaggtgcaagcttttgttttcttttgttgtattgcatggtttaatttattttggttctttttgcttcttgaattcatatttctttttaggatgaatatgtgatcgtgaagcttgcttgtttttacaaattgatggtttttattgaaaataattgcctggtgtttttaattctgtgacaccaatattaacgacaagccgtggtttttacatgtgattaactgacatttcattgttcaaaatgtgggtcttttcaataatgttgatccacaaggtgttttccttaactagcctctgaaggatgagaagcggcaatgtagcgtttacatttagaattcaagtgtttcacacgttcttagttagatgttttgtttatgtttttgaacttcttgcaattatgagcttctcatactgatcatttattcttgcaggtgtttttgcatccgtgtgacctaggttcttccgg

SEQ ID NO: 54204 - DNA, 696 bp, Populus trichocarpa
  Intron number 2 from transcript POPTR_0018s00460.1 (locus POPTR_0018s00460) derived from phytozome v7.0 (chr-ID scaf fold_18; pos 389187 to 389882)
tattgcgagccttctggtaacattatttctttccaactttgcatcatctctcttgtctttctatttttctcccttctgtttgtcacaaagacaatgtggtggcgattctctcacaaacaaaagtggtgattccacttaattaagtccattgctgatctcaaaggggaaaaaaaggacaattaatcgtgttttatatacacatatatttcttatggttagatttaatataaaattattcttaaatgagtttttaaattgaaataatttttaatatactaaacgtacgtgttaattattatatttctgaatattttataagtaatgagatatctgcatatggatggacccattgcttgtttcggaagccaatctcacaagaattaataaacaagtaacaagctatcgtggataaaacttgggaaatatatatagttatctatccttacacacgcacgcacgcacatatatatatcaacatgtttaattatatctattttattcttaaatccttttataaaaatcttcaacaagacctgttatcatgtgttgtccaaattgacaaatcttcatcacaactaaagttgtttgcacttctctaattaatacgaggttgaagtttagaagaaggaaaaaaatctttctcaaaactttggatcatgtcaaaatattaaccggaatcaaataaatgtgcaggga

SEQ ID NO: 54205 - DNA, 549 bp, Populus trichocarpa
  Intron number 4 from transcript POPTR_0003s02400.1 (locus POPTR_0003s02400) derived from phytozome v7.0 (chr-ID scaf fold_3; pos 2488617 to 2489165)
aagaattcaaggttacgaactctcattaaccaaaggtaattcatctattgatacttgtataatatggtcatttcgattgcctttgttttgccttgaaataatgtgtaacttggcaggtgttgtttcctggaaaactcttcttaaatgatattttgtttatcaactgttgtgttgaaaacttgccttccatggaatttagaatgatggttgtttgcatgtccagcattaaacgatgaactcctatcatgtaatcggaatttgagttgttcgatcatttgagagaattgcagtggaatttccatcattttgtgtgtctgtgtctggactgcaggcttgaaagtcttggagcaggatatgatctaatcagtctatatctttctagaattttcctttatattactactatatcttttctttactctgtagaaatatatggctttagttggcatatatgacatatatacactctggcatggttgcaatcagagaacttcgtttgctatgtaaattacagcttgaattggcagcatcaactttgtaaaaccccaa

SEQ ID NO: 54206 - DNA, 784 bp, Populus trichocarpa
  Intron number 1 from transcript POPTR_0003s19730.1 (locus POPTR_0003s19730) derived from phytozome v7.0 (chr-ID scaf fold_3; pos 18395294 to 18396077 reverse strand)
gggccaattgctggatctctctttcggcacttgaggtttgtgtttttgggttttattttctgagtttcgtttattataacgtgggtttgttttatttttagctaattttagctgtaatatatgatttggtcttcttccatgtgtgtgtttaagtaaatgagatggataaagctcctagctttacgaaaggagtaatgttttttcactcaattttgaatttattttacaatgtgggttttccttttcctttcttttttttctggattttttctctagttttgttgcacttgtctgttcactatttagctaagtgttgaaggcgtttcacaatttagtttagattggtttttctgagtatagatagtgtaattttgtgttcaagtagcaatatgcggctaacctggagggttttttttttattattttccttttgtactttagtggatggactgttgaaattactgatggtcgttaagtaacaaaatttctctagctgcttggttttagacttttggttcgaggatgcataggatctaacttagtttgacatttttagctttagaatctggacactatatatatatatatatattacgttcttgatagtttagttgtcctttagcaacgcatcttctcttttcttgaatcttgttgtgtagttgaactactatatgtttggttaaattgcaatgttttaatttagtgctttcttgatttttcattagttatctatgttggtaacatggttgaagtttgcagttgcgattgggagaagaggaggtcc

SEQ ID NO: 54207 - DNA, 323 bp, Populus trichocarpa
  Intron number 1 from transcript POPTR_0019s15030.1 (locus POPTR_0019s15030) derived from phytozome v7.0 (chr-ID scaf fold_19; pos 15661413 to 15661735 reverse strand)
ctgctgattctcctacttccgttcttgaagacgaggtattattatttttagccttgttttgttttagatttttttttcctatttaactctcgaaaaaaagtgtttttgtttgttttttttttttttttaaattgatcgattttatttttaatttttgttgcaaattacaagaagaaaaaaactgtagaagcaaaaaaaaatattttttttattttaatgttaagcagtcaaacaaaagagtgattttttttaaagatatgattaacaatatattatgtattatttatgtttttgtgttttttcccccttaaaatgaaggagca

SEQ ID NO: 54208 - DNA, 553 bp, Populus trichocarpa
  Intron number 1 from transcript POPTR_0013s05380.3 (locus POPTR_0013s05380) derived from phytozome v7.0 (chr-ID scaf fold_13; pos 3845292 to 3845844)
acaaggtttggattttctttctttttttatttgacactctattttatttctcaatcagtcatatatctctgagcatatgccaattgagcatggatcatacggttgatttcttaatcttgttttccatgaagtactaaatatttagatcacagaacttgaaaataagtaatcaaatgtagcatgatcaatcatttgtatttcaaacacattttgatttacgctcatccttgctagttgatatgacattttttctccctctctctttgtgctggcatagttttttaaaaagggatttgaatttaaagtactataatcaaggggaaaatgtgattagttatcagggtatgcttttggccaagatatgacgatcactttcacagagcaaaaacagagtatacatttatgaggagtgacatgtatgaaaatacccctaattaccccattttatttctcatgtcttttttatactaagatttttcttcattttggggattcttaatctatagtatgcactcacaactgtggtcacagaggattgagcaagtggttcacc

SEQ ID NO: 54209 - DNA, 644 bp, Populus trichocarpa
  Intron number 3 from transcript POPTR_0006s07890.1 (locus POPTR_0006s07890) derived from phytozome v7.0 (chr-ID scaf fold_6; pos 5770069 to 5770712 reverse strand)
tgtcgttatctctataaccatcaggtatacatctctatctctatctcttcgtcttcttcttcttcttcttcttctttaattagtatcatatatatttatatataataaaacaatgaatattattattcacttctagctaactaacacaataattgataatttaataaataattaatgaacttgatttgatccttaaactttttttatttccaaaagcaaaatgacctttttttaatttaattattgggtttagaagatgagtttattaatattaagcctgtgaattgctccgaacatgcgtaccgcatcaattatgaagaattaaatgaaaatattgtcaagtagaactaggtataaatacgtagtaatattagtgtattttttctattttatacgtacatataatggcaaaaaaatagtattaattctaatttcttacctttttctcaataatcatttattcaaaacttattattcaaggagcttttaaatcatgataaaaaaatattgaagtcttgaagtagtttttgtgattgtctgccaaaccatttcatcttaatttgtctgcttcttttgtgttaatgttacatgcgtgatttctcaatatttgatcttcgttgaaaattaatgaggacagaacgtag

SEQ ID NO: 54210 - DNA, 683 bp, Populus trichocarpa
  Intron number 1 from transcript POPTR_0596s00200.1 (locus POPTR_0596s00200) derived from phytozome v7.0 (chr-ID scaf fold_596; pos 3224 to 3906 reverse strand)
attccggacagtatctgcctgcaaagttaacaagggtacagtaattatcatttttcctttttttatgatttctttcccatttttttgctggactgaatttcataaatgtattgccaatgttacattaataaatttcctgtgcaaatatcgcatcttctttgaggttctcccatgttttggaacttttcatgatagaatgatgctaatctgagagaggacaaaagtgtgggcaatatgctatgagtctataccattggtttcatctgtttgtcaaatgatgctgcttctgaatctatctagatgccctgtgttggtttcaattaatcacactaacttagaacatgaaataaagccaaagttttcaagttttatgcaggagtggtaaaatgagacttagagcttcagggtatcatgcaaagtatttgaattaagggtaatcatgttttcgggatagaatcatggtagctgtgttgctctatagttgttcacaagcttaattgatcttattaatttgctttctttacctgcacgcatttctgtgtcagatagatttatcataaattggtggaactcaagaaggatatgttgcaagtgttttactgattctttgagttattacacttctgatgagtcaatgttcatgtgcagtttgccctttgaatttcacacggcctctagaagtt

SEQ ID NO: 54211 - DNA, 694 bp, Populus trichocarpa
  Intron number 1 from transcript POPTR_0014s13090.1 (locus POPTR_0014s13090) derived from phytozome v7.0 (chr-ID scaf fold_14; pos 9627972 to 9628665 reverse strand)
gaggttgagatcccttgtcgagtcccaagtgctaggtacttagttttcttcatcttccgtcttttttatttctttttttgggaaggtgacttcaaatttttcaaattggtgaaatttgaaaggggtttcatttttgttgggggcgtgagggactagatctgagagggagaaagatgcaaacttgtgtttgctctggctcttcaaagttcaaaggggagatttgaaaataagctgagatttttagctgcatttgggctaaactttctcctttttggtcctccaggtggggttttactacaggaaaccttcttacagcttctgaggagacagatggttaaactccagtttaaattttctaggtttatggaatggaatggaatgaaatgaagttcattttacttatctccagctactccacgcaatgaaaatcttcttttattaaattcaatttgcttcagctgctcaattttttcttaatatctaaaaatggggactgtttcaggatatttcatacccattgaagtttccatagctagagaaagaaagataatgggaatgattacttatattcaatagcttttgtgtactcttctgttcaattttcttgcatagtttgttcgctcaatttgtataggctttaactttaagcatcacaatttgcagtgccagtgtgtttggtgtctcagcagaatca

SEQ ID NO: 54212 - DNA, 206 bp, Populus trichocarpa
  Intron number 2 from transcript POPTR_0013s13520.1 (locus POPTR_0013s13520) derived from phytozome v7.0 (chr-ID scaf fold_13; pos 13979288 to 13979493 reverse strand)
gagattagttctggccttggatttggtaatatgcagcacacagatttgatttgtttcattaacttgattgcttcagttcaatatcgaactccagagcaaatattacaaagcgatttcaggcactgcagaaagcaggaaacctttcataaccttactcataattgttcttcgttttttctcttttttttttcaagtaggtgtttacc

SEQ ID NO: 54213 - DNA, 626 bp, Populus trichocarpa
  Intron number 1 from transcript POPTR_0019s12200.1 (locus POPTR_0019s12200) derived from phytozome v7.0 (chr-ID scaf fold_19; pos 13315304 to 13315929 reverse strand)
caaattagatagacccgtgcacccgcgtataacacgcgttaatctcactcgcacgtgtgtacacacaaatactaattaatctcacctttagaactagtgagattagtatcctattttatattgtgataacggttgttttttaaagtattttttacttagaaatatatcaaaataattttttttattttttatatttatttttgacatcaatatatcaaaacgatctaaaaacactaaaaaaaaatattaatctaaagcaaaaaaaatttaatttaaaaagaaaatatttttaaaacacaaaaaaaaaaaaacaatcaaactctgcaaataacgaaggaattctaaagagtttgttgaatctctattatgcttaagttttgggcttatttcttgtatgattgcattatgatattttttctttgcaataaattgttggtctgcattattaattcctaatgggatattatatcacctgtgtttgctgttaggcgaatttggttcaatggaaagcacactcttcatgggagaagaagatggacaccatagttccttgtagctaattaatcttggacccaaggcatcacagtttagctccttcattctccatcgtgacagaaggcaggttt

SEQ ID NO: 54214 - DNA, 633 bp, Populus trichocarpa
  Intron number 1 from transcript POPTR_0003s15680.1 (locus POPTR_0003s15680) derived from phytozome v7.0 (chr-ID scaf fold_3; pos 15435724 to 15436356)
cctcttgtaagtaaccgatgaatatttatattggtactcaatcgtctatgtaattcttctgactccctcttccttgaaccttttcatttggttggttgagtcttctttccctttcttgtattactttagatatagctcatgcattggatttcatattgacaagatattagctgtttagtgttttcgtcagaggtgattgggtttcgattagctttttcaaatcttgcattttgtaataatcaaatttaggcaatgctattacctaacatctgatacttctaaagctcttggcaaagaagatgaagctgtttgtttttagcagctaagcagtgtagtatccataccgatggtatatttctcattacataccctctaaacttgttcaattggtaatttcttctcgctgaatgcgtttcccttcttgagaagtggaagcagacatcataacaaaaaccaaaaactggagtgattcgaacaacccttcagtcatttttatattcaaagtttttaggccatggttgattccaagcatgtagattctacgttattattttgaggtccgttggatatctactctttgggctttctcgtgacccttattttgaaattactctgtcatgcagctctttatcc

SEQ ID NO: 54215 - DNA, 713 bp, Populus trichocarpa
  Intron number 2 from transcript POPTR_0018s05310.1 (locus POPTR_0018s05310) derived from phytozome v7.0 (chr-ID scaf fold_18; pos 4831205 to 4831917 reverse strand)
gaaggttagtgccttatcggtattttctcggtctacttcataaggtgtttgtttgctgatatttgctaaggtaattatgtttctcagatgtctctatccctcctttgaagcatgtaaatcttataaaacttatcatctattagtttgatgttaaagagaaaatgagatgcctgactgttccttgtttgcactgtgattgtgatgtgtgaccgggatacaaaatatttattattcttggaaatttgttgtttgtatgccaaatttttttacccctcctagatcacttgtgctaccccaaacatctgattgcgttttctaactgaaatgggatatcactaaaaaaaatatttccttggttttgttttattgatttattcatttaaatccaatcttaatttcataacttaaggtagtttcgttagtggaatggcttgctgtttggttgtcttgtgtcaatgtggtgccaagaggcctctccccttccgactttgtcaagaagtggtacttttgtgttttggatgatgcatgtaagttggtggaagaaagagtttgtgttgaatgatctgaacaactgatccaatttggtgaagttttcttgactgtttattttgtttgtacatatcattatggatgagtaatattttgtgtttgcattgtggaattattgattcatatcattgtttgcttctctctcatcaccgggtgcttttcag

SEQ ID NO: 54216 - DNA, 663 bp, Populus trichocarpa
  Intron number 1 from transcript POPTR_0006s13320.1 (locus POPTR_0006s13320) derived from phytozome v7.0 (chr-ID scaf fold_6; pos 10537228 to 10537890)
gatcttggcttctttgacgagcttaggcaaattgagtacgttaattctacttacgtcttacttctatgattatttcccaaattgagattaaattgccactgctatactttaacgaagaggatgagaatagagaaagaaaagagaagaaaacaaaaagctttcagtatttgctaagcaaaactcaatgggacacttgaagcttgattgctcaggtttaccaaatgtatagattttaaagtttacgaacagcttttcataacagaaaaacatgattggtcagggggaaaacaataaccatctcacgagtcccacatcttcatttgatttttgactctttcaatattgggtggttaggctatgtgatttgtcgatcaagctttgtggagaaccaacttggacttcatgtgtgcagttatgttgctttcacttgttgaaaagaaaggtggaggacatgcatgttagctaatcgctttgaaaaaacaaggcacagatagagactgctggagtctatggattccattccaccacacacgatgaacactaacaatcctcctgacttgatcgtttagtcgcagttgttcttaacaaattcccagtattagctgattgattattcatagaactaacttccttttgatggataatgtgcagggtgtttgggac

SEQ ID NO: 54217 - DNA, 889 bp, Populus trichocarpa
  Intron number 3 from transcript POPTR_0006s19890.2 (locus POPTR_0006s19890) derived from phytozome v7.0 (chr-ID scaf fold_6; pos 18909418 to 18910306 reverse strand)
aaaccatttgtcagtggttcctatgtgagtatgcgcattcttgttgtaaactatcattattctagacttgatgaaatatcttttctagcatatttaagctttcaggttcttaaaccaattttagaatccaacttcaaaaattgtggcatttgataacattccaacttatgatttattcttctagacttgatcaaatatctgttctagaattcttaaacttaagaggagtttcatttgacagcattcaaaatcttctggctcatttgtaaatggtgtagcctgttctatgtttttggcgaggtgaactttgttacggcgcgcgcgtgtttgtgtgtgtatttttgtgtatgtggttgtgtgtgtgtgtatttttgtgtatgtggttatgaccgagatggtatatgtttctctgaaagatgttttttgtttgtaaaataataggcaagaaagttgttgaaaaaactaatgagtgtggagttcaaatattcaatgattaatgctcactagagtaggtggaaaatattagacaaagctggtttttaggggcgaaaaagaatcgtgctgtttatctattttctttatcctatgtgttgcatggacttgctaaacgttttccagatctcttttctgtgttagtatttctcattagtacacccttagtttggtgtaaatgagtttaaataggtaagcaatagaataccagcgccaaaaggttaatactggttcaaatggaagatacttggcactttgtatcgttcttagcattgtatgctagtaaatgatttttttttgttacttttgttatctttggtcatgtgctctcttttttttttttacattatttattgagtttattcttggcaggagggggatttaaagtacagtctat

SEQ ID NO: 54218 - DNA, 557 bp, Populus trichocarpa
  Intron number 1 from transcript POPTR_0006s19890.2 (locus POPTR_0006s19890) derived from phytozome v7.0 (chr-ID scaf fold_6; pos 18911080 to 18911636 reverse strand)
actagtgcccaaggatcttgtctcaaatttgcgctgtatccttctgatgctttatgtcctttaatttcttgatttttggtctatggtaattttttgttttgtcggacaaatatgattattttatccttgatggttatttattatcttggtgaactaaggaggagaaaaactattatggtcgctacaccttatattacacatttatggtcttttagtaatttttccaacaactattgttttttttctttggtactaaggagaagtaagttcaaacttgagacctctttgagggggggggggggggaggggggaggggacagtaatgcgagctagattttcttcatttataaattatggatctaaaaatacatgtacaagtaatttttttttgtttttaaaatagttgttctgctttagagggcttgtgtcatcaatatagtgactgatggagtcctcaaatgtttataccaggcaagggttttcttgctgttcacatgattcggtatttgtatttgtatttcttgaccacatataaggcatatctcggaacttccgaa

SEQ ID NO: 54219 - DNA, 795 bp, Populus trichocarpa
  Intron number 3 from transcript POPTR_0013s05190.1 (locus POPTR_0013s05190) derived from phytozome v7.0 (chr-ID scaf fold_13; pos 3674725 to 3675519)
atcctaaagcacttgaaattgccttgttgttatcggtgggttcacttgttttcttgttttgttgttgttgttatttttaaattttaccttgtattttccagttgataatcagatgagttatgagatgcactttaatttctgtaatttgaagaattgtttttttattttttctttccctctaaactttaagcaattgaatgcctttctttaactcctccctgtaaacgtatccatcggaggtggaatgtgcattttttttaatgatgtattaattattagaaatatctagataacctgatctgaacttctgttgatgttcattttgatttttccttgagaaagacttttgttttgaaaagtagaaagtgctagtcagtcttatttcatcttctcccttgtaataaaagaagaatatatctctggaaaggaaagggtggaagctaagtagcacaggaaaaagaggacgagacaggctatctgttcatgctgattgtattgtggagtagaagttgactgttgctacaataaattgttgttctcttactaaattggcctgcgattcatttgatggaatgtaaatgaccccttttgaaatgccaagttccataaaatttgtacatgtagcataatgtattttggaaaggaatatttttgggtcttaagcttgcaattggctaaccctctctatttgatatgatcatttgagtaatcattatgcataattaatctgtagagtataatttgtgtgtttgtgatgcagggagcaactatagttgaccagatagtggctataac

SEQ ID NO: 54220 - DNA, 496 bp, Populus trichocarpa
  Intron number 1 from transcript POPTR_0013s03670.2 (locus POPTR_0013s03670) derived from phytozome v7.0 (chr-ID scaf fold_13; pos 2342353 to 2342848 reverse strand)
tatccaggtaaagacaatacatatatatatacatcaagattttgatgtttttgctcatgtttcttctattttctctcttttctttgagtcacaaattaaacacttggcgaggttttagtacaagcattttgttcttgaagttaactagctagttagatatttggtcgaatttagtgaatctttagcaagagtgcttgaagatgtgatcatgattaatcaaagctatgctatagataagttctttcttcaagtttatgatcagtatcttgtgtggggagatttcgaatctcatacacacacacacttaattattgagagaaggagagagctaaggtggacattatttaaagaagaacttgtttgtatgttatacaattgggaataataattaatggaaagaagaaaataaatgctaatgatatacaggttgttttggttttacacgtttatgatggctacaggaagcttgcagaggctggtttcaaaaggagtgctg

SEQ ID NO: 54221 - DNA, 751 bp, Populus trichocarpa
  Intron number 1 from transcript POPTR_0013s09270.1 (locus POPTR_0013s09270) derived from phytozome v7.0 (chr-ID scaf fold_13; pos 8918092 to 8918842)
taaattgcagagcgctatcaagttcaacggcggaggttttttatttctaatttttttcgatattaagtttgatgattcagtttgtttagggaggactactttggtagagaggagagcttgaatggccattgaatttggttctctttggaaagggttttatttgtttgttcatttgtgggaaatttttaattcgaacaagaaaattgaaatttggaaagagagttgcatattttatttgataattatttagcagcatttcattatttctggccaaaattgatgctaagaagggatatttgccttttcactctgtttaggttggtcattgataaactggtatttggacatttcttgttatgatgaagcagacaccgagttgagatgccattaaatgcatgacactaagaataaccagctcaaagattatctaatatatttagtttgattgcaaaggaaaagattgtaaatgcattgtcttctgctttgcataggaaagatctacccgctgctctaggatttatttatttatttctgaaacatctattttcttgcttgttgatttgtaggaaaaatcatttgtcttttatttattgcctttcaagtggttatcgcttcatctttaggttgtccatatgatcatggaaacttgcaaaaaaaaaagaaccagcttaatactcaaaactttttgtttgttgacatccgtactaatgtttccttatcagttcttgacttaattattctcacgcaggtc

SEQ ID NO: 54222 - DNA, 623 bp, Populus trichocarpa
  Intron number 1 from transcript POPTR_0003s03700.1 (locus POPTR_0003s03700) derived from phytozome v7.0 (chr-ID scaf fold_3; pos 4370922 to 4371544 reverse strand)
aggctgactgtaagtttctctacaaattattatcttcctgttttcttgttttggtgaattactgggaacatgcatcttgtttaagaactcttttgatccaaattagtatcaattgctcatgtctaacagatactatgcttaaatatagactcatgactccagattccacctttgttaattcacagatgtttgtttgtttgttgtgcaattaattgcataatcttattaagctgaattttggtgtccatgcatgcctgcttgtgcaaatttccagtgtcaagatttttttattaatgtcagttcagttgtatctggtttaagatgtactagatcttgcttctaaatctttggcgtatgatatactttgtcaactcagaagagtatccggccttcattggacgctttcatattcttgtacgcttattgaagtctaggtcccagaattgtccattaatcttgtttaatctgggaaatcaagtagttgtaattttttttatttatctcctcaatctatatcatattatttgacaattttcacattaattgtttgtttttgttttataatatcgttgactgatcctgatgcagttactgcactgaaagctctcaaggatatctggaaa

SEQ ID NO: 54223 - DNA, 634 bp, Populus trichocarpa
  Intron number 1 from transcript POPTR_0003s10790.2 (locus POPTR_0003s10790) derived from phytozome v7.0 (chr-ID scaf fold_3; pos 11683025 to 11683658 reverse strand)
aagatcattcagagattacagttactagacaggttagttttcttcaaaaatcacattggtttgctaaattaagggtttagaatttgtgggttttgcgaagaattggtgagagaaagataatgtgttgcttaaatttttgttagaggcaagagaaatgtttggtttgtatttatgtagctacacatttttcttttattttaaagttggcttttgatggcgttgggaggttgctctgttttaatcgtagaatataatggttcggtatgttccctgagtgttctaattgaacgggtctgatttgtttttgtttctatattgaatttaatgttgcttctgattattatagcaatggtaaatttacatatatttctgtcctggtgtgtttagcaattgcttcaaaaagactgaactagaatgtttaactaaagtgtataatatactatagacctaagaatggcactataagatacagtggttattgagctaggcctgcaaaaagagaaactttttatggtcctgattttttgaatttaatccaacttgtttgctttgacagcgctgattttatatgtgaaggacttatatatttgtatctgcagattgtggtcggtggaaggaacaagtatctgatcaa

SEQ ID NO: 54224 - DNA, 647 bp, Populus trichocarpa
  Intron number 1 from transcript POPTR_0019s15310.1 (locus POPTR_0019s15310) derived from phytozome v7.0 (chr-ID scaf fold_19; pos 15853572 to 15854218 reverse strand)
ctgaactctataatacaccaaaagtgcttacccctgtaagttcatcgtttaatgttgagaatgcaacacatatatactgacacaaatgcatgcacttatgcgcgcgcgcaaaggaacaggcacgtgcataatatgtgaaactatagcattcaagcacgatttgatacagcatgcacacaagaattggcctaatctacttgtaaaacaatgcagaatttgttgcttgcttccattcctgaccttttgaagttctgctggaagaggcagggaaatatagaaaaaggaaacatacaattttcctttgttcatctggggtttgcttttgttgtttgaaagatcttaaaaatgaaatgcaagtgttctttctgtaggttcacaaccatgtgtgattattgctgtcaacaaataagagccaaaacactacttttatgaaaaacttggtttggggaaatagaatcctcagttcctccatttctgttaaatgtgaaattcttccagtccagttaattttgagtgtcccatgccaaagctgactagcttataatcttttgaatttaataattttcattgcatcccctacctttggctgattgatgtgattcgatgctgcagattccagattcaagtatccgatacaaggaaagtct

SEQ ID NO: 54225 - DNA, 333 bp, Populus trichocarpa
  Intron number 1 from transcript POPTR_0003s07590.1 (locus POPTR_0003s07590) derived from phytozome v7.0 (chr-ID scaf fold_3; pos 9139038 to 9139370 reverse strand)
ttcatcagaacgagaccaaattgttcggaagaaattaaaaaaagagaagacaaaacacaatcacaaacatataaaatttattcaatcaaacaaaaagaagtatatattttgatcaaaaacatggaatcaaaccacatcccattttataataatcagagttttttttttttttctttcccaaaagaaaatattaataacagaattagagtttctgtcaattacatttgtatttgcacaatctgtcaaaaaatacctcatctttttcttgcatcttcttcaaactcttcaactcatccagcaccagatctccctctctctttcaatcactaccac

SEQ ID NO: 54226 - DNA, 668 bp, Populus trichocarpa
  Intron number 1 from transcript POPTR_0018s12580.2 (locus POPTR_0018s12580) derived from phytozome v7.0 (chr-ID scaf fold_18; pos 13129594 to 13130261)
cccgtcatctctctctctctgatatccaggttcaggtaggggattgttacgagctcttttgttcttgtaatccctttgggttgttttgaattttgatgatgttatagtatgtattcttgaattttgtaaacttttcttttctttgattttttcttggtttggttagatctttgggtgatgacgagtgaaatggtgtcttctttttttctttagccaagcatggatgttgttggtgttagtagatattgtttttactgttttcttgtacatttggctttggtttcttgatttatttttggttcttgtcattgaatttggtgaatttcatagctttttagttttcgtgatgatttcttgttctttctttctttctcttttgtgtttttgattatgtgggattttgatggtggtggtgatttagattttttttttttgataattagttaattttgctgatattatgttgtcactgatggaagctttatcttttatctatctggatctaactaaattcatgtaattgtaagcttatgaaagtcaattgagggtctgaaattaagatcagattcatttatgtaaattaatgcttattgaattagagagttagtgtgaagagagttgactcgatgggtttgtttgtagaattctgtaattgagagggagagaga

SEQ ID NO: 54227 - DNA, 957 bp, Populus trichocarpa
  Intron number 4 from transcript POPTR_0018s12580.2 (locus POPTR_0018s12580) derived from phytozome v7.0 (chr-ID scaf fold_18; pos 13130676 to 13131632)
ttgcacggcgtttatcaaggacacataactgggcggtatgtgcatcagcatcacttgaaatctttgtgactagatagctctgaatacagaggcttgaagtgatgttactattctgtcaatctaaatatgcaaatcttcatgccctggttggaaacaaaatttttgttttggctttcaggagccctcaaatctatattagcttcctctttgtttcaaggcactcaaatttttgcaggaattctgtttgcactggaattcaattaggtgacagtagtgcataaaatgctgcttagcaacactaaccctctgggatgtatcaccttttgaggacatgactaaagacacttgatgtatcatgtagctttatagttcataccttagaaaatccgatgagcatatgaacttcaacctgacggaataatatacatctctgtggtctttgttggtcagtgcatttatgtttataaaacagtttatattgcagcaccatgtttttgtagtcttctgctttaccattttcaaaatgaaggaagcatcaaaaaataatttgtcacttcgaacaaatgagtgaaagtttcttcataagcaagttaaacttatggacaggattgattgaaatttcccgtacctgcctttacagccatttagatctgaaacagaaaaatataaatgaagtttacgctagtgaaagttaagcacgtcatgtcaaggtggctgtagttcattttcctatatttatgaatcccgtgtttcatttcatggaaagcagttatcatgattcatggataactcatccatggtactttccaaagttgatgctttgagtgatttgatgtccatattattgatgcatgcatatgtgtatttcttatctgtccatttttttctcctgcaatttgtttgacttgctgctagtttttaggttgcattgaaaactttaatcgttattcatcgggc

SEQ ID NO: 54228 - DNA, 597 bp, Populus trichocarpa
  Intron number 2 from transcript POPTR_0003s14310.1 (locus POPTR_0003s14310) derived from phytozome v7.0 (chr-ID scaf fold_3; pos 14412620 to 14413216 reverse strand)
tcatctcacttctcctgttcttttcaccagtgtaagtactactgcgaatggttcttgagcacacagtctcttgaactgcgtggatattttataaaccttgtcaatttgagataccaacgctgtgtggtttttgtatgcatgttcaatctgattattactttatccttatatcaattttctttctcagtttaatatattctatagcatgctttgtctatttgatattatttaaaccaaattatgtgaattataaagtcgccccatttttttaatatatatataggtttttgtatgcatgtttaatttgattattactttatcgatccttatatcaattttcttccccattttttttaattttatatatatatatatatatgctacatcacaagaaacattggccaaccacttcatctgggaccaaattacatatgcattttcttttattattgtttttgtcttcaaaaataaattacaaagacttgatttgcagaaccttctttagaaagtaaaatgtaaaacttgcatgttttgaatattaatttaataacttaccttttcttttattgactttctcaggccaacttttgtacagat

SEQ ID NO: 54229 - DNA, 725 bp, Populus trichocarpa
  Intron number 3 from transcript POPTR_0013s09630.1 (locus POPTR_0013s09630) derived from phytozome v7.0 (chr-ID scaf fold_13; pos 9456891 to 9457615 reverse strand)
gcagactgaaaagcttgtatagcatctatagcaaggtttgtcacattataaaatcagtgatactaacttgaggctggtatttccaagcttctctatacttttccaagatttaataattttgccacttgagaattgatttttgttgccatgagttttgctttgaggcttttgctttgttgtagttcatgagcatattctatatgttttcttgacaatgcatttgcattcagaatttacgtagttaatagtgtgttataggtctagcaagtagtctaaaggaatgaggtagtaaaccagctaactatagtttctgttgttcttgagggatgcattggtgatttcaatttgaatcgaggaagattggatatcccaataaagttattgaaagcataattgtgtgggagtaggtgcagattggatgtgtattgcttgatttgtacgagtgaatactgggagtaacacttgcaactcagtccttagtactcctttggaagtttcgctgttataaatgttgaaagagtattctcaggccattgatggtgattcattattttgtctggcctttaatattctctacatcttttaaattgagtgttcctaaccattttcttttcattgctagttaaagttatatgggacagtggccttattttcattgctcaagttctcacagagagttttcatttgattatattagaacacgtttctatctttgcttcctctag

SEQ ID NO: 54230 - DNA, 549 bp, Populus trichocarpa
  Intron number 1 from transcript POPTR_0006s01900.1 (locus POPTR_0006s01900) derived from phytozome v7.0 (chr-ID scaf fold_6; pos 1141680 to 1142228)
cttagagctcaaccgattacagaaccttctcaaaggtttgccatgtcttatcctaaagtaaactaagttcatgaaaacatgcattgacatgcacatgtttagttcttctgagtttatcagttcaagttaggctgaattttcttttggggtcgtgaaattctgtgaaaacatgaagtgaaaaatgacacgggatttggtttttggttctgaatttatggcctatggtaataattctcaccacaggtaattgctgttcacctgtgtaaataattaggagcatgtaatttggaaaatgacagcacattatcataagatttaagtgtaatttgatgtcaaaattgaagtcctgcattttgacttttatcattctaggctactgtaaaagttctagtgccattgaggtttcttgttttttgctcttttaactgttctgttcttgtctcctagcatttcttgtgatccaaaataagcattagaatgtcttctgatgatttttttttcatcattgtttcagagaaaggaagagagctgggggctgcacaaggagaa

SEQ ID NO: 54231 - DNA, 857 bp, Populus trichocarpa
  Intron number 1 from transcript POPTR_0014s08520.1 (locus POPTR_0014s08520) derived from phytozome v7.0 (chr-ID scaf fold_14; pos 6334121 to 6334977 reverse strand)
caagagcacgacaagtttctagaagctctccaattgtaagtattagtgtacatcttctttcttttcttttctttttcttaatttttattattgggtggtggtttttagtttatatgttttgcttggttgcaagaaaagagaatttgtatttagtttcacctaattggtcagctaaatgagagaaattgaataaaaaattataaaggttttttcaatttggcattgatgattggcatggcaattcggggttttaattattaattattatttttttgtattttaattatagtttggattttgaatttgagacttcagtgattaattaaacgagagaatttgaataacaaactgagggaattaaaggtacctgaacttggggttactaatgagtttgctttctgatgtaaacttgtgttagtgaaatcttatatatatatatatataaaattttaatattaatttagtttttgaaatgggagctttagtctttgatgcagaagtgggaagattgttgattgctgaagaaatacggagagagaaagattttgaatcttactacttgttttggtaaaaatgttattttatgttctgataataaaaacaattcaatttatcacgttcatcaagctctgaccagaaaaacctaacattgaaagcttctaaacttttgtttcggtcttaataacttgaatattgttatagtcagttaggtgactatgtgataaaactttctatgagattatctatgtcactataattcacgctttctgatttgtctgttaacaaaccatgcgtcctaacctaaaattcttttggttacagatttgatcgtgattggaagaagattgaagcatttg

SEQ ID NO: 54232 - DNA, 650 bp, Populus trichocarpa
  Intron number 1 from transcript POPTR_0032s00230.1 (locus POPTR_0032s00230) derived from phytozome v7.0 (chr-ID scaf fold_32; pos 170875 to 171524 reverse strand)
atcttcccagcctcctcactccccacgctcttcaggtttgctctccttatccactgattggtcttgctttagtttctgtctgcctttggacaattctgtctattttcattgttcatagatcatagtactgaagttgatgtaggaagggaaagatcttggggcagagatgatcttcaagtgactaacagaacatccagttctggcagtttgacttcaatttcaacagaaatacatgtaagtttcattcataaattttgattgcacaggataatgttttctgtcgccaattttcaatacatttaggttgattaactcttgaattagcaagtgtctgatggtggtgagttcaagatggcaaggtagcatttttttttcagtttgtttatatagatattcatttttatgaaaaataaattaattgcagagcggtgattggtgaaccttgtagtattttctttgttttactttgcgtttttgaatggaacaattttgttgtataaacatatctaaactcggtttatccaattgatattagaaattgttttgttacctcatcaccttactacatgcttacttttagtgaatatatcagtaaaaattgaacctgccacctctccctcaagaaaaagacgaagaaattagtgaaaatt

SEQ ID NO: 54233 - DNA, 906 bp, Populus trichocarpa
  Intron number 1 from transcript POPTR_0003s20660.1 (locus POPTR_0003s20660) derived from phytozome v7.0 (chr-ID scaf fold_3; pos 19137248 to 19138153)
ctataaattgtaaggttcaaaaacttttatttttaagaatatgttttttaccatgatttttgtaatatacctttgtttattttctttatatttgtgtactcttaattactttgatttttttttaataagctaagtacttgaagtaggattaataagttaaataaattttaaagtttgtttgtttttgtgtttttaaaatatttttcaaaaaatttaaaaaaaatttctttgcatcaaaataaaatattatatcaagagaaacagtagacactaggcctgaaatctacttcgccaaaagaagttgtcaagtacataatctcgatgtcaacagtgtttaatgaaactatctataatttgcttattttgaattaatacgtttgaactttagtcatggattttttataatgcgtgtcatgaaaatgtaatatatatatatatgctttcgaatcactaaatagtagaagctaggtattataggtattcctctatcagtactaataaatataaatatataaaccataagtgatcagtgataaaaatttgaaatcaagatatttgttttatttgtggtcttaagttcgagtcatgtgattgctaatatgatgattattgaaggtttacatgatcgttaacttcacggcccgtgggattagtcgaggtgcacgcaagctaacttgaacactcacgttaatatatatatatatatatatatatatatatatatatatatatatatatatataatttcttaaatcaacttcgcatagagtacatacatgttcattcataatttatgtcatatgtaagagtaaggccataaaaaataaacttcttgtacagacaaaaggtttggtatttactaacttttttattttgtttttcacgaggaccagttctttatcattc

SEQ ID NO: 54234 - DNA, 671 bp, Populus trichocarpa
  Intron number 1 from transcript POPTR_0018s09160.1 (locus POPTR_0018s09160) derived from phytozome v7.0 (chr-ID scaf fold_18; pos 10049001 to 10049671 reverse strand)
tcaaacagtgaccctttacagtcgcaactctaaaggtaagatttttatctttttcttcgtttttgtttactgcatgcaaaaaatcagaatagaagaaaaggaattagacgtttaaatatggggggttttgttttggtccttgcatgatgatgattatcaaatctaatttggctgtaaactaatgatgagctaaagtgagtttgcttttgtcggtttcgcacacattgagattttgcattatagttttgaacaattctgggtatgtaaagaatggattcgggtaatgttggatgatgtttgcttgacatggacaacgttggagtcttgaataaataaggtaatatggggctaaacattgaaaataaaataaatatgctccctttgctttcggattaacacaatgaataaagtgatttaacttagttttttgtctttcgatttgtcaaaagtgaaatcttccaacctttaaactttggttccagatgatcagttttctttgtcaaatttttttcatgttttataaaccatggagcggcaggatggtctagattttgttaacgtggcaaagcttatgggggctcttggtttttcctattcttaaaaggacgcataaacccaactttttgctaacaaaatttgcagatagaaacccttctgctcgcactctcaaa

SEQ ID NO: 54235 - DNA, 800 bp, Populus trichocarpa
  Intron number 1 from transcript POPTR_0003s10270.2 (locus POPTR_0003s10270) derived from phytozome v7.0 (chr-ID scaf fold_3; pos 11320010 to 11320809)
ggtttgcaggtacagcaatcctatgtaattcattcttcatgtaaattaacatcttgttttgaatggttattgaaaatcaacctctattgattagatctgacatgggatttgattgtttgattgcttttatcagtttggattatgcattagaattagttcatgtctggtcctcttggatttgtatatgaaggggcagtgttaattttcatggttattagtgtttcccagtgtaggtgcatgaaaaactcttggttgctctgttttaatacgaatctagattctttggttttcagatctgtttcttcttcttgattggttattatttagtattgttgaagatctatgtttggatatatcaaatttgcaatgttgtggtattgcatgctgctgtaatgacttctgtggtcatgatactctggttcaaagctagatcagggcatctatttgtcaactttttctttatttagtcaaatctgagatcagggctatctatgggaagttgatggctagtaatattttgcagtctatcttacttatgcttagggtcactgtctagtcatggatcgacatctatttaggcaatcaattctctctttatatgatgcatttccttctctagttttccaagacacgagatttatgcaatttatttggaaatagacgtgaaatacaaaacattttgcctcagctattcggcttaagttatttggcacgcttgacgtttaagttgtttattgatgtcacaaattgggctggcctctgcaggaggaatttgaggagcacgctgagaaagccaagac

SEQ ID NO: 54236 - DNA, 567 bp, Populus trichocarpa
  Intron number 3 from transcript POPTR_0019s04470.1 (locus POPTR_0019s04470) derived from phytozome v7.0 (chr-ID scaf fold_19; pos 4627572 to 4628138)
ggtacaagcatcttctcaaagatctcatcgttcaggtcattattgaataaccagcatgcccatttgcttttcagttgcttttaaattgaagaaaattgtggaattgctttgccacgtgtagttcatgaagttttggttgatggggctttttcacttgtgttcgtctgtatctgtataaactcttgatacatgcacatgatgcctacatttcagttgttagatacatgcacttgatgttccctactgagcatttttgtttttttgataaaatgaagtgaattttaatctactaacactctgatgatggcttgagctttgagggaatcatctgatgaaactttttaacttgcagatacattttagaggatgattggttgtttgtaaattagatgaagaaatgaaaaattgtattaccagggaatgctcagaaatgaccattatgatttcatatttaacaggaatgcggtgttatatacatgaataaagtattgtgctcataatctggatattctttcttcattttttttcccagagtttactcagattgaaggagcctgctgtcttgct

SEQ ID NO: 54237 - DNA, 557 bp, Populus trichocarpa
  Intron number 3 from transcript POPTR_0022s00690.1 (locus POPTR_0022s00690) derived from phytozome v7.0 (chr-ID scaf fold_22; pos 328542 to 329098)
tggaacgcataagcaaaaggaagccaggtgaagtggtatgtatctaatctgcaattcatgtcgcagtcgatttctggctaattttgtttcgcatttgatgctgctaatgttatggattcataggaaatcccgtttcgtgctcttagttttttcctttttaacttcatggaacattttgggtttgtaaatctatgaagagtaggacattattaggatttttatttgctatacctaagaacttgatcttcatatagaggttatttgaaatctgtttgttggtatgatgagttctcgtatcactttgagagatgtaaataatggacaaaattcatcatcttgttcaacaatgctaccaagcttttcttctcgacaggctcagtgattttattcatccgtcctacatcactagagtcatttcatttattctggtgcatagttcatacttatacagctgcctttaaaatttacctgagcttctgttacgactgcacaattgttgtttctgtttttatcaatttgcagttaccgcctcacgaaccagcagtagtcagaaaagc

SEQ ID NO: 54238 - DNA, 1000 bp, Populus trichocarpa
  Intron number 1 from transcript POPTR_0014s12910.1 (locus POPTR_0014s12910) derived from phytozome v7.0 (chr-ID scaf fold_14; pos 9509299 to 9510298)
aaagagtgtaatgatggtaatcatacctagttgattgaagatttcaagatctaggttcaaatgaaaaactaagccatataacattctcaatagcactagaaaattattatttcatgcttatttttataatgaaataagtgttagttatagtgtgataaacggtgagctgagcttttaatgatttttatatttttgtacactgggtcaagtatagcaaaatactcttaataaaagatcatgcatataagtgaaaaatgtgattgtttatttgtgaatttcaataaaaactgaattctctaaaacactcatgaatctaagagttgtttagggctaaaatgaacataacaataaaaaccaaagaaaatctctaggtagataattatgtgagtaatattgttttagtttacataaaagactaaatagcttaagacatcacatttattatttagccgaataaatctgataatattttactaagaaatgttcaaagtaaaaaagtacctattctgatgtagtaatctactaaatcaatatttttcaacaaatctttaagttgtttttaaactggtgagttaatttccattcatgtgagggattgttggaaatttgctataattaaacaaattacaggtgaatgagaaattagtttaaaaaaacccatggtttttctactcaaaaaattcttagtttttctagatttaattcttgatttatattggctaattaaaaattaataatggtggaaattagttctaattaattcttcaatcttataactttcagaatttactataaaaagaagtatgaatgaagagtttttaacttgaattttttatattttacactcttcctcaccttatttttagtgttttttttttttttttatgctttggttttccgcacaaatttagctcctgtaattatcaatgtcacatgttctttcacatgttcttttagtgtaataaaagcagactaatttatctttccttcattcaggaaa

SEQ ID NO: 54239 - DNA, 478 bp, Populus trichocarpa
  Intron number 1 from transcript POPTR_0003s07530.2 (locus POPTR_0003s07530) derived from phytozome v7.0 (chr-ID scaf fold_3; pos 9093930 to 9094407 reverse strand)
aaaagggatcatccaaagttttaggtgagcaattgtaatttagataatatgcatgtgagaatttaagtatttggttctgttttattcttacctcgctgcactccccaaattgtttgtgaggatatgcaaattctgatcgtgtagtttgctatatcatttggatatttctgaagctagatgccatccaccaattttatgtatttctacctttatgagccatgcttaaaaaaataatatatcatatatggcgttgtctaattatttctgatgacactgtttccgtgcatggttatcaataactggtacctagaagtgttatttatactttgtttccttcccccttttctcatggtcctgatatagatatcctgatttgattaatccaactttcttattctgataagaactcctatgattatggccatccttgctgtaatattttttttattatgcagaaccaaccgtaaataatagtgag

SEQ ID NO: 54240 - DNA, 827 bp, Populus trichocarpa
  Intron number 1 from transcript POPTR_0003s11700.1 (locus POPTR_0003s11700) derived from phytozome v7.0 (chr-ID scaf fold_3; pos 12496836 to 12497662 reverse strand)
tagagagcgttcgaaagtttcgatctttttttcaggtatggaatctaatgaaactcttattgttctgcatcaacagatcgtgtctttcctttcgattttcttatgttgttcctcaatgaaaacatatttctggagatatcgaaggatgtcttcgccgttgttcctttttttgccttttttttttgcgtgctagcgctagccgtgtgatccttaatcatgacgaatttgaacggtccagatcttactagcaaatagcatttaaggaggcgacggtttggattgatagtaactggagacaaattacataaagagttcattctatgagctggagccaacagcgtcctggaatttatttttttatttttcgtgtccgctttacttgaaaagtcaatactgtcctcttgattgagtgcgcaataaagagagttgacgcggggtcatttatgtcattccgtggttgcagttttattaatgagctcgatctttccttgaaattccaaattttccatgggttataccccccagattactctttatcaccttaaataccccaatatcacactcacgtccccgtttctttagcaggcagtaagagggtatatcagtcaagttgttaatattatgaaccgtaaaatacacaaacaacaactacccctcctctataataaacgatacagtaattattatattgataagaacacgcagaagacacgatctcactttcgttctcctgagattcgtgagaacattgagattacaagaacttgtttgaaagtcctaaccctaactgttgtgtttgtttgattgtagaaaacaagaaataaaac

SEQ ID NO: 54241 - DNA, 808 bp, Populus trichocarpa
  Intron number 1 from transcript POPTR_0014s18210.1 (locus POPTR_0014s18210) derived from phytozome v7.0 (chr-ID scaf fold_14; pos 15024856 to 15025663 reverse strand)
accacaaaagttatagaaagatgatttttgttgagaagggggggtatttttagtgggaggttgtttgcagtttgggaggggagagttgggatggggaagaagaaggggaaaaaggagaggagagggtcgacagagtggtgatatattaactcttactgagggaatcaccgacggaatacttctgtcggtggtttcctcggtaattgtgacggtgaattagtcacgtcactgtacgaagattctagtctgaatccctagctcggtcatttcatcggtaaaatcgcctgcaaaaactgtcacatcatcgaactgctttttttaaaaataaatctatatattttgtctgtaattcagtcggtatataccgacaacattagtccgtcggtatataccgactgaattaccgatggaatagtatccatcggtaattatcaccgtaatttaccaacataattattttctcagtaattctgtttgttttaggcgaatttctgatagtgggtgtgatataaacagatgagaaacctaatccaaaatcccactgttttcactggtagtggaactgttctagcattttatttttcctatagcaatggactttgtgtctaggaatatccagtgcatgcaatcttcttatcgctgtagttggtggtggaggtggtgtgtaggttttagtcttcccaaaatttctggaagtaatctgtcgatgttttatagtttgattctatccttttgtttgctttgtgttgttattaataaccaatgctgttcagcttcctaaaggcacgcatcagtggtcaagctttct

SEQ ID NO: 54242 - DNA, 550 bp, Populus trichocarpa
  Intron number 2 from transcript POPTR_0003s18570.1 (locus POPTR_0003s18570) derived from phytozome v7.0 (chr-ID scaf fold_3; pos 17607996 to 17608545)
gagatacaattcgatatcttgttcagcatcatgtgagttaatttcatggtttgatattgattgatatattcgttgtcttgtgtttgatggaatggcttgaagatgtttatgtggaaactgtgccaacataaatacatagcagaatcaaatggttattgacaattttgggttggcattgaaatctcccctttaattggatatgctggatgccctgtaacaaaaaatattgcctattggttttctccttgttggttgtattgcaaatctttaaactttagagctgttcgcttcagatgtttgcattattctaactatttgggcttgttttatgagaaagtatatatagaggtcaggtacttgtgaaacctatgatcatcttaatgtcatttataaaaaatttaaggtttctgaatcaatgtgttgcatcaattcaccgatgtttggctgtaacctgtaaataattttaagctgtccaccctcttgattgtattcttgcctttcatctcaaattggtttatgcatgccttatttgtaagatgactgcaggttg

SEQ ID NO: 54243 - DNA, 803 bp, Populus trichocarpa
  Intron number 1 from transcript POPTR_0019s09470.1 (locus POPTR_0019s09470) derived from phytozome v7.0 (chr-ID scaf fold_19; pos 11012672 to 11013474 reverse strand)
caattggcaacagaccaagcgcaagtcaggggttagtcagtggtctggacagcagcatgtccgctaccaattatgctccaatttcggtcacacagctcccaattgttcccagtttcgcagcagtacccactagccctctgctcaccatgctgttgggaatgtttctattgtgacatggttccccgacgccggtgcgaatcaacatgtcacacctaatcttgcaactctgaccgattctataccctatcttggtaatgattatttgcatgtcggggacggtaagggtcttgacatatctcatattatactacatgttggtaatggcagcccaatgattatttgcatgttagttctccgttcgcgacagcccaagacagtcttgtccactgccactaccaccacctctactgcctccttcagtcagatagtatctagtcggatagtatctcttcctttagggttatatatatagatagatagatagaattttcttataatattttgatatgctgtaatgcaagagaagctaataatagtaaagaaattgaatggcaaagctacatccttgcacaagcatggacaagattcatcaactgcttgataaatttacgagtggtgttgaagtcctcccttgccctataaaggatcaacatggaaggttaagaaatgtgtccgttttcctagagcagtgaagaaagaaagcaacatagctaacaaaaagatgggcttggaagttgtatcatcggcaataatatcattctcactattcttattgttagcatcaactactcaagcccagtcaa

SEQ ID NO: 54244 - DNA, 410 bp, Populus trichocarpa
  Intron number 2 from transcript POPTR_0003s05990.1 (locus POPTR_0003s05990) derived from phytozome v7.0 (chr-ID scaf fold_3; pos 7354311 to 7354720)
tctggttggaaatccggggattggatttgcactaggtatcacattttcatatgattaattatataacatgataattaattaattgacgcacgtagcatgatcttgccttaagaaaaacaaaagaaacataaatatatgaatgagacaggctttatgtattaatacagtcattaattactctacacaatgaatcttacaagctcttcgtattcaactcctcattttttgactgcttttttcttcccttcttttctgcaaaaaggagatgctttataaaatatctatctcactctttctctagctgttggtgtgcataaaataaaatgcaagctcaacctattcataaagtaatcaaaaacaatattgttaatgttttaattattcgtatgtaattcacggggcaggtgggg

SEQ ID NO: 54245 - DNA, 964 bp, Populus trichocarpa
  Intron number 4 from transcript POPTR_0003s17190.1 (locus POPTR_0003s17190) derived from phytozome v7.0 (chr-ID scaf fold_3; pos 16628934 to 16629897)
agctttaccacaagtctttggaagtttgtgctaaggtatactttgcaccttccttctcataaaaaaagttgagtgtgaactgttgtttctttcagtgtatttggtggttttgagcctaccctgttagatttctggtatgaattttactaattatgctgatatagccctctatctactaataaggtagaaatcacttggtttttacatgaaagtagtgtcagtctttggaagtttgtgctaaggtataatttgcaccttctttccttgtcataaaaaaatgtttagtgtaaactgttgtttctttaagcgtatttggtggttttgagcccaccctgttagatttctgctatgagttttactaattatgctgatatagccctctatctactaatagggtagaaatcacttggtttttacatgaaaatagtgatagtctttggaagtttgtgctaaggtatatttgcaccttgtcataaaaaaatgttgagtgtaaactgttgtttctttaagcatatttggtggttttgagcccaccctgttagatttctggtatgagttttactaattatgctgatatagtcctctatctactaacaaggtagaaatcactcatttttctattgttgaaaagcagaacataatcttatgttcacacatttttcaatttgaggtgtttgttccaatggaataatcaaataatcaaaccacaaagatattattttgattatcatcaccacagcttctccaaatcttcaatattttccttgttattctgtgcttgatgttctgaatgaacattgcaaatcaagctttagcttttttgaaactacttctgtctatcctgatcaaatgaactccacttttgatcatgtgtcggtgctattttttaagtgatatatgtgatcttccagttttccgactaaagatgttgttgacgatatcttctcaggctccagaattgcat

SEQ ID NO: 54246 - DNA, 387 bp, Populus trichocarpa
  Intron number 1 from transcript POPTR_0019s04860.1 (locus POPTR_0019s04860) derived from phytozome v7.0 (chr-ID scaf fold_19; pos 5104684 to 5105070 reverse strand)
acctcttctctgctcaaaacacggtgggtcttcttcagtttctttcatgtcttttttatgcacagtttttcaacctttttgagttatcctcagctcttaagggtttagcaaagttggtgctgcaaaatagtgtttttttttttttttttgtaccttttgtgttcagttctttcttctagttcttgcttctttggctagattttgtctgcatatttactttgaactactttatgtgttcaaacgaacttggaaagtgacaatctttgccgggttttatcagtttctgtctgtgctattctatggttttaaagattctattttgttcttcagaaaccgagttcattaaggacaattttttttgccttggtacaggaagttgattttagc

SEQ ID NO: 54247 - DNA, 819 bp, Populus trichocarpa
  Intron number 1 from transcript POPTR_0018s02000.1 (locus POPTR_0018s02000) derived from phytozome v7.0 (chr-ID scaf fold_18; pos 1800427 to 1801245)
ggtcacctctgctgaagttacccaggtaattttaactttgtttttttcacatatttttcccttttttttttgttgggaattgaattgcgtatgtgttttggttaaatttgtgagtcgttgattagatgtgtatatgcacattatgttcatgttatctcagggtttatgcaattggcccagttgttgaaacttgaaatcagcatttgcttttgttttgttttgcctgagatgctatggctgttttttcttttgttgttattggaattgttgttgtgaaacaaatacatttttgtattaaaaattcaattttgagattgcttaattataaaacttagctgtattgattcacccttttacatttgatgggtggtttgggagttttttcggtgaaagattctttggtttactaagaaatgaggtgaaaagaaggggaacgccgaattttgcagaaaataaaaattatcaggcaaataattgtaggttatttagtcgagctggtgatggaaagagcggaagtgatgtatgtgaatataatataaaacaacacagatctgtaataacatgattactatctttctttactgtctggtttcttcgcaatggaatggattgttggtggataaccgtaggaattatgttcgtgctagtgtttgctagagaatgcttgagtttttattgaaatttatggaaacaaaactctaaatgataatgttttcgtgcattttagttttttggcctaatgaatgatgtattggtataaaaatgcgttgcccttgcccatcaggatatctttgcagattataagcaaccatttgcagt

SEQ ID NO: 54248 - DNA, 619 bp, Populus trichocarpa
  Intron number 1 from transcript POPTR_0006s20320.1 (locus POPTR_0006s20320) derived from phytozome v7.0 (chr-ID scaf fold_6; pos 19380083 to 19380701)
caaaaaataattaactcgcggtatcgcgcgaggtatgtaactagttagataataaactccgtcactaaaccaacaaccacgttaaaaaaagaaaacaaaaagaaaaaggaaaagaaaaggaaaaagaaaaaaagggtttgttttttcatgcttgagtgagagtggagcaaatgaccctcatctcctcgccacaagtccaaactccaaacacaagcactttcagcccacgttaacaaccgacgaccaccatgcacagcctcatgatttccgtcactaaaccctccatagccttcactacgccaccagacttttctacctcctcactctcaaatcctttattcccttctggtggccccacaaactctaccctctctacccctccacctctcccctcaccccccctctcttctccgccattgccttcccttcccgcatcgtcatcaccatattctcagcccctgctctctccctcacaacccctcttctacctcctcgcgagaacatatttataatagtttcacttggcaaaaatgtacaactgatagacaccacgttcttgcttaattttgtgttgatgatatcagtagagtaaaagtattagttcctacaataacaacac

SEQ ID NO: 54249 - DNA, 501 bp, Populus trichocarpa
  Intron number 1 from transcript POPTR_0019s05120.2 (locus POPTR_0019s05120) derived from phytozome v7.0 (chr-ID scaf fold_19; pos 5356267 to 5356767 reverse strand)
aaaagctgagcttccagatttacactgacgacaaggtttggattttttctttttctttttaatttgtcactcttcctatttctaattaatcaatcatatgactattatccatggatcctatgattagtttgatttccgtatgattttgtggaatgcttaatctgatttgatttctccttgttttccattaagtaaatattttagatcatataaactgaagatcaagtaatgacaagcagcatgatcatttctatgtttcttgctaatcatttgtatcttgaacacattttgaaaataattaatgaaatgcagcatgatcaaaaaaaaatttcctctgcaatatagttttgaaaagaagggatttggatttaaaggactcttattaggaaaaaaatgtgattacttaatctgctaccaagatcactttcacattcatgaacactgcttaaaagctaatgaatcacaaactgttgtcacagaggattaagcaagtggttcacc

SEQ ID NO: 54250 - DNA, 753 bp, Populus trichocarpa
  Intron number 1 from transcript POPTR_0021s00550.1 (locus POPTR_0021s00550) derived from phytozome v7.0 (chr-ID scaf fold_21; pos 248697 to 249449)
aaaaactgaatctttcatcagttgtaaactcttctacattttaaatcacaatggctctgcattttcatttgtttttttattgtcttctctgccttagaatttccataagttaggcattgtgcattggaattacctgttctttttgcaatttagtttctctattctctgatttttctcaattaaaccttgaaaccttgtgcttagtgatgtttttacagccatctggcataccaggagctgcagtttccttgccttccatgatatatacaacttacactgtcttgttattacttgtgaatgatgttctttcactatgagatgatctaatccaagttaggttttacttggtaattgcattcatgaaacagagaggttcagacttcattctgcattgggactgcctagaaatgcatgttaatcctgctttgcatatgagatcttttcccttctacagttagtttataactaatcgaagtattcattcaaaaccacagttattaaacccggaccggcccggcgggtcgacccgggacccggtcgacctggtggctagaccggtccgggcaaggttaaaaaccggctagcgcaaaaaaacggtcaaacccggtcgacccagcgggtcaacccatgacccgggcgagacccggcgtatatatacattaactttcctttgagtcgctggcagcaaaatgatgccctaatttcctaagaagagcagcccgcccccaatttccttctcttttatcttttgca

SEQ ID NO: 54251 - DNA, 1020 bp, Populus trichocarpa
  Intron number 2 from transcript POPTR_0003s19410.1 (locus POPTR_0003s19410) derived from phytozome v7.0 (chr-ID scaf fold_3; pos 18141707 to 18142726 reverse strand)
caatgtacagttctccttctatcactttttgtataaggtttcaatttaacttttcattcattattcatctttcaacactggatttttttgtgcctaatctgctgttcttgtgtttttgtctactaatatgtatataaccaatagtaggttcaagaacttgaacatgtttagggtgtcttgtactcacatcagaaatcatttctagtggtttggtactacattgcgaacttattgtcaaaaattggtagtccagggtgcaataaccaggagtttctttgtttgattggtagcttcaaaaaattgggatcgaatgattttgaaaatgtgctttccagatattgagtatgcaatgtaatttgtttatttgaaaatgtgctttccagatattgagtatgcaatgtaatttgtttattctcataaaagcttttcttgcattagttacaaatgaatgattttcatgctccatcactctgccaagttatgtagcttgcacactattctaacttctaagtttaattgcatttgtaatttgctaaatgttcttgcaagtgttaaagaggaacttgattgcgagagagaagggcaggtggggctgggaagggttaagtaccttgacatataaatcaaacaaactacattatttctggaggctgttttgcatttttccttagttctagggttgaagatagaaatgctctcaagtagttcaattgataaacctgtttgcgcttatccctttcctttacttctctctcctttatgggtccagtaactgtagtatactctctattgttaaatctggaaggtcattgtaagatttttggtttagatgtacgcgtttactggtttgaagaggaaaatgcaacaaaatatttgcttgtttgaactgatggtattacttcatgcttgatgctgtttggctgtaaaattgtattactcaacaaattcttggtacttatttgttgaccattatggatttcatcagtgtagagagaagcacagttcatccttaccgtgtta

SEQ ID NO: 54252 - DNA, 892 bp, Populus trichocarpa
  Intron number 1 from transcript POPTR_0013s05100.1 (locus POPTR_0013s05100) derived from phytozome v7.0 (chr-ID scaf fold_13; pos 3605890 to 3606781)
atccgatttgttatatcctctttaaggtccagatgcctgttttggtgatatgtatcacaaaaagaagacgtggtaaagattggattgaacagcagagtagaatatcttcatatatttgtcctgcagataattcaaaacatgtggagcatgattgtttgtttgttttttttggtttttttttatgccgcaaaccttcaaatccccccctccccattcattaccgagatgcccttttctttttcttgagacaaaacctgcatgcttcctcacatttcacagctggaacagactctattgtgggggctgtgggtgtaaacacagacttgataccaatgagtaggccacaaatctagaactggttgcaaactagtgccaatggctttgctgctcctctccttaatccacccagatatcatttaaggcttccaataggcaactcttatcgtgtatcacttgattgttgtatgcaagcagtcaacttgcaggcatgcatacaggtgtaccatggtaccataaagaaaaatttaagcgcaataccattgcaatttttcaaaccagcttgaacttgattttttctcttgtattttgaccaggagaaacaaaccttctccttttagagttttcatgtaagattgttgctgaaataaattataatttgacctcaaaatatttatttagggtgtaatgattgagcgaaatatggcatgtccctgctttctgtgacataagttgagagataatgattgagcactttgatagttgagtggaagtcctcatgatagcctattccttttcttttttcctcctgagccacaaatggtatgccttaagaaatgtttcttgtcccaaaaaaaaaaatttctgcaggtgcagctgattccgtacaatccag

SEQ ID NO: 54253 - DNA, 386 bp, Populus trichocarpa
  Intron number 1 from transcript POPTR_0019s09770.1 (locus POPTR_0019s09770) derived from phytozome v7.0 (chr-ID scaf fold_19; pos 11371039 to 11371424)
ggattcacaggttactaggtaactatagattctcttcttcaaccttttttttcctggaattatagcaattaaaatttatttatagcaattaaaatttcttgtgcatattatagtttatgtttttctcctgtaaatcatttgtgcttcatagttcatgaaaactaacttccatcaacagctaatggacttgcaccttaatggtacaataccgaagggggagatcttgagttcaaaacctcacctttgacaacatttgcttataataaaaaaagattcaccagtttcttatagatttttcattcgacgtaaagatacaatttgagttaaagatgcttctttcattttttgcagtccggagtccaaactagtaagagaagttgtgcaaa

SEQ ID NO: 54254 - DNA, 543 bp, Populus trichocarpa
  Intron number 1 from transcript POPTR_0006s07290.2 (locus POPTR_0006s07290) derived from phytozome v7.0 (chr-ID scaf fold_6; pos 5239627 to 5240169)
tgcagatcgcaagtcgctaccagcaagccaaacaagtaaatctctcaaatttatcctcattctctctcctcagagctttctatcatatctccttttttgttaatcgttttgtttaagaaattctgtgatcacttctgttggattttgaaactaaaaaagctagtaacttttcttctcatttggctaaaacaaacctcaagaatctacttttttgctgtcattttactagggtttctttgtctttgattttgaaataatgggctgttgatactagtgttgaacatttgtcttagttaatcaatttgaagctgttctgttgggtttagaagcttaaaaagctagaaaattgtcttcttttcttgctgtaattttaggtggtctgctcagttttagatttagatgtaacgggtatttgtagtttctgcttgaaatgcagaaattgatctattgattccatctagtttggggtaatgctttgtttttagagcggtagcatattgatatttggttgattttcgatgattatttcgtttatagagagag

SEQ ID NO: 54255 - DNA, 732 bp, Populus trichocarpa
  Intron number 4 from transcript POPTR_0006s07290.2 (locus POPTR_0006s07290) derived from phytozome v7.0 (chr-ID scaf fold_6; pos 5240669 to 5241400)
caagatccatcctgcagcttctgcgtttgagacaggtgatgcttcatttcaattccagtaaattccttgattccataatatggctcgtctataattgttgtcagtatttattttcattaaagtgaactgctaagtgttgcattttagtagatggtgccttaaacctgaggctgatatgttgagcggctgaggcatttgtttcactctgtgtttttggtttcttcaaaatatttactaaataaattaatgtaaacatcaactagaatatgaaatatgtgtctattcacatctttcttttagcttttgcaattatgctagctcagtttgtttaggaatatttgtttgtttcatacaatttgtagtttgatgtgttttttgataggtggtggtgtgttctaacttctccacaattaagatctcagtttaggaagttcaaggacgttgataatgaggtcttttataataatgtgaaaatgtgtgtactggtcataattataattctaaaggattccttcaggttgcagttgtttgccatgagcaacttttcaatgatttaatttgtgcatgttcttttttcctggagataaaatggcttaggtactagtgccatcatctcacgagaaactgtttcttttttgtgagaaattgacatggaatcatgtttgattaatcacattgcctggtgttctgtttgcagatattcaacggagtattcctgaaagtaaacaaagc

SEQ ID NO: 54256 - DNA, 544 bp, Populus trichocarpa
  Intron number 2 from transcript POPTR_0018s09030.1 (locus POPTR_0018s09030) derived from phytozome v7.0 (chr-ID scaf fold_18; pos 9905852 to 9906395 reverse strand)
atcaaagggcgttactgaaattttgtgcatcagcggtacgtcgtcatttccatttggggatctatttttttaattaatttgattttcttatttttgcgtcattttgattaaaaatctgtacagcaactagggtttcaccatttgttgcgaattaatgtaatctgggttaagtttttgtatctaagttgaccagttgttctaattgaaattggaaggaagagcaaagctgctcgaaatgctggttctgtttttttctaatttgggaatctgtccgaaacacctaatctgctactggtattcgtgttggaggaaaaactaaaatgtgtgcggccttacttcaactcgcattgttcttaagtctgcatctcttgttttggttggcgtaaataatatgtatgtaacttatcagctggatctgttatattctgttggaattcagactaattacaggtttagaaaactaaaagaataaaagaaagtgattggtttccgtgttttttgagttttggtttcttattcatttgtagtcaacgacccctttgtg

SEQ ID NO: 54257 - DNA, 646 bp, Populus trichocarpa
  Intron number 1 from transcript POPTR_0019s11760.1 (locus POPTR_0019s11760) derived from phytozome v7.0 (chr-ID scaf fold_19; pos 12988772 to 12989417)
cagacccacaagctgatcctcccacagatacctctgtaatctctctccctcactctctctctctctctctctcacacacacacacacacacacacacatgtacaactctatgtctttctaagactcataaaatgcaaatatattgctgctaattcaagccaaggtgagtaaacaggtacacaacccatgcatcgagcaaatctagctatgtttttgccctagcttatgaattcaacctgtaaaacatgacttttttttttttgttatagagaagaggttccaactgttcaaaacctctcgtgaaatggaggaataccagtacagtacagtctcactggcctatgtaatgcgactttatcacatatcagtgtgatattaaacgttttttcttaaccctttcggactacacaaacggaggaattctcaagtccccaatatcgatcctgatatctcataatgaaaacccccagccccagtaacgggaaagcgtgacactatactgaaatcacttaaactaaacattcatgatggtgataatcttccatttctagatacggactcatgattattagttcgacgaaagtattatatactgatcaatgtcttgtttgatttgttatgtgcttataggaagatccttctacag

SEQ ID NO: 54258 - DNA, 388 bp, Populus trichocarpa
  Intron number 2 from transcript POPTR_0048s00230.1 (locus POPTR_0048s00230) derived from phytozome v7.0 (chr-ID scaf fold_48; pos 48287 to 48674)
tgtccaactcattagtcctactgccttttcaatttagttgattgttacaacttttgagcctcgtgaaatcagaatggaaaagaaaaaacactccaaaatccggaaatttattatgattcagcatctgaacattcattcattattatgatcatgttgaatatatttctcatttaaagtttgaattcattctgttgcagtctgtggaactctgaggttacggcgaccacttaacatgtaagtgaaataaaggatccttacatggctgaagccgaactagcacacttcctaaaagagagaattgactgtcaagtactttggcttatacaaattcttatgatttgtttctcttgcagactaattgcagtgtgttggatcctgactgttctat

SEQ ID NO: 54259 - DNA, 549 bp, Populus trichocarpa
  Intron number 1 from transcript POPTR_0006s22480.1 (locus POPTR_0006s22480) derived from phytozome v7.0 (chr-ID scaf fold_6; pos 21493748 to 21494296 reverse strand)
gttaaattgcagcatagtagcttcttaaattcaaggtgctcaattcttaatttcatttttaacctttttgtttgtttgtttcatcgcaagtttcctttttagagctatcagtcttaactctgtaattttagagtagctagggtttttggaatatctgcttgtttggatgctaagaaaataggagaaaatcaatattcaaaactagaatttcagttccacttgtgattgaattccgttaattatattgtttataataacttcattttttttgctctgaacgactgtaaatgtgcagtaaactgcttcattggttcgattaaagtttcgcgcaactattatggttcgtgttgcgttgaaattttagttgtgtttgctgttgggcatgttaattagtttgttcatgtaaaagatacatgcttggattttatgatttcgtctttatacatgaaaaaagaacttgtagaagtgctaatgtctggtgtgctattgttttaacattaatgtggttagagcttattgttgaggtttccattgcagttcttcaaatcc

SEQ ID NO: 54260 - DNA, 494 bp, Populus trichocarpa
  Intron number 2 from transcript POPTR_0003s18620.1 (locus POPTR_0003s18620) derived from phytozome v7.0 (chr-ID scaf fold_3; pos 17625475 to 17625968)
tcatcttgcgtgaggttcgaggctgctctgcggaggtatatttctctctttatctatctcttgatttggtgtaattaatgaaacccaattgcccttttcttcatttctttgcaaatctagtgcttttctttttatccttctggactttgattggttttgtatcgtttgaaatggcaatggtgcttcattctggatgttagatctgaacccatttgaataggctagatgttatggctgattatgaatccaagtttgtttcttttttgttaatcttgtagatttgatagctgctgttactaaggtgtatcgaaaaacaagaaattttggcagtattgagctagaccattgttttgttttccttactaaaggaatcataaatgcccccacttgcattgatctccagtgcattctttgtgtactgttttctctattgttcgagaagaaagtttgttgattagagtggttttatgaccaggtatacttgtttggaggtc

SEQ ID NO: 54261 - DNA, 291 bp, Populus trichocarpa
  Intron number 2 from transcript POPTR_0006s24630.2 (locus POPTR_0006s24630) derived from phytozome v7.0 (chr-ID scaf fold_6; pos 23214263 to 23214553 reverse strand)
gatctcgatgtactgcccctctctctcagtttttgttatgttttgtttcctggtggtcattgaataatgatcaaggggctgattggtttctgagaaaagcaaagaaaataatttaattttaatttagcctcttgcattagcttaatttgggtgaagtttagggggaaaaacacgggttttgtgtttgtttttgggtgaaaatgcttgtatttagatttttatctgttttaataatcaaaagagaatagtgtggttgagtttttaatggagatgatattgcagttactgtta

SEQ ID NO: 54262 - DNA, 809 bp, Populus trichocarpa
  Intron number 3 from transcript POPTR_0003s05940.1 (locus POPTR_0003s05940) derived from phytozome v7.0 (chr-ID scaf fold_3; pos 7307246 to 7308054 reverse strand)
tagcgctctggcggttagagtattgaaacaatacagtaagtgttaaaacttttttgtttgataatctgaattcaatctttccttgacagtaaatagtgttaacccacacatgtagcaaatacatggatgatataaagatagttcctttctcattactggtaacctcactgttggtggcctagaaaaggagggattgagaatggtaagggtcatgggtgatgagagcattatagtggctgaaattggttttcttgtaaattctaaagattatttcactaccatctagagcatgcatgagagggggttatcctgtattagatctgcttacgaagcctaaaatacaaccctagttaggtggtctggatagtttgccattccttctcattttgaagatatattggttgaaataaatagctatgtcatgttcagtgataacaagaatttcttaaaaaaaaaacaaaaacaaaaactttgactgtagcactaacggaaaggagttatttaaatgattggttgtttcctagctgagatttagtcaggttgagaaagcatgaaattattgaatcccaatctgactattttgttattagctttatgtaaatgtacatgtactttagatacatttgtcaactaatttgacactgattgaaaaggctaaatatttttgttgatataaagcatgtgtttcaagtttttctaaattgtttaatggcagtttgcggctggccaatgcccattagtttctttggtggtttaatttgttatctttgaatggcaatgtcagttgatctggtgtttggtgattgcag

SEQ ID NO: 54263 - DNA, 650 bp, Populus trichocarpa
  Intron number 1 from transcript POPTR_0003s05940.1 (locus POPTR_0003s05940) derived from phytozome v7.0 (chr-ID scaf fold_3; pos 7308302 to 7308951 reverse strand)
agggtatttcgcgtgcatcacagtctcctagaattgtaagaacccaactaattattatgtgatcaatggtagatttgataccttttgattttgagatttttttttaaggctgttcagaatccctcattttaccggaacccagccgtggcttcaagatttagggttttagttacactttcgtaacttttgattttttatttgtgcgatttcccatttgtttgctgcttcctttatttatttttagggtttcttaaggtttttgctctgaagaaccaagctttacttgtagttctgttttcttgggcgtagcagtgattttggtttttgatcttaagcccttttgtaatgttggaatattccttggaaagttcttttcttttagggtttggcaaaatgagaaccatctaaactttgtgtgtactatttttgtagctgctcttcatgaacttagtaagcgaattaatttttgcacaagttggcagtttaactatatgataaacttgagattctttagtgatgtgtaatatcagttgggcaaacaaattgcaaagtcacaacatatacatgaagtgagtatggatggctcatgtcatgctttgcttggtttgtttgtaggtgcctgcatcttttaaccacgtcaagctcagatt

SEQ ID NO: 54264 - DNA, 788 bp, Populus trichocarpa
  Intron number 4 from transcript POPTR_0003s15800.2 (locus POPTR_0003s15800) derived from phytozome v7.0 (chr-ID scaf fold_3; pos 15495577 to 15496364 reverse strand)
tacataatagtgtaagtcttttttcctatttcatctttctgcattaaattttaggaaacttctcggccataaaagagagagtttaagcaatccagtctcaacacctcatctcaattaaatttcggtttcaaattagttagaattgaccatatggatccttcctctttaaagttctttaaaaggaagatgttgctatcccaatattattcaatttcaagaatctcccaatcaaattttcacccgagtactgcaacatccatggtgggtggtgggtcaaccatatcttagttttcattccctgaaaaagaaagaacaagttgtgttcaattacccttttgctaaaaccttttcttactgtctaaattctaaagtttggcaatgaagaaacatatccaccacctcagaggattctgttgaaacatggtgaaaggaggtcgctttttctccctttgtgatttgattatgttaaatggacaaattattatatagatatggtccatcctgtcccaaaaaagcaaatcgtgtgcatgcgaagcagtgttatataatgtataatccaatctgatggatcataatatttaatgctctattaatcaatttgtataatcattgtatatttaattatcaatactactataaagtttaatttgataaagtgcagtgcaactgggatgttattgacaacgtgcatgtatagtcatatttctctctgagaaactggatcaaatgctattttgtaaaagctggtgcattaattatacgagtggtgtccttcaggttcctcgtgg

SEQ ID NO: 54265 - DNA, 669 bp, Populus trichocarpa
  Intron number 1 from transcript POPTR_0013s05630.2 (locus POPTR_0013s05630) derived from phytozome v7.0 (chr-ID scaf fold_13; pos 4042450 to 4043118 reverse strand)
aaggcgtcgacgtttttgacagtatctggaacaaggtcactaacttactctcccttctccatcgctatctctcttaaatattttttgtttgattttcatattttttagctgccaagaagtaacgaatttagagtctaaaaaccaatttgagaagtattgtttcagtgtgctttctttttcttttttagatgtgtttggttgctgagaaaacgaaggaaagtgagttttggcggaatttcattttgttttctcttttgttaaacgtataatgaattgttattttgtgcggatggatttttaacggttagtttgttaatgctgtgatttcattgattgtgtgggttatttttgtttcagttattattattttttttaataataagttaaaataaaaaaactaattctgtatttcgttttttgatttttattctgtgtttgttgtcgaaaaaatggtaagcttctctgtatatttttgtttttgttattttgttttcttggtttacaaatggatttattgatgcgatgtagtgatgatatataacgtttactctctgcttaattgagttttcttgcaccttttgttttattttattttgtagtattttgtttgtttgtttttccctctctaatttggttgtttatgaatgggttattgctgtttgtaggttt

SEQ ID NO: 54266 - DNA, 1010 bp, Populus trichocarpa
  Intron number 1 from transcript POPTR_0006s09900.1 (locus POPTR_0006s09900) derived from phytozome v7.0 (chr-ID scaf fold_6; pos 7317943 to 7318952 reverse strand)
tccatttgcaaggttagatctccgtattatttgaactgtaaaattacttctctcttctttacttgcccctcattctgtctaagtaaattattcaattttttggtgaaaatatagcgtgaaggaattcaatttgtgtgtacgtttatgcaatttggacagaatattaataagcaattaatgtgacagacatgcaatattcgatccaaattgaaccagttggtattcaatttgaacacaagtcaatgagcaaatgaagtcaatgcccctttggcttgctcttcagttctgagaacaatttgagcactgtgtgctgcgctgtttctagctcaatatggagagtacagtttattattggtttggtgagaatgtttatggcactagtgttttgtgcatgaacgttttctctgtccatcagtgtagagctaacggcttctattcttagcccttaatcttattgcttttcctcctattttttttattactgctccaatctaataaatttcaaatacctaaccgatgaagtacatatagcattcagagcatatactatcagagcaatatcaaccattcattcttcatgtccaaaccactcttctattcaagtcaacttgtaatccatgcacctcatgtaagagctatgatgagtgaattacacagcactagctatattttattcctccttgatttgtggtagcgatggatgtagtgccattaactttaatgacttcgcatgtatggaaaaaaaatcgtttttaatcgttttagatagtctctccagtcgttttcagagttagatgaagtgcagttaattcaacgacataagtcgatccccattcatttaattgagatcatgattagtttccatagctttcactggtttgaacaattaattagtagcaagcagatttggctcagacgtgcatgtgaaacagtactgctgaattagagattaatttatgatcaattgctgccatgaatttaatctcgttaaattactgcaggaaggatat

SEQ ID NO: 54267 - DNA, 559 bp, Populus trichocarpa
  Intron number 1 from transcript POPTR_0003s12450.1 (locus POPTR_0003s12450) derived from phytozome v7.0 (chr-ID scaf fold_3; pos 13013697 to 13014255 reverse strand)
atcctcctgtctgtggaacactcttctcgtttcaggtatgaacataacgttaataatctcaaagcaaaaccctttccattggatgctaacagctcattgttttataagactcacctctcctgatgattcaatacatgaaatgcttgaaagttgagaataatataaattaagtaaatcgctttcttatgatattgaaaaatagctagtctatatctacatgtcttgaatgtcacacatggactaccatattgtaatgatttggcagttgctcgatgtagattggatgaacttttggatccataaatatgttaaccaaaagaagacaaaagcatagctttttccttcctgagaaagttcaaagaaccccacaaataaatttgcttttttgtccatacccaacttccatttgtacctaccacaatccagcgatatttacaacagtttctttctttctctgttagatggtaatctttataggatttttcgtttagtatttggtgatagttattgttgtaaattgttttttgggtctctgtggtgaaattcaaaatagtacttt

SEQ ID NO: 54268 - DNA, 571 bp, Populus trichocarpa
  Intron number 2 from transcript POPTR_0003s18940.1 (locus POPTR_0003s18940) derived from phytozome v7.0 (chr-ID scaf fold_3; pos 17830313 to 17830883)
aaggtatgttatgttgttctttcaacagtatggtgttgaaaatttgatgaatgtattgtgttgccagctaaattatccggcatcttgccttgttttccaggctcaagggaaaggagtgaaatgagtcgatcgtcagcttcgaatgagtactttcttcttattcattgtgctgacattcttttgtttgttaatagcatgatgatggcaatgctgttgctttcttgcttacccttgaatataatacataggaatgtacagattgattttcttttttctttctgctaattgccttgttgattagaggcatggagatttctgttggcgatgaatgttttataaacggaagctatatatagctttgaattaatgggttggattactttttgtaaaatgagtattgtctgaatggtgtgattttactgtcgttataaacggagagaagaaaaagtaagttagaaatgcatgaatatcttctcttgttcatcagggtttgaattgtctgtgtactgatttagtccttttttttttattatttaacttgtcaccagtttgttgaagaaactaaagagat

SEQ ID NO: 54269 - DNA, 315 bp, Populus trichocarpa
  Intron number 1 from transcript POPTR_0006s02050.1 (locus POPTR_0006s02050) derived from phytozome v7.0 (chr-ID scaf fold_6; pos 1306444 to 1306758 reverse strand)
tcgtctcatcggatcaaagcatacacaaaaccgtagaaacggtatgatatatatttgtatgtgttgatttaccttttaatgcatcctctttggcctttttcttctttttacgtggatgtcctatatatgtacaagttcttgatatataatctctacagcggattcttccatgtcagaacatgttttgagttcttccaatctttctgtctataaatttatcctgagattttctttgtttttctattgggattaatcatggtgaggtcctatatgaaatgcatgcactaactagtactgttacagaaagtcacaacg

SEQ ID NO: 54270 - DNA, 387 bp, Populus trichocarpa
  Intron number 2 from transcript POPTR_0006s10600.1 (locus POPTR_0006s10600) derived from phytozome v7.0 (chr-ID scaf fold_6; pos 7939689 to 7940075 reverse strand)
ccttgtttcaatcttcttcaaacagtgttgtagtggtacttttctctacacatcattcacagttttatatacaattttattatcatcatcatccttgtttcaatcttcttcaaacagtgttgtagtggtacttttctctacacatcattcgcagttttatattacaaaagtttggagcttttaaaaaatgaagactgttcaacacttgacgcttttaattgtcattgaaaattattaatgcaattgtaaaattcaaaataattgcaagaaaacttcctgataccccccccccaaaaaaaaaaaaaaaaaacactaaacttgagtttgtagtaaatttcatttgcttgttgagggacaaaaccttcgtttctttcctatttgtctggt

SEQ ID NO: 54271 - DNA, 1013 bp, Populus trichocarpa
  Intron number 1 from transcript POPTR_0006s01690.1 (locus POPTR_0006s01690) derived from phytozome v7.0 (chr-ID scaf fold_6; pos 1039069 to 1040081)
gcaggtttgattttctgttccttggcttatttttgtgtttttatgatctgggtttttgttagaatttgattttgttgtttgtgtgattttggatttttgggtttcttttatttcttgttcggtttggcttcatattttagttttattgttgatatagtagctgtcttgagacacatattagacaaagtgaaacacgcatgttattgtacattatggacttgattttagtatgatacattacagatggattgatggtgtagtttgaactttaaaaaggtgggagtttgacaatgttttttggatcgaaggagtgtgattatcatgggtagacattgccagctttcaggctaggaatttgcgtgaattggagaaaacattaaagtttctttgtataacagggagaatgaatgaagccatgtggctattatggcaattggggttggaactggaccgtgggagctgtgctctcctgtttcaagaatgcattttcaggaaaatgtataaggggagaagaatccatgcacaaatggctgttgttgggtttgttccaaacaactatctgaagactaaattgacaatattgtatgccaaatctggggatttgaagatcatgcgtgtgttgttcgatacattgatggataaaagcttgatttcttggaatacacaggtttctggatatgtgcaaaaggggcttgaagaattcagaattggttttcattataaattaagattctgtcctgatgcttgtcaataaataaatagataaataaataaaaagattctgttgggatacttaaaattgaaattttaccaaggagattacgcatatatccaacagtgtttggaatttaggacttgccaattaacaacttttggtgagatggtttaaagtagagtcccatggggaattaaacaatgtcatattatcaacagaattgttgttttgttattcattcttcttttctacctgtcatgcagaaacgtagcaattataaaatcaaacaaggataata

SEQ ID NO: 54272 - DNA, 525 bp, Populus trichocarpa
  Intron number 1 from transcript POPTR_0013s13890.1 (locus POPTR_0013s13890) derived from phytozome v7.0 (chr-ID scaf fold_13; pos 14219934 to 14220458 reverse strand)
ttttgcatccctcaattctgttcttcttggctgtaatcaagctctcatttttttttcttcccatttgagatggtagtgctgttgttgctgtttttgtttctgttgtcttagttcattttgtttggctgatatttgttcttgattatttggttcgaccagtcctccatgcttaattagtaggaaaaaaaatactgttttgtttcattttttggaaagctcataaaatcttgtggaagtcaatctattaaatttcctttttttttcttcaatttatgatgcattaatggtaatcaaaatatatgaatcacatggaactgacaaagctaatattgttttttgagtgtctttgttcatgattgaagaatagttaatacttttaatcattgaatcaagggtgatctagaatttccaatagggtgagtggtaggttgatatgtttggattaagattcttataacactttagctttgatcattataatggaaaactaatttattatttatgattatgtttttcaatctgcag

SEQ ID NO: 54273 - DNA, 834 bp, Populus trichocarpa
  Intron number 1 from transcript POPTR_0162s00200.2 (locus POPTR_0162s00200) derived from phytozome v7.0 (chr-ID scaf fold_162; pos 1598 to 2431 reverse strand)
tcagagagagacaatacagtaagctaatttaccttgtttaccctaaatttttgcaataagttatctattgctattattttctgctgatcatttttttttggtttcttcaattaatttagaaaattattcatctctaccatcgttttgtatatttattaacgttgtgtttttcgttttgtgattttcagcacgcttttgttttcaatcatgaatgaaaaacctattttaaatctctgaaataaattatcaccttctgatctcaaaagttatactttaggtttttttctggcgaagaggagggatttttgcggtgttaattgtttttgaagaggatggattctcaaattgcatctgataagtcagaaacaggatgtggctaatttcttttcttttcctcttggtttccctttgcttgtcaaattgattaagtgcaatgagttatctattgttttctgctgatcaagttttggtttccttaattaatttaaaaaactatttatctctaccatcgttttgtatatttaattaattctgctgttttattttccatgttaggtaatgttagtgtttttaattttgtgattttcagcattttttgttttcaatcatgaaaaccctaatttaaatctctgaaacaagttactatatatatatatatatatatatatatatatatatatatatatattttttttttggcaaagaggaggactatgttaattatttctgaagaggatggattcccaaattgcatctgataagtcagaaacggtaagagtagtcacggggctaatttcttcttcttttttgttttccctttgcagagggggactg

SEQ ID NO: 54274 - DNA, 618 bp, Populus trichocarpa
  Intron number 1 from transcript POPTR_0019s09710.1 (locus POPTR_0019s09710) derived from phytozome v7.0 (chr-ID scaf fold_19; pos 11319860 to 11320477 reverse strand)
acaagacaagctgcctactcatccaggactccaaagtatgaactccctacatttaagaaaactcaaatagaaaacaaatttgttgtgccccaataaatagttctcacttgaatttcaacagccagcaaggattcaggaaatgcccatgtaacttgggtaacaataaaatttggtatcatgaaaattataatatgtaggaaaagaaaaacattacaaaactacaggtggcatttttaagcaaaccaagtgaaacacatcagccatgactcaagcttgtaaagagtaatgagtttgataaatgcattcagaagagtttttaggctgacaaggcatcaaattgatgtttttttaaaaaaaaaaaacatcaaaataacccaagaacgcatcaagttgacgcttttttcagactggaaggcacttaacaaatgcaccttcaatatcaataacacccccacagtgggctaggtattttttttacgaaccaagatgattttcttaataatggttattttgctcacaatcatcactctaaacagctttagccgataattgatgaagtaaatcttgaattgataattttcagcaaataaggcatcccaacaacaacaacaacaaaaa

SEQ ID NO: 54275 - DNA, 892 bp, Populus trichocarpa
  Intron number 2 from transcript POPTR_0013s13200.2 (locus POPTR_0013s13200) derived from phytozome v7.0 (chr-ID scaf fold_13; pos 13753163 to 13754054 reverse strand)
gctctgccactccaagttgttcccctcattctcaggtgagattcgcttcctgtactgtaatttaaatcatgctgttgagaagtttctatcattcttgtatctcatggtttcatctctgcccttagatttggagatgcataacctccaacagggtggagattaatccaggactataattgaagtctatgctaaaagagaaaaatcttggttcaaaaaataaaagaaaaaaaatttatggtgcaagtatatatgtgtgcttttgtataaaatgtgtgatttatgtgagatgaaaatctggggtgctgaagtgaaggttttgaattgatggtatcaattaagcctcaactgtttaagcataaagttcagtaccgcattatgtagagtgcatgtgcctaagtgatggttttgaactgaatgcatcagctgatacccatgctctaatatggtatcatagtccagtgcagcgttctctttcattctttttgttaagcctagacatcagagggaggttgagtaaattccttaacaatctagccgaaagtttggtatggccttataacctgcatgcacctttctatttagcagttaagcttttgggtgagatgacattttctctccacttaatctaattattcccatcagaatgaaaaattaagatatgacgtctgagaaactcttcaatattcaaattccttttccacctttaaagaacagaatttgaagcatccgagtgaagtcttgcaggtggtagcttccatgcactctggttatcaattcaccgtgttatgcgttattgtgtcacatctttcttcatatacctgtgaaatagtatttctattgtcaagcatgtcattcatgtatttgaaacaacaaaaactgtagattccattac

SEQ ID NO: 54276 - DNA, 610 bp, Populus trichocarpa
  Intron number 1 from transcript POPTR_0019s12760.1 (locus POPTR_0019s12760) derived from phytozome v7.0 (chr-ID scaf fold_19; pos 13717539 to 13718148)
gaccttagggaagtctgagtaagctcttgaaatatatcccatgagaaaatattcgttcatttgttgaggatttgaaatttaatttaagaaaatgatgagctctatgaatctatatttatttgatttgattttgaaaatgttgttgcgaaacgcttacatggatattacttggttgtttgttttttgtgttttgaaatgtttttgaaaaaatttaaatttttttatttgaaattaattttttctaatgttttcttattaatatgttatatcaaaaataactttgattgagatgattctattatgataatatgatacgagaaaacatctaatgcatttgcatttcattgattaactgtagcttgagataagtagggagctgcctatttctgaactcaatgttatcatcgattcatgtgttacattagcactatccattgccaataacgattcccaattactcgtacgtgcctgctatgtatatatgtagctactaaggaggaatatgtttatatgtttcttcttgtccggtccattctgacaaacaaatatatgtgtgtgttcttcttgtttgtcaggccggagtctgaatttattgacaaaatcgttggag

SEQ ID NO: 54277 - DNA, 804 bp, Populus trichocarpa
  Intron number 1 from transcript POPTR_0006s22890.1 (locus POPTR_0006s22890) derived from phytozome v7.0 (chr-ID scaf fold_6; pos 21765980 to 21766783)
ggttatttagctcgagtttgcgtgctcctaatacggtaaaatctctctctctctctctatccttttggttgttgcaattaaagttagatactttgcttttacattagtttaataggaactgtttgtgtgttctaattatttgtctagaatatgattgtgggtttggtttctttggttctgttggctttggttttagttgctcgacggccgtagattaatatgttattgtggaggaactcgtcttttctttcttcttatttcttttaaaagagagctgctaatatgaataaaggagggttttttcattgtttccttatttatgttataattagaaaaataggagccaactagctcattaatggcgggaattggtttgagttggatttaattcttgcaaaaaatgtttgcaattggcgcatgaactaagatgtttttgtagtagatggagcaatgtagctgtaaatccagatggctctagaagatgcaattaagatttggggtttgttttttggggtggggtaggttgaaaagctttgaatttgaatcaagagaaggctgtatctgttgtttgttattatatattgtttttaattaattataaatttctatgcggggatattaagcttcttcatttttgttacattacttcataatcattatgtaatttattttgtgaatcacattagttcaatctctcattactttttctttttctttttcttttttctcccttttgtttttggctggatgcattgatccggatagatagttgaacgattaaactggctgttgtttttttgggcc

SEQ ID NO: 54278 - DNA, 374 bp, Populus trichocarpa
  Intron number 2 from transcript POPTR_0006s03230.1 (locus POPTR_0006s03230) derived from phytozome v7.0 (chr-ID scaf fold_6; pos 2048922 to 2049295 reverse strand)
cttccacaagaagtttggaaccagttgtattcgtggtgagttgtgtatgaaattgtggaagaacaaaaaacatgacattactctcttgttctattttgttttcagtctttgcatttttgaattccattatttacaccaggatcagtggttataatcttaatgtttgctaggatttttatgatcaatacccatattaaatagctactgccaacatgaatagagaacataggtaggagttttttttattgccttcccatcatcacaagcaataaaagattgctaaattgcatctttcaatgggccactgttgtttggaggaaaaactaaaatgggggaaatgctcttataatatgttggcgctgttgggtataggt

SEQ ID NO: 54279 - DNA, 468 bp, Populus trichocarpa
  Intron number 1 from transcript POPTR_0006s03230.1 (locus POPTR_0006s03230) derived from phytozome v7.0 (chr-ID scaf fold_6; pos 2049510 to 2049977 reverse strand)
aaagaaggcgatagcttttatttaatcactcaacggtaacattaatttctttatttttcttctctgtgtgggttcttagtgttatgaagtttgtgaattaaaaaatatcaaagttttgatttaaagagttaaattcaagtctttttctctcctgatgtttggattcttttagtgttaagaagtttttaatgttagaagtgcaaagtgggcttgttttattttgttgttttctactataaaaataggtctttagctatctgaaatttcttaaaaatgtatgtttcaagtctttttttagaagtaagagacttttattgtttaggtgacaagtgagaacttaggaatttacttagtaatgttgttcattgtgtgtgtggtagagaatggaaggtgttttttgaattgagtttccgctggtaattttttattaataaggttgctgatatacctttttgttggttataatag

SEQ ID NO: 54280 - DNA, 758 bp, Populus trichocarpa
  Intron number 1 from transcript POPTR_0006s20530.1 (locus POPTR_0006s20530) derived from phytozome v7.0 (chr-ID scaf fold_6; pos 19546718 to 19547475 reverse strand)
agtaaaccccagcttgtcgatcttctttctagactgtacgtctctctatctagcttaatattaatgatttgttggttttcttttctgggttcttttcattttttagattctattttgtttctctttggtttcctgattaaaagacatgtattgtgaagaataattagttgggttttagtttagattgatataattgttgcaattaagttgaggttgaaagtcgagttttctttctatagtattggtagtaattgtagtctgtgtttgatttttgaaagccttcagaaagggtaaaagatttatctttttattataaagatagaattttgagcttttttctgttttaggcaaccaaatagcggccccagtttcattgaacttgttcttgttagagaaagcgagtggatttttgttctactacagaaaattttaatttgtgtctttagtttttaataccctttatttgataaaagtttgagctttttacattgcacttcattctagctggtgcatttagtacctcttttttcgtttctttgcaaaaaataattctaagtctttagttttatatatccttgatgtttcaaatgctgtaaattcatgtagacgcatttacaaattctatagttgctgcgcctttctatgaagataacagctctggaaccctgatttgctgcttctttgtgccgtgtgtgtgtgtgtttgcatgcaccaactatgcaggtgcctttgtggggatatttcacttgtctctgcta

SEQ ID NO: 54281 - DNA, 564 bp, Populus trichocarpa
  Intron number 1 from transcript POPTR_0003s12830.1 (locus POPTR_0003s12830) derived from phytozome v7.0 (chr-ID scaf fold_3; pos 13284717 to 13285280 reverse strand)
aggttttttggcttgcagtatcatccggaggtaacttgggtttgaattcgatatttgggtttattttgatttttgaggttgttttagtgttgttgtaattgaatggatttttgtgagttctgaagtaccatttatgtttaaagtgttgcctgacatttagttaaatttgaaacatttagatgccattaattgataagttttattatgtgaagcagtttgcaaagaaatcttaattcggtaaatggttagggtgactttatgcaatgagcttgatgtgtgtaaagtttattgttattctagtataggaatttttgtatgttggtcaagcatggttttcagataaaactaggagggagattgttattctttgactggctacgtgattagccaagcgtaagctaataacactcagaaaattgattgttttctatccttttgccgtggttaatgttttggaacttgcgtagggtgatagtgggagactactttgttttatcatttgttggcatggtgtatatgctgaaactgttgaatattctgcaggtgactcattcacccgagggc

SEQ ID NO: 54282 - DNA, 244 bp, Populus trichocarpa
  Intron number 2 from transcript POPTR_0006s14690.1 (locus POPTR_0006s14690) derived from phytozome v7.0 (chr-ID scaf fold_6; pos 12057634 to 12057877 reverse strand)
ttatttcaaaattgaaggagcgtgggttttcttctccctttctttaatctccattgcgttttgatgtttattgaattgtgatggtactgttcaaggaccattgattgtggtttgtttctatgtcattgttttagtttgatttccaatgagcttcgaggattaattttattggatattttcttgaccagatccatatatgaatgtctttcttaataataataataaaaaaaaaattgctgtaggg

SEQ ID NO: 54283 - DNA, 760 bp, Populus trichocarpa
  Intron number 1 from transcript POPTR_0014s00790.1 (locus POPTR_0014s00790) derived from phytozome v7.0 (chr-ID scaf fold_14; pos 749790 to 750549 reverse strand)
aggcaactccaagaattgacgtccgcgtggccatgcaataatatgattaccaccaccaccaccaccgaacaaatagctccatcattaatcacttcataaactataaaataaactcaataaatcatgaaactgaaagttaaaacaggaagaaaacgaggctttatttgtagagtcttctgatcagcactccttgtagagtcttatatatatatgtaaatgataaagctgctatgaagcaaaacttaaatggtggggtttacggtgatttttggtaaagggtgcttttagggcaaaatgattggcggttttggtgagccttggttcattctcatgtaaaaagagtagttgactcgtgctcggtcggttatttaaagctatatattatctatcttgttttcctattgtttaatttcagttcacagccacaccacttcttatgctcgatatatccgcttattattagaatatgaatggaatcatgtgtatatatatatatataattggctggaaaagtatacagaaaaccgtcctctcaaaatctagctcgagttgaattttgtgaaaaataattttatcaaattttattgacttgataaatcaactatagattataacaaaaatcaagataagattaaatttgatttttttaatttaaaataatattattttaaattgaacttcccgctataaacccataacctaaaacttaaattaaatcattgaacgatccggacgaaatttcataactatggtacagagc

SEQ ID NO: 54284 - DNA, 409 bp, Populus trichocarpa
  Intron number 2 from transcript POPTR_0018s08110.1 (locus POPTR_0018s08110) derived from phytozome v7.0 (chr-ID scaf fold_18; pos 8916300 to 8916708)
agaatagttacttccgccagcagacacaaaatgtaaagatctcccctttttctttttaatttgttttgatttacttaaattatgagagaaactaggatgaaaaaaaaaaaaaaatgaaattcagaaccaatatggttctttgttgggctatgaattttctttccatgtttaattcaagttgatttgagtgctgttaggccaacatatgattagcaatttcttttcattccttaattctgtttgttggctaattaaattagataactttaagttttcgtggtaattagctgttactgaatcttggtatataaaaaaaatatttttgtgtcaaattttgtttgatggtttcttgagtttaatttgttgttttgcaggctacaacccttgccaccacagacacaagttgtga

SEQ ID NO: 54285 - DNA, 615 bp, Populus trichocarpa
  Intron number 1 from transcript POPTR_0019s08100.1 (locus POPTR_0019s08100) derived from phytozome v7.0 (chr-ID scaf fold_19; pos 9522674 to 9523288)
gcatctttctaagcacccccgatagcaatttgcaggtaaagttgaacgaacatccagatcatgttgtttttttttttttaattaatttctttaagatttgatgcttgtaaactctcttttccattattatagcccgtccgtgaactgcctgtctcaaatctctcattattgttattaagaatgcttggatctaaattagatgccataaattacttgggatttatgtgagtgagtcttttgtaagttaactaaagaaatttattgagaattgttcattttttgagcgatccgtttagaccaattgctttcaaatgaacgattatgctgtccaagatgcgtatttctgatgagctttcagtactgggattggtatgtttacaagattatcattgcgtatttccgtactagtgctcccctccctcaccctaatcactccatcgctcaattttattaattaccgtgtgttcaacgttgcaatataaattcctagcttgtttcgatttatgatttataagaagaatgatacaagttttatgtaattagcttctgatcttgctctctattgctgttcaaatgttaggtttttacctttctattcgaactagaaagcccata

SEQ ID NO: 54286 - DNA, 661 bp, Populus trichocarpa
  Intron number 1 from transcript POPTR_0014s13360.1 (locus POPTR_0014s13360) derived from phytozome v7.0 (chr-ID scaf fold_14; pos 9830530 to 9831190 reverse strand)
gcagggggcatcgctcactctagtttagctcacaggtcattatttaagcttcgtaccattcttttaatttgttcactacctttttttctaaatagtcgttaataatgaagaaaatcaaggaaagtaaaacacagaatgctgaagcttactactactattgctgcattttcttcttcttagctttgagttccttttagggttttcatttgttacttgtacagtgaatctaataggtttcatttctctgtattttctaggctgttaatcttaggattttgagttttatatgatgggtttgttaattgtatatagatttatgtttttcttttcggtccacttgaccgttagtcctacctttatctcattgtttgatatgatgcttatgctaaagcctttaaatgcggtgctttcttcctctccccccccccccccctttttttctcctgggcctttcatttaggatttattcccacaatctgtaaggttatgtgtttattttgaatgaattcggctaaatcttcaaggttatgtgtttattctgaatgaactcggctaaatattcattgtttgaatggtttaagttgtggagtgaaatagcattcatttgcagctcatgagttgcaatgtctctttgcagattggttgacgctacaaacctata

SEQ ID NO: 54287 - DNA, 621 bp, Populus trichocarpa
  Intron number 2 from transcript POPTR_0003s00810.1 (locus POPTR_0003s00810) derived from phytozome v7.0 (chr-ID scaf fold_3; pos 643270 to 643890)
tttctggattggctgtgaagtggtatagctctctctgcaattgctataaacatcatgacatttgtgtattttgtgttggctgaattaatccaaaaatatttagatagatatatttcactcctatcattatatttccacatgttaagactttggtccttgtgtattgtataatctctagtgtttagactagacatgatagtgcatactctttgctaattaatgtatgtgtactttagcatttgaaatatgtgacaatattgatttagcatttaagagttgctatttaaaatttccaacttggacaaaattatggggtcttgtgtcaatagtgttggaaagtcaccttgggaacctcttttcctgtttctgtgttttgattggagtcttgctttctcttcatttatgcaacatggacactgtaacttctgagtaactcaacttgtcatggttgttgtcatgtggatgcccgatatgcgatgtttatttaagtatgaacagcaagagggaaaagaagatgaaagagatgccaagtaacagtgttgctgcaagcttgatttttatgtttttcattaatgtgctgttgcagtcttgctccattggtgaagaaggtcagcgaggctc

SEQ ID NO: 54288 - DNA, 798 bp, Populus trichocarpa
  Intron number 1 from transcript POPTR_0003s14320.1 (locus POPTR_0003s14320) derived from phytozome v7.0 (chr-ID scaf fold_3; pos 14417648 to 14418445 reverse strand)
ggggagattgatccacgagttggcgagacttgcaggtttgtgggttttggattttcaactgtttttcttaatgggttgtttttgttttctgagatttctttgtttttaaagtgtttattttgtgtgaaagtaaattttatatattcgggtaattaagattgggacttttgtcttaatgagagattaagattttcacgtatgatttatatgtgtttttcttctttttttcactgattatgctaatgctaatgtatttggaggggaagtgttgctttttgggcgttcttttttttttttagtatggttgttaatagggcaattaagattgattattccttaaacaaatagattttggatttcttaccatgagataaattgtgatatcttttgttggagggaattatactgtaggctatttttaggaagagatgtgagcttaagttttgctgctggaggctaaactatccatttatgtaaatcttcctatttgtttggcgtgttatatatttgtatatactatgcagtgatatgatcgtgtttttttagcaaatccgtggttttattattacttctttgcttgatatgattttgtttatgtttatgtttatgtttgccaaattctctaggtattgttttttcaaagtctgattaaatgagcctgacatgtttaatactgagtttttggtgttgtctgcttaagatgtatagtacaagtaagtttgaatcagcatgcttcttcttcgtttaactcgattttagtctattaatttggagatgccaggtacttagctgaggcac

SEQ ID NO: 54289 - DNA, 579 bp, Populus trichocarpa
  Intron number 1 from transcript POPTR_1239s00210.3 (locus POPTR_1239s00210) derived from phytozome v7.0 (chr-ID scaf fold_1239; pos 4007 to 4585 reverse strand)
cttacgtgttcctttcttggcgcggggtgagggtttctttgttggtgcagctcggttgtgggtgtgttggtggctctgtgtgcggcttcaacatctttgtgcactgatggttcttctcatgaggaacagtgtctgcgtaagccgagctgatgagtttagatgggttttggcttgggttcttggttaggctttgatttttttaagattattgagtgttgcaggatttggggcctctaattttttaatattgttgggtattgcaggatctggcgtgggtgttgcaggggtttaggacctctgtttattttcaaattgttgagtgttgcaaggtctagcatggttgttgcagggccccaaaactccatccattagacctattgaattttttgtttggttcatgagaaatcttgaaaaaaaatagtttgttaattttgattttcttattctgggtctctttgaattaatataaagtttctacatgttgtttcttggttttttttttgcaattaaataatcttattaatgggtttgttttgatttttttttcaggttgaagaagtaattaatatcttttattgt

SEQ ID NO: 54290 - DNA, 639 bp, Populus trichocarpa
  Intron number 1 from transcript POPTR_0018s12730.1 (locus POPTR_0018s12730) derived from phytozome v7.0 (chr-ID scaf fold_18; pos 13244271 to 13244909 reverse strand)
gacaagcaggttcggctctttcttcagttatttcgttattttttattattattattgcaaaatgattggttggttgattttttatttgtttaattccgattgaatttttgtggtatttttgtaacttaatagttgattggtagatttcttgttcaatttggattgtggtgttttgggaaatttggaattggaaatgattgtacagggaaatgcgaaagagttgattttcatatttttttaatactgttttttatgacaaaaagttgtgggaattcatatagaaatgattttgagtgttgtatttgttatggctagttaatttttgttttggtgttgttaggagtttgttgtggattaaggtggatatacccttatcagtttccgatggaagtagcttgttttgtgtgtattttgtttggtcctttattgagtattaatcatgaatgaaagcagggtgttcttggaaattatttggttgtagtaatactagtaatgcttaaatcgccagttatatacattaactgtgtgatttgctcaactgtttcctgttttcaatgtttgtcacatatcctttttgggtattttgctgactctttttgttatcttatcattctagcttatagagaaagtgcttgaaga

SEQ ID NO: 54291 - DNA, 978 bp, Populus trichocarpa
  Intron number 1 from transcript POPTR_0018s11690.1 (locus POPTR_0018s11690) derived from phytozome v7.0 (chr-ID scaf fold_18; pos 12339124 to 12340101)
atcccaattcaagcagcagtttcctgaaggcagaagtaaatccaagaaagatatcttgtgcatagttagaaaagtcataagtctcttttgacatgcatatggattagcattgatttggatcacttgaataaccgctcctctcagcatacatgaaggtcaatgcttagcggttacgcccacaaacctgccatccgagatgatgccccaataatctacattataaaaaacagtcatcggtattagaaagaaaaacaaaattaacagaagacttctctgtcattacatttaggcatataacataaaagaaaggcacaattaataatccaagacaatagctttcctacaataagcttgagctgtaacagattgatagtaatgtaatagaccacacacgtcgtacatatagttcattctttacttttgacaccagggtttaagaccacaaaaaaaattcaatattgttgtcaaccgaattcatgaagttatatggacaaaatcataaataattgttgatcacgatacatatgtttacacaactccatgtaatataactttccaacaactactttcatttctccaccccgacccaacaactatgctgcaaaaatcttcaatctgattactggctttgactgggcaaattgttttccataaaaaccaagctagggactgcagatggaataaccaatttaagcttggattgttaaatatacatggaaataatcaagatcaatggtaagcaatatagagatgtcaacaaattgtgcacttgcttattcaaagatgaagaaaataacataacctaactaacaaatttgattcattgattagcaattaatgatgtccatcatcaaattcaaatgaattagcattcaacacgaaaaaataaagatggaatttgaaaaggcaggcctaaccttgatgacaaaaatgacagatgacttggtattgcagatacaacgacgacaatcatcgcag

SEQ ID NO: 54292 - DNA, 660 bp, Populus trichocarpa
  Intron number 1 from transcript POPTR_0006s07220.1 (locus POPTR_0006s07220) derived from phytozome v7.0 (chr-ID scaf fold_6; pos 5174731 to 5175390 reverse strand)
atctgcaggtatacacacacgcacataaatttccatgttgttgctaaagtgaatatgaataacccaataaaaaacttgtttgcagtacagaaagaaaagaaattaacccttctcaaggttaaaccaaacaaagttttgatcattgattttaacacaacttttctgttgtccctttgatttcttttttgtttttatggaaataagcctcagttgttgcgaataggattcatttcttttggagttgctgaaatatcaatctgataccattttgagtttgaacctagtaattaaaaatgttgtttttagggggaaaaaaggaaagcaatcttataacaatttactttttctattttttgctaatcccaaaaaaaaaaaaagcttattccttttgatcccccccttctttgattcagtcttaagcttcctacaaaatactggtctgcatgtatatgtcctttcggaaatcccagttctatttaatttctttgggttaatttctctcatattttactctcttagatctcaaacaattagggtttgttttgagtatagttaaccattcaaaaccctctgcagagatatgttagcacatgtttattcatagttaacaatggaagcaaactaacttatcgaagaatttctacctatataatttggcag

SEQ ID NO: 54293 - DNA, 704 bp, Populus trichocarpa
  Intron number 2 from transcript POPTR_0003s07350.1 (locus POPTR_0003s07350) derived from phytozome v7.0 (chr-ID scaf fold_3; pos 8920260 to 8920963 reverse strand)
agaaagaaaataaaggctgatcatccaggttatttatctcttatcactatctttttttgtaaattttgtagagcgataatcatgggcagattctgcatttttttcttaaatgtttcagtttagggtttaaaaagactaattattgagttggctatgcttttatttctttgaagaatttttggccttttgttttaagggttatctcacttgtatcttctaaacttgcttattttcttcagtgctagaacctttcgttgatttattttattgattaacccttggattatcttatatttatattataaagttctagttctacctttgagttttgaagcgaggctatcagctttttctttctttcttttttattttgatgttgataaattttgaatgaaaatgttatacgctaggagtaaattttcaaagtgcatgattttttctgtggtgttcgtagaaacttttctgggagagtttactaagagaaaatattgctattcatttcgaattatatataaattccacttgtaaaaccacccccggtaatcattgttgttccaagagcatggaggctaacaatggctgagccagggcctttttctgtaatggactagtaatgcctccctctaatcaatattttgtttgtgtgttttggaattcattcaatttcagaagttagcccaaaattttgggaggtgctttactgg

SEQ ID NO: 54294 - DNA, 809 bp, Populus trichocarpa
  Intron number 1 from transcript POPTR_0018s02330.1 (locus POPTR_0018s02330) derived from phytozome v7.0 (chr-ID scaf fold_18; pos 2084385 to 2085193)
ccagtacagtttgtctttcttttttatcgtttcattgacttgttcatgtgtttttggacatgggttttggttttcatgtttttttttgttaaggttttgatgttttagttgtttggcagatttatgtagttagttgtgtaaattatgaatatttacaagccattggcttgataatctttgtttttggttttgattctctctgttcatttagctgttttatgtagttagtttttgtaaatatgaaatcttgttgagttaaattaagtctcttgtcttgcttttggcttcttgcggaaagtagaaatctatgttctttactcgctttgtctcagtttgatacttttgggagataggcacctagatatgtatctactttgacaagattataaaggttattgtttactcatttgaatctttactgtctcttatgtcattctatgtttttagctactggtggtttttaatgactggaactgttggatcttctaaattgattgcacatgtactgttgggttattagctcttcggagtagatttatataaatttgttctgtgtttaagttaaatcttatgatttattggcatgacatacttctgaatcttttctaaataaatctaaatttattattgattttctgagttttggttgattctgaatctttttactagattaatgattgattttctatggtataatttgtccctttttctggcatacttgtggaatttttcacatgctggacttgctcgataaatgggttttggattgtgcagttactacgacgagtcaggcaatcacggcattgagg

SEQ ID NO: 54295 - DNA, 821 bp, Populus trichocarpa
  Intron number 1 from transcript POPTR_0014s08490.1 (locus POPTR_0014s08490) derived from phytozome v7.0 (chr-ID scaf fold_14; pos 6306281 to 6307101 reverse strand)
gaagctgtagttggtatatgttctctctttaatctttatctcccaactcaaaaaataattcttagctcattatctttctcttaacgcttcgtttattcttctacaaaattttcgattattttgcgattgccatctattagggtttagcttgcgttaaatttttattcatttcttgattttatcttgtttttccttttatacatttctgttacggcgatgcttattcgaggttcttaacatggatattggtttttttttttttttttttaagtaccggagtttatttatgaagacaaatcttttcttggttcctgagggaaaaaaatcagtgaaaaagaagaaatttaggttgaatggtaaaagtttttttttttttttttaatatcttgggtcaacaaaagaaaaaaacattttgttttactgtttcttaatgctcgtttgaggctttctcatttctaagaaactaaagttagagacaactttcgagattttatttttctgagtttcttagggctaccaaatttagggctagatgattgaggatgcaccataggtgcaactgtggtaacacacctgctccaatagcaggagctgctaatgaacatttgcatccgcttttgttgttagtatctttgatatttatcagctgacaatgcgacagttagaggctattaagatacacatcagttgtgttagttgcaatttgatgcttctttgtcacactttatttgaatctttttgacatttggatcagtggttggatgctttatgttatggagattctaacaactgctttggtttgtcctgatttttcaggtttt

SEQ ID NO: 54296 - DNA, 138 bp, Populus trichocarpa
  Intron number 2 from transcript POPTR_0018s00290.1 (locus POPTR_0018s00290) derived from phytozome v7.0 (chr-ID scaf fold_18; pos 204583 to 204720 reverse strand)
tgcagcttcaaagttggtcttctcctatttcaagagtatgtataaaattctgctctgaattatgtaagggattaacttttttgagttagttacataaacttttctcttcttgctgccaatttgtttgtagagaccacg

SEQ ID NO: 54297 - DNA, 848 bp, Populus trichocarpa
  Intron number 1 from transcript POPTR_0018s00290.1 (locus POPTR_0018s00290) derived from phytozome v7.0 (chr-ID scaf fold_18; pos 205710 to 206557 reverse strand)
tgaaaaaagcaaccacacctctgcccctgtctctggtaatcttctgggactttgatttgtttcttttggctgttatggtagaattttttatgtggggtttgtgtgaatatggtgtcggttgcttcttgttggcaaagaaagagatttgtgtggtcgtgattggcgattaagttgatttctttttagtatattgcatgttggttttggcaattatgatgtttcattcgggcattcttctttctttcttagtgggatctgtgtgaaattaaagagtgttggttcatacttgtttggaaagtaagtaaacagttaatcattagtgtatgattttatctctgtttctttattaaaggattttgttttttcttcttttttcctgcaagtgggaattccttctttttgtatattttataacttcttgttttgtttgtctctacagcctttgtcgtttgtaaaatgctttcaatctttttaattctgttgtttctcaagaacattcattgcgttgaatgtaagactatgcagtttttatttttattttccattaatgttttaatttttgagtctccgctcaatgttgataaacctgtactgtgaactgcttgctgcttcagtgtatagatcgaagaatttattccatttgatctgcttttttcattgtacaataacatagttgaactatcttcaatttctgttaacaatgcagctgcatttcaatcacgttttctacaatagatttgattactggttgtatttaaagatttagtgctttgggtactaagttcatctatgtttatgaaatgtacttcatctttatttaagtgaaggattggaaacgatgtgcaggg

SEQ ID NO: 54298 - DNA, 656 bp, Populus trichocarpa
  Intron number 1 from transcript POPTR_0013s07700.2 (locus POPTR_0013s07700) derived from phytozome v7.0 (chr-ID scaf fold_13; pos 6540550 to 6541205)
ctgctgtccaaaaccaaggtttgtttgggttttgtttttttgccttaactcttattctcttgtaattttttcttattatgaatcataccttgcttggtattcgtgatcgtcatatgcctcctaattagttccccatagaaactttagatggatatttcctggctcctctaccttattactctacaatcgagccaatcgtgtctttattttttatatgattatagagctagattatttggtccgcttccagcaacttcaattaattcaaaccctgatggaatcatgtattcctcctaataattttacaaaaatcaacttgctcagtttcaactagaatcgaatatttattagccaaaagggagacattaatattggagaaaaaaacaatattatcagttaccctgcaaagaaatggagattcttctccttacagtactggtcataccgaatataacaccactcgcctgctttatgtatgtttcccaaggctaagtgtgctatagttatgtgattacttgttttcaacgttcatagtaattcgtaccagagtgtatgtagaatttgttttctagttttcacatattattattattattctcatgtacggaatttctctctcgcgttgcttattggacaattggatttgcaggtaaatt

SEQ ID NO: 54299 - DNA, 643 bp, Populus trichocarpa
  Intron number 1 from transcript POPTR_0013s02710.1 (locus POPTR_0013s02710) derived from phytozome v7.0 (chr-ID scaf fold_13; pos 1635466 to 1636108 reverse strand)
acagcccttgtcaccggtggaaccaaagggctcgggtaattagagctccttcatctcctttctaccttcaccttgcctgatgtttattttagttccactgtcttaatttcatacagaagcctaaacctgttaattttattggaagatgatacactgttcataaatctttacattgtttctctacattaaggtaaccacatttcttacgtttgcaaataagttcggaaatagactaaaactttaactctctctatctttactcttttttttcttcatttttttcctttttgagatctagatttaatgatattctggtcccttattttataaaatgcttgtcgatccgttagtatctccctccaatttccttataaatgtttgttagagttaaaattggtagcttaagaattatatttgcctcttgctgattggttaagattttggacaagttgattgtttaccgttggctacgaagagaccaacactatccgaaattcaaataatagtttagagctcgaaaaacctttgttttttttctttcgatgcacactgcatcaagaattaaagtcgttaatgccgaagactgtttgctgatgcattttgatcagttgtgctattgtggaagagttagcagcgctagggg

SEQ ID NO: 54300 - DNA, 381 bp, Populus trichocarpa
  Intron number 1 from transcript POPTR_0018s13930.1 (locus POPTR_0018s13930) derived from phytozome v7.0 (chr-ID scaf fold_18; pos 14213098 to 14213478)
agttttcttctaatagagaggtatgacaacactcattacaaagcacatactaatttggctgtcaaaaagaaatgtaatagatctgagtaaagatttatttagtagacatgagagagagagagagcaactcagataatgcaaattgagtgtgaagttgtttgcgatatgttcttagcatacacttttttctctttgaacttatatcacccatcaaaaaaactacagagcgttgtgtttccatcaaacataaaaaaggaaagaacaggcaccaaaataatcctcttccaagaaaaaaacaaagaaagaaaaactcctatccccacagtttaagtttcattaaccccattcagaaattttcaatcaatttaaaggagagaaagg

SEQ ID NO: 54301 - DNA, 771 bp, Populus trichocarpa
  Intron number 1 from transcript POPTR_0151s00200.1 (locus POPTR_0151s00200) derived from phytozome v7.0 (chr-ID scaf fold_151; pos 1224 to 1994)
taacaatatcaagaaattaatagccagtaaatattaatatgaaataatattttacaagagttcttggctatgtggcctttcttccatgttgaccaaccttgagtccccagtcctctctctggtcatgacaaaccattaattgtctttcacagaattcaatttcgatctcttgaaggttccaagatggaactttgaattttcctttcttggcacgagaatgacttttttatcataaaaaaatcacgtccactgcatctcaaatgattaagggtgttttgggagtttagttgagattgtattttaaagtttttttggtttgtaaatatattaaaataaatttatttatttttaaaatttattttttatattaacatattaaaatgatttaaaaatatataaaaaattaatttaaagatacgtgagaaaataatatagaatgaaaaaatggcattagaataataaagaatgtgtccaaaagaaagctcggttgacttatagttcaaaacaaaagtctttgaagtttctttttcaaatgcttacgtagcatattgagaccaagtcttgttttctctgtttcagactctattaaactagctgtatattcttgcacctccagcatctcaatcttgcctgcaaaattctttggcagcggccatggatgtccgaaacaatccatggatcatgttttttgttttttttttttgtttttctctcaactcccatgtctccctgggagctgatacaatctctgcaaacagttctctctctgga

SEQ ID NO: 54302 - DNA, 775 bp, Populus trichocarpa
  Intron number 1 from transcript POPTR_0014s15770.1 (locus POPTR_0014s15770) derived from phytozome v7.0 (chr-ID scaf fold_14; pos 11834408 to 11835182)
tgctgtgtcaaatcaatccgctgaaaacattgaaggtaggtattagcatcatatttccgtgcactctttattctaagcagtgaagatctgcttcttcttcttcttctttttcctttttgggtttttctaaagtgatgtgatcatggtttggtagtttgcttctgttgttgtcatcagcaaatacaatgctttaaatgcttgattacagaacatgttacaaattacttttttttttttgtctggaaaactgtaattttatattcgtgtttttcttttgtttgtgatcatgttagatgtttcaggctaagttgttattgagtttcttatcaaatttcttgatcactggtgggtttttggtttttaagagttttgggctttgatgttatttgtattttgatgaaatgaaacttttgcagattccactttgtttactgtgatccctattatgatcaatatgttgatgaagctggaaagtttgttacttgcttgaatgattttagtttcttaacaaatttttaatttaggcttctttttgaggcattgttgtttgttattttgtgaatagtagtataattcatgttatagttcttttcgtttggaaagtacaaacttgttacaaatggagtgcgttgaacttttgatgtttggtttcctgtgggtttgtggctactggtgccgtagtgaatgatgtaatccttatggaggccgtgagtggttctaacttgattttctaaccttttatttgttgcagaagcaatttggcgattgaaaatac

SEQ ID NO: 54303 - DNA, 766 bp, Populus trichocarpa
  Intron number 1 from transcript POPTR_0021s01080.1 (locus POPTR_0021s01080) derived from phytozome v7.0 (chr-ID scaf fold_21; pos 657623 to 658388 reverse strand)
ctggaaggtagcattgcagaacaagtccttggcattgttcggatgccctttgtttttaactctctctggactcagtcacgtaaactttgtttctatctaaatttgacaacaaaacaggccgccggaatagagcaagaggtttaaaattagaaggattattgaattcatttttgcaaaattataaaaagggatttatcatttacttggaaaaaagagagtccaattttaagagaattttacacttctatcaaaagaaggaattctatgcttatcgatcaaaaaaaaatcaaaacaatgttttgtctattttttttaaaaaaaataacaagttaaaagtaagattttaatgttcaagttaatctgttttttccttaaattcaggttctgagtcggctgattttcataactataatcagcattggataataacaaaaacgacgccggtagaagtacaacttacgtgatgagtgcccacgtaacgacgaaaatggaaactgaaacgagagcctatctccttataatttaccatggaaaccagccatagtaatagcagcagctacaagaggaaacactcttcttcttcttcttcacttcaattccgcttctcattccccccctctctctaaacactgccgccatcagacagtaattctacaatggcgcatcaacatcatctattcataaccctctgatctttatcatcatcatatcatttcgccctctatgtttagctggaaacgtccttctgagctccttcgtttaactc

SEQ ID NO: 54304 - DNA, 535 bp, Populus trichocarpa
  Intron number 1 from transcript POPTR_0006s28170.1 (locus POPTR_0006s28170) derived from phytozome v7.0 (chr-ID scaf fold_6; pos 25959484 to 25960018 reverse strand)
ggcgccaaactcaaaacccaccattatattaacaggtaacgaaaacccttttcattaatccttaaattaatgttgttttgtaattaattactacataatcaaagaaaagctggaatctttgttaactttgtctggtttaaaacagcaattatgctaaattgattcatttttaattaattctgggcttgaattcaattggttttacggtatttccatagaaagtttgtacctttcttctatgaaacaaagaaagattgagccttgctgagtgtaatgcagtgtaatttgttgtaatgatgttattagtgtaaatataaaaaaatggttcgtttgattgttgaaatttagctacaaaagtatgcaattttcattgataaaggggtgttgcatttttgctctttgcttgtttatattggttttttaaggtgattttagatgctaccaaagatgtgtgagtttgtttgatgatgatgcgaacaaaatcttatggagttgtaatgtgcctttttggtttggatttagtagtaggggagta

SEQ ID NO: 54305 - DNA, 858 bp, Populus trichocarpa
  Intron number 2 from transcript POPTR_0018s13000.1 (locus POPTR_0018s13000) derived from phytozome v7.0 (chr-ID scaf fold_18; pos 13478469 to 13479326 reverse strand)
ccaatctcactgttaatgtaaggcaaaactttatatctttgtggaaaaacattcaaactttcaattagataggttgaattgacgaatgctggccttgaaatgaatgaagtgtgttgtttgacttgttcccaattttgagtctagttcgaaatattttgatgacatactttctgcaactttcttttgttggaacaattacttttcgtttcgggtaagctgatggttttgtaaggagtaatgcttggtatgatgaatgatttttaatgaatactaacaatagaggtagtgtttttttccccttttctattgcaactgttggatcatttatgttttagtgtattcatgttgaatttgtttaatttattttgctatatgagtcattacttattttgaaggtgcagaaaaacacttggtattcttgatgcaaattgattgtaaacagtaaaccgcatttccgtttcttttttttcccctttttttgtgggttcttcatgtcatgtgttttttgtgctacattttgctagtttaatttatgttttggagagtaatgaaatcttctaacagcttatcagtgatagtaatatatgtttgttatcttgtgcatttgttcctttctaactggtatcggtttagattttagaatatgaagttgtaagtttttattctctgtttgttttatattttcatgagcatttactgaaagaatgttatgattgatgtattcatgaattatttgtacaacagtgttattataacataagcttttcttcgggctttttaacttctggtatttctgtgaataaaatagtctcaccattgggaattatttctggcagcaagcagcacccagatcaactg

SEQ ID NO: 54306 - DNA, 434 bp, Populus trichocarpa
  Intron number 1 from transcript POPTR_0018s02670.2 (locus POPTR_0018s02670) derived from phytozome v7.0 (chr-ID scaf fold_18; pos 2403216 to 2403649 reverse strand)
cagtgagtagttaacccagcatttgatctatgcgagtattccaagtttttcagtgttgctaccaacgaccttgatgcccattaattaattagtccggaatatgaatgtgttaatggatttaagtggggatgtcttgaaagattttgttatgacagtgctcatatgcagaaactttcccatctgggactcctccattaacttttttttttcatggcatggtttccacaaacagttgatcactgctcaaaacttgttaagcatgaacatatcacttaatttataatttgtctttcttgtccgtttctattctgaaatattgttgtcgaggtcttcattcacatgttagcaaatttcagaacatgtgttcttgcatttgtctgatacataaacgacatgctgtttgtgacatggttattgttatttgtgttcctagc

SEQ ID NO: 54307 - DNA, 940 bp, Populus trichocarpa
  Intron number 2 from transcript POPTR_0006s03120.1 (locus POPTR_0006s03120) derived from phytozome v7.0 (chr-ID scaf fold_6; pos 1982770 to 1983709)
tcccttttgacagcacttcctagcaagcagccaatgtaagtgcttttctgttcttgtgaattgttgttcagctagttgtttcaataaattcattcttcccattaatcataccatctgtgttagtaataaacttcctaatggttctttaatatggttatggaatcctatttcatgtttgtggttatcctttttggcgaatgttatggcggggacagttttgcgaagttaatatcaatttctgggagctggaacagtgttgaatgaatggagtacttgtcttcgtgtttactgccttgtaacggcaattcttcgattttttttccacttctgttttatagagacttgagttttgattatgtggtttgagtgctcctctatagttgccaagaaatccctttccatactattgtatcgaatagtaatctatcatgaggaatagaaagtgtcaacatgttgatctttcaataggtattgccaaaatcaaatgaatgacagatttataccgagacaagcaattctgtttctttttctttttgtgttttagaagttcatttgctatgtggttgtggtgttcctccagagttacactaaaaacccttttcatgggaggatcaaattctgaagaaaagatgcttagtaatgcatggtattctgcacataaacaggggaattctttcatatgttgagctttcaacagatttttaccaaaatcaaatgaacaagaattcattggtagatagaagggataggtagatacgtatgatatgccaaactatgtgttagctgtagtttcccatcctgaccttgttgaaaaccatactttagcgaaaccatacttaatctattgtgatatgctaaaccataccttagccatagttttcaccctgacctttgttgacaacctttgatcgatactgtcatgaacagaacagggaaagag

SEQ ID NO: 54308 - DNA, 244 bp, Populus trichocarpa
  Intron number 4 from transcript POPTR_0006s00480.1 (locus POPTR_0006s00480) derived from phytozome v7.0 (chr-ID scaf fold_6; pos 233148 to 233391 reverse strand)
agacaaataaaaaggacagtttatttgcagatcgggtatcctgttcatcttacctccagagtcagttgtttcaattttgttttcttttgatgccctttttcttgttttgtcatcttgcatttcttcatgtgtttcctataatagtataagactttcattatgaaaatgccttcaatgaagtttgcctattaatgtcctaagtctgaaattttgtaggtatttgacttatttgacacaaagcaca

SEQ ID NO: 54309 - DNA, 587 bp, Populus trichocarpa
  Intron number 1 from transcript POPTR_0013s09260.1 (locus POPTR_0013s09260) derived from phytozome v7.0 (chr-ID scaf fold_13; pos 8909506 to 8910092 reverse strand)
ctattgtaagctgtaaacccttcatttttatttcctgggttttgttctttcttgattcgttttagcttgatgctacgagtgttgttatcttaatagtttcatgctacgaaaattcatgattgtttgttttacatgtgaaaatggggtttcctaaaattttataattattttgtcttcccctctaaccaattagcgtaactgcaccagttgataagtacttcttgcaagtcaatttgatttgattttattccttttttttgttatatttttgtgctaaaaacaggccagagccaatttagaaccattaccatgccatctgagttctaatttcactagctattaaaaaaatgggggagtttccatagattcctagacctgagtcagtttggtgatgggtttaatttttccttcatgggtttattgaagtcacatgtaatgcaaaaggtgctaatccatttccatgggtgcataatgcaagttcttatatatagtataaacacacacacacacacacacactctccttatatttgattgcatgcatttatattaaattcaattatcatcttctgcaggttaatccagcaa

SEQ ID NO: 54310 - DNA, 336 bp, Populus trichocarpa
  Intron number 1 from transcript POPTR_0019s07590.2 (locus POPTR_0019s07590) derived from phytozome v7.0 (chr-ID scaf fold_19; pos 8664049 to 8664384)
aaattgcaggtgggtttcatttgttaattgtgtatgtgtgtgattctggggctttttagatgttgaatgaagtgggtcttgctttaatgttttatttgttttaaatttgatcttaaacttgttagagttgattgtgagatggtttatggtctaatgggataatgaaatcatgttcttttagaacttaaaattcctttattttttttccccttcattctctctccctctctctctctctttttagccacagaagaagttttggaaattgattttgtgcaatgatagaattgtgctttgacagttaagctatcatccgagcgttattgtctatacgat

SEQ ID NO: 54311 - DNA, 551 bp, Populus trichocarpa
  Intron number 1 from transcript POPTR_0013s03310.1 (locus POPTR_0013s03310) derived from phytozome v7.0 (chr-ID scaf fold_13; pos 2029170 to 2029720)
cgatttgctttttctaaaggtaattaattatctagttatgctcccacctaagcaaatgatgctagaggttctgtacacctggataaagatttcttgcaactgtactacgtgaaaaccttatcaaacaagttttataaatcaaatgtacatgttcaaacggatatagtcatgatttttattatcaagagattctataaatcatattcgataaccgggccagcctgctatgccggttgaggtcggtaagaccttcaaattaagctcgatggatgctgtttatcaagttttgttatttttctgtgtttaattttgggtttttagctttattttcctatatgctttagattcagtcttcattttctgcttggggccggttacaggcatatttaagccattccaatctttttttactagcggatatatggagaggataataactgagaaatgacaggcgtgtagggttcttgtttctgcccttttcctttttctttttgttttcttgttctttctaattaggttcggccgcgccaccatagctcaaggcagttaac

SEQ ID NO: 54312 - DNA, 845 bp, Populus trichocarpa
  Intron number 2 from transcript POPTR_0013s11820.1 (locus POPTR_0013s11820) derived from phytozome v7.0 (chr-ID scaf fold_13; pos 12461093 to 12461937 reverse strand)
aattgtccccttatcaatccattttgccttttgaggtaagttggactaacccttttgtgattgtttttattgatttaatttgtcattttgttctcaacaacattagtgaagattttgctatatatggatataaatcttcagttgactgaggctatgttgatttgggtgtgtgatcaatgttgtaaagtgatagaaacctcttcaatgagagaagtaacagatacatagttgttgctaatattgattcctcaatcattcttaatattgctcaactggattgaaagttacttcactcatccaagaatatttttaataataaaaaaatccttctcattttattataacaacaattatgagttatatgtaaaccccagagcatatattcttatccacatatccaatcagatattttattcatatatgatttataatttcagcttgtttctaccaaatccgttgtgtgcattgtgtttgattggttcttctgacttttaagtttctgtgtgatctggtaaaagattggttctaatctctggtagcataatcaattaagtttagtccttgtcggttccaattctctgtttcttctgattaggtggttgtatgtgcaataactttgattagttcttgtgaaaatgttaaagcatttgaaatggtaaagctttttgcaaaacacacaagttaaattagttatgagttacttccatatgatggttaggaaagcaaattattttataacacgcttagatgtacatttatacaaactcatggtttaatttccattttatctgattttctcccctactacagattttgtcagcgcaactaggaaggaaacctgagga

SEQ ID NO: 54313 - DNA, 612 bp, Populus trichocarpa
  Intron number 2 from transcript POPTR_0003s09270.1 (locus POPTR_0003s09270) derived from phytozome v7.0 (chr-ID scaf fold_3; pos 10575965 to 10576576)
ctgacaggtatgctgttggttctcacagatgtgtgtgtttgtgttacatattcggatagttagttttgatgtccattcttatgtcttacttctgaaattctagaattgaaccccgtaatgttaccctacttgcttatttttcatctgatgaaaaaaatcctagcaagtgcttgttccagtttacgtggtttatttcaaattccttacacgatccacgttacctggcttttccatgtcagaatctggaaaagaattaattagatttccgagcgcatgaatgatcactgtgagaaaaaagaaaaagaaaaaaaagatgccttggcaactaattaaagagaaacaagtgaaaaatgtttaccctgagttatcagggctggaatcaaatgatgatccatttccagcgtgtactttgtgatataattaccatttctcaactttgagttgcatcactaacaaaaagctacatactgaacgggttctaagtttgcctataaggagcttctgtttaattaaactttgtattgtgattttggttgatcctttatatctgcttttattcattttgattgcaatgtcaatttttgatgaagaataccgtgtgctgcagtgttc

SEQ ID NO: 54314 - DNA, 332 bp, Populus trichocarpa
  Intron number 1 from transcript POPTR_0018s02730.1 (locus POPTR_0018s02730) derived from phytozome v7.0 (chr-ID scaf fold_18; pos 2434935 to 2435266)
ataatccacagcttccgcttgcaattcaagctgtacccgaatttctcctctaattttcattatttactgaatccccagttcgattctatttcaaatccctaattttttctcaatctcgttttctatttctaaatcagggtttcgaaataattgaatgagatttaagtttttgtttgattgaattgtaaattattgaactttttagtttcttaagaaatgggcttttgttaattttggttaagtttcatgctttgcttcttcttcttcttctttggttgtttttgactggttatgttttcgatgtgtaggcaaataggcacactatagttttg

SEQ ID NO: 54315 - DNA, 545 bp, Populus trichocarpa
  Intron number 1 from transcript POPTR_0018s01460.1 (locus POPTR_0018s01460) derived from phytozome v7.0 (chr-ID scaf fold_18; pos 1379776 to 1380320)
tgtggctccgcgtctctcaggttaaaaattaaaccctagctctctctcatttccctatatttatttttattttcgtttttatatcctttttactccatcttctaattcgcgtgcctgatcttgcatgccctatcaaaatctcagctctgtgattttttgtttaaatttctgtggatttttttggcagatgagcctgtatatcttttatatttagtgaatacttagatttgattatttaattgtttgaggttttctttgttttctccttctctaatttgtgggcatctagctagggtttaagggttttttttggctgcatgattacttggttgttcgagctttttttagtcgcaaattagttaaaggttgtagagaatggagctactattttggttccaggagttatttgatggtttttttacgggtttttgtttattgttaaatgctggctctagatctactcgcacggtcggtgtggggctagttcaatttttgtagctcgctgtaaagttggtaatgtgtatttgggtatcaggttattgttt

SEQ ID NO: 54316 - DNA, 1048 bp, Populus trichocarpa
  Intron number 5 from transcript POPTR_0018s01460.1 (locus POPTR_0018s01460) derived from phytozome v7.0 (chr-ID scaf fold_18; pos 1381228 to 1382275)
aatcttgcagggtggtgatattctgaaacgaggtatgtaattcttgtttgttcatttgggtcgttaatctttttgattttatgcagtttatgactcattcattttgttgtatggatttgaaattatgacactaattgttttaacaatcttacgatattcaacttattctagaaactttgccaccccttatattctcatttccctcaaatttagggaaaatcaactaatttgcccttatacttggaagctaatctctgattatcctgttaattttaattgcaactgccatacacttgaactgtgataaaatctctaatattgacctcgtgaaatctgttaaacttaagagtttgtgtcatctacatgcgtattccatgataaatgacaggattagctgccattaataaggggtgttccgtcactgcccagttgctgaccaagtttttctttaaccgtttaattgtaaaatctaaatgggtttctgtcagtccctatttttttcttggataaaaacctgaactactcttttatctcaaaaactcaaatctgtaatttcacatctctgtaggatctgagatttggacggcagaatttgataattttcactaattgaaggctatattggagatttcatcttcctccagaggtatcatggatgcaattgacagtttagagggtagattggagattaggttcaaagtataagggtagatttatagaatttttcctgaaattcataacactctttagatttaaagatctaaaatcctgtttttttaatgattaacaattgtaatacagtaagtttttggctaagggaggagactattgtttatgacataactctatgatttgtcccttgtacattgtctgccatcgaaattcccttataatcaatgtgttcaggtttttatcaagataaacaagcaatcagaatgaagcatgagtttagattttcaggggataatacttcttgaaatgttttcgctcttcaaattcttaaccattttgttttcctgttctgcagggacctttggagagagcatat

SEQ ID NO: 54317 - DNA, 704 bp, Populus trichocarpa
  Intron number 1 from transcript POPTR_0502s00200.1 (locus POPTR_0502s00200) derived from phytozome v7.0 (chr-ID scaf fold_502; pos 9370 to 10073)
ccccagaaggtgcgtgtagtgcctctcggcatccaaaaatacctttttatgttattagaagcgtaatcatgttctcttcttgttggtgcagtgtgtgtctataatgggtgattcggtttgtcacctgtgagcctttctttcccttcctttcatccttcaatatttgattgacttgaaattggatttcatggtttgtttagattgggtgttttaagtctaataactcaggttatgagtttaaaaagttaacatgttttttttaagactttatgattctttttatttttattggattttaatctcatgatataggctacaaatttaataaaatatctcagattgacttaactttaattattatggttataaatttctcatgattgatttttttatgatatttttttatctcgacatctaatattattttttaaaaaagaaattatagttcggcccatgctattattagtaagaccctgtttagaaatacagttcaattcatgttccatcaaaatttaaatattttttatttttttatttttaaattattttaatgtgctgattttaaaaataattttttaaaaataaaaaaaaaatttaatatatttttaaataaaaaatatttttaaaaataatgctaccatctcttaaaagaaaataatttatatacagtgcactgacaagagcaggcaaagacacagtagtcg

SEQ ID NO: 54318 - DNA, 605 bp, Populus trichocarpa
  Intron number 1 from transcript POPTR_0003s08700.1 (locus POPTR_0003s08700) derived from phytozome v7.0 (chr-ID scaf fold_3; pos 10093461 to 10094065)
agcttgcgtcttctaacgggcccttaacggcttctgtgagttctttttaaggtcttttatttttcttttatggactatataccctgtttggattctgagatgctattcggagagagatgaaaatattttattttgaatttggagattttttccccaacagagctaaaacttgaaaatttggcttgctttagtttgtaggaccgtgttttgtttatcattaataatcaatttgatgtagtacagaaaactaataactgaaaaggctgcacatcaatcaattatagcgtggaagttgaatagttatcatagggacatcaacttcccagggaaatatcttgttaatggcgttatcttaattaagcattcatcttcagtgattatgacttgtacttgttaattggggaagatggaagaactctttaatcctagacttgcaaaaaccacacgtcaaatgctctgttttgtagtgctgttttattaaactatcctgcttctaccttttccctttcgagtgttaacattgtgtttgttttctttgcaagtttgtaacttgagattctattgttttaggaaaaggtgagctctccttttgagcttctgaccaa

SEQ ID NO: 54319 - DNA, 466 bp, Populus trichocarpa
  Intron number 1 from transcript POPTR_0018s10570.1 (locus POPTR_0018s10570) derived from phytozome v7.0 (chr-ID scaf fold_18; pos 11473690 to 11474155 reverse strand)
ggagaggagcaggtaatgcattgtgtttcccccccttttcccagtgtgtcgttttgaggattattttgcgtcgtcttgatttgttggttattgttgttgttgaaaataaattaatattttttttttgaattgagcagtgaagatttagtgaaaaaatggatgattaaaaattaattaatcatgatagactgctcctgctggtttcgcatgggatttttgtttttcttcttcttcttcttcttttcttaataattatagttagttttagttctgaaagttttcttgttaatgtagcagtaaaaaaatcagcttaaacatgggtttagccgagttaaatagaaattaaagaaaggcaatgaaaaagtaattattaacaggctggttgactagttttagttaatatgattatagaaagttggggttttgaataagtaatgatttgcaatgcaggtttttgatctaagcg

SEQ ID NO: 54320 - DNA, 612 bp, Populus trichocarpa
  Intron number 4 from transcript POPTR_0021s01010.2 (locus POPTR_0021s01010) derived from phytozome v7.0 (chr-ID scaf fold_21; pos 594534 to 595145)
tatttcattcaggtatgctaaatgttagtatcgagttcactgtattgatgatgtaaaaaacgggtgtatttagcagttggcctccgctgggatatttatttgctattgtcatctctgcctcctctgagctgtttccagtaatttatgttatgtgaattcttagtgtatgtgccaaactctctcgatgcagcatatgacatggatgagtacacaaagaaaatacttaaaaactgtgcaatcttttggaaattgaacaaaggtgctggtttgatgtgtaccaacaaattggatgcctgagtttatgtgacagttcccttattcttgtagacctctagctaatttgaatttctaagaccatttgcctgagccagttgctttcattttcttctgtgataaggaatggagtgagggtttgagggaatggttttgggcagtctaaatgaatatagtttgtattgatgtggcgctaccaataatggtctttagtttcctagcataaacagctctgacctagctgcaataacaatttattatcatagttgtatttcagttaagtgtcttaccataatgaacttttgaatcaggtttgcatctgggtgtacctttggatag

SEQ ID NO: 54321 - DNA, 963 bp, Populus trichocarpa
  Intron number 1 from transcript POPTR_0019s12930.1 (locus POPTR_0019s12930) derived from phytozome v7.0 (chr-ID scaf fold_19; pos 13971096 to 13972058)
gagcttagggaattctgggtaagctcttgaaaatcccatgagaaaatgttcgttcatttgttgaggatttgaaatttaatttaaaattattgagaatgatgagctctgtgaatccatatttattttatttgattttgaaaacgttgtagcgaaacacttctgtagatattatgtggttggttgttctgtgtattaaaatatttgtttttttatttaaataattaatgtttttagattattttaatgtgcttgtattaaaaaataaaaaagtattatttgtagtcaaatatttgtatagatattaagtggttgtttgtttttctgttttaaaatgttttataaaaaaattaaatttttttagtgtttttatattattttgatatgtttgtattaaaaataattttttaaaaaaattatttgtagtgaaatgtttgtatacatattaaggtttgtattgatatcaagtggctgttagtttttgtgtttcaaaatgttttttaaaaataattttttaaaaaataatttttttattttaaattattgtttttagtgtttttaaattattttaatgtatttatataaaaaatattatttagaagatattatgttaatatattttaaaaaataatcatcactattttcttgaatatccttcagttttagaaaataaataggacagtaaatgttttcttctgtcgttaaataatattctatttatttgagtatttatttgaggtgaaaaggataatgcaataataaaaaataatattgattgagatatgagaaaacatcatatgcatttgcatttcattgattttcttagataaacaccgattacatgtagtttccagtttcaaggattggttaactcatacgtgcctgctactaaggagtgagtatgtttatatgtgttcttcttgtttgtcagcccggagtctgaatttattgagaaaatcgttggag

SEQ ID NO: 54322 - DNA, 823 bp, Populus trichocarpa
  Intron number 1 from transcript POPTR_0019s13380.1 (locus POPTR_0019s13380) derived from phytozome v7.0 (chr-ID scaf fold_19; pos 14293311 to 14294133 reverse strand)
cctgtatttttcatcacagatttctcttatcacaggtgggtttgtgcttgcctttctctcttttaatcttgcttgcattttgttgttcgtacatgtgtgtgaaatgaatgatggtatgggattttggtgtttgttaaaatgcctatgtgaacttgcaagatgataacttttttgggttttagtctttgatgcttgtagatatttggaaaatttgcagtatagtttgagtgtggagatgagttttgaataatttggtgatttatttgatgttttgattgtaaatcactgagttttttgcattagatatgtagttatgcattttggtgatgcctggaaattcttgtagtcaaaacgtaagatccttggaaatgttaaagtttgaagcttgatatactgtatctttggatttgatgatgcattagtggcacttgtttcatttctataaaaaaaagttatggtctttctgtgttgggatgtttaagaaatactaaggactaatatgaaagaaaatcaacacagcatagaaccttcacagatttccagtagtgtagccagtaaaacctcctggtcttgtgctagaaccgcttgttccataattctgcaatgcagagttgtggtggattaatggagttgagctgtgggatgtgtgtgtttctaaatgtttatcttctgttcattttcttattgctttcatgtttacatttatgatggggttttcttatccatttccttaaattcatgttttgtttgtctgcaagtgagcattgcgtctttcaagtggagttgaatggactttgtaaattttctgtagcaaaacaactgg

SEQ ID NO: 54323 - DNA, 595 bp, Populus trichocarpa; identical to SEQ ID NO: 53889
  Intron number 1 from transcript POPTR_0019s05380.1 (locus POPTR_0019s05380) derived from phytozome v7.0 (chr-ID scaf fold_19; pos 5734524 to 5735118 reverse strand)

SEQ ID NO: 54324 - DNA, 601 bp, Populus trichocarpa
  Intron number 1 from transcript POPTR_0490s00205.1 (locus POPTR_0490s00205) derived from phytozome v7.0 (chr-ID scaf fold_490; pos 4586 to 5186 reverse strand)
catcagttcaatttcttcactttcactgagatgtttcatgctgttataacttgctaccctgttgcttcaactttttaccttgtaatgctctacttctataatttttaagtgttacagcagcgtatggatgctgttaaaatctagagagtctagcaactggttaacctgtgatgcatttttttcttctgtagcagtccaagtgtttctttttttcttgctgtgatttgattgagcatgcttgcaaagttttagtgctgccttttagtcacagccaatccaacttactaggatgtggtggttgctgattcgtgtggatattttttcaaaatatgcaattattagttttagttgcaaaacttatacgcacttattttccttgacaaaattcaaattttgctggaataatccaccttttattttgctgtgttatgcaggagaaacctcaactatttcagtttgttccaaattaaaagcaggtaccatttgttcagaccacattgtattcacaaagttgtatttattgtgatagattcataattctgtttatctgatttatgctctcacaggtcaagacagcacaccaacttctcaagactattcc

SEQ ID NO: 54325 - DNA, 631 bp, Populus trichocarpa
  Intron number 2 from transcript POPTR_0003s16600.1 (locus POPTR_0003s16600) derived from phytozome v7.0 (chr-ID scaf fold_3; pos 16176646 to 16177276 reverse strand)
ccactttacgtggagatttagatttcttgttgcaggtatatatgtctttacatcaacctacatgattgtctgggtttaaggttgcctatatattatgttgagatctttgaaattcaagaatgtcagtttagaaattaagtcactgtttactctcgtattaaatcggtatcctgatctagtacacattgtggtcatattaaactgattgtgcatcaacatttcttcattcgacttggtgaaacatgatgacttcttttaacttctttgatcccattgtcctgctgtagactaaattcatgacgagtcattccctatccccgtagtttgttttttagtatctcgattttgttttcaagaccaaatcaactctgtaagtaatgtaaatgagagaggttgctgctaactgaaaccaatcctttcatatttgctatctgtctatcttgtttgttagatgttcatgtcgataatcttgaatttcaaactcaaatcaattcatgtaatacattaatacatataaagaaaaactgctcccaacctaaactctttttttttaataactttcatgtaataactggataactcgtgctgttctgttttgctccgctacagtccttggaagaagcaggtgtag

SEQ ID NO: 54326 - DNA, 821 bp, Populus trichocarpa
  Intron number 1 from transcript POPTR_0019s04790.1 (locus POPTR_0019s04790) derived from phytozome v7.0 (chr-ID scaf fold_19; pos 5009128 to 5009948)
tgtgtaaagaacttccatatttcttcatccataaggtacagaacatttcttcttcttttttttcctgtgaattatatatggtgctggttgagaacaccatatacaaagtgtgaacaatccaagcttgatgtagtttaaaggttcttagtttgaactttaaaggttcatgtttcttttttttttcccacctctgataatccatttaatctagccccttcttttctactgttctgttctctttttcaatctttggtaatgttcaatggagttccgggtttgatttgttgtcttaaatctttggcagtgtactttctagttcttttcatgcgtgtatttgataggatctttgcagtaagattttctttagtcttgaggaaaaataatctgtctcactttcttgacatatgaaagaatagcaagttgtttctctgtatgttttattctgctaaatatttgtacgaagtgaagagggcattaggggcataaatcatccttatcatttcatatatagatgtcatcttaaataatagaggtagattctaattttggcagtgtcccaaggggtcaatctgttaattttatcaagagttataccccttttcttggatcatcgtgattgaaaatgttctactttttagatatgtatccatgataggataaacaaacaagtgctcttgatgtgaatataggattttacctcctggagattctaacaagttgttttgagaaggatgttctgttttcttttgttgcttgattcttgtcctcatttcttttgattcattgtttagtttatttggatgctgtgcagagaaagggag

SEQ ID NO: 54327 - DNA, 971 bp, Populus trichocarpa
  Intron number 3 from transcript POPTR_0019s04790.1 (locus POPTR_0019s04790) derived from phytozome v7.0 (chr-ID scaf fold_19; pos 5010873 to 5011843)
tctcaaattggtgggagttctatttcagcaccctcgtcgactaccatgcctggaagtacttccttcaccgatgaaacttgaacacttggttttttgttcctttctctgtttccttggctttcttctgtatattgccatcttatcttagcaaaatggtaccctctccatatgtaaatgaaggaatgatattggtgcctttttgtattgtgtaagcaattttgatacttgatgataagattccatataactagatttctggaattggatttaggcagtctggttgacaagtagcacagaagagaattgctaataaatagtatcttgtcttgtttggttgcggtgagaacaatagaggggagacatgcacatagaacggaagaatgtaatctgtttccctagctagttctaaatcatagattttaaatgtaatctgtttccctagctagttctaaatcatagattttaaatctgagctgatgatctgcttgaccgaatgacagagaccttacaagtccctccttttccttcgccgtctccgtctttgtctttgttcgttagataaaaagacagattaggctcgcgagaaaagttgatgctgctcatttcaggtttgcaaattctttcacctgatactaggactgcaggctcagaaatctactgaatttggggccttggagcttaaggaaatgagagaaggagttctcagaattccgcaggttttgatgctgcttcttcacttcttgaaagatctgtccagaagaatgagatgctactgcagacaacacttttttaaaaaagttgattgcttgagttgctgcgcttcatttgttactgtcatacttgacggaccttttctcgttgtggttggattggctccaaactaaacaatgcagcattgcattggcctccgggattaaaactgttcactactaaataggccaataatattttttaaaggtgaagaaaaacta

SEQ ID NO: 54328 - DNA, 566 bp, Populus trichocarpa
  Intron number 1 from transcript POPTR_0003s16730.1 (locus POPTR_0003s16730) derived from phytozome v7.0 (chr-ID scaf fold_3; pos 16260974 to 16261539)
gcagcggcactccacctcgtcttgaaagttcaaaggcaagtttcaatttttctgtttccttatttggacaatacatgaattagagtttaataatgatgtcttttttataattgtttttgggttttatttaatgattttaccgaaaattgaactatcattttgatttaattgagctttaattgaatggaatgcaatccctttttatgtcaatgaatttgtgtgtgtgtgtgtatcgctctttgttgcacaatttctgttgctgttgctcttgagcatgccttctcgtattctgggtgagaatgatgtgttagccgttaatcttgacaggttcagttattatctggggttttgagtgtcattgtattgggtatttaacaattaggtggatggctcttcaaggaaagcgagttcggctgagcagaatttgtgttcagttcaaattgctgaaattggaaataagccctctgattgaattggttttcagaatgttttaggtaaaggggcttctatcaaatcactggttatctgacttttattttttgaatttctgttgttttcagttttgc

SEQ ID NO: 54329 - DNA, 851 bp, Populus trichocarpa
  Intron number 1 from transcript POPTR_0013s14000.1 (locus POPTR_0013s14000) derived from phytozome v7.0 (chr-ID scaf fold_13; pos 14302890 to 14303740)
cggtcgtccaatctctctgtcccaaatagcttcaggtttcaactcttccttcaatccttttctttgctattaaattattagcattactatgcatattattctactgttgaaaactacaaagtcattttggtaaatttaaatagtataggttttaagagttcataaaatattggtcaagtagttttgcatttagacgttttattttgaccattaaaatgtagctcaagtgaaaattatttttctcccttttcaaagaaatgtcaaatccgaatctctccgttataacccaaatcttttatgttaaatacataaacgataaaattgtgtaattgctcctaagattatcctaggacttcatataaatgtttccaaagtatactatatatatatagtttactctctttgtacatatgtttcataagatgttttgatttctttttatatatatataagaatgagacgttaaagattgtagggatatgattttttttaacattgtagtattcttaattatccaattctttcttcaagttttttttttttttaaattatggatgcttaatttttaacatgatatcaaggcatatgtcttgaattttaactaggtgattcgcccaagttgttgtttgatgcatggtataagttcttgatacaacttcttaaactcaaggaacacgtgaagaaatattttaacattatattgttatccctagcctcaccaaagcacaacatatatagtattaatttcgaaaatgaaatatgctgtatataagttgcaatatacagatttttttcttctatccttcatgatttcaggtattaactcacctagctcggacatttcttatctt

SEQ ID NO: 54330 - DNA, 770 bp, Populus trichocarpa
  Intron number 1 from transcript POPTR_0003s12860.1 (locus POPTR_0003s12860) derived from phytozome v7.0 (chr-ID scaf fold_3; pos 13302922 to 13303691)
acttcgttttggtaacttctaagtgctggttttttttacatcgacccagtttttgttttgatggtttctcaactggattttgagtattttctctgatggtttcttggttttttgtattttgtgtgtgtattttatggtcttgttgtagcttcaaattgtatgaatggttgttttaagagtttttcaacttgattgtatgttttaatgccccttttttcttgtatctgttttacaattttgtgcgatttggagctagtaatgtgatccatcaaaagttggagtttctaaatctgtgatcttgtttaggttttggttctgtgtatttggatttggtgctgatttgccttgttgggttgaattaggtttccatgttttagaaactgtaaaggttataggaggtagttttgaagatggtttctttacttcttatgaccataatttagtgcgggtccatttctatccttttggttctcttttgggtttcttaggttaatatcaaatatgcataactgcataaattatgcgctttgattgggaaagacatttaatgttgtcagtgccacgcttgctttgatttagtgcatacctttgaagcctaccacttattatctggttttataggaaagttacattcaccagattttatgggcctgtctactttcttgcttggaaattgtactttagtctgctctggactcagattgtgttcataatatttacctgctaactttgtggatggtttttgtaggtaaaagttcaaacttgggtcg

SEQ ID NO: 54331 - DNA, 497 bp, Populus trichocarpa
  Intron number 3 from transcript POPTR_1151s00200.1 (locus POPTR_1151s00200) derived from phytozome v7.0 (chr-ID scaf fold_1151; pos 5812 to 6308 reverse strand)
gctgtcagttctattttggaaacctatctttcagagtaagtatacatcatggtgtaaattctatatgatgacgtgttcacgttgtgttgtgttttttatgatgtcattatcccacattggttaggatacgagagccttggttgtttatatgacaccaagaacatcactttcgttttgaggtgcctttcaaagaacaaaactcactgaaaaccatgtaggatactatctcctaatggccctaccatgctgcgcatataaatggacacacatcatcacttttgttccaagattcttcaattttaatacttcttccgtcagttgatccgttaactaatgcttgtctgtctcaaaacgaagactggaaactttgaattatgatcaatttatagttatactttgtttcgtgaagtaaatgattcctattaattaaattatccattacttcttgttcaacttgatttggaatctcttattttgcattttttttcccaatagat

SEQ ID NO: 54332 - DNA, 487 bp, Populus trichocarpa
  Intron number 1 from transcript POPTR_0019s13560.1 (locus POPTR_0019s13560) derived from phytozome v7.0 (chr-ID scaf fold_19; pos 14463724 to 14464210)
tcatctctctcttaactacaaactcttcaaacatagtaagtgtttcttcttttatttcctcttttttgtagttctcttgtgtttgaagtttcaaaaacttgtactccaagcatctcttctagtctccccatgcctatctctttctactaactttttgtgagtgataattagatctggaacagttttaagcaaaaccccactttttatttattgcatttcttaaatctaactgcttcttggtcattaaagtttgaatttttaagttgaaagttaacatttttattgattgcttttatcaactgtaaatgcctttcttttattggaattattaggtgtgctcagctttttccctgtaactgttagtgccatggagatttctttttgattttgctaatttggaaatttgagttcttaatctgggaatcttgttgaggttttgttattaaacatgctagtgcaactttgcttcaaagtcttgataggttag

SEQ ID NO: 54333 - DNA, 775 bp, Populus trichocarpa
  Intron number 1 from transcript POPTR_0019s04800.1 (locus POPTR_0019s04800) derived from phytozome v7.0 (chr-ID scaf fold_19; pos 5013535 to 5014309 reverse strand)
ttggacaccaaggtgccaatatctttcttaactcctgtttttttttttctccatttaatgcattagcgtttgtttatagattttcttttttattatttcttaatgtttcttgttttaggggattagagtgttttttttgttttttctttgaattctgttactttgttccttaattttccatgataatattgctgctaatttgatgttaattctcttgagattcccatgtgaaatttacattagattattaacagccattcttttttctgtgcccgatatcatcaatttgatgtgcttctctctgtgggaattactatttttttctttaagccaaccctgtcccatatcgttattctcagtataaacttcctttagccattgttttagtataatcaatgcatatggaaagagaatggaatgcatgttaagttctacagaatatgttctctgcttttaaaagaataaaaacttgtcggtcatgggtgaagctctgcataattgcatatggggggataggctgcatagggaatcaatgttcttttatggttattggatttggtttgcaaacatatcttctaccttggatgctgccctatttgtttttctcaataatgagttaaatgtctttattttgccatgagatgatttaaagatcatactgaattttgccagctatttctgaattctagtacgatacttggaacttgactggctatgaatattctcaaattgtgataagtacagggaccggaaattcggactggattcttgaagg

SEQ ID NO: 54334 - DNA, 676 bp, Populus trichocarpa
  Intron number 2 from transcript POPTR_0003s03380.1 (locus POPTR_0003s03380) derived from phytozome v7.0 (chr-ID scaf fold_3; pos 3763549 to 3764224 reverse strand)
ttaaggctggatttcttggatcagtcaaactcaaggtcggttttttttactatgatctcaatttcaactatttatatgtcgaggtgggatgattggtttacccaacatgattgcttgatcactgtgaaacaactaggatcctttctagacttctacaactggacaacgtgtggcagaaaatgtgtataacgattcctctctgttccatctactctcaaaagagaagtggaaagagttgagagtttgaagttacaaaatgatatcctgtcttaacttcatctatataagattctaagaggttgaaaatcccaaagaacttataagaactagagattggatggaaaccttatgcaatcgagaagagtgatgtataagcgataatgttgaagtgaattcaagtgcgtatttcaatggagaaaaaggcagagagcccttgttcaaaaccaaaaaagaaaaaaaagaaagaagaaatttctggaggatgttctatcccgcaccctctctcgtttctttactttttgctgtagattaatacggcaaatatgaagttaatgtcttaaattacttgctttattttccatatttgttgttcaccttagcaagcctactatgcatgcattgtgcatattagtccatggaaaagaggcatgagtgacacttttcgatttcaggttcc

SEQ ID NO: 54335 - DNA, 504 bp, Populus trichocarpa
  Intron number 1 from transcript POPTR_0006s28110.1 (locus POPTR_0006s28110) derived from phytozome v7.0 (chr-ID scaf fold_6; pos 25925335 to 25925838 reverse strand)
cttctcaatccttttcctctttccaggtacccgaaaagattcaatctttaattcaattttcatgttcctagatctgggttttttagaagattcaatcttttcattgtttttgtcagttatttgtggtttgtattgtgtaattgcgttaaaagcttatttttttacaagtttttactgccaatattgttattttgtttaaaagaagcaatcttcggaatggtgtgaaaattgtaagtgggaatatgattagaaatgtcctaattcttggcggggcacttaagtttttgtgctaccttctgtaaatatggacaaaaagtaatgattgtatgtgggatttaggtgggttttcatggagtttagtgatgcccataaagaacctacattacatgaaaacacccctttagagaaaattagagatgcagcagcatgttgtatgatatgtgttttgattcttctgattgatcgctattgtggaatagactggtgacttgcggtttgaagacc

SEQ ID NO: 54336 - DNA, 355 bp, Populus trichocarpa
  Intron number 1 from transcript POPTR_0003s01770.1 (locus POPTR_0003s01770) derived from phytozome v7.0 (chr-ID scaf fold_3; pos 1647156 to 1647510 reverse strand)
gactactttccaggcgtggtaaacccccttgctgggtaattttctctttcttttcttgcacagctacacacacctataaaagttattgctcttccgggcatatttgttttattaattgaaatgttgtgtgtgtgtttgagtgactgatagcctcacttgtgttgaaaatagatacttgtgatttatcaattgtcatgtttagatacttgtgatttattttttgtcaagtcaagtttcctttctattttggatgtttcctgtttgttaatttcatcttcccaccccttccctcccatttttttttgcctttttgtcttaatagttttaatctattgccttgttcaggatacaattg

SEQ ID NO: 54337 - DNA, 600 bp, Populus trichocarpa
  Intron number 2 from transcript POPTR_0003s09160.1 (locus POPTR_0003s09160) derived from phytozome v7.0 (chr-ID scaf fold_3; pos 10497913 to 10498512)
gccttgcctaccacaaggatcaccgtgctattcaggtaattcaattgttttcccaattttgtatttgtgtttttactcattcttgtcagtgttttgattttggtcctggatttttcttccttccttccttctttctttctgttttgttctgtaaggtttgtttttcactttcctattctgggactgaaagaatccctctgttttcttacttttttttggacattgtaaatccaatatattaaatttgtttttatttccatatatagtggatgagtgaagatgattttctttaaatttgttattcaaaatctcaactcaatctagtcaattgaatgcagattttaccttttcgaaattaaaactttcctttttttccctacattttctaaacacccaaatagacaaatttggccattggtgaaatccttccttctatttttttttaaatgggatttccgtgtcctgcaaattctcatttggctttgcatttttttcattctgaacaaaataaaataaaattgcatgagcttcacatggtcttctaacactctgtctcttaatgtttctttgtgaatgtacagataaggaggtcctcatacc

SEQ ID NO: 54338 - DNA, 635 bp, Populus trichocarpa
  Intron number 1 from transcript POPTR_0019s10520.1 (locus POPTR_0019s10520) derived from phytozome v7.0 (chr-ID scaf fold_19; pos 12071575 to 12072209 reverse strand)
gttgacgaaattggtaaatctccactgccctcgtctttggttgtctttgcttatatgttaagcttgcatgtagtacttgagtccagaatgccatgaagacataaaatacactttttgtcatggtcatatcggttcccttttatcttccttgataatcagaaaagattcagacttcagaagaggcatctttgtttaattaaaggagtattttctttcttttcttgcaacaatttcgttttttaggatttgcgatatgtggagacaggagaacgatgtttagcaagtttgaggaaatagtctttctagacttgaattctgtttcatcttcttatggtcaccttttgctcctcttttatatcattttctgttggtttcttgaaaggagaagcctttccagataagcaaccaaatctcaaaattagcaacgatgcctgtgttaagtaatgcgattacatacatcttctaggaaaacgaaattctattgaaaaatgaaatggaaagttggctatatatgcacacacatacgtggaatttggccagcaattggaatccctccagtttatgattatcatttttttttccttccattttctttggcagctgaacaactaggacttcctctgattcctgcatac

SEQ ID NO: 54339 - DNA, 463 bp, Populus trichocarpa
  Intron number 1 from transcript POPTR_0013s11280.1 (locus POPTR_0013s11280) derived from phytozome v7.0 (chr-ID scaf fold_13; pos 11944799 to 11945261 reverse strand)
aggagacagcctgggtacggcttttcttttctttctttaccaatttgattgtaatgtagagtcagtgagggaatgcaattagggctttttgtttggttcttgagagatttttagttgctacttacggaagctaatgaattgggtttctaagattacattttggcatatttttggttcattagaaaatgtaaatataaagaaagaaaagggaaattatttgtgtattagaaatgcagtcaaatattccatttcagaatgctccactggcagggttcttatactgtaaaaatgttcttttgaaagtataattattacaagtgcttgattggaaatgtgggtttacgttcttgcgcactttgtgcgagttttgaattgcaatgacttgttaatgatagtaatactgtgattcattatttgtttctttccactttttattggttgggcaggtgggaagcaaacagtt

SEQ ID NO: 54340 - DNA, 612 bp, Populus trichocarpa
  Intron number 3 from transcript POPTR_0006s13580.1 (locus POPTR_0006s13580) derived from phytozome v7.0 (chr-ID scaf fold_6; pos 10799649 to 10800260 reverse strand)
cttggtatccagagaaagtttaccctccaaataaggtcagtattcttattcttactgctccattagtgcttctttttatcatcacctgtcactcataccctattgatcaagaattagtacacaattgtttactcttccttttattttgtagtatcagtctagcatgcatctttttcaaaacccaccaagtagagtgatcattggggtgttatgagttgtaatagctttgtttttgagtcattgtcgattctgctttgttgccatatggctttcgtcaagttgtttataatggtggcaatactaatctacacatatataggtcaggaattgaaatggtgtggacataaagctgatgaattactgagtttagcctgataaaattgcttactgagttattgctcttcgtatcttacatgaattttccaccgaaaactcctgcaactttgttgtcatttttggatacgtgaagattttggataactggtgttagtactaatatgatacctagttacatcaagtgcatatggtcatttgtttaacctatgcattatttatcatttcttgttggattacaaaaccctttttgtttataggtaccatcattggaacaca

SEQ ID NO: 54341 - DNA, 503 bp, Populus trichocarpa
  Intron number 2 from transcript POPTR_0003s15180.1 (locus POPTR_0003s15180) derived from phytozome v7.0 (chr-ID scaf fold_3; pos 15044958 to 15045460 reverse strand)
ggagtttcaacttctctctctctcggctgtctcaggtgtgatcaatgtttaagaggatgcatgggttacgtcctaatatttgcaaatctaactggcggagatatcacaattaatgcttccgagaagaacgaatacagatgacttgcattttccaaatccttaaattatatggattcccaactaagtcagacttaactgcatcacaagtacagatgtcaaaacaaagttcggtttcgctcttcacaaggccatcatcgtgcgaaagcttgagatcgggcagcatccttcgcgtggtatcgcacgatcaaagataagacacaataatattgtcttattctttttttaatgccaacttatagcgaggggcccagaggaaaagagtgggcaacttgctttcgattatccacggaccgacctccgtttccttcacagatttatttatatattttgcgatcattaaatacttagctcacgaagttatcaccatcaccgtagcaaaactc

SEQ ID NO: 54342 - DNA, 884 bp, Populus trichocarpa
  Intron number 1 from transcript POPTR_0003s15180.1 (locus POPTR_0003s15180) derived from phytozome v7.0 (chr-ID scaf fold_3; pos 15045478 to 15046361 reverse strand)
gccaaaagtattccaccttttcttcgcatatgatttgatttctttctccggaaaggatctaatagaggtgcaagtgacggtagatgtcttgattccttctccttttcctttgtgatggcttagttcaaagaattagcaagcgaaagcacttcatttgttgatctattgaatgaacttaagggttttgattgatttatgttactcgcattgaataatattgtatatgatatgtctcaagtttttgcctctagctttttgaaaaactaatatataaaaatccaattatcctatttgagcatatatttttaggtttggtatcagcataaatgcgacagaggttcttctagaagagtgagtataaaaaaatgatgctttaactatataaaaataaataaaactaagaatgcattgtggagcaagattcattgtagcgtgtaaagatgtttttttgacattcaaaatgcaagtaaacgaataacaaattaaggggcaatttttattttcatggagtttaatttgtattatcaaattaaataaggataaattggtttttttatatatatatttttttacggttattaatttaccctttaaataaaaaaatgtattggaggcaagaagtgtttttgactttttatctttttttttcacaatataattacttaattactctttacattttatttccttgaacttgcttccaagggtgttttcatcattttattatgatttttttttgtaattatcaaatacactcaagggtaattaagtattttaacatatataaaagatatttaaaaataaaaattagttggtgaatgtaacgaatgcactggaaaatgggaagagcctgtgcctttcacgcgggttcctccgctgaccag

SEQ ID NO: 54343 - DNA, 867 bp, Populus trichocarpa
  Intron number 2 from transcript POPTR_0013s11140.1 (locus POPTR_0013s11140) derived from phytozome v7.0 (chr-ID scaf fold_13; pos 11828484 to 11829350 reverse strand)
acaaggctcgccggttgggctataaggccaagcaggtaacactttttttgagtcattacatctgaaagaagtatttcttcgtatgttatttcaagtttttatttctgtttaaggtgccagatttactgtttatgatgattatggcacaaagttttagagggcatagtttgttttggtcgatgtgtgtaattctgttccactatgttgatagacataatcagcttgtgcttgtcttaatgttgttgtttctgaacaatgaggtttctcatttccattgtgtgattcttgctggttaagtagcttcttgatgcatattcattcctgcctgagagagtgtctacttacatttgtggaatgcttcctgatacctgcaatatcaaaacaatcgatcatatgagcaaatgggccctcgtttagtcaaccttatttttgtctcgatcagatagagttcttgctgttcttttctggatttgttgttattgatgtcttgaattttatctcctagttggttgagaagaaattgtttggatgttaaattattaagtttgatttttgcttgacttgttctgttcaaactttcagtttgtcttctaatggaacactaagaatttgtgattttgatagttaggtgattgcttacaacgttgaagatataaaaatggagatcagtaacaccattgtttaatcaagctattaaagttgctattcttacccgttttcctttagctcatcttaatttctactcgatgaagtgtgcatggctgccacacacataaaaagtctattgctttgcacatctgtatggatactgaaagtagtttgtttattttagggctacgtggtttatcgtgtccgtgttaggcgggg

SEQ ID NO: 54344 - DNA, 781 bp, Populus trichocarpa
  Intron number 1 from transcript POPTR_0019s01290.1 (locus POPTR_0019s01290) derived from phytozome v7.0 (chr-ID scaf fold_19; pos 1117272 to 1118052)
gggaatcaccgacgaaggtaaagctgacggacttattccttcggtgatgacgtcggtaaaaaaatcactgacgaacttctaatcatacaccgacagaattgttctgtcggtaaaactgtgaaatcttgtagtgtgaaactatgaagaagttacaaggagttggtgggaggttggtgacttggtggcggaggttggtggtggggactctagtgtacagtttatactgtagtaaataattaattattatttttagagattaatattattttataaacaagctcaaaatattataatatttgaataaaaatagggtaaaaatacatattagagtaatttttctcttgaaagtatgttttaagagtaatgtttattatttttaatcataaataatttagaacctgaatttttaggattaatatctaatttaaaatttttgttcccttaaattattattacataacaactccaataaaatcttaaattttaggaatagtgtgacgacctagtctatggacaataataagaaacacatgccatcattttataaaaattttataaaaaaggtgtaaatgtagtgtatatacaaacacgtgtgaatgttgtataaatataaagaggtttcatcactaaaaattttctagtccaaaacactttggaatggctcccacccacttggattcatcgtttagcgctctccccacattagcatctcctagtcgacccttagtagaatctgtatcaagcaagaattctaaaggtcgctgcaaggttgccaccggag

SEQ ID NO: 54345 - DNA, 471 bp, Populus trichocarpa
  Intron number 4 from transcript POPTR_0018s03920.1 (locus POPTR_0018s03920) derived from phytozome v7.0 (chr-ID scaf fold_18; pos 3342102 to 3342572 reverse strand)
agaagattagtgaattgaactttaagctagcagatgtaagttctttgtttgtcagtgttactggaaatgcataaagttttggaatgatgaaacagctttagtccttccctgttctcagacaaggcattttatttacaattttgaagagttttaatggtcttttgactttaatgtcctacctggctttaacacctgtttagtatgatatgccaatggatccccaaaggtgtgcatcagtttcatgtgcacgcatatgcatatgctcttcttcagctatttaagtcctattcttaattgtggtatcacacttgcttttctcttatttcaacatattactgcctgtttcttttttcatcttggcaccaacttctttttcatattttataatctgagtttgtccttcaatttcttagtttgtgatggttagtaatgtgatacataatgtctttgctttatagcttgaaaagatta

SEQ ID NO: 54346 - DNA, 1010 bp, Populus trichocarpa
  Intron number 3 from transcript POPTR_0006s14820.1 (locus POPTR_0006s14820) derived from phytozome v7.0 (chr-ID scaf fold_6; pos 12251314 to 12252323)
gttttgtaggtatgttctttttaaaactttattacctttcttatgcatgtatgtttgtgttctcccatgatgtatgacctttttggaatctgtcggactgattataaacttgattttttgccatctcccaagtcatatttttaaatttaaaagtggaaaatattgtgggacttgcatttcggtcgtaaaatatattttagttttgtaagaaaatgccagaaagtggtaaattcatcattcgccaaacatcaaagacaacattgagttttttcttgtgtaaaacaagtaaaagaaaggttaaatgatgtatgggatcaagatattagagcttcatgccttaacttttatctggaaataatgtttgtcaatcatatgtttttgaacaattagaatcttcaagctgtgttgtacaatgtgttaattaattcttgcaggtgttttttcatgattagggctggttttaacttttaaatatcgtgtattgctgctactgctcagtcttttgagtgattgagtttttctagcctagtccgcacaaactttagaagtctgtgtagttggttctccaaaactgatcataatttccagattcagctggaactgaattgattgattaacacgtcgacttgaaactctcacccctacaaagtaatgaagtactagacttgtttgaatggaattctcttggatagaaagttgttaagatgattgtaagaggcaagcctggatccatggcggggtttgcatgcataatctagttcaatatttagtggggaactaaatctaaagacaataattcagtagtgctaaaaaattatgtaactttctgttctaatgaatattgcttgatctctcttatgcatgcataggaagtcaaagagtagttttattgcttccctcttaagtgcttggtgttatatctcttctagtgattccatctaagccatcaacttatgtgcaacactgtaattacagtctctgcaataccaaggctaccagtaagcaggctc

SEQ ID NO: 54347 - DNA, 589 bp, Populus trichocarpa
  Intron number 1 from transcript POPTR_0006s00470.1 (locus POPTR_0006s00470) derived from phytozome v7.0 (chr-ID scaf fold_6; pos 227278 to 227866)
tctttcttcgtgaactcatcagcaattcctccgatgtatgtttcttcccctttattttatgcttctgttttctttccttctgtctcgtgatttacgtttgaatagagtgattaatgtatgaaacgtttgattttagctgaattttgggacttttgtgttttgtttgatagacccttttgttgttatgttttaattatcttaaagatataaacttttcttcttttttatcgttttatgtatgaataggctaattaatgtatgttttagctggattatgggactttgatgttttgtttggtaaaccctttcgttcctatgctttagttatgttaaagatccaaccttttcttattccgttttgaaaaatcagatgcaagtctatgttcaattggattgctctgatggttgtttttgaactaaatttatttcaatgaatgaaaattgatgtaatttcgtgtaatgtggaaccatttgtttggaatggtatggtcaatgggtgtgaatatgcaaatggtggtattagcttatgatgttattgtgtttgtgttttataggctttggataagattcgattcgatagcttgactga

SEQ ID NO: 54348 - DNA, 432 bp, Populus trichocarpa
  Intron number 1 from transcript POPTR_0021s00800.1 (locus POPTR_0021s00800) derived from phytozome v7.0 (chr-ID scaf fold_21; pos 466861 to 467292)
gtcttgtaatacctcttctccccccccccctctcacatatatatatggatgattgtgatcattagttaactaagaaaaggaaggataacaagaagaaaagataattcttgttttgattttcttttcctttcatatttcttgtattagctagagtaaggatttggaagattggcttttctcgtgtgtttttttttgaaacctttaggccaaaagtggactgaggagaaaaggaaaaaaggagaattttatgctttgttctccagagattttgtcttcccctgttatctctgtttttttccccttcttcttcaagaattatcccttttcaggcaacaaaaatggcgggggttaaaattctttcataccttctctatcaagtggagaattgccctctagttatattaaaaaagcttgcttttcttgcagcttggt

SEQ ID NO: 54349 - DNA, 472 bp, Populus trichocarpa
  Intron number 2 from transcript POPTR_0013s03710.1 (locus POPTR_0013s03710) derived from phytozome v7.0 (chr-ID scaf fold_13; pos 2362051 to 2362522)
cgatcaagcaggtaattttacttttttgtttcttcttttaaacaaaatttgaatgcaacttctttaattattttattaattattatgccgtgatagaattaaccttttatgttcatagagtcttggtattgcatgcaagcatttagggattgtgtagttagtaactatcctcttcttgtatgctaatttagttgaagtaatgtaaagagaattagatttgaatttaaaaagaaaaattattggaaacccatatggtagctctatgaagttttcttgagtgctccttttgtctttaagtgtttgggtttcatgcaatcaaagtatggcgtctaataagtgttgttattgttatgttaggctttgctaaaaaaaaaattcttgttacgaaaaactggcccttctgtttctttcaacatgatgttgattgaattataatttttgtacttttttgaattttagggttatagagaag

SEQ ID NO: 54350 - DNA, 848 bp, Populus trichocarpa
  Intron number 1 from transcript POPTR_0013s00370.1 (locus POPTR_0013s00370) derived from phytozome v7.0 (chr-ID scaf fold_13; pos 146752 to 147599)
gtttctcagcttctatcccattaattaataatcaggtaaatataatttacttttatcaaatttaatcagcttcttctttttttcccgacaatattgaaccaaaattttgttttttttgcttgctattcatggtctttacttctagcagactttaaatttagggcttttgaatcttattcacttcataagattttgagatgcagattatgttttctgtgggatttgtgttggtgagtttagtttcgatttcaaggagatcactttgatttttcataattaatagagtttgttagggcatggcatggatttggttttttagcgtttgttgcgagagacccttttgaggaatcagcttaaaactttgagaaaacagtgaaaaaagctagctttgtttgttgttgtttttttcactgttgaggagatcctgtggatgtagagcacgtatgtaaaatgaattttcttaatgtttgcatagtatttatggagtttaggattacaaaaagggatgttcttgtttgagttttagacttactttttatttttttctgcattttatagactaaatcaggttcgagcataaagattgtgaattcaaattttatgctcattgttgctggcaaccaaaatctgcatttatttgtattatgcatcttgatattcataactgataagctaatagctagcattttcggtctttgatatttttcatggagtgtgtgctgtgactatattttagtgatatttttcacttattcttaactagcatgttttttttttttttttcacttctcctccgaaacgaacctttttattattttacttcttgattttttcttaggtggtagaaa

SEQ ID NO: 54351 - DNA, 356 bp, Populus trichocarpa
  Intron number 2 from transcript POPTR_0013s00370.1 (locus POPTR_0013s00370) derived from phytozome v7.0 (chr-ID scaf fold_13; pos 147649 to 148004)
aacagcaacttgacagagagcaggtgattctaggtttccaatcctttttttttttcttatctgatggattgcatgggagatagcttattcagtacagcttaggaagggttagagaatatttaagttcatgaactgggtccatgttattgataaattgaagatcgctgtttaagttttgattaattgctttggtataaaaagattatatgtttctgtgtcaatggagttttcctttatgcctgtgcttacatgaatacttgagcatcatttaatcttgtgtagtgatgtttatcatctggatttgtggtatgtgcttgacaggactcgcttattgaggatttcacagaggattttcg

SEQ ID NO: 54352 - DNA, 630 bp, Populus trichocarpa
  Intron number 1 from transcript POPTR_0019s08575.1 (locus POPTR_0019s08575) derived from phytozome v7.0 (chr-ID scaf fold_19; pos 10096595 to 10097224)
caatcttttgtaaaactttgttgtctattgtcttggtaatggaagtttgtatcatcttttcatttaataatttcatgcaagacgcttaattacagtttatatgattgatttaatccatgtaaaactaaggttatatgtttcatgttgatttttagtgttgtttgggttttgatattttttatataaaaaaacatgggttttgtttttcagcttctgggtattcttttaaatgcagggaagataagatttatctgtataagaagatttggggttttgattttaaaaaatcgggtttggatttttggcatttgggtatttgaaaaatataggaaaaaccatgtttattttgcaagaaatttagggttttgatttatagtagagttttggatttgggatgaaatcagtggtgttgatttttggcttttaattcgtttgcacaatgcagggaaaacaatatttgtgaaaagtgagttcgagaagaaatatgagcatataggttttctcggttttttgaaatcaagaaccgaaccggaccggaccgaaaccggtcagtttgactcggtttcggttttttttcaaaaaaaaccggtttggttgttttttatagttaaaaaccgaaccgaaccgaaa

SEQ ID NO: 54353 - DNA, 767 bp, Populus trichocarpa
  Intron number 2 from transcript POPTR_0014s04580.1 (locus POPTR_0014s04580) derived from phytozome v7.0 (chr-ID scaf fold_14; pos 3519854 to 3520620 reverse strand)
gatacggggagccacaatcgtatagcccagttgtataatttattccgtctgtgctgatattttggtaaattatagggttgttccggcatatatcaacttgttaactattttgttcgctgcgtttactgctctatgaatccattattgttttgatcttgcactgtgttcttgcattagagtaataataattattgatgttaatcattatcctgttttgttgttattgcatgtgatgatgtaactatattacaatctctcttctcaatagtcttttcaaaaacaaaattacttgtgaaccatagctcccaaagataaacatgtcaaagaactatctcaattcaaaaatttaagctgttgggtgatgttttaaaatatgatttatattattttcaaacaacttgaaacttgtacatgctcacattaccttgtatttaatttctatcaaataaataaagatgatgagattcgaacttgtgaccatttggtcatcaagattctgataccatgtcaaagaaccatctcaacccaatagcttgagctattagatgaggtcccatgatatgatttatattattttctaacacatcctcttaaagtctttgggcttgaaacttgcacatgttcacaataccttatgcttaatttttttcaaataaataaaaatagtgagattcgaacttgaaaccacttagtcatcaagactctaatataatgtcaaagaacgatcttaactaaaaaatttaaattattaaataaaatttaaagat

SEQ ID NO: 54354 - DNA, 697 bp, Populus trichocarpa
  Intron number 1 from transcript POPTR_0014s13100.1 (locus POPTR_0014s13100) derived from phytozome v7.0 (chr-ID scaf fold_14; pos 9638944 to 9639640)
tggccttgtctgctagggactcggttgccttccaggtactataaaatactagtctttctgctccatcgacttccacgtttaataattttgccgatagaatattctatcggtatttactttaacatgtcatcagtgaatatttattgacggatttacaaatgaaaactggttttcaaaaataacctctgggtaatttttgatacgtcgaaaagtttatcggtaatataaaaaccagtaattttatagatagataatgtaagcaaaaacaatctcaacaaaattttattgatgataacaatatctataaaaacttacatgtcattatattgtttgattttttctattccgattggaattctctcgatttaaaaataaacgaagaagttattttcattgatgtttactgatagagttagcaataaacaaattttattaataaatatcatcataaaataccaacaaaaaaaatctattttcatattcattaattttctggtagtcattattatcatgcatattataacagcaagttgaaatagaactcatacttccgcattctttcacgccttctcaaactcggtcccaacagcttcggcacgcgtgcagttcaaaaacccagagttgtgggtagaagagatggcattgtctcagaagctttggaggccttcacagacattccttccccattcttcaattt

SEQ ID NO: 54355 - DNA, 327 bp, Populus trichocarpa
  Intron number 1 from transcript POPTR_0019s04620.1 (locus POPTR_0019s04620) derived from phytozome v7.0 (chr-ID scaf fold_19; pos 4804736 to 4805062 reverse strand)
tcaattgttgctgtttttttccccatttgagaaaggtaagtttttctcattaactagtcgattagatctttatttttttctctttagtactagtatagttcattttggtatgtagacttgagcttagtagattcaaccaaaccaaatattacataatgcccatgtctttatttgttgatttttattttatttatatattttgtatagttcaatcaactaggttcatctttctcgttgaaactgtagtaagtttttgactctctgattctaatatttaatgtcatgtgggtttcgtttcaggtgtgtgaattctgaagatttgtaaag

SEQ ID NO: 54356 - DNA, 701 bp, Populus trichocarpa
  Intron number 1 from transcript POPTR_0018s01110.1 (locus POPTR_0018s01110) derived from phytozome v7.0 (chr-ID scaf fold_18; pos 1008755 to 1009455 reverse strand)
atctttcttctcctctttagctccaattcaatctggtaagtttcgttcttctctctcttcctccaaaaagcgacgccgtttcaaattcacctgatcactcctcgtagattagggttcttcttgtcttatttggggaactcgagtcatttgtttgggaacggtgaaatttgtcttgttttggagtaattagtggttaatgatattgattaatttgtttggttaccgagaaaattgtgtgattacttgaaaaaactgaattgatggagtctttacgcttaagaaaatgattaaatctagctgaatctcttgttttgttaaatgtggggttgatgtttgttttgtgtccttgagttgataagtgatagaaagttttgatttttcatttcttggaagaggaggatcggcattacttttttggtggtctaaaggacaagtttttgatatttaatatttttggttttgaagaaagcccatgaaaataaaagtttagaattttgggtattttttgtcatttgatttttcattatttaagttattcagctgagccaagcggttttattagtatatttggcggtggcttggattttcagaatgttgaatgatgaattactacaccttctcagcgacaaatttgtccttgttttttgtgcttttcttgtcgaacagaattgggattgttccgctgcttgtggtgtctagta

SEQ ID NO: 54357 - DNA, 928 bp, Populus trichocarpa
  Intron number 1 from transcript POPTR_0003s17610.1 (locus POPTR_0003s17610) derived from phytozome v7.0 (chr-ID scaf fold_3; pos 16923494 to 16924421)
ttcaggtacatggataacgatgacttagagtgattgatgcacactattttcttccacttcttgatatccatttatgttttttttaggcttttcgcttttcttttggagagttgggttttttttttgtttccattgaaaatagtcattttcctggaaagttttaggttttgatcaagggtgttatgttgcacccttttatcatattaaaaataaataaataaataaagcaagagtggaattttgatcatttaatggggtctcattacactgaatcagtactggtggagtgatctggaccttcatcatggcatgaagatacaatctctggtttctatttttggatccaaaaataaactgaaagaagatggggtttttctatttttggatttatgtttgtttcttaatttggaagtatatcagtagtttttattattgttgttgtcagtatttcaaaggcggtctaatcattggataataaaatattgataagattaaatagataataatccttggataatcttgaaaaccattaatttttatttttttataatgttatttgaactaatgtaaactaacttaatctggatctaaataccttccaatccaggaattaatctatttctgaatttgttttctgctgggtttatgttgctagttgctaaattaaaaaactttatgtgtttgcaattagtataaggtcttccagtaatatttcttataaaaggtaattttgtagctgtgagggccttctagatgcgtttcaagctattaaattttcttccttttgtgttcccttggagtctccgtcgattgtttcatttgtcagttcgactttaaggtgctctgtcttgtcgtcttaaaacttgtgtcgtgtcttctctatgtatgcgcagctagttgagaaggatcctggagcagcaatagcttt

SEQ ID NO: 54358 - DNA, 699 bp, Populus trichocarpa
  Intron number 1 from transcript POPTR_0003s02490.1 (locus POPTR_0003s02490) derived from phytozome v7.0 (chr-ID scaf fold_3; pos 2582302 to 2583000)
ggaagacagaggtagatggtgaggaatcaaaggagtaaaataagaaataggaatacttatatagagagaaatactgtgttttagactaaccatttgttaactacaaagagagacgacaaagactcagagagaacttgaaatacatgtcttgcttggtgggatatttggacattatttctaggacttgttactaacataaaaaaggtggagggtgaggtggcatgagattaaattgatgtcattttgtacgtttttgttctcgttgtcacaggttcactgtattggtctctgttaatttattttttttaagttcgtgatataccttagaatattgtatcatctcactaattgcctacaatgtgtttcaagacctgtcttctagaaaatattctgaaactctatcaataaaacatagttgttcaatcttattttttttctttttgtatttttaagttatttaaaccatatatgaatttttatttgaattatgtattttaaggtgtttggatatttgtattatttatttcacttttattttaattgtgttatattattatttactacttgactaaaattgccaatatataattagttaaaatatttttcttgtaattttacgattttacgattcgagtttacgatccgagtttatattgtatatttcgtgtcgtatcaaaaaagcatttttgacaaccttga

SEQ ID NO: 54359 - DNA, 1054 bp, Populus trichocarpa
  Intron number 1 from transcript POPTR_0019s01400.1 (locus POPTR_0019s01400) derived from phytozome v7.0 (chr-ID scaf fold_19; pos 1220021 to 1221074)
cttcagggatcgccggcttgactactgccttttgggtcagtcctcctcctcctccttcttcttcttcttcttcttcttctttgcctctgaattacaagtctttgtgagcttgacgctttgaaatgcaacttgctgcataactttgactactaatcatcatgaaattaatttctgctacactggaagatattgcagagaccttgtcttggtacagagacattataatttgtagtgaatatttctatggatcttcagtcctttgaattaattagttgttttagtgattaatttaagcaaattttacttactaacctgttttaattcttaaaatttatttaggggttacattttcaaaattttgagaccatatatagatgctagttttccccttgaatataaaaaaagccttttctcttcattttcagtattgaaacatgagaaaatatctctaatagtagtatagtactgcccttccatgattttcttttcttttctttttttcttaaatcatattgcatataaagaaaaaactagattttagtggaattttcaacctttctaaaaaatataaataacaaattaatttttatttagctaattcatatagctcaagaaagagctagctctctcataaattatttcttaccgatattaatttagtattaagatagtagttatttttaaagtgtaaataacatttgtttttattttttaaaatttatttttgacatcaacacattaaaatatttataaacataaaaaatattaatttaaaatttaaaaaaaaaacaatttttttagaatcacctttacaatacaataacaaaccaactcttaattagtttttacccatgacaagaaatgaatcactagtataacaaataattttagaattgatatttttgtcagattattggagctgactaagaacaagaacgtaatagttttgttttgttcttaagatttcttccatgacgtgaggagagaatctttcaaaaattggtggtgagaaatttctcaagttaactgatgcaggtaggtccaagatcatcaa

SEQ ID NO: 54360 - DNA, 373 bp, Populus trichocarpa
  Intron number 1 from transcript POPTR_0019s05250.1 (locus POPTR_0019s05250) derived from phytozome v7.0 (chr-ID scaf fold_19; pos 5520536 to 5520908 reverse strand)
cttgcgatctctctccctctctccctcaatttcaggtttgctagggtttctaaaatttgatcgattcgattcaattacctaattgtttaattgttttagggttttagggtttttcttgcttaccatttcaattcactttctattcattcaattttctatcttcaattcaattcactttgcttattattattatttttaaaaatcaattccatcaaattaccctaatttcaatttcatcatttttatgtgatcaatcaatgtagtgagtagtgggcgattcaaattagtgatgttttctttcttttttaatgttttaaagtcgtttcctttttgatttgttgttttgtttgtttggctgttgcagttggagagc

SEQ ID NO: 54361 - DNA, 293 bp, Populus trichocarpa
  Intron number 3 from transcript POPTR_0006s09500.2 (locus POPTR_0006s09500) derived from phytozome v7.0 (chr-ID scaf fold_6; pos 6983506 to 6983798)
aaacccttgctaagcatctttttcactgtaagcacttcttttcttttgaattttaatgtgtttgttttggctgttgaaattctttcctttcatcttttattgtttgtttattgctaggagacccttttcttatggtagccaaaaattcccaacattgaaaattagttgatcagatttgattagggaatataatggtatttagggttagagttaatgaactttgaactggtttcgtcctcgtatgctttgtttgaattcttgatattttggtcattacaggggagagccagccc

SEQ ID NO: 54362 - DNA, 667 bp, Populus trichocarpa
  Intron number 1 from transcript POPTR_0006s20560.1 (locus POPTR_0006s20560) derived from phytozome v7.0 (chr-ID scaf fold_6; pos 19591854 to 19592520)
ccaaagggttgtccatgtttagctaaggacgaaaggattgcagaagattacataatcactaactcctaatgttgagctaaagttaattgcttaggagaatgtttaggggatgattcattcccagatcaaatatatgcttgcataaatcttaccacttcttatgcacctttttactttataaacattttgtaaacaatacaaaaacatacactggataaacatcaataccacttcctcattttctctaaatcttgcatactctcattggatttgtcaggatgccttgatactgagtgccataatgtccacgagcttattgtagctcaaactgcttctcatcaaaccttatatgatgtctggcaagcgttggaataaaatctttgcctcgcaatctaaaactcgtgttacttatcttagctctcaactcttcactctccgcaagattttttcaaaataagtgtatgcatcagaaagatttaaaggttctcaatcagccactgattttttcttcaacatcagaaagatttctgatgaactagccattactagccaacctttatcatctgatgatacaatcacttatcttcttgctggacttggacatgattacgactccttggtcactgtcacagtgtcaaaagtgcacgaggtgcacgcttcggcaggc

SEQ ID NO: 54363 - DNA, 459 bp, Populus trichocarpa
  Intron number 2 from transcript POPTR_0018s04360.1 (locus POPTR_0018s04360) derived from phytozome v7.0 (chr-ID scaf fold_18; pos 3670589 to 3671047)
gaccacacaagttaaacagcctcacctatcacgtatgcttaaattgatttttctaatttatttacgaatcacacttgtacttttgcccttcgttttctagcttcttttcttctcataaaggatggcacatttcactaaaagaaatcaggaaacggtactcatcagaaacacacaagtttctctcaagcataaaaataaacaaagatgacaaaacagggtggtgaaataagtagtgccagcagataaaaacaagattcaaagccatggcataaaatcttctgatctagaggcaccagctttagctaaagcatcaccaacgttgaatgcttttcgaagccgagtgaaatatacattatttcttttttactttcaatggcaactttctttatcaataagctgctaaatgataaaaactagaccattaactcctgttattaattttgttggcagacctgtcag

SEQ ID NO: 54364 - DNA, 935 bp, Populus trichocarpa
  Intron number 1 from transcript POPTR_0014s18900.1 (locus POPTR_0014s18900) derived from phytozome v7.0 (chr-ID scaf fold_14; pos 16507428 to 16508362)
ttcctcagtcagaagggtggcttttctgataagaagtaatttattcctctgtttaagtatttgttctgtctgtgtctgtcaaaataactatgttggtgttttgctagcatttggatccattagacagagcagactagtatgtgcttatgattgtctcaagtattgaagagtatcagggatttcgaggacgatacatgaagcttgaatgtaatttagctagattgatgttaaaaaccggattacaaaagcatatgattctatttgtgttaacagtctattgggatttcagccgagtccctcacaatattcaattaaatgccattttaaactacctgtttgtggtgcctgcttgtggcacgcactcgatttagctgtaaatggtctgttctggcattggaatggtggattttactcatcctacattgttatgttcatctgcgttttgtttgtgtttgtgggggaaaaaatggttttgtatgcttttgttataatctttttcttgaatttttctccttgaccgattgttccctctccaatccttcccaacccctcttttctttcattctggttttattcaatggccctcgatttagctcactaattataacatgtctattgggatacaaggaatgttcttatttagaatgttaatgacagagctacatcacacgcagggttgttttttcttgaggttgcttctaagtgaaaggaagagcttttcttccttcaccacgttctgcatgcgtttgcagctgttaccctgtttgcatcttttccttgtttcctagtgctcatgatgccagttgaaataaccaataatcatatacttgtcgatgaatgtttgatgaatccacctcttggattttgattctgagccctatgagatatttttgagtatcctgaagtatggatgtattgtttggtatttcaggaaa

SEQ ID NO: 54365 - DNA, 585 bp, Populus trichocarpa
  Intron number 1 from transcript POPTR_0003s22190.1 (locus POPTR_0003s22190) derived from phytozome v7.0 (chr-ID scaf fold_3; pos 20074334 to 20074918 reverse strand)
tctaaaactgccggttgtcgagagcttttaagtatgtaagtttctatacaacaggctttttatgattgatatgttctttttgtttttttttttgttctaaataatattgtgtgaaaaataattttctcaagagaaaagaattatcaacattatttgcacatttctttatcatactttttttgtcatgataaaatatcatttttttctaacgacaaactcttagaattcttttcacaaatataaaacttattaagcaaatttcatatgaaacaatatataataatgatttattttgataattaatttatatcatttgatacaaataaagtggaactatacaaggcacattatcaataactttaattaaagaaacttaatacatcgcttaatttgtatcactcatgtggtcgcgcatatatatatatatattactggttaaattgttgctagtgaaggcaaacttaaggctgtaagtttcatctcttttttgggtttcgtaattgaatttgttttctcagtggtaacaatttttttgatctgcttgttttgttgtaatactagccatcatctcagttcagtcacagg

SEQ ID NO: 54366 - DNA, 570 bp, Populus trichocarpa
  Intron number 2 from transcript POPTR_0006s19590.1 (locus POPTR_0006s19590) derived from phytozome v7.0 (chr-ID scaf fold_6; pos 18631269 to 18631838 reverse strand)
agctcatcagacatttccaaaattttgttggagaggtactaatgaagtatttgatgtgcttatgccaaaagaaaataacaataataatacacgatacaagaagattgatgtgcaatatattctgaaactcctaacgtctcaataactgctttgagtgtggttggatacttttttgtgtttcattctatttaagtgttaagttctggcaaagggttaataaaatgaaaaaaaacaaaagaacagaaaaagagcctgtgggagattttctaaaccaggctggactagatctacatgtcttaggctgaccaaatttgagagaacagcgcaaaattgcttataataatagcagtgaatattagcttttatactttcaaacggactcactgaaggccattcagcaacaattcacaatcgtgctattttttaccagtattttccctgcatgtcatgtgtctgttctcagttttcataatcttagaaatgttgattatttcttcattgaattgtgcactataactttcattttatgatctgatttgcagcttgctactgaggagagcaaaaacttcc

SEQ ID NO: 54367 - DNA, 847 bp, Populus trichocarpa
  Intron number 2 from transcript POPTR_0003s05040.2 (locus POPTR_0003s05040) derived from phytozome v7.0 (chr-ID scaf fold_3; pos 6219999 to 6220845 reverse strand)
tcaacatctccttcttatccacggctaaaattcaagttcactttcgactcttcctttcaattacttcattttttgtgtatttattcttacatgacatggccgcatagaatgaatcgtcaagacttgacttttgagttctacttgtactggaaactcagagagtgaattgggagatggaggggttatcattcaaatcatccaggctgacaagctgttaggccgttagggctaatacataatcaaggtttacagaaaggtttaatgcagggattcgggaattattgaagtagtgctagggaatatgatctattagacaaaatacctcttaggcaataaagacaatagattgtagttgaaaatgtatcagtgtaatcttgcttttcctaatcataaaactttcgccacaagtagctatgtttttagatgtatcagtatgatatgcacgccaattcagatggcaaacgttttataatgtattgtgttcactagtttttcccagaattcgtttgtccttggtagaaaacttacttgttcagggccttttccctgtaatccttcagtgaatagtatctcctttatcccaatcccttcattctttgcatctccaaaggggccggtgaaattgcaaatatatggacttcaccccaggaaggatctctggtgtcatcttcaaaggaaattgtatcacgtgacaaaagggagcattcaaagctatacttctggagaagtagattagagggaaaacaatcatgcatttgctcctttttttcttactcacttttcctaaatgtatgttactactattatggcaggaagaagttgaagtagaggcaaaggttgtggggga

SEQ ID NO: 54368 - DNA, 805 bp, Populus trichocarpa
  Intron number 1 from transcript POPTR_0013s12150.1 (locus POPTR_0013s12150) derived from phytozome v7.0 (chr-ID scaf fold_13; pos 12794259 to 12795063 reverse strand)
gaaggtgtgttgtttctgcgcgcatttattggttttttggtactgtagttttgtaggttttttcttttttggaaaatttgagtttgatcccggttttttttgctatattggtgatttgtgaaaatgggtttttgtttttgctttcattaattgtttggtgagtgaaggatgagtttctgtggtcgagtaaagtactttgataatgggtactggtgatctcattgaattcttcaatttattgcttttgatggtgaatttgaatgtgtgatgtaaatttgaggtaaaggttgttgatcttttagctcaagagttaaagattctatgttagtttttactgttcgttactttttagaattaagatgatagttgagatggctttatgtgtacctgagaatttgcctattgagacattgcctttttgttctccactttaaaattcatatctctagagggatgtatcaaatgctttaagaatctgtacttgcttggagatacattttgttgtggatgtatatccttccatatacattagataatgaatggatggttactgtgagatgattcctgtcttgcacattttgtgcatttctgccttaaaccctgcgctttcttcttcttttttgagaaaaaaaatctcttttttcttcttctttcatgtttatagatgaaatgccctgaagcaagggtcagcctcattgttcctatacctcattgacttatctctgtatataatgtgccttaactagtgtattgttatcagttgtcaacccctaacttaactggtttgcttgcttgaaaacaggtg

SEQ ID NO: 54369 - DNA, 726 bp, Populus trichocarpa
  Intron number 3 from transcript POPTR_0014s15620.1 (locus POPTR_0014s15620) derived from phytozome v7.0 (chr-ID scaf fold_14; pos 11643033 to 11643758)
tcattcataataaggtgatctatccaggttttttttaactgtgcgcgttactgatatttgatgcttctatgcctgaagcaagatgcattgcagaattccatgagcccatatgcttgtttagtgacatgatttttcttgcttgttcttgtcgatgtgaacaatcttcgcaatctctgataatttttctttcccatatgatttattaaatgtataaattactttaaaacttatagaatggtcgtaaatatcgcttttggtttcacattaattgtcatctgtcgtggtgctgaaattcactttcttgactattatataccattgcctctgttgggaagggaaccatgtacaatcaatttccaaattccaaatgacaaactgagcctatatgcagatagacttcgcaaaaaatgtttctgaacctggaggatttcttgtaacttatttgcgacacccatgctgtagagttcttttgtttccagtattgtagttggtatgctggtttatgtgggataacttttatatccccatgaagtactgggctgagtttttccctataatatttggttttcttcttctgtatctctcctttctaaacttgcataggtttctttgtattctgctcttttctttcaataactttatttgtcgcgatggtctaatgtttatgcttgtcttttgcaaatattggcaggatcgcattatagctcgtcttcaacaaccatattc

SEQ ID NO: 54370 - DNA, 360 bp, Populus trichocarpa
  Intron number 1 from transcript POPTR_0014s12860.1 (locus POPTR_0014s12860) derived from phytozome v7.0 (chr-ID scaf fold_14; pos 9477571 to 9477930 reverse strand)
ccacttcctttactttttcttcgattttcttaaaggttagacttcttcttctctgtctaagctaaacttgaagaagttttcattcatggttctgtgaattttatctgttgaatagttgctatttcgaaaaatatggttttgagtatgggatttatgtaattagcttaatcgaccagttgggtttctatggagaatccatatttcagtcttgcagacgttatattatgattggggttcggaaattaggttctggttttaatctttgtagaatttgtagttatttgtttcggacggtctggttcaactacatcccaggttctgaattatcaaattttttttttttatcacagtgtactccaa

SEQ ID NO: 54371 - DNA, 400 bp, Populus trichocarpa
  Intron number 3 from transcript POPTR_0014s09060.1 (locus POPTR_0014s09060) derived from phytozome v7.0 (chr-ID scaf fold_14; pos 6688755 to 6689154 reverse strand)
ccattcaattgctggaggaacaggctcaggttgctttacttgtcaatttgtcattgccttttcttgtctatttaagttctgaagttttgatgcatttgtgtagtactctcacacaaactatattactgatattttttgttagaatctgacaagtggtcatgatttgaacacttgaattaacacagttctggtaagcgtagattggttccaagttagattgctcttggtttataatagataatttgtgaatcgtacttgataatattgtggccactggcacataatcaaaatggctgcacaatatgtgaacttattgttgctaatatatgatggaacccagatagagctcttagtttctggtttgcttacttcttgagtgtctgcattatgtattgaaggt

SEQ ID NO: 54372 - DNA, 1019 bp, Populus trichocarpa
  Intron number 1 from transcript POPTR_0013s03190.1 (locus POPTR_0013s03190) derived from phytozome v7.0 (chr-ID scaf fold_13; pos 1949846 to 1950864)
gttcatctctctctctctctctctctgcgaagaaggtgtggaaatttctctgtttttttcttgagaaatcattattacaacgaaataaaaatcaaatcaaattaaaaataaataaataaacgttacagacacgcaattcaataactctctttcctatccctcccctctctctttcttataaattcactttcacctcacccctccttttccaccctccctccctccctctatcgttttatgctgtgtccagtgtcgttttgactcgtttcagtttgtgagtgtcctcgagtctgtttgttttcactccatcggagaagaacacgtttctgttttatcttttttttttgttgctgttacacgctatttagagaatctaaacggtgtcgttcctcttgactcgctttgattttctcagtagttgaattgggctcagttttcagtttcagctctccgtttctacactgtacgtctctccgattcaatacgctgtcgtgtttctgagttaagttcaaaccgagtcaaccacgactcgagtcgatttcaatcagagtcaaccctgtgtgtgtaatgattttgattgcgatctgcgttaataattaaaaaaagggaaaacaaaagagtctactggagtcggtactgattctactgactgagatttttgtgattttttttttaatttattgctatttacttttgttttgtttttaaattggggattgaataatccgttgatttatttagttgtttagtatttgattaaaacaggggtggttcatgccatgattatatgacactgctataatttatttatttatttgtttttaatttttatttgatcatgtgaaaatgaatcagaaaatggatattgagcataaaaaaactacatattatatttaaataatagtgtaggtgtatagattggggacttttggcatgtgggttgggtttgatctgtatgaatacttactttttctttggttataatgcagagaaagaggagtcacagagctttggatcct

SEQ ID NO: 54373 - DNA, 554 bp, Populus trichocarpa
  Intron number 2 from transcript POPTR_0013s03190.1 (locus POPTR_0013s03190) derived from phytozome v7.0 (chr-ID scaf fold_13; pos 1950930 to 1951483)
tttggaaatcctgcccaaggaactcaaatttatttgtgagtaataatcattaatactattaaaacacacatggccccatttctattatttcttattcttggaacattgatgtatggttttattcttcttttcatatttgagtttcttttcttgttgactgttaaaagatattttatgctttgtttggtgaatgagaataaagttggtgaaggataataaaaaggtttatgaatttgtaattgcatcttttatttattaccttctctgttgtggattttgctcttcgctggagaaaaaggtttgcctctgatgctttcgaagatacaaaaaccatctctgcaggattttattttacaggactggaaacaaggaaatactcattttggggttttctttttttaattaaaagaatttaagcgtggccttggatgctatctgggaattgtttatgtgaaagtggaaattatacatgtaatagctggcttggtttgattggactttagcttatggcatgcgataatgttttctgtagttgaagtgaagaagcaaagctc

SEQ ID NO: 54374 - DNA, 889 bp, Populus trichocarpa
  Intron number 4 from transcript POPTR_0013s03190.1 (locus POPTR_0013s03190) derived from phytozome v7.0 (chr-ID scaf fold_13; pos 1951679 to 1952567)
cattgtcgatccaaaatcaacttttgaatttattggtaagtttttctatttttatctagctaattgaaacgacatccttgtgaaatactgaaagcatgtgtttgcgtgcatgctcgcatgctaggctctataatacattgattgttcttgagttgaaggttcaagtggcgtggaatttggactggctgcttttaagactctgtggttatcatctgacctctgctgttttgtgttctgtttttctgctaatttatcctcaattcaataatggacattgttattggatgaattttagttttgatctggtttgtgggacattgattctccctatgaatttgcatctttgcacacaacttctcctgtcttgattgaactgttgattttaaaaatgagattggaaggtaatttggcttagaaactataagataaagggcagtaattaagaatacgtttgggaacgtggtttgcaccgcgttcccaaaaaattcaatttttttttttttgctaaaatttaatatgttttgtatgttttagatcgttttgatgtgctgatgtcaaaaatgatttttaaaaaatgaaaaaacatcattggcatgcatttcggcacaaaaagttatttgaaaagcaaccgcaaccacactgccaaatactctttaaattcgtatgatgcttgggttgtgaaacttgtgaaaagagggtaatgaagctgctttttattatagtttgcacttaccattgctgtttcattgttgtccccctttaatttcattctataaatcatgtgctccttgctctttctgcagcatgtagtttttaagcagatgttattttcttcagttatagtctttctaatccccttagctttggtgttaaatgctatgcagtcaca

SEQ ID NO: 54375 - DNA, 391 bp, Populus trichocarpa
  Intron number 4 from transcript POPTR_0014s02100.1 (locus POPTR_0014s02100) derived from phytozome v7.0 (chr-ID scaf fold_14; pos 1829817 to 1830207 reverse strand)
ccctcaacctcagcgaacctctgagtaatccatctgtcatttttttcatctagttgtctgtaccattgctcttattcaaatgattaacttagaatttgtacatggagtgatgcctagaggaattccattgaattcagtgctgttttgatgtgaatctgcctagtagaatctttcgttcataacttttggcactgagtgcttttcaagtcccatgattggttgttttcttattggactgcgattatggagcgtgctgagttaacagaaaggaaagctcataaaacagatgaatttacaagtaatgagttatgatccagactttgaatagacctgtaaatgcttcttcgtttgttcaggtaaagaagctgaatacacgatcgaggaggacaac

SEQ ID NO: 54376 - DNA, 909 bp, Populus trichocarpa
  Intron number 1 from transcript POPTR_0014s03900.1 (locus POPTR_0014s03900) derived from phytozome v7.0 (chr-ID scaf fold_14; pos 3117443 to 3118351 reverse strand)
ccaaggtcaatgacaatgccaattctccatctcttttacattttctctcaattttcttgctatatgattgttttaaaaaatgggttttaatcatttaatgattttatcccaattttatcattgtataagttaataaactttctgggaactgtggctttttggttgctggattgttctttatattctcattttattgtatgcttctctagtgattgcagccgcactgaaacgggttttcaggattttatcagtaaatatccatttttgtacatggtacagcaagctgttttatgagcaatgagtgtgtttgattcttgtcaattctccaatacacaaacatttgagagaaataaaaactgaattaagattatgattgttatagttattgctcattgcaactgtactggtccttgttccagtacagttttcatctttcttgagatacattgccgatgatctagttccagtccccatgaagcaggtttagggaagttgcaatactttttttggatggacaaagtgttgtcagtagtaaaaacctgcacctctctgactgcaaatccaaggacttgtgagttaaatcaaagcagtagattttttgaatgagtacatacctttcaatgagcagaagttcatttttcatgcgttcatcctaattctaagtgatacaatagataccaaagttccatgtccacaaatgaggatggcaatttatatctgcattgcagccctgttgcacagcatgtacttgttataccataatctggcctttgagttctgattattgctgtgatcatgctactcttttgcattcgttttttttttccctgcatgttatgcatcctttgtgatggggctttctatcactgtataggaatatcttcaaggcaatccattgtggcttcaata

SEQ ID NO: 54377 - DNA, 926 bp, Populus trichocarpa
  Intron number 3 from transcript POPTR_0019s09050.1 (locus POPTR_0019s09050) derived from phytozome v7.0 (chr-ID scaf fold_19; pos 10627758 to 10628683)
gtggggtgggtttgatgctctgtatgaccagtactctgaccggatgttatttgattggatgagtgtgcagtagcttaatgaatctggtaaatgtcactacgctatgatgcggttctttctgattgatttgtgttttttttttattgcaattgattttaattagcatgctttggtggtatgaaatctagcttgctgcattcccttggagacttgggaaaaaattattctgtgttttttccctcatgcagccatgcttgtttagtttatctgtccatgtgagtgtcaaattctttgacatatgtttgggtcgtctgattcagaattagcctacctgaaacattactgagattactagaattgccacatttatttttggatttcttagtgctgttgtgttccaattgtatttagagcttgcctatatgtaacactaccataccattgctgttccagtcctttctcatgcattccttctttttttttttttcctattaaggttttgaaagtatggttatccgataaactcctaactacaggattttgctgtctctgcttgcttttgttttcctttttcagtgctgctcttgtttccagcgttttaaaatagtttctgatacttaaagagttattcctgtatggtgaaacaattttccagttttcatcagaaataaatgttctattatatcgcaggctgctatgcccccacaactccttctccaaggcctgcatccaagaagctggcatcacccttccgctgcctttctctgaaaagctagaagaacctgatgaaacagagcatctgcagcaggtacagaatgacccatatcaagatattgaaactgcatatgttgctcaactttgctcaacctccactgccaatacacttaactgattcagaaaatatcttgccaacccgaaaaccctgc

SEQ ID NO: 54378 - DNA, 293 bp, Populus trichocarpa
  Intron number 1 from transcript POPTR_0013s05870.1 (locus POPTR_0013s05870) derived from phytozome v7.0 (chr-ID scaf fold_13; pos 4242481 to 4242773 reverse strand)
gattaggtatgtacacatatatttgttccctactagcatggttttttgtcttgttttttcgttaattcttttcccattattttttcttcgtctttgttgcctctagatcataaactaactatatgtacgtaggtcttgttgcatgctctgcttctccattatgtcaaagtcaaagctcaaaaatggtgaatcgtttgttacatgcacgttctgttcttccataattttgatttctaacgtatccttctgtctttgcaggtgtggaggaggtcgaggtcctttctaccagtgtt

SEQ ID NO: 54379 - DNA, 705 bp, Populus trichocarpa
  Intron number 1 from transcript POPTR_0013s10320.1 (locus POPTR_0013s10320) derived from phytozome v7.0 (chr-ID scaf fold_13; pos 10341070 to 10341774 reverse strand)
gcctacaacgatcatcagagaagggagaatcccaggtataatctctcgctgttttgcctaacgtttcttgcttggtttactttgtttctgccatctgcaaacaataaattttcatttcccatataggttattttaatattctacactttattattaatcagataaaagcctcagtcagattacttaatgcgtaatcaaaggcaaatgccctaacttttgcagcaaattgtgtatgtttgtgattaagatttaaagaaaactaaaaatgcttgtaagaaagtgttaacgaagagcaattttctccattgaacgtaatgccatttgtgtagttttatgttgattattaagagattttcagaatcctattggagccctgaagaatttgaaatatagaaccaaatccaattgtttttagtgacaatcagtttgattaatagggtaattaacatgaaacatactagatcagaaccctgggtattcaccagagaaactataaatttaatctagttcaattagataacttgcaagttttttacccagattgcactaattatcaaaaaatggagtgagttactgattgagatgtagaactgcatttaattttaaatgttgaaagttgttcttcggttaatttgatcatcactgttcaatgattttttcttttttcccttttgcgttttatttatctgtaatatctaaagcagg

SEQ ID NO: 54380 - DNA, 844 bp, Populus trichocarpa
  Intron number 1 from transcript POPTR_0003s05070.2 (locus POPTR_0003s05070) derived from phytozome v7.0 (chr-ID scaf fold_3; pos 6273652 to 6274495 reverse strand)
cactcttcaaacgctcccactttctcccattaaaggtaagcattatagattttaaacgatctactttgcaatttaatgagctttatggttcagttcaactgtccaactcaccttgcttatttcagtggatatattagttgcttgtagaacctgtttgtgttcattgccaacattttagggtagaggtactgcaagtgtaatatggtgagcttgtacatgttgagattatgtctaagatgctactctttgagacctgtattattgaaaactaaaacagtatcatgggcatgaggggtatgctgttaccttggtgaaaagtggggatcttactgatgttgaaaacatttaaatttaagaacccatgatcgatgcaaaatgagtgaaaatgagaacacgagttggaattttaccatacttttaagtgataggcttttttataaaatgatttatggtgagctggaagcaacaaactatcagtttctcttagaagaaaaaaccatggatgatgcttttggtgtttgtcaatgaggtagattttttttatcacatatccaatttatggaaggtttcaattgttgattcagattttttattcttttttgtgtttttaagattcaacattgtatctacaacattttgcacattagtgattttagcaatggactatgcttatgaagtctgttgcatggccgaggaactattttgtttttgaaatattgtagcaagttgctgtagttcactcagttaaactcgttatggtgttgatgcttgtgcttttgtccttgagtctcgataatattgctctgcagacagacagaactgtgtttctgttgttgtgagggct

SEQ ID NO: 54381 - DNA, 972 bp, Populus trichocarpa
  Intron number 1 from transcript POPTR_0013s09620.1 (locus POPTR_0013s09620) derived from phytozome v7.0 (chr-ID scaf fold_13; pos 9452631 to 9453602 reverse strand)
cacctttggaagtccagataagaacacaggtatgaagtgaaatttaaaatgataatgcacctttggaagtccagataagaacacaggtatgaagtgaaatttaaaatgtcaattctgtgatacggctcataaaattgcaatagatcattttttagtgctgttggatcaatttttttactgtaaaaaaatattcaaatattgataatatgtttttttaataatctttttaattatgaacttaaaatataatacatattggatgatatttttttaaaaaagtattaagacagtgacatattgaagcaacccgggttaatttgttaaatctgtgatataagttatgagatcgtgataactctatataaaacaaattaaaataaattatgaaagccaatttctactcaacctaatattgaaagatgaaattgaaaaaagagaactaaattaaaaaaaaaaaaaacgaaaaatactacttgagtcaaccgagttaccttgccaaaccagtgatctaggtcatgagatgaatcaaaaaacattatgaagcctaattttaaatgatcaattagaaagtggcaaaaaaagaaaaagaaaaagaaaaagcagcaaaaataaaaaaaagattccagtcaacttgttaaacccgtaacttgggtgatgagattgagataaattcatagaaaataaatcgaaaaaaattacataacttcttttctaaggatctaatattgaaggttgaaatctagaaaaaaaattaaattaataaaaccagtacataattacataatctaacaggaaaaaataaattgcgaagcaaacacaattcccagaacaatttaatattgaaagataaaaaaaaaaggttgatggataaattttttaaaaaaacaatgaagtagtattatgtgggtgtgaatatattgatttggccacactatgttttgttaataattaatatctattctctcacagaaa

SEQ ID NO: 54382 - DNA, 510 bp, Populus trichocarpa
  Intron number 1 from transcript POPTR_0006s24490.1 (locus POPTR_0006s24490) derived from phytozome v7.0 (chr-ID scaf fold_6; pos 23081443 to 23081952)
agggtctaaaatctccaaagacccccacccccaaggtataatctttatatttgttctgagtgtttgaggggctagtagattataagatatgtggtatttttcctaattttgttgatgaaatacgttggcagtggtctttatggtttgttggggttaaggctctgtgtatgttcttaataattcttggtgtttaaatgtatggagttgttgtatttgtttggaaggttaagcatatgtccccaattttagaatttcttgagtatcaaaagggattttttgcctgggtttggtgcagtttttggaaaaagcataagtttaatttagctgatttcggttttcaacatgctcttactgtgtccttcttgttctcgtttgttctcgtcggtggctctgcttcttgtcggtggctttgagtctctcttgctctcatgactttcattctcactttataaatttagtttcgtgtaattatccaaattgatagttttattcgtgagaaaagcagttagc

SEQ ID NO: 54383 - DNA, 436 bp, Populus trichocarpa
  Intron number 1 from transcript POPTR_0006s08920.1 (locus POPTR_0006s08920) derived from phytozome v7.0 (chr-ID scaf fold_6; pos 6589740 to 6590175)
accacctgctgatcaagcagtaccacccttgccaagtaagtataaagaaaaatcattttttgatgttttgttgtttgtaagaagtaccatcacgtgattctggcgatcacgatcgaaggcagagatccaaaaatgttattccatcaaggacttgaaggttcttaatttatatgatccgaccattcgggtctgattttaacaactatagtttccctctaaaaacaaggggaaaggatgatatacctaagattctatcagtaattcaaaaccattatattcggagaatcttaaacattagtttcctagtagtaatatttttagtttgctaacaattatggcatattttaattttcttttcttttctttttttctcacacacgattatgacatctatgttttccacttatgaatgctttactttggacaagtttaagga

SEQ ID NO: 54384 - DNA, 734 bp, Populus trichocarpa
  Intron number 1 from transcript POPTR_0013s06150.1 (locus POPTR_0013s06150) derived from phytozome v7.0 (chr-ID scaf fold_13; pos 4549946 to 4550679)
gactagtccagctatcaggtcgactcgctggacaggtccaaatttaataattatgtttaaaatattatcatttcaatttttttataaaaaaaaacattaaatcaatgttatatatatatatatatatatatatatatatatatatatagagtttaagtttcaagatacagacaaacagagtttaagtttcaattcttttacaaagtttatttgaaactttaaagactagattgacgggttatcattttaacccaacaaacttagcttagtttaaaataaaaagtttcatgtgtagttttttaacctggcctgatagccggtccagttcaaagtttggattccaagtttttatcgggctactagatcatttaggtcaattttttttaaaaaaaatcaaaataatattgttttaataaaaaaaataaaagtcaatgagttataacgagtttttgaataaatttttctaaattaatctgtcagatcagttggagtttttttttttttttttttttaaaattcggtttagttccaacttcaaatcgatccggcaggccggccggatttcaaaacaatgataaatgtaagaagacgcaggcaattaactagagtagtgctaacaagaagaacaacttcgttgaaaacctactaccaattggattccttcaggtcctatctgagttaagctcaggcatctgctctctctttcatgccctacagctggccattaactcttt

SEQ ID NO: 54385 - DNA, 733 bp, Populus trichocarpa
  Intron number 1 from transcript POPTR_0013s09990.1 (locus POPTR_0013s09990) derived from phytozome v7.0 (chr-ID scaf fold_13; pos 9971151 to 9971883 reverse strand)
ttctctcttgtctcttcctttcgcttaccgactaagtaagtaatctccttgccttttatctcatacgacgatcaaagttttcaaatctattcttacaggtgcactgttatgtttgcctttggagttctttgtcttgtgggttctcttcgtttggtttggttgcagaggtaacagtgtataagaaaaaaggaaaagactttacctttttcttgtttgaatcttttattatctgggttttattttttatgaaatcaaaaatgagatttgaaatttcctaaccaggtttacttggttctttggtttattttgggtttgtgggctatattgatggagatctcactctctttgtgattatgcatttttggtcattaatatttcatttatcggaagagcttatgaatttgatgtgtaacaaaccacggttcgagcactgtttatgtcacctggggtttggattgatagccttagtggcatgctaaagcgaagaaaatttgtactactgcagattaatttaagcactgttcttgtctctgtgtaattgtggagcagcttttgtagtataattactttatggatatagatagtcctataagttttgcttggtaatggaatataagaagcttgttttaagaataagctttgtatgattagttgcgttgttactttaaaaaagcatgaaattccccaaccagaccgtgtaaacatttatatgttgtaggtaatctgatctggc

SEQ ID NO: 54386 - DNA, 405 bp, Populus trichocarpa
  Intron number 2 from transcript POPTR_0014s16850.1 (locus POPTR_0014s16850) derived from phytozome v7.0 (chr-ID scaf fold_14; pos 12973405 to 12973809 reverse strand)
gagaaaaacaaggctttaaaggaaaatattgataagttgaacactacactagctaaattcattaaaggttctaagatcttagaaaccatacgtgctagttaaagatgagttttcaacgaaagagggtttaggctatcaatctaaaaagaataaaaatatttaaaaaatcacttcgttgaagccaaaaaatcatatgacacaaaccaaatatgtaattattatagaagcataggccatttgatttatgcatgttctatgaagaaggaaaaagttagtaatatgacttgggttacaaaaggaaccaccactaaccacaaaaggctcaagaaggtatgagtaccaaaaacctcatcttgattttgtgtatgtatggatcaagggaatatagggaggggttattggata

SEQ ID NO: 54387 - DNA, 334 bp, Populus trichocarpa
  Intron number 1 from transcript POPTR_0003s22140.1 (locus POPTR_0003s22140) derived from phytozome v7.0 (chr-ID scaf fold_3; pos 20057691 to 20058024)
attcaacttggcaaattccagcttcaggtgtgaagcacaagcataatgctttactttttttttctttaaaaatgagaaacaaagggaaaacaattcagttgaatcccaattgccccattctttccatcttctacattcaaagaaatttcttatcgatcactagacgattatagagccctgatgacagattaacccttaagctgcctatcagtataagactggagaaaatcaaaggtataacacgagataacccctaaaagatgcttctgtgtgttgatatgtgaagggctctaatgaaaaatggagctgacaaattcttgtgcatgaaattcag

SEQ ID NO: 54388 - DNA, 1025 bp, Populus trichocarpa
  Intron number 1 from transcript POPTR_0003s04150.2 (locus POPTR_0003s04150) derived from phytozome v7.0 (chr-ID scaf fold_3; pos 4840759 to 4841783)
ttctttcttgctatcaatcactcgctcactcccaggtctctctctcgctctctctatgcaaaaatgtagttacttttgttgtgtgcgtgcgcctaagatgctgctattgcttgctgtcatggatctctggattggttgatttcttgatttttttatagctgggctatctgatttttacttattgagatctggggctgatcggttttttccttttgttggtaaagttttcatttttttggttttccttatcgtttcttatgagctgttagggttaggttctggaaattgcaggtgttttttcttttcaacttggtctggttggagataagtttaacacaaaaagatctttttatgagattgtttgataatcttttgatgctgcttatgtcatattattgcggcttattttgtcagaacgctttaatttaatttaatttaatttgatggatatgtaactcgttgcgcaagtcccacactgctgtaataacacatatatgatttatgagggatggtgtcttaaaagagcaacaaaagtttaagtctttctggactatttcttgcccttgatcagaatttttggaggggtgggtgaagcagcgtctgatggttaaggatttatgtccgaaatatcagttttctgtttgccccttttgtatcttctccagacactgaaacagaagtttaatgcttgtacttcactcttagcttggtttgcaagtttggctcttctgtgacattttattctttcatttcggttggctataatgaaatattcactatcttttgtgcttatggtaatgaatatttctgctttatttttattcttgtccccccacaaacagaattatgtgatagcttgaacgcattctatgtgttccttttttctcatttgtcaattattggcatatgatagatgctgaaagcagaatatgttttacctgttcagttttgaaacatgcatgctatgaaccttaatccattagagtaataaatcttccctctgcatatatttccttaatgcagtc

SEQ ID NO: 54389 - DNA, 299 bp, Populus trichocarpa
  Intron number 3 from transcript POPTR_0003s04150.2 (locus POPTR_0003s04150) derived from phytozome v7.0 (chr-ID scaf fold_3; pos 4842048 to 4842346)
cctgtaggtagctttataactgcagatgtactttcattcgtcatcttaatgagttgatgccaagacatatataacttccctagttgcagttgcaaacctatcctttaggttcttttcttctgctggaaccttgatttttgacctatgattacagttttgattgttggaaaaaaaacatctttgcttcttatactatgatgcttaaattctggtagttccatccttttcttgttctgattgatgcatcctaacttatttttcaaggttttgagaagccatctgcaatccagcaaagagga

SEQ ID NO: 54390 - DNA, 710 bp, Populus trichocarpa
  Intron number 4 from transcript POPTR_0006s25040.2 (locus POPTR_0006s25040) derived from phytozome v7.0 (chr-ID scaf fold_6; pos 23488450 to 23489159)
ttgttgatacccaggtgagtaactaataggtggaactggtattctatttgggaatttttttaataatcctttatgcaccatagtgcatgttcttcaagcatcgacagtaagcactgaggataaggtttttctgtttaattgatattgttaatttatcaaattatctatagactagtggcagactgttaacgagtcttactgaattgacctggcaagagcatattctgtgctctttatctcttttgtaatgcacatttaaactgctctttttgggagctgggggggttgccatttgccaagttggatgcacactaagttaactttggggttaatctagaacctctttggtgaagactgtatgaatatggtgctcatgagggcttgagagttacacttaaaaaataaacaaagtagagtgttgcgaggacattatttaaccatttatatttgatttacactttgatgtatgatcagctttaggtgtgcatcataatctctattagttgcttttagcaaagatcaattataattgatactgctatgcctctcttttagtttttgagatcagatttgagcattcactatcgttgtggttattgcttgtattggcatagagaattatcaatctggagctgtcattttaattttaatacatatttgtcattttgcttgtagattgcttattctcttatagaggagcaagaaggacg

SEQ ID NO: 54391 - DNA, 470 bp, Populus trichocarpa
  Intron number 1 from transcript POPTR_0013s06510.1 (locus POPTR_0013s06510) derived from phytozome v7.0 (chr-ID scaf fold_13; pos 5109382 to 5109851)
tcaatctggtgagtcattcattcatttcactctgttcctttaaaaagtctcaaactttagcatcgatctcttgcctttctatcgtgttctgcccctcaggtattgatattgcaatgatcactaagttgatcgtaatttgaatggtccagatttctatttggattgaatttttcttctatctttttgaactctacccggaacccatcacttagattttctgatatttttttcgttggatttcaggagttgaatttgatcatcgtttgattgctctgtatttcatttgattgggtttttttaggtcggttttgctcaaattatcaattatcagctccttttatatgttttctaatgttatgtttagcaattgggtttcgtggatctagtgcattttagttagtttctaattccaagctctttttttgtttgttaaaaaacaggttgtgacaggagaaggagagagagacgaa

SEQ ID NO: 54392 - DNA, 761 bp, Populus trichocarpa
  Intron number 3 from transcript POPTR_0003s02270.1 (locus POPTR_0003s02270) derived from phytozome v7.0 (chr-ID scaf fold_3; pos 2368523 to 2369283)
gatccaacaggtaataacgcagccgaggattgaatttctaaacatcttaccttttgtttttcttctcgcattgttatgaaactcttttacattttattgctgcatattgctatgtatatcgccttgctggaaaaatcccatcatcacctccactatgctaattctgtaatgcatgtgaagggtttcatctttaacttgttaaggaacaaggactgtgatgcatggctattttatattttatgattgagatgatagattttaaagattttcctgtttaggagataagacgtcactttcttgcttttcttcccggagaaagtatttgatctttttttcgtataaaataatgttgccgtgcattgaatttctaaacatcttaccttttgttttgtttgtcgcattgttatcaaactcttttacattttattgctgtgtttagcatgctttaataaaaagttgagtaattgatgaatgttaggcaagaatattacagattattttcgttttctgcctcctcctttttttccccccaccctaaaaattttcatattatttttgttttcagctgcctcgtcttcccccaacccgaaaattgtcaagaggacacttttatgctttgaatcaaatccatcttaattctttcgcccataactttatgtgtgaactgccaatgtttcatttgtcttccttgttcagtgccttctttttttctttgacatggttttcccatttgcctttaatcttgaatagcatcctatagt

SEQ ID NO: 54393 - DNA, 792 bp, Populus trichocarpa
  Intron number 2 from transcript POPTR_0013s06500.4 (locus POPTR_0013s06500) derived from phytozome v7.0 (chr-ID scaf fold_13; pos 5104760 to 5105551)
aaaaatctttgtcggagcaagagcagctggctaaggtatatatgtaatgcctaacagtagctttaagaaccattgatattttttacttcgataaaaatgaattttgaaattcagaggagaaagtcttgttgcctaagggtgattttaattggttcctatcaagtggaatgatgattcaacaatgaatttcatcagataagctatcaattttgtaatagtttatgcctgaattctttgctaattatacacttgcttaacacaagggcaggggggtttgcttctagttttccctcttccatggtcatttcttttaatcttttctgtatcatgagaaacgagtcttattatgcatgcttagcagctagtaaaaacaaaagcatgatcctgctttctcctacagtaacttttttgcttcttctctatggttcaattaccttctaactgggcctggagcatagtctaccaatcatttggagggctcttcttttcattagattaggatttggatttgtcttcttctcaaattgtcaccctgggttgatcaattttaatgctggctctattttgttttgcatccagcatactggaaactttaaccaatttgattttaatgattttcttttgatgctaagctcatcatcaatcaaaataattctttccattcctagatttttcatgttgggttttaaattctatttctctttcaaagcccctactgagtgatgtataactacagttgatcaaatcaaatatgtgggagggaactaactttcttccttttttttcagatca

SEQ ID NO: 54394 - DNA, 532 bp, Populus trichocarpa
  Intron number 1 from transcript POPTR_0019s09650.1 (locus POPTR_0019s09650) derived from phytozome v7.0 (chr-ID scaf fold_19; pos 11265940 to 11266471 reverse strand)
tcccttggtaatcacttcctctcttcacctgtatatgcacccatatgttttgatttcaacttttttttcctgaaaaaaaaatggggtttttaggcttatgatgtataaagatgaaaaaagtctagtatttgggtaatgggttattttgttttaatcgtacaatctcattttgacttttcttgagcagaatccaaggccctgtttggtaggtattgcggcgaggtcttgttttttttgtttaattttttgtttttgtttttgaattgttattataaaagataaaaaaaatgttattttaatattttaatatatttttaattgaaaattgattttttttttattttttatatcagtttattaaaattacaaaaaatataaaaaatattaatttatattttttcagctgaaaatcaatttgaaaaaaagagaggaaacaatctctaattataatgatttagaaggctattggctgattttattgttatttatgttgttttctattgtttttattaggcatattgttaacaggatt

SEQ ID NO: 54395 - DNA, 482 bp, Populus trichocarpa
  Intron number 1 from transcript POPTR_0003s07970.1 (locus POPTR_0003s07970) derived from phytozome v7.0 (chr-ID scaf fold_3; pos 9454080 to 9454561 reverse strand)
aatcctgaatagtaagctatcatcatcaaacactttttttacccttgaattcttcttctttttttccccttaattatgttaaatataggtgaaattgtattggatctgattgttattgattaattgattccttaattcgcaagtatgcaagtttgtttgtttcgtcctttaattgtttttggtaggattatgatttaattatatgatggattttgatgattagatctaggtgttttgccttcagatccgttgacatttttttttataacttgtaattcaatcgattgcaattcgctattaattgggaaagattttttttttttttttccttcaataggtaattggtaggagggtgtttcaaccttttattttgatgatctttgtgattgtattacgaaagggaaagaataaaaaaacaaccatgtgactttgattcttattttgcagcgactatttgtttaagcttttgcttattggagatt

SEQ ID NO: 54396 - DNA, 402 bp, Populus trichocarpa
  Intron number 2 from transcript POPTR_0003s20160.1 (locus POPTR_0003s20160) derived from phytozome v7.0 (chr-ID scaf fold_3; pos 18733608 to 18734009 reverse strand)
tattgcaggagcttagaatccgtgacatccctaaggtctgtcattttaatttcttcctatccttttcttttgattctttgtggttttagtggacctggttatcataacaatgcataagaccactagcaatagaaaacatgctgtctattttgttatactgatactagagctccttgtaaggcttgttggaaaacctgttgttgagcttgattaattgttctttgttgttcaaaatgaatagtttgtttttgtaattttctaatcgttccaaaatcttataagttgaattaatcaaattcaaataagttttgtaaaaaactccacatgcttatgacagctatgcttttgttgacctatgatctgctaggttggctttcctacattgactgcattttcagagtt

SEQ ID NO: 54397 - DNA, 624 bp, Populus trichocarpa
  Intron number 1 from transcript POPTR_0019s07500.1 (locus POPTR_0019s07500) derived from phytozome v7.0 (chr-ID scaf fold_19; pos 8524696 to 8525319 reverse strand)
gcagcagcggaaatcattgaagaagcaacaatctggtaaaacatattcttgtaatatttggcagtaacttctttctactctttgtgcatgtttttggcacatttcaaactatggttaatttatataccaagaaaggatctttggtgatcttcagtcacaaggcattggtgctgtctatactctaaattattggcatatggctatgagaaactatctgaagcttttgtggccttccaagttactgccatatttatgatctgctttctgataggcctcttgcttgctgtcatggatgcctgtatgctgatgggtgtatggtaatatattgccccaaaagtttctgtatattcgttgctaactcaggtgggtgactgtttggaagaaaatagtttattatcgtttattattgccacccgttgcactagaggtgatagattcatgctgcactgatgtgtcctggcctcgaaccccagaaaaaataatattacttatcactgaaaaatgagtaaataaaaagaaaagaattattcctcgtgcttttacaatgtctatctgctatctttgatttattaagatactttctgagtattaacattagtttctgttgctatgaaggcaaaggtg

SEQ ID NO: 54398 - DNA, 720 bp, Populus trichocarpa
  Intron number 1 from transcript POPTR_0019s04650.1 (locus POPTR_0019s04650) derived from phytozome v7.0 (chr-ID scaf fold_19; pos 4817310 to 4818029)
ttcctatcggtaaagaactcgagctttttgtgcaggtaattaactgtttacttcgcatttaattaattaatagaatgtgaattgttttttttttcctatacatcttgaattttagtgaggtaatattgctgtaatttgtggaaattggattttgattggaaatgagttacatatttttttttgtgaaatttttagtttgctttagtaattttagtgaggccaagtttccgttggctgagaagttataatggaaaggaaagatattgttggtgatagtgaaagagtctgatgctgctgtagttgattttattgtgttttgcctgtggaagttgaagtttggttcaatttttgaggtttaagagtgagagtatgtagcagagaatgaaatcgggatgggcaatgtcttattaggtttgatgaggttttttgatattctttggcatttttttctttatttttaatttcttggattgaaaatgcttggtgagtttaggagaaatcaggggatattttggaagatcgggtatttttatttaattgtttccaaaaaataagcaatttttttctcaaattttgttcctgagaaacaaaatgagtggttttaaaatgatggcaatggtggcttcagcactttgtttcatactgttttgttatacaatttgtgctcctgatgttgttttggtgttctggttatatagcttaaaccaggtttgagtgctt

SEQ ID NO: 54399 - DNA, 397 bp, Populus trichocarpa
  Intron number 1 from transcript POPTR_0006s28230.1 (locus POPTR_0006s28230) derived from phytozome v7.0 (chr-ID scaf fold_6; pos 25988945 to 25989341 reverse strand)
attatcaggtcagtatttttttaatggtatataaatttgctttaattggtcagtgaataattgggtgctttggcaaaataggaatgaaaggaaatgaaagtgttttttttttaattattattatcatttggaacctgagaaaatgacaattttgttctattaagtgttgtgcggctgtttgtgttaattgagttagtatatgttggtttatgagaatgaaagcaatgaaaaaaaaaaggattttgaatctaggctttattcttcttcttttgatttttgtgatttgtgagcaatttagagtggtagggggggaacggttagtttgtgtttagatatgtttttgttgatcatgttctgagtgttaagagtgcatgtcgcaggtgtttgttactgattt

SEQ ID NO: 54400 - DNA, 536 bp, Populus trichocarpa
  Intron number 1 from transcript POPTR_0013s07060.1 (locus POPTR_0013s07060) derived from phytozome v7.0 (chr-ID scaf fold_13; pos 5771816 to 5772351)
ctctgggttcggctgtccagccagaccagtagtatttggtctggctgcccagcctgactcaacaataatttttgactaaacacagaaaaaacaacccctcccatagctctacagtactgttcacaatgcaaacactctatgtcaaaaaaatatactaagataatatttttatagttttttaaaatttattttttatatcatcacatcaaaataatacaaaaaaaattaaaaaatatattaatttgatgtaaagaaaaaaataaaaaatttcaaatttttttaatgtcattttttaaacgtaaaaacaaacttgctttaataagaaaattcaacccaacctgaaataaaaaaaattatcatcactcaacttttgtataatataaaaaaaatcacatcaatttattttcactttatagtatgaaaaaaaaattcaataagagaaaagaaaaaaaattaaagaggaaaaacaataaaattagaaatatcttaaaaagaaaaataattaaagggaaataaatttgttgtcggtatattgg

SEQ ID NO: 54401 - DNA, 765 bp, Populus trichocarpa
  Intron number 1 from transcript POPTR_0003s04750.1 (locus POPTR_0003s04750) derived from phytozome v7.0 (chr-ID scaf fold_3; pos 5762846 to 5763610 reverse strand)
ctaccaatcaacgcggagacagaaaaaaaggtttcgttttgtttatttttaatttgtttattataaacatacatgtatttgtgtttatgaataaattgctaatttttattttattttattttgatgattttgaggatgttgtttgatacggttccgggatgacgtaggcgatttgattgatattgttgatcctataattaattgtaatatctatcattgtaccttttggattattctttggttcgtgggtgccattaagttttgttggtcggttggttagcagtctaagaggttttggtcaaacacatagccatacgataacgggcataaatttcaattctactgctggattcatagccatacgaggacaacaaggctctaaattagtcctagaagttagtgttcgggagtgttcatattttcatagttaaaataatatttttttcctatttagtttaaaatatttttttttccagctttgtttgagatgttttttctagtatttaaacagcctaaaagatctgtaatttttatttttttataagggaattattcaataataaaactatgaattagagattctatgtgtgatcccttcctccaaaaagtctatcatttttgttctttgatttctattccttaggtttgactaggtcagttggtattaaaactgagtgatttttggtagttagttgcttgttgtgtattgttaaattaaccattgctggaagaagtcgtagaataggacatgccatgtaggaggaa

SEQ ID NO: 54402 - DNA, 753 bp, Populus trichocarpa
  Intron number 1 from transcript POPTR_0003s02160.1 (locus POPTR_0003s02160) derived from phytozome v7.0 (chr-ID scaf fold_3; pos 2274958 to 2275710)
cagccaagcattgaatttctaaacatcttaccttttgtttttcttttcacattgttatcaaactcttttacattttattgctgcatattgctatgtatttcgccttgctggaaaaatctcatgatcacctccacgatgctaattctgtaatgcatgtgaagtgtttcatccttaacttgttaaggaacaaggactgtaatgcatgactattttatattttatgcttgagatggtagattttaaagattttcctgcttaggatgtaagacgtcactttcttgctttttcttctgagagaaagtatttgatccttttttcatatataataatgctgccgagcattgaatttctaaacatcttaccttttgttttgtttgtcgcattgttatcatactcttttgcattttattgcagcatattgctatgtgtatggcatgctttaatcaaaaagttgagtaatcgatgaatgttaggcaagaaaattactgattatttttgttttctgcctcctccttttctttcatccaccccgaaaattgtcatattatttttgttttcagccgcctcttcttcccccaaccctgaaaattgtcagacaacacttttatgctttgaatcaaatccatcctagttctttcgctcataactttatgtgtgaactgccgatgtttcatttgtcttccttgttcagtgccttctttttttctgacaggttttcctttttgccttttatcttgaacaacatcccatagt

SEQ ID NO: 54403 - DNA, 952 bp, Populus trichocarpa
  Intron number 2 from transcript POPTR_0003s21870.1 (locus POPTR_0003s21870) derived from phytozome v7.0 (chr-ID scaf fold_3; pos 19856589 to 19857540 reverse strand)
agctttccgatagtagtggtgagttagtttaaagtgtttattgttattcgtagtgtatttttttttctctttagctcatttcataatttgtaagcttactgttgatatgagatttgtttgtgtttgagcttctaaaacaaggtttaaggttcaatatggttagaaatgcatgaggttgttcatggttgatgataatcaggtgtttgcactttaaggttaagaggaaaatgtctggttttgaactgatgtttgaattgaaagtgtaagaaatcactaggaatggtttgctcatttgttagtatgtcagtgtcttgggatatacagggaatggacttacttcagtaagagatggcaggcatatacttgctgaaaaacttttcttgacccaggatgtcaaggtttttttcatggaaacttactactccaggcatggatgggtgaggttgaggtgggttcgagtctaaaacaatgccaacaacagaaaggggcagctgtctgtatttcttggaaggaatctctgtaaaccgaaccataaaccaggtagaaataacttgaaagaagagtataagaggatggttggtggtattaacatttccagatagaagaaacaaaacctgagagctgtctgatatttcttgctagaagctttcatgtgtgcaactgtgatgaaagatgtgctgttacattttactgaagcgcatgcactcatgcaggctggatctagacaaatggaatcattcttttctggctttgagtatatcaatgttgaagagctactttcagtttcgcctggttacttgattggatctttgtaaatgtttttctgtttggtcattgcatcttttagattttgttctgtacatcggtgtttagatgatagaaattttttcatttttctttactgtaaagagttcatgcattgtgttttttatctctaaaattgcaggaactg

SEQ ID NO: 54404 - DNA, 439 bp, Populus trichocarpa
  Intron number 1 from transcript POPTR_0014s03510.2 (locus POPTR_0014s03510) derived from phytozome v7.0 (chr-ID scaf fold_14; pos 2819106 to 2819544 reverse strand)
gctccagtactgcatccagtccaatcctccttggtgttagttctcttatctttttacctttttgtgattcatatgttctcttatctttttgcctttttgtgattcatatatatatatatatataaaattcttttagcttttttttttgttattcaaattttgattattcaattatgagaaaaagttgctatggtcagtttttttgttaaaataaaatttatagtttatgcacgccaccatctatctcttacctttggttctgattctcttttaaatttctgaaagttttaattatttttatatctaaatcctggtggtcttcctgttattaataacatatgtagatttaacagctagtattcagaattatttttgaactaagtggatatttaccaacgaaatcaagtgtctgattcttgtaattaaccacagatcagac

SEQ ID NO: 54405 - DNA, 749 bp, Populus trichocarpa
  Intron number 1 from transcript POPTR_0018s02820.1 (locus POPTR_0018s02820) derived from phytozome v7.0 (chr-ID scaf fold_18; pos 2494951 to 2495699)
gaacaagcttggttaatctcacaggtatattaaattaattgggtttctttctttcttttttataattatttattgggatttttcagttttggaaatttatctactttgcataaaattttggtacagagatcaagttttatgtaattggtttcttgggttggtgaaaattgagttggaaatggaaaacgttgagaacttttcagggtttgatgattgaattcagcacttagaaaactgagtaatttttaggttttgattatctagatagttgcataaaattttgttacagagattgagtttaatgtaattagtttcttgggtgggtgaagattgagttagaaatgaaaaaagttgagagcttttcagggtttgatgattgaatttagcacttagaaatttgagttatttttacttttagggtttgattatctagatagtcccattttgtttgaagttttttgaattaagtacatggcatacaacaaacaatgattaatgaatatgacaataaccactggacgactggaatttaatgatgtttaagtgtttttggaatttcagaggagtgttaaggttgttttatgtgctgtgaaatttttatctagtattctaattgacaatataggttaaagatagacaaaatatttgatgctgtcatttctatttatgattattaagtaagttttgcttatcaaatgtctgtggtgcttacagcaaccaaggccagttgcgtgtacttcttgcgattc

SEQ ID NO: 54406 - DNA, 747 bp, Populus trichocarpa
  Intron number 2 from transcript POPTR_0019s09200.1 (locus POPTR_0019s09200) derived from phytozome v7.0 (chr-ID scaf fold_19; pos 10770709 to 10771455)
aagctgatttcatcaaggtaaatctacctaaaatcgttcctccaaattattaaatatgtcacagcttaattgagttatcttttagttttccaaaacaaaaaaaaggtctcttagtgaggaattgttttcttaagaaaagctgcctgggtaattatgttcttaataaaatccaaagctacacacattgttggactagatgttataaaaaccagtcacagcataaaaacaaattggacccagatcctcattgtcccaattttcttttgtgtcctgagcatggggtcgaaagcaaagtcaacgacttcgtggtttttcaaccaaggtattgagtttagctgaagaaaatcaattgtattccctgaattcattaactcagatcatgtttagtctaattttctattttaaacttatggattcagattttttaatatttaaatcttatcatctctattctatataattatttaattaaattattaaaatactaacaatttttaaagtttaaagaaatttcactcattaaaatatgttagaaaataatataaaatcagagattttataaatttgatagttgtttgacatttatttatatgatcttgagttggtgccacagttacttttatccactgatcaatgatttggtagctcatacatagttaagatcagctatatatcttattgctttgcttttaattcttcttttatcaagtaattgaattgcttgctgttacatgacgcaggttagtg

SEQ ID NO: 54407 - DNA, 707 bp, Populus trichocarpa
  Intron number 1 from transcript POPTR_0006s08820.1 (locus POPTR_0006s08820) derived from phytozome v7.0 (chr-ID scaf fold_6; pos 6494368 to 6495074)
acagcaaccagatcttcttgcctgctgcctgctcggtaaatactgtttcttcaaatgccaagcttctaatgctcagattgaacctgttctattttgcttgtagcgtctgttttagcttgtaagatagaatgggctgtttaaatttttggtgtttgtgaactgggttctcgtataagattgaattttgacatctgacttcttatgtaggtgcattccgtgtccaaagtaaatgggctgtttttcttatcttttgttttgtacttctttaaagtatcaaagctgctgtttcgtgtgttttacagttcattaactgtagattagagtgatggataattcttgctgtcatttgtgtgtacctaaatttgatgttttgatgatgcaatgcaattggtttgttagtaaattgaacgatgaagatatagcggagaataagattatgaaaaagcgaagttttttagtggcgaaagacttgtatggattgatattaggtgttggattcttgtacttgggcatgattattttctaggctagttcgtttctgaacaaaaggaatcatacttgcagatatataactggaaattaattgttcattaggatgacagctcataatgaatgaccagcaggttgttctgataaatttggattttgataattttagttcagttattaaatctaatctcttgttgtggctaaccagatctgtgaag

SEQ ID NO: 54408 - DNA, 468 bp, Populus trichocarpa
  Intron number 2 from transcript POPTR_0003s03360.1 (locus POPTR_0003s03360) derived from phytozome v7.0 (chr-ID scaf fold_3; pos 3759048 to 3759515 reverse strand)
ttgtttctgggggtgcactagaccgtattcagaaggttctaattttcatgccatatatagatagatacagatacattgatagattcccgattagcggtgaagctgtggaacaatttttagtggtttaattttaaacgcatcaaagtatttagtttgctccttataacagagcactggattcgagcatactcttggagacagttttagaaggaaaaatgtggcttaatatggtcttgatactttgaagggctaattgatctttccattcatgtgagattccttacactagcacagaggaaggctggttaagcaaacaatgaacaagaaaggatttttattaatttataatttttcctgggtagttttcaggtttatgattctgtcactcttccttattttgcaattcatgtttctattcttcattgccttgcagtctgttgaacttgatcaacttgcaatttatctgga

SEQ ID NO: 54409 - DNA, 638 bp, Populus trichocarpa
  Intron number 1 from transcript POPTR_0006s27860.1 (locus POPTR_0006s27860) derived from phytozome v7.0 (chr-ID scaf fold_6; pos 25706003 to 25706640)
ctagaagcaacacacgaccaagaagaactcagcaggtctggaggcaggagcagtcaaactaaacctgcaacatcaacgtagggcatcggaataagcagcataggaattcaggaaaaaacaagtacatgtgttgattgtcttcatcaaattagaaagaaactgaatgtccatcaatccatttccaaaaacagaaggtaagagaagctgggataaaccaagtgatcgacggggactaatccaaggagtccagcaggagccatctcttcaaaaatatattcaatttgatcctttttagttttatttcagtttgatccctgaatttaaaatttattccaattcccatccccaaagtatattctcaacctatttaacaataaaatgttaatctctacttgtttaaataaaaaaaattccttaatccattaagaacatgtttgtctactaaatcaattaggttgaatccattaattaataaacgagctctatatttttaattttaaatagcataagattaaattattggattgagtaataactatggtataatggtttaataactatggagcaataagcatcaatcgattgacaagtcgttgaggacagcattaagttccaaatcttggaacgacaagccgcaa

SEQ ID NO: 54410 - DNA, 421 bp, Populus trichocarpa
  Intron number 1 from transcript POPTR_0302s00230.1 (locus POPTR_0302s00230) derived from phytozome v7.0 (chr-ID scaf fold_302; pos 19657 to 20077 reverse strand)
cgtttcatcaaccagggtcactcttggtctcccatgtaagtctctctctatcgccaattttagctcctactctgtttctaggaaagatgatgaaaagggaaaacagggggcttggtgaagaaaatgaaaaggaatattttttttcctttttgggttttctttcaaacatgatttgtgcattttccattgtttggttgaacttgattttaggtatcctggttttgcctcatccaattttctttgagtgcctacttttggttttatttatactctgaaatccatggattggtactggttttcagcttgcaggttacccattggtgtactctcaaagtcttttgatggaatttgcttaagcacccccgtgggaaagggtttaatgaaagttaaggcgttgtctgacagtaaggggacaagtcca

SEQ ID NO: 54411 - DNA, 967 bp, Populus trichocarpa
  Intron number 2 from transcript POPTR_0003s07870.1 (locus POPTR_0003s07870) derived from phytozome v7.0 (chr-ID scaf fold_3; pos 9386394 to 9387360)
ttccaaaggttttttgtgctggtgctgatttaaaggtaatgcgttcactctttggactttgatttttctctttcctcaataatagttggggattttgtttgttaaagaccttttgccatgtcacgaaaggtctcatgtcattatatcccaaaagaaagagacttcatggaaagcagcttgctcttttagctgaaaacttacaacagacaattagaaagtagaggagacttcatatctttgagtttctaagttctaatcttaaagtctagttgggttgtttagattctctgtacattttactgaactgatggcaaataatcaacaatttctttcttttgaatctcgtcccactctcaattggttcaatacaactatggaagtgatatgctaaaactagaaaaaacagcatcttatggtcctagtttgaaggtctttcacaaccttggctagttacaacaagccgaccctcaatataacatgacttgtaaattctcctgtaaaatttgagaatgatatagcggatcaaaagttaagtcatttccgtcaaaagttaagtcatttggcacgactaaacctcttcttggcttaaacttgtccatctagtctataaatgtgtgtgctaggctttccccgtggtccaattgcaacagttctgtatctgcctgttcagatcctcctgcatcactttcatactcatagaatttaagttttcaggttctctaaactcacttatgggctgtggcttatattctctatgttcagaagcacattgaggcttttcatgtggtcttttagtgatttttgttgttcttatttcccctttctgctagttatttctttctttcatgtaaggatgacagtagcaatagtatttcctctaggaaactgcaagtctgcacatatatttggtagcgaatcatatacctgactgatccgcctttgattggattggcaggagcgcaagaca

SEQ ID NO: 54412 - DNA, 521 bp, Populus trichocarpa
  Intron number 2 from transcript POPTR_0006s06230.1 (locus POPTR_0006s06230) derived from phytozome v7.0 (chr-ID scaf fold_6; pos 4433200 to 4433720)
acccaggtgcttatttttgctccttccactcttgctgtgaaattcgttgttttcttggtcatagttttgtctttctttatatgtgtttcagttagcatttaattggataattactgttcttcggaggatgttttgcttaatggagaaatggttttctcagttaggtactggaacaatgagttttcttgctgaaatgagagaattactttgtgatattagatatttttggtagttgtgttggggaatccagtgacatgagtttccttgcggaaatgagaattgctcgtgatgtttgtttggccccacatgctaattacctttgtaaaaatttttagagagaatgaggtgtttctttgtttaggggtcggggatggggttgtttatagctctaccaatcaaagcaactaacttttggttattggattctggtcccatggatttgaattaaattgggcttggtttggggatcaatgattcaaggatcatgaattgcactgcctgttttaattgttagtgcagag

SEQ ID NO: 54413 - DNA, 283 bp, Populus trichocarpa
  Intron number 2 from transcript POPTR_0006s06280.1 (locus POPTR_0006s06280) derived from phytozome v7.0 (chr-ID scaf fold_6; pos 4475157 to 4475439)
ctggccaaaaggtaatgctttagtaattatagtaaccttggtttctatcgaagtttggaattttctcctggttgtgtatttttttaatggaaataagttgtatcatgaagtgaagaattaattttcctttgaatgatttgtttcttagagctaatttagcttaatctcttcttttttttaatccttttcatgttttttgggaaagaggagaaaagaatttgagtttgaggagaatgggaatgatatttgatgcatttttttttaattattgtgtaggtttggg

SEQ ID NO: 54414 - DNA, 871 bp, Populus trichocarpa
  Intron number 2 from transcript POPTR_0006s20860.2 (locus POPTR_0006s20860) derived from phytozome v7.0 (chr-ID scaf fold_6; pos 19891062 to 19891932 reverse strand)
taccctccaattcaccaggtttgttcttaattatcatggattgttctcctttagtctggtttcttccttgaagcaacatgcaaactccccctctctcttttaagtagaattttgtttctgaccaatcacataccacttgagacttcttcccaaaaatataattaaagcagagcaactcaggatctcaatagttgaaattaatatcaccttgtcaaggttataatgaaggaaactgcctatgatatctcatacagttaagagagattaattgtagcttgccatactaaggtatttatcacgtcaatgactggcaagtactcattttagtgaacctggagatgtggagtacttctaggggaattgcttaaattggaagttaatcaattctgctatcctgtttatggattatttaatgaagtaaagtgtattcaataaagttactgattggtagatatggtcacgattagcttaataaaatatattattagcacaggttgtaaaatactataatgcctgtggtaggggcatagaaaaggaattgagaacagagtttgaattcattagggggaaagggtggcattattgatgccagatgtagacttatgtatggagcttaacaaattactctcttgcatttggttcattgaatatttaggacagaaatgcctcatgagtagtttactatataacttgctgctgctttacatggtcaattaggtttggagattcagtttattgtttcaaatctgtaacttaaaagtcttttccctctttcattttttttttttatcttctcaaattgctaaatattgtaattaattttcttaaccccccctccttgtgggctggacttggttgttacagtgcccaa

SEQ ID NO: 54415 - DNA, 725 bp, Populus trichocarpa
  Intron number 1 from transcript POPTR_0006s10840.1 (locus POPTR_0006s10840) derived from phytozome v7.0 (chr-ID scaf fold_6; pos 8224069 to 8224793)
gacgccagagttcaggtgttcgcacttttcaagaggttggttaatttttttatttttttctggttttgattttgaagttctgttcttttcttgtgttgtaagaatccatgtttagtattggaggctttgagtattaggctatagtggtattgaatatagcttgaattgaacttgatcaatttagttgcttttgccaccagtaccaagtggatggaaagtttagcttgtctcttggatcatttctgcagtttattggcacttggttatttcatgtgtctaaagcctggttatttgatatttccttggattttttcttatagtgttaattgatgttccttagagcatcagtcaagagtcaagaccttgtgttagagcttttgggttgtatcttgacacagggctataaccatctttgagtgctcaagtttctgcagtgaatgatgtctggagttacaaaatgcaaactgaaaattaagacatcagctctattggttgattagtagtgtggttacgcttgattgtctagagtttgatgaggtttttggtttttaatcttaaaaatgattgagataaaataacgctcgccaaacttctgtggtgctaagaattgactgctaaacgaattgtattgatattttccctacttcaaatactgatacaagctgttttaaatgatcgaaatcattgtagttgttctaatgttcttctcatgacgaataatgcag

SEQ ID NO: 54416 - DNA, 809 bp, Populus trichocarpa
  Intron number 1 from transcript POPTR_0003s18160.1 (locus POPTR_0003s18160) derived from phytozome v7.0 (chr-ID scaf fold_3; pos 17349179 to 17349987 reverse strand)
aagctgaagttggatctgctactaaagtatgaacatcttttcttctttttatcttttctatttatctattcattgcttgtttgattggaaactcaaattctgcgaaatgaaatgtatgtgattgattttattagctttaattattatttccaatgtgccatgatataggaattatgttttgtttttgttgtgtttcgttatctctttgatatttccaatgttgctgtttttttttttgtgaagtccctttctatgtttgtatatcaaatttccaaacatagaattaagggcattaggattattgggttgcataagagagaacatccaaaagttcttttggtactgcctttgcttcaaagctaatggcgctgggatttggaataattttttcatcagacctttgacgtcattgatttagatattagtgatctacttgaagaaattttactgcattttgcacaattttgtgcttacgatcttatggaaaggttctaggatctatttgtgtcataaaatggacttctcaatttcatatagaagcatctaggagggaaatgaaagagaaagaaaaagaaaaagcttgtgatgcatgcactattaatatcaaatttgtgataggtgtaggattacatcttttcttacattctttcatggtgaagttgttagcttttctaaggttttggagacaccatttttgtcatctttttattattttgctatgttctctggttgtattttgatgtcctcacaagctacttgtgattaacactcagcccattacttgatgacagagggaagacgctgcacag

SEQ ID NO: 54417 - DNA, 773 bp, Populus trichocarpa
  Intron number 1 from transcript POPTR_0003s07020.1 (locus POPTR_0003s07020) derived from phytozome v7.0 (chr-ID scaf fold_3; pos 8626379 to 8627151 reverse strand)
tgcctcctgtttctcttgataacattaatcccaaggtaccctcttttcttttcaacatcaattctgctctttcttttattgattagctgtttggttcttgattttgattggatttttcatctgggtttttctttttcattttccctcttttgttttgttgagttttatatgctctaggtttatgctagtgttttgtttgttttttctgtttgtctttgttgttttagattccttttctggctattgggttgtgcttgatttgtctttgccttttcttttatggatacatacatgaatgtgtccttttttttggttttgctcatttatgcattaaaaatggtcggatagattggaaccttaattcatgcttcaaactggaagtccagtaagcaaagcacataggcctagtgattctttctatgtttatcttatcaaatcttattgctttatttattgcaaatttttaattgtacttagtgacattatcatattttgtagaatctgattaagaatatgcaaaagctctttctgtgcaatccactatcgatttaagaaaaaaaaatgcttaactttgattcacctgaaaaaacaccaatacttatttttactgtagtcaaggagcgtttaaccttgctctaaagttaaagaattcttgagtgtttggttattggtaacttttcttgaactctcttgcattcctttgtttcccttttgttttgtttcctgatattcctagtttattaactatgatattctgtttcccaggttttaaa

SEQ ID NO: 54418 - DNA, 665 bp, Populus trichocarpa
  Intron number 1 from transcript POPTR_0013s04180.1 (locus POPTR_0013s04180) derived from phytozome v7.0 (chr-ID scaf fold_13; pos 2793674 to 2794338)
ccctaaaccagtggaagccaaaccagacccagaaggtaaacttccatacctttctttttctttctagattttgttatttttatgcatgtatctttgataatagtttctgggtttttcaatttattttcaaggtttgaagttttgggtttttttattttttacttttgagtctaaaccactggaaggaaagaattttgcttcaagaatgtctatggaagtgtaccttgtgctctttgtgatcatgtaatgacatttgttcttcttatttggaaatagagtttttcccataataaaagtttgagttctttttattaatttgttgttaagtggatctgaaatgtcagggatacttgaaggattgcttgtattagtgtttgtaatggagggtttagtttctttgtgatcataaaggattgctttctgatgatattattgtcactgccagttctgaatttttttctgaaagactattagggtttctttcactccatgtatcttgcttagattctggactttgatatgatttggagtttgcctaacacatcctttcaaatagaagttttattttatttatcctattatttgctctatagaagctaaatgtcccattataactaacagatggtgcagctgaaaaggccactgcatctggaaagcggttgagg

SEQ ID NO: 54419 - DNA, 879 bp, Populus trichocarpa
  Intron number 1 from transcript POPTR_0003s13640.1 (locus POPTR_0003s13640) derived from phytozome v7.0 (chr-ID scaf fold_3; pos 13970772 to 13971650 reverse strand)
ggcccaagctcctgcccctgcccctaccagtggtaaagattcaaaactctctttctacgttcttgtttatacgtgttttttagccttttaagatggtaaatctcggatccatgagaacccggttttctttacacacacacacaatgtttatagatctagttcttggtaatgtttggcttataatgctgcaatttagttttgatgttaattattctcttaataaaagttgttgtggtcccgtgtccagaagaaaaaggaaaaggaagctgatagattgagatagagatgaaatggagatttagtttcagaattgtcaaagcaaaaattttgtaggttttgggaaatgggattatcaaattcttttactacaggagtgctgtggatattttcgtgaaagtgtgattcagttttgggcttgtaggaatttatttaatgggtgatttaggtgaataaatggtacaggaagttattggaaccaattgtttttttttaaaaaaaaaattgttggaattaattggtactatttgttggttgcaagcatctgtacgtgttaaggaaaatgagattgaattctgatgcatttggctcttgcattgaagttgttaagcaacaatgatttatggtcatggttgataggaaaaaaattgttcttttaaaaaatatttggttctcgaacagaactcacaacaaaattaaaatgtctgtactctgtatcaaggtgccagtgcatttcttcttgaatcttgccttaaaaggaaaaaaattgttaaaaaaaataaaatgatatggaggaacatggagtcgatctatggctttgtccaggaattaatgggagcttttgtttttaatcagggacatcaattgaccaaggcattgcgt

SEQ ID NO: 54420 - DNA, 782 bp, Populus trichocarpa
  Intron number 1 from transcript POPTR_0003s21820.2 (locus POPTR_0003s21820) derived from phytozome v7.0 (chr-ID scaf fold_3; pos 19835111 to 19835892)
taatttttcacattggctgtctacattttccaaaggtagcttacagccttacacactgaccctcacttactttctctctgtttgtgcgtgttttaatgcctaatctattggtttttctctaatttgggttggatttgtaattagaatatgagatttgagctagttggggttgatggtttggtggattttgaagttgaattgcttgtttttatgttggttggtgtttgtgaatgattgaagttaattaaagatatgttctttttagatcttgactaagtacacattttagcttgtagtttttctgtttagctcataattttagttttctgggtgcagttctttatgttgtggctccattagcttggttccagtagtattttgatttgctattcaattttattgtctttccttggattcatagaggtggtttttttgttcatcataggagtgagagttttttaagatgacaagaagtcacaagaatggagagtaacaagtttttttttttaaaaaataaattcttatgaagaaaatagtgattttcatgaaagcatagcatgcaaatgccaaattttcgtgacatagaatgttgaaaattagtaattaatatgcttcggttcatgactcgtgatccataaatggatttctacctttggagtgcttagtcttggcaggattttgagatgatattatagagatggatttcatgtggtgaagcatggtgaatgatctttagatgttctgcaggtctcaattttcttctaagaagttatttttatcaa

SEQ ID NO: 54421 - DNA, 1015 bp, Populus trichocarpa
  Intron number 1 from transcript POPTR_0019s14080.1 (locus POPTR_0019s14080) derived from phytozome v7.0 (chr-ID scaf fold_19; pos 14840957 to 14841971)
cagggtgtacaaagtgccttggtgctctccaaaaggtcagttttttaaggaattttgcatttattgctccttgtgattgtttcttcattgaagagagggatttcttcattgattaaggactcattttttacattacttcatttatcaatgctgtgcttttgtgggttttttttaattaattctctctctcttttttttgggtttcttgttgattgttaattcatccaacaatttaggattttttttttattttttttgcctggatttgtttgactttgcaaatgaggggtgtatctaaaacaatttgaagggctgatacaactaatttgttgtagatacaccactcgtttctttattctgtgttaaattttttgtagatacctatttaatgcaagaatttttgtgggaaactgttgatgttgtatgagtaacaatttattttgttcatgtgcaaataagtggcaaaaggactaataagactttgagggaatttcaatgggctagttttctatttcttttgatggttcaatgaactttatactctaagcaaaacaggagttcaagctgctcgcaataattaggcttttaggtaagtattgactaatgcacattgcctggtaaaaatagcatccaaaaaaagcagaaatagaagcatgaaagtgaagtggggcagtgtaggttttttccagggtcttccttttgatgttttgtgaaactcacaatagctttatatgctagatagaacctttgattttcaaattactttttaaattgttttttttataaaaaaaaatattttttattttttcaaaactcgaaatcaaacatgctcatatcctaccgaattccatgtgctctctttacgtaaccattttacattgcaaacaattgggttcttcactgggattcctttgcacatccatcacctttcctccttggtattccaccttgaacactgttttcttatgactaaaacaaccttgaatgtgattgttattacagttgaaggccaaga

SEQ ID NO: 54422 - DNA, 849 bp, Populus trichocarpa
  Intron number 1 from transcript POPTR_0006s03700.2 (locus POPTR_0006s03700) derived from phytozome v7.0 (chr-ID scaf fold_6; pos 2460235 to 2461083)
gcctcaaagtttcatgtacgtaatttgattttgaatgattaagcaatgcttattttatcccttacctttgtgaatcgattagtaaatgaatcccactaggctgcatagaaaaatctttcactagcattattgtttgattagtttatatatttatccatttatctatatattgaagcagcttttcatgagaagattactgtccaattgttgattgcataatttttctttaagatttatttggaaaatcataggacgggggaacaagttacaagtccaataatatgatttgcagtttttttatagtaatctggtcacccgaaatcatttatatgtccttcttgcctgccctgcattaaattccctctatcgtaagtttgttgattgaagtatataacaactaatgtactgttaacggaaaaagatagtcttgtcacaatatacaggttttttctgttctactcagttattgttgctccctggctgcattggcagctagaagtgagtgtttagatggtggttgagtaagaaagctggtgcccggggccagacttctgaatgcatccactttaattagtgcagtcaatagtgtgtattttctgcaagttacttatggctggttaccgaagttcagtattgaggaacttatttatcattgctctggcctagtcaagaatttaattgaagaacttcaacaatgctggccttaattttcttttgtttaaaaacacaaattcggagatgagttctccgttagaatgaaatgtgttcaagtagaacttcttataacaacctttccttttgcattttatggcagagaaactatctatccttacacaatctcagtgtcac

SEQ ID NO: 54423 - DNA, 959 bp, Populus trichocarpa
  Intron number 1 from transcript POPTR_0003s06160.1 (locus POPTR_0003s06160) derived from phytozome v7.0 (chr-ID scaf fold_3; pos 7577224 to 7578182 reverse strand)
gattcggcagctactcacccaggccgtcagtttaggtcatttgttaaagtttgaattttgaattaattttatggtttttttattattgttctttggatggttgaattgtgcatgcaatgttatctggtgggtgaagcagctaggcaggcagtgatgatactgagaagggtttggactttaattgggaattgctgtgttgccaaggtttaagaattggggctttaaactgaactttagtgtgcttagtgtagtcattgaactcatactgcacagtaaagtgagctttatttttatttttggacaccgtcttgtcttatatgttctcaatgaatagttggttttaagcgttcgaggttgactatgattttgtactacttggttgcttgccatttaatcgtttattgaaaacaaactgtgaaatgattgcaatctgtttatgtaaatgcttagcccttgcatggttcaatgcaattttcagttacaattgagccgagtttcattctagtataatttgttcttttgagtttgggacgggttgcggttgacattatcaagtgtccaaaattccccccttttgtttggttcccaattgaactacttcatgcaaatctttagatcctttcataaaacaaataacatggcacaaaaactagcaggtaataactaggccctctaatgtttgatctactgtagttccttaattactacgctacataattcagtttaggacacattaagcactcctgttatatttgtaattcgttggcacatggttaagttacctctccttcactttgacattttggatagttcgcattattgaatttcaaatattcaagcacattcagtttgccattagagaagaaactgcagttctagagaactcttacttggtgtctggttgtattctatctgctaggatatctgttgttttgagacatctgcttttggttccagga

SEQ ID NO: 54424 - DNA, 480 bp, Populus trichocarpa
  Intron number 1 from transcript POPTR_0013s01790.1 (locus POPTR_0013s01790) derived from phytozome v7.0 (chr-ID scaf fold_13; pos 1022254 to 1022733 reverse strand)
gccactcctgctcaggtgagttcataagaccgcgtttggtttctcgaaaagagaaccgatttctatctttgttttgatgttaactatgcttttaattaatcgagcctaaacagaaattggaaataactgtctgtgagtggctgtaagaagttcttggttgttgctggtgaagggaagagtttattctgttcgttatttctaagtgaaccaaacatggccttagtgttttagaattcatttttgtgtgtgtttatgagttctttgatttcattctgtaatgggtttttttatcggttgaaacttttgttactggtggagcaaagttttattttggttttgatttgcaagtaaaccaaacatggctttagtgttttagaaactcaactttgtgcgcgtttagtagttttcttttttaattggaatctttattgattgaaaatcttaggtggaaagatcggtgtcctataacgagcataggcc

SEQ ID NO: 54425 - DNA, 835 bp, Populus trichocarpa
  Intron number 2 from transcript POPTR_0003s08770.1 (locus POPTR_0003s08770) derived from phytozome v7.0 (chr-ID scaf fold_3; pos 10141020 to 10141854)
gaggtacatgtcttttctttagtgttcgtattaccattcatatgttgcttgttcctgttattgttgctgtcctgtgataagattatgcagtatatttttctgctttggggaaatctccgggtctgatggaatttgctataatctctgatgtatttttaaacaggataatgaagtttttaaattcataacattatccgattatattgacgttaaatatctttcttatgttactaatgatactttagaaactaaaagtggttcaagaaatatcaaaattagataaaatgcagaaacattgtccaatttcaatctttaaccaattgaaagagagtctcctttaaagggcaacaagattttctataaaatagataatagggttctcttgccattgtatgattataaggtactaactaaaaccctaactatgtattaaagtgcaaatgtttttttttttgcaaaggttttgaaaactgataacctagtttaaaataatgtggctgttgattttgatggaaaaaattttgttctatataacagctaacacttatttgctgacagaaattaatgtaattgaaagctattaccagattcaagatgctatcaattgtatattttaggttattactttttgctcagcctaatgtatcaacataacaaaaatgctaactacaaacataattatgtgggcccatgctgcgatttagttttactgataatgttcagttcagcttctgcaaagttctctaattaagctccatgttcttcttctaagatataggcattttctgtttactttctagattccctgattgtcgctgtcaaaccaaagccgcca

SEQ ID NO: 54426 - DNA, 464 bp, Populus trichocarpa
  Intron number 2 from transcript POPTR_0014s03490.1 (locus POPTR_0014s03490) derived from phytozome v7.0 (chr-ID scaf fold_14; pos 2804152 to 2804615)
ttgaccggactggaaatccaagttccagttacaaggtacgtaatttgaattgtattagattttcgatgtgtccacactcactgttagtttgctttgatacatcatttaaacctttgattagtgcatggaactgttaatgatttatgattagttatggtgtggttaattttttttccctgcgtataagaagatcaacacagatacaacagagtaaaggtagagtaatgtgcacttaaattaaatgttttaaaggaacgatgatggtggtgtctactgatattgaattgattataccaggcagtattaaacatttttatgtttctgaagggattgaaccataccagtagatttctattctaaacactttgatgagtcagcatagagattagcaaacacagtcacacacccttacatatgtgagtacagaatgatttttttttatatgcatgtatagataattgcaa

SEQ ID NO: 54427 - DNA, 385 bp, Populus trichocarpa
  Intron number 2 from transcript POPTR_0018s11850.1 (locus POPTR_0018s11850) derived from phytozome v7.0 (chr-ID scaf fold_18; pos 12505039 to 12505423 reverse strand)
acacaggttgataacattgctgaattagagcgaaggtgagctctgccgttttcgctatattgcttgatttgcatttgttcatttgaatcattttgatgataaatttagagacattagcaaggaagaatctatactggatatttaaagcgataaattttagtgttattcttggcaggatagatcaagaaattcaagagaattgaaatgaacaaactaaaaaaaggaggaatctttggaaatagtataattacgggttttgactcgatacacttgtgatgtgactgtacatggtctaaattttttttgatatcaagtattcggggtgttgtcatttgtactcatttgtactaatgatctttgtgggaaatatggagcaggctagagg

SEQ ID NO: 54428 - DNA, 656 bp, Populus trichocarpa
  Intron number 1 from transcript POPTR_0006s17700.1 (locus POPTR_0006s17700) derived from phytozome v7.0 (chr-ID scaf fold_6; pos 15845070 to 15845725)
gaggctctggtagaactcgtattggatttgagagggggcgataggtgtcttgcgttgaagttccatttaaggtgacatgttgtgtgaacacatggcttgtttccctttgtttgccctccgtttttcaatgatgtaatgtttttattaagcttctttttagttgatgccacccctgatgtagcttctgccgatgtactactatgtttaaaatttctccaggatttgaaataattccatccctctcatgggtgtgctcttagttggtttcatttgttttttcatttgtttgatgtggtctttctaggtttgcctattttggttatgtaatcaaagtgccctgcccattcgttttctttctacttggtccgagtgacgaaacagctgcggagttcctgcagcttacctaagaagaaacaataacagccttgggactggaatgacaagatggtgcaattcattggcgaagaacatgctgcgagatgattattgatatttatacatcattaaccagacatcaaaagctccaacaacattgttttgacagcgaagctctttttaagaggagctgcacccacttcaaatagagtaaattccttgtttttattgctttgattctttcagtttgttgctttcaccagtcaattctctcttcacga

SEQ ID NO: 54429 - DNA, 562 bp, Populus trichocarpa
  Intron number 2 from transcript POPTR_0018s14430.1 (locus POPTR_0018s14430) derived from phytozome v7.0 (chr-ID scaf fold_18; pos 14627869 to 14628430)
ttctcccgggcatataatctgtcaaatattgattggtgactacatgagaacatgcaagaaatcaaattggtgttgcaagaaaaaaccttttttttaatcaaaacaatgatggtaactacctatgcaatgcctgttgtgtccgaagacagtacaggacaagacctacctcttctaccccccaaccacctctctctttccaacctcaacttccaaacccaaaaaaaacatcatcaaaacctaactgaaaagcttttatctctgataaaacaatgcaaatcgaaaaacctactaaaacaaatccacacacaaatgcctataaactcaataccaaaacccaatttccttctttccaaaatcgttgacctcaaagacttggcctatgcatcccttgtttttaatcaactcaccaaacccaatatttatgccttcaatttcatgcttcgtgggttagctaccacatggaaaaagtatgatttttgtgttgaattgtattacaagctgaagtctttaggcctaaaagcaaataatttcacatgcccttttttgtttatagcgtgaggga

SEQ ID NO: 54430 - DNA, 476 bp, Populus trichocarpa
  Intron number 1 from transcript POPTR_0019s01740.1 (locus POPTR_0019s01740) derived from phytozome v7.0 (chr-ID scaf fold_19; pos 1515247 to 1515722 reverse strand)
ctcctacatcgatgtaataagttgttcctctacactaattctattcttttgatcatgtctgtccatcgtttcttgaatttgaatattatatatcttctgggtgattgattagtttcctgtgcacttttcttttccccttgtatgatttaggggatatgtaaccaatgttagtgctggagatgttcaacaagtcctcttccgagtggccaatactgggtaaactttttgaaccttaataaaataatttcttgattaattttttagtacaatttcatgcaaggatctgtagtatgaatggctgtacgaatcataaaagaaatttttgtcggttcaatattatagtaatattgatttataatggacagaccggattccttcatgtgtatgccgacaaaactccactctcatcaacattcgcttcctatgacgtagttctgggtgtgaattaatgccttgtcttgtgtgaaataggggcg

SEQ ID NO: 54431 - DNA, 735 bp, Populus trichocarpa
  Intron number 2 from transcript POPTR_0019s09640.1 (locus POPTR_0019s09640) derived from phytozome v7.0 (chr-ID scaf fold_19; pos 11244118 to 11244852 reverse strand)
tgttcagagatccaaaccctctaccccaaagcgtatactactcctactactttcactattttaatttctcttccatacaatttttaaatgtgatcatatatatggatatttatgtctatatatatatatatatatatatatatatatatatttgagatccaaaaaaaagaagaagaagtttttacaacttttattcattttacttttcactgtcttaagtctaaattgagatgctttgatattttcagaaattgttattctttgggcaaaggttattagagttttgtggatattcattgctgattaatttggataagaatttgatggaggtccaaaaacatattctgttttcgaagcaacacattgacagtcgaatcatcgtgcattgtgaatattcttcctaaatgggggaaggttctgttcttcgtaatttgaacagtctggactccatgatgtaataactgagagagtggattgccttttacaagcatgcaaacaacttagtttacttgttaaggaatctgtgctttattattaatcccatcaatattgttgaagtttatatataaaagggctgccagcttcttcttcttttttctttttcatttgatctggtcgagctttgattatgttagctgtttttcagttgaaaaataactgctttagtgtaaaaatatgaaacaataataataaataaatgtcatagcaggaggagcagggaggaactttagggta

SEQ ID NO: 54432 - DNA, 999 bp, Populus trichocarpa
  Intron number 1 from transcript POPTR_0014s09470.1 (locus POPTR_0014s09470) derived from phytozome v7.0 (chr-ID scaf fold_14; pos 7035388 to 7036386 reverse strand)
taccctcctattcatcaggtttgcccccttttctttctttctttcttttttagcacatgtttttccttttcctttttggggttttaatttgttgaatgcttgatgcgggtttggtgtgccttttgttatgttgttgttgatcggtcatagctagggccgttgaaccgtggaaattgcggacttggttttgttaggatttgtgcctgttggtttaattggttggattgtggagatttaggtcgctgggcgcctgtgcagctaagtgaattttggaggtatatttatttatgggcccggaagatttttggttttttgacttttgtagagtttaggtttttgctggttttgttatcttaatatagtcccaaaggatttagcaaatgcatgtaccctctgtagcgaacgtgaagagtcatctgggatccatcgtttgggtcttgtgcttggcgctgcttatacagatgcaaggacatggcggcggcgagaattggatagagtgctagagtacgtgctgggcagctatagtggtataagattctgaaaatgaattgcaatttcacttttcgaaacctgaagaactaaataaagatggacacatcacatgattctaagaacctatgaccattcatatgtgtgtgatgacctcgatttcatttatatgttggggcagttgattacagtgagcagggagcttttcagctaaaaacattaaagtttgaaatctaaaggcctgtgtgaattttagttggatactgggccgttgagaactgtctggtgacttctttatagttggatatgggggtttacctgtatacagtagacactatcttactgtatctatgcaatggaggaaaacttatacttataaatgctgttgattgtgggaagcagcaatctttgtcctttattgttattgctttgggctagcttccaaaatttcttatgcttcctagatgacattggcttttgtttacatattgctgtttctgcagtgccaca

SEQ ID NO: 54433 - DNA, 700 bp, Populus trichocarpa
  Intron number 1 from transcript POPTR_0013s10300.1 (locus POPTR_0013s10300) derived from phytozome v7.0 (chr-ID scaf fold_13; pos 10327685 to 10328384 reverse strand)
tcataccgtcgacaaaggtgccggtcacaagcaaggtaattttatcccccccttatccctctctctttctctttctttttattacagttaatctagttgtgtattgtttagaagatctgatctttttgaggttgagtttgctttgattctctgttgttgttgttatgtttttaggtcgaatcatttatagatctaatctatttaggtggtcgattcttgtaagactacttttttttgtcgtttgatttttttcttgtatttcttctggagttctttggacagaactgtggagttttttctccattcttgatgggtttaaggtttttgcaagaaaatttgtgattttcttttagaactggaagctgggtttggaaatggatttcattaggcaaatagaaatttattatgggtttaaggttttggtaagaaaactgtgatttttgcgagaggtggaagctgggttcagtaagcaaagagagaatatttatgggtttaatctgttttcttaatcgagtggtctggatagaatttacattttagattaggatgattagtgggatttgggatctggtattttattgagtgaacatattagataattaattgcttctcagattgtgtaaaaaaaatttctgatttattattgtgttcaatgttttaatttgctttggtttttggaatttttcaggacccaatctga

SEQ ID NO: 54434 - DNA, 683 bp, Populus trichocarpa
  Intron number 1 from transcript POPTR_0006s15380.1 (locus POPTR_0006s15380) derived from phytozome v7.0 (chr-ID scaf fold_6; pos 12722432 to 12723114 reverse strand)
cgattattacttcgattcatactctcactttggtagtactctccttgattcgctttactttatttatttaaatcttctcgtgtttttttttcctttggtaatagtatactaggttcagttgacttgaatagaagttttagactcctaatgaatggtactctggcatagaaagttttttgtatctgtcttaacctttttttttgtttgtgtttttgcaggtattcatgaagtaagtgtcgtagctggattcaattcagctctttactgggtttcgtaacttggtgtttttttatatatttatttgttgggttttagttttgattatatcttgtttgtgcattataagtgatgattcagaagcttttgtaactcaaatagtgctgccacattttcttgttttatttacctcacaaaacccccttttgaatcggcgcttgttattatgtgatacacttgatttgtttccgagtaatgctctgcattttatcaatggatattatattgctttaccattttgtgtccgtaggtttattgttttgactttgtgtaatctatattatttcatcattttcagctgagatcaaatttttcttgtatgattttttatatatcttgagatctggatttctaaaacaaattttggagttgattgtgtatcaatgcttaaacttcgccagctgttg

SEQ ID NO: 54435 - DNA, 929 bp, Populus trichocarpa
  Intron number 2 from transcript POPTR_0006s00540.1 (locus POPTR_0006s00540) derived from phytozome v7.0 (chr-ID scaf fold_6; pos 280886 to 281814)
gacttccttcgttctaagggaaaaaacacttgtttttgtgataaataattcattaaattcaagaatgcaatgggccaagaagttccattcactttggatttcggttgatgaggtctgtttctatggcatttcaatggaactataattccctttttttgttttaaagctctttcttgctgtgtgtttgaattgtggattgtttgtgtttgaatcgtggaaatttacggttatttcctttcttgggcaggcctttatcacctgtcaacctccactgtcatatagcataacactaattttttaaattgagtggagacttcatgttagatcacagctcagtggtctttttaaacacctgttaatcatcattcaagtgccttctacctattgtctcaaacagtgaggttccttaaaaatggtgacatagtttttgcaccatctataaaatcttgaaggcagcgtcctgttggaaggaggcttaccttttctcctcgtagatggttcacttacaacacttttgtcctgtacattgttctatccatttccattgcggatgttcatcttcttttacaacatggaagcattagctatcttgcctttgcttttacttgtatcttacatttggtcttaaagggagcggacgttttctaccatgttttttatttaacaagaacaacaatttaccttacgctcttgttttacacaatattgtggcaccaatttagtgcaggaagatggtgaaaagagaatagggctggatcaaattccctctatgaacatgataagagtgtaaagtagcaacttggctgcaatttcttcgagcttcacttgtctatttagttctgttttcctgtttgaggtttgtaatggtgcaactcctgcctcaggttggtgcagttgtggttggaatagatccgcgctgcaactgttac

SEQ ID NO: 54436 - DNA, 572 bp, Populus trichocarpa
  Intron number 2 from transcript POPTR_0013s06280.2 (locus POPTR_0013s06280) derived from phytozome v7.0 (chr-ID scaf fold_13; pos 4698009 to 4698580)
aaatcccatcagaagtccaagatttactgcctcaggtcctccctccctccctccctccctctctttctgtgggatgtgttagtgagtggttttaaggattaaattggttgttattaatagtccaccaatcatgaaagttttcagaagcaccaacaataattcagcatgtaaatgattgttttctttcctcggttaagtgatgtgctcatgtcttcttctttttttatattaaaaaaaaaaagttttttgagaagggaattaattaacatttatttaccattacgaaggtaacataaatcaaaccaaaaccaccaagattatgaaggtaaaatgaatgaaaccagcatcatgttgtagttgtcaactgtgaagcgatagaatcttgtttctatctcttgtcttctcaccacccaactagtatcattccactcagaaagccctgtgttatctcactcacacaattctttacttaacgtacacgaccctctctctatctctctctctctgttgttttcatggaatctaaaccttaattacacaatattcataagggagttttatttcttcgcagg

SEQ ID NO: 54437 - DNA, 456 bp, Populus trichocarpa
  Intron number 2 from transcript POPTR_0018s03870.1 (locus POPTR_0018s03870) derived from phytozome v7.0 (chr-ID scaf fold_18; pos 3298015 to 3298470)
gaccacacaagttaaacagcctcacctatcacgtatgcttaaattgatttttctaatttatttacgaatcacacttgtacttttgcccttcgttttctagcttcttttcttctcataaaggatggcacatttcactaaaagaaatcaggaaacggtactcatcagaaacacacaagtttctctcaagcataaaataaacaaagatgacaaaacagggtggtgaaataagtttccagcagataaaaacaagattcaaagccatggcataaaatcttctgatctagaggcaccagctttagctaaagcatcagcaacgttgaatgcttttcgaagccgagtgaaatatacattatttcttttttactttcaatggcaactttcttgatcaataagctgctaaatgataaaaactagaccattaactcctgttattaattttgttggcagacctgtcag

SEQ ID NO: 54438 - DNA, 664 bp, Populus trichocarpa
  Intron number 3 from transcript POPTR_0018s13830.3 (locus POPTR_0018s13830) derived from phytozome v7.0 (chr-ID scaf fold_18; pos 14094989 to 14095652)
gagagcccagaagtgatcccatagaagttcatcaagtaagttctaaacagtggagatatgccacaattttttaaatatatataaaaaataaaaaaacaaatgtctctctaggtatctcaaacaattcattagttatattagaacacttgagatatctgtgctgatgtacttccagcttagggtctcgtccatgggagagaagactctgtttgtgagtttgacatgcagtcaagctagagaagcaatggttaagatctgcgaggtttttgaatctttaaagctgaaaattattacagcaagtgtcacatctgtctcagggatgttcaagaagacaatcttgatagaggtccgtctcttttttcctccccgcctctctatcatctcactccaagggactgaaatgttaagcaataagaaatggctgccaaagatacatgtaaatgttgatacagaaatgtttttctttgattcccagtcaagttccaaagacgttagaaccatcaatgcacatgaaatgaaataaatatataacaaaaaattagtatataaatttaagagactgcaaagcataactcttttgaatgtttctcaattcagctattaaattaatatggtagaaaaacatttaaatcataaccatctgattaatttgttttgcaggcag

SEQ ID NO: 54439 - DNA, 785 bp, Populus trichocarpa
  Intron number 2 from transcript POPTR_0013s05230.1 (locus POPTR_0013s05230) derived from phytozome v7.0 (chr-ID scaf fold_13; pos 3724473 to 3725257)
ttggacttggagctaccaggtaagtaagaattgatgacatttctttttttagcttcatgcaatcagtataggtatatttaagttctgtccaaatgaatttgataaattcattaaaaaaagaaaatcttatttcagttaccaaaggatcctgaaattttgtctgaaagaagtccatattgtaatactcgggtatggaatatggtcaaatttccctgccaagcaaacaagaaagtggacagtcatgtttgagatctgaaagttacattctcaatttgaggcagtgatcatcatctcgagtgtcatgcattgaaaattcgaaagtgcttccagttccttctgttgttttttctcttttccctcttttttcttctcctgggagctttctcaaggaaaagtagtgatatgatgacatctgcatcaatccacaataggatagatggtgtccatttctatctgcctttgcttttttataagattttatatccactcctcctttcagttttttttcggctggctttcagtccgccactgataactaatacagagaattgcttttgatcaattttgtgatgtaatgccaacttttatgtgtcatttaattgatgattggattttcttttccatagtattccgatcaaccttaatatgcattacagagttcagataaaacttgtcctgtaatcccatctaataacttaagtttttggattgagatggtttttgacaatgaaaactcctgccatcaagcagggagcctgaacttgttaagaggattggagctgcaa

SEQ ID NO: 54440 - DNA, 922 bp, Populus trichocarpa
  Intron number 3 from transcript POPTR_0018s00470.2 (locus POPTR_0018s00470) derived from phytozome v7.0 (chr-ID scaf fold_18; pos 409930 to 410851)
gctcagtggcgattctctcacaaacaaaagtggtgattccaattaattaagtccattgctaatcttaaatgagtttttaaattgaaataatttttaatatactaaacgtgttaaattttttaattaaatttaaaatttaaaacatgttatagtattaacctctataaattttaaatttaaaggattttcaattaaaatatgtaagagttaatacatattattttatatcgaactcattaataacttcagatatatatatttttttgaaaggggttttttaacaccacgtgagagagcccgggtaattgataagtttcattttcacttaattttaaaatatatataaaaaaattaaaaataaaaattttaaacacgatggaaacctcattccaacgttccaaacactgccgcatattgaatcctcctccaccagtaatattttattactggatgataaattccttttaatatagctgatgaaaacaacaatatattttattattatatttctgaatattttataagtaacgagatatctgcatatggatggacccatagcttgtttcggaagccaatctcacaagaattaataaacaagtaacaagctatcgtggataaagcttggaaaaatatatagttatccatccttacacacgcacgcacgcacacatatacatatatatatatatatcaacatgtttaattatatctattttattcttaaatccttttataaaaatcttcaacaagacctgttatcatgtgttgtccaaattgacaaatcttcatctcacacacacactaaagttgtttgctcttctctaattaatacgacgttgaagtttagaagaaggaaaaaaaactttctcaaaactcttgatcatgtcaaaatattaactggaatcaaataaatgtgcaggga

SEQ ID NO: 54441 - DNA, 182 bp, Populus trichocarpa
  Intron number 1 from transcript POPTR_0014s17710.1 (locus POPTR_0014s17710) derived from phytozome v7.0 (chr-ID scaf fold_14; pos 13971650 to 13971831)
cttcctccaagccccatccccacctcctcgaccaggtagctgctacctcttttttcttctttatttgtgttttttttttccccggagaattgaagaaatgatttatttattttttcttcttttaaaaaattgaatttgatttctcaggttctagtagaagacaactccttctcaaaaacctt

SEQ ID NO: 54442 - DNA, 493 bp, Populus trichocarpa
  Intron number 1 from transcript POPTR_0019s14740.1 (locus POPTR_0019s14740) derived from phytozome v7.0 (chr-ID scaf fold_19; pos 15420988 to 15421480)
cggtagtactactctcatgatttcttttacctacaacaagttctccttggcttcctttgcatgtcctttatctttgacttgctcaaaagcttaaagcttatacaatatcatcattataaccatcttcttcttcttcttcttcttatcaatttctgttttttccttattgttatcatgatcatatggtagaaccgtgtgttacaattactttaagctttcctataatctaatatacatgcttctgcttttctatcctttgtataatcaaataagctttctaatatatatattctggtatatatatcacttacaaaacccaccttttttaacatccaaatctctacttgactttcattttttgaatcatgataattcaacaagcttcgttttaattttttttatggtacttttgattacaaatattgtatgattctatatcattaattatccatcttgttatatgagcagcacgacaaagcctctgtcatattag

SEQ ID NO: 54443 - DNA, 436 bp, Populus trichocarpa
  Intron number 1 from transcript POPTR_0006s08950.1 (locus POPTR_0006s08950) derived from phytozome v7.0 (chr-ID scaf fold_6; pos 6600366 to 6600801)
accgcctgctgatcaagcagtaccacccttgccaagtaagtataaagaaaataattttttgatgttttgttgtttgtaagaagtaccatcacgtgattctggcgatcacgatcgaaggcagagatccaaaaatgttattccatcgaggacttgaaggttcttaatttttatgatccgaccattcggatcctgattttaacaattatagtttccctcgaaaaacaaggggaaaggatgatatacctaagattctatcagtaattcaaaaccattatattcggagaatcttaaacattagtttcctagtagtaatatttttagtttgctaacaattatggcatattttaattttcttttcttttctttttttctcacacacgattatggcatctatgttttccacttatgaatgctttactttggacaagttttagga

SEQ ID NO: 54444 - DNA, 770 bp, Populus trichocarpa
  Intron number 2 from transcript POPTR_0018s00490.1 (locus POPTR_0018s00490) derived from phytozome v7.0 (chr-ID scaf fold_18; pos 439702 to 440471)
tattgcttgccttctggtaattctagatcttatataatatatcaactttgctcttcttacattgtgattaattttgtccattttccatctgttaattggttgatggtgttatgcgtatcatcaagttaagttagagaaaggaagaaaaatattgaatccctttttattctcactgagattgcttgctagaagggtttgatcctatgtacaatagtttaacaaccactgatcttacaccaaaaaaatgtccgatctattttattgattttgtttttcccttcaggattttaattcaatgatcgttaagaagattagggctcgaatgtacttgagtttttgaccacatgattgttttgatagtcgccatttaagagataattacttcataaagtttcaccgggagaaatctccattgatgggtttgctggttgtctttatggacgttttccttcaaggtggtgcatattaagagagagattacttggttgtaagggtcaaaaagattagagatttttttattccaataactacggttttgtaacaaaagttaagaaacaaaaaaggaatccgtgaatttacaattctcattgcatcaaaacgagattcaagttcaaaatattgttttaattccagaaatatggaattgtgagattgaaatgaagaccaactattcatctaaatcgaaaagagagtactaactccaagtctatataccaacctcacaatagcagcaatcaacctaattttattgtacagggcgtgattctact

SEQ ID NO: 54445 - DNA, 708 bp, Populus trichocarpa
  Intron number 1 from transcript POPTR_0006s05420.1 (locus POPTR_0006s05420) derived from phytozome v7.0 (chr-ID scaf fold_6; pos 3826551 to 3827258)
ctccgtgctttgcagtgaagttaacatatcctgaggttaggtctttttatgtataaatttgacatatttgttttgttttgtcattttaatttaaggttagccatgccaagacatggttgactgtgtctctgtaattgtgaactagttgtttattttatattttatttgtaccatatggttttgattccatctagaactgtccacgatttaaagtcatatacttaaacacatgctgattaatgtgtccctgatgatatctattccatcagtttgtgtgaatatgcattccctgtcttataagcatcgtttgtttttgtgtttgaaattgcatttgagtgcgtttcaaaatgggtgcgtttggcttgaaaaagaatcaaattgatgcttttttagtgttttctgatgattttgatgtgctaatgtcaaaaataaaaacaaaactgaaaaaaatcattttaatgcattttcaagctaaaagcacttttgaaaagtgccttgcactgcaataccaaacaaaaaatttactccattatgtaacagataggatttgtttgatttctgttctatttaagcttcctagaggcacacaaactcttctgatggagattttaattgttcttttaatcacttatcatctttggttactttgttcctttcttttccctgcatttattgatgttatgtacttgcagagagtgacaccctgga

SEQ ID NO: 54446 - DNA, 1037 bp, Populus trichocarpa
  Intron number 3 from transcript POPTR_0014s15110.1 (locus POPTR_0014s15110) derived from phytozome v7.0 (chr-ID scaf fold_14; pos 11220814 to 11221850 reverse strand)
tcaccattcctccattgtcacagagcccattacttgtaagtctccctccaaacaccccccggcccccatttatatatggtgttggaggtttacaagttatttaagaatttcaaagtgaataattaatatcttaagtacttctcaagaagaatgacacacatttgtatatggtgtgcatttgaattattaataatcttgtgtgatcgttgataaacttagtttaattgatcttcatagaaggttttacgcaggggcggacggaatgaaggggtggcaagcaggggcccgggcccctgcaaaacattttttttatttgataattaaatgtgatctggagttgtaatattttttaatgagatgggtccttctcaccgtaaatatatttgttattctttgctttacttttgaattcctttgactttgtgttgattttatggtatgtacatgcctacgtgaaaaagaaataaaatatgaagttatcagtatgatttgctacattttcactccctaccgctcagtcgatacaaattataaataaaatttttttatgaaaaaattgaaacagagtattgattaatcatttttcattaaaccaaataagataactggtatcaatattttaaattaaaaatatatttttattttgttttgagatgtttattaagaatttgatgaaatttattttataattttattatttttgtttttttttaaatctgctagttttaataattattttttaaattttttatagtaatttttttaattaattaaatatattttattagtttattttaattatacttagattttttttatattttatttttaacagagctatcaaaacatttacattcgagtatttttataataacggaagaaaaatgttgtgtgtgattgaggggcacgtataccattctccattaatattagcaatacatgatgatgatatacagtaagtgtaattatttgacattttctttctggaaatctgcatcgcagctgtgattcatccattcgccgagcacatatcctac

SEQ ID NO: 54447 - DNA, 684 bp, Populus trichocarpa
  Intron number 1 from transcript POPTR_0019s10440.1 (locus POPTR_0019s10440) derived from phytozome v7.0 (chr-ID scaf fold_19; pos 12020292 to 12020975)
gcctagaactatcaccagatagagaagaatcccaggtataatattccaatgttttgcctacctttttttcattttgctttgtttctatctatctgcaaacagttgtttttcatgtcccattagggttcttttaatgttaaacttaattattaattaaataaaagcctctgttaggatcagttttctttacttttgcagcaccatgttgttttctgtcgattctctttgcagacaaattgtgtatgttctcaagcaagatttaaagaaaactaaaatacttcaaaaaaaaaaagttaaagaagattaactttcttcatggaacacagcgcaatttgtgtaattttatgttgattatttaattgattttcagaatactatttgaatcctgaggaatttgtttttagtgacaagtagtttaatcaagagggtaatgagcacgaaacttactgcatcacgaccctgggcatttaccaatgaaaccataaatttaagctgattcaactagtgtacttgcaaacttcataccagaattgctgtaattattgaaaatgaagagttgagttactgattgagatgtagaactgcagataatattgaaagttagaagttgttctgttaatttgaccatcactgttcaatgtttttttttttaatctataatttatctttaaaatccaaagcagg

SEQ ID NO: 54448 - DNA, 679 bp, Populus trichocarpa
  Intron number 1 from transcript POPTR_0018s10310.1 (locus POPTR_0018s10310) derived from phytozome v7.0 (chr-ID scaf fold_18; pos 11245687 to 11246365 reverse strand)
tacgttatacaaatataacccagagactcttgcaggttgaacagaactctccctttttttttcccttttgtatttcttctttaatgatttcttccattctttactttatattatttagtgttgtttgtgagattatttgctctttccaaactgctttttgcagagtaattttaggataaaaacataattttgaagctctgtgtttaatgtctaacctgtacccttaggttacctgttaacagttggttatccgctctgtggttaatggattaaacacttgtttaataataaatctactttcgtaaacccttcttggaaagatcatgagtactcctgtttcttataatcgatatcatcattgaatgaacagcagtgtgattattccatggccttacaagtatctaaaaattcccttttttttacatgctactatacaagtcacctttgtccatgacttggatgcagcaattatctgaaaattttgaaattgggtggtggattatgaaattgaagatatctcacgctaattagtttcttttcctctaaaacttcatgaatattgataagaaaaatgatattcttgcaagctttttgataatgcgtgcgattgtactagttatatggtaattttaaggaaaagttttgtttgttgattttcaaatagaaaactacgaaccat

SEQ ID NO: 54449 - DNA, 520 bp, Populus trichocarpa
  Intron number 1 from transcript POPTR_0006s01830.1 (locus POPTR_0006s01830) derived from phytozome v7.0 (chr-ID scaf fold_6; pos 1106726 to 1107245)
ggcaagtggagataattccgaatctttattggctggtaatttttccatccttgtggaaaattaaaaatgataagttttttagatttgaactttcacagcaatttttttcatgattacctgtagcacagtataatagaacatcatcttacagaattgtttcatctaaagctttaattacttcatgagcagttcgtagaatagaaaatacaagttagagtcctattctgaacatgaaatctatgagtgtcttgtagttgttatctaatagggggtttaaaaactgtaattgcagagacttctagatagttaaggttgtactgattacagaataatatttcaaagacatcatgaaaattgatgcttctgttattactcaaattctttgttcttctaagcaccatcatgcatatgatctctatgcatccaaaggatgattgattttgttttcctcctcatcttgatgacctttttctttgttttcttctttactttttaatgtgcccaggccaaggaagtggtg

SEQ ID NO: 54450 - DNA, 628 bp, Populus trichocarpa
  Intron number 1 from transcript POPTR_0019s14090.1 (locus POPTR_0019s14090) derived from phytozome v7.0 (chr-ID scaf fold_19; pos 14849406 to 14850033 reverse strand)
tgatacgtgctcccttttaaaagggtaagtctaatttttcatgcatacatatatatatgtatgtacgtatgtctattatgaatgtatattgagaggaagggaattgatgcttgattattttcttcaagaaatactggatcttggaaggttttgttttctttttgttgtgtgatttattgatatgatggtagatggaatttggtagcttcagttttttgtataataaattcttgaccgaacagttcagatatctttttccaattcttgttgtgatgatgataagaattgaaggtatatttgactaaggttattaaatgggcttttcacactccaataattgaaaggacctgtgtgttgctttctttttgtttactttattagggagatagcatatttttaaagataagagaggaagaaagtataggggtcatggtcatggaaatattatgtgatccccaattggttttcaaatttatttttagaacttcttgatgatgtttgatttccatctggtttatttaggcaaggtttctgactttcacagatttagcatataccttgttgttcaatctcttgtagtgctaagttgtagtgtatatttgcaggagatatttgaaagcaatcaact

SEQ ID NO: 54451 - DNA, 449 bp, Populus trichocarpa
  Intron number 1 from transcript POPTR_0013s06990.1 (locus POPTR_0013s06990) derived from phytozome v7.0 (chr-ID scaf fold_13; pos 5679909 to 5680357 reverse strand)
gaaaaatcacaaaatcatctttcagaaattgggtggtaagcaacccaaaaccaactttattcttttttattaatttttggtcttaaagcccccatcttactatgtttacaagcaataaagaagaaaatcataaaaataatgtatttatttatttttggtgattaaaggatgcttgctttcaaatcaggatcaataatttgttgtgtagttgacatggagattcgatgattaattaattatcacatcatcaccaacacatcaagcccatatggtgtggatttgattcctaaattccatacacagtaccattttccctcatttaacccctctaatcaaggagtaaaatgggattaactttttcttgtatttaagggaaaacacatcaacaatttattcaaagacgcataatttccttctttgttatgtttatgttttcaattgctaggtgc

SEQ ID NO: 54452 - DNA, 825 bp, Populus trichocarpa
  Intron number 1 from transcript POPTR_0014s03710.1 (locus POPTR_0014s03710) derived from phytozome v7.0 (chr-ID scaf fold_14; pos 2958708 to 2959532)
cagcttatcttaggtagggcgtatttggggtgctaataccttccctttacgcaatcagtctccgtacccgatctctgagaccagttagggttcctagtgaccaaaatactaggtggcgactcctattcctttttctcaccgctaagagacaaagaattccttgtctcctcacatttaccagaattatatccacatacattaagggtggacgatcgccgcgacgtcgacacgtgcgacatacaacatcaacaaaatactagctttctctttcttttgtttttttggattatttaacaagtaaatgctcgcgtgcttatgaaattttttaaaatataactaaaagttccactgaaaatcccttctgttgctacccaatttttgacccgtgttttgataaatttttagaaaaaatacaaaaaaaacaaaaaacaacgaaaattcagaaaatatgttttttttaatatatttgtattatttttagtatttttagcatcgtctcaaaagaatttaaattttcaaaggtttttagaacacgttcgacttttaacgcgttatttttaaaatcactgatttttcttattcgagtcgatgttgaaaagaaaaatacaaaaaaataagaaagatcaaaatttacaaaaaaaaaagttgagggaccaagtttggggacctgacaatatttttgcctataaatagaagtttcaaaacaaagataaagagggggacaattttgagagactaaaaaaaaatacaaaaaaaaaaaccctaaacctaaacctatctctaccccaagccgccgccccccaacactggacaaaacccttactc

SEQ ID NO: 54453 - DNA, 443 bp, Populus trichocarpa
  Intron number 2 from transcript POPTR_0003s14800.1 (locus POPTR_0003s14800) derived from phytozome v7.0 (chr-ID scaf fold_3; pos 14776534 to 14776976 reverse strand)
ctgcagaacgaaggaaaattttcctggtcaatgcaaatttaagagctcttcttgaatttttttgacacccttttgtccgattagtctatcttgttaaaatccgccccttctcttttagttggttatttttatactgtttcattcacgtttagtcgagtgagtaaatttagaaacttgctgcgattttcttgacacccttttagttgcttgagctaattctgttcaaattttccgtttctatcattggtgaatactttctttaaacaaattaaggtttattaatcttgcacatgttaattattgtttcattcacgaattatttgaaaaatagtagtgatggtattggatcgaggaaaaaggtgtgattttttgatgtttgttaatctatttgcagaaactttataaaagtactttgattctagcgtaccagagttttggtgtgg

SEQ ID NO: 54454 - DNA, 333 bp, Populus trichocarpa
  Intron number 2 from transcript POPTR_0003s01160.1 (locus POPTR_0003s01160) derived from phytozome v7.0 (chr-ID scaf fold_3; pos 1020385 to 1020717)
aggtataatattgctttacacatttgttccgtgtttttctttataatgttgatatcatattcgcatatgattaatgagttatgtagatctccgatttctttgtttaaaatcgtaatcccttcttcactgtgccttggcgttcgtttctgttgttttgaatttgaatattatcacggagctgtagaatttaaaacttgttattgtataattttttaagcagcgtatcctttgattaactgtcactggcggaagggtattggcgaatttgttgtgctaagctattcatctgtgtagctaattttttatttgtgtcatttaggttaagcttctgtg

SEQ ID NO: 54455 - DNA, 324 bp, Populus trichocarpa
  Intron number 3 from transcript POPTR_0014s03930.1 (locus POPTR_0014s03930) derived from phytozome v7.0 (chr-ID scaf fold_14; pos 3135282 to 3135605)
gaaacattgtcattggtgagtaatattgcagtctgatgctatcagcagaactaaatggttctctcactacactcatgctgctattcctatactttttttattcatcttctggattcctttgccaataacttttatttgttatttgattttctgaattggtttatttattttttcttcatccagtgtaattatatcaaccaattattttgtagtgtcatcattgccttttcagctctgttttatcatattgtttcattctctttacatcttatgatccaatacaccacagcttattaataagtttcttgaattaatggatagata

SEQ ID NO: 54456 - DNA, 406 bp, Populus trichocarpa
  Intron number 3 from transcript POPTR_0003s04670.2 (locus POPTR_0003s04670) derived from phytozome v7.0 (chr-ID scaf fold_3; pos 5609481 to 5609886)
ttagctaacttcatcgctactcccatagagctaaggtatttctgctttcttcctggaatggatcatggtatcgtatccatcttcatcgttgacattgcgtgatttttttttaaagaaaaaaattatacctggcattgatccattttctaccacattttctgattaattatctatttatactgcggcagttagtcaaagatttaaggaaatatttggtgatttggtctctgaatgctcaaaggagctttgatgtgcatttggacttgataataacattttcaatttcttgtcgcatgcattgcagcgccttaagtatgtactagattcgtttttcttttctgaattctgattttatgtttttccttttcaagtttggtggtgcccttcttgcgctttggcgaagtta

SEQ ID NO: 54457 - DNA, 400 bp, Populus trichocarpa
  Intron number 1 from transcript POPTR_0014s06550.1 (locus POPTR_0014s06550) derived from phytozome v7.0 (chr-ID scaf fold_14; pos 4974847 to 4975246 reverse strand)
ggagagtatcttcttaaagtctcgaagttgctgttgtaggtcatgatgatcttttaacattttttttttttgcattgacattttttttaaagttgtagagttcaacagttcatttgctcttatgtgaaagtttgtggttttgatctttgaagattaaagcaaaatgttgaggttctgttagatattcactgtttttttttttaaaaaaattatcttctgtttttttttccttctttagattttgatcttgggtttttttaggtttggtaatttggagttaaaatgctaattttgctgagattttttttgtagtaatttattttctgttaacattttattttcatcctaatttttctgtgttgcagaatctggaaaatagtattgttaggtgtagtgattt

SEQ ID NO: 54458 - DNA, 798 bp, Populus trichocarpa
  Intron number 2 from transcript POPTR_0191s00230.1 (locus POPTR_0191s00230) derived from phytozome v7.0 (chr-ID scaf fold_191; pos 32494 to 33291 reverse strand)
agacgattgatgttctttacttggataatacgtattgtaatccgtcttatgattttccgactcgataagttgctactcagcaggtaggatttatatatttcttgttcacatagcaattttttctttgagtgttttttggtaggtgtagacgattaatgtgcattgcagagaatggataccggttaatagggataaagcatggataaagaactaaatattggtgctgaaaatgagaaaatataatgagcaattgattggtatttgtgtcttaggaatgatcatgaaagtaagtagatttattttgagtttataggcttggcggagattacagtgcttcaaaataggaaacaaatcagttatacaacttttcttactggtttaattacttggtaatgacaagttattgatatcagtgcttctcatccggagcatgacatcattattgggatttatactttggggaaagaagagcttctaattcacatttaacgtgtgcttaacataaaggtacggtcatcgttgattctgatcttctatatgcatggattatgaaggatgtgtttttgtaaagcacagaaccaagttcttagcttagttactatgcttgtttattgtttttattatgattctagggcacccatattttctcatcgttttacaagaaagtagttgttgaatgaaatttagtgagctacttgcaaattacatttgcgaactatttctggttcaggtttgtttttagctttaatttcctttccttctttgaagatttaggtgtggctagagcgtttacaaacc

SEQ ID NO: 54459 - DNA, 380 bp, Populus trichocarpa
  Intron number 2 from transcript POPTR_0003s08890.1 (locus POPTR_0003s08890) derived from phytozome v7.0 (chr-ID scaf fold_3; pos 10211313 to 10211692)
tcctcctcctcctcctcctcctccagcagccagtatgttagtttcttgcgcacttgttttagcttcaaaagtcaaaactattttggatttcctgtgcgtttcaattctcaaagaaaaagaagacgaggaattaaagggaatggccaagagcccttggaatcttgcatctactttttgatgctagtgtttcttttctttttctttgaataaaactatgcatcatgtgattcagcacgagtacagattttctgctattattaattacttgatactgcaaatgcaatctataatttaaattgctcgttatcaggtgctagctctgtaaatattttaatttgatgatgattttcaggtgcacagagccagcttgtgtgttctgg

SEQ ID NO: 54460 - DNA, 630 bp, Populus trichocarpa
  Intron number 2 from transcript POPTR_0014s18000.1 (locus POPTR_0014s18000) derived from phytozome v7.0 (chr-ID scaf fold_14; pos 14596345 to 14596974 reverse strand)
ctggcactctgtgcacctactcctcctgaggaaatgttaaatttgtaaatatggattacctgggaggatactatcattgcctttgtttataggatttctttattgcctagtaggtagttttgaagggaattgacaaagggggcatagtaagcagctagcggtgcacctcagatatcaaaagaaggatctcttggttggaactcaacagacatccaaggagagccaagcttggtacgaactttcaaagtattttttttttccttcattttgctgacacattttctagggaaaggaaatgattctgtttggattggcatgtctgagcaggcagtagagaagatgtgccacattcttttgatgatggtaaagatgaaagccttgataattcgatgggtggccatggaacatattctgatggattttctcatgaaaggaagacaccatatcaagggtcaagctcaaaattggaaatgatgcaggagcatatcatgtatcctgataacaaaagtccaaagctaaaggtaactgacccacgcatactatgaatgaagtggtttgtgcatgtgtttattaacctaacctttgaaatcatttgatgagctgtgaagggggcctttttcctcaattaac

SEQ ID NO: 54461 - DNA, 583 bp, Populus trichocarpa
  Intron number 1 from transcript POPTR_0006s06500.2 (locus POPTR_0006s06500) derived from phytozome v7.0 (chr-ID scaf fold_6; pos 4675957 to 4676539)
caggtgcgtctaattatattgtagtttttttcatctcttttgtgatttggagctcaaattgttaattctagttgtgtatcaaggtgttccatgcttatttgcttaagggcctcctctgtttttattgtatgatattgatttactatgctatttaagtgttgaaagttggcttctttttgttaaagttttgaaatttgagcttaagacaatctcatctgtctctcttgtatcctgtcgaaggtggtaaacttgacattaagagaacagatctcaagatggggttgtgttgattcttttacaaagatcaacttcttgatttgcaggaactgggaaatgcaagttctatttcagtttacaaggttatcatggtaatagaaaacttgaccgaaaaatatcatctttttcaagtcagaaaacagaattgattgctgatccaacttgcctactagtgctaaatttgagtttctctttctttgctcaagatgaactttgtgtttcaattggcaataaagtatgtaacttgtggatgaaagaggggtctcacttgattctgtcgatgcagctactgaaacaagatacctaa

SEQ ID NO: 54462 - DNA, 360 bp, Populus trichocarpa
  Intron number 1 from transcript POPTR_0018s13420.1 (locus POPTR_0018s13420) derived from phytozome v7.0 (chr-ID scaf fold_18; pos 13737863 to 13738222 reverse strand)
aaggagtttacaaaggtacgtgttgttcataactccatactcttccttacaaatatctttatataaaaaaactctaaccaataattgagttacatataattttgtttataattgtattaataggtgaaaataagaatataaaatcatccatcaagtttctcttaatagcttaatattctatgttgagatcttaattatttgatcatctaacaatttaattttttaaaataagatgatttccccccctcacagtatagtctctttgattaaatattgatgggctttcattgattgatgtgtaatggtgagcaaaatattgtttgactttttttttcttaatttctcctgtcaatagagcaa

SEQ ID NO: 54463 - DNA, 995 bp, Populus trichocarpa
  Intron number 2 from transcript POPTR_0003s11920.1 (locus POPTR_0003s11920) derived from phytozome v7.0 (chr-ID scaf fold_3; pos 12643627 to 12644621 reverse strand)
agacttgtcctttattacttcgagttttcactaaggtacttgcaatttttttttaatagagatttcgacttcgatttttagtgttctataatgctaagaaaggtgttttttttttcttttcatttttctctgctcaaagtaatttaaagctacaactgcatgcataatgtgttttctgaaatgggtaaataacgaaagtgcttttgtttttttaaattctagggtttagttgtttagcatctggttatgccttattttgaaattaaggcatttgatttagggtttagttgagaattggagtgatgcagtctgtgtaggtactagggtagagaagctgtggattctagtgaaattccaggaattgatttaaatgtagtgaaaattcccttaggaaagctaccaaactcattggaattggttcgtgagatgtatttcatgaattttaaaagaatttggatattagatattggtgatggtaactttcccttccaaaagaaggctctaaaagaactggaggcaggtagccagttcaaagaacattatttctttgaaccaacaatgtatatagctttgggtgattatattatagtgcaaaggaatttgctttgctattacctttagcgtgaagtaaggtttagttaaggggttttccctcgttttctttttcttccccttctcctttatcaagctcttcaaggatcattctgccattcaatttagagttagcgtgagcaatctcacctttggattcataagaaatagcttggaatcggatcagagatcagtaataacacagccaattttttgaattgtgatttattaatgaatagataccacgaacttcttgttgaaataatcaaatattatctgacctcgtgaataagcatcaagcttgaatggaatcacttactaaattgatgaattcactttgtatctgattttcattctaattttctgcagattggaagtcatcataagccagaagattttgctgt

SEQ ID NO: 54464 - DNA, 798 bp, Populus trichocarpa
  Intron number 1 from transcript POPTR_0018s08410.1 (locus POPTR_0018s08410) derived from phytozome v7.0 (chr-ID scaf fold_18; pos 9355442 to 9356239 reverse strand)
gagggattagaggaggttttgcctatcaggtaaataattttataaacaaatctttaacgggctccttctagttttttctttgtcgtttgggataaatcagtgttctattttgttcaacttaattaattatttgtatttattactgaatttgatgggaacctgatattgctttagttaattaagtgttgctttcatccaagggggtctttagaagcggaaatttgagtggatttgattttttttttgggctctagtcatgggcatgagcttttgattaactgggggatatgggcatctagttatttccttatggatttgatttggccgaggaagctagcaaatctcaatctctgctaccgtcagtcttcatctggatcataaataagacccattaagatacgagcagggcaagtgtgtttttcttattcctgtttttttttcccctttttattggtggtctcagtggaagtagtggagatgatttttccaccccttctctggctaggctctgccttgttatattctttcaagttttgacttataaattgcttgcaagttatgattagaggaactgatttattcagagtggcatcttatgatttgagaatatagcacagacaataatggggtatttcataaactgattggcacctgcctgctctttttctttttttctcgaagagcttttcttgttttgggatgttttttagctaattgaactctggaaaacttgtgttgtttgcttcattttttactgatgatggagaaatgtttgcaggagaggtatatcaaagtttt

SEQ ID NO: 54465 - DNA, 620 bp, Populus trichocarpa
  Intron number 2 from transcript POPTR_0018s06570.1 (locus POPTR_0018s06570) derived from phytozome v7.0 (chr-ID scaf fold_18; pos 6604959 to 6605578)
gctcaaggtaaatatcaatctcctattgatttgtcatatcaatttttttggtaggtatcttctacaaaatgaagggagctcctttgaatatgtaaatggaagtgttttcacaattttttttctacaattcattattcattcacttggctgcatgagattctttgaaatttaatctagtgcagtggctgcatagacgactaaggtggaggcgacagtctgcactagatacacacatccttgattttattttcataaaaaaaaaaaaaattgtgagggacaatccttgcatattctgtggcatatttctgtgtattaggttgtccctacttcaacttcgttttttgcttttgcaatgtattctcttgcaataaccaaatcacctctcatattctatttgagcttttaaatggctttaggattagtgctattctcaccattacaaagattggttgcttgtccaaaaaggagggagggagagagggagggagggggtgtatcaaactggctcaatttcatccggtgggagtttgttctttatttatttattttaaaaaaaattatgtattgtttgatcttgtttggcagctggtcacagctcttggagactcttcctcttccaa

SEQ ID NO: 54466 - DNA, 1014 bp, Populus trichocarpa
  Intron number 1 from transcript POPTR_0006s13900.1 (locus POPTR_0006s13900) derived from phytozome v7.0 (chr-ID scaf fold_6; pos 11087966 to 11088979)
ttccacttccttctctgttgcctttgttgcgtttggttagttagttctcttccttcttctggtctcactgtgttcccaagtttttttttttttcctttcctttctatcgataccatcttatagtttttattacaagaaaacattgaattacagtttggtcttttcttcagcaaaaatgtttattagaagaacttgtgcagatcatgagtctgtataatgctgaaccagtactgttcatcatgatccgatgaaaatgcagaataatgttgtaagaactaaaagctgttgtaccatgacctccaaaaatgaaaagaaacctaaaattttgtcatggtgctgacaaaactctgctgtgttttcaacgttcaatgtcaagaattcaagtttaaattcccttgttatgtctgaactatttatttatctatatttgactgaatcaagctttaaatattccacaaggagaattttctctcttctctctttacttttgatgattgatgtgttttgcttcttgccgaataattttctctgatttcttcttgttgcatgagagctttctgctttcatcagcaaggtttttaggaataaccccttattggtattttgcacttccaacgttattcctgctagctacaaataatatgttctgctttcttttattccttttgttatggaaacctattgaattccttagtcactggttgatttttattttttatgttaattgttttctagcattatttaagatatgtaatcgtagttcaaccattcactcttcacccaagtattaattttttttttgaagtatggtgggtgaggtgagaggtaggtttggaaatttctagtcttctagaataatgtggtttttcctctgttgttcttgactttattcatgttgattaccagctattataatccttacaaatagttgagagttcttgctggttttttattcttgtatctgttattactacctagtacttaaaacttgatttctgtttttcttaaggagct

SEQ ID NO: 54467 - DNA, 577 bp, Populus trichocarpa
  Intron number 2 from transcript POPTR_0006s04180.1 (locus POPTR_0006s04180) derived from phytozome v7.0 (chr-ID scaf fold_6; pos 2834406 to 2834982 reverse strand)
aaaaagaagggagaaagaggctttatcgaggggtaagtcatgcaagctgattatggaagtgttcataaacttctctgtataagcaatcttgcaaacaattagataactaatggtttataaccatcccttaaacaagagtaaattgctgtttagttcctaggttttcaacgagatgatcgcccgtcatgtttgaaaaccaataacatagtcccttgactttccttgactattgtcttgttaaagatcttttggtttgttcttaatctcaaatgtaccatttaaagatattcctagataaaaatctaaacagtgagagtttagagaaaaaccaacctgacttttcaaaaaggtgagtggatgaaagtcaaggaaccaggttataggttttcaaatataaaggactaagaactgtgttcaaaactcaggaactaagaatcagttgctcactgaagaaagcactaacaactcagtcagtcctcctaactttaagtccatcactaacaacttctactatttctaatcctattgctaatccattttttttggggggttcttatttgtgcagcctcttcgctct

SEQ ID NO: 54468 - DNA, 346 bp, Populus trichocarpa
  Intron number 1 from transcript POPTR_0003s01720.1 (locus POPTR_0003s01720) derived from phytozome v7.0 (chr-ID scaf fold_3; pos 1572023 to 1572368 reverse strand)
ggaacttggtacgttccacgttagctaactctcattcattcctcttctttcacatcttccagcaatcaaattaatctctagatgtcgatcatcatgaatcatgacatattattgactatgaatcgataccattcaagttcttctgtaactggttctcaacttaaaaaatattaatctgatgtttttttatatgtttttcaaagggttttaacatctctgcaacaaagttatcaaaaatcattattatagattgtcttaaacacgatccaactgtaaaaactatgtaatttcgtgctctaagcttgtcttgattgcataaaggtaaggcattgtcggagggtaaaca

SEQ ID NO: 54469 - DNA, 819 bp, Populus trichocarpa
  Intron number 1 from transcript POPTR_0019s11870.1 (locus POPTR_0019s11870) derived from phytozome v7.0 (chr-ID scaf fold_19; pos 13097355 to 13098173)
acacacttaggagcctagtacctggtactaggaaggtatttgctgtttttggtttggtcatgttagagtttgagttcaattgaatcatagtacttaaaatctactctcttttttttctttacttttcttttttaatgagttctgtttcttaaagcttgagaacaatattcagtgagccatcaggtaatgcacttgaaagtagtattgtttattgtgataacacgagttgcttgattttattgtttgcaaggtctgtactattaacttttgaatttatgaatttcaagagtataattacagctcttgttgatgtcagggaatttttttaagtgggagtgtgcatttctcttgtgtttctggttgatgtctttgctgtatgagcatgaatcactaaagataatgataatatcttgaaactatggatttagcttctgtaagaatcggataatttattttagtttactgtgctgcttttgttggtgaatgttcttgagttatttaaaataagaatgagtggttaagctaagcttactataattcccttggttatgtgtttgttcttagcatctctattacccaagacctatatattccctgttataattttctggtaattgttttcattacttttcttgattgaaattgatcataaatcaagtgcatgcaattttatatacggaccacttgataaataaactgtgatatttaggttgagttatttggtattgtgagagctggattgttgtgatcctgtcaagattctagcttatgggcttgttgaactggcttgctgaattagtaatcaatttgaactctcag

SEQ ID NO: 54470 - DNA, 715 bp, Populus trichocarpa
  Intron number 1 from transcript POPTR_0003s13490.2 (locus POPTR_0003s13490) derived from phytozome v7.0 (chr-ID scaf fold_3; pos 13867090 to 13867804)
caatcccacaagtaagaaccatttctcatgtgttctgctagcaatgtttttctttctatctttttttcttatttattttgccttatctctgtttgatgaaatgtctacaagaagcacacacgctttgatatcgttgttaaacatgagtctagttttgaagatttttccaatcggattttattgaaacatagataatttaatttcaagccaccagtcagtgtgtgagagacactgaaatttgccttctgattatgttcagacgagggagggaacctttccatattagcttctttgaatggaagttttgtgaagcaacagaaaaacttgttgagggattgtatggttactgaagattttcacctttacatgtatttcaaagatataaggagatagaagtttttcaattgttgacttcttgttttcttgggaaggaattataattttgccgccactgctttagacaaagtggatgaggaatgcttctctgatggtgaattattgtactttgcacctgtttaacatttaaagtttaaagacactgctacgcatgttcccctgtatcttatatatatataatgcttagaggtttaggttttggcatatgggaaatgttttgtcaaaaggttcttaggccccttttctattttggttttttcatctgggttgctatcagctctatttggtgcaagcttctaaacctgtttttacagcaatc

SEQ ID NO: 54471 - DNA, 453 bp, Populus trichocarpa
  Intron number 2 from transcript POPTR_0018s05190.1 (locus POPTR_0018s05190) derived from phytozome v7.0 (chr-ID scaf fold_18; pos 4684617 to 4685069)
ggatcatttccaatcacaagctcaagccttttcgggtaatttctcgtaattctagattctaacactcggattgggttttctttttcctgttcaagcaaggcagaattttgggtcttgggctttgtttatttatgtcaataatgttatgcagtgttaatttcttgtgttgtatcctaaattgaacccaatcctctgttttagcactccaaaattgtgaaatgatgctacctaaaacctccactattttcttttcaatcaaagatgatgccttttgttttagtgctatttgttgtgttgtagatctataattgagtggagttttctgtttcatgacttcaaaatcacgaggagttgtaaccttcacattgattgttgccaatttaactcaaagctaacttatttttattttgattttataacgcagacgttttatttgaagcaatctctaaatca

SEQ ID NO: 54472 - DNA, 663 bp, Populus trichocarpa
  Intron number 1 from transcript POPTR_0019s08290.1 (locus POPTR_0019s08290) derived from phytozome v7.0 (chr-ID scaf fold_19; pos 9775240 to 9775902 reverse strand)
agtttcagagatcatttttgaagagagatttgaaggtagcttcttcttaatttcttgccaccttttttcactactctgttttgctatgtcaccagctagcatccaatcctaatgctagctacttctagttaaccgttaaaatcgtcattcactgttttgtcttttctttgggggtctagcatgctgtcattgtgaaataattttaggatttgaagtgggatttggataataatgataccctttttctttcattctttctactgtaaattcaagttttgatttcctttgttggtgtaaagtggtgttattttaatttttttgaagtaaaatgttctttttctttcttgttttctatttggtagctgagaattgttcatggaaaagaaaagaaaagaaaatctgacatttgagggtgttgtttgttttgcaatcagtgaatacttttctgggcaaaaattaaaaataaaaatgaagtcaacaggctttctgggttgactttaactaaagtgattgtacactgcagagctttaaagaacctcccctacttaattaaaagacttatttaagtgtgagaataattcggtgattgttcgtagtttaagatgaccttgttatgcaaagagttggttagtattaatcagtgtaattttgtgttggaaaaag
